United States Patent Application Publication US 2008/0168583 A1 - sequence listing, part 6

SEQ ID NO: 34320 - DNA, 351 bp, Gossypium hirsutum
  Clone ID: LIB3149-034-Q1-K1-F3
gttcaagttaataaatgttaagctggtaataggtttttgtaaatgtaaccccgaaatagctcttatttcttccttatgctagtgaaatttctagtttattttctagagtgtgtgtttttaattttagtagttgcttcattaacagggttatgatatcagtttccttatcacgaactaccactgtgaagagctgcagaaacagaagctcattgattttattgtgcaattcatggaggtaagaacattcttaaccgtatctgtttatctttgtcttctaattatatatagtggatccctatttaatcttaagtaatcaactataaaaaatattgataaacccatgatttcttt

SEQ ID NO: 34321 - DNA, 156 bp, Gossypium hirsutum
  Clone ID: LIB3149-034-Q1-K1-F4
ctccattttattttcccattgaggccgaacctaaacctgtgctcgagagatagctgtccatacactgataagggatgtatggattatcgagaagagaggagccgtggtggtcccccccggaccgcccagatcccacgagtgaatagaaagtcgcga

SEQ ID NO: 34322 - DNA, 397 bp, Gossypium hirsutum
  Clone ID: LIB3149-034-Q1-K1-F5
ctcaattatgtcttccaagcaaggtggcaaagcaaagcctttgaagcaacccaaagctgagaagaaagaatacgacgagcatgatttggctaacattcagaaaaaagaaagaagaagagaaggcccttagagagctgagagcaaaggcatcacaaaagggatcatttggtggttctggtcttaagaagagtggcaagaaatgagtttcttaaaaacccgagctaaaccgaacttatcgagtcctgtcttgggattaaaacatctattatgctgatgtctcttgtttctattgtgatagttgggatgatttgatgctctagtttcattctgaatttgctattaaaaacattgtgtgtaatttcgtgacgtataacttaataaattcaagttctacgtt

SEQ ID NO: 34323 - DNA, 375 bp, Gossypium hirsutum
  Clone ID: LIB3149-034-Q1-K1-F6
aggagatatggccaatattgggaaagaaatttggagttagagtgcctaaagagacgtgtatggaggaattttggtatacgagggccatgggagacaagaaaaggttatgggaagaaatagtggagaaggaaaggttggtggagacgaagatggaagagttggcaaattggcaattcatggacatcttgcttaggttccgagccaaactgttggggtccagagctaaagttgatgggctaggttttacaatgagatgcaacacatttgattcaatcttgtattggattgatgtcatgagacatgaaaacttcattccctaggcattttctttacaaaaaattaattaaaggaaaaatatgatttatggaaagcaaa

SEQ ID NO: 34324 - DNA, 413 bp, Gossypium hirsutum
  Clone ID: LIB3149-034-Q1-K1-F7
cttttatcgattagtgtcgcaaaaatttgaagacccggcagaaggagaagaagctctcgtggcaaaattcaaaaagctcaacgaggatctgactgctggtttccgtgcactggaggatgagactagatgaacggaagtttaaagatttgactttcctggccccaatgtttaaattgtccggctaaaatcactaggctctcgctttctttgtttccgtgtccttgtttatctgggtagatgcatgttgtgcacgcgttttagcttctgttggcctgaattctagagtgctctagctttgaattcgttattatgtattattattgtttgcacttttcctttttgacagcaggagattggaaccgtaatttattatttcatgtactttttgcaataaaaattgtcatttattattt

SEQ ID NO: 34325 - DNA, 347 bp, Gossypium hirsutum
  Clone ID: LIB3149-034-Q1-K1-F9
cttgaactctcctgatcgtgcttgcactctcgcaaaacaggcttttgatgaagccattgccgagcttgatacacttggagaggattcatacaaggacagcactttgataatgcaacttcttcgtgataacctcactttgtggacctcagacatgcaggatgatgggacagatgaaatcaaagaagctcccaaacaagaggatgagaaacaaccgtgaagtctctaatcttcatggtagtgttttacttctctggttgtttttgtatggagaagtcgcttggtcctactatcgtcttcaattacttgtttttagtagatcaggcctcaatttatgaaccttggaagta

SEQ ID NO: 34326 - DNA, 293 bp, Gossypium hirsutum
  Clone ID: LIB3149-034-Q1-K1-G10
aaaaagaaaacgaacaaaaaaaaagaaaaaaaaacaaaagaaaaagaccaaaaaaaaagaaaaagaaaaaaaagagaagaaaacaaaaaggaaaaaaaaagaaaaagaaaaaaaagaagaaaaaaaaaaagaaagaaaaaagaaagaaaaaaaaaaagaaaggaaaaagaaaaggagaaaaaagaagcgaaaaaaaaaacaagaaaaccaaagagaccaggaggagaaaagaaaacaagaaaaagagaaagaagaaacaaagaaaaaagaaaagaaaaaaaagaaaagcaaag

SEQ ID NO: 34327 - DNA, 427 bp, Gossypium hirsutum
  unsure (1)..(427): unsure at all n locations; Clone ID: LIB3149-034-Q1-K1-G11
atcataatggcactagccaaggaccctatttgctcacttcaaacctcagctttcaataatggaaactttgatgaaggtggtgatgatcacttgaaaaagcttggcggtggtgtcaacaactttccgatgactagctcttcctcattttcctctccgcgtagtattgattccgacagtttcgtattccggccaccgcatgaggaagttcattcattgataaacttcaaaggcagttcaatgtacgacaacttcattcatcaatatcatcatgggactaattatggatctcttcttagctttgaacaaaacgagaaggctccacgaagcggtacttacttaaaaagagcaagtcacaaagataattattctatgntggatcctcgcttggtggaagattttagttgctttgaaacagctagcaatttta

SEQ ID NO: 34328 - DNA, 369 bp, Gossypium hirsutum
  unsure (1)..(369): unsure at all n locations; Clone ID: LIB3149-034-Q1-K1-G12
cccacgcgtccgcccacgcgtccgctttcggcaatatattctttgtttcttgttaaggaccttagtgcttggaaactaagacctaatatagggcttgtcgctattctatactcggtaagcacactatagttacaatggatcatttaaaagaattgaagtcgcacacaaatgacaacatggtgctattgattcaggcaatagtggcaacaaccttccggatcagcttgtgttcatggtgcctatggaaagtaggacctctatacgtttccatgttcaaacccttggccattatctttgcagncgntatgggtatcgtcttcttaggagatgatctttctcttggaaagtatttgagcttttaagcataac

SEQ ID NO: 34329 - DNA, 431 bp, Gossypium hirsutum
  Clone ID: LIB3149-034-Q1-K1-G2
gttcgatcatcagcagagggtactgttgaagagaaccgacacggaggaggcggcgacacccagagtgtggaaagtgaagctagtgataagtccggacaagttggcggagatcatggcgcaggaggctcgaacggaggcgttgatagagagtgtgagggcggtggctaagtgtggggatggggtgtcatcgtcgtcggtggctaagtctgatcagtggtgtgtgtcttgtggtgggaaaggatcgttgagaaatcatgctcaagatagatcgtgacctcgttattactgtacaaattaaagggataatatttttatgtttaattaaatttggggtatttattttatgtgtaattatgtaattttcaaaaattatataaggggattaattgtcaagttagcccttggaagttaatcaaatttgcaatatttta

SEQ ID NO: 34330 - DNA, 353 bp, Gossypium hirsutum
  Clone ID: LIB3149-034-Q1-K1-G3
gtgggacatgattaggggaaaaggaacaggttactctatgaaaggtcacatcaacgttgacactccgtttggagctatgaaattacccatcagcaaggagggtggcacaacccgccttaagaagaatagggaagacggtggtgatgatgatgatgatgatgaggtatgttaattactcctgacttgtcctttttgaagtttgaaacttgctatacgaatagaatcctatgttttcttatttcattcttgttttgggttaggatgttactcttatgttcgatttgattcttcttttaaatacaagaggatggtctttaaaaaaaaaaaatatatttaatatatttattattatt

SEQ ID NO: 34331 - DNA, 365 bp, Gossypium hirsutum
  unsure (1)..(365): unsure at all n locations; Clone ID: LIB3149-034-Q1-K1-G4
gcaaccactactcgtagaagatcggaggtctcgagctcaacattcaatttcactcaatttcagtggcatcttagtcaaattgatacaaatgcttgccaagaggatctttggtttgattcagttagtattcttgaatccgattcggacgatgatttcctcagcattcatggagatggttttccatcagtgagcaatgcaattgggaatatatcaagtgggcagctgcttcagtatgaaagttcgacgtgcttcatggacggcaagtgcaaaaacgaagaataccatgaaggttatttaaagacagatggaggtaaaatgagcanagatgaacctaaaggaacaagatcgatgtctcacattagtag

SEQ ID NO: 34332 - DNA, 396 bp, Gossypium hirsutum
  Clone ID: LIB3149-034-Q1-K1-G5
acaaaattcagattatgttgttgaatcgggtgcaacaagaaattttgaaccttggcgtgctgaagatgaggaagcggagaaagagaaacagaaaagggaatctgaagaaatgggggatgcgatgaaatctttggagaacagaacgttggattcaaaaagagagatggatatccttgctgcgcttgatgaaatgaagtctatgaagtccagacatgccacggtgagcgtagattcaatgctggaggccttgcaacgcactgccgcagaaaaggaaaagaaaatagaagaagaagacgaagccctcattaaatcgattttccagaagccaaaggaatttgttcgaaggattttcagaatgaatgttttcgaacgatgattgagggatctggacccggt

SEQ ID NO: 34333 - DNA, 433 bp, Gossypium hirsutum
  Clone ID: LIB3149-034-Q1-K1-G6
agcaatattgacctgactccaattgaatttccgagtttgcagcaggctatacaaaataaacttccagacaaaagtgatcatagcaactcagaacctgaagcatcaagcgtagaatcaactgttactgttggcaattgtgagaatagtcagaagtctcatgtggatgaaccttgtccaatgatttcctttgaagaatcagaaaccgctccggttcatataaatgttaccagacagccatctcctcctcctgtacttgcagaagtacaggatttggttcatacaatatctcctcaggtgaaggagacagattgtagaatagataacccctcaacggaagctcttgttccttctgaatctcctctacagttgcacatttcaacaacaatgatggaaagcttcatgaagctggctaaatcaaatacaaatagggaat

SEQ ID NO: 34334 - DNA, 346 bp, Gossypium hirsutum
  Clone ID: LIB3149-034-Q1-K1-G7
ggggttcatgtaacatcaacacctttagatctctcttactctcagctcactgttgccaccggaacgatgcggaaattttaccaatcaagaaagagccaaagggcattaactgtagtgatgttaggtagtcaaattccattgtatggaggaggggctagcttgggtagcctgaacggtgaaccgactcagccggtgccattgacactaaacttcattgttcgttccagggcttatgttttaggtaagttggtgaagcccaagttctacaagaagattgaatgttcagtcaccatgaacccaatgaagatgagttgggctatttcactgaaaaacaagtgcatttaca

SEQ ID NO: 34335 - DNA, 318 bp, Gossypium hirsutum
  Clone ID: LIB3149-034-Q1-K1-G8
accacgttattcccaaatactactccttgaacgatctccaatttgttagcaaccccgttagaacccaagctggtgaggatttcggcctcaacgtaactggcctgaacaaccaggttaacgtctcaagcggggttgtcgagactcagattaacaacgcattatatcaaaagaaacctctggcaatttatcaagcggacaaggtgttgttgcctgaggagttttttgaagctaaatccccagcggctgcaccttcaccggcgacaaagaaatcatcaacagggtctaaatcgaactcaagagcatcagcaaccgcagatg

SEQ ID NO: 34336 - DNA, 227 bp, Gossypium hirsutum
  Clone ID: LIB3149-034-Q1-K1-G9
ctcacaaggtttttagtttatttgaaagagacttttgattgatgtgaccttatttgcttggatcaatctcaagcttggatgaatgttgtagggtttctatagttggtgtttttcccataatggaagtaaaattctaatctgttgggtggctttatagtttcattcctttttgtaacctaaagattatgttgcgatattttgattttatgcattatttggcattaagg

SEQ ID NO: 34337 - DNA, 397 bp, Gossypium hirsutum
  Clone ID: LIB3149-034-Q1-K1-H1
acaatgtctatgtaaagaatctctcggaatcaactaccgatgaagacttgaataaaacttttggtgaatttggtctgatcactagtgctgtggtaatgagggatgtagatgggaaatccaagggctttgggtttatcaacttcgagaatgcagatgatgctgctagagccgttgagtccctcaatggaaagaaatttgatggtaaggagtggtttgtcgggaaagctcaaaaaaaatctgaaagggaggctgaactgaaacatcgatttgagcagacaatgaaagaggcagcggataaatttcaaggagcgaacttgtatgtcaagaatttggatgatagcataagtgacgaaaagcttaaagagctattctctcaatatggtaccataacatcatg

SEQ ID NO: 34338 - DNA, 284 bp, Gossypium hirsutum
  Clone ID: LIB3149-034-Q1-K1-H11
gaaataggtaatgacaactgaacaagctttacttgaaactaggccctcaaagggagtgaaatttagtttcaagggccttttcattaggaaggagatgtcaaacctctgcactgccatctaaggatgcaatgaagaactcatagtcatatttccttctagtttgcaacttttcatgttggagtgaaacaatgaactttgagaaagccagtgatttgatttttgttccaaaaaaaaaaaaaaaaaaaaaaaaaaaaaaaaaaagatattataataaaaaataaaaa

SEQ ID NO: 34339 - DNA, 392 bp, Gossypium hirsutum
  Clone ID: LIB3149-034-Q1-K1-H12
gagttctggaaattatgcaaagcagaagagtccagttgcaaatgatcattttattgggcagtcaggtggatcatcttcaagacaagctggtgtttctagcagtcgtgatgcatttgctggtagcgatgttgacccacaacgttctcgtacagcctacgctagccccggagcactgcaaaagaattcaagtcgacaaagaagtcccattgattctgccgaccctaagcggtcaatgtctgcaagaaacaccagtcatgtcaagaactatgaagcggccctcaaaggaatcgagggcctgcaatttgaaagcgacgagagaattcactattaaacgcttggatatacaaaattttgtgtaaaaccgtgaaaatggttgatgtactaatacattt

SEQ ID NO: 34340 - DNA, 310 bp, Gossypium hirsutum
  Clone ID: LIB3149-034-Q1-K1-H2
ctaatgcctcggatactgttttgggaatggagatagaatttaggctagtaagaaaggctttgtggttatgggacaaatttttgtaagacaaaaataagtacaagggatgttttgtacaggctctaatcccttttctaatagcaatgggaaattcatctaaatttttagtagtttcagtagtaggttcagcaattgcctcaggttgtataggaggagaagatgattgatcttgcaccggtgccttcttccttgagtaaaccagtaaaggacgagtagtgtcctgaatccctctttgtgatttgggtgtatt

SEQ ID NO: 34341 - DNA, 314 bp, Gossypium hirsutum
  Clone ID: LIB3149-034-Q1-K1-H4
cgaagcccgtgatcgacttgggcgatgatttcgagactgactttcaggagttcaaagatgaagaatctgatatagatgattatgatgttgatgatgttttggctgatgtaaagccctttgcttttaacgctacaaagaaacctgcttctgctgtatctcatggttcgaactctgaaaaatccatgcaattcaatggtcaagctgagaaatgtgcgaaaagaaagaggaagaaccagtatcgtggaatccggcagcgcccatggggtaaatgggctgctgagatccgtgacccaaggaaaggggttagggtctgg

SEQ ID NO: 34342 - DNA, 382 bp, Gossypium hirsutum
  Clone ID: LIB3149-034-Q1-K1-H6
gacccctcctgtgcaggtaaaattctgctacagcccttgcgttgagtcctaacctgttcaatcgtgagggcttcaaagcggattttgaaagaactcatggatttgcacaaagatccaaccacttatctcgtagctggtccaatatctaacgacatgtttcattggcaacgcaacaatcatgggaccctcagatagcccttatgctggcggtgtgcttttagttactatccatttgcctccagattatccttacaagcctcctaaggttgcattgatgaccaaggtcttccatcccaacatcaacagcaatggaagcatttgtcttgatattctcaaagaacaatggagcccctgcacttaaccattttccaaggttctgctc

SEQ ID NO: 34343 - DNA, 369 bp, Gossypium hirsutum
  Clone ID: LIB3149-034-Q1-K1-H9
gagaaattcgctactggtgtctccatggttacggcattgtctctcgccatctcgtacccaaccctggctgctgcaccacacatgttcatcaatggctacaagaatgtattggccgttgctgttgcaactgagtattccttcccccaggctgataaagtgaaggagtacttggcggatccaagtaagtttgctgttgtcgctgcccctgttgctggtggtggtggtggtgctgctcctgctgctgcccctggcgaggaggaaaaaaaacctgaaccttgaagaagagtctgatgacaatttgggattcagtctcttccgactaaggtttatttgttttaaaagccataaaaccttattgggatttaattt

SEQ ID NO: 34344 - DNA, 434 bp, Gossypium hirsutum
  Clone ID: LIB3149-035-Q1-K1-A10
gtctgtggattcctcctagaaaccctgtgattgtgtataggttgatcttgtggtggctaatagcaataccaacaattcgtgagtacaactcgtacctccaagaccggaaacctgtgaaaaaagttggagcattttgttggctttcccttgcaatttgcattgttgagcttctcattggcatcaagtttggacatggtttatatccaaaggcgatgccacaatggttggtaatattctggttgtccattggagtgacactggtttcattcattctgatttggtcatggaaactgcaacgcaattttggcaaaaagagaagatagttttgggaaatgcagtaatactattacactattctttggttgttatttactactatcggtattgtattgaggtttgtaaataccgtgtatcaatcacttgataaattgtat

SEQ ID NO: 34345 - DNA, 274 bp, Gossypium hirsutum
  Clone ID: LIB3149-035-Q1-K1-A11
aaagatctaagtgatacagtctttgttgttcttcatggatagttatttgatgggtacttttttttgaaggatttaaagctgttgttttcattttcatggcttagggtttttgttcttgtatttttgttgaaccattttcatctacttgataaatgttatttgagtttttaaggattgaaatgatttgaattggtaaaaatatatgttatataatatattatataatataaactataaaattttataaatattttaattatatttaaaataatag

SEQ ID NO: 34346 - DNA, 175 bp, Gossypium hirsutum
  Clone ID: LIB3149-035-Q1-K1-A2
gaacaatggagcccggcacaaaccatttccaaggttctgctctcaatctgctcgttgctgaccgagccaaaccctgatgacccttttgttccggagattgctcacatgtataagaccgaacgggccaagtatgaagccaccggctcgaactggacccagtagcatgccatgggat

SEQ ID NO: 34347 - DNA, 387 bp, Gossypium hirsutum
  Clone ID: LIB3149-035-Q1-K1-A3
tgcaattctattgaatacatgctttgcttgccctttggcttcaatacttcacactcctctagatgaacaatcggcaaggttctgtgctgcctctattgttactgccttagaagatctacatgagaatggcgtgctttacagaagtgtgtcttcagatgttttaatgttggacaaaacaggccatttacagctagttgacttcagatttggaaagaagttatctagtgagagaacatttacaatttgcggaatggcagactctttatcgccagaggtagttcatggaaagggccatggtcttcctgctgactggtgggccctgggagtcctgaactatttcttgttgcaaggtgaaaagccatttgtgtcatggagacaaagcgagct

SEQ ID NO: 34348 - DNA, 287 bp, Gossypium hirsutum
  Clone ID: LIB3149-035-Q1-K1-A6
gctgaataccaaaagctccttgcccaaaggttgaaggaacagcgtgagcgcaggagtgagagcttggccaagaagagatctaggctctctgctgcttctaagccatccattgcagcttaattgtaccacatacaaggattggtattttcttcggttttgaatgttgattctaaaatctcattataggttgaggtgattttgacttgacaatgcttttaagttttcatgacattatgttttggatgcttacctattcctctatttatttcatgaatttttttatattc

SEQ ID NO: 34349 - DNA, 177 bp, Gossypium hirsutum
  Clone ID: LIB3149-035-Q1-K1-B1
aaaaaaaaaatataatatatatttatttaaataatttttataaaaatataataaaaaattaaaaataaataaatataaattaatttaggggcggttgttttaaaggattaaagtttacttacgcgtgattgcgacgtatagcttttttataggttaacctaaattaaattaattggc

SEQ ID NO: 34350 - DNA, 412 bp, Gossypium hirsutum
  Clone ID: LIB3149-035-Q1-K1-B10
gaaaaagctgctgaaaatgtttacatcaagaaaactgagaaagagaaattggagaaacttgcacgcaagggaccgaaaccagaggagaaaccagctgttggttcagggggttctgtgactgatgctaagcctagtagctctacatcaacatcaagagcttcatcgaccgagaaagtatcgaccgataagtatcaaaactatgcagtttttactggtgttgtaacctttgcaagtgctttgggatggtatatgatatctgcagataagaagaaagaagcccaggactgaggttaacacgaaaccgatcggattttagaaccaaaacatggcacggatagttgaaaataaaccaaacttttttgagaccagttggttatgttccttccatggcataaatagtacaatttcatgc

SEQ ID NO: 34351 - DNA, 383 bp, Gossypium hirsutum
  Clone ID: LIB3149-035-Q1-K1-B11
atcgaaaatgccaaagcaaattcatgagatcaaggacttccttctcactgccagaaagaaaggtgcatgctctgtaaaaatcaagaagagcagagacgttgtaaagttcaaagttcgctgttcaaagtacttgtatacactttgtgtgtctgatgctgagaaggctgataagttgaagcagtctctccctccaggtttgagtgtccaggacctgtgaaaatagggccgctttgaattcatcatccaattactaggtgatgaaagctagattttgactttggttttatcatatttcatgcctttcaaactcaaaatttactgaaatggaggtcgagttactttttaatggttaatgaatgtgttttgcttttggttgtcctatt

SEQ ID NO: 34352 - DNA, 437 bp, Gossypium hirsutum
  Clone ID: LIB3149-035-Q1-K1-B12
gatggaagtggaatgaaagaaccagtacaaacgcaggcgatggatggtagagcaggactcggaagtcagacgaagaagttggaccctagccttgaggtgcaagccggggatagttacaaaactgtgattcataagaaagcacttgctaggtttcgtgaaatgtcttagcagcccctaggtagaaaagatgtggaaatcattattgtttctgtttatatatatgtatcatttagagaatgttggcgtggtttgaaacttccagtccacaccattttggaaagttaatatttatggccattttaatttcggtgtgaatcgagttttttggagcctgcctaggatatcttttacttcattattatttgagtggctaaatggcttgcaggtagtgtttactgattcaactagacgggctattgatgcataaatatttgata

SEQ ID NO: 34353 - DNA, 373 bp, Gossypium hirsutum
  Clone ID: LIB3149-035-Q1-K1-B2
aaaaaaagaacaaaaaaaggaaaaaaagaaaaaaaaaactaaaaaaaaacaaaaaaaaaaaaacaaccaaaaaaaaagaaaggaaaaaaaacaagacaaaaaaaaaaaaaaaaaaaaaaaacaaaaaaaaaaaaaaaaaaaaaaaaaaaaaaaaaaaaaaaaaaaaaaaaaaaaaaaaaagaaaaaccaaaaaaaaaaaaaaaaaaaaaaaaaaacaaagaaaaaaaaccaaaaaaaaaaaaaccaaaaaaaaaaaaaaaaaaaaaaaaaaaaaaaaaaaaaaaaacaaaaaaaacaaaaaaacaacaaaaaaaaaaaaaaaaagaaacaaaaaacaacaaaacacacgaaaaaaagccgaacaaaaaacaaa

SEQ ID NO: 34354 - DNA, 106 bp, Gossypium hirsutum
  unsure (1)..(106): unsure at all n locations; Clone ID: LIB3149-035-Q1-K1-B3
agaatatatagtatttgccttaatgcagtcttgttttgctgcattgctttttttaaagcaatttcattttatatacttcaataccaacatatgagatgttcactng

SEQ ID NO: 34355 - DNA, 434 bp, Gossypium hirsutum
  Clone ID: LIB3149-035-Q1-K1-B4
gcggcataagagttttaaggaaaatgcagatcttcgtgaaaaccctaactgggaagaccataaccctagaggttgaatccagcgacactatcgacaatgttaaggctaagatccaggacaaggaaggtatcccgccggaccagcagaggttgatcttcgccggaaagcagcttgaggatggtcgtacacttgccgactacaatatccagaaagaatcaacattgcatctggttctgaggcttcgtggtggcattatcgagccatctttgatggcattggctaggaaatacaaccaggacaagatgatctgccgcaagtgctatgctcgtctacacccccgtgctgtgaactgcaggaaaaagaagtgtgggcatagcaatcagctgaggccaaagaagaagatcaagtagattggatatcttgatggagtttta

SEQ ID NO: 34356 - DNA, 425 bp, Gossypium hirsutum
  Clone ID: LIB3149-035-Q1-K1-B5
gagagtctgaggctcccaattccataggggttcattctaaagatccatcaaatcctgaacacatggttaagatagctgtttccaataacaccagtggaagcttatttagtaaaactgcaacaagctctaggagtagtcatagcagtgcaacacaaaagtctcatgtaactgaggctggaaacttgatgatttctgttcaagtacttcggaaagggaccaacgattttgctgaagaaaacgagcttggccgtggtgggtttgggactgtttacaagggtgtactaggcgatggaacggaactagcagttaagaggatggaggcctgggtcataagcaataaagcgttggatgaatttcagtccgaaatcgcttgtctatctaaggtccggcatcggcatctggtttctcttttgggttatttcatt

SEQ ID NO: 34357 - DNA, 440 bp, Gossypium hirsutum
  Clone ID: LIB3149-035-Q1-K1-B6
gaaagaatcagcatccaaggaccttctcaatgtgagccatgatcaccatgtttacaaaaggcttttgaaagatctaattgttcagagtttagttagactgaaagagcctggagtcctactccgttgtcgcaaagaagatttgcatttggtggagtctgttctggattcagcaaaggaggaatatgcttctaaagtgaatgttcatccaccagagataatcattgatgatgtccatcttccccctggcccttctcatcatcatgttttttccatcatcatgctgaggctcacgggcctttctgctctggaggtgtagtcatagcatctcgagatggaaaaattgtgtttgagaataccttggatgcacggttggatgttgcattcaataagaaacttccagagattcgcaagtggctttttggtcaggttgctgcttgaag

SEQ ID NO: 34358 - DNA, 436 bp, Gossypium hirsutum
  Clone ID: LIB3149-035-Q1-K1-B7
gtaagatgcatgatgattttcttgctctatcttatgttattcggactttttactttccttgaaagtgtacctttcaaacacttatccacaacaacataacatgcagttatgatcttttaaatatataaaaaaaaccctcagaatattcatagattttatctgtgtaaacagggtctaaatttggatttttttgacatttgcaggggagttaagaagacgaagaagtgaataaataaggaagatggctagacttcatatgttaatggcttttgttttctttataggagtttgtttgcgaaactctggttccatttatgttgacacatataactataaattagggaattttggaagcccgggtgctgttttatttaatcaggatgcttatgttttaaaaatataaattcttttataatattttttattttaaataatt

SEQ ID NO: 34359 - DNA, 441 bp, Gossypium hirsutum
  Clone ID: LIB3149-035-Q1-K1-B8
gcagtttgctaatggaaatggagggaagaaacccagttccaagtcctggagtgtgttcatagaaaattgcagcaatcctcgttgtgttagtaatgaaaactcctgcaaaattaaagctgtttttttctgaacattatttattgtatcatagtgaccaaattgaattgaaagaattgaagattgattgcttctcatctattgaaggggaagattgcacccttgtacattaaccttgtattcttaatgattgattactcctttacctttttgttaagcttatcttcatacaatgtttagtagttaattatatttttaacgcagctcaaaaatttgcttgaattatattatttttttttttataatttatttctatatttattaggtcgtccgctctagatgttcttactttattactcttcattctgcgttttattttttttt

SEQ ID NO: 34360 - DNA, 281 bp, Gossypium hirsutum
  Clone ID: LIB3149-035-Q1-K1-B9
tggtaaacgatcaagttcctggcttctgattacgtatcttgatgaagatcttcggatatctaaaggagatggtggtctttttgtgcttgctagacaggggagtcctcttctggagcagtatccatacagtatctatgaaggggatgtaccatatatattgttgttgtcgacctttccactgatagccaattgtaatttttgctgttgtataattttttttgttaatgtttatgtttcttttatttattttattttttgaccctttataaaattttttattt

SEQ ID NO: 34361 - DNA, 354 bp, Gossypium hirsutum
  unsure (1)..(354): unsure at all n locations; Clone ID: LIB3149-035-Q1-K1-C10
cccacgcgtccgggccgcccttttttttttttttttttaaattgaaacatgcttgtggatgcatcttattttatactagatgaactaaatatcgaatctcaaatttgtcagatgccacatttcaaagagaattatacaaatcaagtggattaaatccggttcccaaccgactatccctactttacatctagtacaatggcagaacattaacccaggattttgaggcctgtttgttatttaggttttctctttcagttgttcacttgcttatgtttgcatcttattcatggattgtttaatagcttgtttgaggatgaaccttttaagcgttttaatgttatattttactcccna

SEQ ID NO: 34362 - DNA, 314 bp, Gossypium hirsutum
  Clone ID: LIB3149-035-Q1-K1-C12
tgcatgtggaacaatacaagtcccaagtgaggaaaacattaattggtccaagggtccggattttgggaatcggtggagaacaatggaaccacttaaagggtttgcccgaagccaagagaacattcaagctgccaaattccatttactacatgtcttaacttcatctgaataaatttttatgcactcattttcccacctcatgtgctttttgtatttgcttgggggtggttttcaaaaattccaattttaaatttttagttaaaattttcttttatttatttttcaaaaataaaaataaaactttcttaattata

SEQ ID NO: 34363 - DNA, 409 bp, Gossypium hirsutum
  Clone ID: LIB3149-035-Q1-K1-C2
attttgtcaaatctcgaaatcatcacatcaatggctcgtacaaagcaaacagctaggaagtcgactggtggaaaagctccaaggaagcagctagccacgaaggccgctcgtaagtccgctccggcgaccggcggagtgaagaagcctcaccgtttcaagccaggaaccgtggctttgagagagatccgtaaataccagaagagcaccgagttgttgatcaggaagctttctttccagaggctggtgagggaaatcgctcaagatttcaagactgatttaaggttccaaagcaacgccgtcgctgcacttcaagaagcggcggaggcttaatctcgtggattgtttgaagacactaacctgtgtgcaattcatgctaagagggttactatcatgcccaaagatattcaac

SEQ ID NO: 34364 - DNA, 250 bp, Gossypium hirsutum
  Clone ID: LIB3149-035-Q1-K1-C4
aaaaaaaaaaagaaaaaaaaacaaaaaaaaaaaaaaaaaaaaaaaaaacaaaaaaaaaaaaaaaaaaaggacacaaaaaaaagaagaaaaaaaaaaaaaaaaaaaaaaaaaaaaaaaaaaaaaaaaaaaaaaaaaaaaaaaaaaaaaaaaaaaaaaaaaaaaaaaaaaaaaaaaaaaaaaaaaaaaaaaaaaaaaaaaaaaaaaaaacaaaaaaaaaaaaaaaaaaaaaaaaaaaaaaaaaaaaaaaaaa

SEQ ID NO: 34365 - DNA, 430 bp, Gossypium hirsutum
  unsure (1)..(430): unsure at all n locations; Clone ID: LIB3149-035-Q1-K1-C5
acctactacaactttaaccttccaaccttgggaattggcttacctgatgtaaatactcagaaggaatttgacatgaagctgcaactaagtcagaatgagagacaagttgtgtcaaatatgttcacgccaccaaccgctaatcagtcatggagaaaagttttaagcatgggaaatcatctgaacggccatgaaccaatcctcaaggagatcatcttctcaatgcacgataatgccagtgacaatcactactcaagcagcagccacagagattattaacaggatacagaaacatatcggatgtatacatgcggaacctcgaatgatcttcgggtagcactttctattatctcatatgattaaaattcctttttctattaaaatttngaaaaaaaaataaatatttcttataattttttattattaatatttt

SEQ ID NO: 34366 - DNA, 431 bp, Gossypium hirsutum
  Clone ID: LIB3149-035-Q1-K1-C8
ggctttttgtagcggtggtgaccaggcgttgcgaaaagcagatggttatgctgattttgaaaattttggccgccttaatgttttagatcttcaggtacaaattaggcgtcttccaaaaccagtgatagcaatggttgctggttatgctgttggaggagggcatgttttacatatggtttgtgatctgaccattgctgcggataatgctatttttggtcaaactggtcccaaggtaggaagttttgatgctggttatggaagttccataatgtcccgtttggttggacctaaaaaggcgcgcgaaatgtggtttcttgccaggttttacactgcctctgaggcagagaaaatggggcttgtgaatgctgttgtaccgctagagaaactggagcaagaaacaattaaatggtgtagagagatcctaagaaaca

SEQ ID NO: 34367 - DNA, 86 bp, Gossypium hirsutum
  Clone ID: LIB3149-035-Q1-K1-C9
tttcgctagcgtgcggcgtttttactttttcatagctgtctcctattttcaattctctggccgtctttttacttttttgagactgg

SEQ ID NO: 34368 - DNA, 427 bp, Gossypium hirsutum
  Clone ID: LIB3149-035-Q1-K1-D1
cagatcagacagggcatctgaccacatcaaaaacaggcttaagacaggcaaagtccagaggcagaaagaagcaaggaagcaattggagcagggcattcacttggtcaaagctccgctcgcacttgcacaagattcatctctttgtcttccaaaaatcaaagtcaatgtgtcccaagcacagacagaagagaatcagcccatggaagagtgaaattggttctgctgttcctcggcttggtatttttgtccaccaaaatcttatgcatgcaactcgtggcttaagttatcaagaggttttttatgttgtgtctagcggtccagaattttgattagcatgttcaaatgttattgttttgagtagcatattttgtagtcactaattatggaaaagtcattaaaatatggattatctttggtttttcctttt

SEQ ID NO: 34369 - DNA, 430 bp, Gossypium hirsutum
  Clone ID: LIB3149-035-Q1-K1-D10
gccatatccatatttattggaatagcaaatgcattaatgacggtgactgctgtgagcatgcagaatgtgctaatcggtcaagatcttaatggttgcgcatttgtctgtggatcattgagcttcttggataaaatctcatgtgggctcaccctatttgttcttcaatcctttcatagtagctcaccaatagttgctggaaactattcaaccagtaacttttcaatcacgagatacggcttaggacttgtgccggcattttgttcacttgtcggcgtggcggttacttggaccatggaactacgtgtcccgttgtacaaaccactgaccgaaaccctactggaatgacataaaatgttaataataccagtaagtcatttacagcttagaaaagaaagcatagcatcatatggttgattgagggaggaattga

SEQ ID NO: 34370 - DNA, 397 bp, Gossypium hirsutum
  Clone ID: LIB3149-035-Q1-K1-D12
aggctgaaaaacaaagtcaagcataaaataacttgatcactcatcttcaatacatagttcaaggtttatgacaacgcataaaaagcaaaaaagatacacggccgaatggccattcagtccatacaaatgccttcaaaatcaacatactacctatgtaaaaacagataataaccaggtaaacttatcgctttccaccaccaccaccaagcttgggacctttgggtgcaccaccctttggaaggttacccttgccttgtgtcttctgttgcttcgctgctacttctgccttctttgccttcttttcatccttagtcttcttgatcctttccttgatttctcggagagcagcttccctggcagcatcacgaacttcaggtttctcactcctcttcttctg

SEQ ID NO: 34371 - DNA, 433 bp, Gossypium hirsutum
  Clone ID: LIB3149-035-Q1-K1-D2
gttcaacaagctgttaactacaagcagcttaaaaggggagcttatgaagctactaagacacttaatagaggtatatcggggtttgttgtcatggctggcgatactgagcctcttgagattcttttgcatcttcctttgcttgctgaaaataagaatgtcccatatgtatttgttccctcaaagcaagcacttggccgagcatgcggtgtcacaagacctgtaatcgcatgctccgtcacatcaaatgaaggaagccagttgaaatcgcaaatacaacagctcaaggatgccattgagaagctcctaatctaaagatattacgtaactcgtatttctgtgtgatgggctcttttggaatgtggagggcgctcctttagagactttgactgaataagtcgggccactatcgaacctgtgtttaatattcgacctt

SEQ ID NO: 34372 - DNA, 128 bp, Gossypium hirsutum
  Clone ID: LIB3149-035-Q1-K1-D3
cggatttcccggttcgcccaacccgtccggtttggtggtatggaaaaatctggttaatttttgggaccataaccatcttaggtaatgaaggttccccgttttaaaaataatatcagcttctctatatt

SEQ ID NO: 34373 - DNA, 369 bp, Gossypium hirsutum
  Clone ID: LIB3149-035-Q1-K1-D4
gccgtttcccttacacaattcctccaaggctaaggccgccaatttaaggcgctccgccaggatggaccttctttattggacggattttgtcaaaaccggcaaactcaaggaccttcctccatttgatccggattgggactatatcaaagccgcttccatggcggggaaaatatacctgaggggaggttttggggttggtgccttaaaaaggatttacgggggggctaagagaaatggaagccgtcctcgccatttctgtaagagcagtggatctgttgctcgccacattcttcaacaattgcagaacgttaacatcattgatattgatcctaaaggtggtaggagaatcacatcgaacggccaacgcga

SEQ ID NO: 34374 - DNA, 80 bp, Gossypium hirsutum
  Clone ID: LIB3149-035-Q1-K1-D6
gaggaagggttcatccataaaaaagtggatgtaatctttgctggccatgtccatgctaatgaaagaatcctgtcgaatct

SEQ ID NO: 34375 - DNA, 384 bp, Gossypium hirsutum
  Clone ID: LIB3149-035-Q1-K1-D8
attttctgaaaacatgagccatgttcttgttgttttcactgttcttgttcgagggttttagcaaacaactgaaagatccaagtagaaacatgctagcatggtcagcatgcatttgtctaagtggatcttcaattattggtttctttttgttgttatgtgatttgttgtttgtttaagctcatgcttttggatcgaattctgttgatttaaatttctttttttactgttggggaatatgttctaaataaacttcaaatgcaactgcttgtcagttgatttttatgaaaaaaaaaaaaaattattttaatattatatataatattttcatattttaaatttttaatattttttacttttttttaatatttgataattttttttata

SEQ ID NO: 34376 - DNA, 409 bp, Gossypium hirsutum
  Clone ID: LIB3149-035-Q1-K1-D9
aaaaccctaaaatcttcttgagctgccgcagctgagatccgacactccacatcgcagcaatgggtgaggaagtaaaggctttggttcctgagtcactgttgaagaagaacaagaggaatgaagaatgggagcttgccaaaaagcaggagctcgaagccgccaagaagaagaatgtcgagaaccggaagttgattttcaacagggctaagcaatatgcaaaggagtacgaggctcaggaaaaagagttgattcaattgaagcgggaggcaaagttgaaaggaggattctatgttgatccaaaagctaagcttttgttcattgttagaatccgcggtatcaatgccatgcacccaaggaccagaaagatcttgcagcttctacgtttgagacagattttaaatggtgtttt

SEQ ID NO: 34377 - DNA, 104 bp, Gossypium hirsutum
  Clone ID: LIB3149-035-Q1-K1-E12
ctttcattgaatgagtttagtgcacctgctccgaggtctgcggccccagtaaactctgtgcggagtcatgaaaaaatgactgcttgttcatcatattcatttgc

SEQ ID NO: 34378 - DNA, 293 bp, Gossypium hirsutum
  Clone ID: LIB3149-035-Q1-K1-E2
cccacccgtccggctactgggaatcaggacacaacttgcagattgtgggatgtaagaaaaccagcccagtccctagctgtattgaagggaagaatgggagcaattagagctctcaagttcacatcagatggtcgatttcttgccatggctgagccagctgacttcgttcatgtcttcgacaccaagtccgggtatgtgaagtgccaggaaattgacttttttggtgaggttgctggaatatcctttagcccagatacagaatcgcctgcggttgaactctaacaagatcgcga

SEQ ID NO: 34379 - DNA, 285 bp, Gossypium hirsutum
  Clone ID: LIB3149-035-Q1-K1-E3
agtggatacctactccaatctctataccatcataaccgttgatcaacctgcactcggactggaagcaatctttagcattagagtccctgatcagaagtttggcaaggatgaactccattatttgcattaatacgcatggataatctcaagcataggattaactgcaaatcctataattaacctttcaggtgattgtaactaatgtacttgcactgggaactgatctcttgtttgacacataaactgggaatttctcaaaatatcaatgcctggttgagctttttc

SEQ ID NO: 34380 - DNA, 299 bp, Gossypium hirsutum
  Clone ID: LIB3149-035-Q1-K1-E5
gcttcacttagggtcgatggagccttgaacgtggatgtaacagaattccagaccaacttgggccgggacccaagaatacactggaggcggtcttcatacgctccagtcatctctgctgagaaggcttaccatgagcagctatcagttgctgaaatcaccaatagagcccatgagccctcatctatgaaggccaagtgtgatcctcgccacggcaagaaaatggcttgcagattgatgaaccgcggagaagtagggcccaaggaagtcaaagctgctgatggcaccatcaagaccaagag

SEQ ID NO: 34381 - DNA, 278 bp, Gossypium hirsutum
  Clone ID: LIB3149-035-Q1-K1-E8
atttcgagccgcgatcgatacgatattctccaaccaattttggctgaaaaaatgttttgtaaaggtaaccacccaaaaaggaggaaaggtggtgggtttggtccaaaaaacctgttggataatgaccatgtattgacgtattggtcaccgaaagaaaataaaaaccagcattggatcgaaataaaagtacccaatggcgaagaaagaatgaaattcaatgtggtgaggattcaagaaccaattggacttggacaaaagatcattaagcatgaaatata

SEQ ID NO: 34382 - DNA, 434 bp, Gossypium hirsutum
  Clone ID: LIB3149-035-Q1-K1-F1
cagatgaatactggaaaaagtcgaagttgccaaatgcaaccttatttaagcctctgcagccatataaaagacgcataaaagagacatttaaagattttccaccatcatcactgccccttatcgacactctacttgcaattgatccagcggaacttctaactgcgactgctgcattaagaagtgaatgcttcatgaccgagccttatgcttgtgaaccttctagcctcccaaaatattcccccagtgaagagatggatgcaaaacggcgagatgatgaagcacggagactcatagcagctagtaaagccccaggtgacggtgcaaggaaaacacgaacacgtgatcgtgcaagggcagggcctgccccagaagccaatgccgagcttcagtctaatcttgatagaaggcggttaataacccatgcgaacgccaag

SEQ ID NO: 34383 - DNA, 405 bp, Gossypium hirsutum
  Clone ID: LIB3149-035-Q1-K1-F10
atatggggcagatgggccaaatgggtggtcagatgggtcacatgggtccaatgggtggggagatgggttataacatgggccaaatgggaaaccatcccatgaaccagatgagtaattttgctgcagtgcaaggactaccaccagcaatgaataatggtggtgggtattattaagggatgggaccaggaaattcttattatcagcctcaatatatggctgccatgatgatgaaccaacaacgtgcaaattgagggatgtatccacccatgatgtatgctcattaaccatattccccaccaaaatatggacctccacccatgcattcacccccatctgaatcttatgctcattacttagtgaagaaaacccaaacagctgtggattatgttaaaatttccccatttt

SEQ ID NO: 34384 - DNA, 353 bp, Gossypium hirsutum
  unsure (1)..(353): unsure at all n locations; Clone ID: LIB3149-035-Q1-K1-F11
cacatgtgctacttccggtgaaggactgtacgaggggctggactggctctcaaacaacattgcaaacaaggcataggtgtgacatgactgagttggcagtcttacaacccttttggattttatgaatgtctgcccccgttttatgtgttattttttatggtttttcacgtttgttgcaaacactgccatttgttacttatagtttaagaataattgacaaagtttgggaccgttatttcctagcgggaattgatggttagccagtttaattacccttttaatgtaaaatatacataatatatacatatatattttttccttcaaaannnanaannnnnnnnnnnnnnnnnnna

SEQ ID NO: 34385 - DNA, 412 bp, Gossypium hirsutum
  Clone ID: LIB3149-035-Q1-K1-F12
ggatcattggccgcacaaacacagcagccattaagatggcataaggcttattttgatgcacccgagggtgacgagccgttggctttggacatggaaagtatgggaaaaggtcaaatatggattaacgggcagagcatcggtagatattggaccgcatatgctcatggtgattgcagtggctgtagttattctggaacgtttcgaccaacgaaatgtcagctcggttgtggccaaccgacccaaaaatggtaccatgttcctcggtcttggttgaaaccgacacaaaatctattagttctatttgaggagctcggaggagatcccttgaaaatctcacttgtaaaaagatccatgtccactgtttgtgctgagatgtcggagtaccacccaaatatcaagaactggcaaatcg

SEQ ID NO: 34386 - DNA, 396 bp, Gossypium hirsutum
  Clone ID: LIB3149-035-Q1-K1-F2
cccacttacaccaatcttaaccgtcttgtctcccaggtgatctcctctttgactgcttcacttaggttcgatggtgccttgaacgtggatgtaacagaattccagaccaacttggtcccttacccaagaatacacttcatgctttcttcatacgctccagtcatctctgctgagaaggcttaccatgagcagctatcagttgctgaaatcaccaatagtgcctttgagcccttatctatgatggccaagtgtgatcctcgccatggcaagtatatggcttgctgtttgatgtaccgtggtgatgttgtgcccaaggatgtcaatgctgctgttgccaccatcaagaccaagagaactattcagttccgtgactggtgcccaactggattcaagagt

SEQ ID NO: 34387 - DNA, 59 bp, Gossypium hirsutum
  Clone ID: LIB3149-035-Q1-K1-F4
cttgattcagagtccaataccaatttgattcatccaacacaagatttctttgatggtag

SEQ ID NO: 34388 - DNA, 383 bp, Gossypium hirsutum
  Clone ID: LIB3149-035-Q1-K1-F5
cgatggttgcattactaccaaggagctggggactgtgatgcgatcacttggtcagaaccctactgaggcagaactccaagatatgatcaatgaagttgatgctgatggaaatgggaccattgattttcctgaattccttaacctaatggcaaggaagatgaaggatactgattccgaggaagaacttaaagaggctttcagggtgtttgacaaggaccagaatggtttcatatctgctgctgagcttcgccatgtcatgacaaatctcggtgagaagcttacagatgaggaagttgatgagatgatccgtgaagctgatgttgatggtgatgggcagataaactatgaggagttcgtcaaagtcatgatggccaagtaaggat

SEQ ID NO: 34389 - DNA, 433 bp, Gossypium hirsutum
  Clone ID: LIB3149-035-Q1-K1-F6
agaaaataaaaaaatatataaaaaaagtctacacaatagtcaattataaatgattagagaagaatgtttttttatatgaaatctttgcttataatatttatgaaaaaaagatttcatataaaaaaataaaataagtcgacattgttttgaatatcacttatccgaatatgattgtaaaataaataacaaaacttgtaattatataaaaaaataattaaaatcaaacaaattagtaatcaaatttgaaaaaaataacttgattttagaatttcctccttgtcattatataaaaaaaaataactgggaaaaatgagattttaagcatcaattaaaaggtatatatttgccctctttactgtttacaaattaatgcgacatgattatgtgaaatgactaagattactctcaacctccatttatactctacttctct

SEQ ID NO: 34390 - DNA, 425 bp, Gossypium hirsutum
  Clone ID: LIB3149-035-Q1-K1-F8
ctcttttaacacatccatcgttcaatgcgcttgttttgatctatagatcttaggttcggagtctctgtgtgtgctttggtgtgggggttttctagtgacaaaaatagaatggggaaacaatcaaagtcaggagggtgtttggggtggttactggcgatagtaatattggctctggttgtgggagccattgtttatgcagtgaagcagaaaatcgatcacgccaatgataataagccatctcccgttccaggtcctccaggcgctattgacaagaagtatgccgatgctctcaaaatcgcaatgcaattctttgacattcaaaaatctggtaagttagtgaataataagatatcatggagaggagattctggacttaaggatggaaatgaagcgaacttggatctttccaaggggatgtatgatgc

SEQ ID NO: 34391 - DNA, 438 bp, Gossypium hirsutum
  unsure (1)..(438): unsure at all n locations; Clone ID: LIB3149-035-Q1-K1-G1
tgcaattctattgaatacatgccttgcttgccctttggcttcaatacttcacactcctctagatgaacaatcggcaaggttctgtgctgcctctattgttactgccttagaagatctacatgagaatggcgtgctttacagaggtgtgtctccagatgttttaatgttggacaaaacaggccatttacagctagttgacttcagatttggaaagaagttatctagtgagagaacatttacanattgcggaatggcagactctttagcgccagaggtagttcagggaaagggccatggtcttcctgctgactggtgggccctgggagtcctgatctatttcttgttgcaaggtgaaatgccatttgggtcatggagacaaagcgagctcgattcatttgcaaagattgcaagaggatacttttattcttttacataaat

SEQ ID NO: 34392 - DNA, 434 bp, Gossypium hirsutum
  Clone ID: LIB3149-035-Q1-K1-G10
agctgaaccaaatggctgaggaagccaaaaggagagcagaaattgctaggttgagagaactgcatacactgaaagggcatgtggaatcggtggtgagattgaagaacctggacatagacacaatccagcaagcgtacacggtgtaaggtgggggaatggtattccgaaggaatagtggaaaatgtaatgagagggagcgttttcctgagagtgaagctctaatatatgtatcttttattaccttaatcccgtccgccattttacaagggaaaggttattgtttatggcattttatgtttatattagtagtaaaaaaccatatgttttgcttttgttgtagtaaaaaaaaaaccaaaaaaaaaaaaaaaacaaactgtgatagtagaaataagaacccaaattaactttttcggataattccagttttcgagtga

SEQ ID NO: 34393 - DNA, 434 bp, Gossypium hirsutum
  Clone ID: LIB3149-035-Q1-K1-G11
cccgttttaaggtggatctccgtacatatatccactgtatggattaggcgagctgcctcaggcttttgcacggcttagtgctgtttatggtggaacatatatgttgaataaacccgagtgcaaggtggagtatgacgatgaaggcaaagtttgtggtgtcacatctgaaggtgaaactgccaggtgtaagaaagttgtttgcgacccttcctacttgccaaacaaggttaggaagatcggcaaggttgctagggcaattgctattatgagtcacccaattccaaacaccaatgattctcattctgtgcagattatcctgccacaaaagcagttgggtcgtaaatcggatatgtatgtcttctgttgttcatattctcacaatgttgctccaaagggcaaattcattgcatttgtttcaacagaggccgagacag

SEQ ID NO: 34394 - DNA, 178 bp, Gossypium hirsutum
  Clone ID: LIB3149-035-Q1-K1-G12
atgaatttccatttccatgatatctgggagaataactggaaggtgtcccaataccaccagggctgaatctagccgttgtgtttacttccaagtttatgtattttcatctctgtttgtgataataaaattgtaccttcgtccaaaaaaaaaaaaataatttttaataattttattattt

SEQ ID NO: 34395 - DNA, 441 bp, Gossypium hirsutum
  Clone ID: LIB3149-035-Q1-K1-G3
aactttttaaaggtcgtttcaagtgcaataattgacaaatacattggagaaagtgcgaggctgataagagaaatgtttggatatgctcgtgatcaccaaccttgcatcatctttatggatgagattgatgccatcggtggacgccgttttagtgaaggaacaagcgctgaccgtgaaatacagagaacgctgatggagttacttaatcagcttgatggatttgatcagcttggaaaggttaaaatgatcatggctacaaaccgacctgatgtacttgaccctgcacttcttcgtcctgggcggctagatagaaaaatagaaattccattgccgaatgaacaatcgagaatggaaatcctcaagatccatgctgctggcattgctaagcatggtgaaattgactatgaggctgttgttaaacttgctgagggttttaacggg

SEQ ID NO: 34396 - DNA, 135 bp, Gossypium hirsutum
  Clone ID: LIB3149-035-Q1-K1-G4
ctttagatgtggcaataactttctcaacctggattttgtttgtatcacgggaattatgactacaggtacaacctatgtttcatgatattctcatacctataagcacacgttatgcatttgtgcgaatttgcatgc

SEQ ID NO: 34397 - DNA, 365 bp, Gossypium hirsutum
  Clone ID: LIB3149-035-Q1-K1-G5
caaggcccttcgtgaccgagcaccttatcctccaaaccatgtggttggccatctaattgggagctttgctttcattgtctttgacaaatccacctccactttgtttgtggcttctgatcaatttggtaaggttcctctctattggggaatcaccgccgacggatatgtggcctttgctgataatgctgaattgctgaaaggtgcctgtggcaaatctcttgcttcttttcctcaaggctgtttctactccacagcagtaggaggattaagaagctatgagaatcctaagaacaagatcactgcagtgcctgctgaagaagaggagatatggggtgctaaattcaaggtggaaaggccaacagttg

SEQ ID NO: 34398 - DNA, 302 bp, Gossypium hirsutum
  Clone ID: LIB3149-035-Q1-K1-G6
gaagacctagaaccagctttgaaggctctcaaagatgggcttatgaccaagaatgtggctgaagagatagcttacaagctttggtgatcaataacctgctagtcttgaagggaaaaagctggcctcattcacaagggtctcttcgacagttcgggctgccatggaagatgcccttgttcgtattttaactcccaggcgctccattgacatactgagggatgtacatgctgccaaggaacagaggaagccatatgttgttgtctttgttggcgttaacggagttgggaaatcaactaatctcg

SEQ ID NO: 34399 - DNA, 409 bp, Gossypium hirsutum
  Clone ID: LIB3149-035-Q1-K1-G8
aagaaaaaaaaaaaaccagacatggcttccaacactgttgcatccgctgctcttcttcttaccttgaacttgttgttcttcactttggttagctctacctacgtgccttgcccaccaccaccaaagagccacaagcctacccacaaaagcccaccctcggcacctgaacagccaggcacttgccccagaaatgcactgaaactaggcggttgggctgatttggtgggctcagtgcgcgttggtggtggaccggcgaggaccaaatgcttgtttctcatttcgggtttgggctgatctcgatgctgctgtttgcctttgcactgctattaaagctaatgtgttgggggttaacctaaacgttcctgtttcattgtctttgctcctcaattcctgccaaaagcaaatgcct

SEQ ID NO: 34400 - DNA, 244 bp, Gossypium hirsutum
  Clone ID: LIB3149-035-Q1-K1-G9
attctggtgcctgatgttgattacaagatcataagcggtgaccaccctactatgactgcaccgcttttgcaaatgtacgctcttacaaaacctccatcagagatcaaatgtaatatgatgtggaaggtgatacctaccctttcttttacgctaactacatgtgccttaatgaggcctgtgatatcaatattcttaaagtggatcttcttggtgacaatggaaattacacggatgctgtcattga

SEQ ID NO: 34401 - DNA, 170 bp, Gossypium hirsutum
  Clone ID: LIB3149-035-Q1-K1-H1
aaagagaaaaaacgaaaaaaaagaaaaaaagaaaaaaaaaaaaaaaaaaaaaaaaacagaacacaaaaaaaaagaacgaaaaaaaaaagggaaaaagcaaaaaagagaaaaaaaagaaaaaaaaaaacaagggaaaaaaaaaaaacaaaaaaaaaaaaaaacgaagaggg

SEQ ID NO: 34402 - DNA, 407 bp, Gossypium hirsutum
  Clone ID: LIB3149-035-Q1-K1-H10
gttttctgaattgctgaccaagatcgacaggcgatctggaaaggagcttgagaaggagcccaagttcttgaagaatggtgatgcagggatgataaagatggttcccaccaagcctatggttgtggagactttctctgagtacccaccccttggacggtttgctgtcagggacatgcgtcagactgtggctgttggtgtcatcaagagcgttgagaagaaggatccaaccggtgctaaggtcaccaaatctgctgccaagaagaaatgagattgcatttgatagtatcaaagccttttgattttggttttctatgtagtctggtacttaacagttttttagaccaattttgatatgtgttcatttggttgagactggcatttgtccacggattgtgtgtttgcttttt

SEQ ID NO: 34403 - DNA, 379 bp, Gossypium hirsutum
  Clone ID: LIB3149-035-Q1-K1-H11
gaagaaaaatcccaaaattttcagcttttcctctcttctagaaatggcccaagttagcatgttgaaggctttttgttggcttttgtaatggcaatcctaaacgttgcctcggcgcaggttagtgaggcgccgtcaccgttgccagacgctggagctggattctcagtcggagtttctaccgccgccgttggcttctctttgatcgtttcccttcttgctttcttcaagcattaaattgaagggcttgtttggctctcctctctgtgtggctttcttttatatatatgtatgtgtgtatgtatttatgataccattctttcttcgttaaatttattgtaatgaagttgattctttgaataaaatgcttccgttatgattt

SEQ ID NO: 34404 - DNA, 391 bp, Gossypium hirsutum
  Clone ID: LIB3149-035-Q1-K1-H2
gttcaaaaaaattctggcaaaccggcattcagctcaaagatcaagagtgagaaagctgcaatatatttcatagcttgaaagaagcgttacaacattacagactgaagtatcaacattatcaccaagagttgcatttctggatcattaaagagtggttcttactgttgaaaatagtgctttaaagcaaaggattgcagctctggctcaagacaagatttttaaagatgctcaccaagaaacattgaagaaggaaattgagagacttacacaagtttatcaacaacaacaaagccttaagaatatgaacgacaaccattctttaccaccaccgcaacagcagcaaccattgttggcaccgccaccgaacgaaggacaacttattagttgattt

SEQ ID NO: 34405 - DNA, 406 bp, Gossypium hirsutum
  Clone ID: LIB3149-035-Q1-K1-H3
cgggtggcattggggaaccagaaggaggctataatgtttcaccaggcttaaaaaccagccccagcttcagtttggcaccagcggcgggcggacctttaccacgccgaactccttacctttgcccaacaagaagatgggctcctcgcctgttgccaatcgtctcaaaatgaattctgatttgggaacaaaatagtcaagatcggcattgacatctccggagaaagaagataggtactatgcaacaaggggatcgggttccatagtgttggaagacaataataccaaggtttttgatggatcaccaccatgttaaggaagataaagggactgtgtggcccagattgttcaccacattatctaataaagaaaaagaacaggatttcatggcaatgaagggatgtaagct

SEQ ID NO: 34406 - DNA, 411 bp, Gossypium hirsutum
  Clone ID: LIB3149-035-Q1-K1-H5
cgtgccggtccgaaccggagtttcgggctcgacctacgcgcacatttttgttctccttccaagtttctcccatctatccgcacgaggcaccaaaagttaaatgcaagaccaaggtctaccatccaaatattgacttggaaggaaatgtttgcttaaacatcttgcgtgaagactggaaaccagtgctaaatataaacactgtaatctacggattataccatcttttcacggagccaaattatgaggatcccctcaatcatgatgctgctgcagtgttgagggataatccaaagatgtttgaatcaaatgtgaaaagggctatgtatggtgggtatgtggggcaaacctattttccgcggtgtatgtagcttttacgatgtagctgaaagcgcaaactcactatgttatgga

SEQ ID NO: 34407 - DNA, 304 bp, Gossypium hirsutum
  Clone ID: LIB3149-035-Q1-K1-H6
cccacgcgtccgccgtatggcgcaaggaagctgattggcgggatccctcgcgggtgcaccgccgaccgaccttgatcttcttcgcgttgctaaagttaccggtggtgcacctaacaagctttttaagataaagtggtgaggctgtccattgctcaagtctgactgtaatttacagaagctgaagctgattgagggaagcttacaaaagaaaaaattttgctctcgatctccgcccagaagacccgagctattcgcagaaggcttaccaagcaccaggcattttttaagaccgaaaggggagaag

SEQ ID NO: 34408 - DNA, 384 bp, Gossypium hirsutum
  Clone ID: LIB3149-035-Q1-K1-H7
tctctttctaaaatgcgtacgtactcttatgtactactgtaagcttgactgcaatcgccttttaaagatgttgactgatttatttatttcatttctgggtttgactattttgcttattatctttaaagtttctttttttttaaatgtatatgggtttcaatttatgggataaacggtgatagctcgacggcgccttctcctgcgaccatatgggtctgaagaggggtgctggaaccttgatatttttttctctcttattcctgcctaattacattttcttagtgtgcgcccatttatatatttttgatgttaaggattttaggatctttatttataaacttttttaacgctatatttttattttaaaaagaatatcctcttttt

SEQ ID NO: 34409 - DNA, 380 bp, Gossypium hirsutum
  Clone ID: LIB3149-035-Q1-K1-H8
attctttcttcttccagagctgggacaagataaagcctacattagtgagacagtgttcatgtttgtctttctatcatttttcttgtggactttccatccttttgttgtcaaggtcaaaaagttctatacggttcaaatttggtgcagggtgctagcatatttagttgtttctcagactctccgaattttcactttctattctactcagcttcctggtccaaattaccattgccgaccggtatatttgttctctgggggttaatgtaacaaatgaaaacagattggttttatcgttttagtaaataacttttgtgcaaggttcaaaacttgctagattgccagaaccggatggtttggctagaattccttgtaattaaatt

SEQ ID NO: 34410 - DNA, 383 bp, Gossypium hirsutum
  Clone ID: LIB3149-035-Q1-K1-H9
gaaagttgtgttccttctgattattccaatgataagcttaaatttatccaaaatccatcaattaacaaatcttgtgttaggactttgacggttcctaagctgatgaaaagccctgtttttatctattatcagcttgataactactaccaaaaccatcgccgttatgtaaaaagtcggagtgataaacaattgaggagcgtgtcagatgagaaatccacaaaagattgtagccctgaagacaaaacggtggatggtccaattgttccctgtggtctagtcgcatggagtttgtttaatgacacatactggtttttggggtatagtaagacattataagtttaaatacatgacatatcatggaatagtgacaaagatcttaaatt

SEQ ID NO: 34411 - DNA, 382 bp, Gossypium hirsutum
  Clone ID: LIB3149-036-Q1-K1-A11
atccattctatgctggtttcgggaatagagtcaccgatgaaatcagctacgttaaggtcggaatgccgaaagggaaaatcttcattattaacccaaagggtgaggttgccgtgaaccgtcgtgttgacacaaaatcttatacatctcttcacgcccttgttcatggcatgtttccaccgacaacctgctccgagcaggaagatttcaattcgtggaatttctggaaactgccacctcctgtattcgacatatgaagttgtcggctaaagtatgttgctttagcatttggatgccaagatagatggatgatgatttcttcgatcattccagagctgtccaggttataaataatcatgactgcttgaagaactttcaccctgct

SEQ ID NO: 34412 - DNA, 395 bp, Gossypium hirsutum
  Clone ID: LIB3149-036-Q1-K1-A12
gccgaactaagccaaacccctttggccatggccccatcgcaacctacaaccgaccgatttactaggccgtgattcctcctccactttcgacttcaacgaggcaaggaagaatcaatggcggattcacgaggtaaggcttcatttttctcttttcttttatttttagatgcaaagaatgaaaaagaaaatcagagggagcagatcaagagagaaaaaacgtaataaaccctagagattcaaaacaggaaatcaccttgctctgttttttttttgctttctattgcttctgtatgcctccagaagactttacaatcgcaaaacgaaaggctttatagccgagtgttccaaaaaagaataaaaataaattacaattttttctttttctctttgttttc

SEQ ID NO: 34413 - DNA, 371 bp, Gossypium hirsutum
  unsure (1)..(371): unsure at all n locations; Clone ID: LIB3149-036-Q1-K1-A2
cgacccangcggccgcaaagttgagaagaaatcatatccaaaggctcatgtcttgaaagcagcgaaagcagtgaaggctggggccacatttaataagaaggccaataatatcccaaccaaagttacattccacatgccaaggaccttgaataatgatatgaccccaaagtacccacgcattatttcttcaccaaagaacaagcttgatcattatcagattctcaagtttcccctcacgactgagtctgcaatgaagaaaattgaaaacaacaacactttggttttcattgttgacattcgtgctgattagaagaagattaaagatgctgtcaaaaaaatgtattatatttaagccaagaaagttaacacct

SEQ ID NO: 34414 - DNA, 411 bp, Gossypium hirsutum
  unsure (1)..(411): unsure at all n locations; Clone ID: LIB3149-036-Q1-K1-A3
ggaatncccgggcaagaagtccgaaatgaagtacaaggattagatctaaataaccattctatctaattgatgttattatcagcggctggcactttttgggttgcccccatttgatgtcttatgagtgaaaggaaaaagaaagggaaaagagaaggatgcaaatgccttccacgtacgggtttaagtgtcttcatttactggtcaatttgatatgatatttttcaagtttttgctgttctgtctttataagagtttgcataaaacgtatgtactaattttatgtattcttttttgttgctagaaaagttttttttttgggggggggagataaaggagagaaatgaatggtgtttgattgaacatcccaaactctggaaaataaaaagaggaaaaattattcaccttctgcat

SEQ ID NO: 34415 - DNA, 393 bp, Gossypium hirsutum
  Clone ID: LIB3149-036-Q1-K1-A4
cgcttattctcaccataaagagtctcctttacggcccagatcatttgctgtgaaagatgagatcttctgcttgtttgagggagcccttgataacttggggagtttaaagcagcaatatggtctggcaaagtcggcaaatgaagtgattttggtcattgaagcttacaaggcccttcgtgaccgagcaccttatcctccaaaccatgtggttggccatctaattgggagctttgctttcattgtctttgacaaatccacctccactttgtttgtggcttctgatcaatttggtaaggttcctctctattggggaatcaccgccgacggatatgtggcctttgctgataatgctgaattgctgaaaggtgcctgtggcaaatctcttgcttcttt

SEQ ID NO: 34416 - DNA, 401 bp, Gossypium hirsutum
  Clone ID: LIB3149-036-Q1-K1-A6
gagacttctgagccaacagttgaagaaaccaaagaaagcacagagtctacagaagcagcaggggcagcagcagcagcagcagaagtaaaagcagaagccgaagccgccccagtggaagcacccaaagaggaagctgcaaaggaagaagagaaaccagctgaagctcaagctgagaatactactaccgagtaaataagcttgtaagatggggaatcaatggaagcttgtgtagtgggcttactgttagctaagtttgcatgttgaaatcaattagtttcaattctagttgaataaggatgtgatagtattaaggtggatgaggcttgggactggggcatggaaatgacccaccaatgatagcttgcctattggctaaactaacatgcaattggcatatggca

SEQ ID NO: 34417 - DNA, 266 bp, Gossypium hirsutum
  Clone ID: LIB3149-036-Q1-K1-A8
attatcagcgtctggcactttttgtattgacccccccccatgtcttctgagtgaaaggaaaaaaaaaaggaaaagagaaggatgcaaatgccttccacccaccagcccaaacatttttatttccccaacgaacaaacatgatctttttcaaagtcttgctgttccctctttataaaaatttgcataaaacctatgtactaattttatgtattcttttttgttgctagaaaaattttttttttgggggggggagataaagagagaaa

SEQ ID NO: 34418 - DNA, 392 bp, Gossypium hirsutum
  Clone ID: LIB3149-036-Q1-K1-B1
aattgatgcactttcttccgcaggctaaagtaattttcatcacatctaaggtaacggttggaatcatcatgcagaatccttgaaaaactctggctcggttaaggttctgattgcagcccataaactcgttgctgtgaagaaaaattaccaaaattttccatgttttgtgtttacctttcacaattaggttcatgtttagtgaaaaccaactgatacaatctagcgccaagcttttttttaaagaaaatccagtattgaacagacaagtaagaaatttgtatgcactaaaaagtgtgacaattgtaatcttaagacagtgacttaagcctcctatcggttagcaatttttaattgttgtaaacttgtaagccccgttaaaaaaatatatattt

SEQ ID NO: 34419 - DNA, 383 bp, Gossypium hirsutum
  unsure (1)..(383): unsure at all n locations; Clone ID: LIB3149-036-Q1-K1-B10
cccacgcgtccggttatatggaagtaactgggtttggagctgatgtcagggagcaaatatacaaagtggcatctgtgaatctgtgttccaacatctcgggtcaaattcttgccagtcttgtcatgagtccaccaaaggttggagatgaatcctatgaatcatacagtgctgaaagagatggaatcctctcatctttagccaggcgtgcaaagacactggaagatgcattcaacaaattggaaggtgtaacatgcaacaaggcagaaggtgcaatgtatctgtttcccagaattgaccttcctgaaaaggcaatcaaagctgccgaagctgcaaaaaaagcacctgatgcatactactgccagcgcctnctcgctgctactgga

SEQ ID NO: 34420 - DNA, 241 bp, Gossypium hirsutum
  unsure (1)..(241): unsure at all n locations; Clone ID: LIB3149-036-Q1-K1-B11
caagaggctttttcagaccactcaatttgtttattataatggaggatgtcatgcttttatgtatgtggcacttattttcaatgtgccccatcattatccctgcttttctttcctattttatggtctttctttgtttggcttggtgtttctaagttatctttgaaaattttataaaaatcangtcnctataaaaaaaacacaaacaaacaaagacaatgaaaaatacattaaacaaatantg

SEQ ID NO: 34421 - DNA, 406 bp, Gossypium hirsutum
  Clone ID: LIB3149-036-Q1-K1-B12
gccaagagcagctcatctgttgagaagaactatgagttgcctgacggacaagtcattactattggagctgagagattccgttgcccggaagtcctcttccagccatctttcatcgggatggaagctgctggaatccatgaaactacctacaactctatcatgaagtgcgatgtggatatcaggaaggatctctacggtaacattgtgctcagtgggggttcaaccatgttccctggtattgcggaccgcatgagcaaggagatcactgctcttgctccaagcagcatgaagattaaggtcgttgcgccaccagagagaaagtacagtgtctggattggaggatctatcttggcatcactcagcaccttccaacagatgtggatttccaaaggtgagtatgatgaat

SEQ ID NO: 34422 - DNA, 380 bp, Gossypium hirsutum
  Clone ID: LIB3149-036-Q1-K1-B3
ggtacactcgtcggacacctggagttcgatctccaaacagcctatgaggacaatataaagaaaattgtggatttcagtactgttgaaggtttttgggtctgttattgccacttggcccgtccttctactttgccaagcccaacagatttgcatttattcaaggagggaatccgtccactatgggaggactctgcaaactgcaatggtggcaagtggataattcggttcaaaaaggttgtttcaagtcgcttttgggaagatctggttcttgccttggttggtgatcaacttgattacggagataatgtttgtggtgtagtgctgagcattcgcttcaatgaagatatattgagcgtatggaatcgtaatgcgtcggatca

SEQ ID NO: 34423 - DNA, 399 bp, Gossypium hirsutum
  unsure (1)..(399): unsure at all n locations; Clone ID: LIB3149-036-Q1-K1-B4
gncacgnnnaaaccaacattccaagtaacttaacaaagcacacagtctacataagcgacaggattttttatcaacatcagcacacccccaaaacaaaatcctaagccaccccattgaaagcacccaaaaagtaatctgcaaatgaaaaacaaaaaccatctcaatctcaaactgaaaatactactacctaattaataatcttgtaagatggcaaatcaacgtaagctcttctaatgtgcattactgttaactaactctacatgtagaaatcaattattttcaattctattttaataacgatctaatattattaatatgtataacgctttgaactgaaacatataaattacccaccaataatagccttgcctattgtctaaactaacatacaattttcat

SEQ ID NO: 34424 - DNA, 384 bp, Gossypium hirsutum
  Clone ID: LIB3149-036-Q1-K1-B7
gcgcaatgtctgacccggttcaaacctcccttgccgatttaccttccgatccgcttctgggaccgggtgctttcatcgacgtcaacggtgaacgaaaaccggccgagccaaccaaagctcgcaacggttcgatcccgaacggttcccaaccggagacaccttcgcggggctcggtcaactcttcatcgtcggcagattctaaggtcaaaccgcgcgtattggccccggaaacttggttgccgcctggatggttgatcgaagatagggttcggacctccggcgccactgctggactagttgataagtattacgttgatccaacgtcaggccgaaaatttagatccaaaatagaagtgctttactttttagaaaacggatctcccc

SEQ ID NO: 34425 - DNA, 394 bp, Gossypium hirsutum
  Clone ID: LIB3149-036-Q1-K1-C11
gtaaaaagaaaataagtactctgttattctttgctattttgttttcctcggactccgtagggccgtttttgcagataatcgtgaagaaacggcgcgcgtggagagggccatctccgagtcttgcggcgactgggcactcgctggaggtgtggaaggtggaggaagttgcggcgctcccctgttgtcactagggttttttctttttttagttttggggtttggtttagttttgggcctgtaaggccgttgggcttgtaactggactgtttttaattgtttgggcctgggtcgattgggccctattacaaaaataaaacaaataatgttgtggatttccaaaagaaaaatcaaaggaaaccatgtaagaaagggacatgaaagatttctttctttt

SEQ ID NO: 34426 - DNA, 376 bp, Gossypium hirsutum
  unsure (1)..(376): unsure at all n locations; Clone ID: LIB3149-036-Q1-K1-C12
cgcctcctagtttacagttctcaggttctttcgattcagccgtagccatggtgaacgtacgtaagaccaagaagacttattgcaagagcaaggagtgcatgaagcacacattgcacaaggttacacagtataagaagggtaaggatagtttggctgctcaagggaaacgccgttatgatcgcaaacaatccggttatggtggtcagaccaaaccagtgttccacaagaaggcaaaaaccaccaagaagattgtgctgaggctgcaatgccagggttgcaagcatgtgtcgcagcatccgatcaagaggtgcaagcactttgagattggtggagacaagaaagggaagggaacatctcttttctaaatgttgngttc

SEQ ID NO: 34427 - DNA, 402 bp, Gossypium hirsutum
  Clone ID: LIB3149-036-Q1-K1-C4
aaagctttctttattatcatggaaaccaacttttgcgcttcttattttttaataggaaccgttttttcggtctgcctttttgttgctttcaaaactggataaattctcgttgctaagcgtatctcgcttgatattttagagggcgaactggcgaaacataagtcttacgccgaatatctgcttcaacagctatttcgtgcgaagaatatacatttaagggagggggaaacttttaagggagtagtagaaaatcatttggtttttgaagagcccttaaaagagcaaattgatgggctctatcaaatctgttgtgatctcattctaaatggggccaacagtagctactttctaaaaattgtggaattttatggatccacgcttggtatgtagccaagcccaaaa

SEQ ID NO: 34428 - DNA, 330 bp, Gossypium hirsutum
  Clone ID: LIB3149-036-Q1-K1-C7
gcaagaagctggtatatgggtctgacgcttgtgataaaggaaaattgtggattccagttggtcttgggcttcagtggtttgttatcaaatggattcaaggagctataaaaagggatattgcaactggcaacgggcctatatgagagccacatgaatgtgaactgctggaatgcaagttgcatttggtctcgttaaagtttctatataatattttagttttcttctatttttttggtaaaaagtacaaagaatcctctgaagttggttttgctatttgctataagtatggttttgggaagcagagtaagtaatggttggacggatgggata

SEQ ID NO: 34429 - DNA, 378 bp, Gossypium hirsutum
  Clone ID: LIB3149-036-Q1-K1-C8
gtcaatactgtggtccgtatgtaaacttgcccctgatgaatgctcctcagttgctgtaggggccggtttggcagcaaagctgcttctcgtgattcagagcggttgcaatcctctgttgaagcaaaaatcttcggagctcttgaagttatgtagcctaaattatacagacaccatctttatttcaaagtgcaagctcacaaggacaatcctatgacaagttaaagggcctgccatgattggttcttgaaatcttccaagaatgaacgatcatatacttatgagatagggggtttgaggtatgaattagctctcctgtatatatttaagcacttcaattcctgcaatttgattcaactttacttaaagaacactcataat

SEQ ID NO: 34430 - DNA, 309 bp, Gossypium hirsutum
  Clone ID: LIB3149-036-Q1-K1-D10
gctttcatggccatggctgcttcaatcaagtaataggatggctagccaaccaggcatgagcggtgcgagacctccaacggtgaatatcaaaggacagcctgttaaccagaactctggttgctgctcttcttaaatgaaaatttagttttagttggtccatgtgatgatatttgtccttttgtgttatttgttgcatgtagttgggggaaaaaaaaactagtcttatttttatttcatttgatagtaaaagatggttctacatgatttttatattcttatctttttttgttatattaaatactcaattct

SEQ ID NO: 34431 - DNA, 393 bp, Gossypium hirsutum
  Clone ID: LIB3149-036-Q1-K1-D11
aggagagaaatggcgagcggagggaaagtgtcttttaaagtcactcttacctctgagcctgggctccctttcaaagtgtttagcgtgcctgaagcagccccttttacagccgtcttgaaattcgcagccgaggaattcaaagtccctcctcaaaccagtgctatcatcaccaatgatggcgtgggaatcaatcctcagcaaagtgcaggaaatgtgttcctcaaacatggatcggaacttcgcttgattccccgtgacagggtgggagccttttgaaataacaaaaacttcatttgttatctctgagtgagaagactggttatgactttgtttggttatggatcccttgttttggtatgtatgtttaaacctttacttgatgtagaacatgac

SEQ ID NO: 34432 - DNA, 382 bp, Gossypium hirsutum
  Clone ID: LIB3149-036-Q1-K1-D12
cacccacatcacgcaaaggttacccctaagttttgcaagcagtttgctcgtgtcggagacgtcataaacaaagctctcctagagtacaaagaagaagtaacaaatggttcgttccctggtccttcacacaccccatacaaaatgaatcccaaagacgtgaatggattctcgaaggagttgcagagattgggtttagatgatgcagcatcggcggcaaacgaagcagcagttgagcccgagaagatgaacatggtgaacaccggaagtaactaaattaaggccagatttcttcaccttttttttttacttcaatcaaattcatttaagaagcaaataatgccattctttttcggtattgcaaatttttggttaaaagcaattg

SEQ ID NO: 34433 - DNA, 382 bp, Gossypium hirsutum
  Clone ID: LIB3149-036-Q1-K1-D3
ctcgacataaaacaatgatcagctcatcttggggtgctcctgcagccttcaccaaaggttgcaaccttcagcatgtagcagatggtctatacggtagacatttgtttgtgtacagttggcctgatggcgaattgaagcaaacaatggatcttggaaacactggtctcgtacccttagagataagattcctacatgatccctccaaagatacagggtatgtggggtgtgccttgtcaagtaacatggtccggtttttcaaaacccaagatggttcatggaatcacgaggtggcaatctcagtgcaaccattgaaggtacaaaactggattcttcctgaaatgcctgggctaataacagactttctaatctctcttgatgatcg

SEQ ID NO: 34434 - DNA, 380 bp, Gossypium hirsutum
  unsure (1)..(380): unsure at all n locations; Clone ID: LIB3149-036-Q1-K1-D4
cagagactgagacaaagaatcccataccaacagctgcatcctgagccaatggcgtcaacagttctaaggcgagcaacctcatccgttatcaagtcaagtcttctaacggaagcgtcaaggagaagctatgcctcggttgctgtggggactgacattctgtctgccgcatcccaagttagtctccagaaagctcgaagctgggatgaaggcgttacctccaatttctccactacttctgtcaatgacatcttcaagggcaagaaagttgtcatctttggactacctggagcatacacaggtgtttgttcacaacagcatgtgcctagttacaagaagaacatcgataagttcaaggctaaaagaatngattcagtcatttg

SEQ ID NO: 34435 - DNA, 399 bp, Gossypium hirsutum
  Clone ID: LIB3149-036-Q1-K1-D6
ggaaaatgtgaatcccaagcaaatctacactaatgcatcctgtgatggtaacggtgattgaggggctaatcttgaaacatttgcggagacaaaaactggagaggcaaaatttggatccaacatttcacatttaggccattattctgacgtagcagagaaatccatggaaagatttgtttcagtaatatcatcatttagattttcatcacccgggtctcgtgctagtggtcttcgagcccctttgaaagatgctcggaacacatgtaacaacaggtcatctgctgctgtggattttagccagtttgcttatgttccaaaaaacaagaatgccaaattagcttcgcctagattttgagttctggtcatatttttagcagaagtaccaaactttgcaatggc

SEQ ID NO: 34436 - DNA, 314 bp, Gossypium hirsutum
  Clone ID: LIB3149-036-Q1-K1-D7
gtttgttctttaaactgttatatccctggtattggccgtcttcatgttggaactttatagggtcgtgcatgaaggctgtgttctattccctgttgagggtgatccattccaggtgggggaagcttagagaggctaaaacggcttaaacccatcctttcgtcctctccgtttcaataaatttaggtttgtatgatttcatgtattaggtatattgttttccttttttcttgtatgtgtttgccttttagatagagtcctgatcctcgtgtaaactcaaaaagggttttttggtaatgagaatgtgttttgagatt

SEQ ID NO: 34437 - DNA, 384 bp, Gossypium hirsutum
  unsure (1)..(384): unsure at all n locations; Clone ID: LIB3149-036-Q1-K1-D8
gaacctgttgggcaagtggaaagaatccgtatattcaggtggtcagtttattcccgttgggggggtagcttactatgttactgcccctgcaagcttggcagatatggcagcaaatcccttccatgctctgttttatctagtgttcatgctttctgcctgtgccttgttttcgaaaacttggattgaagtttccggttcttcagccagggatgttgctaagcagctcaaggaacaacaaatggtgatgccaggacatagagattcaaatctacaaaaagaactaaaccgttacataccgaccgcagctgcatttggcggaatgtgcatcggtgcattaactgtcttagccgatttcatgggagcaatcngttcagttaccggaat

SEQ ID NO: 34438 - DNA, 401 bp, Gossypium hirsutum
  Clone ID: LIB3149-036-Q1-K1-D9
gttgattccggtaccaagttatctaaaatacaatcaaggatatcaaaattgaaagaaaagcgtaagacacgattttggaccagagaaggagttctatgcattctatggtcattgttttgagaccaaccagaataagtacgtttacaaagtgtgtccatacaaacaagcttctcaagaggagggctacacatcaaccagtttggggaattgggaccaattcgaggaatcctacaggatgatggtattttctaatggagaaaattgctggaatggccctgatagaagtatgaaagtgaagttgagatgtggtttgaagaatgagatcactgatgttgacgaacccatccgatgcgaatacgtagcgatactgtccaccccagctgtttgtctggaagataagc

SEQ ID NO: 34439 - DNA, 344 bp, Gossypium hirsutum
  Clone ID: LIB3149-036-Q1-K1-E10
acgcattaaggaagtggaggtcaatggaatcactgtgaagatcaaatattgtgacactggcatgctttataggcctcctcgctgctcacactgttcaatctgcaataactgtgtagaacgatttgatcaccactgtccttgggttgggcaatgtatcggactgcgaaattatcgattcttcttcatgtttgtcttctcaacaacccttctgtgtatatatgtttttgcattctgttgggtctacattaaaaggatcatggcatcagaggagacaacaatttggagagcaatgattaaaaccccagcttccattgttctaatagtttacactttcatcgcaatgt

SEQ ID NO: 34440 - DNA, 286 bp, Gossypium hirsutum
  Clone ID: LIB3149-036-Q1-K1-E11
gtattatctgaatgatcctcgagattctgtgtctgttcggccattggacttgcaccacagcatggtttttcgtctcggcctctccaaggaaccagtctgtcctagttttatttgagattttcattgactacttcagttttgtcccatgaaggaagtcactgcttatcttttcattttttccttattgaatttatccgttatcttccttttttttcattctcattccacatttaatttattttttttatttgtgcgtaccctctaaaattatattttccactttgtc

SEQ ID NO: 34441 - DNA, 371 bp, Gossypium hirsutum
  Clone ID: LIB3149-036-Q1-K1-E12
atctgagagaaatttttgtttgttattatgttgaattgatgaaatgtggaactgaggtggagtacttttctcatttggtagtttcatactgatattattttgctgctgggttcacttgaagacaaatctattgaaaggttattgtttagtgatggttttattaaaaaaaaaaaaaaaaaaaaaaaaaaaaaaaaaaaaaaaaaaaaaaaaaaaaaaaaaatttttaaaaataaaaaaaaaataaaattaaaaaaatataaattaataataatataattaaaaaaatttataataatataataaattaaggggggccccttttaaaaaatcaaaattttttttcccgtttttgaaacgtatttttttttttt

SEQ ID NO: 34442 - DNA, 391 bp, Gossypium hirsutum
  Clone ID: LIB3149-036-Q1-K1-E2
aaagaaaaaaaagcttcatccaccactctatacaatggaaaagattcagcacaaccgtgtggaagctaaaggactaaagcttcatgttgcccagattggaactggtccccaagtggtggcattcttgcatgggttcccggaaatttggtattcatggaggcaccagatggttgcggtggctaatgctggctatcgagctatttccattgattttaggggctatggactctcagagcatccatcagaaccagagaaggcaacctttaatgattttgttgatgatgtcgttgccgttctcgactctttgggcatcactaaggcgcatcttgttgccaaggattttggggcctttgtagcagccatggtgggcatacttcaccctgatagagtg

SEQ ID NO: 34443 - DNA, 397 bp, Gossypium hirsutum
  Clone ID: LIB3149-036-Q1-K1-E3
gcatacactactagtacccactactagcaatggcttcctcaatgatctcatcggctgccagggccactgcctctccggcacaggctaacatggtcgctcctttcaccggtctcaagtctgcctctgctttcccagtcaccaggaaggccaacaacgacattacttctctcgcaagcaatggcggtagagtgcaatgcatgcaggtgtggcctcctactgggaagaagaagtttgagactctctcatacctccccgatcttacacccgtgcagttggctaaggaagtagattaccttcttcgctcaaaatgggttccttgcttggaattcgaattggaggagggattcgtgcaccgtaagtactcgagcttacccacgtactacgatggacgctactg

SEQ ID NO: 34444 - DNA, 403 bp, Gossypium hirsutum
  Clone ID: LIB3149-036-Q1-K1-E4
gtttcatcgtgggggccaacattttggcaggaggtgccttcgatggagcctcaatgaaccgagctgtttcattcggaccagccttggttagctggacatgggacaaccactggatctactgggtcggaccccttatcggtggtgggctcgctggtctcatctacgagttcatcttcatcagcaacacccacgagcagctcccaaccaccgattattaagcctaatcagggtttaattgatttgtctgtcactttgaaaccggattttctccgatcacatttgagtctcctatctctttccttgtattttgtgtttaatttgtggccgtcgatcttgtttacttttttggtttttttcattcccatcctctatcatgatcatcatgaatggcagatgtttacaa

SEQ ID NO: 34445 - DNA, 381 bp, Gossypium hirsutum
  Clone ID: LIB3149-036-Q1-K1-E6
atggcaaccatttcagctacctcatcaatctccattgcagcttctctttcatacaagccaggatggctcaagctcaccaccccaattgccattgggttgccaacaatggcgaagaaagtgaaagtgatgtgttctatgaaggaggaggaggaaaagaatagctctagcgttggcatgagtgctgcatcgctgttagctgcagcagtcatgtcaagctcaccggctatggctctggtggatgagagaatgtccaccgaaggaactggacttccctttgggttgagcaacaaccttcttgggtggatcttgtttggtttattcggcgtgatatgggctctttactttgtttacacttcatccctcgaagaagatgaggagtct

SEQ ID NO: 34446 - DNA, 392 bp, Gossypium hirsutum
  Clone ID: LIB3149-036-Q1-K1-E9
ctgcatcagaggttttcccgatctttgctttcgactaattgaagaccttggctctgctaatcgccgcttgagatcttcaaacaggaagaaaatggggttcattatggaatttgcagagaatctggtgttgaggttaatggaggacccaaaagagagggatagaaaattcagagaacacgtttactctatgaaggatcgatgcgcaaaaaccaaggagatgtggagttatccactgcggccttatgggttttggacatttgagcgccacaatgctcagctccgttgggatcctcagattagccaagtccccggccgcagggatccttatgatgaccttcttcaagacagttatgcgtcttcctccaaacgaaactgaggaatcagaagccatt

SEQ ID NO: 34447 - DNA, 260 bp, Gossypium hirsutum
  Clone ID: LIB3149-036-Q1-K1-F10
aacttagattacccaaacttacggtctctttcatacaacgtcatacattttctatagtgcggcctaatttcaattaactggccaatcttttacatcttacatactgttataaccaataactaatcccaactaaatcacttatacataaatacaactttcgacatctgtcatgataactaaaatgcccagaccgatcatcctttccatctaccacgcagcctaaatgacaaatgctacgcacactatatcccatcattttt

SEQ ID NO: 34448 - DNA, 398 bp, Gossypium hirsutum
  unsure (1)..(398): unsure at all n locations; Clone ID: LIB3149-036-Q1-K1-F11
gcgtgctatccancacatgtattataaacttatgtgcagctggcacgcactttttcgtgcggcctgatgtcgctggaatgatacgaagtgccatatctgagttcagagaccagaattcatacgagaagccaacttgattcttgaactcaatatcctttctttaatggagctcatatatgaaaaaccaataaagaacaacaaagaaattctaatgtatgaatatgtgcaatttctggcttcctattttcattttgacttcagaccctgatataattgagggctatatttggatttggattttgtatttatttatatgtttggctatcattccaaagacttgttcgagtatatcattatccttttgctgaaatattaggtgattgttaacaggagttatt

SEQ ID NO: 34449 - DNA, 300 bp, Gossypium hirsutum
  Clone ID: LIB3149-036-Q1-K1-F2
gaaaacccggccgacccacgcgtcctaaaaaaaaaaaaaaaaaataaaaaatttttttataaaaaaaaaaaaaaaaaaaaaaaaggaagaataatttaaaaaaaaaccaaaacccaaaaaaaaaaaaaaagccccccccccctaaaaatacccaaccttccccccccttccttcccccaccatacccccccttttcccccccctaaattcatttcacttcccctcctttaacaacaattatctctcgaaaacccctccctttccccactttaaaccccttcaattacccccccttttccc

SEQ ID NO: 34450 - DNA, 399 bp, Gossypium hirsutum
  Clone ID: LIB3149-036-Q1-K1-F3
ggcaattgatcgagggatccggcagttactttgctggtgtagacgcgtgcactgatgacggggctgatggagcattggtgatggtcataacgtaatttggggccagaccaatggacgaccgatgatcggggcgttgatgagcattgaagccccttgggacaactcattaaacagtggcctcgatttgggggttaccagacactccccgaagctttcagaaatgtttgcggcgccacagcattcaggaaaccctagggtttccctgtttctcttaagtctgttgggccttttgggctgttttgttttgggtcaaggtctgtaatgtaatggattaggtctgacttaggctagcatggattaatgagtctgatggtcctgctggtgtaacgggtcttattt

SEQ ID NO: 34451 - DNA, 331 bp, Gossypium hirsutum
  Clone ID: LIB3149-036-Q1-K1-F4
cggattgtaaccaacaatcctacccgatttttgacccgtcggagtcgtcgactcacagtgcggggacttgctactcaaggcagtgttctcttctacgacaatcggtttgccgtggcggcaaatgtctttaccagatgtcctacggggatggatcttacacaatcagggattacatgactgaaacagtgtcatttgggaactccagtgatatcaaaggcgctgctatgggttgtggccataccaactaatgcttatttgttgcaactaccgctttggttggactcgatggaggctccttgtctctaacatctcacattatagcgacgtcatt

SEQ ID NO: 34452 - DNA, 389 bp, Gossypium hirsutum
  Clone ID: LIB3149-036-Q1-K1-F5
aaagagacaaggaatcttggggggattgatctcagagaaggtaataaagaaaatgggtgggaaaagcagcatggccatggctgcagtttttgtagttttggcttcaaccctaaccacgtatgcttctacaacttacactgtaggagactccactggttggcaagtccctaccagtaattctaatttatacgatgactgggctgacaataaaaccttcgttgtcggggatgatctcttgttcaactttattactggggaacatgatgttgcagaggtgaccgaacctggttacgacgcctgtaccaacaccgacaccatctcaaccgacaacaaaggacccgtaaaaattacgcttaaaaagacttgtgaccactacttcatttgcactt

SEQ ID NO: 34453 - DNA, 223 bp, Gossypium hirsutum
  Clone ID: LIB3149-036-Q1-K1-F6
catgcaattagtttcatcaccatttatcgttcctctttgattccaatgtcatatttgggggttttgtatttattttgcttcacactcatgtctaatctagttggattgataatattcacgtcacaattcgatatgatcttattttcaaaacacatataaccagctttctttaatagcgatgatgcccacaccaatctcccttcccaacaattacacaatctaa

SEQ ID NO: 34454 - DNA, 379 bp, Gossypium hirsutum
  Clone ID: LIB3149-036-Q1-K1-F7
acaacaacaacaacagcaaccgactcggtgctctgtttgcaagaaacgggtcgggttgaccggaggcaagtgcaagtgcgtgattacgttttgcgggtcacacaggtacccggaaaatcatggatgcacgttcgatttcaagaagattgggcgagagaagattgcacgtgccaatcccgtggtcaaagcagagaagatcgtgaggatttgagaagaagaagatggaaagccgattgaccctttgacttttaatgagtaaaagaaaaaaagagaaatagaaatgtcaaactcgttaagattgcgacacgtgtttcagtgttggtccccatacctttaaaaattgggcttggataaaaatattttatcttataaaataagt

SEQ ID NO: 34455 - DNA, 427 bp, Gossypium hirsutum
  Clone ID: LIB3149-036-Q1-K1-F8
tcccggtcgaccacgcgtccgccctcacctgtgaagtaaaaaaacccggccctgattggcaagaggtgactgaagtggttggtgcggtgactgatgaagtcaaagatgctttggtgaaaaacattaggagaagaatgaccccacaacctttgaagattcgggctgatattgaaatgaaatgtttccagtttgatggcgttcttcacatcaaggaggccatgcgcaaagctgaggctgctgggaatgatgattgtcctgttaaaatcaagcttgttgctcctccactttatgttcttaccactcaaactcttgacaaggagcaaggtataactatcctcagtaaagcaattgcagcttgcactgaagcaatagagcatcacaagggtaaacttgttgtcaaggagcagcctatagccgtgagcgaacg

SEQ ID NO: 34456 - DNA, 397 bp, Gossypium hirsutum
  Clone ID: LIB3149-036-Q1-K1-F9
cggcaaccggtggagtcaagaagccgcatatgttctggccaggaactgtggcgttacgtgagatggggaagtatcagaagagcacggaacttttgatcaggaaactcccatttcagaggttggtaagagaaatcgcccaggatttcaaaacagatctgaggttccaaagcagcgctgttgctgctctccaggaggccgccgaagcttacttggttggactttttgaagacaccaatctttgtgctattcacgctaaaagggttactataatgcctaaggacatccaacttgctcgtcgcattaggggtgagagagcttagagttatttaagatttattgtactaattagatttccatgaatttgttgtaggatttaatatccaaaacgtggagatgt

SEQ ID NO: 34457 - DNA, 259 bp, Gossypium hirsutum
  Clone ID: LIB3149-036-Q1-K1-G1
ggccgatcttcctgggattgttaaggttgatccggttgctgttcaggttcctcaagtcgggttcggacgtggtggtggacccggaaggaggttttaagtggtgggttttccatggatatgatgggttcttaattttaagtttgatatgttttcttttgggattttgtgtttttgttggaaccattttagttatgtctaatgctactgaaaatttattaagtttgataagaacttcctttcgaaggtttttggaatgggt

SEQ ID NO: 34458 - DNA, 398 bp, Gossypium hirsutum
  Clone ID: LIB3149-036-Q1-K1-G11
gtagtttacctagcagtagcaatgacggtttagatagactaaagggctttgacaaattcggtcacgagacatctcaaagtcaaactgcaatatcagacttggaaaaatatttagatgagcctgtctttcctcgtaactgcaatttcaatatattgaattggtggagagttcacactccaaggtatccaatcttgtcaatgatggcacgagatgttctcggaactcctatgtcaaccgtctcacaagagtcagcattccacgctggaggtagggtgctcgatagttgtagatgtccactgactcccgagactcgacaggctttgatatgcacacaagattggttacggatacaatcagatgtaccccgtccatcttcaagtcattatgctctacccctt

SEQ ID NO: 34459 - DNA, 402 bp, Gossypium hirsutum
  Clone ID: LIB3149-036-Q1-K1-G2
cacttcttctcttatttgaactcaaagtccctgctaatattagaatcatgggtgtggtcagttatgactatgagaatacctccccagtcgcccctgccaggcttttcaaggcctttactgttgaagctccgaaagtttggcccacggctgcacctaatgcagtaaagagccttgaggttgaagctaatcctagctctggaagtatcgtaaaaatcaactttgttgaaggccttccattccaatatatgaagcaccagatcggaggacatgatgaaagtaatttttcatacagttacgatttaatcgaaggtgggcctttgggggataagcttgaaaaaattagctatgagaacaagtttgaggcaactgcaagtggaaggagtatttgcaagagctcaatga

SEQ ID NO: 34460 - DNA, 402 bp, Gossypium hirsutum
  Clone ID: LIB3149-036-Q1-K1-G3
agaaaacgaaaaaaaagaagaagaaatacattcgttttctttttgaagtcgggtttgagttgttggggtgaaaaaaatgttgggagtatttagcagtgcgatagtgtctccgccggacgagctggtggcggccggttgccgaactccatcacctaagataacggcggacgctctggtgaaacggttccttgagacgaactcctccggcgtgtccatgcacatcggagaccatgtccaattcgcttattctcaccataaagagtctcctttacagcccaggtaaaaaaaaatcatatatggtattggctgttggatgatctcaatcgttgaaaattaattatgaatcaaacttcagttgatcatcgagtgctttcgaacgaacctaagaattactgtaatttg

SEQ ID NO: 34461 - DNA, 408 bp, Gossypium hirsutum
  unsure (1)..(408): unsure at all n locations; Clone ID: LIB3149-036-Q1-K1-G4
caacactcaaaatatttgaagtgttcaatttttagttagtttttttttttcaattgagactgcttaggatgtaaaaagaaaacatgtttggcattatttttttgtttagtataaaatatggtttcataaaattttttatttggtaaaatataaaataatgatatgttttcataaaaaaaaaaaaaaaaaaaaaaaaaaaaannnnaaaaaaaaaaaaaaaaaaaaaaaaaaaaaaaaaaaaaaaaaaaaaaaaaaaaaaaaaaaaaaaaaaaaaaaatattaaaaataatatataaccaattaataaaaaaaaatttttttttttggggggggcgctttaaaaaataaaaaatttttacccccggtgtggaggattatttttttttttttttgggaccaaaaaattta

SEQ ID NO: 34462 - DNA, 370 bp, Gossypium hirsutum
  Clone ID: LIB3149-036-Q1-K1-G5
gcccaataaagggattcctaccgtctcctttcaccattctcaactggtcctttgtgagaagtgatcaaccgagattcgaaacttgctaccagattgccttggccatcaaggatgaagtggaggatcttgagaaggctggtatcaatgttatccaaatcgatgaggctgctttgagagaagggttgcctcttaggaagtccgagcatgccttctaccaaaagtgggctgtccactccttcaaaatcaccaactgtggtgtccaagacattacccagatccacacccacatgtgctactccaacttcaatgatatcatccactcgatcatcgacattgatgccgatgtcataaccattgaaaactcacgttc

SEQ ID NO: 34463 - DNA, 397 bp, Gossypium hirsutum
  Clone ID: LIB3149-036-Q1-K1-G7
caaagctcaaagctttctcagctttttatatattcctacttattttctataaaaatcaaagtggggtctttccttactcaaagtgtcctcaaacttttccttgtcatctctttgtttcaaatctctttggccgttaggaagctgagtgaagtggtgcaagaccagcctcagctcttgacataccacaatggtccccttctttctggcaaaattactatcaatttgatttggtatggcaagttcaagccttccgagagggctattgtctctgattttgtcacctccctttcctccacggctccatcgcaaagcaaccggccttcggttgcccaatggtggaaaaccactgagaaatactaccacctcacctccaagaaatcttccctttccctgtctt

SEQ ID NO: 34464 - DNA, 357 bp, Gossypium hirsutum
  Clone ID: LIB3149-036-Q1-K1-G8
atttcccgggctgatcaccacctcctcctcaccactactaagcaacggctttgacctcaccatggggaacaaaagagtgtgatccaggggagcgacagataaagagagctgtgagaggtcgcctattctccgcgtttcaagagaagaaaaagaaaacaagaatgatgtagacaagttgtagggtcaataaaaaacaaagggttcatcgttttcacatttgtattattcagtggttctcgtatttcttgctgctttagtatacaatgtttcctaaattttatgtgtttttcttttccgacctttttgcaaatgcaagggtgatgggtttgatctttaataaaataaaggtttttactt

SEQ ID NO: 34465 - DNA, 328 bp, Gossypium hirsutum
  Clone ID: LIB3149-036-Q1-K1-H1
tcgatcgaagcctacccgtggaaggaagctcattgctagcatattgaagaccattctttcttcagagacaatggacatccccgacggggttgatattaaagcgaatgccaatatgatcgatgttgaaggtgccagaggtaagcttatccgcaacttcaagcacctcaacctggattttaatgttatcaatgacgaagagagcggcaaactcaatctcaagatcgacgctcgctttggctctacaaaaactaccgccggcatgcgtactgctctcagccacaccgataatcttatcagcggcgtaaccaacggctaccgttacaagatg

SEQ ID NO: 34466 - DNA, 380 bp, Gossypium hirsutum
  Clone ID: LIB3149-036-Q1-K1-H10
attaaaacccaacctggggaagtcgttaagcctgatcaattcaaagcaataaacgatgaaggaatggggatttatcagaggccatttatgagaagtaaactgtacattcagttcactgttgacttccctgactcgttgaccccggaccagtgcaaggcactagaggctgtgcttcctcccaaggcatcggttcagctgactgacatggagctggatgagtgcgaggaaacaaccctgcatgatgttaacattgaggaagtgatgcgtaggaaacagactcaagctcaacaagaagcttatgatgaagatgaggacatgcatggtggtgcgcagagagtacaatgcgctcagcaatgattaaaaaaagccgaatgttcgag

SEQ ID NO: 34467 - DNA, 304 bp, Gossypium hirsutum
  unsure (1)..(304): unsure at all n locations; Clone ID: LIB3149-036-Q1-K1-H11
cccaggcgtacgantaaaacccaccctnnttaanttctnnatttttttttctattcaaaccaataaactatgaagaaaagcctttttatcaaaagccactcacccacacataaacctcacattcagttcacttctaacttccctaactctatcaccctctaccattccatcacactatatcctgtacttcctcccaatacatcttttcaacttactaacatatatcttaattaataccattaaacatcccctcataatactaacacatcaaaatttattcctaataaacaaacttaatctcaac

SEQ ID NO: 34468 - DNA, 227 bp, Gossypium hirsutum
  Clone ID: LIB3149-036-Q1-K1-H12
cccacgcgtccgcaacattcagttctaagtttctgggtactcaaaactcactatcctgtgggagagagcttcaaatattggaccctctaatggttcaagaactcaatgctggttcaagtttggcaagaatggtgttgatgctgaaggtgctggcatttatggtagtcaaaaaagagatgattttgacaaagatgatgttgaacagtacttcaactacattgggatgc

SEQ ID NO: 34469 - DNA, 377 bp, Gossypium hirsutum
  Clone ID: LIB3149-036-Q1-K1-H2
attagaaccaagagatcatttgaagccttcttccttaaagcttatgcattggccgactctagcatggatttttcatgttcttcaacagttatctcattgcttgaaaatgccttgaaatgcccctcggataatcttcggaaaggtcaagctctgaacaatcttggaagtgtgtacgttgattgtggaaaattggacttagcagccgattgctacattaatgcccttaaaatacgacacaccagagcccatcaaggccttgcacgagtacattttctcagaaacaacaaggctgcagcatatgaggaaatgactaaactgattgaaaaggctaaaaacaatgcatctgcctacgaaaagaggtccgagtactgtgaccg

SEQ ID NO: 34470 - DNA, 319 bp, Gossypium hirsutum
  Clone ID: LIB3149-036-Q1-K1-H3
ggcatatccaaggtcggacatcatcctttatatcgaagatgatccagaggaaattggtctgaaatcatttgaataactgtgtgttggaagtatttgttaggcgtatcatatgcccctctttgaggccaattgttttccttttcttttttggttatttcccctctaaatattttgtatttttgggaatatatgaattaccttcaattactttgaaaggcacgaaatttggtagtgtatcttttatgagcctaatgaaaatgtcagtactggctgtggctgtggctgtggctgtggactgactatattagcttctttctct

SEQ ID NO: 34471 - DNA, 354 bp, Gossypium hirsutum
  Clone ID: LIB3149-036-Q1-K1-H4
aggcactgctactgttagtgttaatcctccttcaaatattccctctacttgcaggggtccgtccagtggtacaagcacaacaccatccacagggactccgacgacaccgaccacagggacgcctacctcaacaccaaccacagggactcctaccacaccaacaacggggacaccgacaacagggactcctaccacaccaacaacggggacaccgacaacagggacaagcaccgggattccttccacaacacccaccacggggacaaccaccgggtctccgacggtgtttggtggtggcaccacctcacttggtccgtcgggaacaaccaccggcatcaatgatccaagtcatgc

SEQ ID NO: 34472 - DNA, 124 bp, Gossypium hirsutum
  Clone ID: LIB3149-036-Q1-K1-H5
caacacgaaagcttgcgatagagatttaattttgatccacagctaactgaagtggcgcagggttctttcgattcaacgctgcattcattaaaactgatcattattcacactcctatcttccctc

SEQ ID NO: 34473 - DNA, 307 bp, Gossypium hirsutum
  Clone ID: LIB3149-036-Q1-K1-H6
ggtgttccactataggttggcatattcattccctcactgctgcttccccttggcgcgccggatctgatggcacggctgatttcccatcataggatactctccatcagtcatcctaatggcagggcaggctaatagtaaataaaatagctacaactaacacctcgcgtggaatgtggggtgcatgtggttactttagggaagatttttaactctattacagcattaatccatgttatctgcactgagagtctacttcacgagaaatctggtactaagattttgcaatatgtttcacctattttcttgc

SEQ ID NO: 34474 - DNA, 390 bp, Gossypium hirsutum
  Clone ID: LIB3149-036-Q1-K1-H7
tacttacaatgatatcatgtgtctttacacatattttggacagcacgagaaagtacctgatgtagtgagggagatgaaagagaacaacgtatccccggacaacttcagttacagaatctgcatcaattctctaggtgtgaggtctgatcttgagggaattgaagaaattttaacagaaatggaggatcaacctcatatcaagatggattggaacacgtatgctgttgttgccagtttctacataaaagcaggccttactgaaaaagccattgatgcactaaaaaaatccgaacagaagctagataataaagatggaacgggctacaatcatctaatatcgctctatacgagtttgggaaataaagccgaggtcttgagattatggggtct

SEQ ID NO: 34475 - DNA, 395 bp, Gossypium hirsutum
  Clone ID: LIB3149-036-Q1-K1-H8
gctgatttcaggcctgaacccgatttccttagactcagcatcccgtttctggtcaacaacggtgggattgctctggttcaagcccggtggagatttgtgaatgctgacgaatgtttgttaacaagaatgcaagagatgtcattggattaccatttcacagtggaacaggaagttggatcagcaacacatgctttctttggttttaatgggacggctggtatatggagaattgcggccattaatgaggcaggtgggtggaaggatcggaccaccgtggaggacatggacctggcggtccgagcgagtctccggggatggaaattcgtttacctgggtgaccttcaggtgaaaagtgaacttcctagtactttcaaagcatttcgattccagcagca

SEQ ID NO: 34476 - DNA, 405 bp, Gossypium hirsutum
  Clone ID: LIB3149-036-Q1-K1-H9
caatttctctcgttgatctttgttagagattagctttttaatttttcattatgggaaagatgaagagcggaatcaatggatttggaaggatcgggcgtttggttgcgagagttgctctccaaagcgatgatattgagctcgttgctgttaacgatcctttcatcaccactgaatacatgacgtacatgtttaagtacgacagtgttcacggtcaatggaagcatcatgagcttaaggtgaaggactcaaagacccttctctttggtgaaaagcctgtcacagttttcggtatcagaaaccctgaggaaatcccatgggctgaggctggagctgagtatgttgttgagtctactggtgtttttactgacaaggacaaggctgctgctcacttgaagggtggcgcga

SEQ ID NO: 34477 - DNA, 425 bp, Gossypium hirsutum
  Clone ID: LIB3149-037-Q1-K1-A11
gggttataaggccaaacaaggttatgtggtttaccgtgtccgtgttaggaggggtggtcggaagaggcctgttcctaagggtatcgtgtatggtaagcccacaaaccagggtgtcacccaattgaagttccagcgcagcaagcggtctgttgctgaggagcgtgctggccgaaagttgggaggtctcagagttgttaactcgtactggatcaatgaggactctacttacaagtactttgaggttatcctggtggatgttgcacacaatgctatccgcaatgacccaagaattaactggatctgcaatccggttcacaagcacagggaacttcgaggacttacatctgctggtaagaaaaacaggggtctccatggaaagggtcatttgcaccacaagaaccgtccttctcgcagggcaacctgga

SEQ ID NO: 34478 - DNA, 351 bp, Gossypium hirsutum
  unsure (1)..(351): unsure at all n locations; Clone ID: LIB3149-037-Q1-K1-A12
ctgagagtgaactaaagcctgnaattgaccttctaggtcccgttgatgaaatattctttgagatctatgaccgatatgaaccagtcaacgaaccttctcttgacaattggttcatatcaacaagttatgatgctacaacacattttgaatcaactgtcagtgatgtacttaacaatgataccatgataactggaaaaggtcttggccctaagagggatttgaaggctgctaaggcttcggaaaaataattaccctgaaaccttgtatttggcaaaggtttggcctggttaaaccttctaacaacgttgaattgttcctgtgggatttatgtctataccaccatgttttttt

SEQ ID NO: 34479 - DNA, 205 bp, Gossypium hirsutum
  Clone ID: LIB3149-037-Q1-K1-A2
cctagatgtactggaccagatgatgaagttttccatcggtgttactcctgcattgcaggagttggtgcgtggagcttttgggaaagttgggaagactgaagaacttgatagagttttaaatgaaaataggtggagattccctgggcgtcaacctcgaacttttggacagtcaccacggtcaccctccggacatgctgaaatgggt

SEQ ID NO: 34480 - DNA, 404 bp, Gossypium hirsutum
  Clone ID: LIB3149-037-Q1-K1-A3
acctggctggcctacggaccactttatttataaaggagagctccttaagctcaacctgggggacggttagagggctacctctccatcaaaaagcaagaatgtatggggcaaagtgaccatgcaaagtaagcctagttaaggcgactgtgctgggactgttactgcttactatatagtatcggacggtccaaattacaacggagccaacatgggagttcctagagattaccacaggggaaccttacctgattcagaccaaggagcacgtaaatggtgtcagcgacagagagcaaaggatgaaccttcgaggtgagcctaccacagactctgactcttattccatcctctggaaccagagccaagttgtgtttactagagtacgagaccccatttgattgcacacc

SEQ ID NO: 34481 - DNA, 269 bp, Gossypium hirsutum
  unsure (1)..(269): unsure at all n locations; Clone ID: LIB3149-037-Q1-K1-A5
cggaatnncccgggtccgacgccacgcagtccggaatggttggagagttctaggagaagatttttcatgtgttatggataatagaggatcccaaatacggagcaagattgggaatagcactgtccatggaactaggtgtagccaatttggcatgagatttaaagctaatctaaactggtcagaagcttatctgttcagggattcaaagctagtaataggctaggattcagatatagctcattaatagtggttgccattcacaatttggc

SEQ ID NO: 34482 - DNA, 226 bp, Gossypium hirsutum
  Clone ID: LIB3149-037-Q1-K1-A6
gcccatcggaagagcacatcaagggtgatctaagatatatgttagattctttgctcgaccctgaaaccatgtcggcatacaggcctcatgcaacaagggaacgcgtgatggatttggctactaaacttcttgattgcaagcaatttttgaaagactacaaaccaagtgctcacaatccctgcgctatttgtgtttggggtcattaaaagctttttaaccctactaa

SEQ ID NO: 34483 - DNA, 401 bp, Gossypium hirsutum
  Clone ID: LIB3149-037-Q1-K1-A7
ccctgatctcccactcaactcggatcacgactccctcgactcgtttagcgttttgggtggaataggtatacccgcctcgacgtcttaactcagtaactcgaattaaacgatggagccgatggatatcgtagggaagtcgaaagaggacgcttcgcttcccaaagcaactatgaccaaaattataaaggaaatgttaccgccagatgtacgcgttgcaagagatactcaagatcttttgattgagtgctgtgtagagtttatcaatctcatttcatcagaatccaatgaagtttgtaacagagaggagaagcggactatagcacccgagcatgtactcaaggctctagaggttcttgggtttggagaatacattgaggaggtctacgctgcttatgagcaac

SEQ ID NO: 34484 - DNA, 212 bp, Gossypium hirsutum
  unsure (1)..(212): unsure at all n locations; Clone ID: LIB3149-037-Q1-K1-A8
ctcgttctacattataacaggcttgatggaactctcccttattttggtggaaacattccctcattaagctgtaacattgctcatatacatgcattgcccctaaacttggagttgcaaaacatgngtctatttacttaagaaattgttcatattatgcacttatcgttcttgacgggtgactcatcactcttgtaaaaaattctattgtttct

SEQ ID NO: 34485 - DNA, 409 bp, Gossypium hirsutum
  Clone ID: LIB3149-037-Q1-K1-B10
ctgcccttcatataaagctccgagctactgttggaaacatgacgaagacccctggtcctggggctcagtcagcacttagagcccttgctcgttcaggcatgaaaattggtcgaatagaggatgttactcccattcccactgatagtacccgtagaaagggtggcagacgtggaagaaggctctgattctttgctttatatcaattactcactcagctactactgctgtggtgcttggagttttctttgttaaacagttttctttatattcaagtgtgttttgctcggttctcttgctgcacatttagttttttggaatggattttagatcttttatctagacaggaaaaagttgtggaactatttaatgcagcttcaaagttaagcttttatattattgaggtttttat

SEQ ID NO: 34486 - DNA, 417 bp, Gossypium hirsutum
  Clone ID: LIB3149-037-Q1-K1-B11
ggttgggttaaatccctagacaaaacaaattagtttatcagtcctcactcagaaaattgggagattggaaaaagagaaacaaagaagagaaagaatggcttggatatggttggaagcagcacttcccctcggaatcatagctggaatgctctgcgttatgggcaatgctcagtatttcatccacaaagcttatcacggccggcccaagcacatcgggaacgatatgtgggacgtcgccatggaaagaagggataagaagctcttcgagaacctctcttcctccgattgatccctttttagttttcttctggaaacttggtcgatgttgtgagagaagaaataaaaagcgctctatgatattctgtaatgctgaagaagactaaagagcagatgaactcgagtattttctttttcatg

SEQ ID NO: 34487 - DNA, 422 bp, Gossypium hirsutum
  Clone ID: LIB3149-037-Q1-K1-B12
gagaaggttcctcggcaccatgctcattcattatttcatcagaagggttgcctgtgattctgccatacattaccaaacaaatactgtatgcttccccagcagatttcaagcatcttttgcaatataaatcaatcaaatttgctgactttgttgatgctgatttcggtcagaaggcagcagacctgatgttaggctgctgtgtgattgttttgagagaagaccatatccaagcagatgcattggcaatagccattggctgctggaaaggccggtcgagtttgagtgtgatggttacagcaatggactgccaagaactgctggaaaggctttcagcacgcatggagactgaaaagaatggaactttggcacccgaaagccttggcgtgctagataagaaacaagatatgagtggtgaaaatgga

SEQ ID NO: 34488 - DNA, 296 bp, Gossypium hirsutum
  Clone ID: LIB3149-037-Q1-K1-B2
acgatctaaaaggagataaatcatcatcttttgttttttattttgaacccagacctaacattgggagttacgatatctattatgcttctcttaaaagacaaaaaaaatcattcactaaagatttctaaccacaaccaaatatcttctctttacaaaactaatttaaaacctaacccaactaccatttagattttacccacattctttcaattaatttctttaatcagatatatgtagtaaacttttatgttttataattttttaaaaaaaaaaaaaagtcttttttttaatttttt

SEQ ID NO: 34489 - DNA, 394 bp, Gossypium hirsutum
  Clone ID: LIB3149-037-Q1-K1-B3
gctccgtgttcacaagcgagttattgacctattcagctcccctgacgtggtgaagcagaggacatctatcaccattgaacccggtgttgaggtagaagtcaccattgcagattcttaaatgtgccttacttttgctttttggcctcacatggtttttagtttatttgaaagagacttttgattgatgtgaccttctttgcttggatcaatctcaagcttggatgaatgttgtagggtttctatagttggtgtttttcccataatggaattaaaattctaatctgttgggtggctttatagtttctttcctttttgtaacctaaagattatgttgcgatattttgattttatgcattatttggcattaaggaatgaaatgagttgctttatgttc

SEQ ID NO: 34490 - DNA, 397 bp, Gossypium hirsutum
  Clone ID: LIB3149-037-Q1-K1-B4
cttgtgcttggttacctcaacaatctggttattgtaatggcatttttgatacaggcaaatacagaagaggagctaccagagtatcttcttggaacatgccggctgaaccatcttgacgcatcaaaatctattacagtaaaagtatgaataattatttattctcaacctgatgtttactaggctacactaggctggttaagaagcttgggtgatgattgatgaaattgaagaataccaaaaatcatattattgcattatggcattgctgctgccgctgctgcttccacagatagaattgcattctttctttttcttttttttttttttaattatttttatcaaatggtcattatctacctaaccttttgtgctctgtacgtatcatcgtagtatttaa

SEQ ID NO: 34491 - DNA, 393 bp, Gossypium hirsutum
  Clone ID: LIB3149-037-Q1-K1-B5
cttttgcttaactaccttatcaattttactatttaactagcatgtttgatacagagaaagactttttataacctacccgactttcttcttaaaacacgccaactaaaccatctatacgcatcaaaatctattacaagaaaaaaaaaaataattattttttcttaaccaagaattttctaaattacactcagcttgtccagaagcaaatccaacgattaaaaaaattgaagaattcctaaaataatattatttcctcattacataactaataacactactacttccacagatataataacattctttctttttctcactataaacaataaattatgcacataaaattttaattatctacctaaccaaaaaaaataaaaacatattatcttttat

SEQ ID NO: 34492 - DNA, 396 bp, Gossypium hirsutum
  Clone ID: LIB3149-037-Q1-K1-B7
gcgagatcgtcgattcgaagatcattaactatcgtgagactggaagatccagaggcttgggcttcgttactttccgtgatgagaaatctatgaaagatgctattgaaggaatgaacggtcggagtctcgatggaaggaatataaccgccaacgaagcacaatctcgccgaagcggcggcggcggtggtggtggaggatttggaggaaacggtgggtacaaccgtggaggcggtggatatggtggtcgccgtgaaggtggatatggaggtggtggttacggaggtggacgccgtgatggtggtggatacggagacggtggatctcgttactcaagtggcggcagttcttgggcttatgttaaggcgtgctaagatttgagtgagcttcggctcttat

SEQ ID NO: 34493 - DNA, 263 bp, Gossypium hirsutum
  Clone ID: LIB3149-037-Q1-K1-B8
ggagaatggatagatcgatggaacgagcttttggagaacggtacttttccaggtgctctgtaagacggtacttttcgggaaatccagtgaagttgtcaaatgagaaacggcattttcaggaaataagaaattttggcatgtacccgttttgactggatcatgattgataaaatggagttatatatagcctacgttacataggttcaagtgttggatattgatatctgtccgacaccaataaatttaatttctttttgagagct

SEQ ID NO: 34494 - DNA, 417 bp, Gossypium hirsutum
  Clone ID: LIB3149-037-Q1-K1-B9
gcagaacccttcattttttttctgccaccattggcacccaaagatgcaaattttcgcaaaagccttacgggggaaaaccttacccttaaaggtgaagtcttccaccacatcgacaatgtcaaagccaagatccaagacaaaggaagcattccacccgaccaaaagagccttattttttgccgaaagcaactctaggacgggcgcacctttaccgacttcaacattccgaaaggattcaccctccatctcgtgctccgtcttatgggaggtgcttataagagaaaaaagaagaacacctacaccacgcccaagaagatcaagcacaagaagaagaaggtcaagctcgctgtgctacagttctacaaggtggatgaatcgggtaaggttcaaaagctgaggaaagagtgtcctaatgct

SEQ ID NO: 34495 - DNA, 390 bp, Gossypium hirsutum
  Clone ID: LIB3149-037-Q1-K1-C1
ctgaacttccaaaggatgacaaggaaggggcagccaccgcaggcggcatgggcggtctagattagctaagggctttcacagggtacctccattgctgctctgttaagacaatttttatatgatgaaaccttgtaaacatgagatgagaacaagagaatattttactttaggtccccagactgggcaaggggatggccccttttttttttttttaatttgatacatggaatggcttttattccaaaaaaaaaaaatccaaaaaaaaaaaaaaaaaaaaaaaaaaaaaaaaaacaaagcccaataaacaaatataattaaacaaaccacatagatttatacacgcaaagaaaccaaataacatcaaaaaaaaaattgggggggggccctttt

SEQ ID NO: 34496 - DNA, 373 bp, Gossypium hirsutum
  Clone ID: LIB3149-037-Q1-K1-C10
aataattgagaaatttccattgtcaccaattattgttaccaatggaggagtgaatggaaagcatgaacatgcaggctatggtggtataaatgcaagatacaaactccttcacgaggtatggtccgtgtgagtgtttatgttagatcgttgtgtatatctctcatgttttgtagccatggaaaagtgagggtgaaggtgaaaaaactcaaggtgaaatgtttagatgatcaaagttacaggaaattctcaaacatcgtttattggcttgattgtacagttggaagaacttggtttctttttgttgaatgcggagagcttgaaatcaactgcaattatgtcttcgatatacagaataaattcatactgttttttt

SEQ ID NO: 34497 - DNA, 426 bp, Gossypium hirsutum
  Clone ID: LIB3149-037-Q1-K1-C11
attttgttctgcaacatacgaaaaaaagattaagtttgaaacccggaaatgtcggacgaggaacaccggtttgaatccaaggccgacgccggtgcctccaaaacctacccacaacaggccggaaccattcgtaagaatggttacatcgtcataaaaaaccgtccctgcaaggttgttgaagtttcgacctccaagactgggaagcatggtcatgctaagtgtcactttgttggaattgacatcttcaccgccaagaagctggaagatattgttccctcttcccacaactgtgatgttccacatgttaatcgtactgactaccagttgatcgacatttctgaggatggatttgtgagtttgctgaccgaaagtggagacactaaggatgatctgaggctcccaactgatgagaacctgttgaaacaa

SEQ ID NO: 34498 - DNA, 384 bp, Gossypium hirsutum
  Clone ID: LIB3149-037-Q1-K1-C2
cacttcttcgctggttgggacagccatcacaaatgctttgattaatgctaggaaggccggggataagacatcggcagctgaagttgaaaatgttcctatactatccaccagtgttgcctatggtgtatatatggcagtttcgagcaacctcaggtaccaagtgctggctggtgtaattgaacaacggattctggagcctttgttgcaccagcacaagcttatgttgagtgcaatatgctttgccgttagaacaggcaacacattcttgggttctctattgtgggtggattatgctcgcttggtcggtattcagaaggctcacgaagaggacacagcagcataggttgaggttggaaccaaccagttatggtggttttccccatc

SEQ ID NO: 34499 - DNA, 394 bp, Gossypium hirsutum
  Clone ID: LIB3149-037-Q1-K1-C3
ccggtgcccggcacaaaggtgtattttcatgggttgatttccaatccaggccaactttgaatggcgcatcctcgttgaggtaccttctggcaagactacctcctagggttcattctgtctactaccgggatgaaataggaaacatctcgtcctcacacctgcgtactgattcccgtaagtctgaactggaaattgaaccacggtatcctttatttggaggttggaaagcaacttttgtcatcggttatgggctaccattacaagacttcctttttgagacatctgatgacaggcgttatctcaactttacttttggatgcccccttcttgagacagtggttgacaagttaaccatcaaagttgtgttacccgagggttcaaaagacccttctgc

SEQ ID NO: 34500 - DNA, 398 bp, Gossypium hirsutum
  Clone ID: LIB3149-037-Q1-K1-C5
gttctttttagtttcgtcttcggcccatcttcccatttctggtgattggacatccgaaggacgatcccaaaagtccttctttctcgcgcgaaaggaaaaagatgtatagtttcccctcttaccagggctatacataggtagagaacggctccatctacatccagagagctgcgctttgcggcgagcgctgctttcttccggtttgactgttattgaaagggggccaccccgggcaccgaaagaatagctccccgatcgccggagcttcaaaatacagggtgtgtagcaagcagtcgtaccagggggatcgcttcttcacttcgattcagacggcgtaacgacccagtcgtaccttggaaacatgctagtccacggcggatagcaagaatccgcgtccc

SEQ ID NO: 34501 - DNA, 399 bp, Gossypium hirsutum
  unsure (1)..(399): unsure at all n locations; Clone ID: LIB3149-037-Q1-K1-C6
tcggatacttatatcaagaaggcattggataaaaaatggagagattataaaagcactttggagaaagaatattttaagaaatatataagtctcgaagagaaatttcgaaatgtccctccgggaatgctgagataccaatgagaagatgtggttaaattttagaatttaaagaaaagagaggatcgtgagcgagttggaacaagtagcagacaaaaacaaaaatttacgcacacagcacggtcgaaaagttttgcttgtgtagctgaggccgaggtattttgaatttattaattactttctattaaataatatttttactactatataataggaactctcgtctggtcaaaaagttaaacgccttcagctntttgatattacacataggaagaaagatgg

SEQ ID NO: 34502 - DNA, 353 bp, Gossypium hirsutum
  unsure (1)..(353): unsure at all n locations; Clone ID: LIB3149-037-Q1-K1-C7
agaaagaccggcccgagcgaggcgtggggggggtnccaaaatggttttgtcattttatgttttccgagccaagccaaccttgggaagaggatgcatcataaaggccttctttcaatactacctcctgaggtggaaatttgcctctaccgggatgaaataggaagcatttgaggctcacacctgcggactgattcccgnaagggtgaactggaaattgaaccacgggatgctttattttgaggttggaaagcaactcttgtcatcggttatgggctaccattacaagactgtctttttgagaacattgatgacaggcgatttcttaacatttcttttggatgcccccttcttga

SEQ ID NO: 34503 - DNA, 392 bp, Gossypium hirsutum
  Clone ID: LIB3149-037-Q1-K1-C8
ctttgtagccaaaaaggaacaatgagccgttttaaagaaactttatccaacatttctgatgctgccaaacacatttccttcaccaagaaacacaagaaaattttcttggcactatttgcatctttagtcattgtcgctgctataatcggcattgttgctggagtgagctcacggaataactccgatgagtccgatacttcccatcatgccattgtgaaatcagcttgtagtggtacattctaccctgatttatgtttctcggctgttactaccgtccctgctggtactgccaaaaaggtgaggagccaaaaggatgttatcgaattgtctcttaacatcaccaccactgctgtcgaacacaattacttcaagattaagaagcttttggctcg

SEQ ID NO: 34504 - DNA, 61 bp, Gossypium hirsutum
  unsure (1)..(61): unsure at all n locations; Clone ID: LIB3149-037-Q1-K1-C9
gttgtcaatagtaaatacgattgttgcaattataaaaaaaaactgtgtaattgtnatctag

SEQ ID NO: 34505 - DNA, 412 bp, Gossypium hirsutum
  Clone ID: LIB3149-037-Q1-K1-D1
gttggtattttggtgtttctgattaaaaattaatttaaaaaaaaagaaaaaaaaaaaagaggagaggaaaaaaaaaaaaaaaaaaaaaaaaaaaaaaaaaaaaaaaaaaaaaaaaaaaaaaaaaaaaaaaaaaaaaaaaaaaaaaaaaaaaaaaaaaaaaaaaggggcgccccttttaaagaaccaaattttacttccccttgcttccaactttttattttttttttagggcccccaaaattaatttcattgcccgtggtttaacaactccggaattggaaaaaccctgcttttcccaaattaaatccctttaaaaaaaatccccttttccccagttgggttaatagaaaaaagcccccaaccattcccctttccaaacatttgcccaccctaaatgccaattggacccccc

SEQ ID NO: 34506 - DNA, 248 bp, Gossypium hirsutum
  Clone ID: LIB3149-037-Q1-K1-D10
ttttaaaccaagcctccacctcaagcatactgtgaacttaacggagcccatgcaccccaaactaataacggttcatcagatagcatgggctactttttatgctaggttatgcatacgtataaatgctaatcctacattaatctttcttcgtcagatggtgacttcgtatttgttcgaaaggtgactaacaacatgttgaccgatatataatgctatgtgaaagctattttgttcccttttagatacat

SEQ ID NO: 34507 - DNA, 410 bp, Gossypium hirsutum
  Clone ID: LIB3149-037-Q1-K1-D11
gaaaaacctgaacccaagccaccgatgtattaaccacctaagaaggaaaagtccgaaccagagccacggggttatacacctccaaagaaagagaagcctgaaccaaaaccatcagtatatgaaccaccaaagaaggaaaagcctgagcctaagccaccagtttatacaccaccaaagaaagagaagcctgaacccaagccaccagtgtatgaaccaccaaagaaggaaaagcctgagcctaagccaccaggttatacaccaccaaagaaagagaagcttgaacctaagccaccaatgtatgaaccgccaaagaaggaaaagcccgagccaaagccaccagtttatgcacctccaaagaaagaaaaaccagaacccaaaccaccagtttatcaacctccgaagaagccacc

SEQ ID NO: 34508 - DNA, 393 bp, Gossypium hirsutum
  Clone ID: LIB3149-037-Q1-K1-D12
ccctatctccctctcctcaacaacagtcgctatgccaacaccctccgttttcgctatctgggaaccctgcgtctccaatcatgaatcgtaggagtcggtccttagccaggcatcccctgcctcgatccgaacccttcctgaaattcctcaaaccagtcgccctagctcgcctacgggactcgagaatcagcgccagatcgcaccgctccacctccctctttcagatctctccgtcctttcagccttctaacggcggtcaggctttctccacagccatggacggctttccttgctttgtgccaacaccgacagtctacgggccccgttgtccccaaaagaagaagctaatcgcgaccaagggaatgctatttctgggttcaacacaatcagctc

SEQ ID NO: 34509 - DNA, 403 bp, Gossypium hirsutum
  Clone ID: LIB3149-037-Q1-K1-D2
ctttttatctcttcgaattttcattacagaccctgatcctaaactctcaattatgtcttcgaagcggggtggcaaagcaaagcctttgaagcaacccaaagctgagaagaaagaatacgacgagcatgatttggctaacattcagaaaaagaaagaagaagagaaggcccttagagagctgagagcaaaggcatcacaaaagggatcatttggtggttctggtcttaagaagagtggcaagaaatgagtttcttaaaaacccgagctaaaccgaacttatcgagtcctgtcttgggattaaaacatctattatgctgatgtctcttggttctattgggatagttgggatgatttgatgctctagtttcattctgaatttgctattaaaaacattgtgtgtaat

SEQ ID NO: 34510 - DNA, 336 bp, Gossypium hirsutum
  Clone ID: LIB3149-037-Q1-K1-D3
ggtggatctggcatttttgaaggtgtctctggtcaggtcaagctccaccaaatcgtcttgcccgttaagcttttctacactttctatttgaagggaattggtgaactcccagaagagctgctttgcaaaccagttgacccacacccagctgttgaagccgttccggctgctaaggcttgcgagccacatgccgccattgcaaatttcactaattaaataaattatgaatcttatgtaattttaaataatttgcaaatccaatgatgttagtatttttattttcattttaatattttgtagtagagagtaaaattagaaataaatgtgttccttttt

SEQ ID NO: 34511 - DNA, 378 bp, Gossypium hirsutum
  unsure (1)..(378): unsure at all n locations; Clone ID: LIB3149-037-Q1-K1-D4
cccacacctgccattatttatgctaccttttttattttaaagcaccaccaaaccatctgggacgataagctcaactacacaaactataaaaaaagtaaaaaataaactcccaaaattatctactttgcaaacaataaagacccacacccaacattttaagccgttcctgcttctaaaagccngcgagccacatacacaccattgcaaatttcactaactaaataaattatgaatcttatgtaatttaaaataatttgcatatccaatgatgttagtatttttatcttcattttaatatctttgagaatagagtcaaattagaaataaatgtgttccttcctaaaaaacaaaaaaaacccccaaaagcttctttttaca

SEQ ID NO: 34512 - DNA, 398 bp, Gossypium hirsutum
  Clone ID: LIB3149-037-Q1-K1-D5
cccacgcgtccgcccacgcgtccggaaaatgggggaaaaaagtgaggatcaagcatagatggaaaacatgggagttctaggcaaggtggtggattaccttctattgttatcattcttcagcatcacattaacagctcagttggacatccccgagtccatcctcccccacgcctacaatcccttctatcaagtttataccacgttaacccaagattatttggtgcttgagcagcctgcttttttcaaggcacttatgacgttggaacttgtttaccaactccctctcgctttgcttaacatctatgggttgttatactctaagccctggttcaacaccacctgcctcctctttggtgcctctatcgttgcctctacgacagctatggtgggagacattc

SEQ ID NO: 34513 - DNA, 397 bp, Gossypium hirsutum
  Clone ID: LIB3149-037-Q1-K1-D6
gctgattccatgagctctagatagaccatttagtacagtaaaaagtttgacactgtgtccgtggtaccctctttgaaaacccagggcattgtcaaaagacatggtggttgtcctcttctccgacaaaacaatgaggacatctgacatttgtggtcgcttgtgtctaaagttgactgtgtaaggataaaattccatgagatctaccatactgataatgtaattttttatggtagttttaaatcccataattttctgcagaagtctttaatttcggcctgtattaaataactattaggaatcaagctagcatcttgtaatagtttataagcacttcatactgaatattctccggaaggttctcctttccacacttgaaaatcttcatgatttgcttctg

SEQ ID NO: 34514 - DNA, 410 bp, Gossypium hirsutum
  unsure (1)..(410): unsure at all n locations; Clone ID: LIB3149-037-Q1-K1-D7
aaanccgacccaacccacgcgttcggattattccattatctatagattttttattattccagcaacaacaaatacactggccagtgaaactttttttcaaaacccacttcataggcaaaagacatcttccataacatcttcttttacaaaccaatgaccacaacccacatttttaaacccttccctctaataataactgcgaaccaaaaaccccccatgacaactaccatacttaaaaaaaaaattaatattatagaattaaaaaccataatccaatccaaaaatcttaaaattctgactttcataattaacttttaggaaacaaactaacatcttaaattaatttattccctcttcaaacaaaatattctccagaaggttctcctttccacacttgaaaaacttcataa

SEQ ID NO: 34515 - DNA, 423 bp, Gossypium hirsutum
  unsure (1)..(423): unsure at all n locations; Clone ID: LIB3149-037-Q1-K1-D9
cgaacgacaacgaattgaagcacctcctcttccaagtatggaaaccatgcctccacctccgacatacgaggaagttaacggagtttatgcttcccaaacaaataacggttcaacagatagcatgggctactttttaggcgaggtaatgcatacgtataatggcgaatccgacgtggagctttctttgtcagttggtgacttcgtagttgttcgaaaggtgacgaacaacgggtgggccgagggagaatgcaaggggaaagcaggttggttcccttttggatacatcgaaagaagggaacgtgttcttgcaagcaaagtggcagaagttttctaagacatttctgcgtatcggtgtcggagaagacgattttgtacgttcatctttctcttccatatttgnttggtttgggcttatgtgtattt

SEQ ID NO: 34516 - DNA, 375 bp, Gossypium hirsutum
  Clone ID: LIB3149-037-Q1-K1-E1
gttctagatcgcgagcgagctagccctttttttttttttttttttttttttttttttttttggttggttttttttttttttttttttttttttttttttttttttttttttttttttttttttttttttttttttttttaaaacaaaaaaaaaattttttttattttttaaaaaattttttaaccaaaattcaactttttcaaaaattttaaaacaaaaataaatgggaaaaattttaaaaaaaacccttttttttttttttaaccggccaattctaaaattcgaattttttaaaaggggtaaaaaaaaaaaccttcttttttttttttaaacacttaaaaaaaaaacccctggggaacgggggggatataaaaa

SEQ ID NO: 34517 - DNA, 418 bp, Gossypium hirsutum
  Clone ID: LIB3149-037-Q1-K1-E10
cagtgaacaggggatgggtccgacatcagctccaacgacggccacagctccatcggcggggacggctccgtcggcgggaaaggcgccatcaagtggttcggggaagtggtgcgtggctaaatcaaacgccagcgatgcggcgttgcaagcgaacatagattacgtgtgcagcagcggagtggattgtaagccgatccaatcggctggggcctgctttaaccccaataatgtgaggtcacatgcatcgtacgcaatgaatgcgtactatcaagccaatggtcgtcatgatttcaactgcgatttcaatcgtacgggtgtcatcacctctaccgatccaagtcatgcagcttgtaactattcagtgaatcaagggtcagggttaaaattggaaagttcagtggccgcaaatacaatgaga

SEQ ID NO: 34518 - DNA, 408 bp, Gossypium hirsutum
  Clone ID: LIB3149-037-Q1-K1-E11
ctatcctcttgcctagcgggcaaggatttatctccgtggaaaagatgattcattcggatccgcatgaaagcccaactccattgcattgccagaatccatgttgtatatttgaaagaggttgacctccttgcttctctcatggtacaatcctcttcccgctgagccccctttctcctcggtccacagagacaaaatggaatgtaggactaggactggcgccaacagttaatcacggaagaaaggactcactgagccgggatcactaactaatactaatctaatctaactaatactaatctaatactaatagaatactaatctaatactctaatactaatagaatagaaaaaatagaatagaaaatactaatataatagaaagaactgtcttttctgtatactttccccg

SEQ ID NO: 34519 - DNA, 200 bp, Gossypium hirsutum
  Clone ID: LIB3149-037-Q1-K1-E12
aaatgatcataccatacttccaacaattttttctaacttttaacacagctccatcctcatagacaattgagaccttctcaaatgcaccatcaatttccacgaagaatttatccccaactctttcaaaccccatccactcctacaaacatacaaacatatattacctcctcaccatcacaatccatataaacccaatccaa

SEQ ID NO: 34520 - DNA, 396 bp, Gossypium hirsutum
  Clone ID: LIB3149-037-Q1-K1-E4
gtatatctgtcaatgatcttgtaattaaggctgctgcattggctctccgaaaggttcctgagtgcaatagttcatggacagatgactatattcgccagtataacaatgtgaatattaatgtagctgtgcagacagagaatggactttacgtccctgttatcagggatgctgataagaaaggtttgtcctcaattgctgaggaggtcaagaatttggcacaaaaagccaaagagaacagcttaaaaccagaagattacgagggaggcacatttacagtgtctaacttgggagggcccttcggtattaagcaattctgtgccatcattaatcctccacagtctggaattttagctgttgggtctgctgagaagagggttatccctggcttcggtcctg

SEQ ID NO: 34521 - DNA, 391 bp, Gossypium hirsutum
  Clone ID: LIB3149-037-Q1-K1-E5
gtacgttgatgctattatgacaataccgatgggaaccctctttcccatgtgtggtgtgggtctggcattcaatcgggaattgattggccctgctatgtactttggactcatgggtgatggtcagcctattggtcgatacgatgatatgtgggctggctggtgtaccaaggtcatatgtgatcacctcggactgggagtgaagacaggattgccttacatttggcacagcaaagcgagcaacccgctcgtgaatcttaagaaagaatactaaggaatttactggcaagaagagctgatcccgttcttccagtctggtacccttcctaatgactgcacctcggttcagaaatgctacatcgatatctccaagcaggtcatggctaaactaggc

SEQ ID NO: 34522 - DNA, 366 bp, Gossypium hirsutum
  unsure (1)..(366): unsure at all n locations; Clone ID: LIB3149-037-Q1-K1-E6
gctgttgaagctgataaacaaacggtatcttaggtttcaccactccccaaggaagcttctgaagaaaatgttgaattgttaaaacaacaacagcaatcggacggttcttcgctcaaggacgttgagctcggcaaatctcagccttagatttgtatgttcttcattttttttttgattctttttcaaaaattgatttgtttaatgttttaagctcttggaattggctgtacaaattttaaaagtttactaatttttttcctacgttttctttttaatatttcattgtagtaaagtcattccaggataagctattttctgattgataangcaacaacaggaattttaactgttgggtctgctgagaaa

SEQ ID NO: 34523 - DNA, 398 bp, Gossypium hirsutum
  Clone ID: LIB3149-037-Q1-K1-E7
atcgaatcttacaaagcatgggcagctttgtagctagtggaagaaaaacaagtgaaaggagctgaaataaccatgccgatattgagtttcgatcagatgggattaaaagacgatctcctccgtggaatctacaattacggctttgaaaagccgtcggctattcagcagagagccgttatgccgataatcaatggccgcgatgtgattgctcaagcccaatctggtaccggaaaaacttccatggttgctctcactgtttgtcaagtggtcgacaccgctagcagagaggttcaggcgttgatattgtcacctacaagagaattggcgtctcaaacagagaaagtgatacggacaattggcgatttcatgaatatacaagcacacgcatgtattggagg

SEQ ID NO: 34524 - DNA, 399 bp, Gossypium hirsutum
  Clone ID: LIB3149-037-Q1-K1-E8
gataataaagcgtttgtctcagatctcagatgatggcccgtaccaagcaaaccgggcgtgggtcgactggtgggaaggctcctaggaagcaacttgctaccaaggccgcccgtaaatctgccccaaccactggtggtgtgaagaagcctcatcgataccgtcctggaactgttgctcttcgtgaaattcgaaagtaccagaagagtactgagcttcttatcaggaaattgcctttccagaggcttgttcgtgaaattgcccaggatttcaagactgatttgcgtttccagagccatgccgttcttgctcttcaggaagctgcagaagcataccttgtgggtctctttgaagacaccaacctgtgtgcgatccacgccaagcgtgttactataatgccca

SEQ ID NO: 34525 - DNA, 418 bp, Gossypium hirsutum
  Clone ID: LIB3149-037-Q1-K1-E9
gaaaaaaaaaaaaccagacatggcttccaactctgttgcatccgctgctcttcttcttacgtagaactggctgttcttcactttggctagctctacctacgtgccttgcccaccaccaccaaagagccacaagcctacccacaaaagcccaccctcggcacctgaacagccaggcacttgccccagagatgcactgaaactaggcgtttgtgctgatttgttgggctcagtgcgcgttgttgttggaccgtcgaggaccaaatgctgctctctcatttcgggtttggctgatctcgatgctgctgattgcctttgcactgctattaaagctaatgtgttgggggttaacctaaacgttcctgtttcattggctttgctcctcaattcctgcgaaaagcaaatgcctgctggttacaaa

SEQ ID NO: 34526 - DNA, 237 bp, Gossypium hirsutum
  unsure (1)..(237): unsure at all n locations; Clone ID: LIB3149-037-Q1-K1-F1
tccaagtacaatcttcctagaatctccatcttacttaccaaaatgaaaaaacccatggttgataagcttatttttctcaagaaatcaagaaagctcaagaaggttaagcttctgaagcattaccaccatggcgttctatgagaagtttagactgattcccccttaaacactcatcttattcacttctctaacacaaaacacgtgggggggaacacacatatntactccatgctgttt

SEQ ID NO: 34527 - DNA, 274 bp, Gossypium hirsutum
  Clone ID: LIB3149-037-Q1-K1-F10
atctgtttggaagaggagtggtttgcctttataggattagctgcagttttgaataaaaagccgttctggatgaactgttagtgattggtaagcgacgtcctctgatcgagatcttcattatacttgtcacttgttcatggatattttggatattttaccgtaatcccggattttatgctccaattttaaatgggttaatcgacactgttggtgacctatttaaaaaaaaataaccatattaaaacttttgatagaactctaaaatcaatccacc

SEQ ID NO: 34528 - DNA, 403 bp, Gossypium hirsutum
  Clone ID: LIB3149-037-Q1-K1-F11
atcattacatatttaaatttgagactcaatttttatttttaaaaaaaaaaacataaaaaaggaaaaatggataaatttaaaaaaaaaaaaaaaaaacaaaactaaaataaaaaacaataaaaaaaaaaaaaaaaaaataaataaaaaaactggctggccgttttaaaaaacccaattttacttccccttccatgcaacaaataagtttttttttagggccccctaaattaaattaattgcccgtggttttaaaacgttggaactggaaaaaccctgcctttacccaatttaatgcctttgaaaaaaatccccttttcgcaagttggggtatttacaaaaaagcccccaccgatcgcctttcccaaaatttacccaacctaaatgggaaatgaaaccccccttt

SEQ ID NO: 34529 - DNA, 312 bp, Gossypium hirsutum
  Clone ID: LIB3149-037-Q1-K1-F12
cgttcatattctagtttcgccagcaaaattttggaaggcgccaagaaggaagggagattgggacatggaaacagttccttttcaagtccatggaataagggtctaagcattacagtggagagatacaattttgataattcaggcctacatgtaacttccacttctttggttgccatgttacacatgctctttatttattttagtggcataagaaggaagtgagtgttttttctattttaattattggtttttcactttaatttattcgtgtatagaaatgtggccttccgtatgattgatgaagctttttct

SEQ ID NO: 34530 - DNA, 271 bp, Gossypium hirsutum
  Clone ID: LIB3149-037-Q1-K1-F2
tttggatgtcacatttttggcacaagggacccatttcgtccaagaacaacttcctaaggaggtgaatcatctcattatctccttccttaacaagcactgcgaatagaggaaactgatgacctagttgcttcttcatcttcttccttctttaccgctgaataaaaggacctcgtgccatttaaataaagaataatatgacctcaaaatggtcaaatttgaatgtattgggagttgagaatcttcatttcagttcaattaagtattcactctt

SEQ ID NO: 34531 - DNA, 283 bp, Gossypium hirsutum
  Clone ID: LIB3149-037-Q1-K1-F3
gagaaaacactagcgtatttgttatcttcaaaagcctgtctatatagtggatgactgataatgacctgaaacccatagctattgccccagtggtttaccataaaactgtatggcttgaagttgcacttgaaagatggttgttggaatctgcaatggcaacaacttgatgcccaaagatggttactgaacagccagcggttatgccataaccgattgtgagggtgcctgaaggaggacacagaccacgctcagagatttaaactctagtcgggatgaaaagctg

SEQ ID NO: 34532 - DNA, 369 bp, Gossypium hirsutum
  Clone ID: LIB3149-037-Q1-K1-F4
atgaaaaacactcaacttatctctattaattcttctattaaaactctcctcctatcatattggactagctcatatatcacttcaaacccatcatctacagcccccatttttttaccaaaaaactatattccttaaaattacacttgaaaaattattcatgaaatctgaaattccaacaacttaattcccaaatattgttaatgaacaaccacctcttattccataaccaattttaatagtcacagaatcagcacacagaccaccctcagatatttaaactctatccacaattaaaacctaatctttttagttcattatatagcatccatctctgactaaatatccaaaatttatttaaacaataataaa

SEQ ID NO: 34533 - DNA, 240 bp, Gossypium hirsutum
  Clone ID: LIB3149-037-Q1-K1-F5
taaaggttctatttacggaagaggttttgttttttgggggaagaggtaggggttccggcgcggaaattcgacccacctggttggcacctgggattgggttccatttggtagaaccaaactctttcccagaatgtgtgaacgtgcaagaccaaattaaaagattggcctttgaatgtactcctataatgggttgctgcttttaggattcacactcatgtactctataaaataaaacccatc

SEQ ID NO: 34534 - DNA, 123 bp, Gossypium hirsutum
  Clone ID: LIB3149-037-Q1-K1-F6
gcgttttgctttgagatatggttgcttgaattttgagaacttggatcatgtagggagttgttttttattgttttaaagttcgatactttgttaaatcttggaaggtattgagtggttgggaat

SEQ ID NO: 34535 - DNA, 300 bp, Gossypium hirsutum
  Clone ID: LIB3149-037-Q1-K1-F7
ggcacaatggacccatttcgtccaataacttcttcctgaggaggtgaatcatctggtgtggctccttccttaacaagcactgcgaataaaggaaaccgatgacctagttgcttcttcatcttcttccttctttaccgctgaataaaaggaccttgtgccatttaaataaagaataatatgacctcaaaatggtcaaatttgaatgttttgggagttggagaatcttcattccagttcaaaaggacaaaaaacaaccctcagatataaaaactctgtctacgatgaaaagcgggagttttt

SEQ ID NO: 34536 - DNA, 425 bp, Gossypium hirsutum
  Clone ID: LIB3149-037-Q1-K1-F9
gatgagtcttagtggcccctgcttaatctcttcattgaaaatggttgtgggaaatcattcaaaacaagaaagtgaaattctggaagaaagtatacgtaatttacagcttcttcttcgtccggaagatcattgctcatatggtcaccttttgcttttactgcgttgttcttccgctcacgattttgatccccgaagtttgggttcctatttggggagccgtctatattccgtcagtcattaccattctaaactctgtaggaactccaagatcaatccacctattgttttactggatcctgttcgagaacgtgatgtcgttgcaccggacaaaggcgacgtttatcggtctcctagaggcagggagagccaatgaatgggtcgtgaccgaaaaactcggtgatgctgtcaagaaagcagccgatgct

SEQ ID NO: 34537 - DNA, 291 bp, Gossypium hirsutum
  Clone ID: LIB3149-037-Q1-K1-G1
cgaaaacatcgatgggggtttaacagtgttttgccccaccgaccctgttattaaggatgggatgcccaaatacaagaacttgacagcatccaagaaagcgtccctgctgttgtaccacagcgttcccgtgtatcagtccatgcaaatgctgaaatccaacaacgggattatgaacacattggccactgatggagcaaacaagtatgatttcaccattcaaaacgacggcgaggtggtgacattggagactaaagttatgactgcaaagattacagggactttgaaggatga

SEQ ID NO: 34538 - DNA, 315 bp, Gossypium hirsutum
  Clone ID: LIB3149-037-Q1-K1-G10
ctcagaacagctcaaaaaagcttccaacattttgaagaaacaaagaatcaaacatgtcgaaggaagtgagtgaagaagggatgagccgaaaggactatgtggatcctccaccggcaccgctcatcgacgtggctgagatcaagctttggtctttttacagagctctcatcgccgaattcatcgctactctccttttcctatacgtcaccatagccaccgtcatcggccacaagaaacaacacgatgcatgcgatggtgttggtcttttgggtattgcttgggcttttggtggcatgattttcattcttgtttact

SEQ ID NO: 34539 - DNA, 392 bp, Gossypium hirsutum
  Clone ID: LIB3149-037-Q1-K1-G11
cttcagcaccttgcttttttatgcaagtctgaagttaattcaatgggtcgtatggctgcaggagtcttgcagctgctcaagcttgaaaactcgctcggcaaggatgccatatataaacttagcaacctaggaattgagggatttgacaagattttctcatcggataagctcaaccgagggaacagtgctggaagtattgggcagtctccattatcaaaagtgattattgaagaccagcgctcaactatcgctttgctcgaggaggcagttttggattcacaagccaagtgtgccacgctcgttactgaattatctaatgcagagtcttctgaggagaatcttacggctattaaagaactgagacagaaattagatacaatgcagattttggt

SEQ ID NO: 34540 - DNA, 404 bp, Gossypium hirsutum
  Clone ID: LIB3149-037-Q1-K1-G12
atgcagtcctcttccgatcttgatcttcattcgcagttgaaggaattgattcctgaacaacaggagcgcctgaagaaactgagggcagaacatggaaaagtgcaacttgggaatattactgttgatatggtcattggtggaatgagaggaatgacagggttgctttgggaaacctcattacttgacccagatgagggaattcgctttaggggcttgtcaattcccgagtgtcaaaaactattaccagctgcaaagcctgatggagaacctttgcctgagggtcttttatggcttcttttgactggaaaggtgccaagcaaagctcaggttgatgctttatctcaagaattgcgtgaccgtgctgttgttccagattacgttttcaaggccattgatgctctacc

SEQ ID NO: 34541 - DNA, 401 bp, Gossypium hirsutum
  Clone ID: LIB3149-037-Q1-K1-G3
gaaaaaaaaaaaaccagacatggcttccatttcttttgcatccgctgctcttcttcttacgttgaacttgttgttcttcactttggttagctctacctacgtgccttgcccaccaccaccaaagagccacaagcctacccacaaaaacccaccctcggcacctgaacagccaggcacttgccccagagatgcactgaaactaggcgtttgtgctgatttgttgggctcaaagcgcgttgttgttggaccgtcgaggaccaaatgctgctctctcatttcgggtttggctgatctcgatgctgctgtttgcctttgcactgctattaaaactaatgtgttgggggttaacctaaacgttcctgtttcatttgctttgctcctcaattcctgcgaaaagcaaa

SEQ ID NO: 34542 - DNA, 228 bp, Gossypium hirsutum
  Clone ID: LIB3149-037-Q1-K1-G4
cccacgcgtgcggtttcttccatagccgcccctgtttatttaaaaaagagagagagaatggaggttgttgctgcatatttgttggctgttttggggggcaacacttccccttcagctgatgatcttaaggccattcttggctctgtcggagctgaagctgaagatgaaaggattcaacttcttttatctgcggtcaagggcaaagatataacagagcttattgcatcc

SEQ ID NO: 34543 - DNA, 385 bp, Gossypium hirsutum
  Clone ID: LIB3149-037-Q1-K1-G5
gttctgggctccttggtgcggaccatgccttatgatcgatcccgtaataggtgaactaggacagcaatacgcaggaaaactcaagtgcttcaaactgaatacggacgatagcccctcgatcgcttcccaatatggaatccgaagcatcccgacactcatgatcttcttgaatggtgagaaaaaagatgcagttattggtgctgtgccaaaaactactctatcagcaagcatagagagattcttgtagatagcgattcataagaagtgatattgactgatggaatcatggaagtgtccagcactcatcacccacttggctttggttagatgctttatttctctctatgtgatgttgaaaattttcctacttttatgtcaaatttgg

SEQ ID NO: 34544 - DNA, 380 bp, Gossypium hirsutum
  Clone ID: LIB3149-037-Q1-K1-G6
ctgatgacttgtttttgtaagagaggcatgttggatgaagctaagaaggtatatgaaggattggaaggtaatgggtgtaatccaaatgcggctacttttcggacgctggtgttttatttatgtttaaatggattgtatgagcaaggttataaggtgttcaaagagagtgtgaggttgcataagattcctgattttaacactttgaagcatttggtggagggattggtgatgaaaaagaagatcaaggatgcgaaagggttaatcaggacggtaaaagaagacgtttcctcccaactttttgatagcatggaagaagctcgaggaagaacttggtttggtttctggtaatgctgaagctcgtgaggctaaagaatcaacag

SEQ ID NO: 34545 - DNA, 395 bp, Gossypium hirsutum
  Clone ID: LIB3149-037-Q1-K1-G7
accccgcattaccacactacgactcatccttatgggactggttacgtggagccctcgcgacggtcgaccgagattatgggatattaaacaaggttttccataacataactgatactcatgtcgctcatcatttgttttcgacgatgccgcattaccacgcaatggaagcaactaaggcaataaaaccaatattgggagagtattattcatttgatggtacaccagtttataaagcgatatttagagaggcaaaggagtgtatttacgttgaaccagacgaaggtgagcagagcagcaaaggtgtattttggtttagaaataagatctaactttgccgatagcgttgcggttgccgatggtgatgcctttaagaatgtgttaaatttgttacatta

SEQ ID NO: 34546 - DNA, 202 bp, Gossypium hirsutum
  unsure (1)..(202): unsure at all n locations; Clone ID: LIB3149-037-Q1-K1-G8
acccacgcgtccgacccgcnattaccacactacaacacatccttattttaccgaaaacgagaaaccgagggggcggccttccaaaangatgggaccccacccaagcaacactatcccataactgatacagatgaagatcattctctgctttggacgatgctcgatctccacatcaaaggaagcaactaaagctatccaacca

SEQ ID NO: 34547 - DNA, 416 bp, Gossypium hirsutum
  Clone ID: LIB3149-037-Q1-K1-H10
cgagtttgccgaactttatgttttcaaatggacatcacttctcattcctccaaccacagggcttattgtcaacctggtgggcattgtggctggcgtatcatatgctataaacagtggttaccaatcctggggtcctctttttggcaagcttttctttgccatctgggtgattgctcatttgtatcctttcttgaaaggtttggtgggtcgtcaaaatcgtacccctacaattgtcatcgtctggtctatacttcttgcttccatcttctcattgctgtgggtgcgtatcgacccctttacctcagaagctacaaaagctgccgctaatggtcaatgtggcatcaactgttagtttcattttcggatcattttattccggtaaatgctctctccttcaagttggctattgtgtatat

SEQ ID NO: 34548 - DNA, 195 bp, Gossypium hirsutum
  Clone ID: LIB3149-037-Q1-K1-H11
ctagtgctgatatccttgttctgtctgctttagaaggcatcgtttcgttgggaggcccttgagcattcgtgtcaaaactggaagaagagacggtagaaggagcacagcagatgttgtggaggagtatcttccggaccacaaagagaccatctctggcgttctcgacaggtttgccgccatgggtattgacacccc

SEQ ID NO: 34549 - DNA, 151 bp, Gossypium hirsutum
  Clone ID: LIB3149-037-Q1-K1-H12
attaaaggagaagctggaacataagttttgtaactattgggaagcccccattttggtgctactatacttttaatacactttgatttgaaatataatttaattctttatttgtattgctttcctaatagagtattggataattgaaaataaa

SEQ ID NO: 34550 - DNA, 95 bp, Gossypium hirsutum
  Clone ID: LIB3149-037-Q1-K1-H3
gttatagatcgctagcgagcattctagattatccacgcttacatgcgccggcatacgacgtcggtggtgttatataaagtcaactaaatggacgt

SEQ ID NO: 34551 - DNA, 409 bp, Gossypium hirsutum
  unsure (1)..(409): unsure at all n locations; Clone ID: LIB3149-037-Q1-K1-H4
ggagaaagttgaaacagaaactgatccagcagagaagactgagtaaataataaagcttttgtgatgaaaatgagggtgtcaatggaagattgtttcaagtggctacagtttgataagtttgcatgtcaagtcaactagttttcttctatgtaggtcaataaggatgtggtaatgtggctgatggaggcccaccgatagtagtcttgcaatggctaagttaacatgcatttgcatatgtcaaagagtgacatacttcatgttccattgtgggggaatttttatgggtcatctgttatctgtaaagggatgggtttcttgggtcccaaaccacctttctttgcttatgtttattggtttgcttgnatgggtattaggagaggcagtatcaagtatgcatgttgtcttggtt

SEQ ID NO: 34552 - DNA, 392 bp, Gossypium hirsutum
  unsure (1)..(392): unsure at all n locations; Clone ID: LIB3149-037-Q1-K1-H6
tgacactacaaggatgaactactacaaggcttacctgactcaactgaaaaaggcagtcgacaacggagcaaacgttattggctactttgcatggtcattgctggacaattttgaatggagattaggctacacttcaaggtttggcattgtgtatgttgattactctaccctcaagaggtacccaaagatgtcagcttactggttcaaacagcttcttactcggaaaaaacattaagcaggcagagtttatgttacagtcatgtagagtaagtgctcatggaagaaaccaagtatggtgaggccattcctatgctntagtcctcccatagtatgttctttccttcctggcttaatcaataaaagcatgttaatgcttctcagttcatcgctct

SEQ ID NO: 34553 - DNA, 282 bp, Gossypium hirsutum
  Clone ID: LIB3149-037-Q1-K1-H8
catggtcatactaagaaaacccatcgtacctatgtgcagtgtaagaaccggattgatacgattaagaaaaagtataagatcgagaaaactagggtgagttcttctaatggaaccctaacatcgtcttggcctttctttgaacggttggatgctcttattggatctaattttgctgctaagaagctttcgacgtcgcctaagatatcaccgaagccgtcgccgaggttgtcacccaggatcccgggatctcctcctgtggctcttccgcttttgcttccgtac

SEQ ID NO: 34554 - DNA, 339 bp, Gossypium hirsutum
  Clone ID: LIB3149-037-Q1-K1-H9
gaccacgcgtccgctttacttcaatccaatccatgtaaaggctttttcaagttggagtgaaaatggctgagaaagcaagtggaagaaaggaagaggtggcgaccagggattacaccatcaaccttcacaagcgcctccatggctgcacattcaagaagaaggctcccaatgctattaatgagatcaggaagtttgcagaaaaagcaatggggacaaaggatgtgagaagcgatgtcaaacttgaccaacacattttggacccgaggaatccaaaaaggttctaaaaagattaaggtccccattggtcccctgaaaaattattatgaaaaagccaaagaa

SEQ ID NO: 34555 - DNA, 396 bp, Gossypium hirsutum
  Clone ID: LIB3149-038-Q1-K1-A1
agggaaaaaaaaatgggaagaggaaaattcaagggcaagcccactggccaccgccacttctgtactccagaagagctccgtgctggtacctcagctcggccccgtacatttaggaaggaagaagctgaagtagaggaagaagaagaacgagaagagtctgaagaggaaatagaagaagagcccgagaaacgaaaagggacccaagggcttattgagattgagaatccaaatttggctaaacaaaagaatgtcaaagccaaagatgttgatatggggaaaacaactgaactatcaaggcgtgaaagagaggagatagaaaagcaaaaagcacatgaacgatatatgaagctccaggagcaagggaaaactgagcaatcaagaaaagatttagagcgc

SEQ ID NO: 34556 - DNA, 386 bp, Gossypium hirsutum
  Clone ID: LIB3149-038-Q1-K1-A2
cagcaaataatagatatggcgaaagctgaggttgtaattgttatgactatgatgatggtgataacagtggttgatgggttgggagggatgatgaggataaacgatgttaataacaacaaaaaggtgcaagagcttgagaggacttctggggatgattataacatgcggagcctatggccggtgcataaaagtttgggcaatggtgggccgtcgacggagtacatttgctcttatgtggatggagctaagaaacacgtggtgtgtggaatcaaggattatatcaagattaacggcatgcgaggtggagtcatcaacacattcgagttagctgttttgaattaactttggaatcactctaaggactggcttaattcaatggcttatac

SEQ ID NO: 34557 - DNA, 399 bp, Gossypium hirsutum
  Clone ID: LIB3149-038-Q1-K1-A3
aggaaatctgctgccgagaataccctcactgtctataaatctgctcaggacattgcagtaggtgagctagccccaactcatcctatccgtttaggattggctctgaacttttctgtcttctactatgagatcttgaactctcctgatcgtgcttgcagtcttgcgaaacaggcttttgatgaagccattgcagagctggatactcttggagaggattcatacaaggatagcactttgataatgcaacttctccgtgataacctcactttgtggacctcagacatgcaggatgatgggactgatgagatcaaagaagcttccaagcctgaggaagagaaacaaccgtgaagttcccagtctttgtggtagcattttacttctcttcttgtttttggatgg

SEQ ID NO: 34558 - DNA, 306 bp, Gossypium hirsutum
  Clone ID: LIB3149-038-Q1-K1-A4
gcggaaaagtatggaataagtgggtttccaacattttaattcttccctaaaggtaacaaagctggcgaagactatgacggtggcagggatttagatgactttgtttctttcatcaacgagaaatgtgggaccagtcgtgatgcaaaagggcagttaacttcaacggctggtattttgtcaagtttggatgcattagtgaaagagtttgtggctgcttctgccgacgagaagaaagtagtcttctccaaaattgaagaggaagttgagaagctcaagggttctactgcgaggcatggaaagatatac

SEQ ID NO: 34559 - DNA, 431 bp, Gossypium hirsutum
  Clone ID: LIB3149-038-Q1-K1-A6
cgcggcaagccaaacagtgcgtctcttcttggggttctgcaatccacacaaataacaccagtttaggggcgtggttactagtaacacagtgggtgtggacgcttacttatggagggcagtgtctaccgatggtatacggctatgcttttgccaccaccaaatggcttaggcatgtacgcggctgcagccaccgcatacggggcatatccgatctacggcagtcatcagcagcaggtaagctaaaataataacagcaggagagatgttatagctctacttagacatttgaactagaaaaaaaaaagaggggtaaagggggactggcttgttagttgttactccataactctctctgggttgtgtagaattcttacataaatccctccaaatatggagcggaactgaattttgacccctttttttaagtagtt

SEQ ID NO: 34560 - DNA, 413 bp, Gossypium hirsutum
  Clone ID: LIB3149-038-Q1-K1-A7
cagccggcttgcttcaacccctgccagtcccagaaaggccatgggagagtttatccatgggttttattattggtttgcctaagtctgacgggtttgctagtattcttgtggtggtggacaggttttcaaagtatgcgacttttattccggcgaccaaagagtgccctgctgaggaagcagctcggttattccttagacacgtggtgaaatattggggagtgccactatctattatcagcgatcgagatggtcgatttactggtcggttctggacggagttgttcaagtcaatgggctcagaattgaacttctccacaagcatgcatccacaaaccgatgggcaaactgaacgagtaaatgcactgttggagacgtatcttcgacactatgtgagtgccacacaaaggaattgg

SEQ ID NO: 34561 - DNA, 275 bp, Gossypium hirsutum
  unsure (1)..(275): unsure at all n locations; Clone ID: LIB3149-038-Q1-K1-A8
aaattacaacttttnttttctaccccaaaggaaacaaaactgggccggtcgttttaaaaacagggctgtcccacactatggctctttcatcaaccanaaatgtcggaccagtcgtgatgcaaaaaggcacttaacttcaacggctggtattttgtcaagattcgatgcattaatgaaagagtttggggctgcttctgccgaccagaaaaaaatattcttctccaaaaatgaaaaagaaattgagaaacttaagggttctactgccaggcatggaa

SEQ ID NO: 34562 - DNA, 374 bp, Gossypium hirsutum
  Clone ID: LIB3149-038-Q1-K1-B1
tatagttctggtctgctcaacactcttccttctctctaaatctaatactcagatccgcgagtgatggttgtcacagctcattagaatggagacctttctattcacatctgaatcagtgaatgagggtcaccccgacaagctctgcgaccagatctctgatgctgtgctggatgcttgccttgcccaggaccccgacagcaaggttgcctgtgaaacatgcaccaagaccaacatggtcatggtctttggagagattaccaccaaagccaatgtagactatgagaagattgttcgtgacacatgccgctctatcggatttgtttctgatgatgtgggtcttgatgctgacaactgcaaggtcctggtcaatattg

SEQ ID NO: 34563 - DNA, 66 bp, Gossypium hirsutum
  Clone ID: LIB3149-038-Q1-K1-B2
aaaaaaaaaaaaaaaaaaaaaaaaaaaaatttatttaataaaaaaaaaaaaaaaatggggggggaa

SEQ ID NO: 34564 - DNA, 419 bp, Gossypium hirsutum
  Clone ID: LIB3149-038-Q1-K1-B3
ggaaaacagcaatggtgtctttgaagctgcagaagcggcttgccgctagcgtcctcaagtgcggtcgcggcaaggtctggctcgatcctaatgaaatcaacgaaatctccatggccaactccaggcagaacgttaggaaacttgtgaaggatgggttcatcatcaggaagcctactaagattcactcccgctctcgcgcacgtaggatgaaggaggccaagagaaagggaagacactctggatatggtaagaggaagggtaccagggaggcaaggttgccaacaaagattctttggatgaggagaatgcgggtactgaggcgattgcttcgtaagtacagggagtccaagaagattgacaagcacatttaccatgacatgtatatgaaggtcaagggtaatgtgtttaagaacaagcgt

SEQ ID NO: 34565 - DNA, 408 bp, Gossypium hirsutum
  Clone ID: LIB3149-038-Q1-K1-B4
gtaagatttagtgaaatgtgtggggtccagtatgataagagttcctcctcctccttctcagggtcagtgtttacattgactaataaatatctgctatcttcttcacttaaaaaaaaaaaaaaaaaaaaaaaaaaaaaaaaaaaaaaaaaaaaaaaaaaaaaaaaaaaaaaaaaaaaaaaaaaaaaaaaaaaaaacaaaaacaaaaaaaaaataaaaaaaaaaaaaaaaaaaaaaaaaaaaaccgggcccccccttttaaaaaaacaaattttactaccccttcattccaacataaaatttttttttatgtgcaaccaaaataaaaaacactgcccccggtttaaaaaccgggaacctgaaaaaacccgggttacccaaattaatatcccttgaaaaaaatcccctttt

SEQ ID NO: 34566 - DNA, 415 bp, Gossypium hirsutum
  Clone ID: LIB3149-038-Q1-K1-B8
cttctttcaaccgcgcctaataaccgctcggatttttctcagacgtgaaaaaaatggggctggctttcaccaagctattcagccggctatttgccaaaaaggagatgcgtatactgatggttgggcttgatgctgctggtaaaaccaccattctttacaagctgaagttgggagagattgtcactaccattcccaccatcggtttcaatgttgagaccgttgaatacaagaacatcagcttcactgtttgggatgttggtggccaggacaagatccgaccattgtggagacactatttccaaaacatgcaaggacttattttcgtggttgatagcaatgatcgtgaccgtgtggttgaagctagagatgagttgcacaggatgttgaatgaggatgagttgaaggatgctgtgct

SEQ ID NO: 34567 - DNA, 412 bp, Gossypium hirsutum
  Clone ID: LIB3149-038-Q1-K1-C1
atttccctgacaatccatttcaaagacttttcttttctctctcaatttttgtatttttcaacgtccttggtgttaaaatcagttttattttctctccttttttccagttacttccctcggttctttgttattttctttcatttttgcctctttttttccatacggatcgtttcaattttctttcttgttcttaatccaatttattggttaaacagacaaaacccagattacattgtatttgactcctttcttcctatcaactgcctgaccaagtgacagattttttcattcattaaaaaggatgttaggtttaaagaaatctccattgaagaccgctaagcataattcagttgatcctgcacgtgtggccgcttctcgttccaacccctttgattctgatgacgagtttgac

SEQ ID NO: 34568 - DNA, 370 bp, Gossypium hirsutum
  unsure (1)..(370): unsure at all n locations; Clone ID: LIB3149-038-Q1-K1-C2
gccagaagggcctanacctggtttcatggtggatggtgctacacttgaaactgttacgcccatcccatacgatgtcgttaatgatctcaagggcggttactaaatctactctgttttttgtttgcggtattgttttggtttccttttttttttttttggcaaaacatcagtggtgaactgaattaaacatttggaagtgctgttttctttagtatattttgaagaggtactgaatcttcagagattttaatgttatgatatcattttagagattatggatatgcctatgataaagtgtagtatttgtttatgcattgtgtttggtattatcattttgtcacagtccagtttaaaaccttactactttcat

SEQ ID NO: 34569 - DNA, 416 bp, Gossypium hirsutum
  Clone ID: LIB3149-038-Q1-K1-C3
gaaaaggttcctttctctgaggccgacaggaccgaccagccggctagtttgtatgccgccacgcaagaaggcaggcgaagaaataacccacacttataatcatatctacgggctttcagttactggattaagatttttcaccgtgtacggtccatggggaaggcctgatatggcgtatttttcgtttacgagaaatattctgcaggggaagcccatcaccatttatcggggaaagaatcgggttgatttggcacgagattttacctacattgacgatatcgtgaaaggctgtttgggatcgttggatacatctgggaaaagcaccggttctggtgggaagaaaaaggggaacgctccatataggatttttaatttggggaatacttcgccggttaaggtgccggagctggtgaaca

SEQ ID NO: 34570 - DNA, 421 bp, Gossypium hirsutum
  Clone ID: LIB3149-038-Q1-K1-C4
atttgctgctgcaacaagatggatgcaacaaccccaaagtactcaaaggcaaggtttgatgaaattgtcaaggaagtctcttcttatcttaagaaagttggttacaaccctgagaagatcccatttgtcccaatctctggttttgagggtgacaacatgatcgagagatctacaaacctcgattggtacaagggtcctactctccttgaggctcttgaccagatcaccgagcccaagaggccctcggataagccactccgtcttccacttcaggatgtctacaagattggtggtattggaactgtccctgttggtcgtgttgaaactggtgtcctcaaacccggtatggttgttacttttggtcctactggtctgaccactgaagttaagtctgttgagatgcaccatgaatcccttccgg

SEQ ID NO: 34571 - DNA, 410 bp, Gossypium hirsutum
  Clone ID: LIB3149-038-Q1-K1-C5
gtttcttaattttcattcgatatcgaagatgtcgggaaggggaaagggaggtaagggacttggcaagggaggagcgaagcgccaccgtaaggtcctccgtgacaacatccagggcatcacgaagccggcgattcgacgtttggctcgtaggggaggagtgaaacgtatcagtggcttaatctacgaggaaacccgtggagtcctcaagatcttcttggagaacgtcattcgcgatgctgtcacctacaccgaacacgctaggagaaagacggtgaccgccatggatgtggtttatgcactgaagaggcagggcaggactttgtatggatttggcggttagatgatttaaggtttaagtttgtaattagaggagctttggtaatgtttagtcgaaataacagattgggtct

SEQ ID NO: 34572 - DNA, 317 bp, Gossypium hirsutum
  Clone ID: LIB3149-038-Q1-K1-C6
ctgatcgggcaaagtatgaagctacagcacgtggctggacccagaagtatgccatgggatgatggtggttagtgggtaatacgtattggcttttgtacgatgccatgtatgtgttaaaaccttcatatattttggtttgggaaggaacttgtgattgtgcttagatttggatttgaattatgtggacatcttatatcaaaggtgggtctatggttgtaagagagaatgccattccattccatgtctttttatagcttgttatatgatgaagcatttcctaaaactttcatgcttataagtggaggattatggtttga

SEQ ID NO: 34573 - DNA, 383 bp, Gossypium hirsutum
  Clone ID: LIB3149-038-Q1-K1-C8
gaaaaaatcaaacctttttcatcgtagagcatagctaaaccagaagaaaggggaaaatggacgcaattgactcagttttcgatccactgagagagttcgctaaggacagtgttcgtctcgtcaagagatgccacaagcccgatcgcaaagaatttaccaaggttgcgttccgaacagcgatcggattcgttgttatgggattcgtaggatttttcgtcaagctcatctttatccctattaacaacattattgttggatccggttaggccttgtcaacgtttgctgaaaatcggtagaatgtttaagttaagaggtacgtcatgagtttatgaagtaatttcaatttagacttgggtttgtctttaaattcagtttttgttgaa

SEQ ID NO: 34574 - DNA, 271 bp, Gossypium hirsutum
  unsure (1)..(271): unsure at all n locations; Clone ID: LIB3149-038-Q1-K1-D1
actctattttcatccccagaatgcttctaatctcattcatatagtgccctattcattatctgtttgtttttttctattttctccctttatttgttcttttttttttttggttattctgagtttgtgtcctgtatcagtgtcgtgttgcaaaaatgtattgagaattttgctataatatattaatggcacttgnngtnnaaaaaaaaaaaccataaaacaaaaaaaaaaaaaaaaaaaacaaaaggataaaaggggcggacgctttaaaggt

SEQ ID NO: 34575 - DNA, 359 bp, Gossypium hirsutum
  Clone ID: LIB3149-038-Q1-K1-D2
caaatgtctgtaacaacagctccagttacatcacaggggattcatcagacagatcctctgctagctctttcaacttggtgggtaccagtgaagggcaaaccacagacgatttagatggttgtaccctacttcaccttgcctgtgaaacgggtgacattggcatgattgaacttctattacaatatggagcaaatataaatgtaatggattcaagaggtcaaacaccacttcatcgatgtattctcaaaggcaaggctgcagttgctaaattacttcttaccaggggagcagatccgcaggtgttaaatagggaaaataaaacccctgttgagctatcagtggaatcaaattttgatgac

SEQ ID NO: 34576 - DNA, 418 bp, Gossypium hirsutum
  Clone ID: LIB3149-038-Q1-K1-D3
atgggtttcgtgatgttcgcaccaactacaactacacggagccaactctagcaggcaacgcggggttggttgctgcactcgtggcattgtctggtgacaaggcaaccgggattgacaagaataccattttttctgcagttccaccaatgtttcccacaccaccaccacctccggcaccttggaaaccatgaaaactttttgatctttcttctgcccatgtgtgacttacagtctgatgattttggaattagtttttggtacgtaaatgaccttggaagtgtaagtaacgcaaaaaggcaagacaggagatgagtgatgagacaacctgcacaaaactggtggtggttcgtctgtcagattggggagtcagacaagcattcaaacattgataatttgtatatgaagtctatttggattt

SEQ ID NO: 34577 - DNA, 263 bp, Gossypium hirsutum
  Clone ID: LIB3149-038-Q1-K1-D5
gtcgaatataaaaacatcagtttcactgtctgggatgttggtggtcaagacaagattggggcgttgtggaggcattacttccaaaatacacaaggtcttatattctgggttgacagcaatgacagagaccgtgttgttgaggccagggatgaattgcatagaatgttgaatgaagatgaactgcgagatgctgtgttgcttgtttttgcaaacaagcaggatctttcaaatgcaatgaatgctgctgaaataactgacaagct

SEQ ID NO: 34578 - DNA, 337 bp, Gossypium hirsutum
  Clone ID: LIB3149-038-Q1-K1-D6
aaaacgggccgaccgacgcgtacggacgaatataaaatcatcatactcttttttttttatgtccaaggacaccacaagatgggtcgtttgtttatacattacttccaaaatacacagactctcatattcttgattgacagcaatcacagagaccgacttgttgaggccagggatgaattgcatataatgttcaataaagataaactgctacatgctctgttgcttacttatgcaaacaaacaggatcttgcaaatgcactctatgctgctaaaataactcacattcttgccctccattcccttcgacaacattactagtatatccataatacttgtg

SEQ ID NO: 34579 - DNA, 373 bp, Gossypium hirsutum
  Clone ID: LIB3149-038-Q1-K1-D7
ctttgtatacaatatatcaaaataatattacttttatcatctaatacaaaaactataaaattttctgtcttattaaaaaaaaaaaaaaaaaaaaaaaaaaaaaaaaaaaaaaaaaaaaaaaaaaaaaaaaaaaaaaaaaaaaaaggggccgccctttttaaaaaaacaaaaattttcttcccctttcttaaaaaaaaaaaaccttttttttggtgccccttaaaaaaaaaaaacttccccccctttaaaaaacaattaattgtaaaaaccttggccaccccaaattaattcccttcccaaaaaatcaaatttttccaatttggaaaaaaccccaataccccaactctattcccttttacaaaaatttttttaa

SEQ ID NO: 34580 - DNA, 320 bp, Gossypium hirsutum
  Clone ID: LIB3149-038-Q1-K1-E1
ctctgacacacactgatctagacaaggaaaccgaggagataatcgctgatgtgctcggcgtagaaggtttcagacagacaattgctggtaatattcttgtagggagctactgtgccttttctaacagaggtggcttggtccatcctcatacatccattgaagacttggatgaactttcaacgcttcttcaggttccattggtagctggcaccatcaaccgtgggagcgaagtgatagccgccgggatgaccgtaaatgactggacagccttttgcgggtcagacaccactgcaacggagctttctgtgatagagagcgtg

SEQ ID NO: 34581 - DNA, 253 bp, Gossypium hirsutum
  unsure (1)..(253): unsure at all n locations; Clone ID: LIB3149-038-Q1-K1-E10
gagtgaccattgcagactgtagagatgttttagccagcacacggtaactagaagaagctgcagagagagccatttatgagagcacacataagcacagcaagctgtataacttgagtcgcaggataccagagtggactcttaatgtggtggctcagattaagttgataattngtgagcatgtgcacttgatgggtgctttagtattgtgttgagtgggtgaagaataggaaatatctctatcgcttgttgctct

SEQ ID NO: 34582 - DNA, 109 bp, Gossypium hirsutum
  unsure (1)..(109): unsure at all n locations; Clone ID: LIB3149-038-Q1-K1-E12
cgctccatgttnttctctacccatctaacccaattgacctaatttcttggacttctatcacagcttactgttatgcatcatacgatcgagactttaagtcagtcattac

SEQ ID NO: 34583 - DNA, 361 bp, Gossypium hirsutum
  Clone ID: LIB3149-038-Q1-K1-E2
aaaatgtcttcaggttgcaattgcggatctagctgcagctgcggatctggctgcaattgcggtgagaactgctcaatgaaccttaaccttggatactcggagaagacaaccagcactcagaccatcatctccggagttgcgccagtgaagatgacctttgagggaccagagatgggcactactgaatcaggacatggatgcagctgtggatcaagctgcaaatgtaatccatgcacctgttgaagcttgatgaaagccatagattatgaaaaaagaaagcagcaaaataacaggcctctgtaatgatttattttcaaggatggatgcctgcaaggtctataattatgtctctctctgtctt

SEQ ID NO: 34584 - DNA, 230 bp, Gossypium hirsutum
  Clone ID: LIB3149-038-Q1-K1-E3
gtaatttgtttcgctctgctgacttggatactcaattcacatgtttcttaaagcaagctgcgattggaattcctacatgcccacttcttcaagtgagggaccatgttacaaatctttggatcaacattctgctttcgtatcggaaattttgggccacaatatcatcaactggacaggttattcttcctggggctcttaagcttcttcctctatatactcttgcattaatc

SEQ ID NO: 34585 - DNA, 333 bp, Gossypium hirsutum
  Clone ID: LIB3149-038-Q1-K1-E4
ctctcttaccctcctttcgtttcatttcatttcatttatctggttttcttttctcttcgcgggggtggatgctaaggattccacaaagacagtgtcctaactcccaactcatgtttctaaattctagtcttgtttaggtgggtttggcttggtttagagctttcttttcccgttttaagttgtgttgtttattactataatttgtcgacgagacaaaaagacttttgtttcgagttttttggtctggtttgattttttaagaatggcaaatgaagaagagaaaaacaatgatttctatgctgttttggggttgaataacgaatgcactcaaac

SEQ ID NO: 34586 - DNA, 224 bp, Gossypium hirsutum
  Clone ID: LIB3149-038-Q1-K1-E5
taaaaaaaaaaacttaaaaatttattttaaaaccccccaaaaacaaacccccgtccgttttttttacaaaaccactccccacacaacaaaaaccaaactaccaattctcttcatcaacattctactcttcatttacttccattttcctccacataatcatcaactttacatcctattcttcctcaacctcttaaccatcttcctttttctactcatccattcat

SEQ ID NO: 34587 - DNA, 411 bp, Gossypium hirsutum
  Clone ID: LIB3149-038-Q1-K1-E6
gaggactacaacggccgcatcgtcggttacgtcctcgctaagatggaggacgaaagcaacgggtgccacggccacattacctctctcgccgtcctccgcactcaccgcaagcttggcctcgccactaagctcatgaacgccgcccaagccgccatggagcaggtgtttggagcagagtatgtgtcgctgcatgtgaggaagagtaacagggcagcgtttaatctgtatacccagacgttggggtataagattcatgatgtggaggccaagtattatgcagatggggaggatgcatatgacatgaggaagcagttgaaagaaaagacgaaccatcatcatggtcatcatcatcaccaccaccaccaccatcatcatggtggtggatgttgttcaagtgatgcaagaagtgga

SEQ ID NO: 34588 - DNA, 277 bp, Gossypium hirsutum
  unsure (1)..(277): unsure at all n locations; Clone ID: LIB3149-038-Q1-K1-E7
aacattgngaactttgcctctgtatcataaaaccattccctaaggctaatcatgccgtatatcatagtcattactatacaaattttcgctacattatctttattagcatattgtattttgatagcggaaacccactcaatttttacaaatactgattttgttgatttacacaatcatctttatcaatttttgaactcaatcacttatttacctttaaaactattaaccatctcccaataatatccaaaactgtcaaccacattttacccattctcat

SEQ ID NO: 34589 - DNA, 408 bp, Gossypium hirsutum
  Clone ID: LIB3149-038-Q1-K1-E8
aacttttctaggtgttccccaaaataatgttcacccacatattcacaatatatcctaataaggtcattagaaataaaaaaagagctttcacttactttttcttttaattgtaagaccaaaaaccattctctatcattcctcatctctttagagcttctcctctttctctcaatttttttttttcctttttgcatgcttgataagaaattgatggcaactttgatttttatttccttaggtttccatttttttaaccctagtgtgttttttactcatgggctttagtcaaaactcttactaaaacaattggaccgtgctattatgatttgatcgagtaattacatatttcaagtagaaaaattgtgtgaatggattgatgtattagtctaaaacttggttcactcttaa

SEQ ID NO: 34590 - DNA, 242 bp, Gossypium hirsutum
  unsure (1)..(242): unsure at all n locations; Clone ID: LIB3149-038-Q1-K1-F1
gcacgagtatctccccgaagatcttcagaaaatgcagacaccatttaggagctatcttcaagatatgcttgctcttgtgaaagaagagagagcagagcgagaagcattgngagctttgcctctgtatcagcgaaccattccttaagggttttcatgccgtatctcatagtcattgctgttgaaattgtgtttgatatcttattgcgatggatttgatagcgagtgactgaatttacaatctg

SEQ ID NO: 34591 - DNA, 211 bp, Gossypium hirsutum
  unsure (1)..(211): unsure at all n locations; Clone ID: LIB3149-038-Q1-K1-F12
ataccgtagttagctatatagcgaganagaactaccagatcctatacgcgacgaccggaagccactgaatcgcgcatcgctcgatgattgaaactctacacgccgccaatcctgaaggggcgaaggtaaccctctgccgcctgcgacagagcctgtacatcggtgtaggatcagctatcgcgtatcgcagtatcgcaagcgtcacagcgag

SEQ ID NO: 34592 - DNA, 418 bp, Gossypium hirsutum
  Clone ID: LIB3149-038-Q1-K1-F3
gtcaagatccaagaacagggttcaattctgcctcggctgctttagatttcctagaggatgagaaatgtgcaaatactcatgtgacaataggtgggcagaaactcattttatcaacatggtctcaaaaagtacagctaaagtttctgaagcattttctaggaaatgatggattcgtgaagcatatgatggaaaatgaaaacttccatagtgttttcgacttccttccggaaagaaagaatgcttggggcaatgtactatatgtgcccgaaagagaagaggttactatttcgcttttccaacctatggttgctagacacaatgattgctctctgctaccattgctaaccagagacaagcagttagcaaagaaaaagaccatgtctcccaattcccacttgagcaaggcaaggactcaatt

SEQ ID NO: 34593 - DNA, 210 bp, Gossypium hirsutum
  Clone ID: LIB3149-038-Q1-K1-F4
ctgatttaaagacgcttgtgttgagagttagatgtttcccatgcctcaggacattgttcttaatttggttacctgttaaccttgatcatcatgtatgtatgattaatgcttttgtggccaccctgagggatagaggttagaagagtttgtgagacagttgtctgaatttgtagctcaacaaaactaattacttagttcgaggtaacagtt

SEQ ID NO: 34594 - DNA, 329 bp, Gossypium hirsutum
  Clone ID: LIB3149-038-Q1-K1-F6
cttgaaccttgcatggaagctcctttcggttgtgaagcaaagtaaaagaatgctggatccaggcatttacgcaaagctaatattggagcttggaaagaatcctgataaacacatccttgtagaagagttactgggtgatcttggagaaaaaagaataattgaatttgaattcacaaggactgtccagggatcatgaaaggttggattaaggcatagaaagttgaaaatggggagagcttgttttactggttcaagcaatcaaggcgtgaccccagtgtggtgatgtacacaacattgcttcatagtcgttattctgagaacaagtacat

SEQ ID NO: 34595 - DNA, 360 bp, Gossypium hirsutum
  unsure (1)..(360): unsure at all n locations; Clone ID: LIB3149-038-Q1-K1-G1
tgctgtcagacatgttcttttgagacagggggtgcttggtatcaaggtcaagatcatgcttgactgggatcctaagggtaagcaaggccctactactcccctacccgatctagtcacaatccaccctcccaaggaggatgaataaatcatgagagtagagcctgagccaactaatattgaggttccagttatggcttaaatactgttttggttgacatctttttgatttttggaagtatgtgagtttcttagttctatgtagctaaaagtttggcctcaaagaccccagcattttgtgggttcttctttntgtactctaatgtttctcctactatagntattacgtaattggtaattttc

SEQ ID NO: 34596 - DNA, 421 bp, Gossypium hirsutum
  Clone ID: LIB3149-038-Q1-K1-G2
ctagatttaggggagatagggtcattatcgtcatttcacgctatgaatcggcgataacgggggcgggtcatatcaacggcaaaataagagaagaaaagagatgtacagaggagagagagccgccggtggttccaaaggggaggtaggttcggtggatcggaaacggatcaacgaagcgcttgataagcaactggaacgatcgtcgccgtcaacatcgagagcaatcaacggcaaggataagtcatcgcagtcccttcaaatggggaagcatccacctgatcattaccgtgactcttgttctgcttctctacctaaaccgaacgcctccggtgatgaatctgaaactgacagtgaagagtcggatgttagtggttccgacggggatgacacatcttggatctcatggttttgcaatctacgt

SEQ ID NO: 34597 - DNA, 345 bp, Gossypium hirsutum
  unsure (1)..(345): unsure at all n locations; Clone ID: LIB3149-038-Q1-K1-G3
aaaaaaggcaactagacttgagaaagaaaaacagtctcaaaatgcagcagaagtcaggcttcgggagcctcttgctctccctcattttccttcctctcatcttctccgacgccagaaaggaggctcccctcggaggatggagtccgatcaaagacaccaaggacccacacgtgataaagatcgcggaattcgccgtcgaggagtataacaagcagtcaaatgggagtttaaagttggttaaggtggtgaaaggcgagacccangtggtggccgggacaaactaccggttgattttgcaggcgaaggaaaggaccttcgataacacgtataangctgtggtgtggg

SEQ ID NO: 34598 - DNA, 297 bp, Gossypium hirsutum
  Clone ID: LIB3149-038-Q1-K1-G4
caagagctcgatggcagcattttctcaaattatcaataatgaaggtgccaaatcgctgttcgggggggctggtgcaaacattcttcgtgcagttgcaggggctggcgtgcttgctggctatgacaagctgcaagtccttttccttgggaagaaatatggatctggtggcggctaatgtggaaggtgattctgctgccttaaagaatgatctagcgtcccaagttcgaataatttgggaaggacaaactgcttataatcgttctcgtacccagtaattaagaatttaatttgaaaaag

SEQ ID NO: 34599 - DNA, 408 bp, Gossypium hirsutum
  Clone ID: LIB3149-038-Q1-K1-G5
atagtattttgtttttttgttttttacaaaaacatccttcctccatttcagaccaaggaagggaaagcaatgaagccagtctttaccattatatcggcattattacttgccgtcatcgccaccgtcaacagctgccctccgtcagacagggcggcgctgttagcattcagagcagctctccacgaaccatacttaggaatcttcgattcatggactggcacggattgttgccacaactggtacggcgttagctgcgacagtgagtcacaccgagttgccgacatcaacctccgtggtgagtccgaagaccccattttcgaacgagctcaccggaccggttatatgaccggttttatctcaccggaaatttgcaagttgacccgtctttcaagtattactatagctgat

SEQ ID NO: 34600 - DNA, 410 bp, Gossypium hirsutum
  unsure (1)..(410): unsure at all n locations; Clone ID: LIB3149-038-Q1-K1-G6
atgctgggcagttcccgtgtaatcgttatacacactacatgacatcctctactagcatagagcttaatcttgctaggagggaaatggtcatcctcggcactcaatacgccggggaaatgaagaagggtcttttcagtgttatgcattatctcatgcctatgcgtcaaatcctctcgttacattctggatgcaatatgggaaaagatggagatgttgccctcttctttggattgtcaggtacgggtaagaccactttgtctaccgatcacaacaggtatctgatcggtgatgacgagcattgttggagtgacaatggtgtgtcgaacatcgaangtggttgctatgccaagtgtattgatctttcaagggagaaggagcctgatatctggaatgccattaagtttggaact

SEQ ID NO: 34601 - DNA, 352 bp, Gossypium hirsutum
  Clone ID: LIB3149-038-Q1-K1-G7
tgattttcaaagcctgatctctgaactgtctctggtaggcttcgtagttggctatccggttggcagacaacgacttgctcctgatgctacacaggtgaagctattcattgatgatctttcagagacgggaaaacttgatgggttaaagtttacgttctgggatgagcgctttacatcaaagaatgtggaattgctgataaagcctttgagcttgcatccagtactagcaaaaactgtagttgataagtttgctgctgttcaaattcttcaagcatacctggattatgtgaacaagaaggaacgtaggtgagatataaccctattggtatacatctaagcgttatgtcatctg

SEQ ID NO: 34602 - DNA, 390 bp, Gossypium hirsutum
  unsure (1)..(390): unsure at all n locations; Clone ID: LIB3149-038-Q1-K1-G8
tgattttcaaagcctgatctataaattgttttttttacgctacanaaacggctatccgggggccggttttctacttgctcctgatgctacacaggtgaagctattcattgatgaactttcagagacgggaaaacttgatgggtcaaagtttacattctgggatgaacgctctacatcaaaaaatgtggaattgctgataaaacctttgagcttgcatccagtactaacaaaaactgtagttgataagtttgctgctgttcacatacttcaagcataccttgattatgtgaacaagaaagaacgtaggtgagatataaccctattggaatacatctaggcgttatgtcatctgaataacacccggatcgtagctttgcaagtgaaaatact

SEQ ID NO: 34603 - DNA, 249 bp, Gossypium hirsutum
  Clone ID: LIB3149-038-Q1-K1-H1
gtgctaaccacatctgctggcatcatggaccatgaagaagctagaaggaagaatgttggtgggaaagtacttggctttttctactgagtcaaatttttgatattttccttggttcttttttaattccactccatgtagaactggatacttaactgcaattttaattttgaatgggaagtaataataatgttttgggttataaggttggaaattatgaatggtgggttggccttaaaaaaaaaaataaaa

SEQ ID NO: 34604 - DNA, 118 bp, Gossypium hirsutum
  Clone ID: LIB3149-038-Q1-K1-H2
ccaactcaatatccaacaattatcatcttttacaacaacaatgttcccctggattcagatcgcaatgcttttctatcaaaccttacctactttacacaattagaagattacctcactc

SEQ ID NO: 34605 - DNA, 344 bp, Gossypium hirsutum
  Clone ID: LIB3149-038-Q1-K1-H3
agcgaatatcattatattctgcagtataggactcgatgtaggatttattggctcgagcgacgggcgtagctgctgatattatgctaacatgcggaaagtcagtgaccgagtaaaggaaagcattcactattgatgatatgctcaataaaaaagaaaggcattcttcatctttcttgtaaggaaagcctccactattgtaattgtactcgataagaaagaaaggtatgctgcatccactgggataatatgaatcagagactctattgtcatgaccgtattctaagtctaacctagaaacactgaactcctaacacgaatgctgaacccctttttctttggtcggc

SEQ ID NO: 34606 - DNA, 398 bp, Gossypium hirsutum
  Clone ID: LIB3149-038-Q1-K1-H4
caaatattcaaaaaaatatggataagacatcaattatttaatttgcttagatttgtatatcttgtgttgctttaagggttctttgtgccttttgaattttcaccattttaatttagttaactatttttggtggaaaagatgcagttcatttcttattgtttgaaaggaaatatatgcttatgtaattatgctactttgaatcaaattctaatatccttaaaatagttgcaaaatcattcttatttacttcatgaacctctaagctatatttacatgacgttcgttcaagtttattataatgcaatatgctaaacctagtatacaaaaatgttttgatgtgatgtatggaaattgtttactattttttctctaatttgaaaactttatatgagtaagtc

SEQ ID NO: 34607 - DNA, 369 bp, Gossypium hirsutum
  Clone ID: LIB3149-038-Q1-K1-H6
gaggtggtggaattggacaccactaaactactaagctcacgttgcatggatgcatggattgctgtcattagtccaaaatgagagcataatcggaatgatttgttgaaacattatatattagtaataaattactaaaaagtcaaaaaaccgattccaattacaaaatctaccctaaattaaagctacttttatttgcattattaccttctttttttaattatttgtcatacgtatatattgctaaaagaaaaaacctttttgttatcaattagggtaatatttgatatatcgtaattgaaaatcgaagattcaataccatgaataaatattttctttatttcctatctcaacacgttcgacggctttacc

SEQ ID NO: 34608 - DNA, 131 bp, Gossypium hirsutum
  Clone ID: LIB3149-038-Q1-K1-H7
aaacaatgacccaataaaaaaaaacattcactattttttataccctcaataaaaaaaaaaaccattcttcaactttcctctaaagcaaacctccactaatataattttccccaattaaaaacaaaggtatt

SEQ ID NO: 34609 - DNA, 412 bp, Gossypium hirsutum
  Clone ID: LIB3149-038-Q1-K1-H8
gatttataccattttttcaatcaaaaatgatttgtacgggtataatcattttgacactggcgggccttgattcaattaaagcacatcgaatcctggaattaaccacaagaatgtattggatcaataaaaacagcaatttgtttttacacaatcgagattaccgatcaaattttatactcttagaaacactatcccgatgctttcgagatacatgcatattgttcttaatactgaaacgggaaacttgtggctaaaagagttactttgttttaaaaagaatggggtgcaaaaggagtacacacaagtcgtgtttaaccccataattctttttatgggtcttgaaaacacataatgttttatatgagacctcttaactattattatcttggcgagaataatgctcatcaagcta

SEQ ID NO: 34610 - DNA, 389 bp, Gossypium hirsutum
  Clone ID: LIB3149-039-Q1-K1-A1
ctctgcttgtccaggagcagcaggtatggtagcaatatgcaagggatggaatgcaagggcgaagctagtttggccaaaattaataaccctggatactatggacctggacctatgccagtgatgccttacggaatgcccccagtgaatgggatggggccaccagccgggtattattatactccatattgatttttccacatataaaatagataacttttctttgcttaccttctgtattatctttttctagttttctttccctttttatcgtttcctttgagatgatatgatgttctgaaatatgttcacgaaggacttgctcattctgtggatttttttttttgtgctgggaggttcatgatctggttgtgatgtctctttgtgctttt

SEQ ID NO: 34611 - DNA, 337 bp, Gossypium hirsutum
  Clone ID: LIB3149-039-Q1-K1-A10
ccttgatttacttttattcttgaggttattataaagagagatttttacaaaaaaaagaaaggaaaaaaaaaaaaaaaaaaaaaaaaaaaaaaaaaaaaaaaaaaaaaaaaaaaaaaaaaaaaaaaaaaaaaaaaaaaaaaaaaaaaaaaaaaaaaaaaaaaaaaaaaaaaaaaaaaaaaaaaaaaaggggggggccgttttaaagaataaaactttactgacggttaaatccaaggttttactttttttattgggcaaccaaaataaattcaattgcccgagttttaaaaacggggaaattggaaaaaccttgggtttcccaaattaattgccttgg

SEQ ID NO: 34612 - DNA, 401 bp, Gossypium hirsutum
  Clone ID: LIB3149-039-Q1-K1-A11
accaattaaagaggcatatgctccatccactagtgggtatccaggatcagctcatggtgctatttctggatccaaaaggccttcttcttatatggaatctcatgccggattcgcacaacctgtgaagcacaatgaccaatatctcacagaatgtatcgcacctgcttttcatcatcaaaggcaagcttatgcagggtatcttaagctagatcactatgaaagacaacctcctgctaagtacttcaaacctgctattgggaatgatgccctacctcatgcaggatttcttgagtcttctttcagaaagcaaagttttgatggagccagaaggattgccgagtatagtggcccggacaatcaaaggcctgttcatggatcaggtagtatcaccaatctagata

SEQ ID NO: 34613 - DNA, 383 bp, Gossypium hirsutum
  Clone ID: LIB3149-039-Q1-K1-A12
cccacgcgtccgcttatctcctaacctttcttttcgctcggagaatcggcttgggggggcctaaattgcaatccctttcagggggaaagggaaaatgtcatcatacgaaaacgccgcaggcgggaagctgaagctgcagggaaaagccttggttgttcaggctgctggaatcaacatgaaaaagaatcctctcaagcaaattcaacatgatgaccaaattacccagaacgatccctctgatgccgattctgctggtgaaaccacggaagtttctgttgatcccactgaagaagatatcaacaacgcagagagatcaagcggggagaaagccgctcctcattatgatgatcatcttaccccagcacatagacgatacattgagc

SEQ ID NO: 34614 - DNA, 416 bp, Gossypium hirsutum
  Clone ID: LIB3149-039-Q1-K1-A2
gccatggttaggttggtatgctccgacaggaagagcggccaagttgtcttcaaaaaggagggatacaccgacaaaaccggaaaataccagattcgtgtatccgaggatcacttggatcagatctgtgatgcagttcttgtgaagagctcccagcttggttgtgccacaatgtcccccggtcgtgaacgtgcccgtgttatcttgaccaacttcaatggcatttcatccaccacccgttatgccaatgccatgggcttcatggttgacgagcctgaagcaggctgtgctgagatgatgaagatgtatcaagaagatgaagaagatgtctagtgtgttggtttggatttatttgcatatgaaatatgatgttgtctgctatttgttatgtgaattgctccgttatttctacgtttaga

SEQ ID NO: 34615 - DNA, 409 bp, Gossypium hirsutum
  Clone ID: LIB3149-039-Q1-K1-A3
gatttttcttacaagtgcgctcggttggtgtattgaatggcttcaggcatattttcttgttcttgatgacatcatggacagctctcacacccggcgtggccagccttgttggtttagattgccgaaggttggtatgattgctgtaaatgacggtgttatacttcgcaatcacatcaccaggattctcaaaaatcactttcgtgggaaaccttactatgtggatctgctagatttatttaatgaggtggagtttcaaacagcttcaggacagatgatagatctgattacaacacttgaaggagaaaaggatctatccaaatactcattgcaacagcaccgtcgcattgttcagtacaagactgcctattattcattttatcttcctgttgcgtgtgcactggttatgtgt

SEQ ID NO: 34616 - DNA, 371 bp, Gossypium hirsutum
  Clone ID: LIB3149-039-Q1-K1-A4
ctgaaaccctaatcctaatcccagattccttctgtctacatcgtttagcaaatggcaaccgaggacccggcagtcgtggcagaccccgcacccgagacggaggaggacaagactgctgagaccaaagctacttcaaaatccggcagagcaaagaaagccaaagaacccaaaaccaagaaagctgcagctcctaggaaaccacgggctgctcctactcatcctccttacgaagagatgatcaaagatgcgatcgttactttgaaagagaggacaggttcaagtcagtacgccattgctaagttcattgaagagaagcagaagaatctttctggaaatttcaagaagcttctgcttgtccatttgaagaaact

SEQ ID NO: 34617 - DNA, 380 bp, Gossypium hirsutum
  Clone ID: LIB3149-039-Q1-K1-A5
ggccaacttcttggattagatgttggcagtgttcttgaagttaccaactgtttcccttgcgcgatccgcgaggaagatgaggagattgaagctgatggagctaattatcagcttgagatgatgagatgtctaagggaggttaatgttgataacaacactgttggatggtaccaatcaacgattttgggctcatatcagacagttgagctcattgagacttttatgaattatcaggagaatattaggaggtgtgtatgcattatctacgatccttcgaggtctaatcaaggtgtcttggctcttaaggctttgaagctatctgattcttttatggaactttaccgagctaatagctttactggagaaaagtgagggagaaa

SEQ ID NO: 34618 - DNA, 170 bp, Gossypium hirsutum
  Clone ID: LIB3149-039-Q1-K1-A6
gccaagcgtactgaacatcataatgaatgtttttatgcttatgtcacacatgaccagtggggaattggttaattcagttgtttgaactcttaattaacagatgactctgtttggcatgttgttcttccaatggaaaaatataacctttgacagcttgggctgatggcggt

SEQ ID NO: 34619 - DNA, 410 bp, Gossypium hirsutum
  Clone ID: LIB3149-039-Q1-K1-A7
ggaaaccatgccttttaagagcataagaatggaagcgcaagatcattttaagcaggggggaggtgtttctatgtacaaaatagatggtaacaaattggacgatctagtatgcgtgagacattctgtaaactccaagggctaagaaatattacaggttgatgcccttctgtattctctttggtggtatgagtgggagaaaccgttccttatcaccaacaaatcatcaatgagatgatgagtggccgtttgggaatagcaatctgtcattttgagtttggtgaaatgttgtatggtacttctgaatgctgtcctgtgtgtgaagcattgcccatgcttccaatgtggaaaaggccatagaagacattttgctctgtggtcgcaaactatgattacttgctacagggtttctc

SEQ ID NO: 34620 - DNA, 397 bp, Gossypium hirsutum
  Clone ID: LIB3149-039-Q1-K1-A8
ctttctcaacatctcgctgttcgatctcttagtttcttgggatttgttgggtggtgataccaaaaaggggagaaaacggagatgattcatttatctttttgcaaattgagatgtggatcatgatgcttttgtaaatatttgattacaacttagattctgggcaaatatcaaatgtaatatgataattatgtattgttagagcaaaaatggaaaggctgtttgccctcagtatagagcaatatcatctttgtatactgtattttatccatttatgtaccccatctttgattaaatcttagattttgagggtatcaaatataatgaaatttatgtatccttaaaactaaaaggaaaaaaaaaaaattaagctctgtggtcacaaactatgattacttgc

SEQ ID NO: 34621 - DNA, 196 bp, Gossypium hirsutum
  Clone ID: LIB3149-039-Q1-K1-A9
caatacccagccagacccacgcgtccgatttgacctgtaaatattatatattaagattaatatataaataaaaaattagaggaagagtatattatatataaatgagttattaatcaaaaaaaaaaaaaaaaaaaaaaaaaaaaaaaaaaaaaaaaaaaaaaaaaaaaaaaaaaaaaaaaaaaaataaaaaaaaaca

SEQ ID NO: 34622 - DNA, 393 bp, Gossypium hirsutum
  Clone ID: LIB3149-039-Q1-K1-B1
ggagaaattgttgaaacatgtgttttggtcgaacggaccggaaacggagcatccgacggtggagaataaacagtgtgccggtaaggaatttttggtgttgatttctaggttgtttgtggtggaacttttccgacgttatgatacgtttgagattgaagttgggacatcgacgtttggggctgccattaccataaagtcgttaaataaagcaagcttttaagtatactggaatattcgtcaatgcaggggctttgtcaaatgtgtcatgttttttcttcaataaataatgtattatcgaatgttgaatttccgtttatgcaccatattttatataactaaaatatgtagccaattcttgtattatttgaataaaattggttaaattttactatt

SEQ ID NO: 34623 - DNA, 397 bp, Gossypium hirsutum
  unsure (1)..(397): unsure at all n locations; Clone ID: LIB3149-039-Q1-K1-B11
atggaattgatgatttaaggtctgtaagacctgatacaaatatgattagagagtgtgtggcagaaaacctgtcttcagagaatgaactcggtggtgctgtttgggatattttccggagggaggatgtacccaagttaattgagtacttacagaagcatcacaaagaattctatcacattagtaatcttcccgtgaattttgttattcatcctattcatgatcagaccctttatctcactgaaagacataaaaagcagcatgaagatcaaggttgttgcacccccccaccgcaaacattaatgtcaatagctattgtacgagaaattttaaaattcgatgggaattatattttatacttggttttgtaaaaaaataaanctataaataaaaaactaaa

SEQ ID NO: 34624 - DNA, 224 bp, Gossypium hirsutum
  unsure (1)..(224): unsure at all n locations; Clone ID: LIB3149-039-Q1-K1-B12
atcgaagagaagtatacatggaagatttatttggagagactattgaccctgacgagagggtatggattctggaagcatgtttccaaccttgaacgccgtgagagtcgtcgttaccttgagatgttttatgctcttaagtaccgcaagctggctgaatcagttccattggcagaggagtaaatttaagctgttaaataacattgggccggtttttcttggngaat

SEQ ID NO: 34625 - DNA, 225 bp, Gossypium hirsutum
  Clone ID: LIB3149-039-Q1-K1-B3
gttggcgacaatgtaatcactgaagatgatatcattgctctcattaagggaagtgagggggtggcaagcctgttgaagcttatctattggctaatcctgaatcctgcaactaggatattggttgctttgaattctgattcttggttttaaagagtggtcattgcttttaatggtgtgttttttatattttctttttccttttaaaacctaaattgtcttctaatt

SEQ ID NO: 34626 - DNA, 293 bp, Gossypium hirsutum
  unsure (1)..(293): unsure at all n locations; Clone ID: LIB3149-039-Q1-K1-B5
cgggcggggggaaaggatgaaataacttaanaggttatattgtctctcaacaaagcatgcaacggggggggctaatctagtttaaccttatctaatttctaatcctgaatcctacaactaggatattggaacctttccaaccttattatacgttaaaaaaaaaagtcattacttctaatggtggggctgccataatcacaaattcctttaaaaaaccaaactttcttctattctggaaaaatcatcaattgcaaaaactatttcaaataaatcatcttttttcttcaataaat

SEQ ID NO: 34627 - DNA, 406 bp, Gossypium hirsutum
  unsure (1)..(406): unsure at all n locations; Clone ID: LIB3149-039-Q1-K1-B6
ccgagtcgaaaacgaaaccctaaattcatttctccctcccccttcaccaccggcaggggaaaggaagtacaacccacgtgnctcctcctctcgccgtaagagccgcaaggcccatttcacggcactttcgtccgtccgccgagttttgatgagcgctccactctcgaccgatctgaggtccaaatacaacgtccggtccatgcctgttcgcaaggacgacgaggtccaagtcgttcgcggtacctacaaaggccgcgaagggaaagtcgtgcaagtgtaccgacgcaaatgggtgatccacattgagcgtatcacgcgggagaaagtgaacgggtcgaccgtcaacgtcggtatcaacccatcgaaggtcgtcatcaccaagctgagactctacaaagatcggaag

SEQ ID NO: 34628 - DNA, 411 bp, Gossypium hirsutum
  Clone ID: LIB3149-039-Q1-K1-B7
gcaccaatgtggcttgtggcactgcccatttagacgatgctaaaaaagtagctgccgtgagctgatgcaactgtacttgttatgggcatagatcagagtcaagaaagggaaagctttgacagagttagccttcttttaccaggacaacaaccacttttaataactgaagttgcaaaagctgcaaagggacccgtgattctcgtcataatgtccggtggaggctttgacatatcgtttgcgaaaaacgatgataaaatcacaagcatcctttgggttggttaccccggcgaagccggtggagccgccattgccgatgtgatatttgggtattataatccaagtggaaggctaccaatgacatggtacccacaatcgtatgtcgataaggtcccgatgacaaacatgaacatg

SEQ ID NO: 34629 - DNA, 319 bp, Gossypium hirsutum
  Clone ID: LIB3149-039-Q1-K1-B9
cccacacatacacaatttgtgtggtatcttttctactttctttcaacttcgcatgtatggggtaaatcttaagtacggctaaattttgccattagcccctatattctacaaaagttagaacatctaacccttatgtgctaattcggtcattaataaacattccacttcttgcaaaaaaaaacataagatgaacatcggaattacaaaatagaatacaagcataacacataaactgaatatcttaattaaaataaacaataaatgggcaggcgctttcaatattccaatttatacacccgttggttgaaaccattaacct

SEQ ID NO: 34630 - DNA, 380 bp, Gossypium hirsutum
  unsure (1)..(380): unsure at all n locations; Clone ID: LIB3149-039-Q1-K1-C1
caattgccttgctccattggtagtggacattcacttcaagttaggcattgttgagggtgggatggccactgtccattcnattactgcaacccaaaaaaccgttgatggtccatcaatgaaggattggagaggtggtagagctgcctccttcaatatcattcccagcagcactggagctgccaaggctgttggcaaagttttgccagcattgaatggcaagctcactggaatggctttccgtgttcccactgttgatgtctctgtagttgacttaacagtgagacttgaaaaggctgctagttatgaagatattaaggctgccatcaagaaagaatctgaaaccaacttgaagggaattcttggttacgtggatgaagatt

SEQ ID NO: 34631 - DNA, 402 bp, Gossypium hirsutum
  Clone ID: LIB3149-039-Q1-K1-C10
gctgcccagaaagtcgtcgaagtcaatgctcttgccaaggcattggctggtcagaaggatgaggccttcttcactgccaacgcatctgctcaggcttcaaggaagtcctccccgagagtgaccaatgaggctgttcaaaaggctgctgctgctttgaagggctctgaccaccgtcgtgctacaaatgttactgctagactcgatgcccagcagaaaaagcttaacctgccagtcctccccaccacaaccattggatccttccctcaaactttggagctcaagagagttcgtcgtgaattcaaggctaacaagatctcagaggatgattatgttaaagccattaaagaggaaattaagaaagttgttgaccttcaagaagagcttgacattgatgtcctggtt

SEQ ID NO: 34632 - DNA, 403 bp, Gossypium hirsutum
  Clone ID: LIB3149-039-Q1-K1-C11
gcagagttcaaaaatatgttgaaacattggatatgttgaagattaaaaacgccatgcctagtaccaatggagctcaatccgaaacacagaatcgacataagcatagtgttcgaaaacaagagcagcaatccaggcaaagattagcaccaatccaggagcaacaatcgagcaactcggtttctcatttgccaatccatcaacaataccagcacaagcatcagcaccagcaggcatctggtccggtcgtagttactacgaaatgggaaacattcgattcatccccggcaacattgccggtcacctcgacatctacatcttcatcaaccgctaataactcagccccaccgaagttcccctgggaattcttcgattaaagacagtatgccactatgtcctctttggt

SEQ ID NO: 34633 - DNA, 401 bp, Gossypium hirsutum
  Clone ID: LIB3149-039-Q1-K1-C12
ggaaacaaaggccttcatcttagcactccttcgccccttatctcatcgcaatcatgatcgtgccagaaaagaaccgcagggagatatcaaagtacctctttcaagagggtgtttgctacgccaaaaaagattacaacttggcaaaacacccagaaatcgatgttccaaatcttcaagtaataaagctgatgcaaagcttcaaatccaaggaatacgttcgtgaaacttttgcttggatgcattattactggtaccttaccaacgatggcattgaatttttaaggacttaccttaatctcccctctgagattgttcctgctactttgaagaagcaaactaggcccggcggtggtcgtcccatgggtccttctgatagccgcccacgtggtccgccacgcttt

SEQ ID NO: 34634 - DNA, 415 bp, Gossypium hirsutum
  Clone ID: LIB3149-039-Q1-K1-C3
agtcgatgtcgaatgcagaaaaggctccgtacaaagtgaaagcaacggaaaggaaatcagaatacgagaagctcatggcagcctacaacaagaaacaagaaagttcagatgatgaggaagaagccgagtccgaatcatcaaaggatgatgaagaaagtgaggacgatgattgaatccaggatggttttggattaggttctgtaaatgaaaccatgtttaaaaatactgtctttagcagcattgtatgatggtatgtttgcttgatatgtcgtgtgcttggttttcgatgtgaaagaaaacgcagctcctatatttctatattcgcatatatgtttgtgttaccatgttgaaggcactgccactgcaaaagagattactgaggatatggcggacggccattagtggcagcaactcg

SEQ ID NO: 34635 - DNA, 343 bp, Gossypium hirsutum
  Clone ID: LIB3149-039-Q1-K1-C5
cccacgcgtccgcatgattctcctcagaaaacccaaggaggctccttcaaaatcctaggcgaatttctggaggtaacaccatgttgcagcattaattgtgttccacctcttgttactttacccttcctaatattttttttccttaaatttaatttccaaggtttcttctttttcccccctctttaatcaatcatcatgtacctcctttttagtttgatttaagttcaaagttgttgattttgggttttaatttttgtattgttggtgataaactgataaaaggaaaggaacgaaattttttgttctttttttttttcaattgagagtgaagaatctttgttgt

SEQ ID NO: 34636 - DNA, 411 bp, Gossypium hirsutum
  Clone ID: LIB3149-039-Q1-K1-C6
gctgtccgggacgcattccggagactagtttgggtggcgaacgtgacatctctgggtgggttcgacacatgttactcggtcccaatcaatgcaccgaccataacatttatgttttcgggcatgaacgtgacactgccacaagagaacctactgctccacagcacagcaggcagcatcacatgtcttgcgatggcatcggcaccagcgctgaatgtgatcgccaatatgcagcagcagaaccatagggtggttttcgatgtgccaaattcaaggatgggggtcgcccgtgagcgatgttcgtaaaaagtgtggggtctttttcttctaacttttgggaaacagtgttggtgttgattaaaagcagaatatatctgattaataatgaaagtcaaatttttgtagttatatatt

SEQ ID NO: 34637 - DNA, 412 bp, Gossypium hirsutum
  unsure (1)..(412): unsure at all n locations; Clone ID: LIB3149-039-Q1-K1-C7
gcagaactatggggagaaagttctcattcattttgaagattttgcaaatcacaatgcatgtgatttgcttgctaaatatggcacaactcatctggttttcaatgacgatattcagggaacagcatctgtggtccttgctgggcttgttgctgcattgaaagtagttggcggaaccttggctgatcatagattcttattcctcggtgctggggaggctggtactggcatagcagaactcatagcacttgagatttcaaaacagacaaatatgccacttgaagaggctcgcaagaagatttcgcttgtggactccaagggactgattgttaaatcccgcattgactctcttcagcatttcaagaagccctgngctcatgatcatgaacccatcaagaaacttgttgatgctgtt

SEQ ID NO: 34638 - DNA, 400 bp, Gossypium hirsutum
  Clone ID: LIB3149-039-Q1-K1-C9
gcaaacacaaagctttcaagcaacaagactgttagaaggattagggttcgtggtggaaaggtcaagtggcgtgctctcaggctcgacactggaaactactcgtggggaagtgaggctatgactcgtaagacccgaattttggatgtggtgtacaatgcatccaacaatgagttggttcgtactcaaactctggttaagagtgctattgttcaagttgatgctgcaccattcaagcagtggtatctccagcactatggtgtcgacattggtcgcaagaagaaaacagcagccaagaaagaaggagaggaaggtgaaactggcactgaggaggtgaagaagagcaaccatgtcttgaggaagctggagaaacgacaacagaatcgcaagctcgatccacata

SEQ ID NO: 34639 - DNA, 79 bp, Gossypium hirsutum
  Clone ID: LIB3149-039-Q1-K1-D1
aaaaaaaaaaaaaaaaaaaaaaaaaaaaaattaatttaaaaaaaaaaaaaaaaaaaaaaagggggggaaaaaaaaaaaa

SEQ ID NO: 34640 - DNA, 51 bp, Gossypium hirsutum
  Clone ID: LIB3149-039-Q1-K1-D12
tttcgtttattcgacgtcatagctcttctaaagtaagttcttttttcaatt

SEQ ID NO: 34641 - DNA, 365 bp, Gossypium hirsutum
  Clone ID: LIB3149-039-Q1-K1-D2
agactggccaacaaactactgatcgaattatggtggaacatataataagggaagagaacgggatggctgctcaagagatcctaaaactgactagcgagcttattgccgtccggcttccgatcatagagacttaaagggaatgtcctctagattagaaggaagcaacatctaatgtttgttctgctgcaccaagacatgccgatctaccaaaggtgctgcaggttcaaatgctatttgcttacaagaacggcaaggaatttgcatcaactgcatctgaactgacgccagattgctgagacaatcagcagttgatacaattgttatacatacgcgtggcttcacctgaagcaaaactgaagattctg

SEQ ID NO: 34642 - DNA, 418 bp, Gossypium hirsutum
  Clone ID: LIB3149-039-Q1-K1-D3
aagaacatcattcaacctcgattcatggttcagcttttgcacaaagccagaagatcatcggtgccaaccaaaacatgttaattcttgaacattcggctaagaactgttccacaaaaacccaagtaaaagcccgtccggtagttggttctaagcttgtagcacaaggtgttcttcgtaaacccgggaatggctcagctcttggtcccaaggctccggttcaaccaccacctgaaatatggacaaggggaaatggccttgatgaagttgttgacatggcagatatgttgcaaatggaatcccaagattggttcctaggatttgtcgagaaattcttggatgccgatgtagacacatctgttctatccgacaacggtcaaatagccgggatgttgacacagctcaagagtgttaatgactg

SEQ ID NO: 34643 - DNA, 410 bp, Gossypium hirsutum
  Clone ID: LIB3149-039-Q1-K1-D4
gcgtgcgaagagcattatttaaattttattcatggtttatttttttcacaaagccagaaaatcatcggtggggaccaaaacatgttaattcttcaacattcaactaacaactgttccacaaaaacccaaataaaagcccatacggtagttggttctaaacttataacacaaggtgttcttcttaaacccaagaatggcttattttttttttccaacgctccggttcaaccaccaccttaaatatttacaaggttaaataacctttatgaaatttttttacatccacatatatttcaaatttaataccaacattttatactaatatttttttataaaatattggattccgatgcacacacatatttactattcttcaacaaaaaaatatcctttttttttacacattttaa

SEQ ID NO: 34644 - DNA, 413 bp, Gossypium hirsutum
  Clone ID: LIB3149-039-Q1-K1-D5
gcacaaactcaaacgtcttgtccagtctctaaattctttcttcatggatgtcaaatgccggggctgtttcaacataacaacagtgtttagccactctcaaacagtggtggtatgtgggaattgtcagactgttctttgtcaaccaacaggaggaagagctagactcactgaaggatgctctttcaggaagaagggtgattgatctcatattttgctattttatgattcacaaaaacaaaagaaagtaatctttggatcaaatatgggaatcatatgagtaatctttttcatgtgtttcagttatgacatatgtttgaagtttatttttgtagtaagtttgttcctaagctttgatacttgatgatggtattaatcaattatggattgtctttgtagtggatgaagtttatttt

SEQ ID NO: 34645 - DNA, 409 bp, Gossypium hirsutum
  unsure (1)..(409): unsure at all n locations; Clone ID: LIB3149-039-Q1-K1-D6
cttgctttancagcagtttcttccctttcatagttgctgaggatgatgtttgttgagagagccgaatgcttgagagtttactggagattactgacactgatgccgatgttggcagaatggaagccaaaaatgtagccatggacttcattcatgaagttggttggcttcttcatagaagtcaattgaagtctagattgggccagttggatcctagctcagaatccttttctctaaggcggttcaagtggcttatggagttctctatggaccatgaatggtgtgctgtagtgaagaaacttctaaatattcttcttgatggaacagtgggctctggggagcaccactctatctaccttgcattaacagagatgagtcttcttcacagagctgttaggaaaaattgtagacc

SEQ ID NO: 34646 - DNA, 208 bp, Gossypium hirsutum
  Clone ID: LIB3149-039-Q1-K1-D7
aattctctaccaattacttaaaaacatttccacaaaaacccaattaaaaccccatacgttaccttgttctaaacttataacacaaggtgtttttttcatacccctcaattgctcacttctttgtcccaatgcttccctataaccaccacctttaatatatacaaagccaaatcgcctttattaatctttctacaccatcaatattttt

SEQ ID NO: 34647 - DNA, 142 bp, Gossypium hirsutum
  Clone ID: LIB3149-039-Q1-K1-D8
atgattcaggaaaaccagttataagtttttctttttgtactattgtgttcctgaggctagaatctttaattgttttggtattttcttgattcttctgaaagttatgttacaagcaaaaatccattttattttggttttttag

SEQ ID NO: 34648 - DNA, 224 bp, Gossypium hirsutum
  Clone ID: LIB3149-039-Q1-K1-E1
ggagaacaatgtactgcatactcaacgggaccgtgcacaacctactgcctttgcaagggtggagcttgcaatgccttcatgtgagttaccagatgagatgctatcattaccacattctgtgttgatcagaacgaatatacgcctgccctgaatacagcatccaaagctagctgtactaccaacttaataggtacaacgaatgcagccattcatgacaaaacatt

SEQ ID NO: 34649 - DNA, 398 bp, Gossypium hirsutum
  Clone ID: LIB3149-039-Q1-K1-E11
ggaaagggcggggggtttttgaattagttgcctccgtttaataattaactttttgcttggctccctactctctctccaagatggacagccacgtggagcctaccatcgccaccgctggtcctaccgcgctctctccgccgcgcgattctcttgatctcattcccgtcggatccgtcgaggcagaggaggagattgagacattatctcctccgtccgaggaggatcacgaccacgctaacggtcaaaatcgggatcaaaagcagaatcaggagaactcgtcggcgactgctgtccttactgatgatctcaaaaataagatcattaagcaggtggaatattatttcagcgatgaaaatttgccgaccgataagtacatgatgagtctgattaagaagaac

SEQ ID NO: 34650 - DNA, 338 bp, Gossypium hirsutum
  unsure (1)..(338): unsure at all n locations; Clone ID: LIB3149-039-Q1-K1-E2
ncggaaaagaacaanctacgacatnagcttgcaagtaagatgatantgcattcctctcttaaacatgaggtgctcaggttttattcctcatttggatattttttatatataagacttaatttcccctgagattttcttgttagtttggattattacaaaacataatcagttctttgattaattatatagatttatgcaatcagcatattctgttttgaaccaaaattttgtttccttacaacttaagagttgatgttaacccaagttttcatcttacatttatttggacgtgtatgattcggaaaactttaaaaagttcgaatatacatttgttggag

SEQ ID NO: 34651 - DNA, 307 bp, Gossypium hirsutum
  Clone ID: LIB3149-039-Q1-K1-E3
ctggcattgcattaaatgacaattttgtttttcttgtcgcgtggtacgataacgaatgggggtgcagttctcgtgtgatcgacttgatccggcacatggcttctgcctaagtgagtgattttggtgaaccaaactcatttcataatggactttttaataatagcctcgttcttcagctttagcaaaatatggaagagatgctatgggaataataatagaaattgctcgggattctgggagtttctaattttacactgtaattgtgttctgtctgaaacacttgtaatatatataattacaaggaacc

SEQ ID NO: 34652 - DNA, 408 bp, Gossypium hirsutum
  unsure (1)..(408): unsure at all n locations; Clone ID: LIB3149-039-Q1-K1-E5
ggatgtcaatgctgctgttgccaccatcattaccaagagaactattcagttcgttgactggtgcccaactggattcaagtgtggtatcaactaccagccacccactgtcgttcctggtggtgatcttgctaaggtccagagagccgtttgcatgatttccaactcaaccagcgttgctgaggtgttctcccgcattgaccacaagtttgatctcatgtatgccaagcgtgcctttgttcactggtacgtgggtgagggtatggaagaaggagaattctcggaagctcgtgaggaccttgctgcacttgagaaggattatgaagaagtcggtgctgagtcangcgaaggtgatgaagaaagatgaaaatgagtactaaataagtaatgtttgagtggagggcttgcatt

SEQ ID NO: 34653 - DNA, 238 bp, Gossypium hirsutum
  Clone ID: LIB3149-039-Q1-K1-E6
aagaatcttgacttgaactagagggttcctgctcattttggttagtgcaaatcccaacaggttttcttgtttggctccaagttgttgattttacttggtaattttattgtatttgcgttgtttgcctgttcatttaagtgcttggagccaatatttgcagactagtcactcagaatcgatcaaattcaataatccaaggaattcttttccccgctgaaataatatggagtttttattt

SEQ ID NO: 34654 - DNA, 412 bp, Gossypium hirsutum
  unsure (1)..(412): unsure at all n locations; Clone ID: LIB3149-039-Q1-K1-E7
gtggatcttagctttaagcaaaaacaactttaaataaataaataaaaataaaaacagtgggatatagaataaaactactgcgtatccaattcaatccaaagtccctttcaaactcagtataccgttcgaagaaaaaaaccagcaaaaacaagtgttttttttccttcacagatctgagatccaaaagcctctcattcttcctctaagtgtaaagaattatttcaaagatatttattataagagagtaaaagcaagcaaacatgtcaagaaggcaagtaagttccacgcgccgctttgttgacagcggaaacttcccattctctggtgctntacattctaaatcccgatcttctcctattttatctatcgctcttgtcgctgtgggagctatccttctcattggctatgccta

SEQ ID NO: 34655 - DNA, 377 bp, Gossypium hirsutum
  Clone ID: LIB3149-039-Q1-K1-E9
cgctgttgcccaatttccttttgcaaccgttggtgggcgtattcccggcttaatggaagggggagacatgtttgtaggcagaactagaaagaatttgggtttagaaccttaagctacacacacacacatacacatatatatttgccattgtatttcctcatttccacctttaattcctttttgcttataatgtttcacattttttgcacccctctgttggctgtttcatttgtatgttgttttgctttgcgcttttaaatagattctcaataagatttgatggtaggggcatgtatgtttatttgttagtacagatcaattcttttgcaatgaattatttagacaagttgcaagtaaaaaaaaaaaaataaaagggc

SEQ ID NO: 34656 - DNA, 392 bp, Gossypium hirsutum
  Clone ID: LIB3149-039-Q1-K1-F10
gcgaaagaaaaaaatgcgaccacctatggtcggcggaggttttaggggcggaagggacggtggtcgagggagaggaggtggccgaggaggctttggtcgtggtggaggacgtggtggcggtgggttccgtgatgaaggacctcctgctgaagttgtggaggtctctacctttgttcatgcatgtgaaggtgatgcagtgacaaagcttaccaatgagaaaataccttactttaatgctaatatttatctgcagaacaagacccaaatagggaaagttgatgaaatctttggtcccatcaacgaatcctatttttcaatcaaaatgttagaaggtattgtggcaacttcgtatgctccaggtgataagttttatatcgatccgagcaagcttt

SEQ ID NO: 34657 - DNA, 403 bp, Gossypium hirsutum
  Clone ID: LIB3149-039-Q1-K1-F11
atgcaaagaagccacagcggaaatcacttcccaaactgccttctcagaagactaggctgggtggttcaacaaatgacgaaaagacatctaatacgtccagccagaaaaaggtaaatgcacctaaagcatctaccgagggaaagatagccttgcctaaagcaataaatgaagaattatctccaacccaactgcagccagcagtttctgctgctggttcagatgaaagtcagcgagacattgatcaagtggacttggttcaagagccgattgcactggagcattaagcatggcaatggtttcaagtggatgttcatatacaaagttcttgacctgaatttgcctaaataaggacgtctaagactgaattatttgatgatcaaggcataaaaaagattatacatta

SEQ ID NO: 34658 - DNA, 399 bp, Gossypium hirsutum
  Clone ID: LIB3149-039-Q1-K1-F12
ctcggcgtcagcatttgagttagacgagtctgatatctacaacaacggtgtctggactgggtctgactcgcctgagttcaggtccaccagtcgagtggcgaagaagcagtccaacaagcgcggcggcggagggaattccgtcgtcggaggggcgccggcctccctgccggtcaacataccggactggtcgaagatcttgagggaagagtaccgagataataggaggagatcggagagcgacgataatgacgtggaagccgatgattggtcggaaggaggtgtcaggattccgcctcacgagtttttggcgaagcaaatggcgaggacgaggatcgcgtcgttctcggttcatgaaggggtagggaggactttgaaaggaagagatctgaggagggtcag

SEQ ID NO: 34659 - DNA, 414 bp, Gossypium hirsutum
  Clone ID: LIB3149-039-Q1-K1-F3
aagagagagagatatatacataataaaaattacttttcaaaagaacacaactatggctcctgatagagaaggatcagatgcttcagtggaagccatggttgctcaagtcgaaaaacacccaatttcatcgatccttatcatcattgctatgcaaacagaagctttgccggtggtgaataagttccagttgattgaaaaccctcattcttcgtttccaaaaggggtcccttggatccattatcatggtgcatacaaggacatcataatcaatctagtttggcctggaaaagatttaacctttggggttgatagtgttggcacgatttctgcctctcttgtgacctatgcatctatccgagcattgcagccagacctaatcataaatgctggcactgccggcggctttaaggaaaa

SEQ ID NO: 34660 - DNA, 435 bp, Gossypium hirsutum
  Clone ID: LIB3149-039-Q1-K1-F4
ggcgagccacgcgtgcgcttcaaaaagttgcaaggcaagccagatcttatcatcggaaactacagtgatggcaatgggggggcctccttgctcgcacataaattgggtgtcacacagtgcaccatcgcccatgctttggagaagacaaaatatcctgattcagatatctactggaagaagcttgaagacaaataccatttctcttgccaatttacagctgatctttttgcaatgaaccatacagatttcatcatcaccagtactttccaggaaattgcaggaagcaaggacactgttggtcaatacgagagccacactgctttcactcttcctggtctctaccgtgttgtacatggtatcgatgtgtttgatcccaaattcaacattgtttcccctggtgctgatatggagatatacttcccttacaccgaagag

SEQ ID NO: 34661 - DNA, 213 bp, Gossypium hirsutum
  Clone ID: LIB3149-039-Q1-K1-F5
ttaaaaaactcctccatggactcaagggtggttcagccggtccatctcacttagagcacccgcctgatcatccctactgacggcgatactctccttgccttaatagaccgggtcgttcctcccgcacttttacttttaaaaaaataaagtgctctaaacaggcctacgcttgtatacattaacatcggataacaatataagatttcgatccta

SEQ ID NO: 34662 - DNA, 410 bp, Gossypium hirsutum
  Clone ID: LIB3149-039-Q1-K1-F6
catcagtcaagaattaaaccatggcaacgtatgaagtcaaagttttgggttcctggccgggtccatttgcgatgaggcctaggattgcccttaacctcaaatccctcacctatgaatacattgaagagaagttatgggaaggcaaaagcgagcttcttcttcaatcaaaccctgtttacaagaaaataccagtcctcattcacggcgataacaagccaatctgcgaatctctcatcatcgtacaatacatcgacgaggcttggtcttccggtccttctattcttccttctgacccctgcgaacgtgctgtcgctcggttttgggctgcatatcttgacgacaagtggttcccagcggtgaaaagtataggagtcgctaaaggagaggaagcaaagaaagcagcaatagcg

SEQ ID NO: 34663 - DNA, 410 bp, Gossypium hirsutum
  Clone ID: LIB3149-039-Q1-K1-F7
cacccatcgccaagatgcagatcttcgtcaaaaccctaacggggaagactataaccctagaggtcgagtcttccgacaccattgacaatgtcaaagctaagatccaagacaaggaaggcattccacctgaccaacaacgtcttatcttcgccggcaagcaactcgaagatggccgcaccttagccgactacaacatccagaaggaatccactctccaccttgtcctccgtctcaggggaggtgcgaagaagagaaagaagaagacctacaccaagcccaagaagatcaagcacaagaagaagaaggtcaagctcgccgtcctccagttttacaaggtggatgagtccggtaaggttcagagactgagaaaagagtgccctaatgcggaatgtggcgccgggaccttcatg

SEQ ID NO: 34664 - DNA, 335 bp, Gossypium hirsutum
  Clone ID: LIB3149-039-Q1-K1-F8
gagccatacttatggtataatgattagtatacatacctaaggcatgctgtgctcgggtggttctttgttcaacttaatcggatgtatacagatactgtacaaaaactgcctactaattttgagtcgaatattatgagatgttctgtggttcctcgattcaaatacctatcaaccagtgctccagcattgcatcatagagggaataatgggaaaccatattatggctgcatccaatgatgttacttcaagaagatcctggaaagcttatacaaatggagagcattccaaaaaaggtgatttgtatgatcaccagagttttggtgttgcaacaccat

SEQ ID NO: 34665 - DNA, 383 bp, Gossypium hirsutum
  Clone ID: LIB3149-039-Q1-K1-G1
gctcagggagaaccaagtctcactggtcattaaatcattatggacaccaaaagccgctcgggcgcccatgaatgcagtgctgattctggaaaggaccctaccaaggtggacaggcaagcaccttacataagcaggcaggctatcaagagcaatctggctaaggggcatgaccaaaggtgaattctgcagggttcttatactaacggtgtgcctgagcacttgtgtgtctttgtagacagctatggaactggaaagattactgacaaagaaatcctccaaaatgtgaaggagaacttccacttcaggcccagtatgatcaccatcaacctggatctcaagaggggtggcaatggccggttttttgagacagctgcctacggaca

SEQ ID NO: 34666 - DNA, 269 bp, Gossypium hirsutum
  Clone ID: LIB3149-039-Q1-K1-G10
acccgatacagacattgtttcggtgattagcatatctccaaaggtacttatatgcagattgatccaatcaagtgttgactgttgtgcataactacttagttatgtatcaaagtttctatgtcccaaggtatgagcatggtaactttattggcccaacaatcttatccaatgttaatgtcactcatggatttgtccaagaagaaatttgtgaccctattcatcctgtgcattgatgctgacatccctttttatgctatatacattgatta

SEQ ID NO: 34667 - DNA, 147 bp, Gossypium hirsutum
  Clone ID: LIB3149-039-Q1-K1-G11
cttttcttagcccaaaatgttctttcatatccagtctcaactgattcttactcgtcaaatgctactatatgactatcatgtttgaaattaaatactactcaaactcacgcttattcttgttctaaattaaacacattcatatccacc

SEQ ID NO: 34668 - DNA, 396 bp, Gossypium hirsutum
  Clone ID: LIB3149-039-Q1-K1-G12
cgctcgcttccccatctacagggtttacattgggattgaggcagctgtaaccaatggctggcaaggttgagaagaagggagatgcaaaggcacaggccttgaaagctgcaaaagcagtgaaatctggagccacttttaagaagaaggccaagaagatccgaacaaaggttacgtttcacaggccaaggaccttgaagaaagataggaacccaaagtatccacgcattattgccccaccaaggaacaagcttgaccattaccagattctcaagtttcccctcacaactgagtcagccatgaagaagatcgaggacaataacactttagtatttattgttgacatccgtgcagacaagaagaagatcaaagatgctgtgaagaagatgtatgatattc

SEQ ID NO: 34669 - DNA, 406 bp, Gossypium hirsutum
  Clone ID: LIB3149-039-Q1-K1-G2
gagaaatgcaagagcagagcctaaaaacattatcctgtaattgagcaaaaggctaggagagggagccttcttattgggatgtgttttatgtttttttaatgtttatatatatatatttatatttatatttggtatatatagatatgcaaaaagaagaaatcatggggacgtctttgtaatgtacaagaagcaataaacttaaccttatatattgctggcttgttttgttgctgatgatgggggctttgttttaataatttcaccatgtttttttttttttttttgctattgtctttgttgccatagcttattgattatgtgtgtgtgtgtgttttataattattattcctttttcttctacccccactcaaattttaatgctaatggtactttttttccccttccc

SEQ ID NO: 34670 - DNA, 61 bp, Gossypium hirsutum
  Clone ID: LIB3149-039-Q1-K1-G4
cgccggtcgaacaaaacatcaattttttcaacaattaatttgccttcgagcgtggcacctt

SEQ ID NO: 34671 - DNA, 410 bp, Gossypium hirsutum
  Clone ID: LIB3149-039-Q1-K1-G5
gctctgtaaaaatcaagaaaagcagagatgttgtcaagttcaaggtccgctgctccaagggcttgtacaccctttgcgtgtctgatgctgagaaggctgacaagttgaagcagtctcttcctccaggtttgagcgtccaagacctgtgaaattaaaactgcccttagcttgtactaggcaatgaaaactagattttgacttttagtttattgcttgcatttcgaatcgttttgcaacgatcaaaagtttttataatggatttttatttggtgtttttttatggacgttagtaatgttattaaaaccctttatttattttagtattcgtgttctacatcttagtttggcacatattggataatcaaacatatgaaaaagaaaagaatcaatatattctgattcagtaaaaa

SEQ ID NO: 34672 - DNA, 141 bp, Gossypium hirsutum
  Clone ID: LIB3149-039-Q1-K1-G6
gggatggcgaagcttttggtctccgatgttgctcgcaaagagttcgccactctgcgtcgcactttcgatgaagttaactccccttttccaaaccaagttaagtcaggaacctgacccttcgattgggaatattatagaaaa

SEQ ID NO: 34673 - DNA, 412 bp, Gossypium hirsutum
  Clone ID: LIB3149-039-Q1-K1-G7
gcccaccgaactgaacctcctctccaatctttctctaccttttccacacccccccgccgggtatggcgatttcggcgctccaaaaactcacctcccaaatccaccgtctcccatatctctcctcccaaatcctcacccgatcctccgccaccttaacctcctccccctcctcttccaaaaaagttgctgatcggctcgtcaagctcttcgccatcgaccctgaaggccagaagcgtgaggttgtcggcctcgctggccagaccttacttcgtgccttgactaacagcggcctgatcgaccccgactctcaccgcctcgaggagatcgacgcttgctccgccgaatgcgaggtcaacattgcccaggagtggctcgagaagcttccgccgcgtacctatgatgaggagtatgt

SEQ ID NO: 34674 - DNA, 401 bp, Gossypium hirsutum
  Clone ID: LIB3149-039-Q1-K1-G9
agcgcatgtcactaagtacagttgtctttgttggaggcttgactccatgggaagagaaagtggtggagcgtgcgaaagcacttagagtacaacccggaacagaacccgatacagacattggtccggtgattagcaagcaggcaaaggaactcatatgcagattgatccaatcaagtgttgacagtggtgcaaaactagtagttgatggaagaaatattctggttccagggtatgagcatggtaacttcattggcccaacaatcttatccaatgtcaaggtcagcatggaatgttacaagaggaaacttgtggcccggttctcctgtgcatggaggcagacaacatagaagaggctatagacattgttaacaggaataaatatggcaatggagcttcaatat

SEQ ID NO: 34675 - DNA, 415 bp, Gossypium hirsutum
  Clone ID: LIB3149-039-Q1-K1-H1
gtttcctggtccacgtaattgattccctgtcggaagtttatcctagagttgaagaatgggtggagaatgtgatcatggaggaaggaaatgcaacaatattgacactatttgtctgtctactcactgttctataccttcgtgagcgacaacgcaggcatgctattgctgctgcgggggcacacgaacctaatgagcatgttgtacctgctgcacgctaattgtcagtgttggtattaagattagatgtgtttttttcaaaagtaaaatctccatagcaaaaatgtatagatcggcttctttggccctgttctagagagctcctacattgtaccatagagaatattctagtccaaaaaagattaacataagttgaaaaacgatcttttgcctctaatatcaaaacatgtactttatg

SEQ ID NO: 34676 - DNA, 289 bp, Gossypium hirsutum
  Clone ID: LIB3149-039-Q1-K1-H10
ggaagagtattattgtctatatagcttgttttctcgagggttttttcttttttaccaacggtaagcttgctgctttgatttgcagtttctgtaacttgatcagttgtggtatccggtatacggattcattgtcatattcggatgcataattggaattatcccaaattgcttcttcttaaaaaaaaaaaaatgaaaaaaaaaaaaaaaaaaaaaaataaaaaaagaaaacaaaaaagataaaaaacacaaaaaaaaaaaatgcaataaaaaaaaaaaacaaattattaag

SEQ ID NO: 34677 - DNA, 395 bp, Gossypium hirsutum
  Clone ID: LIB3149-039-Q1-K1-H11
gctgcccaaaaacgccattaaatcattcttatgtttttcatattcaaaacatctggtattgtttttctgattgaaattacattgaaataaaaacagtttctcagcttaaaaaaaaaaaaaaaaaaaaaaaaaaaaaaaaaaaaaaaaaaaaaaaaaaaaaaaaaaaaaaaaaaaaaaaaaaaaaaaaaaaaaaaaaaaaaaaaaaaaaaaattatttttttttaaaaaaaaaaatataaaaaaaggggggggcccctttaaaaaaaccaaacttaacccccccggcttagaaattttttttttttttttttgggcccccaaatttaaatctctgggcgcggtttaaaaaagtcggggatggaaaaaacccggggttccccaacttattttctttt

SEQ ID NO: 34678 - DNA, 271 bp, Gossypium hirsutum
  unsure (1)..(271): unsure at all n locations; Clone ID: LIB3149-039-Q1-K1-H12
catacacaaaacatcaagaaacgtaccctttttaaagcaaagcagacccaccaaatccccnggtgacaataaaaaaaagaaatacccttacccctcaaaccatcttccccttaactgttccgtcccgatcatctcaacgaaagctattcttttaatttccctaatctcttctttctacctgctttttgctgttagatagtgtaaagatcttcaagcctatgaatctttaattgccatttgttttatataaatgggcccctcttcaataatt

SEQ ID NO: 34679 - DNA, 367 bp, Gossypium hirsutum
  Clone ID: LIB3149-039-Q1-K1-H2
gttgctatatagcgagcgcgcgctctataggagacacacttacacacgcgcgcgtgcgaggcgatatatcttttatatagtgacctaaatacaaaatactgtgcgcggttttacaccacgtcgactgtgaaaacactgtggtgacacaactcaatatcgttgcggaacatatccctttttccagatgtggtaatatcgaaaaggcgcgcaccgatctcgcttttcaacacatgtgcacactctatgtggaatgtgacacgccctgtatcggcgcatataacgcgccgggtgtgttgggtacacgcacagtgacacctatacttttgagagcgctatagcgcgctccttttgctttctttcctttctt

SEQ ID NO: 34680 - DNA, 199 bp, Gossypium hirsutum
  Clone ID: LIB3149-039-Q1-K1-H3
cgggcgacccacgcgtccggttgaaagactgttcgttgcaaaagagaaatttcctatttctttttctggccagattccggaggccaaaagggatgccaatgtccaaatggaactagccagtcttttaaaccttggggaaggtaaagcaccttcatggggtttgatattccaactggtggaaaggatttaacctattcac

SEQ ID NO: 34681 - DNA, 423 bp, Gossypium hirsutum
  Clone ID: LIB3149-039-Q1-K1-H4
gtagagattaaggcttctcctaagcagtttcatgaaatgtttgcccacaaaccgcaccatgtgcaccatacttgttatgacaagattcaaggatgcgatttacatgaaggtgaatgggggaaagtcggtaccattgtccattggagttatgtgcatgatggaaaggctaaaaaggcaaaggaagtagtggaagcagtagaccctgataagaatttggtcactttcagagtgatcgaaggagatctaatggaagagtataagagctttgtaatcacgattcaagtttcgcccaagagcgagggtagtggcagcgtagtgcactggactttggaatacgagaagctgcacggtgggattgcgcatcctgagactctgctgcaattcgttcaagatatctctaaagacattgacgcccacctcacc

SEQ ID NO: 34682 - DNA, 257 bp, Gossypium hirsutum
  Clone ID: LIB3149-039-Q1-K1-H5
ctgcgcggtcgcaacggttgacagcggattatttgtggcccgatctgaaaaaatcaggctgtaaaaagcggtcgggtagaaagcactcgaagaagccggcggtcggctttgaagatgacttcgaggctgattttcaggtgtttaaggatgaggattctgatgtcgatgacttcaatgatgatgttgatgatgttttggctgatgttaagtcctttgctttttctgctacaaaaaaaccctctcctgctgtttctcat

SEQ ID NO: 34683 - DNA, 223 bp, Gossypium hirsutum
  Clone ID: LIB3149-039-Q1-K1-H6
gcgctacccgtccaggactctttcattcctcttttgaaaaaaatttataaaagcccacaaaaaaaaaagagggggggtatacttgttaatgacaaaaaacaaagaaacaaattacaatgaaggtgaatggaggaaaagacggtaccataactccaattaaaggggcgggcctttttaaagggccaaaatttgcttccgctgtattggaagcaatagacttttt

SEQ ID NO: 34684 - DNA, 310 bp, Gossypium hirsutum
  Clone ID: LIB3149-039-Q1-K1-H7
cggacgcgtgggcggacgcgtgggcagcattttgctagcttgaaaccaggcgatgtgagttgaggtgaaagggcccattgaaaagctcacatactcacccaatatgaagaaacacattggcgtgattgcaggtgggacaggcataactccaatgcttgaggtgattgaggctatactaaagaaccctgatgacaagactcaggtgtcactgctttatgccaatgtctcccctgatgatatattgctcaagcagaagcttgatatacttgctgctagtcatacgaatattaaggtgctctacactgtagac

SEQ ID NO: 34685 - DNA, 309 bp, Gossypium hirsutum
  Clone ID: LIB3149-039-Q1-K1-H8
catgaactcggttaaacaggttgaagagaatgttgccgctgcaacagaacttgcactatgcgggaaagatcatgaaactctagctgaggtggaagcaatactgaagccagtgaagaatcagacatggccgagcggaattcaacgaagctgagcaacaatatcgacccgtatttttattattgtatgcatatattctcccacatggaatgggggcaaccattctgttgttatgatactagtatttagatgacataaattttcgtccctgtccaagtaaacttgctactgtccgataacgagtatgattga

SEQ ID NO: 34686 - DNA, 403 bp, Gossypium hirsutum
  Clone ID: LIB3149-039-Q1-K1-H9
gaagaacccaagaagtcaagcaaaaagggctcttcaaaaaaggttgcaacagagagtccggagtcaaaaagcaaagataaatccgaatctggaaagaatctcacccctgcaaaatctagcaaaaaatcttctggatcaacttcaaaacaagatgctagtgatggtggtgggacttctggctctaaatcaaagggttctgcatcaaagaagcctaaggttgaaaaggaaaactctaaggatggatccaccaaagagaagcttgcagtcaagaagcaaacaaataagtcatcagcaaaggtttctgctaaatcacaaggtaaaagcaaaagtggcaagaaacctgagcctagtagggaagagattcatgaagttgtcgtagatattctaaaaaaagtggacttca

SEQ ID NO: 34687 - DNA, 411 bp, Gossypium hirsutum
  Clone ID: LIB3149-040-Q1-K1-A1
gaaatgtcaaggtttcgcgggatatggcatgcttccctgaatgcaaccaagaaagctctgggatggaatgttgatgattggatccctcccgctgaaaaatacatattcaatttcagttcaaaagaggagctcaagaaatggcatctttattctgatgcggaatttggagggttgtcgtcggcttcattggagatcaaagacgatgctgataaatcaagtgttttctctgggaatctttcccgggatgtaaccgaaggtacaaaatggaacataactaggagcggcttttgtggaatgcggtctaagaagtttgatggcttcattgatttggaagcatatgatacaatagcattaaggattaaaggagatgggagatgttatatatctacaatctatacagaaaattgggtt

SEQ ID NO: 34688 - DNA, 377 bp, Gossypium hirsutum
  Clone ID: LIB3149-040-Q1-K1-A10
cccacgcgtccggtgaaggcaattcttcgcttgtttagttataattttgttgagcgacgaagcttagataatctttggtttgagcttatgatgcgtcgctctgcttatgcatccaaaaaaacgggtcaacccaattcaaccaacccgatttcctgttctccctccgatatctttcgcaccgcttcaagtaaggcatcttcaaaagagatggagcggattgacaacctattttattcttttgccaataggtcttctgggatgattggcccagaaaggattgagactctatgttcagacatgggaagtgatcacacagatgttatgatcttgatgcttgcttggaaaatgaaagcccgaaaacaagggtactttaccct

SEQ ID NO: 34689 - DNA, 407 bp, Gossypium hirsutum
  unsure (1)..(407): unsure at all n locations; Clone ID: LIB3149-040-Q1-K1-A12
gctgaggttctaatagagttgaaaccatatgtcgagcttgctgaaaaacttgggaggctggctgtccaattggtagcaggtgtaagtggtgtaaaaaatgtgaaagtgtcgnatgcttcctctagagctcctgatgaccttgacacaaggctgctccgtgcgatgatcaccaaggggcttattgagcctatttccagtgtttatgtgaacctagttaatgctgattacaccgctaaacaaaaatgactgcggattacggaggaacgcattgttatagatggttcacctgagtgtccactagagtccatccaagttcagattgccaacgtggaatcaaaatttgccggcgcgatatcagagttgggtgagattaaagtcgaaggacaagtgaaagatggaattcccca

SEQ ID NO: 34690 - DNA, 384 bp, Gossypium hirsutum
  Clone ID: LIB3149-040-Q1-K1-A2
tgcggagttggtggtgttcttcttctgtctggtttgattgtgctcacctgtatagatcaagatgatgcaaggcataatttcggccataccggaggtttcatatgcccttttgttccacttctaccaattgtctgcattctcatcaatgtctacctgctcatcaatttgggggctgcaacatgggctagggtatcggtgtggcttttgataggggtggttgtatatgtgttctatggtcgatcccacagctctctgctggatgcagtctatgtgcctgcagctcatgcggatgaaatttatcgatcctcgggtgactcgttggtttaattccaccttgaatgcaggaaccattgtggaatttttgtcggacccaagggtgggggg

SEQ ID NO: 34691 - DNA, 406 bp, Gossypium hirsutum
  Clone ID: LIB3149-040-Q1-K1-A5
gggatgggaactgtgttagaaatcattgtttttgctgagtccgctagtcagtttggtgaggtggttgttgacccgatcacaaaacagctattgcactacaccgaaaagcccgagacttttgtaagcgatttaattaactgtggagtttacgtctttactcctgatatctttactgccattcaagaagtctccacacaccgagaagaccaagctaatttacgccatttgacaagctttgaaacgctgcagtctccaacaagggctcttccccaagattttgttagattggatcaagatatcttgtccccttttgctggaaagaagcaattatatacgtacgaaactatggatttctgggaacagatcaagactccagggatgtctctaaaatgttctggtctttatc

SEQ ID NO: 34692 - DNA, 386 bp, Gossypium hirsutum
  unsure (1)..(386): unsure at all n locations; Clone ID: LIB3149-040-Q1-K1-A6
cttttttcgccattgttaaaaactgttttgttcacaatttctgtccagtttcgagagttaaaaacttcaacatctgaattagaagtaaaccccatactcgggtaagactagagagtaaaatactgttcctttgttcgtcggatgcagtttatgtgtcacattttcattgcatgtttccattgatctcggtacttgtctcgtttcggtcagccgtcaacatgcaaccaaggtaatggctatacttgggtgatgtttacttgatagagatatatctctaagtattcaccanaagaagccattggtgcttcatagggttactttttttttgttagtagcgtcagatattagtgttcaaactttggattatttgaatgcatgccatgttg

SEQ ID NO: 34693 - DNA, 397 bp, Gossypium hirsutum
  Clone ID: LIB3149-040-Q1-K1-A7
gtgttggaattattgtttaccgcggtctttactttggaatgtatgattctttgaagcctgttgttttggttggtggattgcaggatagtttcttggcaagtttcttgctgggttggggtatcacaataggtgctggactggcatcttatccaattgatacggtacgtagaagaatgatgatgacttctggagaagcagtgaaatacaagagctcgatggcagcattttctcaaatcatcaagaatgaaggtgccaaatcgctgttcaagggtgctggtgcaaacattcttcgtgcagttgcaggggctggtgtgcttgctggctatgacaagctgcaagtccttttccttgggaagaaatatggatctggtggcggctaatgtggaaggtgattctg

SEQ ID NO: 34694 - DNA, 387 bp, Gossypium hirsutum
  Clone ID: LIB3149-040-Q1-K1-A8
ccgtgttttatttctcttcgtcggtatttaaaagtgctggagtaccatcggatgttgcagatgcattgataggagtagcaaatttaacaggatctattgttgccatgcttttaatggataaacttggaaggaagctgcttcttctgtggagcttctttggcatgactatgtcagtggtccttcaagttgctgcggcaaattcttacgtgtcaggctctggatctttatacctatcagttggtggcatgctaatgttcgtcttaacatttgcactgggagctggtcctgttccaggtcttctcctacctgaaattttccctaatcgaatccgggcaaaagctattgcgttctgtatgtcagtgcactgggtaatcaatttcttcggtg

SEQ ID NO: 34695 - DNA, 413 bp, Gossypium hirsutum
  Clone ID: LIB3149-040-Q1-K1-A9
gcctcccccaacttcacaccagcaaagcaaaagcttcaccaatggggatcgatttagtcgcaggaggtaagagcaagaagacgaagaggacagcccccaaatccgatgatatttacctcaaactcctcgtcaagctttaccgtttccttgtaagaagaactgggagcaaattcaatgctgtgatattgaaacgcttgtttatgagcaaagttaacaagcctccactatctctctctaggcttattgaattcatgaagggaaaggaggataagattgctgtggtagtggggacagtgacagatgatattagggtttatgaggttcctgctttgaacgttactgctcttaggtttactgagactgctagagctaggattgagaaagctggtggagaatgcttgacttttgatcag

SEQ ID NO: 34696 - DNA, 400 bp, Gossypium hirsutum
  Clone ID: LIB3149-040-Q1-K1-B1
cgaagctttagaggcacatcctagggtgaggcgcgtctattatccaggcttgccaagtcatgctgaacatgaaattgccaagcagcaaatgactggctttggtggtgtggtcagttttgaggtggatggagatttgatgaccaccatcaagtttgttgatgcattaaagataccatacattgctccatcatttggtggttgtgagagcatagtggatcagcctgctataatgtcctattgggatcttagccaagctgagaggcgcaagtatgggattgaggataacttggttcgtttcagcttcggagtggaagactttgaagatttgaagctgatgttctgcaagcactggagaccatataatggcgctaatctccgtcgtttgggtttgggtttaaat

SEQ ID NO: 34697 - DNA, 306 bp, Gossypium hirsutum
  Clone ID: LIB3149-040-Q1-K1-B10
gttagggagcatgcgtactatttacagtactagaatggtagaccagattacctgaagaacgtatggaaagtcatcaattggaaatatgccagtgaagtgtacgagaaagaatgtgcttgagattgggcccttttcttagtgaatgaaagttaataatctcccttgtgacgaccttggatttgggtttttgcttgttcgattcaagcttctttcatgtgtagcaaaaaatgatacgtcattgcgtgagatgaatttcaatttaggaaatgcgataacgtcagtctcttgaaatatggtttaattttt

SEQ ID NO: 34698 - DNA, 138 bp, Gossypium hirsutum
  unsure (1)..(138): unsure at all n locations; Clone ID: LIB3149-040-Q1-K1-B11
gtgggttctgnnnggatggagtataaagttttgaaattggatttttagatagcatgtagtgctttaaagttcatatgtttgtatgtaagnaagtatgaaattaagtaatacctctatataacctggtgataaaatctg

SEQ ID NO: 34699 - DNA, 405 bp, Gossypium hirsutum
  Clone ID: LIB3149-040-Q1-K1-B3
acgaagaggaaaaatgggtacccgtcacgaaactcggccgcttagtcaaagccggcaagagcacatcccttgagcaaatctacctccattctctccctatcaaggagtaccaaatcatcgaccaactcgtcggcccttcactgaaagacgaggtcatgaagatcactccagttcagaaacaaactcgcgccggtcagcgtacgcgcttcaaggccttcgtcgtcgtcggtgacggaaatggacacgttggactcggtgtcaaatgtagcaaagaagttgcgacggctataagaggggcgatcatattggctaagttgtcagtgataccggttagaagaggttactggggaaataagatcggaaaaccccatactgttccatgcaaggttaccgggaaatgtgggt

SEQ ID NO: 34700 - DNA, 378 bp, Gossypium hirsutum
  Clone ID: LIB3149-040-Q1-K1-B4
gtgagcttttgttgaaaaggcaagggattcttccaatagtgaagaaaactgtaagctttggggaagatgggaatgtttataggattattaccaatggagatgaggttaattcaagtggagatggtagtttaaccgatgagagtgtttcgagtgatgaacgtggagatacaatggagaatcttgtcaaagaaagtgaagatttagttgagaatttggaggaggcaatgaacttgaacaaacaggcaagaagtaacagtgttgaggactatcagattcaaggtggtgattttgtgttttctgctccattgcctgtgaagatggaatctaaagctgatctaatgaagaaaaggaatggtgcgctcaaaattgtttcatcat

SEQ ID NO: 34701 - DNA, 288 bp, Gossypium hirsutum
  Clone ID: LIB3149-040-Q1-K1-B5
gttttataggaaccaagctaacctgctcttttctccaacgttgtacctcttctagagtgtgacccaaaaacaattgactggccagcgaaccacatcctcgggactgactaaaccctgacattccccaacttaatccccttgctgcacattctgctttacacagctatcgtatgagcgaataggtccgcgcccttcgctctttccaacaagtgctcaacctgcatggcaagtgatacccaccctgtagcgacgcatacatcacagaggaagatgtgtatacactcacca

SEQ ID NO: 34702 - DNA, 404 bp, Gossypium hirsutum
  Clone ID: LIB3149-040-Q1-K1-B6
gttgacttatacgccacattgaagcagggatcagtgaagatctggtcagaagttcaggagggtaagtttgctttagacaaaggttggaaaattgagaaaataacagtgttgggattgagtggaagtgtagacacgtctggacttgaaattaatggaagtccagtagccaatggtgcttccaacatagaattgagttcaatgaaacagatgcatttgcaggatgttgaagatggggttggcaagaagaagtctttaatggtcgaactttcaggcttgaatttatatgttggaaagaactttgacatgtccatgaaaatgggggtacaaggttgatgattatggtgttatgtacttttttttttcccattttcattgttgatggtttactgtttgtcttaattggg

SEQ ID NO: 34703 - DNA, 250 bp, Gossypium hirsutum
  unsure (1)..(250): unsure at all n locations; Clone ID: LIB3149-040-Q1-K1-B7
attttgcaatagacaaaggcccnaaaaatgagaaaataacagtgttggtattgagaggaagtgtacacacacctggacttgaaattaatggaagcacagtagccaatggtgcttccaacacagaattgagttcaatgaaacagatgcatttgcacgatgttgaagatggtgttcacaataagaagtctttaatgttcaaacatataggctcgaatttatttataggaaagaacatatacattttcatgaa

SEQ ID NO: 34704 - DNA, 404 bp, Gossypium hirsutum
  Clone ID: LIB3149-040-Q1-K1-B8
tgaaaaaataccaacgaggagccagttcatgttctgctctggcaactgctgttagggcagggcctactgctgctatagcgccagcttccggttgtgcaagtgcaatacactgtgctctccttggactcagaaatagccttgatcctgaacgcaagaaagagtcgatggagaaatattttggtcccactctgccacaggatccaaattaatcttgcaagcaacagtgtcacttctggtattttcaccttgctacggttcaaaattttctattggtcaactatttgcgcatcaaaagaaattttcagctacttgtttcattttcttatcgatactcaggattgttgtgatggatcaaagagtgttctttcctcgaagagaacacggattgtcatgtacctcgactt

SEQ ID NO: 34705 - DNA, 240 bp, Gossypium hirsutum
  unsure (1)..(240): unsure at all n locations; Clone ID: LIB3149-040-Q1-K1-B9
ctcatgttagactgcntttggggggtggactttcattggatatataatcttatgttaggatgataatctatcatttaagtgggctatattatggtaacccatccaatcaccggatttggggtgaaaatatttggcaggtttattattattatttaacaaatcagactgtcacttacctccacccaaaaaaagaaaaaccataggagactaaacaaaataaaaagaaaccaccaagcatat

SEQ ID NO: 34706 - DNA, 385 bp, Gossypium hirsutum
  Clone ID: LIB3149-040-Q1-K1-C1
aattgcttctaaggaatgtgccacgaaaggttcaattttctgaacttccacctggtttagggggggtgccattaagctatctcttttagttaatgaagcatacaaggatgcacaccaaaaaagtgtccaggccatgaaggaaagaatgagtgaccttgcacaaagcttaggtatgccacaaggtctcagtgagggattaaaacaacaatgatctctcaactaacacctggatggagcttagtgagggattgaagcaacaatgatctcttgactggcaccaggattagcttcagttttgcatacaaaccaatggtagaaattttcatttgtactttttactgcgaattcatgttgtgaatttccgttctccatagaactggcacac

SEQ ID NO: 34707 - DNA, 360 bp, Gossypium hirsutum
  Clone ID: LIB3149-040-Q1-K1-C11
atcaactccaccattcttcaagttacttgttatgctcgtaaacaccgatttggagcaacagcacctcccaaagagaactctctagttgtgagttacatttcgtcagctataacggaaggtgaagttgaaaacgatagtcttacaaatctaacgaaacccactaacatataaaccaatataaatgtgtgtgtctgtgtgagattgtgtataaggtgttaatactcgtctttccttcttatatatgccaaaaatggttgtttctataatctggagttgattagtgaaagtgttgtatcgtggctgatgtaatttgttcattaatttggataaatgagaagatataatgatggggttgatatt

SEQ ID NO: 34708 - DNA, 355 bp, Gossypium hirsutum
  Clone ID: LIB3149-040-Q1-K1-C12
gcatttgggatgcttattgtatctggacttttataagtaaacatttattcattgttgttggttgtgattttaaggcccgggttaatttgggttattacaattattggtcaaaatatactcttattatgtattaattaataattacatcattttttaaatgataaacaaccattttttcatattgaacctatttacagagtctatgtgaacctagataatgctgattacaccgttaaacaaaaaagactgcggattacggatgaacgccttgtttttgatggttcacctgagtgttcactagattccatccaagttcacattgtcaacgtggaatcaaaatttgtcagcgcgatat

SEQ ID NO: 34709 - DNA, 269 bp, Gossypium hirsutum
  Clone ID: LIB3149-040-Q1-K1-C2
gaacattgaccccctataaagtacctatcaaggtggaatatgcggtccgaaagagttgttatgcttctgtagttgttgaaaatatcaaacttgtgtacttaaggaggagcttagtggaggagctgttgatgcatcctgatacatttgaagaaaaggttgtgggaagttttgttagagtgaagagaaagcctggaaactgttcggggatgacttcttttcagcttttgctagttactggcgtaaagaaaacctcaaatgctgagagcaac

SEQ ID NO: 34710 - DNA, 398 bp, Gossypium hirsutum
  Clone ID: LIB3149-040-Q1-K1-C3
attgcattaaatagatcatgaaatctttcctttctttttttgcattcctctcacttctcctgtttgtagacaccattgcagcagctaggaaagatgctggagagtactggggagctgtaacgaaagatcagcctatgcctgaggcactccaagagcttgttcggattgaggctgccgttgtcagccccgatgagaaaaccaagtgccatacatcaggtaatattgagcttaaggaagagaagattattgttaatgaggagttcgaaccaaggccaaacgtttcagcttatggtgatgacgctaatctaaaaggagataaatcatcatcttttgctgaagattttgaaccgagacctaaacgttcggcttacgggggcgatgatgcttgtcttaaaaga

SEQ ID NO: 34711 - DNA, 360 bp, Gossypium hirsutum
  Clone ID: LIB3149-040-Q1-K1-C4
ggccggtattgaagtcggagaagttgtttattatagttctcagccatggccggttggtccgagtagcataccatgccagttgatggtcgggttctttgcatacgctaaatctcttgaaataaacgtggataaggaagaactagaagacgcacagtggcacagtagagaagtcgtgaggaaagcattggcggttgcagaatacaagaaggcgcaaaaaacgaccgcagccaaagtagatcaaatgtgcaaaggagtcgagaagggacggagtttgtcggcagattttaacgtcgaaagtggggaactcactcccatgtttttttcccggtccattcgcgattgcccatcacctcatctcta

SEQ ID NO: 34712 - DNA, 417 bp, Gossypium hirsutum
  unsure (1)..(417): unsure at all n locations; Clone ID: LIB3149-040-Q1-K1-C5
aaaacccggtccgacccacgcgtccgggccggtattgaagtcgatagaagttttttatcatagncctcagccatggccgggggggccgtgtattttaccatgccagttgatggacaaaanctttgcatacgctaaatctcttgaaataaacgaggataaggaagaactagaagacgcacagtgtcacattaaagaagtcgtgaggaaagcatttgcagatgcagaatacaataatgcgcaaaaaactaccgcaaccaaagtagatcaaatttgcaaaggagtctttaaagcaccgactttctcttcatattttaacgtcgaaagttgtctactcactcccatgttttttcctctttccatacacgattgcccatcaccttatctctaccttttctaatcaaggtgtacctactttca

SEQ ID NO: 34713 - DNA, 401 bp, Gossypium hirsutum
  Clone ID: LIB3149-040-Q1-K1-C6
gcaatttccggccacagggctggtcaccgttcgatcgccggaccgccgtgcaccgccgtcgccggccaccgcgtgagggcgagtgggtggtgctgacatgggcggtggagcaggtggagcaagtggctggtatgaggcgatggacgtcagcggcgctaggggttgattaaggttttagctttttgaaaccctaatctagctagttgggttaagaattcgggctatgtgggtttgggtcagggtctgtttgtaattgggttgttggattaaaatttggacttaagtgtgggtgaatttaaatgggtatttggggttgggatttaaggtttaatgggcccgggtaatttgggctcttacaattcctaaaagtattgtccagtggaaagttgacataggggatc

SEQ ID NO: 34714 - DNA, 406 bp, Gossypium hirsutum
  Clone ID: LIB3149-040-Q1-K1-C8
ccgcatcccaagtacaagaggcgtgttaggaagaagaagaagtttcaggctcacgacccaggtaaccaattcaaagttggcgattatgtgcagcttgagaagagccggcctattagcaagaccaagactttcattgcggtggctgtaccaagtaggaatgggaagcaggagaaggaggaggcaggggagcttgggattccattggagtctaaacagactcaagagcagccgcaggcttagtgttaagcccttcgcgtgggctccttttgttgttggtaaatttgtgatcttttgcaagggatttcactgtttcaaaaactgcttttccttaatgtaataattgtcgtttttcaagggtctggattgttttttgagtttgtcatgaaaaaaaaaaaaaaagggcggg

SEQ ID NO: 34715 - DNA, 292 bp, Gossypium hirsutum
  Clone ID: LIB3149-040-Q1-K1-C9
gctcttcaactccttgtcacatttgggaaatcaccccctcctggttacactggctctctggaaaaccaatgttgctaggttgatggactctatatgatggaatggacatgagaggatgtcgagcttttctctttgtttcttagttggattggaaatctgatgcagtttttattgtaaaaccaattattttttttcttttaaaagattgttgcaacttgcaagtgtgtttctgtatcttccacacaaaaaaacaaaaaaataagcaatcaagaatgatatttgtctttggtcc

SEQ ID NO: 34716 - DNA, 297 bp, Gossypium hirsutum
  unsure (1)..(297): unsure at all n locations; Clone ID: LIB3149-040-Q1-K1-D10
gcctattccttacagactcactttattattctcactacgagacnngcttccggtgggtttgagtgtctgataatgtacataggacgtccctaaccttacacacaacactcctgtgaagaaacttaatgcttttgaagttttctcaaaggcactttataccattccgacaactattgatgacaatacggtgcttgaacagccaaatattccctcccactttccttcttatctccacatttaaggactcaatccattgattgttatcatcaatttatctttatgagatattgctgatct

SEQ ID NO: 34717 - DNA, 410 bp, Gossypium hirsutum
  Clone ID: LIB3149-040-Q1-K1-D11
tacttcttgaggctcaagggagacgtggaatgggagacgtgtgtaccagccggggactgtgcatggaagcagattgcagaacctgtgatgaagcaatacatggagactactgatggatcctacatcgaagataaggaaactgcccttgtctggtgttatgaggatgcagatccggattttggatcatgccaagctaaagaacttcttgatcatctcgaaagtgtgctggccaatgaacctgttacggtaaagagtgggcagaattttgtcgaggttaagccacaggtacagaaatatatttccaaatatggtacaatacttttcttttttatcagtccacattgagccggaaatcaacttatcgaatcagtgattgccaagcaaaatgagtatggttaggtctactgaaa

SEQ ID NO: 34718 - DNA, 346 bp, Gossypium hirsutum
  Clone ID: LIB3149-040-Q1-K1-D12
attcattgctggggaaaagataagtgcagttgatttagctttgggaccaaaactttaccatcttgaggttgctcttggccatttcaagaaatggactgttccggaaagcttgactaatgtccgcaattacatgaagtcgatattcagtcgtgaatcgttcgtgaaaacgcgggctgctaaggaatacgtgatcgccgggtgggcacctaaggtgaatgcatgaacaaactggaaacagtgaggtgtttgaagagtgtgagttatgtaataaaatgtgagggatggtgatgtaataaaatgtttgaatctattagtgtcaatgctactaagtaattggtaagtcttt

SEQ ID NO: 34719 - DNA, 384 bp, Gossypium hirsutum
  unsure (1)..(384): unsure at all n locations; Clone ID: LIB3149-040-Q1-K1-D3
caggtcgttgccgatgcttttgacatgataaacgcggacgacgggaaagcggttaaagaagatgagttcaagaaactattgacggagatcttaggaagcgtcatgctgcagttagaaggcaacccggtctcgatttcttcgaattctgtcgttcacgagcctctcgcatcgtcctcatcgttactgcaaccatcatcctagttgcatatcactaatattaagggtgacaaaagaaaaaagggacaataaattttggttaattttaagttaaaaaactcttagtagcttttaagttgaattatgntgcagttcactggtttgtattgtctaatgaaaatatattaccataatacatgcaaatacagtacaaaatacaatattttc

SEQ ID NO: 34720 - DNA, 392 bp, Gossypium hirsutum
  unsure (1)..(392): unsure at all n locations; Clone ID: LIB3149-040-Q1-K1-D4
atttgaagctgctttcaaaggaggtgtgcatgttggttcaattggtgctggtgggcgttatgacaatctgatcgggaattttggcacaaagcaggttccggccgttggcatgagtcttggaatcgaacgagtgttgaccataatggaagagaaagcacagaaccaggcagtccgagccacggaaacccaagttttggttgctgtcctgggggataaactcgctgtagctgcagaactggtcagtgagctttgggacgtagacatcaaagcagaatacaaggttcataaaaaggtgatgaagcacatcgaatatgccatagactcanagatcccttggatggtgatcgtgggcgagcgagagctgaatgaaaggatcgtaaaaattgaaaaca

SEQ ID NO: 34721 - DNA, 367 bp, Gossypium hirsutum
  Clone ID: LIB3149-040-Q1-K1-D5
ctttttgttgctttcaaaactggataaattctcgttgctaagcgtatctcgcttgatatgggagagggcgaactggcgaaacataagtcttacgccgaatatctgcttcaacagctatttcgtgcgaagaatatacatttaagggagggggaaacttttaagggagtagtagaaaatcatttggtttttgaagagcccttaaaagagcaaattgatgggctctatcaaatctgttgtgatctcattctaaatggggccaacagtagctactttctaaaaattgtggaattttatggatccacgcttggtatgtagccaagcccaagaaaaaaggaacgaggggaagaatcgacaaggaatccataac

SEQ ID NO: 34722 - DNA, 403 bp, Gossypium hirsutum
  Clone ID: LIB3149-040-Q1-K1-D6
tgtgatgttccgcatgtcaatcgtactgactaccagttgattgacatttctgaggatggagttgtgagtttgctgactgagagtggagacactaaggatgatctgaggctcccaactgatgagaacttattgaaacagatcaaggatggttttgctgagggaaaagacctggttgtgtctgtgatgtctgcaatgggggaggagcagatctgtgctctgaaggacattggtcctaagtaatttgagattttattttcagacttttattgcaattttagattataactttttattttttttaagaactttaatagctttgtgtcttggaatttgggtttttttttattttttttattttaatatatctggatacgagaaaaacaccattgctgttatcttattg

SEQ ID NO: 34723 - DNA, 389 bp, Gossypium hirsutum
  Clone ID: LIB3149-040-Q1-K1-D7
tgtgatgttccccatgtcaatcgttttgttttccaggtgattgacatttctgaggagggagttgtgagttaactgactgagagtggatacactaaggatgatctgaggctcccaactgatgagaacttattgaaacagatcaaggatggttttgctgatggaaaagacctggttgtgtctgtgatgtctgcaatgggggaggagcacatctgtgctctgaaggacattggtcctaagtaatttgagattttattttcagacttttattgcaattttagattataactttttattttttttaagaactttaatagcttagcgtcttgaaaaattgggttttttttaattttttctattttaacatatctggatacgaaaaaaacaccatt

SEQ ID NO: 34724 - DNA, 289 bp, Gossypium hirsutum
  Clone ID: LIB3149-040-Q1-K1-D8
cgagaaaaaagtgtacgttttgcctaagctccttgatgagaaggtggctgctcttgaccttggaaagcttggggctaacctcaccaagctcaccaaggatcaagctaactacataatcttccccattgagggtccttacaagccttctcactacacgtactgaggatagaatacgagagatagagaatgctagagtcagactcaaaaaaggaaccataccacgggatgggttgatagtttgtttgtactaaaatttattgatgatttgtggatagagggttcgattttg

SEQ ID NO: 34725 - DNA, 395 bp, Gossypium hirsutum
  Clone ID: LIB3149-040-Q1-K1-D9
gccttgtgcgtactgtctcagacagttaatgacactagggtattgcttggaggtggatggcctgagatggtaatggcaaaggaagtggatgagctagcacgcaagactcctgggaagaaatctcatgctattgaagctttctcaagggcacttgtaaccatcccgacaattattgctgacaatgcgggtctggacagtgcagatttggtggcccagcttcgtgcggagcaccacaaggagggatgcaatgcagggattgatgtcatctctggatctgtaggagatatggctgagctaggaatctctgaatccttcaaagtcaagcaagctgtattgctctctgcaactgaggctgctgagatgatacttagggtcgatgaaatcattacatgtgc

SEQ ID NO: 34726 - DNA, 192 bp, Gossypium hirsutum
  Clone ID: LIB3149-040-Q1-K1-E10
aaaaaaggccgaccacgcgtccgagacataccttaatcttcccttttagatttatcctgctactccgaagaagggagactaattccggttttatacgtcccatggatccttcttataaccatccacatgttccttcacgctttgtcgactgtgagaggcgattcggtaacattgatagataccgaggaggtc

SEQ ID NO: 34727 - DNA, 332 bp, Gossypium hirsutum
  unsure (1)..(332): unsure at all n locations; Clone ID: LIB3149-040-Q1-K1-E11
caaaggnggcnngnnnggnccattaaaatggncangacagggaagggggggaggccaagcagagaagcagcaacgacaagncncagccgaaggananacggacgagagaaaggnaccagacaaacaaannanagacgggaaccccncgcagaaccagcgctagctattatgacttgtaaagctgtttataataatgctgcttacaacaaatctataatcgaaaacaatagggggatggaagtcatcggattctataattattggaacgattacctgaagcaaccggatacccaagtgacgatgttccgaaacaaaacttcagagcacgacac

SEQ ID NO: 34728 - DNA, 409 bp, Gossypium hirsutum
  unsure (1)..(409): unsure at all n locations; Clone ID: LIB3149-040-Q1-K1-E12
ttaagttccagctgaagaaagttttatgcatgggagttgctgttgggaatgttgcaatggaggagaagcagatcttccaaaatgtgcaaatgagcgtcaatttccttgtttccttgttgaagaaaaattggcaaaatgtgaggtgcctctacttgaagagcaccatgggtccttcaaacaggatcttttgagttcatatttttaccttctgttatgtacggactgaaagtagtagtggggatttaatactaaaatcagtttttttcttctcttttacttagaatgtttaagtttatgttatgttctgttgttccctagaaatgttatgaatacgagacatttgaattttgatttgcttatcaactttggtttcacattatttgcttaatccacacaaaaatttnccttt

SEQ ID NO: 34729 - DNA, 344 bp, Gossypium hirsutum
  Clone ID: LIB3149-040-Q1-K1-E2
gttggttgcatcttcatggagctcatgaataggaagcctctgtttccaggcaaagatcatgtacatcaaatgcgtttattaactgagctgctcggcacaccaactgaatccgatcttggatttctccggaacgaggatgcaaggagatatatcaggcagctcccagcacatccgcgccaatcactagcagaagttttcccacatgttcatccattggccattgatctcattgacagaatgttgacatttgatccgaccagaaggattactgttgaagaagcattggcacatccttacctcgaaagatacacgacatatctgatgaacggtctgccccgaccatt

SEQ ID NO: 34730 - DNA, 366 bp, Gossypium hirsutum
  Clone ID: LIB3149-040-Q1-K1-E3
gatccaagaaagaagaagaaaccaacttgctttgtttaaagatgcaaagaaacgttgacatgctctaatagaaccatttgcaagacatgtcgattggaggtttgtttaaaacacaggtttccagccgatcatgcttgcaagcaggcttcttcctccaccactccagcggcagccgatagaggaagctggaacgagaagttcttggtggcttttggtttaaggaatgggaaagattgtggcaagagtgggcgaccttcatcatcgactactccatctttaaaggcctattaagactttaatggtttatgagacactattgtaaatgctaattctttgaatcatctataaaacttcaatatttactta

SEQ ID NO: 34731 - DNA, 400 bp, Gossypium hirsutum
  Clone ID: LIB3149-040-Q1-K1-E4
ggaacataactgtcaacgaagcccaatcgctcagaagtggaggcggtggcggaggatttggaggaggaaacggtggttacagccgcggtggaggcggcggcggatatggtggtcgccaaggaggatatggtggcggacgccgtgaaggtggatacggaaacggtggggggtatggtggaggtggatacggaggtggacgccgtgaaggaggatacggtgacggcggatctcgttactcaagaggcggcggtgcatctgaaggcaactggaggtcttaaatttaaggtttcaaagtgggcttgggcctatattgttatgggtttggtttgggtttggtagttggtaattctaaagttactctgttactgtttggtttgggttctctcggttttgatcgatg

SEQ ID NO: 34732 - DNA, 403 bp, Gossypium hirsutum
  Clone ID: LIB3149-040-Q1-K1-E5
ggaacataactgtcaactaagcccattcgctcaaaagtggaggcggtggcggaggagtgggaggagttaacggtggttacagccgcggtggaagcggcggcggatatggtggtcgccaaggaggatatggtggcggacgccgtgaaggtggatacggaaacggtggggggtatggtggaggtggatacggaggtggacgccgtgaatgaggatacggtgacggcggatctcgttactcaagaggcggcggtgcatttgaaggcaactgtaggtcttaaatttatggtttcaaagtgggcttgggcctatattgttatgggtttggtttgtgtttggtagttggtaattctaaagttactctggtactggttggtttgggttctctctgttttgatcgatgttg

SEQ ID NO: 34733 - DNA, 158 bp, Gossypium hirsutum
  Clone ID: LIB3149-040-Q1-K1-E6
gtttggggaatggaaactgaactacctttttgctctcctcgaaaacggcgttcgttttttgagcctatttttaaagaactaaaaaaaaaaataaaaaaatggaaaacgaaatgttttatagctttaacaattttaaaagaaaaaactaaattgtttcg

SEQ ID NO: 34734 - DNA, 396 bp, Gossypium hirsutum
  Clone ID: LIB3149-040-Q1-K1-E7
ccgtgttttatttctcttcgtcggtatttaaaagtgctggagtaccatcggatgttgcaaatgcattgataggagtagcaaatttaacaggatctattgttgccatgcttttaatggataaacttggaaggaagctgcttcttctgtggagcttctttggcatgactatgtcagtggtccttcaagttgctgcggcaaattcttacgtgtcaggctctggatctttatacctatcagttggtggcatgctaatgttcgtcttaacatttgcactgggagctggtcctgttccaggtctcctcctacctgaaattttccctaatcgaatccgggcaaaagctatggcgttctgtatgtcagtgcactgggtaatcaatttcttcgttggtttgctct

SEQ ID NO: 34735 - DNA, 197 bp, Gossypium hirsutum
  unsure (1)..(197): unsure at all n locations; Clone ID: LIB3149-040-Q1-K1-E8
aaacccgagccgacccacgcgtccganntgttnaatttaaacttaactatttttatactctccccaaaaacaacgaacgtggcatgttcatatttataaagaactaaaccaaaaaatacaaaaatggaaaaccaaataatttataaatttaacaattttaaaataaaaaactaaattctttctaaaagcttctatat

SEQ ID NO: 34736 - DNA, 414 bp, Gossypium hirsutum
  Clone ID: LIB3149-040-Q1-K1-E9
aggacataccttaatctcccctctgagattgttcctgctactttgaagaagcggactagggccggtggtggtcgtcccatgggtccttctgatagccgcccacgtggtccgccacgctttggcgacggtgagaggcgattcggtgacagggatggataccgtggaggtccacgaggaggcggtgatttcggtgataagggtggtgcgcctgctgattatcacccttcattcaggggccctggttcaaggcctgcttttggtcgtggaggcggtggttatggtggtgccggttctgcaagcggcgcaggtcttccatgagttttgtcagtttaggttgaatggcacttcctagttcattttggggtgtgcttttttgcactcaaatgattgagattatctatgttcttttttccc

SEQ ID NO: 34737 - DNA, 394 bp, Gossypium hirsutum
  Clone ID: LIB3149-040-Q1-K1-F1
caccattatcaaatttccagattttccaggaaaaagaaatcaaaaccacaaggtgaagaaggtaaaaaccagcagcggcaaaggcaataaaaggtgaagccaaagagagagagatatatacataataaaaaagattcttcaaaagaacacagctatggctcctcatggagaaggatcagatgcttcagtggaagccatggttgctcaagtcgaaaaacacccaatttcatcaatccttatcatcattgaagctttgccggtggtgaataagttccagttgattgaaaaccctcattcttcgtttccaaaaagggtcccttggatccattatcatggtgcatacaaggacatcataatcaatctagtgtggcccggaaaaagattaacctttggg

SEQ ID NO: 34738 - DNA, 321 bp, Gossypium hirsutum
  Clone ID: LIB3149-040-Q1-K1-F10
cccacgcgtccgggcatctgccagggcatggggtggtgagaagagtccatcaccttctgtgcttagctcttcacagatggctactgctaacagtgatggtcattttgattctccaactgtttcaactgctaatacaagtggggttccggcggtcacacatctcggcattgtaggaagaggagtaaagcgtgtattgacaagtacatcaatggtagaatcaaacccaataaagaaacctggaattgaaccttcatctgacaaaggagatagcagcagtgcgtcttgatgtttcggatcttagatcccaggaataggtaatca

SEQ ID NO: 34739 - DNA, 270 bp, Gossypium hirsutum
  unsure (1)..(270): unsure at all n locations; Clone ID: LIB3149-040-Q1-K1-F11
gcaagggtgacgccggngagcttttacaatttagctgtttctccattaaagggcgttttggtatccatcttaaactaaagaacatgagccaacttgtatcatttccaatggaaatgaatttcttttctttatttcatgctgtcattaggatccaatttggataaacatggttttttaggattctttaaacaagttttccttcttgctttaatttattaagtagtttcagttggtgttaaaaaaaacaacttaaaaaaccaaggcaaaata

SEQ ID NO: 34740 - DNA, 286 bp, Gossypium hirsutum
  Clone ID: LIB3149-040-Q1-K1-F12
gagacttagtcgcctctcaacatcaggagtacgaagggaaaagacctaaaccgaggctcggatcgatgaaccaaaagttcattcgagcacgtctctgatgtggcctagtagaggagcgcacgacgcggagggacgcgcgacgtgcgatgcttgggaacatccatggttgcggcggctgagggtgttagctgctagagttttcatttttctttaattttgctgggctgatagggttgttttgggtttaagtctgatgggtttagggtttgggtaatgatttgtattg

SEQ ID NO: 34741 - DNA, 335 bp, Gossypium hirsutum
  Clone ID: LIB3149-040-Q1-K1-F2
aattactgttattttcttggatttcttttttttttttcagaaaccaaggagaaggaattagtgtgtaaaaccgagatctgagatatgggtttcttggtaacaaccctaatttttgctgcgattgggataattgcatctctttgtaccagaatctgctgcaaccgaggtccctctgcttatctgctccatctaacattggttatcacagcaactgtatgttgttggatgatgtcgtcaattgtatatcctgcacaaatgaaacctttctttgtccccatttagagagatgggttttgtagttcaatacgcgttctgtggcaccattattattgtgc

SEQ ID NO: 34742 - DNA, 375 bp, Gossypium hirsutum
  Clone ID: LIB3149-040-Q1-K1-F3
cataatcatcctcacattcttcttctgcaaattgggaacacattctgcaaacttcctggtggacgcctgaagcctggagaaaatgagattgagggtctgaagaggaagctgaccagcaagcttggagctaattcacctgctcttgtgccagactggcagattggtgagtctgtggccatctggtggaggcccaattttgagacaatgatgtatccatattgccctccccacattacaaaacccaaggagtgcaagaagcttttcctcgtccacttgtctgagaaagagtactttgcagtaccgaaaaatctgaaacttcttgctgtaccattgtttgagctctacgataatgtgcagagatatgggccagtcata

SEQ ID NO: 34743 - DNA, 264 bp, Gossypium hirsutum
  Clone ID: LIB3149-040-Q1-K1-F4
aaaaaagggaaaaaaaatttttttttttatattaaaaaaaaaaatttttcccccgggccataattacggattttatttgattctttactgggcttaaaaaaaaaaaaaaaaaaattgtttattaccaaaaaacggttttaaaaattttgggggccttttcccttttccaaaagacaaaccaaaatttttttcaaaaaaaatataatcttttcccaaaccttttttttttttaaaaaaagtttacaattttttcccaattctttt

SEQ ID NO: 34744 - DNA, 402 bp, Gossypium hirsutum
  Clone ID: LIB3149-040-Q1-K1-F5
ggaaaattcgatcttactggaattcctccatccccaagaggaacccctcaaattgaagtcgcatttgaagtcgatgcaaatggcatcttaaacgtcaaggcagaagataagggcactggaaaatctgagaagatcactatcacaaacgataagggtcgtctgagccaggaggagattgagagaatggttcgtgaggcagaagaattcgcagaggaggacaagaaggtgaaggagaggattgatgctcgcaacagcctggagacctatatctacaacatgaaaaaccagattaatgataaggataagctcgctgacaagcttgaatccgatgagaaggagaaagttgaaaccgcagtgaaagaggcacttgagtggcttgatgacaaccagagtgccgagaag

SEQ ID NO: 34745 - DNA, 405 bp, Gossypium hirsutum
  Clone ID: LIB3149-040-Q1-K1-F6
gttcttttggccccgcttgggtgaatataatatgtatgaaattacggatctggtggagggttacagaaaggtgatgatggaattggctgtggcataggctaatcttgcttagcagctgtggtacctgttgagtgagaatttggggttgtagcctgttatacaataaaaaagtgtattatgtgtgcaatgggctaaccttttgatctaaggctagcaattattctacatgcatcaaacctgacataatcaagggactgagggctcacactgatgctggaggaatcatctgactcttacaagatgacaaggaaagcggccttcagattgtgaaggatggtcagtggattgatgttcctcctatgaaacactgtcttgtcatctaccttggtgaccaacttgaggtaa

SEQ ID NO: 34746 - DNA, 394 bp, Gossypium hirsutum
  Clone ID: LIB3149-040-Q1-K1-F7
gcttctttctagctatatccttatcagctttcaaagatggcaggaatcgcctttggtcgcggttgatgattccttcagtttggggactgtcaaggcctaccttgctgagtttatctcaactttggtgtttgttttcgccggcgttggctctgccattgcttacaacaagttgacaactgatgcagccctagatcccgatgggctagtcgccattgctgtttgccatggatttgctctctttgttgcagtggctatcggtgccaacatctcaggtggccatgtcaaccctgcagtcacttttgggttagctcttggtggccaaatcaccatactaactggcatcttttactggattgcccaacttcttggatccattgttgcttgcttcttgctc

SEQ ID NO: 34747 - DNA, 395 bp, Gossypium hirsutum
  Clone ID: LIB3149-040-Q1-K1-F9
aagggaagctgtgaggaaaagtctcgtcctactgaagaatggtgagtctgccgataagcggttgttaccccttccaaagaaagcaactaagatactagttgctggcactcatgccgataacttgggctatcagtgtggaggctggaccattacatggcagggtcttggtggcaacgatctcacaactggtacgactatcctccaggctgtcaaaaatacagttgattcaagtactcaagttgtatacagtgagaacccggatgcagggtttgttaaatctggcgaattctcttatgccattgtggttgtgggagaaccgccgtacgcagaaacatatggtgacagcctgaatcttacaatatcagagccgggtcccaatactatttacaatgttt

SEQ ID NO: 34748 - DNA, 388 bp, Gossypium hirsutum
  Clone ID: LIB3149-040-Q1-K1-G1
gtgacaagcagggattcccaatgaaacagggagtgttaactcctggtcgtgtccgtctcttgctccacagagggaccccttgcttccaaggatatggtaggcgcaacggagagaggaggaggaagtctgttcgaggatgcattgtgagtcaagatctctctgttctcaacttggtaattgtgaaaaagggtgaaaatgatcttcctgggctcactgatactgagaaaccaagaatgaggggtcccaagagggcatcaaagattcgtaaactcttcaatctctcaaaggaagatgatgtccggaagtacgtcaacacttaccgtcgatctttcacgacaaaatcaagaaagaaagccagtaaagctcccaagatccagagattggtcac

SEQ ID NO: 34749 - DNA, 272 bp, Gossypium hirsutum
  Clone ID: LIB3149-040-Q1-K1-G10
gcgcgttgttgttggaccgtctttgaccatatgctgctcactcatttcgggtttggctggtctcgatgctgctgtttgcctttgcactgctattaaagctaatgagttgggggttaacctaaacgttcctgtttcattgtctttgctcctcaattcctgcgaaaagcaaatgcctgctggttacaaatgtgcttaagcaatgtttgggtttttcttttacgtgtactttttttttctgggcgtgttaaatttggtgttttgatatgtcaagg

SEQ ID NO: 34750 - DNA, 121 bp, Gossypium hirsutum
  unsure (1)..(121): unsure at all n locations; Clone ID: LIB3149-040-Q1-K1-G11
ccaagttntccatgcacctncttttaccattttcaagccacccccancggaagggcactagaaggattctaaaagttcccccccccctacaataccaacccaaaaatctactcaccaacct

SEQ ID NO: 34751 - DNA, 417 bp, Gossypium hirsutum
  Clone ID: LIB3149-040-Q1-K1-G12
gtcgagaaggcagctagggaatctcaggctgaagctatcagaaaaattctcggccaagaggcaagtaggaagaaacgagaagataagataaaaaagaggcaagaagaaatggcacaggaaaaagctacaaattctatgatacttgcatcagacaccgtaagatggcttatggggccttcaggaacagttgtaacattccccaatgaggttggtttaccaagtatattcgatcctaagccttgcagttaccctccacctcgagagaaatgtgcagttccatcttgtacgaatccatacaagtaccgagattcaaaatcgaagcttcccctttgcagccttcaatgctacaagacaatgcatgaaaagatgtctgcccttactgcctggtagtgaaatgcactaccaaaacgtcatttc

SEQ ID NO: 34752 - DNA, 309 bp, Gossypium hirsutum
  Clone ID: LIB3149-040-Q1-K1-G2
gttaaggaccaggaagagaaggcaaagagatgcgaatgcgttcaagggctgctgttgtctgcaattgttgatgatatcttataaagctgctgtaatttccggacaccggttcctgatggacatcaagttcagggaagagccttcatcccactttcaatctagggtttgttaagctgttagtggtgaatatcttgatgtatgtattaagcaaaatgttgaaataaggtgtagcaatgagtgtaatttttaatgttcgatgatggacttattttgaagttcttattttgtccaacaacatatttaagagtt

SEQ ID NO: 34753 - DNA, 298 bp, Gossypium hirsutum
  Clone ID: LIB3149-040-Q1-K1-G3
cgagcactagctgacaacataggtaagttaggagccctctagtttctagcccttggtgaatgaaaacttttatgtccaatgggataagaaaaagggaaaagaaacctactgcattagattggaataactagcagattggaggaagagtggattgtaaagttatatgttgatattatcatctgaatgtcaaacttcaaaaactttttcctattagcatattctaatctatttctttcttttaaccttgtttcattgtctgccatgttaagcatagtgacgtatctccgcagtttcttct

SEQ ID NO: 34754 - DNA, 255 bp, Gossypium hirsutum
  Clone ID: LIB3149-040-Q1-K1-G4
ctaatcgcgagcgccgccctttttttttttttttttgataatttagaacttgtaatcaatagaaccagctatttgattatcatactaatacaacattgccactgtcaaaacagaatttcggtagcttttcgtacttaaaaggaatccaatatctattcccattgtctcttaaaacaaatatacccctacgaagggggtttttgtacgtttaatttaattctaaggtgacataactcaccactgattttagatatg

SEQ ID NO: 34755 - DNA, 374 bp, Gossypium hirsutum
  Clone ID: LIB3149-040-Q1-K1-G5
cttaacaatgccaaaggagcaactttggggatgctgtgaagaagcttggattatggggtctgtttacccgtggtcttcccctccgtattgtgatgattggaactctaactggagctcagtggggtatctatgatgctttcaaagtgtttgtgggactgccaactactggtggtgttgctcctgcacctgctgccgtggagcctgccaaggcatagaatgttggaaaacaagtaaacataggattgctggaatggtttgtcaagctggtggaaggatattcttttttgcgttgagaacatttttatcaagtcgctctgttttgaaaaaaactattggttttaagagaagaatgttttgatctcaatctcaaacta

SEQ ID NO: 34756 - DNA, 407 bp, Gossypium hirsutum
  Clone ID: LIB3149-040-Q1-K1-G6
aagagaatgagaacagagtatggtaaactgaacaagatggagatgggcatatgggaatgctgtgaacttcttaacgacgtaatcgatgagagtgaccccgacttggatgaacctcagattgaacacttgctgcaaacagctgaggctatcagaaaagactatcctaatgaggactggatgcacctgactggccttatccatgaccttgggaaggtgcttcttcatcctggttttggggagcttcctcagtgggctgttgtaggtgacacatttcctgttggttgtgcttttgacaaatcaattgttcaccacaagtatttcgaggaaaatcctgactatcataactccgattacaacactaaatatggggtgtacttagagggatgtggacttaacaatgtgatgat

SEQ ID NO: 34757 - DNA, 379 bp, Gossypium hirsutum
  unsure (1)..(379): unsure at all n locations; Clone ID: LIB3149-040-Q1-K1-G7
aaaaccgggccacccacgcgtccgaagagaatanaacagattggttttcttttaaganggagatgggcatatgggggggcggtgaacttcttaacgacgtaatccattagagtgacccccacttggatgaacctcagattgaacacttgctgcaaacagctgaggctatcagaaaagactatcctaatgaggactggatgcacctgactggccttatccatgaccttgggaaggtgcttcttcatcctggttttggagagctttctcagtggtctcgtgtaaagcacacattccctgttggttgtgcttttgacaaatcaattgttcaccacaactatttcgaggaaaattctgactatcataactccgattacaacac

SEQ ID NO: 34758 - DNA, 363 bp, Gossypium hirsutum
  Clone ID: LIB3149-040-Q1-K1-G9
ccaatattcccaggtttttgttgtaataagtttcaatctgtagccatgggaaaattaaaaagaaggcccccaaaattgctggcatgaagaaaatagtcactcaaaaagctattaaacagtagttgtttcttttctttctctatttgattacagagaaattactttttttcctctctgtaaacaaacgggattttggattttggatttcgcattagccgtttaattgattggcttaaatggatttggaaattgaaaatagaatagcagctattctcttaaaagaggcaaccgaattgaaacggcaagcgggcaacgaaagtgttcatgtttatcttcagcagccaaaaaagaaaagtattcagc

SEQ ID NO: 34759 - DNA, 332 bp, Gossypium hirsutum
  Clone ID: LIB3149-040-Q1-K1-H1
ggagagaaccggagctactgtcgtcgccgccgccatggtgaagtttctgaaatccaacaaggccgtgatagtcctccaaggccgatacgctgggcgcaaagcggtgatcgttagatccttcgacgatggaacacgtgatcgcccctatggccactgtttggttgcagggataaagaagtacccgagcaaggtcatccgcaaggattccgccaagaaaacagcaaagaaatcgcgcgtcaagtgcttcgtcaagctcgtcaactaccagcacctgatgcccacccgctacaccctcgacgtagacttgaaagacgtggttaccgtcgatgcac

SEQ ID NO: 34760 - DNA, 279 bp, Gossypium hirsutum
  unsure (1)..(279): unsure at all n locations; Clone ID: LIB3149-040-Q1-K1-H10
tgagatcagcagctacttcttcttctcatcccctctcgtaaggcaccctaccacgtatgtgccgaaaagggcnaaagataaagggagaagcctggaacatacggtattgaaactatttgggaaagcccccatatttggtgctactatacatttcatagcattttggttgggacttaggattaatgtcttgagttggtgtgtttagttatggatatgggataatgaaataggaacattatcttctttttggttaataaatttgtggatttgctcttcaat

SEQ ID NO: 34761 - DNA, 354 bp, Gossypium hirsutum
  Clone ID: LIB3149-040-Q1-K1-H11
tgttgagtctactggtgtttttactgacaaggacaaggctgctgctcacttgaggggtggcgcgaagaaagttatcatttctgctcccagtaaggatgctcccatgtttgttgagggtgtcaatgacaaggaatataagcctgaccttaacattgactccaatgctagttgcaccaccaactgtcttcccccattggctaatgtgatcaacgataaatttggcattgctgaaggtcttatgaccaccctccattctattactggtacacaaaaaactgttgatggtccttccattaaagacttgataagtgggtgaactgcttacttcaatatcattactaacagcacttgaac

SEQ ID NO: 34762 - DNA, 204 bp, Gossypium hirsutum
  Clone ID: LIB3149-040-Q1-K1-H12
cttgagaatcgggataggtcgaatgctcgttcatactatccgaagccctaaattggtaaagtggcttgtatattttgagtgtggcatgtatagcactatactcactttgtgtaaatgatctaatgatatggttatggtttggtaagaaaagggtttgtaaatgattagccattgaaatgaccaatctaaatcatgtttgatgtc

SEQ ID NO: 34763 - DNA, 352 bp, Gossypium hirsutum
  unsure (1)..(352): unsure at all n locations; Clone ID: LIB3149-040-Q1-K1-H2
atcgttcacatggcatccaccaaagcatgttgaagtttcttcagggccagtgaagaagttgtgtttctgatctaaagaatatgaggtgtttgagagaagcttcttgttatatggaataaaaaacccaatgattttaccccttcttgcatgtttacatttctggttttgaaggtgtagtgaacaagtttaccagtttgatgttatgaagtaaaatggtgtttatacatcaatcaaattagtgctgtcgtttttttccccttttaattggtgctatttgctttcaagtttacctaattgaatgagaaggaatatcggttttcgaatgatttggggcnnnnnaaaannannanaa

SEQ ID NO: 34764 - DNA, 289 bp, Gossypium hirsutum
  Clone ID: LIB3149-040-Q1-K1-H3
tgctcccgccgtatttcacttcccctctcttctctcttcttttccttccttccttccttccttctgtcaacaccactctctaatggcttcccttgctggttcatcaatctctatgcaacctcgccagaccctggctacaagcagggtttctgggttgaaattggtttcatttgtgaaccggggaagaagcagcctctcctttaggttgcgtccagatcgcttgcggatttcatgtgctgccaaaccagagacagtggataaggtatgtgaaatagtaaggaaacaacta

SEQ ID NO: 34765 - DNA, 258 bp, Gossypium hirsutum
  Clone ID: LIB3149-040-Q1-K1-H5
gtcttagcaccctcttatttactaattcaatgtttgcagttggtagagaaaatccatcatgaccccccccccccgaccttactcccctgctgtcaatgtaaattatttccttctcatttttgtttttcctcttaccactttcactcctttgtagttttatgagggacatcacaagatgtagtttatgtatcactcttgttttcttagatgtattttggaagacattcattctccttttatgttttaaaaaagaaaaat

SEQ ID NO: 34766 - DNA, 407 bp, Gossypium hirsutum
  Clone ID: LIB3149-040-Q1-K1-H6
gcaactagagcgaaagatgatttatgtccactgtgccctttcacttctggggtttttgtggcgctaatgatggcacagatcgaggtcttgagaaagaagggccactcgtactcagaaatcatcaatgagagtttgattgaagctgttgattccttgaaccccttcatgcatgctcgaggagtttctttcatggttgataactgttccacaaccgcacgattgggatcaagaaaatgggctccacgttttgattacaaccttactcaacaagcattcgtagcagtggattcaggtgctcccatcaaccaggacctgataagcaacttcttatctgatcctgttcatgaagctatcgaagtctgtgcaaagctaagacctactgttgatatatcagtgcccccagatgc

SEQ ID NO: 34767 - DNA, 274 bp, Gossypium hirsutum
  unsure (1)..(274): unsure at all n locations; Clone ID: LIB3149-040-Q1-K1-H7
cgacaactaaaacaaaagattaaacatttccattatacccccacactnanaaaacagggggagcgcaaattaaaacacagatctacccccacataaaaaagccccactcgtacacataaaccaacaatcagacttctaatcaaactctacactcctaaaacccctgcatacatacacaaggactatggtatactgtttgataactgatccacaaccccacaaatgtgatcaataaactatcccacaactatctattacaaccatactaaaaacc

SEQ ID NO: 34768 - DNA, 409 bp, Gossypium hirsutum
  Clone ID: LIB3149-040-Q1-K1-H8
cttctttttgcgccacttgcctgaatctaacatgtctgaaattcctgatctcgaagaagattacagaaaggtgatgaaggaatttgcagtggagttggagaagcttgcagagcaacttttggacctgttgtgtgagaatctggggttggagcctggttacctgaaaaaagtgttttatgggtccaaagggccaaccttcggtaccaaggttagcaattatcctccatgccccaaacctgacctaatcaagggactcagggctcacactgatgctggtggaatcatcttactcttccaagatgacaaggtcagcggccttcagcttctcaaggatggtcagtggattgatgttcctcctatgaaacactctattgtcatcaaccttggtgaccaacttgaggtaatcaca

SEQ ID NO: 34769 - DNA, 358 bp, Gossypium hirsutum
  Clone ID: LIB3149-040-Q1-K1-H9
ctgatactgaaacattgagatctaatgggggacgaaaacaatcccaaaaagcctgatgtgggaatcttcccttacccagctcagggtcacatcaaccccatactccagttcgctaaacgcttgctatccaaaggcgtcaaatgccgccttgttaccactgtcttcctctccaacttctcattttccgacccatcttccacctctattgatatccacaccatcttcgaaggctttgaccaagggaggtattaacaagcttgtagctccgacgcctaccttgcaactttctggttcgttggccccaacagtttaacagcattaatcaaaaaacttactgaaattcacccttgtgatgccc

SEQ ID NO: 34770 - DNA, 109 bp, Gossypium hirsutum
  Clone ID: LIB3149-041-Q1-K1-A1
ggcagctgatcgtgtgctgttgcataatacaatctatggtgttacactgtggcctctataaaagatgagctcaacgctgactactgttgatggaatactctggtctttt

SEQ ID NO: 34771 - DNA, 124 bp, Gossypium hirsutum
  Clone ID: LIB3149-041-Q1-K1-B5
tgtatgatatatatgatatggacactatcatacagagaagcaagactgcgtgtcgagaatctactgtacattttacactcaatcattaagatgcatttttctgtttcgtacaatggactggtgt

SEQ ID NO: 34772 - DNA, 156 bp, Gossypium hirsutum
  unsure (1)..(156): unsure at all n locations; Clone ID: LIB3149-041-Q1-K1-C4
aagatctataagacatgcgcacggactttgtactaagcttgacttagtcacagaganacgctacattaacgtcagcccgtatgtgacatcttatccatatggacttgtttagatgagatgataaggcacagacatgaagtctctctagactttctg

SEQ ID NO: 34773 - DNA, 116 bp, Gossypium hirsutum
  Clone ID: LIB3149-041-Q1-K1-C6
cttactgacaataattgaccattgtctcactgttacagtgtgatggtctgctcatgtacagaagtggatattatccaccaccatcatcaatgtattgaattatggaggatgtacat

SEQ ID NO: 34774 - DNA, 88 bp, Gossypium hirsutum
  Clone ID: LIB3149-041-Q1-K1-E10
cgtgacttgtaaggctaggtctctatactgccaaggttaactactgcacaaggttagtcgtgttatggtagagcttcaccgcgagaca

SEQ ID NO: 34775 - DNA, 217 bp, Gossypium hirsutum
  unsure (1)..(217): unsure at all n locations; Clone ID: LIB3149-041-Q1-K1-E4
gcgctgcggngaactgtgctgcgtctgctgaggtgcagtgctggagatgcagatgtaccaacctgacgtgccaatacacactgatattgtctgtgacacccaaagacacttagactaatgatcgctaacgtgattgacacactcactcatgatatacaacaatctgacacctgttaaaattttggttgttaaaaactgtgcagttctgtcccgtctg

SEQ ID NO: 34776 - DNA, 292 bp, Gossypium hirsutum
  unsure (1)..(292): unsure at all n locations; Clone ID: LIB3149-041-Q1-K1-E9
agcgtcgagctgttgctgatgaaccttctacaagcagagctggtgtgtcattaagtacacgctatctacatcgacacattgagagcctgtgttgacatcgctgactatttcactttgtagctcaacgaagtatgaaaacatctcnctttatctgatgctttgatagatgtactacactacaaatgttgagtagtaccactgcattggagtctgatcaaacgcaatatgagaagatatgtgtaaaaaaagcgcgtaagtcactatcctctcagatattttagactatatatgc

SEQ ID NO: 34777 - DNA, 222 bp, Gossypium hirsutum
  Clone ID: LIB3149-041-Q1-K1-F12
acagcgtcggtgatcactagacttacatcacaagaagtagtgacaatggatctctatctagaagaagacaagtatcggactgtggggattaaaagccaacttgtattgtggatgaagtgaagtgtataaattctgcttctcgctgcatgcagaacaaataagttaaaatatattgaactgcatctgagtgatgatattatctagcttttgtacttatggata

SEQ ID NO: 34778 - DNA, 249 bp, Gossypium hirsutum
  unsure (1)..(249): unsure at all n locations; Clone ID: LIB3149-041-Q1-K1-F6
gcatgcttgcatctcttgctaagcatatatggccgagtcttggccgccttggacatgttgttgtctatgtgtcgattcatcactgtttgggtgttgtggtagagcgantaatcttaacacaatcagcatcaacagtgtttacccttttttacgaatctctcgactgtatactttattactacgtacacaccattctgtgatataccaatgcaaactgctgtctcattcgaaatggggaaattaacgttg

SEQ ID NO: 34779 - DNA, 129 bp, Gossypium hirsutum
  Clone ID: LIB3149-041-Q1-K1-G3
cgcgggtaaaggctagaaccgtaggcctcgcttcaccaaatacaaccttctgtggttatagctaacgcgtagcttcgctatcagcaaatacagtttgtgattatagctagtaactaaccatggcttagc

SEQ ID NO: 34780 - DNA, 336 bp, Gossypium hirsutum
  Clone ID: LIB3149-042-Q1-K1-A1
gcgccttcagacacttaggaaaataaaacctatcaaggatcttaatgcaaagttgggcaagccgggccgggcagagataacactcaaagatgacctctccgaaagagaccgtatggacctctacaaaacatacttgttatattgtctgacaggtgaagtcaccaggattccttttggtgctcaaataaccacgaagaaggatgattcagagtatgttctactgaaccagcttggtgggatccttggtttgacgagtgaggagacagtagaagtccatcggagtttggcggagcaagcttttaagcaacaagctgaagtgaatttagctgatggaca

SEQ ID NO: 34781 - DNA, 134 bp, Gossypium hirsutum
  Clone ID: LIB3149-042-Q1-K1-A10
accaacaaagtgagcatgcacaccaacagacacaaggggggtcaaagcatgcaaacacatctgcacaacccttctaactaaatacaaaggtttgcccttctcaagacgaaaataaatacaaaaagcacactagc

SEQ ID NO: 34782 - DNA, 212 bp, Gossypium hirsutum
  Clone ID: LIB3149-042-Q1-K1-A11
gctaggtgtttgtgctgacctgcttggactggtaagcatagtggtgggagcacctccttcgagcaaatgctgtgctttgctccaaggcttggctgatttagaggctgccctttgcctttgcaccgccattaaagccaatgtgcttggggccaacctcaacatccctattacccttagcttactccttactgcatcatagaaagaaatccctc

SEQ ID NO: 34783 - DNA, 245 bp, Gossypium hirsutum
  Clone ID: LIB3149-042-Q1-K1-A12
aagcaaagcacgcagcaatcatggcagatgaggaagggaaggatgaggtgccggaaatcacatcatttgatcctagtaaaaagaagaagaagaagaaggttgtgattcaggaccctgcagatgaatctgttgacaagttggcagagaaaacggaggcattatcagtttctgaagggcttgactttagcaatctgaaaaagaagaagaagaaaccagtagaggccaatacattcactgacgaaagt

SEQ ID NO: 34784 - DNA, 217 bp, Gossypium hirsutum
  Clone ID: LIB3149-042-Q1-K1-A2
ctcttaaaaaaaaaaaacctttcttggttcttaatgcaaagaaaaacaaccggggcctgtcaaattataacactcaaagatccccccaccgaaaaacaccgtattgacctttacaaaacatacttagcatattaccagacaccagaaatcaccataattccttttggtgctcaaataatcactaaaaaggattacccacaccatgttctactcaacc

SEQ ID NO: 34785 - DNA, 222 bp, Gossypium hirsutum
  Clone ID: LIB3149-042-Q1-K1-A3
gttatgcagggttcaactttacgaacatttttatgcttcgcaaaagctatgtgataaagtggacggggtgacataaattgcccttccagtgataacaattggactagctgatgctgccaccttctatgtttacatgctcttgtgagatatgagagtaatcattgatagatttataacatacagagcctgaaaagatgaggactccaaacttatgtacactct

SEQ ID NO: 34786 - DNA, 378 bp, Gossypium hirsutum
  Clone ID: LIB3149-042-Q1-K1-A4
cagcaagagagccatggatgagtatacattagagatattcatgggaggcaagaacaccatggtgttgcacaacacatgtgaggattccctgttggctgctcccattatcctagatttggttctccttgctgagcttagcaccaggatccagttcaaggctgatggagagggcaagttccactctttccatcctgtggctacaatcctcagttacctcaccaaagcccctcttgttccaccaggcacaccggtggtgaacgcactgtccaagcagcgtgcaatgctggagaacatactaagggccagcattggcttggctcctgaaaacaacatgattttggaatacaagtgaagaagttgaggagagaaaaagtgaac

SEQ ID NO: 34787 - DNA, 351 bp, Gossypium hirsutum
  Clone ID: LIB3149-042-Q1-K1-A5
ctggaaactaaacgagattttctctaccttcattgtgcttggaggttacttaacactaatgactgtgatattctactgggcaatgaaagacaccaatttcttctcgaacacatttaatgttatatcactgaagcatagtattgatggtgagagagaaatgatggcagatttataccttcaagttagtattgtgagtcatgccctcatttttgtcacaaggtctcgcagctggttctactatgaacaccctggacttatactactcagcgcctttctagatgctcagataacagacactttaatagctgtgtatgcagactgtgggtttgcatggattaaaagtataggttg

SEQ ID NO: 34788 - DNA, 351 bp, Gossypium hirsutum
  Clone ID: LIB3149-042-Q1-K1-A6
ccagaggatactctagaggaagcctacatttatgctgacaggcagatacatcggcatagtgggggttagattcgaatgactaatcaaacggactaatgacttgtctaatacatagtatgcttcatgattgctgcatcgattagcgagtcatatagagagtagtcgatgtttatacctataatttgcgctactgggtcaacctattattatacttataatgaatcggacagtggtgctactctgaacgccctggactaatactagtgagagcctttctagtttgttagttgacagactatttaatagctttgtatgcagactgggggtttgcatggattaaaagtataggtt

SEQ ID NO: 34789 - DNA, 150 bp, Gossypium hirsutum
  unsure (1)..(150): unsure at all n locations; Clone ID: LIB3149-042-Q1-K1-A7
gaaaacccggcccgacccacgcgtccgccagaaaaaacaccagatgaaattcacatttattcccacaaacaaacacaccggcgacacgtgcctttttaatcgcccgaccaaacaaacaaacaaatanctcgtctaacacaaagtatccta

SEQ ID NO: 34790 - DNA, 433 bp, Gossypium hirsutum
  Clone ID: LIB3149-042-Q1-K1-A8
aaaaaaaaaaaaaaaaaaaaaaataaaaatttaaaaaaaaaaaaaaaaaaaagggggcccggtttttattaaacaaaatttcatacacatacatactaaaaaaatattttttttatattgtaacctaaatttaattaactcgccgtggttttaaaaaaccttgagtgtgaaaaaactgtggttacccaaattaatctccttttacaacatattcttttttccaaatgtcgtaaaaaaaaaaaaatccccaccaattgccctttttaaaaatttagcacactttatattgaataggaccctctctctttaggggcattataagcgcggggtgtggtgtttatacacaaaagaaaccctttactttccagagccctaatgcccccgcttttttctttttttcctttttttttttccacaatacaactgtttttcc

SEQ ID NO: 34791 - DNA, 252 bp, Gossypium hirsutum
  Clone ID: LIB3149-042-Q1-K1-A9
gcgtcccattttcctcattttctttcacaccaagcaaagcgcggtaggtacatcctaacaacaatgcctaccaagatattagccctccttgcgcttcttgcccttttagtgagcgcaacaaatgcgtccattatcacacattgatcacttgcttctagtgccattattccacagttcctatcaccagttacttcaacgggcttcgaacatgcagtcgtgcaagcctacacgctacaactagcgcttgcggcg

SEQ ID NO: 34792 - DNA, 411 bp, Gossypium hirsutum
  Clone ID: LIB3149-042-Q1-K1-B1
cccaaccaagaagagcagccgccgcagagcaaagggttcagagaggaaatggcagcaaaaaggaagacccctgttaagacccgaaacccagatcttatacgtggcgtaggcaagtattccaggtctaagatgtaccacaagcgcggcctttgggctatcaaggccaaacacggtggcgtcttcccccgccatgaccccaagcctaaagcacccgtcgcccccgagaaggctcccaaattttaccccgctgaagatgtcaagaagccgctacttaataagcgcaagcctaaacccaccaagctcagagcaagcattactccacggacagtcttgattgtgttggctggaagatttatggggaagagaattgttttcttgaagcaacttacttctgggcttcttttgggtact

SEQ ID NO: 34793 - DNA, 223 bp, Gossypium hirsutum
  Clone ID: LIB3149-042-Q1-K1-B11
aaccaagtacatggttcattaagaggcacgtgtaagccattctttgctgcagttttcttgcaagttggttatgtaagcatggatatattatctaagactgcattaaacctggggatgagcaattacgtactcgttgtttaccgccatgccattgccaccctagttatggctcctttcgctgctttattcgacaagaaagtgaggcctaagatgaccatgacaa

SEQ ID NO: 34794 - DNA, 118 bp, Gossypium hirsutum
  unsure (1)..(118): unsure at all n locations; Clone ID: LIB3149-042-Q1-K1-B12
ccaaaagcnagagagcagaaaagcaggacggggcagggggaaccaaaaagagagcanaaaagcgagggacaaagcagcgagcaagaggacaaaaccgcacaggaggacaacggaaacg

SEQ ID NO: 34795 - DNA, 57 bp, Gossypium hirsutum
  Clone ID: LIB3149-042-Q1-K1-B2
gacgcaccctgtaaccgtgcattaaacacgcccggtgttgttgttacgcacatcata

SEQ ID NO: 34796 - DNA, 389 bp, Gossypium hirsutum
  Clone ID: LIB3149-042-Q1-K1-B3
gcgctggaggtgttggatccgctgattcttctgcttctagaagaaattccaagcgacccggatacggtaagttcactcagcacgagcttccagcttgcaagccaatcctcacgccacgatgggtcatatcagcctttatgcttgttaacattgtcttcattcctattggagtggtctctctgtttgcttctcgagatgtcgtcgaaatcattgatcggtatgaaactgcatgtgtaccggacggctacaaaaatgataaggtcacattcatacaaagtaatttgaccaaacaatgcaacagaacattgacagttaagaagcgaatgaagaagcctatctatgtctactaccaactggacaatttctaccagaatcatcggatgtatgtg

SEQ ID NO: 34797 - DNA, 433 bp, Gossypium hirsutum
  Clone ID: LIB3149-042-Q1-K1-B4
aaggagcttccaccctatgaccctgattggtactatgtcagagctgcttccatggctaggaaaatatacttgaggggaggtcttggtgttggtgcctttaggaggatctacggaggagctaagagaaatggaagtcgcccacgccatttctgcaagagcagtggatctgttgctcgtcacatacttcagcaattgcaggatgtcaacatcattgatattgatcctaaaggtggtaggagaatcacatcaaacggccaacgggatctggaccaagtagctggaaggattgcggttgctatctaagaaattttaactttctgtttttcatgttcctgagatttagtcgtttgaaaattgggttttcataagaagcttgtttaaacattttccgttttggtatattaagttctgaatttattttgattttgatttt

SEQ ID NO: 34798 - DNA, 372 bp, Gossypium hirsutum
  Clone ID: LIB3149-042-Q1-K1-B5
gaaaacccggcccgacccacgcgtccgaaggagcttccaccctatgaccctgattgttactatgtcagagctgcttccatggctagggaaatatacttgaggggaggtcttggtgttggtgcctttaggaggatctacggaggagctaagagaaatggaagtcgcccacgccatttctgcaagagcagtggatctgttgctcgtcacatacttcagcaattgcaggatgtcaacatcattgatattgatcctaaaggtggtaggagaatcacatcaaacggccaacgggatctggaccaagtagctggaacgattgcggttgctatctacgaaattttaactgtctgtttttcatgttcctgaaatttagtc

SEQ ID NO: 34799 - DNA, 406 bp, Gossypium hirsutum
  Clone ID: LIB3149-042-Q1-K1-B7
gtgcgttggataaagttgaaaaagaaatcaagaagcctcttatgagggatgacaagaaatgaatggctcttcttactgctgagtttgataagatcaataagaagcttgggatccggaaggaagacctgcccaagtatgaagaacaactggagctaaaaattgccaaggcgcaattggaggagctgaagaaggatgctcttgaagcaatggaaacacaaaagaagcgggaggaattcaaggatgaagcaatgcctgatgtgaagtcattggacatccggaacttcatctgaaactcgaaattcgcctttggtggttccagtttgagggtgaacaagtataactgttcaacgagtgcttaaaaacctttcttttcattttgctacaatatatgatattaataataatg

SEQ ID NO: 34800 - DNA, 233 bp, Gossypium hirsutum
  Clone ID: LIB3149-042-Q1-K1-B8
aagattttcaaagatgctcatcaagaagcactgaagaaggaaattgaaaggctaaggcgggtgtaccagcaacaacaaatgctcaagaaaatgaacagcaacaatagcaacaaccaccatgcaccaccacaacaacaaccatcacagccgcagcagacgaagaaagaagaacaactataagttgttcagagaaatagagagagctagagacggcagtgagaaggtcttggtgc

SEQ ID NO: 34801 - DNA, 262 bp, Gossypium hirsutum
  Clone ID: LIB3149-042-Q1-K1-B9
cttctccagtgtccaaaaaagcttcattgtggcttggatcgaaaaccccatggctgctcttaagctagtttgtgctctagtgttgtgcatgttggtggttgagcccattgccacaaccaccataacatgcggcgatgtgacaagcaaagtggccggttgcttatcatacttgcagaacggagggaacgtgccgaaggcttgctgcgacgggatccggtccctgaacaacatggctcgaaccacccctgaccggcaaaccgtg

SEQ ID NO: 34802 - DNA, 287 bp, Gossypium hirsutum
  Clone ID: LIB3149-042-Q1-K1-C1
gattgggtctcgctcgattatcaggatcttgatctgtgaagtacttgttatgatcattgggacacgtacctagttggatattacatgttggttaacagttcactgttcaattttttattctcctggatatttatctaagtattgcttgtttcacaataaagcaaaacacggaggcgtcttacaccgccatgaccacaagcctaaagcacccgtcgcccccaaaaaagctcccaaattttaccccgctggaaatgtaaagaagcctgtacttaataagcgcaagccta

SEQ ID NO: 34803 - DNA, 262 bp, Gossypium hirsutum
  Clone ID: LIB3149-042-Q1-K1-C10
ctctgctttcgccaaacaaacgcgagatttggggaggtatttcccttgtctatctgcctccgaatcaatggctttgccgaaccagcaaactgttgattatccgagcttcaagctcgttatcgtcggtgatggaggaactggaaaaactaccttcgtgaagaggcatctaactggagagtttgaaaagaaatacgagccaaccattggtgtggaggttcatcccttggacttcttcactaactgtggcaaaatccgtttctac

SEQ ID NO: 34804 - DNA, 241 bp, Gossypium hirsutum
  unsure (1)..(241): unsure at all n locations; Clone ID: LIB3149-042-Q1-K1-C12
acacctgctaagtctgagcacatcaagcagtgcaagtgcccaagctgcagtagcaagagggctagagtttgaaagtagtaggttcagaaattggactttaaatctatttaaaacgaaacagacaaggttggttttatagcctttttcgttacagtttagaagtaaaacagagcttggtccgtttagttgatgaatgaattttatgactggatattggatttaaaaaanaaaaaagaaatta

SEQ ID NO: 34805 - DNA, 209 bp, Gossypium hirsutum
  Clone ID: LIB3149-042-Q1-K1-C2
ggagatagagcttggaacaataattattgtatatttagtagtcagttgatggtttgggtgtaggggcaagggtcaattttgttctttggggaagtctaaagtgaagagaagaaaaaaaaaatacagtcaagtggtctaaactctaaaagcttgatcctttgaatagatgtatgtatatataatgaaatacatattattcttttcttgtg

SEQ ID NO: 34806 - DNA, 368 bp, Gossypium hirsutum
  Clone ID: LIB3149-042-Q1-K1-C3
aaaaaaaaaaaaaaaaaaaaaaaaaaaaattttaaattataaaaaaaaaaaaaaaaaaaaaggggacgggtgaatttaaattataacccacccaaaaaaacaaaaacgctcttcctttttttttcaccccagttttctttcccttgcttcccatttttcattttttttttatttgcccttaatttcattttactgctcattcttttacaaccccccccctgggaaaccccctgctttacccactttaatccccttgcagcacttccccttttcctccccttgatcattattgaaaaatctcccccctctcatctttcccttcttttcccccctttttttggcaatatataccaccctttttttttctc

SEQ ID NO: 34807 - DNA, 429 bp, Gossypium hirsutum
  Clone ID: LIB3149-042-Q1-K1-C4
gtaacttggccgttctatatcttccacaacacagaggcagctaaggtaacccatctctctctgcgttcctcgttgtctttcctccttcttttctttcttgttgatttggctcagtgaaaactcagtgagttggtgcgaagatgagtcgtggggcagcagcgggaccccaggggaagaagaaaggggcctcctttaccatcgactgttctaagccggttgaagataagatcatggacatagcctctctagaaaagttcctccaggaaaggatcaaggtcggtggcaaagccggtgctctcggcgattccgtcactgtcacccgcgacaagagcaaaatcactgtctcctccgactccaacttctctaagcggtatcttaagtacttgactaagaagtacttgaagaagcacaatgttcgggattggcttc

SEQ ID NO: 34808 - DNA, 400 bp, Gossypium hirsutum
  Clone ID: LIB3149-042-Q1-K1-C6
gccttgcccaggaccctgacagcaaggttgcctgtgaaacatgcaccaagactaacatggtcatggtctttggagagattaccaccaaagccaacgtagactatgagaagattgttcgtgatacatgccgctccattggatttgtttctgatgatgttggtcttgatgctgacaattgcaaggtcttggttaacattgagcagcagagccctgatattgcccaaggtgtccacggacactttacaaagcgtccggaagagattggagccggtgaccagggtcatatgtttggttatgccactgatgaaacccctgaattcatgcctcttagccatgtccttgcaactaagctcggtgcacgtcttactgatgttaggaagaatggcacctgcccctggct

SEQ ID NO: 34809 - DNA, 310 bp, Gossypium hirsutum
  Clone ID: LIB3149-042-Q1-K1-C7
taagacacctagagaggccattgaaggaacatatattgataagaaaagcccatgtactggcactgtttctattaaaggccgtatccttgccggtacttaccatactgcaaaaatggtaaggaccattatcgtccgaaggaactaccttcactgcatcaagaaataccaaacgaatatccagttctttggccttgattctcaacaaaaggttacatcatcctatgttgtggtcattgatcttggaggtgttggaagtcatgctgcatctatgcttctgagatcaggagttggcaagctcctattgctgggc

SEQ ID NO: 34810 - DNA, 363 bp, Gossypium hirsutum
  Clone ID: LIB3149-042-Q1-K1-C8
gaagacacctaaaaaggccaatgaaggattatatatcgataataaaagcccacatactggcactgtttctattaaaggccgaatcctaaccgatccttaccatactgcaaaaatggtaaggaccattatcgtccgaaggaactaccttcactgcataaagaaataccgctcgaatatacaattttttggcctacattctcaacaaaaggttacatcatactatgttgtggtcattgatcgttgaagcattgccagacatgcagtatctatacatacgagatcaagagttggcatgctcctattgttgggctgtgaccagtttactgagaacactgcttatctgcggtctatagaacttaaact

SEQ ID NO: 34811 - DNA, 260 bp, Gossypium hirsutum
  Clone ID: LIB3149-042-Q1-K1-C9
ggagagaagcctgtttcaatcgtccctcaagggaagctgtcacgaaaaaagacattgggtcttcccaaatcttggctttgcattgatggcggatctcaggtcagcatttctcaatgtgtattcccagctcaaatcggagctccttcaggatccttctttcgagtttaccgatgattctcgtcaatgggttgaacggatgctggactacaatgtgcctggagggaaactgcatcgtggactctctgtgattgatagctacc

SEQ ID NO: 34812 - DNA, 438 bp, Gossypium hirsutum
  unsure (1)..(438): unsure at all n locations; Clone ID: LIB3149-042-Q1-K1-D1
cggacgcgtgggcggacgcgtgggctagttctagatcgcgagcggccccctttttcttggtctttgtttttttaaattggtgttgagttattttggttatagaaataatcattttggtagtgtacaggggaaatattaggagttaaaaaaaaagggaaaataaatataaaatggaaatgagaatgaaaaaggttgaagaaagaaaggctcaaattttccatgaaaaaaaaaaaaaaaaaaaaaaaaaataaaaaaaaaaaaaaatattaattatttaaaaaaaaaaaaaaaaaataattaataaaaaaaaattaaaaaaaaaaaaannggggggggggcccctttttttttttttttttttcccccccaaaaaaaaaatgtaaaacctcaaatgggggttaaagggaaaaaaaaaaaccccctctttttttttaaaaa

SEQ ID NO: 34813 - DNA, 258 bp, Gossypium hirsutum
  Clone ID: LIB3149-042-Q1-K1-D11
ctttgggctaccaatgaggttcgggccaaatgcaagttctggtacttcttgagaaagctgaagaaggttaagaagagcaatgggcaagtccttgccatcaatgagatttttgagaagaaccctaccaagatcaagaattatggtatttggctccgttatcaaagccgtactggttatcacaacatgtacaaggaataccgcgacactactttgaatggagctgttgaacagatgtacaccgagatggcttctcgtcac

SEQ ID NO: 34814 - DNA, 261 bp, Gossypium hirsutum
  Clone ID: LIB3149-042-Q1-K1-D12
aaacccggtatggttgttacttttggtcctactgggctgaccactgaagttaagtctgttgagatgcaccatgaatccctcccggaagctttccctggtgacaatgttgggttcaacgttaagaacgttgctgttaaggatcttaaacgtggttttgttgcttcaaactccaaggatgatccggccaaggaagctgccaacttcacctcacaggttatcatcatgaaccaccctggccaaatcggaaatggttatgcccca

SEQ ID NO: 34815 - DNA, 396 bp, Gossypium hirsutum
  Clone ID: LIB3149-042-Q1-K1-D2
tgctgctagaccgacatggcaacctgccataggtggtaatgaacaacgtggtactcgcgtgtttcgggccatctcaaaagtattcgtcgagggaccttgctgctcatactactctaaagcctagaaaggatgggcaggacacccaggatgagttgcagaagagaaacctccgtgatgagcttgaagagcgtgaaaggaggcatttctcgtcgagggacaagtcctataatgatgaaagagatcataggaagggaaaccatcttcttttggaaggggcgaaaagggaggctgaagaccgaattgttccgcgcagtgttgatgctgatgattctgacgtggaagtcaacagtgacaatgaaagtgatgacgacgacgacgacgatgatgaagatgatg

SEQ ID NO: 34816 - DNA, 206 bp, Gossypium hirsutum
  Clone ID: LIB3149-042-Q1-K1-D4
agcgctgtgacggtgaggagtaccattagaaggttgagggagcaaactgagagctgagcgaataacattagcatacccaactttcgtaggatgtttttgcatgtttaatctaaacgtattgaaatctttcttttgacaatgatgttattttgtatcaggatctggtgttgaaactttatatgagatattgagttgttggtttcttc

SEQ ID NO: 34817 - DNA, 353 bp, Gossypium hirsutum
  Clone ID: LIB3149-042-Q1-K1-D5
ggagaaagatatcacccggttatgaagaaaggggactgggtacaaatggatttgttacctacagacagatcagcacaatcaggaactaagctgggtgatttcatatctgcttctgcaaatgagtcagctgtaatcacgtgtggaaaggaagaagattggtttgctggaaaccaccatgtaaagcctgaaaaccagcattcagccaatgatcatatgctttttaatggcgatcgtgttttatctgttgagagtgatcatctatattctcagaagagtgtgaaagatgttattgatgatgattctttcatggtagcagcttcgccagcaagtgacgatctggatgattcgcaatg

SEQ ID NO: 34818 - DNA, 424 bp, Gossypium hirsutum
  Clone ID: LIB3149-042-Q1-K1-D6
ggagaaagatatcacccggttatgaagaattgggactgggtacaaacggattggttaccgacagacagatcagcacaatcaggaactaagcttggtgatttcatatctgcttctgcaaatgagtcagctgtaatcacgtgtggaaaggaagaagattggtttgctggaaaccaccatgtaaagcctgaaaaccagcattcagccaatgatcatatgctttttaatggcgatcgtgttttatctgttgagagtgatcatctatattctcagaagagtgtgaaagatgttattgatgatgattctttcatggtagcagctcggacagcaagtgaccatctggatgattcgcaatggaaaacatatataagcatggttgcatatctaacttcacatatcaaaccatatggcacaatagatgtttcac

SEQ ID NO: 34819 - DNA, 335 bp, Gossypium hirsutum
  unsure (1)..(335): unsure at all n locations; Clone ID: LIB3149-042-Q1-K1-D7
nctgcttcgagcgatctaaaaccctaaattagaatgaattttacggcttcaaagcaaccggaaagttgcttgcttggccctgaatcggattcccaaaggacactgtacccatatgtgacaggaacatcaatcgtggctttaaagtataaagatgggattttgatggctgctgatatgggaggttcatatgggtccaccctgcggtacaagagtgtggagcgaatgaagcctattggcaagcattcccttctgggtgctagtggagaaatcagagatttccaagagattttgaagtatcttgacgagcttatcttatatgacaatatgtgggatga

SEQ ID NO: 34820 - DNA, 423 bp, Gossypium hirsutum
  Clone ID: LIB3149-042-Q1-K1-D8
tattttttagggtttgctttataaaacccatttgcaaccctaccgttggttgatgaaagcggcaaagtcactgtgttaaagagaaacggcgcctccgcccaacaacaatggttcacgtctccttttaccgcaactatgggaagacatttaagaagcctcgtcgtccttatgaaaaggaacgattggatgctgagttgaggctggtgggagagtacgggctgcgatgcaagagggaactctggagagttcagtatgctttaagccgaatcagaaatgctgctagggatctattgaccctcgatgagaagaacccgcgtcggatctttgaaggtgaagctcttcttcgcaggatgaatcgatacggactcttggatgagagccagaacaagcttgattatgtattggcgttgacggtggagaact

SEQ ID NO: 34821 - DNA, 247 bp, Gossypium hirsutum
  unsure (1)..(247): unsure at all n locations; Clone ID: LIB3149-042-Q1-K1-D9
gnngcagaggaaggngaaagancgaaaccaagggagaagggcgccncnccncaccgcncaaccnncngcgcnccnccganccaaaacncncaaaggcaaggcnnncnncncncaanccccgaagcccaccgcncncnccgnccccnnnncaaggaaaccccacaaaccccncagnngcncgncnnncaaaacccnggccagcgcacgaaccgaccctacgcccgaanccgannccgacccagaaacc

SEQ ID NO: 34822 - DNA, 260 bp, Gossypium hirsutum
  Clone ID: LIB3149-042-Q1-K1-E1
ggaagtataaacaaggtgagtctaatgctatagacatgaaggtgaaagatgacttgtgcgcgattgagaactatcacgaaccaccgcgggctgaggcactattggggtctacacgtgcgtggttatcacaccatgaccactggctgcagaggaatgactgcaggtgtgtgtatgaagcgagggacgtgttcatatatgatgccaagcagagagattattgccttgggctataaacattctgcgcagcatcagatgtgaca

SEQ ID NO: 34823 - DNA, 267 bp, Gossypium hirsutum
  Clone ID: LIB3149-042-Q1-K1-E11
gaccggaacgggagggccgggccaacccacccgtccgaggaacacagctgaacactcaagaacaagccagaggggaccaacacctgcaagcaacccaacagcgaagaaaccaggtgacgaaaagaaaacggacggggcgaaagcccacaacgagaagaagccaaaaagccgcgaaaagccccaaaaggaaggcggagcagcggacggagacaagaacaggaagagggccaacaagagggccgagaccgacaagacctacataacaaa

SEQ ID NO: 34824 - DNA, 398 bp, Gossypium hirsutum
  unsure (1)..(398): unsure at all n locations; Clone ID: LIB3149-042-Q1-K1-E2
cggaaaannggaaggacccacgcgtccgagaagtataaaaaagtttattctaatgcttttaactttaagaagaaagatgacttaaacgggattctgtgactatcaacaaccaccgcgggctaacacactattgcaatcttcacttccatgcttataacaccatgaccaatgactgtataggaatgactctaactatctctatgaagcgtttaacgtttcatatatattgccaagcagagagattatttctttggtttataaacattcttctcaacatcagatgtgacattctgttattagttgacctaactatctctcacatgtaacgcgaaaaacaaactaaactttcgcatacctctgtgaatactaaaaaaaaaaaataaaacggcgttccttat

SEQ ID NO: 34825 - DNA, 419 bp, Gossypium hirsutum
  Clone ID: LIB3149-042-Q1-K1-E3
acacagtataatagaatcttactagtgaaataacaccatatgctgtggaagtataatagagattcttgtactagaagccggattgtattttgctcctctactcaaaaaatgagcaaagtagtctttattgttacatcaaaaagcaaattgatcattcttttaaaaattccatccatttatactattataaaccgatccctttacattagcatgaggtttacgtgacatgctacgtggcactacctagttattcagccagccacgttagtatttaatagtacaaatagatgaaacttttaacaaaaatgaccaatttgctttttttatttaaaatataaaaactaatttgctcatttatttagtaaaagagactaaatacaatctgacttctaacaaaaggcctctatgatacttttatt

SEQ ID NO: 34826 - DNA, 435 bp, Gossypium hirsutum
  Clone ID: LIB3149-042-Q1-K1-E4
cagctttggtgatctgaatcatctaatatttgcaacaatgtctggagttacttgctgctgacgtgtgcctggccaactcaactccgatcttcaaaaactcgccgtaaatctcatcccattccctcgtcttcacttcttcatggtcgggtttgctccactcacttcaagaggctcccaacaataccaagctctaactgtccccgaactcactcaacaaatgtgggacgcaaagaacatgatgtgcgcagccgatcctcgacacggccggtacttaaccgcatcagctatgttccgtggtaaaatgagcaccaaggaagtcgatgaacaaatgctaaacgttcaaaacaagaactcatcctactttgttgaatggattcccaacaacgtgaaatcaaccgtgtgtgacatcccaccaaccggtctcaagatggcatc

SEQ ID NO: 34827 - DNA, 352 bp, Gossypium hirsutum
  Clone ID: LIB3149-042-Q1-K1-E5
actcaatctcctagaatcattttttttttggttttgaatatcactgatgattgctccaatgaccgatttatcagtattagacctttgacatttcttgatgacagttttcgagtctcccacaactcctattttgttgactcccatactaatccctagttttacttcctgtaatcctgcatatgcctctgccgtgaatggatttgctatcccggagtgaataactacctgtgttgcaaggatttccttttcctcgatccatacgattagacccgaagccgatctaaacgattgacggtcgaaggctgcgtcaaaatgaactgtggcccttccccttttgaatacctgttgaata

SEQ ID NO: 34828 - DNA, 430 bp, Gossypium hirsutum
  Clone ID: LIB3149-042-Q1-K1-E6
tagcaattgcagtcccaacaagtctgctagatcaatggagggttttacaacaagaacaaaggcatccgctcaacctttggagaacgccgacgagcttatcgcctccgtcgagactttcatctttgattgtgatggagttatatggaagggtgataaattaatagatggagtccctgaaactcttgatatgcttcggtcaaagggaaagagactggtttttgtcacgaataactcaaccaaatccaggaaacaatatggtaaaattttgagacacttggcctgaatgttaatgaggaggaaatttttgcttcttcatttgctgctgctgcatatttgaagtccattaatttcccaaaagataaaaaagtttatgtcattggtgaggatggcatcttaaaagagcttgagcttgcgggattccaataccttg

SEQ ID NO: 34829 - DNA, 351 bp, Gossypium hirsutum
  Clone ID: LIB3149-042-Q1-K1-E7
tccaaaacactagctgagaaggctgcatgggaattttccaaggagaaaggtctggatgtggtggttgtgaatccgggcaccgtgatgggtcctaatatacctccaaaccttaatgctagcatggtaatgttgttacgccttctgcaaggctgcacagagacatatcaggactttttcattggatccgtccatttcaaagatgttgcgttagcacacattttggtatatgagaacacatcagcaaccggaaggcacatgtgcgttgaagctctatctcactatggtgacttcgtggccaaggttgctgaactttaccctgaatataatattcccagtttgccaaaggatact

SEQ ID NO: 34830 - DNA, 413 bp, Gossypium hirsutum
  unsure (1)..(413): unsure at all n locations; Clone ID: LIB3149-042-Q1-K1-E8
cacgaattggtcggctgcttgacttcacacaggatgtacgtgctgcaatggaggcttcaggaaaatctctaacatgtttcatggctgctacttcatccctggaagcagcacaaaatatcgagtgtattacttcagctagaaaggtgatggatttcagctaccaggatgtggatgaacatgcatgtttggttgagcaggcaatgcacgccataagtcgttctgatttatgcaatcccagaaattaagctaccttgtatatatattcgagttttatcagactataacccctcaacatgcattggagatgaaaggtggatggcttatacctgcattcgggaacgaacaaatatgtgagtggcccaataacctattgcctcagtggacatgtgtataaagngcgattgatttgcaaa

SEQ ID NO: 34831 - DNA, 259 bp, Gossypium hirsutum
  Clone ID: LIB3149-042-Q1-K1-E9
cagtagccaactgtgaataagtgaattgacagccaggcgttccattccatttccgtatagttcaaaaacacttgagtaccttcgatcatattttagtgtcaaaaatggccgaggagcataccagtaaggcccctgagttggagagcaacgttagcggtgaaggagcagtggagagcaaggaccgagggttgttcgatttcatggggaagaaagaagaggagaagcctcaagaggaggtgatcgtaaccgagtttgaaaa

SEQ ID NO: 34832 - DNA, 355 bp, Gossypium hirsutum
  Clone ID: LIB3149-042-Q1-K1-F1
cacaatgtaagaatcttgctaaaaggttgttggcggatttcgttttttttttttttttatgcgggaaagtgtaaaccttacaatttatcttgttttgattttgcataagatgcaatggagactattaagaatctcagatcatcagtcatgaatgatataagcaagtaacaaaatgtgaggtacttctctattacctgctcatactgcctttattgcagaggagtcagaaaccgacagtgaagaatcagacgttagtggttccgaaggagatgacacgtcttggatttcatggttttgcggtttgcgaggcaatgagttcttttgtgaagttgatgatgaatacatccaagatgac

SEQ ID NO: 34833 - DNA, 242 bp, Gossypium hirsutum
  Clone ID: LIB3149-042-Q1-K1-F10
atgctattaaattcaatccacagaagtttccgtgggtctgctgacatggcacatgcccttcacccaaattacatggacaaacatgaggagaaccatcaccctaagttgcacgggggccttgttatcaaacacaatgcaaaccaacgttatgcgaccaatgcagtcacgtctttcatattccgggaaatagctatgaaacataaccttcctattcacgattttgtggtgcggaacgatacacc

SEQ ID NO: 34834 - DNA, 266 bp, Gossypium hirsutum
  Clone ID: LIB3149-042-Q1-K1-F12
ctcttatcactttcaatatcttacaccaaaacatcgttttttttccactcaaaggaatggctacatctcagttaacagcatcatcaatgacagtatcagtaaggaatttggcttcatttgaaggattaaggccatcatccattgtgaaattctcttcctttggatctttaaagcctgggtctttgactcaaaggtcctttaagggtttggttgtaaaagcggctaccgttgttgctcccaagtacacctcgattaagcccttgggt

SEQ ID NO: 34835 - DNA, 369 bp, Gossypium hirsutum
  unsure (1)..(369): unsure at all n locations; Clone ID: LIB3149-042-Q1-K1-F2
gaaannnnggaaggacccacgcgtcccacaattaagaatttgtaaaagttttttctttttaattttttttttttatataggcggcgtagagttaaccttacaatttatctagcctaaattttgcataagatgcaccggaaactattaagaatcttagatcatcagtcatgaatgatataagcaagtaacaaaatgtgaggtacttctttattacctgctcatactgcctttattgcaaaggagtcagaaaccgacagcgaacaatcaaacattaatcgtttttatttatatgacacgtctcggatttcaatggcccgccagctgcaatgcaaaaaattcttttgtgaatttcattcattaatacatcca

SEQ ID NO: 34836 - DNA, 405 bp, Gossypium hirsutum
  unsure (1)..(405): unsure at all n locations; Clone ID: LIB3149-042-Q1-K1-F3
gatttgaagacctagtccctgtgaacaaatcttgttgttcatttctgggtttaatttctggggagggagaagatgacaaaagataggcaaatcggtgtagcaatggatttctccaagggaagcaaagcagcttttttatggacaatttactatctggtagacaaaggggatacccgngacctcatccacgtcaaacccaatcagagcgacgagtctcgtaaccttctttggtccaccagtggctcacctttgattccattatcggagttcagagagaatgaagtgatgaaacattatgaggtggaacctgatcctgatgttttagacttggttgatacggcttcaaggcagaaagaggtgaatattgtcacaaagatttactggggtgatgccagggataaaata

SEQ ID NO: 34837 - DNA, 352 bp, Gossypium hirsutum
  Clone ID: LIB3149-042-Q1-K1-F4
aaaaatcctcgaaaaaagaactatgtcgtgggctttggtaaccatcatccaaagcatgtgtcaccatcgacgggcctctatccctgaaaataacatcaaatataactgtaaagggggatggaaatggagggatacgtcaaaaccaaaccccaacacacttgtgggagccatggtcgcaggacctgacaagcatgatgggttacgtgatgatcgcaccaactacaactataccgagccaactctagcatgcaacgcatggatggttgctgcactcaaggcattgactggtgacaaggccaccgcgactgacatgaatactattttttctgcagctccaccaatgtatgctaca

SEQ ID NO: 34838 - DNA, 334 bp, Gossypium hirsutum
  Clone ID: LIB3149-042-Q1-K1-F5
ctagaaagtattttcagcagcttattaatgctgtggattactgccatagcaggggtgtgtaccatcgagacctcaagcctgagaatttgctgctagatggtaatggagttcttaaagtttcggattttggtttgagtgctttacctcagcaagttcgagaggatggattacttcacacaacatgtggaacaccaaactatgttgctccagaggtgatcgacaataaaggctatgatggagctaaggcagatttgtggtcatgtggtgtgattctctttgtcttaatggctggttacttgccttttgaggactccaattagtctctctgtataaa

SEQ ID NO: 34839 - DNA, 407 bp, Gossypium hirsutum
  Clone ID: LIB3149-042-Q1-K1-F6
cgatcgtcctcttcccgcaatggcggatgctcaaactgaaaaacccctttccgtttccgggcaatatgcacttcaggagaaagaggaaaaatcagatgtgactacaaaaccagcagaagcaaaagaggtggaaaatcctgtaaatgcagccactggttctggggatgttgtaactgaaaaattggaggagacttctgccgatccagttgagggaagcactgaggcccctcctactgctgctgaagaaagcactgaagcaaatcctgctactgggaacagtggtgaagatgctgcagaagaaaactcgggtgactctgaggaaactccagagataaagcttgagactgccccagcggatttccgctttccaactacgaaccaaacaaggcattgcttcacacgatata

SEQ ID NO: 34840 - DNA, 329 bp, Gossypium hirsutum
  unsure (1)..(329): unsure at all n locations; Clone ID: LIB3149-042-Q1-K1-F7
gcatatttgagtttcgctcagttttcattgaaaaccctagacctcccaacgaagtagcggggccgcagtttctctgtcgatatccgaaacaagaaatggctgtcacattcaacgacctgggtncngctgctggcttgaataatctggatgagtatctccttactcgcagctacatctctgggtaccaagcttcaaaggatgatattaccgtctacgcagctctatctggtgccccatcgtctagctatgtcaatgtttctcgatggtacaaacacattgatgcccttttgagaatctcaagtgtttctgaaaaaagctgtggtgtgact

SEQ ID NO: 34841 - DNA, 380 bp, Gossypium hirsutum
  unsure (1)..(380): unsure at all n locations; Clone ID: LIB3149-042-Q1-K1-F8
gcatatttgagtttcactcagttttcattttaaaccctagacctcccaacgagggggcggagccttattttctctgtcgatatccgaaacaagaaatggctgtcacattcaacgacctgggttctgctgctggcttgaagaaactggatgagtatctccttactcgcagctacatctctgggtactaagctttatatgatgatattaccgtctacgcagctctatctggtgccccatcgnctagctatgtcaatgtttctcgatggtacaaacacattgatgcccttttgagaatctcaggtgtttctgaagaatgctgtggtgtgactgttgaaggatttgatcccgctgacgctgttgccactccttcaattgctgat

SEQ ID NO: 34842 - DNA, 255 bp, Gossypium hirsutum
  Clone ID: LIB3149-042-Q1-K1-F9
aaaaaaatgtcttcaggttgcaattgcggatggaggtgcagctgcggatctggctgcaattgcggtgagaactgctcaatgaaccttaaccttggatactcggagaagacaaccagcactcagaccatcatctccggagttgcgccagtgaagatgacctttgagggaccagagatcggcactactgaatcaggacatggatgcagctgtggatcaagctagcaatgtaatacacgcacctgttgaaaagcttga

SEQ ID NO: 34843 - DNA, 311 bp, Gossypium hirsutum
  unsure (1)..(311): unsure at all n locations; Clone ID: LIB3149-042-Q1-K1-G1
caatgtaagaatcttgctaaaaggatgtttgcgtttttcgattttaattttttaatagggggtggagggttaacattacaatttatcttgtttagattttgcataagatgcaatggaaactattaagattttttttttttttctttttaatgatanaagcaagttacaaaacgggatgcacccctatatcacctgctcatactgcctttattgcagaggagtcagaaaccgacagtgaagaatcagacattagtggtttcgagggagatgacacaaattggatttcatggttttgcggattgcgaagcaat

SEQ ID NO: 34844 - DNA, 265 bp, Gossypium hirsutum
  Clone ID: LIB3149-042-Q1-K1-G10
ctcacttcagcttgcgtttcttttcactgatggtggagatagcaccaggtgcgaagaacatgttcagtttcttgagggagtcagaggagattcctcaaaataatccaaagctcaaagctcatgctgtcaaggttttcaagatgacatgtgagtcagccatacaactgagagagaaaggggaagtggtagtggctgatactactttgaagtatttgggcactgtccatgtcaagagtggtgtcaaagacccccatttcgaggtggt

SEQ ID NO: 34845 - DNA, 266 bp, Gossypium hirsutum
  unsure (1)..(266): unsure at all n locations; Clone ID: LIB3149-042-Q1-K1-G11
cagggaccggaccggaaggcccgggccaacccacgcgcccgaccaaactcaggggggaggaccaacaanggcggcaaacatggatatggacggnaaactaccccccattatggtgggatctcaaacagggataatactcctataggctatggaggcggaagtggaagaaatgattctaatttaagctctagtactcgggatatctggggaaatggaagccttagcaatgccaaatgccaccagccctggaggattcttggggactg

SEQ ID NO: 34846 - DNA, 428 bp, Gossypium hirsutum
  Clone ID: LIB3149-042-Q1-K1-G2
cccacgcgtccggagagagagagggaggaaaagatgcagatattcgtgaaaacgctaaccggcagggccataactctcgaggtcgagagcagcgataccattgacaacgtcaaagccaagatccaagacaaagaaggaatcccaccggaccaacaacgtctcatcttcgccggaaaacagctcgaagatggccgtaccttggctgactacaacatccagaaagaatcaacacttcatcttgttctgaggttgagaggtggaattattgagccttctttgatggctttggctcgcaaatacaaccaagacaagatgatttgccgcaagtgttatgctcgtctgcatccaaaagccgtgaactgccgcaagaagaagtgtggtcacagcaatcaagtgaggccgaaagagaagatcaagtagataccgac

SEQ ID NO: 34847 - DNA, 418 bp, Gossypium hirsutum
  unsure (1)..(418): unsure at all n locations; Clone ID: LIB3149-042-Q1-K1-G3
cttggtagtgtcagctttgaaacttcctgacaaaaattcgaactttgcccaagtttccgaattttggctatctgcatccgctttcattcaaagccttcaacctgaaccccaacactgctttgagttactgaatcttctgtttggaatattcttatggggggaaaagacaaatactagtgaacctgattggggcccttttgacacgtgaattgttatgagataatttgtgaatgaatagctgagatcgagagatgatctatgaaatgattggtttgaagttcacagcaaaaatccaatctaatgcccaagttttagtttgattttcgacggtgttagaatatgcatgtaagtggcattattatacgttacttaagacatgagtgttgaatatatatcttaaatggaaatntggaataca

SEQ ID NO: 34848 - DNA, 423 bp, Gossypium hirsutum
  Clone ID: LIB3149-042-Q1-K1-G4
caatgatcgtgaccgtgtggttgaagctagagatgatttgcacaggatgttgaatgaggatgagttgagggatgctgtgcttctagtatttgcaaacaagcaagatcttccaaatgctatgaatgctgctgagattaccgacaagcttggccttcattctctccgccagcgtcactggtatatccagagtacatgcgccacatctggtgaaggactgtacgagggactggactggctctcaaacaacattgcaaacaaggcatagatggcgtaattgacttgtcagtctcaaaaaatgccagccccttttggaattattgatgtttctacgtccgataaaatgttttggattttcatgttcttttgtttcttgcaaactttgtcatttgttcttgtagtttaagaataattgataaaattttc

SEQ ID NO: 34849 - DNA, 315 bp, Gossypium hirsutum
  Clone ID: LIB3149-042-Q1-K1-G5
cgaagctgcttgttcttacgctgctttaattctctatgatgatggcattcccatcaccggtgagaaaattgcaacaattgttaaagctgcaaatgtctcggttgaatcttattggccaagctaggttgctaagcttttcgaaaagtgcaacattgaggatcttataaccaatgttggtgctggtggtgctggtgctccagttgccgcagctgcacctgttgctgctggtggtggtggtggagccgctactccacctcctgctgaggaaaagaagaaggatgaaccagatgaagagagtgatgacgatatgggatt

SEQ ID NO: 34850 - DNA, 407 bp, Gossypium hirsutum
  Clone ID: LIB3149-042-Q1-K1-G6
ggagcttgcaaatttacccgagctctgttatctctatcttcaagaaaaccgtttcactgggcgaattccggccgcattgggcactttacaaaaccttcggcacatggatgtcggtaataaccatttggttgggaccattcgggagcttattcttattgaacgctgcttcccagttctacgaaatctatatttgaataacaactatttgaccggacgagttccggctcagctcgcaaatgtgacaaatttggagatattatacctttcatacaacaagatgtctggagtgataccaacggcactcgccgatattccgaagctaacatatttgtacttggatcataaccaattctcaggccgaattccgaatgcattctataagcatcctttcttgaaagaactgtata

SEQ ID NO: 34851 - DNA, 359 bp, Gossypium hirsutum
  unsure (1)..(359): unsure at all n locations; Clone ID: LIB3149-042-Q1-K1-G7
ccaagattgacaggcgatctggtaaggagcttgagaaggaacccaagttcttgaagaatggtgatgctggtatgattaagatgattcctaccaagcccatggttgtggagaccttctctgagtacccacccctgggtcgttttgctgtgagggacatgcgtcagaccgnggctgtgggtgttatcaagagtgtcgagaagaaggacccaaccggtgccaagttcaccaagtctgctgctaagaagaagtgaagaggccaaaaggttttagccgtgaagcagattgagtgttttatctttggttatatgtgggtngaaagttttgcctgttttatgtacgatttttaaaagttgagatgc

SEQ ID NO: 34852 - DNA, 364 bp, Gossypium hirsutum
  Clone ID: LIB3149-042-Q1-K1-G8
acaaaaataacaagcaatactaataaggattttgaaaaagaaccaaaaaaacttgaaaaatggtgattctgatatgattaagatgattcctaccaagcccatggttgtggagaccttttctgattacccacccctgggtcgttttgctgtgagggacatgcgtcaaaccgtggctgtgggtgttatcaatagtgtcgagaagaatgacccaaccggtgccaagttcaccaagtctgctgctaagaagaaatgaagaggccaaaaggttttatctcataaccaaattgaagtgtttatctttgggtatatctggttttgaagttttgcctgttttatgtatggattttaaagtttgacatgcttt

SEQ ID NO: 34853 - DNA, 70 bp, Gossypium hirsutum
  unsure (1)..(70): unsure at all n locations; Clone ID: LIB3149-042-Q1-K1-G9
caaaaaggggcgcggaaaaangagcaagccaaggggggggccganaacaaacaaaaccgcaanacngaaa

SEQ ID NO: 34854 - DNA, 243 bp, Gossypium hirsutum
  unsure (1)..(243): unsure at all n locations; Clone ID: LIB3149-042-Q1-K1-H11
ngacttcttcagaaactatctttccctcaaaaatgggtactttcaggtttcaccagtaccaagtagttggaagggctcacccaacagagagcgatgagcatcccaagatctataggatgaagctctgggccaccaatgaggttcgggccaaatccaagttctggtacttcttgaggaagctgaagaaggttaagaagagcaatggtcaggtccttgccatcaatgagatatttgagaagaacc

SEQ ID NO: 34855 - DNA, 397 bp, Gossypium hirsutum
  unsure (1)..(397): unsure at all n locations; Clone ID: LIB3149-042-Q1-K1-H3
gggagacgttaaagagtactggattaacgacggagtttgggggtctatgaacattttgaaggacgagcatgacgaattgatttgcactcccctcaccataaaaaatcccacatgcgaagggctgaaaacatggaattctacaggtttggaccaacatgtgatccaaatgatatacttttgaacggtttcaaattgccagaactagacgtgaatgattgagtggtatttcaaaacatgggggcttatacttcatcacgtgagaacgatttcaatggctacaaaacctcagctattccaacttatatcctggttcttatgccacccgtaagacaagaaaaatatgcgggttgggctaattagcttgccaacttatatcttctngcaatcatgacacgat

SEQ ID NO: 34856 - DNA, 187 bp, Gossypium hirsutum
  Clone ID: LIB3149-042-Q1-K1-H4
gtttgacatagagagtgtatcggtttatagagcttgtatcaggcatatacatactgatgatgaagtgctgagcaaaatatatatttgttttagttctctagtttcacaaaaatacgaagggctgaaaacatggaattacacacaaaatggaccaacatttgatccaaatgatataactggtaaatgg

SEQ ID NO: 34857 - DNA, 332 bp, Gossypium hirsutum
  Clone ID: LIB3149-042-Q1-K1-H5
cgctgtcaaaaatggttttggtgttcatctaacattttcaacacatattacgtgtgttgagcaccaacgttgctggaaagctaaaaattatgtttgcttagacttacatcaagggtatcggaaggcgttttgctaacattgtttgcaagacggccgatgtcgatatgaacaagagggctggtgagttgactgcacaggaactggacaatctcatgaccattgttgccaaccacaggcagtttaaaattacagactggtttctgaataggcaaaaggattacaaggatggaaagtattcccaggttgcttctaatgctctcgacatgaaattg

SEQ ID NO: 34858 - DNA, 386 bp, Gossypium hirsutum
  Clone ID: LIB3149-042-Q1-K1-H6
gaaaacccggcccgacgccacgcgtccggtctgacataaaaaatttatcttttcatcgaacatgtataacacatatacccggtgatcgtcaaattctaaacaaaatatctaaaaattatactaccatagacgaatttaaatgctatacggaaggcagacaagcgtaacacaagagagcaaagaccgacaatgtcaatataaacaataaggctgaagagttgactgcacacgaacttgacaatctcatgaccattgttgccaaccaccagcagttcaaaatctcagactggtttctaaataagcaaaaggatcacaacgatggaaagaattcccaagttgcttctaatgctctcaacatgaaaatgagaaaagacttggagcgtgtg

SEQ ID NO: 34859 - DNA, 421 bp, Gossypium hirsutum
  Clone ID: LIB3149-042-Q1-K1-H8
caaaaaaagaaaaagtttgaaatccggatatgtcagacgaagaacaccgatttgaatccggggccgactccggagcctgcaaaacctacccacaacatgccggaaccatttgtaagaatggttacatcgtcataaaaaaccatccctgcaagggtgttgatgtttcgacctccaagactgggaagcatggtcatgctaagtgtcactttgttggaattgacatcttcactgccaagaagctggaagatattgttccctcttcccacaactgtgatgttccacatgttaatcgtactgactaccagttgatcgacatttctgaggatggatttgtgagtttgctgactgacagtggaaacactaatgatgatctgaggctcccaactgatgagaacctgttgaaacagatcaaggatggttt

SEQ ID NO: 34860 - DNA, 252 bp, Gossypium hirsutum
  Clone ID: LIB3149-042-Q1-K1-H9
aaaaaaatctgttgtctacttcatcctctctatagagtgagtaggcatttggggtaagcactttcgcctattttctcctttctttgatgcttcttttaatatgttccattagcctttgttggggatcgaatttctacttctaatctcttgttctgtcgtatgatttcaatttttttatgacaatgaattttgaagaatgtagggtagggaatgttcaagcactgcattttataacatatatatatgtataat

SEQ ID NO: 34861 - DNA, 347 bp, Gossypium hirsutum
  Clone ID: LIB3149-043-Q1-K1-A1
ggcgggattacccgctgagtttaagcgtattaatatgcggaggaaaagaaacttaccagggttcccctaataacggcgagcgaaccgggaaaagctcagcttgagaatcggtcgccatcggcgaccgaattgttttctggagaaacgtgctcagcgaccgaccgggcccaagtccactggaaaggggcgccagatagggtgagagcccacatgtgtccggaccctgtgagaacaagaggcgctgtctacgagtccggttgtttgggaatgcagacctaatcgggcggtaaaatccgtccaaggctaaatacggtcgagagaccgatcgcgaacaagtaccgcgaggg

SEQ ID NO: 34862 - DNA, 347 bp, Gossypium hirsutum
  Clone ID: LIB3149-043-Q1-K1-A10
ggcgtacggtgcgggacgcatgcttacaggtgaggtgaaaaagcgactgatagaagttgtgactgaaatagtagaaagacatggaagggctcgagcagcagtatctgatgagatggtggatgcatttatggctgtgagaccacttcccaatatgtttgattgaattaataccaggtaatgaaaagaacttggtgagatgttttccaaattatcgaggaagaacacaacatttggttatattttatttgcattcccttgctagaattctctaaattatgagtttagctatagggaaaatgtattttgtggtgcaatttctcaactctagaaatatagtgaagtgagtg

SEQ ID NO: 34863 - DNA, 358 bp, Gossypium hirsutum
  Clone ID: LIB3149-043-Q1-K1-A11
ggggaaggggcgagttgcatatctgaagattaaaaggttttgaaaattacctctaattatggcattgatatttccatggccgctcataaagagcatgctccacggatttatgctaatgttcacagaaagatttcaccagagatgaatgatgaatttttctgtcattttcgacctgaggaagtttaggctgtagttaaatctatggaacctcttaaagcattaggtattgatagtttccctgctctcttttataaaaaaaatattagcatgttgtaaggaatgatgttatgagatactgtttggtggtttttcgtggggaggttgttgttgaggagataaataagactcatattatctt

SEQ ID NO: 34864 - DNA, 390 bp, Gossypium hirsutum
  unsure (1)..(390): unsure at all n locations; Clone ID: LIB3149-043-Q1-K1-A12
agcagattgaggtactgcaacgtcaacttcagctcttgcagatgcacaagtcaaaaactgaggaaagctcagacattggtctgacaacctcatcagatagtaaaggaaagggcgttgcatcttcttcttctgaagagtaaagagggtacatagttcttgctcaactctagcttatttgaattcatgtagtgatcttaacctaacacacagattattacatacttcagaattttattcataacttttagtgccatgttacctatttcctttaaaaaaaaaatcttttgagcttaccacatcgtcttaaccttttctttgacatcacanagtcattttatgacagtcattatcacacattaaatattgtaaaggacaaaaactgtagatttt

SEQ ID NO: 34865 - DNA, 354 bp, Gossypium hirsutum
  Clone ID: LIB3149-043-Q1-K1-A2
cgcgtacggacattgggtgccgcaacttatctctactctgtaatggctaaatcaaagaatcacacggctcacaaccaatctgacaaggctcacaagaatggaatccaagaaacccaagaggcaccgccacacttccaccaaagggatggatcctaagttcttgaggaaccaaaggtatgcaaggaaacacaacaagaagaatggagaatcagccaatgaagaagagtaggcttttagtggggtaaaagaaaattctagcctgggttagggttttctaattatggttgttttgtttgtttcaatggaaattaaggttttgtttttttcaacattagcactattttgatgattatc

SEQ ID NO: 34866 - DNA, 378 bp, Gossypium hirsutum
  Clone ID: LIB3149-043-Q1-K1-A3
tgaaaaccggaaatgtcggacgaggagcatcatttcgagtccaaggccgacgccggcgcttgcaagacctaccctcagcaggccggcgccatccgcaagaacggttacatcgtcatcaaaaatcgcccctgcaaggttgttgaagtttccacctccaagaccgggaagcatggtcatgcaaagtgtcactttgttggaatcgatatcttcactgccaagaagctcgaagatattgttccttcttcccacaattgtgatgttccgcatgtcaatcgtactgactaccagttgattgacatttctgaggatggatttgtgagtttgctgactgatagtggagacactaaggatgatctgaggctcccaactgatgagaac

SEQ ID NO: 34867 - DNA, 392 bp, Gossypium hirsutum
  unsure (1)..(392): unsure at all n locations; Clone ID: LIB3149-043-Q1-K1-A4
cgaacaaaaataccttaaatntctttcttttancattttttttattccaanaccnacaccaacactgtgcggtcttatcttaaaaagggcccgaccatccacaaaaacctttacatcttcatcaaaaatcccccctccatacttcttcaaatttccacctccaacacctcaaatcatattcattcaaactttcactttattttaatcaatatcttcactcccaanaatctcaaatatatttttccttctttccacaattattaattttcccatttcaatcatacttactaccatttaatttacatttctaaacattaattttttattttcttactaatttttcaacactaaaaattttcttaaccttccaactttttataaccttttttaaa

SEQ ID NO: 34868 - DNA, 142 bp, Gossypium hirsutum
  Clone ID: LIB3149-043-Q1-K1-A5
gagttgaataactggtcattacaatgctggttggcatctatgatggtgtttctaaatgatgttggtgtttattgatataaatgaatgaaaaaaatttatatcataatatattaatttaattgagggagaaaatacagatatt

SEQ ID NO: 34869 - DNA, 310 bp, Gossypium hirsutum
  unsure (1)..(310): unsure at all n locations; Clone ID: LIB3149-043-Q1-K1-A6
tgtagatataggcacaattaggagttccttagttgtgttgtaggagccaaagataaaaaaatggtgaagatagcttttggtagcattggtgattcttttagtgttgggtctctcaaggcttatttggctgaattcattgctactttgctttttgtgtttgctggtgttggatcagctattgcttatgggaagctaacgtcggatgcagcactagacccaccaggcttggtggccatagcggtagctcatgcacttgcgttgtttgttggggtagccattgcagccaacatctcangtggtcatttgaacc

SEQ ID NO: 34870 - DNA, 349 bp, Gossypium hirsutum
  Clone ID: LIB3149-043-Q1-K1-A7
taggattgagtttggctaggaattacagaccatgaaatgtgaaactctgaaggaagattcttaaacaaggatttcccttgtattagattctgtagttgaatctgattgtgcttgatcaaattgttatgctatttggtaatagtggtgagcttatctggactgcatcaacagacggacacgcggaatatgtgttagggataaagttgtgttagagtctaggaatatgatttgaagcataagagaaaactacattacttttgcactgttacttggagcgcaccatacatgcatcggcgagtagggatggaattgcaggctcacatggagaaatgaagcatagaataagcaa

SEQ ID NO: 34871 - DNA, 388 bp, Gossypium hirsutum
  unsure (1)..(388): unsure at all n locations; Clone ID: LIB3149-043-Q1-K1-A8
cgtacgcccactcattctacccatttatttccncattttttttctactctgaaatgcccaaatcaaggaatggcacaaattacaaccgatcttgccaagctcacaaaaatttaatcaacaaacccaaaaagcacctccacacttccaccaaagggatggatcctaacttcttgaggaaccaaatgtatgcaaggaaacacaacaagaataatgtataatcatccaatcaataagagtaagcttttattgttgtaaaagaaaattctaacctcatttaaggttttctaattatccttagttttgtttgtttcaatgtaaaattatgttttgtttttttcaacattatcactattttgattaatatctttgttataaaatattttaaact

SEQ ID NO: 34872 - DNA, 349 bp, Gossypium hirsutum
  unsure (1)..(349): unsure at all n locations; Clone ID: LIB3149-043-Q1-K1-A9
agggaatnntgttccacgataccctcttggtgtttggtgccctgctaagatgatanaggagaattgtagggtggttgctcatgtgcgaggattggtgaatcaattaaaganagctaacatnaagagcagatttcgagccaacgggctcttgaattaggcaagacacttctgaagaggaggcgagagtttgtgtcgattagtgaagttatttcagccatgaagcacgtccaatcatgatggaaatgctggaaactgctgtgcacgtatccataaaagcttttgcgcttaaatagatggaaggttttacaggatccataatttaataaagttttcatggtccttgaggcat

SEQ ID NO: 34873 - DNA, 365 bp, Gossypium hirsutum
  Clone ID: LIB3149-043-Q1-K1-B1
caagttgatatccaactatcaatctttaggtttattgcattaaatagatcatgaaatcttgcctgtctttttttgcattccggtcacttctcctgtttgtagacaccattgcagcagctaggaaagatgctggagagtactggggagctgtaacgaaagatcagcctatgcctgaggcactccaagagcttgttcggattgaggctgccgttgtcagccccgatgagaaaaccaagtgccatacatcaggtaatattgagcttaaggaagagaagattattgttaatgaggagttcgaaccaaggccaaacgtttcagcttatggtgatgacgctaatctaaaaggagataaatcatcatctttt

SEQ ID NO: 34874 - DNA, 261 bp, Gossypium hirsutum
  Clone ID: LIB3149-043-Q1-K1-B10
tgaagtttgtgtttaatgattgttttcctttttgtaagttcttgataaatgttaaaaatgatgattgagttggggtttaggttttagagataattaccgtttaatgattttgcaccggtatttatactctatgattgagccatggatgctctttctagctttgaatgttttcatgaatgtgtttattgcctatagaatagcaatggattctcaatgttcatcatttccattgtggaatccctagccttaaatttgaattaa

SEQ ID NO: 34875 - DNA, 173 bp, Gossypium hirsutum
  Clone ID: LIB3149-043-Q1-K1-B12
gattttcagaacttatcatgggatttaacttgttataacatctattcattgttgtgatgctttgatgtcataaacaaagaagagttgaaaatttattgttatagacattatccatctagtaagaagtccgcttcttagcctttcgttataacacgagttccatcatcccattt

SEQ ID NO: 34876 - DNA, 277 bp, Gossypium hirsutum
  Clone ID: LIB3149-043-Q1-K1-B2
aggtcaggcgggattacccgctgagtttaagcatatcaataagcggaggaaaagaaacttaccaggattcccctagtaacggcgagcgaaccgggaaaagcccagcttgagaatcggtcgccatcggcgtccgaattgtagtctggagaagcgtcctcagcgacggaccgggcccaagtcccctggaaaggggcgccggagagggtgagagccccgtcgtgcccggaccctgtcgcaccaagaggcgctgtctacgagtcgggttgtttgggaatgc

SEQ ID NO: 34877 - DNA, 399 bp, Gossypium hirsutum
  Clone ID: LIB3149-043-Q1-K1-B3
atctgcgtccatgcatatcttgtgagaagatcgctcaattagttctcctatggtgggttttcgcataaactttgaagatcgccatacagaagcgaccaaaggtggttgaaacttggtcttgagtcgtcgagaattttttcctttcgggaaaagggattgtgtgtgtcgaacaagatcgatcgactttgagagcgaaatcttctcgagattcttgaaattttggaaatttatagtatcttttaaaaagattttcaagctttgatttctaatcttttaaaactgtgtagaatggtgtagaggatgtgtttatatggtgccaatgagttgaaaggatatcctaatttgtggaacttctaatacaattgacttttttaaataaaaaagggatttatttttatt

SEQ ID NO: 34878 - DNA, 357 bp, Gossypium hirsutum
  unsure (1)..(357): unsure at all n locations; Clone ID: LIB3149-043-Q1-K1-B4
gctttgagtatgaattgaaggagatttagttgaagagatgaatgtgagccatgcctcantccacccagtggaagatctaccagccgcggacggaggcgtangtataggcggcggcaacaacaacaacaacgaggtgcctagagtgaggatgaaggatattcaggggatgcctggaacggcaggagggctcgcgttgcggatttgtcagtttgtttctgcagttatgggactttgtattatggcaaccaccagtgattttccatctgttaccgccttttgctaccttgtagctgccactggcttgcagagtgtgtggagcatatcgcaggctatanatgacatttatgcccttttagt

SEQ ID NO: 34879 - DNA, 195 bp, Gossypium hirsutum
  Clone ID: LIB3149-043-Q1-K1-B5
gccggtctacagtttaatggcatttagacatctgatgttggtttctctagttctgcacttattcggttatagattggaaatgggtgtctttgtgtttaggactaggaaacagaaaggtgttcaaaagttccatttggccttggctgaggacttatttttagcacagtgaatcaagatctgaaataatttgagatt

SEQ ID NO: 34880 - DNA, 231 bp, Gossypium hirsutum
  unsure (1)..(231): unsure at all n locations; Clone ID: LIB3149-043-Q1-K1-B6
gacccgcgcgtccgacctttctacanactaatttcatataaacttttttttatgaattctctacatccccactggctcgtttataaataaaaaccggccgcctacccatccaaaactatcaaacacaacatcttccacaacttccatttctctctttctnaatacttatttttaacacaatctctcaaaatcttaaataattctatattaaaaaaaatcaaaaaataaatt

SEQ ID NO: 34881 - DNA, 318 bp, Gossypium hirsutum
  Clone ID: LIB3149-043-Q1-K1-B7
ggcgcaccggaatattgccacgccaacttcacaaaatatttcacgagcagtttctggtcggccgaacggttttcagggacattcaaagggaggaagccgtgctatttcaatacgggggtgatggtgatagatctggtgaaatggaggagggtgggatacacgaagcggatcgaaaggtggatggaaatccaaaaaaaccgatcggatctacgagctgggttcgttgccgccgttcctgttggtttttgcgggacgcgtggcacccatcgagcatagatggaaccagcatgggttgggtggtgacaacgtgaggggaag

SEQ ID NO: 34882 - DNA, 388 bp, Gossypium hirsutum
  Clone ID: LIB3149-043-Q1-K1-B9
agacacccaaagagtttatagatgaccaacatcctcggcttttcaaggacttagatttcatggagttctttctttttgccttttccgatcctgcaaggcacatcgacaacggggagttgctccatgtctttgctggcctctcaccaccagtttccaattaaaatcatgctcatatagacaagttaaagtttggatctggtttttaattaatgttacaaataataaattgagtcctatactcgagatctacgttctcgaactgtattaccatgttatattttgttataattgtgtactactaaatctactatgttgagtaatgttggttttatgaaatcaataagattgcagttcatggactgaacaagacgcctactcattgaacttg

SEQ ID NO: 34883 - DNA, 364 bp, Gossypium hirsutum
  Clone ID: LIB3149-043-Q1-K1-C1
agaagaagaagaagatgtcgtggcaaacatatgtagatgagcacttgatgtgcgaaatcgatggcgatcatctctcctccgccgccatcgtcggccacgatggcagcatttgggcccagagctccaatttccctcagttcaaacaagaagagattaatgccatcatgaatgactttgctgaacctgggtcacttgctccaactggattgtaccttggtggcacaaaatatatggtgatccaaggcgaacccggatatgttattcgagggaagaagggatccggaggtattactattaaaaagtccaatatggctttgctcatcggaatctatgatgagccaatgactcccggccaatgcaatat

SEQ ID NO: 34884 - DNA, 336 bp, Gossypium hirsutum
  unsure (1)..(336): unsure at all n locations; Clone ID: LIB3149-043-Q1-K1-C10
tttctctttgcgcctttcttctctcggccgaaggtaagtcatggttaagcataacaatgtcgtgccaaatgggcacttcaagaaacactggcagaactatgtgaagacttggttcagtcagccagcacgaaaggctagaagaagaatttcaaggcaaaagaaggctgtgaggatctttccaaggccaactgctggaccccttcgccctattgtccatggccagactttgaagtataacatgaagttgagagctggaaagggtttcacccttgaagagcttaaggctgctggtatttcaaagaaacttgcaccgaccattggtatcgctgntgatca

SEQ ID NO: 34885 - DNA, 386 bp, Gossypium hirsutum
  unsure (1)..(386): unsure at all n locations; Clone ID: LIB3149-043-Q1-K1-C11
gcgaggaattcaagggctatgttttcaagatcatgggaggttgcgacaagcaaggattcgggatgaagcagggtgttgtgggtcctgctcgtgttcgtctcttgcttcatagaggtaccccatgcttccgtggatatggaagacgtaatggtgagcgtagaaggaagtctgttcgtggatgcattgttagccaagacctttctgttttgaacttggttattgtgaagaagggtgagaatgatttgccagggctaacggacactgaaaaacctaggatgagaggtccaaagaaggccttcaagattagaaagctctntaacctttcaaaggaagatgatgtccggaagtatgtcaacacttacaggaggactttcaccacaaaatct

SEQ ID NO: 34886 - DNA, 389 bp, Gossypium hirsutum
  Clone ID: LIB3149-043-Q1-K1-C12
cctgaaaaaggcccaagctgaggctgaaggaaaagcccccgagtctaagaaaccaattgttgtgaaatatggactaaaccatgttacctaccttattgagcagaacaaggctcaattggtggttattgctcatgatgtggatccgatagagttggtggtgtggcttcctgctttgtgcagaaaagtggaagtgccttattgcatcgtcaaagggaaatcacgtttgggatcgattgtccacaagaaaactgcttcggtcctgtgcttgaccacagtcaagaacgaggataagttggacttcagtaaaatcctcgaggcaatcaaggcgaacttcaatgataagtacgacgagtacaggaagaagtggggaggtggtatcatgggatcca

SEQ ID NO: 34887 - DNA, 269 bp, Gossypium hirsutum
  Clone ID: LIB3149-043-Q1-K1-C2
aaaagaggaaaaagaaaagacatgggtgttgtaatcattgacggatcgacggtgagagcctgtgtgactgacgaccagcaggtgacgaagagcgtggatgagcgtttctcagctcttgacctcaacaacgacggtgtcctctccaggtccgagcttcgcaaggccttcgagtctctgcgtctcctcgagtcccacttcggtgtcgacgtcgccactccccccgacgagctcactcagctttacaactccattttcgagaggttcgattg

SEQ ID NO: 34888 - DNA, 358 bp, Gossypium hirsutum
  Clone ID: LIB3149-043-Q1-K1-C3
accatatgctcattggctggaaattttgatccttgggattccatcttttcttgggcctgcaattgctccgggacatatgatcacattttggctttggatagctttacggcaaatcgaagcaatagagacacacagtggatatgatttcccctgggcacccacaaggtttatcccattttatggtggtgctgattaccatgattaccatcattatgttggagaacaaagccagagcaactttgcttcagtttttacttattgtgattatatctatggcactgacaagggctatcgataccataagaaggtcctaaggaagttgaaagagcaatctaaagctaatggtgctcagaatggg

SEQ ID NO: 34889 - DNA, 355 bp, Gossypium hirsutum
  Clone ID: LIB3149-043-Q1-K1-C4
catttacacccttttgtttgttaattgtccattttgattgacagtctaaaggagatgttgaaggagccaaggaatactatttgcaagccatacaaggtgaccctaggaatggtgaaaccatgtcacagtatgctaaattgatctgggattctcaccgtgaccatgataaagcttcacattattttgagctagcagttgaagctaatcctgaaaatagcaatattcttgcagcatatgctagcttcctttgggaaacagaaagaagatgaagacaataacacaaggcaagatcaaactcaggtttctcttcagaacagagctttgtctgcaataagctcataagtcattcattctg

SEQ ID NO: 34890 - DNA, 385 bp, Gossypium hirsutum
  unsure (1)..(385): unsure at all n locations; Clone ID: LIB3149-043-Q1-K1-C5
gtttgcttccgtcacaactcaaaaaccgtacacaaaatgggcaaggatctgagcgacgagcaaggctcatcaatgaaggaggcttgcactctcttcgacaccgacggtgacggcaagatcgctccatcggagctagggatcctaatgaggtctctcggcggtaaccccacccaagctcaactcaaagctattatcgctgaagagaagctcacggcgccctttgacttccctcgcttttttgatctcatgtccaagcatatgaaacctgagcccttcgataggcagctacgcgatgctntcaaggttctggataaggacaatactggctntgtctccgttgcagatctgagacatatactgactagcatcggagagaagctggagc

SEQ ID NO: 34891 - DNA, 380 bp, Gossypium hirsutum
  Clone ID: LIB3149-043-Q1-K1-C6
atacacttactttggttgcagtcaagagaccattccagaatttgtcaagaaccccattatccctaagtatccagatattatgattgctaaacttggccctggacaggaaattgaactggaagcacatgctgttaaaggcattgggaaaacacatgcaaagtggtccccagtggccactgcttggtatcggatgcttcctgaggttgtattattggaagatatcgaagatgaccttgctgaagaactcaaaagcaaatgcccagttaatgtgtttgatatagaagatcttggaaaaagtaggagaagggcaactgtagcaaggccacgtgcgtgcacactttgcagagaatgcataagaagtgacgattgggaaaaacgtg

SEQ ID NO: 34892 - DNA, 207 bp, Gossypium hirsutum
  unsure (1)..(207): unsure at all n locations; Clone ID: LIB3149-043-Q1-K1-C7
cccacgcgtccgatcaaagttcaatatctatagaagacaaattagagtgacacttaaaattgtctcatccgtacataattgacatattcttttaccattaaacacttctttgagattttagttnaaaaaaaaaaaaaaaaaaaaaaaaaaaaaaaaaaaaaaaaaaaaaaaaaaaaaaaaaaaaaaaaaaaaaaaaaaannnaaaaa

SEQ ID NO: 34893 - DNA, 401 bp, Gossypium hirsutum
  Clone ID: LIB3149-043-Q1-K1-C9
ggcctcctactgggaagaagaagtttgagactctctcatacctccccgatcttacacccgtgcagttggctaaggaagtagattaccttcttcgctcaaaatgggttccttgcttggaattcgaattggaggagggattcgtgcaccgtaagtactcgagcttacccacgtactacgatggacgctactggaccatgtggaagctgcccatgttcgggtgcaccgactcggctcaggtgttggaggagcttgaggaatgcaagaaggcataccccaatgcattcattagaatcattggcttcgacaacgtgcgtcaagtgcagtgcattagtttcattgcctacaagcctccaggcttctaagctttttattaactttgtctctccatttgttgaatttga

SEQ ID NO: 34894 - DNA, 388 bp, Gossypium hirsutum
  Clone ID: LIB3149-043-Q1-K1-D1
agaattgtcagccgaagaaggtgaattgtttgcctaatggtttcagctactacaagctagaaggagttgaccatttcatgagccagtacaacgaaggagaagggataaaggagagtgattgtgggaggaaatgcacctctgattgcaagtgtttggggtacttttaccacagggaaacatccaaatgttggatcgctaatgagttgaaaacccttgctaaaacctctaactcttcccatgttggttatataaaggcacccaacaagtgacgggaatcctattaagtatttgtactttttcctctgtattttccagtttctttattgtaagctaataagtatttgtaagtttgaattacaaattaaagttttatttaaaagtatcaatc

SEQ ID NO: 34895 - DNA, 379 bp, Gossypium hirsutum
  unsure (1)..(379): unsure at all n locations; Clone ID: LIB3149-043-Q1-K1-D10
cgggccgaccgcacgcgtacgcactgacaaagtttttaatcttatcttttttttgatcgacgctcaaaangaattagggggtgtaaatctataagagagggacgtcatcacacaacagaacatgtatgcacatttgctacctcattcctttgcctcaccttctatgccaggcttgtgatgttcccctacattaccatcaccaccacccatgagacgaatgttaattccttcaatgccaactattaatattccaccaatgggcacctattaagtcataacatgtctgttcaatttaaacattttaactttcagttcaatgccactctatatttctgctatttataacgcttatattccttttcccctttttcttttttat

SEQ ID NO: 34896 - DNA, 243 bp, Gossypium hirsutum
  Clone ID: LIB3149-043-Q1-K1-D12
attcttttaactactgccttttctaagtttgaaacgcactttctcctggagtggccttctttcaactcagggcgggactaccaaaatttcttacctatcacatttatccatttgtttatcacatcttttctcactattgctctttcttctcttctgtttaaacataatttaatccattactttatattctttatcacttacttccttatgttcaattttttgttctcttaaccaaaaaattta

SEQ ID NO: 34897 - DNA, 348 bp, Gossypium hirsutum
  Clone ID: LIB3149-043-Q1-K1-D2
gtgagctctcaccaatggctttcaaagctctgctgctgttactattggccacttttctggttgtgcaacaacagttgcttgcaatgaagtgggagtgaagactgagattaaatatgctgctcctgttccagtgaaggcacctatccctgctccacccgttaagcctcccaccactccggtgccgccgtacaaggctccaactccagcacccccaactaagggccccactccatataaaccccctaccaaggcccccactccaccatataaaccaccaaccaaggcttcaactccaccatttaagcccccagcaccagcaccaccaaccaaagcttctacttccccata

SEQ ID NO: 34898 - DNA, 386 bp, Gossypium hirsutum
  Clone ID: LIB3149-043-Q1-K1-D4
gaatatgatgatatagcaatgaaatatctatcctatgtgctcttcttccttgttgcatgtgtttgtgtttactctcttatgtatgagcgccataagagctggtattcctggattctctcttcactcactagctgtgtatacatgtttggttttattatgatgtgccctcaacttttcataaactataagcttaagtctgtagctcatttaccctggaggcaaatgacttacaagttcctcaacaccatcattgatgatctctttgcattcgtcataaaaatgccaacacttcatcggctttctgtcttccgtgatgatcttatatttttaatctacctgtaccagagatgggtatatcctgtggataagaaacgtataaatgaatt

SEQ ID NO: 34899 - DNA, 317 bp, Gossypium hirsutum
  Clone ID: LIB3149-043-Q1-K1-D5
aataaactcaagtacaaaagaagccattgaacttcctgtgtcttcatcaggagttgaatggagtgcagaaattgtgtattcctgtgtggatggtgaacaacatcgtgatagggatgctgagctggaagttggtgaggaccttattagccacaacacgcatgatgagcgcatgaatgaagttgagttgtggcaacaactagagcatgagctttacgataaagccgaagatgatgagggtgatgttgttaaccaaataaggaaagaagaagcggcagccattgcaaaggttggaggtgagggacagtcggatacttcag

SEQ ID NO: 34900 - DNA, 364 bp, Gossypium hirsutum
  Clone ID: LIB3149-043-Q1-K1-D6
ggtggaatcctgaatcttatttgggtcctgctgctttgcttcacgctaacagatggataagcgatagccgtgacgaatacgcaaaagagagattggatgccataaatgacgagtttaagttgtatcgttgccatacgatattgaattgtgctcgtgcttgcccgaagggtctgaacccaggaaaacagattacaaacatcaagcaccttcagctgactggtggtgcttaaagtttcaaacttcacaataaattgtttgtgtatttaaaaccagttaatctggatccttgaacaatttgtttcaagttaaggataccaataattgtgttctgtatgtagactatattttcatttgatataatgcc

SEQ ID NO: 34901 - DNA, 401 bp, Gossypium hirsutum
  Clone ID: LIB3149-043-Q1-K1-D7
cacaatgctatccgcaatgacccaagaatcaactggatctgcaatccggttcacaaacacagggaactccgaggactgacctctgctggcaagaaatacaggggtcttcgtggcaaggggcacttgcaccacaaggctcgaccttcaaggagggcaacctggaagagaaacaacacactctcccttcgccgctaccgttgatcccctggaccgtacttggtgtttttgttactgctatcttggcttcattactattgtagggtttataagaattttgagacagttatattgtgtgtgggacatcttgaaaatcttctatgttagaggctattgagatttatgtgctcactgaaaatgtccaatgctattgtcatattgagattgtgttgttgatttttttt

SEQ ID NO: 34902 - DNA, 395 bp, Gossypium hirsutum
  unsure (1)..(395): unsure at all n locations; Clone ID: LIB3149-043-Q1-K1-D8
ttagttcttcgtatgctataattttttgttttgaagttgcagattcaacctaatggcgaggaagggttcttcaacggggccttctanaaaagcaaaaaataaaaaagaagaatctgttccagaacagaagaattcagcttctaaagtggctggtaacgaaatcgacgagatatttgcaggtaaaaagaggaagaaacccgacccgaaagggtccgagaaaccgaacggcgatgaaatttcaaaacccaaatcgtcgaaaaagaagagtcaaaagagtagagaaaccaacagggaaggaggattcaatgagtcttcttctgggccttggaaaaggacagcagatggttttgcaatttacactgaaaaagaattgggtattagtaaatctgatgctg

SEQ ID NO: 34903 - DNA, 401 bp, Gossypium hirsutum
  Clone ID: LIB3149-043-Q1-K1-D9
cactggcaaagttgatgaacttatcaaggacaagattgaggctcaaaaggaagtaaaggctaaagagcaggaagagaaggacgtgatcgcacaacagaacatgtatgcacagttgctacctcttgccttgcccgcaccgccaatgccaggcatgggaggttttgctccatcaccaccaccaccacccatgggaggaatgggaatgcctccaatgccagctttcggcatgccaccaatgggcagctattaagtcataacaggtctgttcaattgaaacattttaggttacggatcaatggggctctatatagctgcaatttcgaggctttcattctttttcccctctttctttttcatttgtctgatgagtgaagatcaaaatttggaataatgccattttt

SEQ ID NO: 34904 - DNA, 360 bp, Gossypium hirsutum
  Clone ID: LIB3149-043-Q1-K1-E1
gaaaacaacaagctacctcatgactttgacagaaggggaaaatgggtgaatgcttctcacttctgtaagctccttgtcgaaccattggacatcgcggattattaccgaactggtatgcaccgcgagcgtgggcactacattgagcacggaagggaaaggaggtatgaagttttcgacaagtggtggagaagtgttccagaggaagaaaacaagaggagcaaatttgccagcttgacacaagattcatgcttctgggccagggtagaagaagcaaaagaatgtctagataatgtgagaagtgagaaggatgcaacgaaacgacagcagttgtggcacaagatcgacaactttgaagcatat

SEQ ID NO: 34905 - DNA, 336 bp, Gossypium hirsutum
  Clone ID: LIB3149-043-Q1-K1-E12
cgctaggcaagatatggtggtagttgaggtgccaaagctaggcaaagaagcagccaccaaggccattaaggagtggggccagcccaagtccaagatcacccaccttgtcttttgcaccactagcggtgtggacatgcctggggctgactaccagctcaccaagcttttaggcctccgcccctccgttaagcgcctcatgatgtaccaacaaggttgcttcgcaggggggacggtgctccgagtggctaaagacttagctgaaaacaacaaaggtgctcgtgtacttgttgtgtgctcggagattactgctgttacctttcgtggacctagtgacac

SEQ ID NO: 34906 - DNA, 208 bp, Gossypium hirsutum
  unsure (1)..(208): unsure at all n locations; Clone ID: LIB3149-043-Q1-K1-E2
cttgctcaactctagcttatttgaattcatgtagtgatcttaacctaacacacagattattacatacttcagaatcttattcataacttttagcgccatgttacctatntcctttaaaaaaaaaatcttttgagcttaccacatcgtcttaaccttttctttgacatcacagagtcattttatgacagtcattatcacacattaaata

SEQ ID NO: 34907 - DNA, 241 bp, Gossypium hirsutum
  Clone ID: LIB3149-043-Q1-K1-E4
ggatgaaagagtattcttttaagactgggcttgtctaggtaggaaaggggcttgctgctggagtgacctgctttcaactcagggtggtagtaccaggatttgttacctatgacatggttcgatttgtttatcagatgttttcggactgttgttctgtgttctcttctgtttaaacataattgaatcggttactttatagtctttatgacttacttccttatgttcaattttttgttgtctt

SEQ ID NO: 34908 - DNA, 150 bp, Gossypium hirsutum
  Clone ID: LIB3149-043-Q1-K1-E6
ggatgaaaaaagtataggttcagcaatagacaggtttctgtttaagaactatacgttgttgaaaataccttagatgcttttatatgccctttgatggttcaattgtctgaatattttctttcatgtttatatgagcaaattgattccttc

SEQ ID NO: 34909 - DNA, 400 bp, Gossypium hirsutum
  Clone ID: LIB3149-043-Q1-K1-E8
catacatagacataactttaaattaatcatttttttctcgagccgtacgaggagaaaactgcttatacgtttctaggggggggggtattatttaactacatctatcccaatgagccgtttatcgaatcgttgcaattgatgttcgatcccgaagagagggaagagatcttcgaaaagtgggtttttatgatccgataaataatcaaacctatttaaatgttcccgccattctctatttccttgaaaaaggagctcaacccacagcaactgttcatgatattttaaagaaagcgggggtttttacagaacttactcttaatcaaacaaaattcacttaatgaaatccaaaaaagagggtgtggatgattcatatctagctttgtataaatttttctttatt

SEQ ID NO: 34910 - DNA, 347 bp, Gossypium hirsutum
  Clone ID: LIB3149-043-Q1-K1-F1
gccgccctacaatatccctttgcttgataattgattgttgcaatctgctattacttggatgaaggctttaatcgatacagtggggcagtcatctcaaattttggtgctctttgactcatccttttccgcaatacactgaatgcatgaccgactctgggggtgtgaattcttttggatctgtcaaatttgaaggtacattcatcaaatttacaaatgcttgcaaaatgtcagaggacgaatggcgattcttgaacgggtgtgctttgcagaatcctaagaatcaacctctatcaaagttgccgtatatattctttgaacatggagatgcactacggtgataacttttt

SEQ ID NO: 34911 - DNA, 280 bp, Gossypium hirsutum
  unsure (1)..(280): unsure at all n locations; Clone ID: LIB3149-043-Q1-K1-F11
ctttctgcgatgttggcggatctggactagttcttatgatatcaagaatgttttaggattaggaatagggcttgtaattaaagggtgctattgggattattggaatttataatttggtcgtgtggttttctttggtgatttgtaattcgtgccatgaattgcagattttaatgaaatttggaatttaatttcggccnanaaaaaaacaaataaaaaaaagaataaaatttaatattaataataatgacaatcattttgaacactagaaaaaataaaattg

SEQ ID NO: 34912 - DNA, 392 bp, Gossypium hirsutum
  Clone ID: LIB3149-043-Q1-K1-F12
atcatatctaagctgtatgaaaaacatgcatccggaaataccaaagtgggtattgacttggggggaggtgactccgaggatggtgtttgcaaagatgtgtcaaccctgaatatttgggatctttatgtcaccaagtttttcgctctcaaatatgctgctgatgctgcctgcactgttctacgggttgatcagattataatggcaaaaccagctggaggtcctggaaggagagagcagcctgcaggaatggatgaggactaagtcttctaatctgcaacatgatatgccattcctttctttttttctcatcagggctggttcggactttgttaggcatcttcggagatgctaaaaaccctttgaaacaaagttttgcttttgttttgaaaatt

SEQ ID NO: 34913 - DNA, 373 bp, Gossypium hirsutum
  Clone ID: LIB3149-043-Q1-K1-F3
cctgaattggtgatgaaatctattgtaccagttgttatggctggtgttttgggtatttatggcttgattatcgctgtcattattagtactgggatcaatcctaaggccaaatcgtattaccttttcgatggttacgcccatctttcttctggtcttgcttgtggccttgctgggctttctgctggaatggcaattggaattgtcggcgatgctggtgtcagagctaacgcacagcagccaaagctttttgttggaatgatccttatcctcatctttgctgaagctttggctctttatggtcttattgtcggcattatcttgtcatctcgggctggacaatcccgagcagaataagataactcaagtgctgcat

SEQ ID NO: 34914 - DNA, 395 bp, Gossypium hirsutum
  Clone ID: LIB3149-043-Q1-K1-F4
aaggaacccaagttcttgaagaacggtgatgctggtatgattaagatgattcctaccaaggccatggttgtggagaccttcgctgagtacccacccctgggtcgttttgctgtgagggacatgcgtcagaccgtggctgttggtgttatcaagagtgtcgagaagaaggacccaaccggtgccaaggtcaccaagtctgctgctaagaagaagtgaagaggccaaaaggttttagcggtgaagcagattgagtgtttttatctttggttatatgtggtttgaagtttttgcctgttttatgtaagatttttaaagtttgagatgctttggtttgccaaagcatcttagtcaagttttgtgtctgatcttgcggaactatactttgttttttctat

SEQ ID NO: 34915 - DNA, 395 bp, Gossypium hirsutum
  Clone ID: LIB3149-043-Q1-K1-F5
gtttataatccattatacttacggatgtgactacaatttgaagggagaattaacgtatggaaagattggagaatggcgtttcgataagagatcgtaccttagtgggcctcctccaaggaacctctctttgccccctccaggtgttcctgaaagtgtggtgagacttgtgaagatggtgaacgaagctacagagaatattcccaattgggatacactaaatcgtggctgagatctgatcttactaatctgcgcatccattttgacgctggtatcaatctgctttccaactagagttatggacatgaaatacagaggtagctgagacagcagtatacatagagaaaagggtatgtttacaagttaaaggagggatatatcatttttttacacttata

SEQ ID NO: 34916 - DNA, 396 bp, Gossypium hirsutum
  unsure (1)..(396): unsure at all n locations; Clone ID: LIB3149-043-Q1-K1-F6
cttatggtcgagcaggtagtataagtgagggtttgcgcagtatcatgcagtctantcctggagaagttggcgttaatcgcgccttagtgaaccgagatagcttccagcgctacaatatggatggaattgctgagatattattagcacttcagaggatcgaacaagatgaagagttgacatatgagcaattacttgttctagagaccagcttgttccttaatggcctagacttttatgaccagcatagagacatgagactggatatagataatatgtcatatgaggaattactagccctagaagagaggatgggtaatgtgagcactgggctatcggaagaagcattgtcgaaatgcctcaaaaaaagcatctatgacacagcatcttcggagtttg

SEQ ID NO: 34917 - DNA, 233 bp, Gossypium hirsutum
  Clone ID: LIB3149-043-Q1-K1-F8
caacaagcacaaatgtccttgaaaaacccaaccaaagcccccaaaaaacgacacttgttgagtatgtgtttttcatatggtaatagctgaaaagcttgcagtaataagttctgtgagaagagaggaaatggatggatttcttgtagtgtcttcgtttgtaatcctagaagctatgaacttgtcaaatagttttaattaaacatataactgaagataaataagtagtatatatt

SEQ ID NO: 34918 - DNA, 375 bp, Gossypium hirsutum
  unsure (1)..(375): unsure at all n locations; Clone ID: LIB3149-043-Q1-K1-F9
aagagaagaaaggaacaatggagtggacacattggctcaccaaaaatggtcaggtgccaacttttatgatagatatctcaagacagttcaaggaggtatatcatccacagcagccatgggcaaaggggtgactgaggagcaattcaaggaaacatggactagaccaggtgcagggaacattggaagtgaaggcaatctggttgtggctaaggctagaatgtaagacaagcaaaaatgagctgaaggatggtctattttggacttgggagaataacccaattcttgaattttggaattgggacggaaaaaaaaaaagtggtaataaaatcatttgacaatggatcagtctgggtattntcgtttctttttggtttc

SEQ ID NO: 34919 - DNA, 359 bp, Gossypium hirsutum
  Clone ID: LIB3149-043-Q1-K1-G1
ctgaggataaccgtgagccctctgatcattacactaccaaaattggtggacttcctgattggcctcttcctatagaggctttgaagttcaaccctacacttattcactgcacacaatgtggaagtaaactctgtcttgttgctcaggtttatgctccagtttcaagtggaactttgaacatagaagaccgtctacttcttgtttttggttgtgtgacaccaaattgtggtagctctcctctcagaaagtggaaaatgaatcaaaggaatcatcctctgctgctactctggataaagctccttcagcttcatctcctgtttctgtttcaaaaactaactggtgggagaatttgagtgatg

SEQ ID NO: 34920 - DNA, 358 bp, Gossypium hirsutum
  Clone ID: LIB3149-043-Q1-K1-G10
caatcaacttccgttttgcctttcacaatcgctgaaaccaaaccttccaaattcctgcacagttaagcatttttcagggtggaaacaccattttgtttttctgtccaaaaaaccctctccaataacaatctgtaaagcttccttcacgtagaaaaatcaactctccctttccctcacgaaacttcgatttctttctcctcagcttcacttcctcgtaaaagtttcctttttgccgctccttccccctagggtttcgtatagtaaggaacgaggggatcgaacataatcaaatcgaatggattggggaaacgtaaccgcagaggatctgatcgacgcgcttcgtgaagttgactggtca

SEQ ID NO: 34921 - DNA, 386 bp, Gossypium hirsutum
  Clone ID: LIB3149-043-Q1-K1-G11
ccaacctaccatcctctccagtgagggcttcttcatcctttgggatcgatccatctgggccgtctgcagctgcagtggtaagttcaaggtcatctgcctttgcaaagcgtagccagagctttatcgagcgtactgctgtaaatcgtcattcagggctgtcttcgccagcttcttctgcaagtgcaatgccttccaacctatcagattggggttcccccgatggcaaactagactggggcatacagggagaagagctaaacaaactaagaaaatctgcttccttcgggttccggagcagtggcagcaatttgggaaatgcccctcgttctatatcatcaactacagatgagcctgatgtgtcatgggtccagtctctggtggtggac

SEQ ID NO: 34922 - DNA, 387 bp, Gossypium hirsutum
  Clone ID: LIB3149-043-Q1-K1-G12
cacttgcggaggctgcattccttattggtctggaaaagaacagcgatgttgtgcatatggctagctatgcaccactttttgtgaattccaatgacagacggtggaacccagatgcaatcgtcttcaactcctttcaggcgtatggaactcctagctactgggtgcaacgttttttcacagaatcaagtggagcaattcttcttaatgcaacactgcaaaaagattcctctaattcccttgttgcatctgcaattacttggaaaaattcagaggctggtcaaacctacataaggataaaggttgtaaactttgggagcaattcagtcaacctccaaatttctgttgatggattggatccaaattctgtaaagctgtctggatcaacaa

SEQ ID NO: 34923 - DNA, 379 bp, Gossypium hirsutum
  Clone ID: LIB3149-043-Q1-K1-G2
ctcggggaaagatcgattcatcagtcttcttctctgagtagaggttttggatttgtaagcatttacaatgtcttcgtgctatgtcgcagcaaccactgactcaattgctctggccttagaagccaaaacaccatctgaagccatctcaatcctttaccgtgtactagaaaatcctgcatctgctcccgatgctctacggattaaagagcaggccataacaaatctatctgatcttcttagacaagagaaccgagcagaggagctcagaagccttctgacccaactgaggcccttttttgcactaattccaaaggcaaaaactgctaaaattgtccgtggtataattgatgatgtagctaagataccaggaacatcagat

SEQ ID NO: 34924 - DNA, 309 bp, Gossypium hirsutum
  Clone ID: LIB3149-043-Q1-K1-G3
ctcaggaaaagatcgatccatcagaccatttctcttacaaaaggttttgaatttctaatcggtcggaatatatacaagctagctcggaccaaccactaactcaatacctctcaccttataaaccaaaacaccatctgaagccatatcaatcctctaccgtgtactataaaattctgcatatactacacatgctatacctattaaatagcatgccataacaaatctatctgatcttcttatacaagagaaccgaacagaagaactcagaatccttcttacccaacttatgccctattttgcactaattcc

SEQ ID NO: 34925 - DNA, 148 bp, Gossypium hirsutum
  Clone ID: LIB3149-043-Q1-K1-G4
ggaaaaaaaacaggaacctgatttatgttccttggctttactatttgcgtgttaagatgtgatcggtcatataattatgtcggctggtatgatggattggttttctttttgctcaatttgtgttaatatagcacttgttttcctattt

SEQ ID NO: 34926 - DNA, 389 bp, Gossypium hirsutum
  Clone ID: LIB3149-043-Q1-K1-G5
caagggtcccactctccttgaggctcttgaccagatcaatgagcccaagaggccttcagacaagccgctccggctcccactgcaggatgtctacaagattggcggcattggaactgtgcctgttggtcgtgttgagactggtgttcttaagcctggtatggtagtgacctttggcccctctggcctgaccactgaagttaagtctgttgagatgcaccatgaagccctctctgaggctctccctggtgacaatgttggattcaatgtcaagaacgttgctgttaaggatctcaagcgtggtttcgttgcttcaaactctaaggatgatcctgcaaaggaggctgccagcttcacctctcaggtcatcatcatgaaccaccctgggcaga

SEQ ID NO: 34927 - DNA, 332 bp, Gossypium hirsutum
  Clone ID: LIB3149-043-Q1-K1-G7
cgaagttgatatccaactatcactgggtaggtttattgcatgaaataaatcaagaaggctcgccttcctttgtttgcgtacgtctcacttcttctgtttgtagacaccattgccgcagctaggaaagacgctggagagtactggggagctgaagtgaaagatcagcctatgcctgaggcactccaagagcttgatcggattgaggctgccgttgccaaccccgatgagaaaaccaagtgctatacatcaagtagcattgcgctttaggaagagaagattattgttaatgacgagttcgaaccaaggccaaacatatcagcttacggtgatta

SEQ ID NO: 34928 - DNA, 156 bp, Gossypium hirsutum
  Clone ID: LIB3149-043-Q1-K1-G8
acggatatctcggctctcgcatcgatgaagaacgtagcgaaatgcgatacttggtgtgaattgcagaatcccgtgaaccatcgagtctttgaacgcaagttgcgccccaagccattaggccgagggcacgtctgcctgggtgtcacgcatcgtcgc

SEQ ID NO: 34929 - DNA, 274 bp, Gossypium hirsutum
  Clone ID: LIB3149-043-Q1-K1-H10
aggacatatccactcttcctatgatgtgaaacgttacattcagccggtattggaaaacgaatccaaggatagcttatggtgagcaacggaagataattcaagtacgatttacgacttacaaacttgttatatacttttgatttctcaatattcaaagatactttgatgttgctgcctgtgtatttgccttaacaatgcaatatcttgttccatgaaaaacattcttagagattgttcttaactttcaatataatgcttctatatattctttttt

SEQ ID NO: 34930 - DNA, 386 bp, Gossypium hirsutum
  Clone ID: LIB3149-043-Q1-K1-H11
atcggaaggcgattcgctaacatcgtttgctagaaggctgatgtcgacatgaacaagagggctggtgaattgactgcacaggagttggacaatctcatgaccattgttgcaaaccccaggcagtttaaaatccctgactggtttttaaataggcagaaggattacaaggacgggaagtattcccaagtcgtgtctaatgctcttgacatgaagttgagggatgatttggagcgtttgaagaagatcaggaaccaccgtggtttgaggcactactggggccttcgcgtccgtggtcagcacaccaagactactggtcgcagagggaagactgtcggtgtgtctaagaagcgttgaaggcttcatatatattttggaaaaaatgatgt

SEQ ID NO: 34931 - DNA, 358 bp, Gossypium hirsutum
  Clone ID: LIB3149-043-Q1-K1-H12
gttgtactctggtgaacctttgggtgataccaagcttcctctggtttatggtggtgattgtggtgacaggtattgccatatgggaagcctaaattcatcaaaagttgaaggcaaaatcgttgtttgtgataggggagggaatgctagagttgaaaaaggaggtgcagtgaagcttgccggtgggttaggaatgatactagaaaacactgccgacaatggtgaagaactcatttccgatgctcatcttatcccagctacaatggtgggtgaggcagctggtaataagatcctggaatacattaaaacaactcagtttcctacagctacaatttcgttccgaggaaccgtgattggccct

SEQ ID NO: 34932 - DNA, 381 bp, Gossypium hirsutum
  Clone ID: LIB3149-043-Q1-K1-H4
ctattgctccccagttgaaaaggtaatccatccaattcatgaccaatcgttttacctcaccatggagcacaaaaggaaattgaaggaagaatttggagttgagccatggacattcgaacaaaaccttggagaggcagtttttattcctgctggatgtccgcaccaagttaggaatctgaagtcatgcaccaaagtcgctgtggactttgtatctccccagagtatcaaggaatgcctccgattaactgaggagttccgccaactaccaaagaaccatagagccagagaagacaaactcgagatcaacaaaatgataatttatggagtagaacgggcaattcgagagttatcagatctaatatcaaccccaaattgagcccc

SEQ ID NO: 34933 - DNA, 382 bp, Gossypium hirsutum
  Clone ID: LIB3149-043-Q1-K1-H5
ctgctcaccgccataagcgagatcaaaagccagcagcgcagcagctaaaagagcagtcttttgacaattattcgccatgggtgaggttcacggatctctagctcgtgccgggaaggtgagaggccaaactcctaaagtggccaagcaagacaagaagaagaagccccgtggccgcgcttacaagcggatgcaatacaaccgacgcttcgtcacagcagtggttggatttggcaaaaagaggggacctaactcatctgagaagtaagagatctatgtaggtgaagaaggcaagaagccttgttgaaagctttgatggattttaagtctttgttttcttttgataatgtttttatgatattggtttcaaggattggattgaact

SEQ ID NO: 34934 - DNA, 391 bp, Gossypium hirsutum
  Clone ID: LIB3149-043-Q1-K1-H8
ccttagagaagctatttcaaccattgtagctcagtccaaggagaagcagcgtaagtgtattgagactattgaactccagattgggttgaaaaactatgatccccaaaaagacaagcgtttcagtggttccgtgaagttgccacacattcctcgacctaaaatgaagatctgcatgcttggagatgcccagcatgttgaagaggcagagaagataggtttagattatatggatgttgaagcactgaagaagctaaacaagaacaagaagttggtcaaaaagcttgccaagaagtatcatgcttttttggcttctgaatctgttatcaagcagatccctcgtctcctgggtcctggtctcaacaaagccgggaaattcccaaccctttgtact

SEQ ID NO: 34935 - DNA, 382 bp, Gossypium hirsutum
  Clone ID: LIB3149-043-Q1-K1-H9
tcaatatcctgatgtcaaccatgcaactgttatgactccatctggagaaaagccggttcgcgagcttgttaaggatgatgcgtggttgaatggagaattcataaccactgtccaacaacgtggtgctgcaatcatcaaagctaggaaactctcaagtgcactatctgctgctagtgctgcttgtgatcacattcgtgattgggtccttggaactcccgagggtacatgggtttccatgggggtttactctgatggttcatacaatgcaccagctggggtcatctattctttccctgtaacttgtaagaatggagaatggacaattgtccaacgactggcaattgatgaattctcgaggaagagttggacttgacccgacagg

SEQ ID NO: 34936 - DNA, 418 bp, Gossypium hirsutum
  unsure (1)..(418): unsure at all n locations; Clone ID: LIB3149-044-Q1-K1-A1
atttattctaagatcactgagttggagatggaagtgagcgagcattcgctagttataaatgccattcagccacttgaccagtcgaggcggtgctaccggatgattggaggtgtccttgttgagagaaccatcaaagaggttctccctgccgtgcaacgaaacaaagaagggcttgaggaagtaattgctcgtcttaacgagaccctggagaagaaaaagaaggaaattgctgatttcgagacaaaatacaaaattaggatcaaaaagtccgataatgactcgaaagatgaaagcaacaagaaggaaggctccgctcaaggagtcctttgtcgcccttgcaagtcgagtcagtaataggtatattccttcctatntccttncttatatgctcgaacttgctttttataaaccctaaatc

SEQ ID NO: 34937 - DNA, 424 bp, Gossypium hirsutum
  Clone ID: LIB3149-044-Q1-K1-A10
ggaagggtctccgcgtaactgtcaaactcaccgtccagaaccgtcaggcgaaagtcactgtggtcccgtcggcggcggctcttgtaatcaaggcgttaaaggagccagagagggataggaaaaagaccaagaacatcaagcacaacgggaacattaacctcgacgacgtcatcgaaattgccaaggtaatgaggccgaggtcgatggctaaggatttgagagggacagtgaaggagattttgggcacgtgcgtctccgttgggtgtactgttgatggaaaagaccctaaggatctgcagcaggagatcgatgatggagatgttgatgttcctttggagtgagaaagcttgttcttctcgttttttacgtctatcctcatgcttgcctcttttagaaaaatgttcaatataaagattttgaacaa

SEQ ID NO: 34938 - DNA, 424 bp, Gossypium hirsutum
  Clone ID: LIB3149-044-Q1-K1-A11
gcttattatcctttctttagaggtcatgctcatcatgacacaaaaagacgagagccttggttgtttggtgaacgaaataccgcacttatgagagatgccatacgaattcgatacaccttgcttccatacttctacacattattcagagaagcaaatgttagtggtgttcctgttgtacggccattatggatggagttcccatctgatgaagcagctttcagcaatgatgaagccttcatgggtgggaacagtcttttagtacaagggatctatactgcaagggctaaacatgcatcagtatatttgcctgggaaggaatcgtggtacgaccttagaacaggaactgcatataagggaggaaaggtccataaacttgaagtttcagaagagagcattcctgctttccaaagagctggcacaatat

SEQ ID NO: 34939 - DNA, 422 bp, Gossypium hirsutum
  Clone ID: LIB3149-044-Q1-K1-A12
ccggtgttccaattattcttgttgggactaagcttgatcttcgagaagataagcagttcttcatagatcaccctggtgcggtgcccattaccacagcacagggtgaggaattgagaaagctaattggagcgcctttttacattgagtgtagttcaaaaacacaacagaatgtgaaagcggtctttgatgcggccatcaaagtagttctccagcctccaaagaagaagaagaaaaagaagagaaaggcacaaaaagcttgctcaatattgtgatcatgcaaagaagtgatattggtgccagataccatgaacaattagccatttaatctgttagtctctcaccatatctattatctcttctctctgagaaaatagctccttttggtatgttatctgaactgacagaactagggaactttctac

SEQ ID NO: 34940 - DNA, 356 bp, Gossypium hirsutum
  unsure (1)..(356): unsure at all n locations; Clone ID: LIB3149-044-Q1-K1-A2
caggaatattccnaacttattttttcaccttttaatgcagtcaaacataactgtggttggggagtttttattcgggttggagagtcttcaaaccacaatgccttcgatttgcttgctaaatatggcacaactcatctgggtttcaatgatgatattcaaggaacagcatctgtagtccttgcacggcttgccgctgcactaaaaataatctgtggaacctttgctgatcataaaattttaatcccttgtgcttgaaaagcttgcacttgcatttcaaaacttatagctcttgaaatttcaaaacagacaaacatgccactttaagaagctcgcaagaagatctctcttgtggactc

SEQ ID NO: 34941 - DNA, 359 bp, Gossypium hirsutum
  unsure (1)..(359): unsure at all n locations; Clone ID: LIB3149-044-Q1-K1-A3
accggccggaagaccacgcgtccggagcttganaagctatcaatctggggtggcatacgtattaggacactctcatataagagcaaaagtgaatgcaccatgcttgaagagatttatgatccatgtggcctatttattcttacgtaaaaactgcagggcacctgccgtggttctcaacattcctcagacatgtttgattgaggttggcatgaactattatctgtagaactactactttcttctcaaataattgtttctttttttagtttccaataagagatgttgaggaagttttagctgtgtctacaaattctttttgcaatatcttcttaaaacaaaattatagggaattatttttg

SEQ ID NO: 34942 - DNA, 417 bp, Gossypium hirsutum
  Clone ID: LIB3149-044-Q1-K1-A4
cttaagcaaagaacttatgtatcagcaggttcttcgtcggtttgctcattttaatgctatacaactaagtgagccagctcctttgcaagagttaatcatgttggccctgaaggaggaggacttggacctagaaagcaatgaaaatgatgagctcaaaaagaagattgcagaaatgaatacacagctgcttaagcaaaagtctgaaatgttggaggagtatttctgcatttttattgattcagatgggaatttatctagactgccaattctacttgaccagtacactccagacatggatcgtgttcctgaatttgtgctatgtttgggcaatgatgttgagtgggaagaagaaaaaaattgtttccaatcacttgcagctgctcttgggaatttttatgctatgcatccgcctatgtt

SEQ ID NO: 34943 - DNA, 231 bp, Gossypium hirsutum
  Clone ID: LIB3149-044-Q1-K1-A5
gccggccaaccctttattcccgatccaaaattctgtctttccgcagccgttttcgtttatggcgcgactgttccggctccagggcgtaacagaatacggacaatgccaatctattaggaggatggcaacaatccaaacacatcgttttcattttaccaaggatcatgaatgcagtttggatcagatgggttcgcggcagatattctggatactggtgtagggttatagata

SEQ ID NO: 34944 - DNA, 424 bp, Gossypium hirsutum
  unsure (1)..(424): unsure at all n locations; Clone ID: LIB3149-044-Q1-K1-A6
aaaagagcaatttttttgaggtggtagtttacaaaaccaaaatgaagatctgttgcattggagcgggttatgttggtgggcctacggtggctgtgatcgcgcttaaatgtccggatattgaagtggctgtcgttgatatctctgtacctaggatcgctgcctggaacagtgaccagctccctatctatgagcctggtcttgatggtgttgtgaaggagtgtcgtggcagaaaccttttcttcagcactgatgtagagaaacatgtgcgtgaggctgatatagtctttgtttctgtcaacactcccaccaagactcggnggctcggagctggcaaagctgcagaccttacatattgngaaagtgctgcccgcatgatcgcggacgtatcgaaatctgacaagattgttgttgagaaatcaacagt

SEQ ID NO: 34945 - DNA, 411 bp, Gossypium hirsutum
  unsure (1)..(411): unsure at all n locations; Clone ID: LIB3149-044-Q1-K1-A7
caggaatatgccgaacttatgcacgaattcatgaatgcagtcaagcagaactatggggaagaagttctcattcagtttgaagattttgcaaaccacaatgccttcgatttgcttgctaaatatggcacaactcatctggttttcaatgatgatattcaaggaacagcatctgtggtccttgcagggcttgttgctgcactaaaagtagtcggtggaaccttggctgatcatagatttttattccttggtgctggagaggctggcactggcatcgcagaacttatagctcttgaaatttcaaaacagacaaacatgccacttgaagaagctcgcaagaagatttcgcttgtggactccaagggattgatnngtaaatctcgtattgactcacttcagcatttcaaaaagccc

SEQ ID NO: 34946 - DNA, 226 bp, Gossypium hirsutum
  unsure (1)..(226): unsure at all n locations; Clone ID: LIB3149-044-Q1-K1-A9
cgggcggggngcttcattttaaattgctcacctgttttttataatttttaaactatcacatttttcggtacttagctctgtaatgagagcattggggtttccttcacaatgaggtgtttaaaactcaaagtttgtctatggagattcttggttctatggtgattttgcttgtaatacttacgtagctcgtaaacctgattaaattctatatttgtattctcatttt

SEQ ID NO: 34947 - DNA, 220 bp, Gossypium hirsutum
  Clone ID: LIB3149-044-Q1-K1-B1
gggtgcttcattttaaattgctgagcggtggattataacttggaaactattacatttttgtttagttgtctctgtaatgagaacatttttgtttccttcacaatgaggtgtttaagactcaaagtttgtctatggagattcttggttctatggtgattttgcttgtaatacttacgtagctcgtaaacctgattaagttctatatttgtattcttatttt

SEQ ID NO: 34948 - DNA, 423 bp, Gossypium hirsutum
  Clone ID: LIB3149-044-Q1-K1-B10
catctgcaattcagcaaagaggaattgtacccttttgcaagggacttgatgtaattcaacaagcacaatccggaacaggaaaaactgcaactttttgctctggaattctacagcagcttgactacagcttagttcagtgccaagcattggtccttgcaccaacccgtgaactagcacaacaaattgagaaggtcatgcgggcattaggtgattaccttggtgtcaaggttcatgcttgtgtaggtgggaccagtgtccgtgaagatcaacggattctctccagtggggttcatgtggttgttggtacacctggccgtgtatttgacatgttgaggagacaatctctccgccctgatcatataaagatgtttgttttggatgaagctgatgaaatgctctcaagaggcttcaaggatcagatct

SEQ ID NO: 34949 - DNA, 108 bp, Gossypium hirsutum
  Clone ID: LIB3149-044-Q1-K1-B11
tcttcattcattttatttctttatctcaagctgaataatcttgtacaaagtaaggtgacaagtacatctgtgttttctttgtaatagaagagaatggttcttctgatt

SEQ ID NO: 34950 - DNA, 416 bp, Gossypium hirsutum
  unsure (1)..(416): unsure at all n locations; Clone ID: LIB3149-044-Q1-K1-B12
cccacgcgtccggaaagaactagttgaggtcccattggagaggaaacagaagaacactagggcctggccttaccatggttgggttggaccatgcgagcaggtttctgtgttgtatgaaggcttcggagtcggagatgcctccaactatgactctgttaaaagctttgctcaacttatgtggcctaatggtcacccacgctttactgagaccatacataccctaacgacgcanatggaggagctgaacaagttaatttggttaatgctaactgatagttacggattacgggaggattcactgaaaatgaactacacaacgttggtgcggatgatgaaatacctggcccctccaccaggggaaaataagagaggactctttgctcatactgataaaccagttagcacacttatttgtg

SEQ ID NO: 34951 - DNA, 428 bp, Gossypium hirsutum
  Clone ID: LIB3149-044-Q1-K1-B3
gtccgtcaccgttaggatggtgccggctcctagaggtgctggtattgtggctgctagggttcccaaaaaggtgcttcagtttgctgggattgaagatgtcttcacttcttcaaggggttcaaccaaaactcttggaaactttgtcaaggccacctttgaatgtcttctgaaaacatatggtttcttgacaccggatttctggagagagactcgtttcacaaggtctccattccaggagtatactgatctgttgggaaagccatcgaagacccttgtactggaagatgtcgagagagttgatatctgattgaagatcaacagggtcattacttattagtaagttgggcgtgtttctaggtcctttctatgttgcaatctttaattgtgtcttgcttggtttgattttgtcatgagattaaatcagtaat

SEQ ID NO: 34952 - DNA, 428 bp, Gossypium hirsutum
  unsure (1)..(428): unsure at all n locations; Clone ID: LIB3149-044-Q1-K1-B4
tccgattctctcagcctttaaatccaccaaatgattgtttcttccgaggaatccgaccaaattgggaggctctactaatttagtggatgcctcaacnaggctaaggttaagtctcaagttggtctttcctcattcccccttgttctctctatttctagggttttgcatttttctttctgtaatttgtcccactaacatgtgcatatcagttgtagaagaaatggagaagaacaacttgtgctccagcgccttgaagaacaacatgccctatagaagcgctgccttgaaaaccaccaccgttctaatgacaccgccaataatacctctgattcccattctgctaagccctcatccgaaatccttttctaaaaataaaaatcttctcctgcgtttgtgttactaacttggtgcatcccaatacaagaatt

SEQ ID NO: 34953 - DNA, 249 bp, Gossypium hirsutum
  unsure (1)..(249): unsure at all n locations; Clone ID: LIB3149-044-Q1-K1-B7
aaggcctgctctgcgtccagatttccatgtttcgacctaaggaggtatanacgatcaaatgtgccattgcttaggcaaatgctatctgttaattgatgatgtttgtcggcacgattagttattctttttgttaatgttttgctaattgaaattcatggtgcttgtatcatgttaaatagggcttttctttagtattgcatacgttgcttcttttgttttttattcctttatcttataagttttgtgtcc

SEQ ID NO: 34954 - DNA, 70 bp, Gossypium hirsutum
  Clone ID: LIB3149-044-Q1-K1-C1
cgttgctatggtggaaatggatgaggtggtttttaattatttccaaaaaaaaaaaaaaaaggaaaaagaa

SEQ ID NO: 34955 - DNA, 423 bp, Gossypium hirsutum
  Clone ID: LIB3149-044-Q1-K1-C11
aaagagcaatgcattcatctgtttgaagaactgaataagtacaggtctttgccaaaaataacaagggaagaatttgagttaatatttgatgagctggatgatagtcatgacttcaagatcaacttggatgaatttactgatctttgcaatgccattggtctaagatttcaaaaggaggatgttccatctttgtttgaaagatttcaaatctatcgttcgcctttctctgaaaatttgaaagcctttgttcggggtcccaaatttggatacataatatccttcattctcatattgaatctgtttgcagttatcattgagacaacgcttgatattgcaaacaactctggtcagaaggtgtggcaggaggttgagtttgtctttggctggatatatgtactggaaatggcactgaaagtatattca

SEQ ID NO: 34956 - DNA, 416 bp, Gossypium hirsutum
  Clone ID: LIB3149-044-Q1-K1-C12
ccagatgggaaaacaatagaagcagatgctgctcatggtactgttacacggcatttgagagttcaccaaaagggtggtgagaccagcacgaacagcatagcatctatctttgcttggacacgtgggcttgcacacagggcaaaattggatgacaatcctaaactcttagatttcattgagaaactagaggcagcttgtattgcaactgtggaatctggaaagatgaccaaagatcttgcactaatcattcacggctctaagcttgctagggacaagtacctgaatactgaagagttcattgatgctgttgcagcagatctaaaagcaagactttgttaagtataaatttgaacatggtaactactcctaaccatcaaagttcgttgtgcttgttttgcccccttcaccttgtatag

SEQ ID NO: 34957 - DNA, 401 bp, Gossypium hirsutum
  Clone ID: LIB3149-044-Q1-K1-C2
gagaaactaggtgtgaaacaatggcgtcctcggatcttattggcaagctcgagactgatgtcgagatcgatatttctcccgaaaagttccaccatatgtggtgccacaggccgcaccatgtccaccacactagctctgaaaaagtacaaggatgcgatttacatgaaggtgaatttggaactcccggcgtcgttatctgctggagatatgtgcatgatggaaaggctaaaactgcaaagcaggtagttgaagttatggaccatgagaaaaagtcaataactttcaaaatgcttgaaagagatctgatggaggaatacaaaagcttcgtgattacaatccaaacttcccccaagagcgacggtaaaggcagtatagtgcactggactctggattatgaaaag

SEQ ID NO: 34958 - DNA, 383 bp, Gossypium hirsutum
  Clone ID: LIB3149-044-Q1-K1-C3
cacaaatccaaattctcaaaaatgaatggctatctttgttacacactcatccctccctatgcactctgtatcttctacaacgaaaacccctctctctccctctcccttctcatactcccaactatggcaactcttcagtctctggctttggcctctcctgtctctcactcttccctcaaccaaccacgctctctctctggaatgccatcttgggttgctcaccggagcgccaattcacaattcaatgggcaatctttacaagtggctcaatcgcgaatatcacctacaagatggaactctaagagatgcagccccatagtaatgatggttaaaccaaaaattcaattcattcaaagaactgatgagcagacaataccagatgt

SEQ ID NO: 34959 - DNA, 286 bp, Gossypium hirsutum
  unsure (1)..(286): unsure at all n locations; Clone ID: LIB3149-044-Q1-K1-C4
ncttcatacatcttatttttttaccttaattataacaaccncanacaaaccaaggggacgcgaacatataaaaatggcgtcgcaccaaacaaaataaatctttttatttaaaaaaaactcaacattaaaaatcctatcatcaatgcctccctctctaaaatatccaatcttacttccccgttcattcaactttatctctcttctataatatcacctaaaattcatttcactctccctttctttacaacttcttaactttaaaaacccttccatttcccaacctaat

SEQ ID NO: 34960 - DNA, 428 bp, Gossypium hirsutum
  Clone ID: LIB3149-044-Q1-K1-C5
gatcgcgagggccgcccttttttttgtttttttttttttttttttccgaaatgaggatcaatgcgtgaaccaccgcaaaaaaaaaggacatagttaaatttggcttattacatcgggaaattttcaacagacattaggttccaaggaaagatctcaactacaaaaataaagacattgacgcccacctcacccaagcaagctaaacagtatcacatgttgctattgttaccgctacttcaagcactattcatctatttaatgaataaagtgacaacttcctttctcatgtattttgatctgaatatgtatgtttagatcaatatgcagtcaaggggagggagctttgtattttcttgcatgtttgtctttttagttctgtatgaattcaatgtatcctatgcttttatttgtgttcaaatgaatatatg

SEQ ID NO: 34961 - DNA, 401 bp, Gossypium hirsutum
  unsure (1)..(401): unsure at all n locations; Clone ID: LIB3149-044-Q1-K1-C7
ccttcgatggtctggctgcttcgaagacttctactcaggaacacatttcagccccgaaagaaaaagctgtggatgttggagatgttgacagccattcctcaggggcacaaagcgattccatcgtgaaacctgttgtttccgttaacattgagcccgagcaaaagctggtgcagcaagacatagtagacatgtacatgaaaagcatgcagcaatttaccgagtcattggctaagatgaaactgcctctggacatcgacagtggaccgaccaaatcggagaattcaagtaccactgatcagaaaatacaggcatcgaanaacaccagctcccgagtgttctacggaagcagggcttttttctaagcttcctgatcctctattcaaaggaagacacacaggtga

SEQ ID NO: 34962 - DNA, 219 bp, Gossypium hirsutum
  unsure (1)..(219): unsure at all n locations; Clone ID: LIB3149-044-Q1-K1-C8
ggggccgaccacgcgtccacatttaaattccgccttttttttatacgtcntactcacaacacaacncangggcnaattgaaaatctatctcggtcttagaaaaacacatacattcctcattctcacaaaaccataccatctttaaacctaatatttcctctaacattaatccctaccaaaaactttttcatcattacattctatacttcttcattaaat

SEQ ID NO: 34963 - DNA, 339 bp, Gossypium hirsutum
  Clone ID: LIB3149-044-Q1-K1-C9
gtgacactctcccagcatttatacagtcccaaaatcattctaatttagcccatcgagtctctcatcctcatttctgctttctcttcaatcttgatggctctctttctctcacttcttctcattcttttgactccttcaaccaatgcggactggccaccttctcctggttactggccaagctctaaatttaggcctatgagctttcacaaaggctttaaaaatctctggggtccttcccatcaaagtgttcaccacaatgcattaaccatctggcttgacaaaacttcaggaagtggattcaagtcagttcgtgcatttcgatccggttacttcagtgcc

SEQ ID NO: 34964 - DNA, 239 bp, Gossypium hirsutum
  Clone ID: LIB3149-044-Q1-K1-D1
tttattaattttttttcttcttattttttttttttctttttttcttttctcttttttttttctccctcttttttttttttatttcttttttttttatttttttttctttcttaattttattttatttttttttcttttttttttttattaatattcttttttttttttctttatttttttcttttttttttctctttcttattctctcattttattactcttttatttttaatcttttt

SEQ ID NO: 34965 - DNA, 249 bp, Gossypium hirsutum
  Clone ID: LIB3149-044-Q1-K1-D10
aaggcctgctctgcgtccagaaatccatgtggcgacctaaggaggtagagacgatcaaatatgccattgcttaggcaaatgctatctgttaattgatgatgtttgtcggcacgattagttattctttttgttaaggttttgctaattgaaattcatggtgcttgtatcatgttaaatagggcttttctttagtattgcatacgttgcttcttttgttttttattcctttatcttataagtttggtgtcc

SEQ ID NO: 34966 - DNA, 250 bp, Gossypium hirsutum
  Clone ID: LIB3149-044-Q1-K1-D11
aaggcctgctctgcgtctagaaatccatgtttcgacctaaggaggtagagacgatgaaatgtgccattgcttaggcgggtgcgtatctgttaattgatgatgtttgtcggcacgattagttattctttttgttaaggttttgctaattgaaattcatggtgcttgtatcatgttaaatagggcttttctttagtattgcatacgttgcttcttttgttttttattcctttatcttataagtttggtgtcc

SEQ ID NO: 34967 - DNA, 341 bp, Gossypium hirsutum
  Clone ID: LIB3149-044-Q1-K1-D2
accacgcgtccgaagatgcttgcctgctcgacccaacatctgtgggtaaccctgactgtgggctcagactcgcaagtcgctgaggtgaaaccagccctgagcaacatggttgctgctgccaagctgctccgcacccaactcgccagcgccaagtgataggctcccgagatattggaaatccgaatcccataccattccagagagattaaaaagaaaaatggcaaagaagtttcttctatcttatcatttgaaataactctgtgttgatgaaatatttgttacatgcccttggcgtccctttgatttccttatttttgggtgttcttttctctaaagatcat

SEQ ID NO: 34968 - DNA, 421 bp, Gossypium hirsutum
  Clone ID: LIB3149-044-Q1-K1-D3
cccacccgtccgaattttaactaacctcccccaaacaaaaccttaacggttacagctttggaattcaggcctttcgaccatggcggatgttgaaacggaggtggcggcggctggagtgcccaagaagcgaacattcaagaagtttagcttcagaggtgttgatttggatgctctccttgatatgtccactgatgagcttgtcaagctctttcctgcccgtgctcgcagaaggttccggaggggtctcaagagaaagcccatggctttaatcaagaaacttcgcaaggcgaaaagggacgctccaccaggtgagaagccagaaccagtcagaacccacctccgaaatatgatcatagtacccgaaatgattggtagcattatcggtgtgtacaatggcaagacattcaatcaggttgagatc

SEQ ID NO: 34969 - DNA, 360 bp, Gossypium hirsutum
  Clone ID: LIB3149-044-Q1-K1-D4
atgccggggcggacccacccgtccgcttctttctctccaaacatgggcatctcatggagcaacacaagcaatagcaaccggaggagaaaccaagcttacctgcatggccctccacctcctccacctttctattatccccaagaacccactttccttcctcctccgccacctccaccgccatcccagccttctactagccacccttatcctgcgcatactccacccccaccgcctccaattcccaacaattactactgttccccaccctacaacccctgctgttactcaaaccctgtcatgggtcgttaccctattcaatatcctccatatttcgccaaccaagctagtgcctggcccccg

SEQ ID NO: 34970 - DNA, 432 bp, Gossypium hirsutum
  Clone ID: LIB3149-044-Q1-K1-D6
gcactggatatgtctaagcaagtcccccaaggtaacaggtttaatatgcaagattatatacgtgaagattgtggaaagctaaaaaataaaattatggttggagcacatcattctgctcgagattcacttcactgcaagaaagtttggggggccataggagctggacctgatgataattttattaagtcatctggtgcgacatggtcaagtgaaggtagtgtaaatttgggtgaaactgatcatgagcacagcaaggttatcaaatcaagaaactccagcctcgcaacaaatgaggactttcatgtggaaaaacaggatgaatgcttgtcactgaatgctgcatatgacgaaattggaatttatcctaatagaaatcctaccttgaatgggagttctctttctatgattagttggaagtctagttctgataat

SEQ ID NO: 34971 - DNA, 389 bp, Gossypium hirsutum
  Clone ID: LIB3149-044-Q1-K1-D7
caagaagccgcttcttaacaagcgcaaacctaaacccaccaaactcagagcaagcattacaccagggactgtgttgattttgttggctggaaggtttatggggaagagagttgttttcttgaagcaacttacttctgggctccttttggtcaccggaccattcaagatcaacggtgttcctttaaggcgtgttaaccaatcctatgtcattgctacttccaccaaggttgacatctcaggggttaacgtagacaagtttgatgacaagtactttgccaaggaagtagagaagaggaagaagaagactgagggagagtttttcgaggctgaaaaagaggataagaaaaaactgcctgaagacaagaaagaagaccagaaagcagtcgacg

SEQ ID NO: 34972 - DNA, 421 bp, Gossypium hirsutum
  Clone ID: LIB3149-044-Q1-K1-D8
gccgccgatttgcttttgttaccatgaaaaccgtggaggatgctaatgcggcaatcgagaaactaaatggcactcaaattggagggcgggagatcaaggtaaacatcaccgaaaagcctctggcacaagtggatttgtctctccttcaggcggaggattcccagttcattgatagcccgcataaagtttatgtgggaaaccttgcgaagacagtaacttcagagacactaaagaagtttttttctgagaaagggaaggtaatgagcgccaaggtttcacgggtcccggggtcctccaaatcaaggggatttgggtttgtatcattctctttagatgaggaagttgaagctgccatcaattcttttaacaatgctatgttggagggggaagaaattcgtgtaaacaaggcataaaatgcgga

SEQ ID NO: 34973 - DNA, 287 bp, Gossypium hirsutum
  Clone ID: LIB3149-044-Q1-K1-D9
ttttaatcctttcttctctttctcctgtgaacattgattggagattttaaaaaaaaaatggtgtataactcttcagtcctgcaaatattcttgattcatgtaaattgaaaaagaaaaaaaaccataggttcagaattcagatatggggtttactttaatttagtgtaggggggatccaatgatgatattaatagatgttttgtcagttcaacttcatttgtattttggaagacatagaaaatttcaatctgatgttcctactatatatatatatatttatttttacc

SEQ ID NO: 34974 - DNA, 255 bp, Gossypium hirsutum
  Clone ID: LIB3149-044-Q1-K1-E1
gttaatcaaggatttgacataccatcagctattgtaagctttcccaacttccatgcaagagtggttttccttgaaaatgactctttgaacaagtcacccttgttgtcaaagtttcaggaaaagagtcctgtcatgtcttacacagaagtattactggtacctttgacaactcctgattttagcatgccttacaatgttatcacaatcacatgcacagtgtttgcattgtattttggatcattgctcaatgcacta

SEQ ID NO: 34975 - DNA, 249 bp, Gossypium hirsutum
  Clone ID: LIB3149-044-Q1-K1-E10
agataccgatagctatctttacattatgttaaaaaaaaaaaaaaaaaaaaaaaaaaaaaagaataataaaaaaaaaaagagggcacaaaaattaaaaaattaaaaaattaaatatataatacatccaacatatataaataatcaatattggccccccctttaatattacttaaactactttctctatccttccaactatataatcctttttattttccttttaattttaattaactgcccatccttttt

SEQ ID NO: 34976 - DNA, 432 bp, Gossypium hirsutum
  Clone ID: LIB3149-044-Q1-K1-E11
gaggcactcggcaaagatgacattaattcacttaaagctaggaagcttattgttgcacagacatggaaaggttattcagtgaaaaaagggccaaactatgcccctacaagaaagaaagttgctactgatctgactcgagagaatctacagaggggtgactggaaggaactagagttcaaagagtataacttcaatgctaaaggaccacctgctgaagctggccatcttcatccattactcaaggtgaaacaacaattaaagaacatatttcttcagctgggttttgaggagatgccaacaaataattttgtcgaaagcagcttctggaactttgatgcattgttccagccacaacaacaccctgcacgtgattcacatgatacattctttctggaagttccatctactacaaaggaactgcctgaagattat

SEQ ID NO: 34977 - DNA, 340 bp, Gossypium hirsutum
  Clone ID: LIB3149-044-Q1-K1-E12
aaaaccggccgacccacgcgtcctctcactcataattattttctcctttttatttaacccatctacaatatctccccaggatgtcttaatataaaaaatcccgcgcacactaatctcaacaatcttatctctctctttatttcttcctttacttcatcttttaaatattactatactttcaatctttatctcaatcactttcaaaccaatttactcccatcccctataatccatttcatattttcttcatatccaccatttatttcatcttaaaattcttaccataatcaactatcactttcataaatcacaatcaattcattacatccatcttcaatca

SEQ ID NO: 34978 - DNA, 271 bp, Gossypium hirsutum
  Clone ID: LIB3149-044-Q1-K1-E2
attttattatgttcaatacttctttcagattttcgcacaacacaccagcggcatgggattcatattactacattattatttttgagaggtttttccctcataactcttcaagattgactgtccctgcaggaactattttttcatgcatcacatctaaaactttttagtgttacacttccttgaaaaacaacctttacccttcaagccagactgccttgatggttcatctctcaacttattacgcaaatactcccctcaacaacaaaccatc

SEQ ID NO: 34979 - DNA, 310 bp, Gossypium hirsutum
  Clone ID: LIB3149-044-Q1-K1-E3
ggtttattcgagctttctggcattccaccagcacccagaggcgttccccaaattacagtttgcttcgacattgatgctaatggtatcttgaatgtctctgctgaggacaagactactggccagaagaacaagattacgatcacaaacgacaagggtcggttgtctaaggaagaatcgagaagatggttcaagaagcggagaagtacaagtccgaggatgaggagcacaagaagaaggttgaagccaagaacgcattggagaattatgcctacaacatgaggaacactgtcaaggatgagaagattggttc

SEQ ID NO: 34980 - DNA, 293 bp, Gossypium hirsutum
  unsure (1)..(293): unsure at all n locations; Clone ID: LIB3149-044-Q1-K1-E5
aaaaaaaaaaaaaaaaataaaaaaaaaaatttttataaaaaaaaaaaaaaaaaaaaaaaaagggagggaataaaaaaaaaaaaaggaaggaaaaaaaaaaaaaaaaaaataaaaaaaaaaaaaaaangggggcggcccttttaaaaaataaaaattttattacccttttattcaaaataataattttttttttggggcaccaaaattaaattaattggcccgggttttaaaaacttttaatttgaaaaacctttgtttaaccaaaattaatatctttaaaaaaaatccccttt

SEQ ID NO: 34981 - DNA, 430 bp, Gossypium hirsutum
  Clone ID: LIB3149-044-Q1-K1-E6
aacgccccccttttatttagggttttggattccttaatctttatcttcgaccaatcaacgatgactggcaaagccaagccaaagaggcacacagccaaggaaatagcggcgaaaatcgacgccgccacaaccaataaaggcggcggcaaggccggatttgctgaccgttcgggtgtggagaaaggtggacatgctaagtacgagtgtcctcattgcaaaataacagctccagatttgaagtcgatgcagattcatcatgatgccaagcaccccaaggttccctttgaagagtcaaagcttgtgaatctacatgctgttcatgtggttgagacttccaagcctcgtcctggtgttaggggcagccttaaaaagtgataaaaaaccccaaaaaatgtgtttttcgtcaagctttggtgttttgtgatgtttc

SEQ ID NO: 34982 - DNA, 362 bp, Gossypium hirsutum
  Clone ID: LIB3149-044-Q1-K1-E7
cctccactttgtttgtggcttctgatcaatttggtaaggttcctctctattggggaatcaccgccgacggatatgtggcctgtgctgataatgctgaattgctgaaaggtgcctgtggcaaatctcttgcttctttccctcaaggctgtttctactccacagcagtaggaggattaagaagctatgagaatcctaagaacaagatcactgcagtgcctgctgaagaagaggagatatggggtgctaaattcaaagtggaagggccagctgttgttgctgccacagagaaaccctttgctttctccttctaaatctatggatccatggaattataagagctgcaaatgcatagcatatggatc

SEQ ID NO: 34983 - DNA, 415 bp, Gossypium hirsutum
  Clone ID: LIB3149-044-Q1-K1-E8
tgcaaattacaattatgggatagagtgtcttttcagattttatagttatggtctagagaggaaatatcgagatgatctttataacgattttgaacaacttacccttgatttctatcataagggcaatctttatggccttgaaaaatactgggcattccatcacttccgagatcagaaagaaccgataaagaaacatcccgaactggataggttactgagggaagaataccggcgattggaagatttccgtaccaaagagaagaatactattagcacaagagaggagcgccattgatgagtgacgtaattgatccctagtgttattgaaccccaattttgacaagcaactctgatgactggatcagagagtaggaaggagttcaaggtctatatgaattatgatttggtttatgaa

SEQ ID NO: 34984 - DNA, 420 bp, Gossypium hirsutum
  Clone ID: LIB3149-044-Q1-K1-F10
attctctcagcctttaaatccaccatatgtatgatgcttccgaggaatccgagcagattgagaagctctacgaatttagtagatgcctcaacgaggctaaggttaagtctcaagttggtctttcctcattcccccttgttctctctatttctagggttttgcatttttctttctgtaatttgtcccactaacatgtgcatatcagttgtagaagaaatggagaagaacaacttgtgctccagcgccttgaagaacaacatgccctatagaagcgctgccttgaaaaccaccaccgttctaatgacaccgccaataatacctctgattcccattctgctaagccctcatccgaaatccttttctaaaaataaaaatcttctcctgcgtttgtgttactaacttggtgcatcccaatacaag

SEQ ID NO: 34985 - DNA, 338 bp, Gossypium hirsutum
  Clone ID: LIB3149-044-Q1-K1-F11
cccacgcgtccgggcaaagaagcagaatggctggcgtgtctaagcagcgatcaggcagtgttgttattttttttttcaaaaaaagaaaaaaaaggaaaagaaaagagtttgacataaagaaatgtgtaaaggatattaaatatgatggaataaaatagagtaggaaaaagacatttggttctggtgctgctgattttctgaagaagttttggttgagagtttggatccttgtagcattctgaaccaaaactcagcaccaccagaacccgagaacctaatccctaaaaaatgcgttttgtccctgtagtatgaaataaagcattttgatccttcatagt

SEQ ID NO: 34986 - DNA, 434 bp, Gossypium hirsutum
  Clone ID: LIB3149-044-Q1-K1-F12
ggtggatctgatgagttttccgaagatggatgatcagatggcggtacaagaggttgcatcgcaaggcttgaagggcatggaacacctgatccgtctcctttctcaccagtccaaaaacgtcgactgcaccgacctcgccgatctcaccgtctctaaattcaaaaaggtcatttcacttctcaacagaaccggtcacgctcggttcagacgcgggccgattcaacccctttcttcctcatcttccccctcgacatcatcctctgcttctctgtctgttccgaattctcaaaacaatctaactctaacttctgctgcgatctcaacgccggcgaacataaatacggcgctggtcggtacttcggttatcagtccttctagcttcgttcaatcgcagccgcagagtttgactctggactttacaaaacctaatttgt

SEQ ID NO: 34987 - DNA, 339 bp, Gossypium hirsutum
  Clone ID: LIB3149-044-Q1-K1-F3
cccacgcgtccgcggatctcgatgtgtcaatccaccaatcatctacggtgatgttagccgccccaagccaatgactgttttctggtcatctactgcacaaagcatgactgcacgcccaatgaagggaatgcttactgggcccgttaccatcctcaactggtcctttgtcagaaatgatcagccccggtttgagacttgctaccagattgccttggccatcaaggacgaagtggaggatcttgagaaggccggtatcaatgttatccaaattgacgaggctgctttgagagaggggttgcctcttaaaaagtcggagcacgccttctacttgaaatgggc

SEQ ID NO: 34988 - DNA, 103 bp, Gossypium hirsutum
  unsure (1)..(103): unsure at all n locations; Clone ID: LIB3149-044-Q1-K1-F5
gcggccccctttnnttttttttttttttttttttttctcaaattttgggatagttaaaacttattactggatagttttattcaaggattttttattccttttt

SEQ ID NO: 34989 - DNA, 432 bp, Gossypium hirsutum
  Clone ID: LIB3149-044-Q1-K1-F6
ctcccagcagctgataaaaagaagattgaagatgctattgaacaagccattcaatggctagacagcaaccaactcgccgaagccgatgaatttgaagacaagatgaaggagttggagagtatttgcaaccccatcattgctaagatgtaccaaggtgccggcggtgacatgggtggtggcatggatgaggatgttccggctggtggaagtggtgctggtcctaagattgaggaagttgactaaatcattgattttcttcacctgagttctctattggtctcttatgtttattgggatttaaactgcttggttttagtggttgggttctaatcggattgaaatgaacttttatagggtttgttccttttttgggatactctatcagtagcacctgtgattgttgtgttttggaaaacaagtcccttttggact

SEQ ID NO: 34990 - DNA, 418 bp, Gossypium hirsutum
  Clone ID: LIB3149-044-Q1-K1-F7
gcacactgatgtcgcagttctcctcgataatgaagctatctacgatatttgccgaagatcgcttgatattgagaggcctgcttacactaatctcaacaggctggtctctcaggttatttcttccttgactgcatctttgagatttgatggtgctttgaatgtggatgtgaatgagtttcagaccaatttagtcccataccctagaatccatttcatgttgtcttcatatgcaccagtgatttcagcggaaaaggcttaccatgagcaactatcagtggcagaaatcacaagcagtgcatttgaaccagcttcaatgatggccaaatgtgatccacgccatgggaaatacatggcttgttgcttgatgtacagaagagatgtggtgcctaaagatgtgaatgctgcagtggcaacaatc

SEQ ID NO: 34991 - DNA, 405 bp, Gossypium hirsutum
  Clone ID: LIB3149-044-Q1-K1-F8
cttaagcaaagaacttatgtatcagcaagttcttcgtcggtttgctcattttaatgctatacaactaagtgagccagctcctttgcaagagttaatcatgttggccctgaaggaggaggacttggacctagaaagcaatgaaaatgatgagctcaaaaagaagattgcagaaatgaatacacagctgcttaagcaaaagtctgaaatgttggaggagtatttctgcatttttattgattcagatgggaatttatctagactgccaattctacttgaccagtacactccagacatggatcgtgttcctgaatttgtgctatgtttgggcaatgatgttgagtgggaagaagaaaaaaattgtttgcaatcacttgcagctgctcttgggaatttttatgctatgca

SEQ ID NO: 34992 - DNA, 320 bp, Gossypium hirsutum
  Clone ID: LIB3149-044-Q1-K1-F9
tgcaatgtgtctttacaagcattcaaaggcaatatgaactggtaccttgaccttaagtctgcttaccactgagctgccaggtgtctactgtgctgctcgtgctaggtattcaacaactgtactcttctcaccaagctcgaattgtgcaagaaagcctttgcttgcaatggacaatgcagatgagcaccaataataagagagaaacgagccggtctcctatacatatagccttttccacataatcttttctatagcaagtatgtactcagcaatgcttttaaccggatggtcaacctctgtcggagaaagcggcaagttat

SEQ ID NO: 34993 - DNA, 432 bp, Gossypium hirsutum
  Clone ID: LIB3149-044-Q1-K1-G10
ggcccatgctgcccgacatgtgaccgataagatgatgttcaatgcttctttcatatttgggcacaccacaccaactacaaaagaggcatattactacaggatgatttttgagaggtttttccctcagaactcggcaagattgactgtccctggaggagctagtgtggcatgcagcacagctaaagctgttgagtgggacgctgcctggaaaaacaaccttgacccttcaggccgggctgccttgggggttcatctctcagcttatgacgcagagactcccctcagcaacaagccatccaaggttattgatagtataccacggatggactttcctggagttgccatacagagttaatgcctgcctactggaagacaacagaatgtatgaattatttaataaaatgagtaggagctgtggcatgtccaaatgta

SEQ ID NO: 34994 - DNA, 252 bp, Gossypium hirsutum
  Clone ID: LIB3149-044-Q1-K1-G11
gacgaagttcgatttcactcacagctgcaccagagcatttaagtcaaggttggttgtttgtcaaagggaaatctttatacctcccaaaagcaaagtttgtttcgagtgtttttcatgaaatttaatgacatatgaactgggagatggatggtacatgatattatttatgtatggtattgtttattcagtacattttcattcctttaagggactaaaccttaaacataaaagccaaacatgacttaaaagacg

SEQ ID NO: 34995 - DNA, 344 bp, Gossypium hirsutum
  Clone ID: LIB3149-044-Q1-K1-G12
gcagaatttggctgcggtgactgcgactctagaagaagtcgtcactcaagtcatcgattgtatcagcggaaagtgcttgcctgaactttgattttgtccctacttatcaccgttttcattctgaaaaatatatggacaataaaaaacttgtaattcttacatccatgagatgcaaacattagagatgagtgtttctcttagagatcaaaacagcaacaaacaatcccatagtttttgagtagtcgagtgtttgaataagacagtcttaacgttacatggtgggcttcattgcacactggcttttggcctatattgaattttgcttacaagcaattttatgcata

SEQ ID NO: 34996 - DNA, 388 bp, Gossypium hirsutum
  Clone ID: LIB3149-044-Q1-K1-G3
gaacgaaccagcaacttttactggttctgaggttagaatgatcaatgatgatgttcctctggcgcaatttgctgttgcttttgagggagcttcttggacagatccagattccattgcgctcatggttatgcaggcaatgttgggttcatggagcaaaaatgctgggggtggaaaacacatgggctctgagctggtacaaagagtcggcattaatgaaattgcagaaagcatgatggctttcaacaccaactataaagatactggtcttttcggtgtctatgctgttgccaagcctgattgtttggatgatttggcttatgctattatgtacgagacaaccaagctagcctatcgtgtttcggaagctgatgtcattcgtgctcgtaat

SEQ ID NO: 34997 - DNA, 337 bp, Gossypium hirsutum
  Clone ID: LIB3149-044-Q1-K1-G4
gctgagaccctcttcaaatatattgctccggagcatgtaccagttcaatatggtggactgagcagagaaggtgaacaagagtttagcgtggccgatgccgtcacagaggttacaatcaagccagcagcgaagcacagtgttgaattccctataactgagaattgtaatctggtttgggaactccgagtagtgggatgggaagtcaattacggagccgaattcgtgccgaccgccgaagatgggtataccgtgatcgtatcgaaaacaaggaaagtttcttcggccgatgaaaccgtgatctccgatagcttcaagaccggtgagcctggaaaggttg

SEQ ID NO: 34998 - DNA, 350 bp, Gossypium hirsutum
  Clone ID: LIB3149-044-Q1-K1-G5
gcaaagtggattgcacgccttgtctatagtggcaaaaacaccgtctgaagttgaagcaaaatgaagggatgtgtttgtcattgttgtgtgactccaaagccttgcttgttaatcatgataaattaagtgaagattatgtcttgagccttgtggtagacagtttatgagtgaacattgagggactgcaaagtgtcttgtaggtaaagaaagaaaacccattatgttaaatcgcatttagcattcatcttttcactctattgtaaaagttatgttgctcccacttgttactatttctacccttgatttttcctcaccattaaatcagaggttaagacatacttaagctctcg

SEQ ID NO: 34999 - DNA, 427 bp, Gossypium hirsutum
  Clone ID: LIB3149-044-Q1-K1-G6
ctcactgtcctgcttctgctatgcgaatgctcggatttgcacgaataagggagatgctcagcgctggcatcactgtctccttgggcacagatggggcaccatctaataatagaatgagcattgttgatgagatgtacctagcttctctgattaacaaaggacgggaagtgtatgaaaacggagcaactgatcccacagccttccctgctgaaacacttctcaaaatggtgacaattaatggtgcaaaatcagtactctgggacaatgaaatagggtcgcttgagattggtaaaaaggctgacatggttgttatcaaccctttctcatggtctatggttcctattcatgattgcatctccaaccttgtatattgcatgcgaactgagaacattgtctctgtaatgtgcaatggtcggtggattatgag

SEQ ID NO: 35000 - DNA, 294 bp, Gossypium hirsutum
  unsure (1)..(294): unsure at all n locations; Clone ID: LIB3149-044-Q1-K1-G7
cctattcaaataacacttttaatttctagttataaaaccacaccctcaanttaaggccctgcgaatatataagagggccaggggctcaaaaactaaaaaaccttactatttaataataaaacactaaactctttatccctttattcatcccttcatatcaaaatattatttatctaatatttctatcttcttaatatatctcttttaatctctaaataaacataaacccaattattttcaaaatccaacttaaccattcatttcatttcttatctaaatctaaaaaacttatct

SEQ ID NO: 35001 - DNA, 259 bp, Gossypium hirsutum
  Clone ID: LIB3149-044-Q1-K1-G9
caccaccagtgatggtcgaactcttgtctctaacaatgtcgtccctcctaattggtccttgggccaaaccttcaccggctcacagttcccctaaactctccagaatccgtaatataatagtgatgataatcgtaatattgcattgcagtcttattactgtttgaattaagctggggtgtaaaagattaatgtttttaggggtagagtggtcgaaatgaatagattaatcataatatgaggttataactctatatcaagt

SEQ ID NO: 35002 - DNA, 410 bp, Gossypium hirsutum
  Clone ID: LIB3149-044-Q1-K1-H10
aagaaattccaagttctggataaatacccttatctatatgaagttagaaaaatatctcgggcaaagggaacctttgaaaagcccaaaaatggagggtgaggtggttagttctcttttaggtattttatgtgatggtgttgactgtttagtctctggggatcatgctgatgaatttaaggattatttctcaaaaatcatgatggagagggagatagcagccacgatgaaagtgtttgatggtgggtgttcggccataattgtgggaagatggggtgaaagaacaaagacagaaactttattgaagaaagtgatataaaagctgtttctgccaacggaaattgtttcaatttcaattaaatggatcatataggccctttaatttatttcttttggtctaaataagtctttta

SEQ ID NO: 35003 - DNA, 182 bp, Gossypium hirsutum
  unsure (1)..(182): unsure at all n locations; Clone ID: LIB3149-044-Q1-K1-H11
nnnacgcatncggtnctggctcttatcttttgcggnatatgattttgtatgtttgttacgctctggtcgaaagttgtttggttatcaacctttangttcgagttttctttggaaaatgtagttaaagataatccattcaagttgtaactttaattttggattaaaacacattattntctttt

SEQ ID NO: 35004 - DNA, 427 bp, Gossypium hirsutum
  Clone ID: LIB3149-044-Q1-K1-H2
aaagtatcaagattgcagcaggcgaatcatgaggccgaatctcgattaaagcttgtttttgacgagaatatgaagcttgcaaaggagcgtgattcattggcaatgaccgcaaagaaacttagccgtgatttatctaagttggagacttttaagcggcaattgatgcaatcgctgagtgatgataattcatctcaggctgaaactgttgatattgggacctgtgaccagtcagtccctaaagcctatccggacaaggatgatggggcgagtgactacatgtcgcttcgttcttccaatggttcgacggacttgggaagcacaactgatgaagcttcaagatatgctggacaaagattttctataactccatatatcacaccgcggctgacacctactggaactccaaaagttatatccacaaatgggt

SEQ ID NO: 35005 - DNA, 300 bp, Gossypium hirsutum
  unsure (1)..(300): unsure at all n locations; Clone ID: LIB3149-044-Q1-K1-H4
ccggaccggagttccgggctcgacgtacgccttgttggtgttgaaaggattcggagtttctctcaccccttcattttctgccatatacctctgtgttcnatgagcaagtggtctagctgtcttttccttcctctcgtgaatgagttgatttctagaaaaccagattagccataaagcaatacaaaaaaggcaacattgttccccagttcctctcttgaaaacctagggcattgacgaaaaaaataaggactgtttcaacctaagaacggcaacagggacatctgtcacttgtagaaactc

SEQ ID NO: 35006 - DNA, 112 bp, Gossypium hirsutum
  unsure (1)..(112): unsure at all n locations; Clone ID: LIB3149-044-Q1-K1-H5
ttatcaacctttangttcgagttttctttggaaaatgtaattaaagataatccattcaagttgtaactttaattttggattaaaacaaattattatctttnaaaaccaaaaa

SEQ ID NO: 35007 - DNA, 414 bp, Gossypium hirsutum
  Clone ID: LIB3149-044-Q1-K1-H7
gtgctaccgagtttgcattgtcgggaatatataccgtaaagagtgatgtgtatagcttcggggtggtgatgttggagctggtaactggtcggaaaccactagacagttcaagggtgagatcagaacagtcacttgtccgatgggccactccacaactacacgatatcgatgcccttgcaaaaatggttgatcctacactcaatggcatgtatcctgcaaaatctctgtcgcgttttgccgacatcattgctctatgtgttcagccggaacccgagtttcgacctcccatgtctgaagtcgtgcaagcgttagtgaggttagtacaaaaggcaagtgttgtgaaacggcgaccaagcgatgaatcgggattcgggtataagactccagatcatgaggcaggggacttttcattct

SEQ ID NO: 35008 - DNA, 240 bp, Gossypium hirsutum
  Clone ID: LIB3149-044-Q1-K1-H8
gttgggattgttaggaattatttattcgtttggtgtctgcccattcaagccagcagattgacactagggcaaccaacacctagatgttttgttatagttttgcttaaattagttctatgtagtatttgcctttcttgactttctgtgaacgatttttccttttgctaaagacctccatctataatgtgtgagctacagtttctggttgttctggttaaatggataatttttggttcctca

SEQ ID NO: 35009 - DNA, 423 bp, Gossypium hirsutum
  Clone ID: LIB3149-044-Q1-K1-H9
aaattttatagttttgttcgtggaaagaacagagattcagagatgagtaagcttcagagtgatgcccttagagaagctatttcaaccattgtagctcagtccaaggagaagcagcgtaagtttactgagactattgaactccagattgggttgaaaaactatgatccccaaaaagacaagcgtttcagtggttctgtgaagttgccacacattcctcgccctaaaatgaagatctgcatgcttggagatgcccagcatgttgaagaggcagagaagataggtttggattatatggatgttgaagcactgaagaagctaaacaagaacaaaaagttggtcaaaaagcttgccaagaagtatcatgcttttttggcttctgaatctgtcatcaagcagatccctcgtctcctgggtcctggtctc

SEQ ID NO: 35010 - DNA, 407 bp, Gossypium hirsutum
  Clone ID: LIB3149-046-Q1-K1-A1
ggaaattaaatttctttaattttttctctttgtcgacctaagtctcttttatttgcttctttcaccatgaccaagcagcaggcgaactggtctccttacgacaacaatggaggatcttgcgttgcgatcgctggagctgattactgtgttatcgccgccgatactcgaatgtcaaccggttacaatatactgacccgagagtactccaaaatctgtaaacttgcagataaatgtgtcatggcatcctcaggatttcaagctgacgtgagggctttacaaaagcaactggcagctaggcacttgatttatcagcatcagcacaacaagcaaatgagctgccctgcaatggctcaattgctttccaacacactttattacaaagcgtttctttccttattattctttta

SEQ ID NO: 35011 - DNA, 371 bp, Gossypium hirsutum
  Clone ID: LIB3149-046-Q1-K1-A10
tttaatcttctcttcctacacttttaatccttatcttcgctaacacccttacgggcaataccataaacctcgaggtccaaagactcaacccgacctactacgttaagccgaaaatcctatactaccacgggataccaccaaaccaacatcttctcatgtttgcctcaaaacaactgaacgacctccgcaccttgaaccattacaacatacaaaaccattccacccttcatcttattatgcgtctacttgcatatcttcaaatcttcacctaaacgctaaacctctagtccataactctaaaactctaacgctattaaacccttgacagcctaaatgccataatccgacaccatgaatgcatcccaccatac

SEQ ID NO: 35012 - DNA, 254 bp, Gossypium hirsutum
  Clone ID: LIB3149-046-Q1-K1-A11
tggcatttcatgtatcagcttttcggatgccaatggcactactgacgtttagggtctttagctaagacgtcggatgattatgttcttacctgttcaatgtcataattgtcacttttcggctcccggaagggatcccaccaaaccaacaacgtctcatcttcgccggaaaacagctcgaaaagggccgccccttagacgatcacaacttacatacggaggcctccctccatctagctcttcttttacgtgaccta

SEQ ID NO: 35013 - DNA, 375 bp, Gossypium hirsutum
  Clone ID: LIB3149-046-Q1-K1-A12
gggatgcagatttttgtcaagactttgaccggcaaaacaatcaccttggaggttgaaagctccgataccattgagaatgttaaggcaaagattcaggataaggaaggaatcccacctgatcagcaaaggctcatctttgccggcaaacaattggaagatgggaggactttggctgattataacattcagaaagagtctacacttcaccttgttcttcgtctccgtggtggccactgattattctaacacaaccatcttgccttggtttcaagttttaaagtgctcgtgtgtctttctaacttggatttctgggtcttgtcccctttgtaatacttttacttctcctctggaataaaaaagttggttttcttttcc

SEQ ID NO: 35014 - DNA, 315 bp, Gossypium hirsutum
  Clone ID: LIB3149-046-Q1-K1-A4
aatcaatcatcaattatttcgtcttggtaacattttaaaaaaattttataaaaataaaaaacggataatataatagggaatctagggcaaaaacatgtgaaaaaaaaaaaaaaaaaaaaaaaaaaaaacaaaaaaaaaaaaaaaaaaaaagaaaaaaaaaacaaaaaaaaaacaaaacatcaaaaattttttttttactccacccctttgtcccccccctttttttttttcccactttttttcccccttttttttttatcaaattttccttttaatgaggccccctttaatactataacccctccccccataatt

SEQ ID NO: 35015 - DNA, 413 bp, Gossypium hirsutum
  unsure (1)..(413): unsure at all n locations; Clone ID: LIB3149-046-Q1-K1-A6
tcgcaaaatgtagtagttgaggggcttttttagtatagcctattttttaaacaaaatattatgtggagaactaagggaacaccatgggagtgttcaatgctctgttgttcagactccataataggtagagcacttgtgtcaacacaactcaaaacagatatttgtacgggatctgtgttggatnctctagggagatggcaaaaaaagatggattaaagagaataaaaataacatgagaaggaagattggaaaagcattgaaatgcacacaaaaagaggcaaaaatattaaaaaattttgggttggaaattgcattgaaaagtcaaaaactttaaggctcaaatacatgaatactggttatcttgtttcttacacccatgaacttgtcgntttctattatccattttggtttat

SEQ ID NO: 35016 - DNA, 283 bp, Gossypium hirsutum
  Clone ID: LIB3149-046-Q1-K1-A7
aaaccatatatatcctgtagtttatttctggtctgtagaactagccttgggttcatttgttcttgagaacaggatttatttatgggctggtaatcggcttcgaaagttcttaggcttcattgattcactttaagtatacagtttactcgagaatggagtgtttgaaagttaatttagaatttgtgttgattaaaaaaaaaaaaataaaagaatctataataataatcatcatatacaagtcaaaatgataataattaataggtcggctcttttggaggaccct

SEQ ID NO: 35017 - DNA, 379 bp, Gossypium hirsutum
  unsure (1)..(379): unsure at all n locations; Clone ID: LIB3149-046-Q1-K1-A8
gctaaactcccagcagctgataaaaagaagattgaagatgctattgaacgggccattcaatggggtagacaggggccaactcgccgaatccgatgaatttgaagacaagatgaaggagttggagagtatttgcaaccccatcattgctaagatgtaccaaggtgccggcggtgacatgggtggtggcatggatgaggatgttccggctggtggaagtggtgctggncctaagattgaggaagttgactaaatcattgattttcttcacctgggttctctattgttctcttatgttttttgggatttaaactgtttggttttggtgttttggttcctaaatcgattgaaatgaactttttatagggtttgtccctttttt

SEQ ID NO: 35018 - DNA, 393 bp, Gossypium hirsutum
  Clone ID: LIB3149-046-Q1-K1-A9
tgttaactccgctaccaatgctcttaggcgaatgcagggctttcctttttacgacaaggaaatgagaatacaatatgcaaagactaaatctgacataatagcaaaagcagatggcacttttgtcccccgagagaagcgaaagaggcatgacgaaaagggagggaaaaaacggaaagaacaacttgatcctaatcaagctgcagcaggtttgaatccatcttatgcgggtgcttacggtgcaacacctcctctatcacaaataccctacctgggtgctagacctatagtcccagaagcacctgcaccaccaaataacattctatttgttcagaatcttcctcatgatgcaactgcgatgatgctgcaaatgctcttcaaccaataccctggttt

SEQ ID NO: 35019 - DNA, 224 bp, Gossypium hirsutum
  Clone ID: LIB3149-046-Q1-K1-B10
ggataaggtacaagaatctttttaattattttagggaaagaaagaatacaaggatgacagggggctattgagaggaaaatggaacataatataatcgatgttgtctataaagctgaagaattataagagggaatgaaagaaaggaatatagacaaagaggcacaggatattattatcaaattaccaaagccgtattgtcatattgcttaaatacaaattggcaa

SEQ ID NO: 35020 - DNA, 388 bp, Gossypium hirsutum
  Clone ID: LIB3149-046-Q1-K1-B11
ggagagaaccggagctactgtcgtcgccgccgccatggtgaagtttctgaaatccaacaaggccgtgatagtcctccaaggccgatacgctgggcgcaaagcggtgatcgttagatccttcgacgatggaacacgtgatcgcccctatggccactgtttggttgcagggataaagaagtacccgagcaaggtcatccgcaaggattccgccaagaaaacagcaaagaaatcgcgcgtcaagtgcttcgtcaagctcgtcaactaccagcacctgatgcccacccgctacaccctcgacgtagacttgaaagacgtggttaccgtcgatgcacttcagaccaaggacaagaaagtggctgcttgcaaggcgaccaaggagaggttcgaa

SEQ ID NO: 35021 - DNA, 378 bp, Gossypium hirsutum
  Clone ID: LIB3149-046-Q1-K1-B12
ggagagaaccggagctactgttttctccgtttacatggtgaagtttctcaaagccaacagggccgtgatagtggtgcaagggctatactctgggcgcaaagcggcgatcgttatatccttcgacgataggaacacgtgatcgcccctatggccactgtttggttgcagggataaacaagtacccgagcaaggtcattcgcaaggattccgcccagaaaacagcaaaaaaatcgcgcgtaaagtgcttcgtcaagctcgtcaactaccatcacctgatgcccacccgatacaccctcgacgtagacttgaaagacgtggttaccgtcgatgcacttcataccaaggacaagaaagtggctgattgcaaggcgaccaaag

SEQ ID NO: 35022 - DNA, 72 bp, Gossypium hirsutum
  Clone ID: LIB3149-046-Q1-K1-B2
gtaataccctctcgtttcctgttaccgaagcccgggtgttttttgccattattactgaaagctttgaagacc

SEQ ID NO: 35023 - DNA, 309 bp, Gossypium hirsutum
  Clone ID: LIB3149-046-Q1-K1-B3
gagaagtctaagcctgaagacaagaaagaagagcctccggcggcggttgtcacggtagtgttgaaggtttacatgcattgtgaagcttgtgcaatggaaatcaggaaacgtattcaaagaatgaaaggggtggaatcagctgaaccggatctaaagagctcagaggtgacagtgaaaggagtgtttgaaccgccaaaactggtggagtacgtctacagaagaaccgggaagacggcggtgatagtgaaactagaggcggagacaccgaagacggaagaagaaaaagccaaagatgccaacaaggacgag

SEQ ID NO: 35024 - DNA, 410 bp, Gossypium hirsutum
  Clone ID: LIB3149-046-Q1-K1-B5
cgagattcgatcatccccgtcgattatagcataatccagatcgttatggggctccgttctccggtggattccgacttccactgggcatatcatcgcctccgagaaacgccttctctctctcgtcaagactctgtatgtgcaagaactcgtgaatataggctcaggtccgcctggttctaaggttaggtggtttcgttcttcaagtaacgagccgaggttcataaacacagttacctttgatagcaaggagggttctcccacccttgttatggtacacggatatgctgcttctcaaggtttctttttcaagaattttgattatcttgccaatcgtttcaaggctattgctattgatcagcttggttggggtggatcaagtaagcctgactttacatgcaaaagcactgaag

SEQ ID NO: 35025 - DNA, 304 bp, Gossypium hirsutum
  unsure (1)..(304): unsure at all n locations; Clone ID: LIB3149-046-Q1-K1-B7
aaggcaagcctgaagacaanaaaaaattttcttcgcggtttttgtcacggtagtgtgggaggtttacatgggttgttttgcttgtacaatggaaatcaataaacttattcaaagaatgaaaggggtggaatcagcttaaccggatctaaagagctcataggtgacactgaaaggagtgtttgaacctccaaaactggtgtaattcgtctacagaagaacctgtaagactgccgtgatagacaaactatacgcggacacacctaacactgaagaagaaaaagccaaagatgccaactacgaccag

SEQ ID NO: 35026 - DNA, 298 bp, Gossypium hirsutum
  Clone ID: LIB3149-046-Q1-K1-B9
gaagatggtaccggagaactgaaagtgatgatgatcatgatagggataaaagaagccgaggtgataggaagagatagaatgatgcatgatatatgctttattttcgctagtaaacgcagcaaatcaagtaggcttagcatctgtttttttgataaaacgaccagtcaattaccatattcatatgaatcaactaaaaccttaagcttgattaccaattacgaccttttccaaggtgttgtgttgtatctccatgagttacttttgatttttttttaactacactgagtctttcggtttt

SEQ ID NO: 35027 - DNA, 340 bp, Gossypium hirsutum
  Clone ID: LIB3149-046-Q1-K1-C1
cttcgatcggccaccatagcttcctccgctccaatcaaaaccatgcccaacagataagttgatttgttcttttgtgagcctctttcgctatgaaatgagcaactttattagattctctaaggataaaccgaaaaatacaggattcaaaggcaaagctcagatgctttaaatctgtaatgaaaatttcgatttctaatctgtcttccttttctttttacagtttctgaattactgatcgcgagtcactttcaatctcatcctctctcaaccctagagataactgaagatggacgcctagagacatgccatcgcttccgcaaaaaaaaaaaaaaaagaaaaa

SEQ ID NO: 35028 - DNA, 387 bp, Gossypium hirsutum
  Clone ID: LIB3149-046-Q1-K1-C11
gcgtcttcaaaaatttcagagctttctttgttgtatgattggcggagttagtgaaagactatttatgaaaaaaaaaaaaaaaaaaaaaaaaaaaaaaaaaaaaaaaaaaaaaaaaaaaaaaaaaaaaaaaaaaaaaaaaaaaaaaaaaaaaaaaaaaaaaaacaaaaaaaaaaaaaaaaaaggggggggccttttaaaaaaacaaaatttaactacccgtgcattgaaaggaaaaattttttttaaggggccccaaaattaaattccagggccggggttttaaaaacgtggaaatggaaaaaacctggggttaacaaaattaaacggtttgaaaaaaaatccctttttgccaatttgggtaaaaacaaaaaagcccccaccaaatcc

SEQ ID NO: 35029 - DNA, 424 bp, Gossypium hirsutum
  Clone ID: LIB3149-046-Q1-K1-C2
acggatccaagctctagacctgcttccatcgatcctaattatagagcggatccaagctccagatctgcttccattgatcccagacccgcttccattgatcccaactatagagcggatccgggctctagagctgctcccattgatcccaattatagagtggatccgagctctagagttgcttccattgatcccaattatagagcggatccaagcgctagaggtgcttccattgagcccaattatagagcggatccgagtgctagaggtgctccgattgatcccaattatagagctgctccagagctgaagtataggggtccaaccctggaatctgctgggttttctaaacgaagagaaagtttatttgtgaacagccaagttgtggatgacaacagttaactgttaaaaaccagtttccattaac

SEQ ID NO: 35030 - DNA, 424 bp, Gossypium hirsutum
  Clone ID: LIB3149-046-Q1-K1-C3
acggatccaagctctatacctgcttccattgttcctaattatataccggatccaagctccagggctgcttccagggagcccagagccgcttccattgatcccaactatagagcggatccgggctctagagctgctcccattgatcccaattatagagtggatccgagctctatagttgcttccattgatcccaattatagagcggatccaagcgctagaggtgcttacattgagcccaattatagagcggatccgagtgctagatgtgctccgatagatcccaattatagagctgctacaaagctgaagtatatgggtccaaccctggaatctgctgggttttctaaacgaagagaaagtttatttgtgaacagccaggttgtggatgacaacagttaactgttaaaaaccagtttccattaac

SEQ ID NO: 35031 - DNA, 380 bp, Gossypium hirsutum
  Clone ID: LIB3149-046-Q1-K1-C4
gctcaatctctccttttagctcagaacgctcttcacgctgtgtagaaatgccgttcaaaaggtgcgttgagatcgggagagtgggtctcgttaactacagcaaagactacggcaagctcgtcgtcatcgtcgatgttgttgaccagaacagagctctagttgatgccccagatatggtgaggggccaaatgaactttaagaggcttcaattgactgatttcaaaattgacattcctcgtgttccaaagaagaagacactgattgaagcaatggaaaaagctgatgttaaaaacaagtgggagaatagctcatggggtaaacagctgattgttcaaaagaagagagcatctctcaatgacttcgacagattcaagatcatg

SEQ ID NO: 35032 - DNA, 356 bp, Gossypium hirsutum
  unsure (1)..(356): unsure at all n locations; Clone ID: LIB3149-046-Q1-K1-C6
caaagctctctctctctattctctttggcttatctatcgctttgatttcgcatccttgctgggcactcgatggcaaatcgatggttgaggcctgaggtgtatccgctgtttgcggccgtaggtgttgctgtcggaatctgcgggtttcagttggtgcgcaatatctgcatcaaccctgaagtcagggtaaccaaggagaacagggctgctggggttttggacaactttgctgagggagaaaaatattctgaacatttcttgagaaaatatgtccgcaacaagacgccagaaatcatgcccagtatcaacagcttcttcactgacccaaagtgaggcttcactcttgctntatgctg

SEQ ID NO: 35033 - DNA, 410 bp, Gossypium hirsutum
  Clone ID: LIB3149-046-Q1-K1-C7
caagtccaagcctctttcttgtgttccggtgcatgtcgaacatgccgagctcaaaactattggggggaggtatttcataccaaacagatgaccaaggtctgagagaagctttcagcaaatatggtgaagttgttgaagcaagaataatcgtggatcgagagacgggtaggtctagaggatttggctttgtcacctacacaagttctgaggatgcttcaagtgcacttcaggccttggatggacagactctccatggccgtcaagtaagagtaaactatgcaactgagagagctcctcgtaactttggaggtggcggctacggtggtggtggctacggtggtggtggctacagtggtggtggctacggcggtggaggctatggaagtggtggcggtggatatggaggcggt

SEQ ID NO: 35034 - DNA, 314 bp, Gossypium hirsutum
  unsure (1)..(314): unsure at all n locations; Clone ID: LIB3149-046-Q1-K1-C8
gcccgagaaaacnggaacggcccacgcgtccgcaaagccaancctctgttttaagacccggtttataaccaacataccaaggtcaaaactatggggggcacggggaacataccaaggagatnaccaatgacttatacaatctttcaacaaatatggtgaagttgatcaaacaacaataatcgccgatcgagatacagccaggtctacaagatacgtatatgacccctacacaactactgacgatgcttcaattgcacttcatgcctaggataaacacactcttcacgtccttcaagtaacagttaactatacaa

SEQ ID NO: 35035 - DNA, 289 bp, Gossypium hirsutum
  Clone ID: LIB3149-046-Q1-K1-C9
ggggccgctgcctcaacttctgtgagagtttaatggggagggtacaatgtgaggactagggcaagttaagctgaggctttggctcctatcactttcattgctggaggaagttggttaagctctacaggctttcctttcgctcttgggttgtaataattttaaagattgtattgtcaatgtacccacctacctacttcattgtttggtttgagatttgctttgcggccgtgtatctgttaaattattactaaattaatagtagtaataagcgaatgccaaggctttcttc

SEQ ID NO: 35036 - DNA, 432 bp, Gossypium hirsutum
  unsure (1)..(432): unsure at all n locations; Clone ID: LIB3149-046-Q1-K1-D1
ccangcgtncgggtgagttctgcaacatagacaagtttttcttttcagtcgatacatgtcatcgtaaggaagggactccgggtcaggctggtctggtccgttactgcgaaagctcgaccagctgggccattgagaagcttttaaccatcgaccccatcaaccactcgctaagctacgagatcgtcgaaaataacatagggttcaaaggctacgtcgccaccctgaatgtgttggcggttgaaggcgatgggtgcaagatcgaatggtcgtttatatctgacccaattgaaggtatgaagttggaagattttgtttcttatttggataatacactgctattcatggcgaagaaactggaagatgctgtccgggctcaaatctagatgttgaaaattgttggtttttgttgtgtgttttagaaagttatgtgtt

SEQ ID NO: 35037 - DNA, 390 bp, Gossypium hirsutum
  Clone ID: LIB3149-046-Q1-K1-D10
aaagaaattaaagaaccaatcatgaagcttgacaccagcggactagaatcggctgcgcctgtctcgggtgctcccagtgaacttgttgatgggttttcggctgctccgtcgttcgatctcccaaacactactgattttgatgggtttcaaaaagaagctatccagatggtaaaacctgctaagggtaccaccacgcttgctttcatctttaaggaaggtgtcatggttgccgctgattctagagctagcatgggaggctatatctcttcacagtcagtgaagaaaattattgaaatcaatccttacatgcttggaacaatggctggaggagctgctgactgccagttttggcacagaaatttaggcatcaagtgccggctacatgaatta

SEQ ID NO: 35038 - DNA, 312 bp, Gossypium hirsutum
  Clone ID: LIB3149-046-Q1-K1-D11
gaaaacccaaccattcttgatgatgaagcataattaagggaagtgttgaaatttgcaaatgcatgtggagccatcacgacgaccaaaaagggagcaatccctgcactaccaaccgaggccgatgcccttgccttaatcaatggagcttagattttaagcaacttgaataatttgcacattgttttgcctcccgtgattatcctttcatttcaaagagttctcaatttatccccctatgatatgcgaccttcgatcccgcaacgcccaactgctcgtgctgtaatgacggaaaagactttgtgtttttaagcg

SEQ ID NO: 35039 - DNA, 390 bp, Gossypium hirsutum
  Clone ID: LIB3149-046-Q1-K1-D12
aagaaatggcaagagcaggagggataacgaacgccgttaacgtagggatagcagtccaagccgattgggagaatcgcgaattcatctctcacatttccctcaatgttcgtcgcctctttgaatttctcctccaattcgaggctacaacgaagagcaaattagcatccttgaacgagaaactggacaccctggaacgtcgtttggagcttcttgaagttcaagttggaactgcgtccgctaacccttctcttttcagtacgtgattcatatttaaaagttgtatttgtttccatatctttgtcgtgattttgttcctctcctagttttcgacgttgtaggaaaacaaagttttcttctttttctgtttgtctatataataaccttggcgat

SEQ ID NO: 35040 - DNA, 424 bp, Gossypium hirsutum
  Clone ID: LIB3149-046-Q1-K1-D2
ggtctacattgaagctgaaatacagcatcgtttcagagacggacgaaactggaacatataacattgtggttgaagatgaccacgaagaccaaatttgctacgcaacacttgttagcagccccattcccagctgcagcattgtggaccctagacgtaataaggccacagctattctgacccgtagcaatggtgccatatccaaccttcactatacaaatgcaatgggattcctccaggatacggtagcggatggttgccaagaactgctcctcaagttgctgcaggatgatgaataaataatttacatgatcttcacgatttagcttcttttaatttttccttgactttaggacgcaattcataatgatgatgttgttgatcgatctatgttcacctgccatttttttgatgatcggttttatat

SEQ ID NO: 35041 - DNA, 419 bp, Gossypium hirsutum
  Clone ID: LIB3149-046-Q1-K1-D3
gcctgaggaacttgaaccatttgctaagaagtgtttcttttatggctgccattgactatatagggtctgagagaagggatgtttgcatgccatcccatggtggaaatatgggccacgctattcagggacagagagcgttttcaggacacaaaaagtatataactccaaataaaagacatatgcttccttattttctgaactcctcaatgcccgaagcagagttcaacaggatcataaaagaattacaccatgaatctttgggacaaccagaactcatgaccagcaaagctggaagggatgtaaccaagtatccggttccagaatgtatgtgcaatgatgcacattcccacttcatttgatacagagagcttgcaacccgatagctaacattgcaagagtctttatcgagaatccaaatt

SEQ ID NO: 35042 - DNA, 415 bp, Gossypium hirsutum
  unsure (1)..(415): unsure at all n locations; Clone ID: LIB3149-046-Q1-K1-D4
gnggaaaggggcttttggcggcaaaaacaactttcgctaacaaggacaaggacaaagataaggacaagaagcgcgcggtttctcgttcatctcgtgccggaattcaattcccagtgggccgaatccaccgtcacctaaagactaggacttccgcaaatgggagagttggtgccacagctgctgtttacttggcctccatccttgagtacctaactgcagaggttcttgaattggctgggaatgcaagcaaggatctgaaagtgaagagaatcaccccgagacatctgcagcttgctattaggggtgatgaagagcttgacactcttatcaagggtactattgctggaggtggtgtcatccctcacattcacaagtcccttatcaacaaaaccaccaaggattagaatgtttgagt

SEQ ID NO: 35043 - DNA, 386 bp, Gossypium hirsutum
  unsure (1)..(386): unsure at all n locations; Clone ID: LIB3149-046-Q1-K1-D5
catttttcaaacttgggttatggcatcacatggagggtggttgtgaccagcatgatggcaaacgtaatggacctggaagtcncaagcctnaccaatgtccatctcagtgcacaaggaggtgtagccagacacagtaccataaaccatgcatgttcttctgtcagaaatgttgcaggacatgcctttgtgttcctccagggtattatgggaacaaacaagtttgcccttgctacaacaactggaaaaccaaggaaggaggccccaaatgcccttaaattactcaaaagaagacccctttttttttacattattatccctataaatttcctatttgaaattcaagtcatttaagcataaggttgcactgtaatactaactatatattt

SEQ ID NO: 35044 - DNA, 309 bp, Gossypium hirsutum
  Clone ID: LIB3149-046-Q1-K1-D6
ggacttttgagatccgagggtaaagattacatagtacaagaaggtgatgggatgctgtttcggttcaacgtttgatgactgtgtttccggagctgaaggcaaattcatcattcttttacttatcaaagcaccaaacaagaaatgtaaacgtcgatacagcggtctaagaccatgttcaatatcagaaatatagcataggattgtaatttttctttcaccattgctaaaccgagaaatatatatattcagagattttgctcgaggaattgcttgtttgtaatccaaaagtaaaacaaaggttcttacagc

SEQ ID NO: 35045 - DNA, 414 bp, Gossypium hirsutum
  Clone ID: LIB3149-046-Q1-K1-D7
caaaatctctctttctcgtcaatatggcagctaatggcgttgtttctgacaagagcttgatcggcagcttcggtgagatgctgatcgattttgtccccactgtctccggtgtttctctagccgaagctcccggcttcctcaaagcccctggcggtgctccggctaacgtggccattgctgttgctagactcggaggcaaagcgtcatttgtcggaaaacttggggacgacgagttcggtcatatgctggccgatattctcaagcaaaacagtgtctccggtgacgggatcttgtttgaccaaggcgctagaactgctcttgccttcgttacgttacgcgccgacggagagcgtgagttcatgttctataggaatcctagcgccgacatgctgttgaagccggaggagttgaacg

SEQ ID NO: 35046 - DNA, 412 bp, Gossypium hirsutum
  Clone ID: LIB3149-046-Q1-K1-D8
gactggttttatgggagctatgatatcgaactcggcattggtcctccggcacatattctcggggaagggcatgaaggggaaaggcgttcatgcgatgaactactacgcctgactatctttggtgtctcttgtaattctcacacctttagcaattgctgtagacggaccgcagatgtgggctgcatgacgggaaacggccttatcccaaattggaccacagcttatctggagggtagcggcccaaagtatttcctatcatctctacaaccaggtctgatacatgtcccttgatgagacatctaccttgacatttagcgatggcaacaccatgaaacgtatatcagggatagtctcttacatcatcatcttccacacgcctgtgcagccaatcaatgctgtatgagctgccatt

SEQ ID NO: 35047 - DNA, 305 bp, Gossypium hirsutum
  Clone ID: LIB3149-046-Q1-K1-E1
gttgcaacctccaccaccaagtactgcaccagaatcctctatagagtccacattgaaagtccatttgtgctttagtgacgaggaatccacatctcatcaaaaggaacaactagctgtttaaggccttcaatttagtgtttagctctcaatgtcgtttcaattttggcgttttcttgtggatttccctttttttttttttgggggggggggtggttggatctcaaattgattatgcatgtacagatactgggagatgctttcttttttacagcctggctatatacatatatgtaagtctttttttc

SEQ ID NO: 35048 - DNA, 184 bp, Gossypium hirsutum
  Clone ID: LIB3149-046-Q1-K1-E10
gaaaaacatgtgtttcaaatgtcttttgtgggattgtagtttgttcacggtgtttagttgagtaggtagtttaggcttcttagtttaatgtgaatataatctaatcatcaatatctgttacttggtcaatagaagagctgtgacttttttttcattaatgaaatgaatgcaatatttcaatttc

SEQ ID NO: 35049 - DNA, 388 bp, Gossypium hirsutum
  Clone ID: LIB3149-046-Q1-K1-E11
agcgtatttccaagctaaagaagaacggctgctcgtatatgattatttcccaaatggcagcctcttctctcttattcatggaacaagaaccaatggtggtggaaagcctcttcattggacttcttgtcttaaaattgcagaggatttagcttctggattactttacattcaccaaaatccaggcttaactcatgggaatttaaaatcctcgaacgttttattaggccccgacttcgaatcatgccttacggattatggtctcacgttattccgagaccccgagtcaccagaagagccaagtgcggccacttttttctatagggcacccgaatgtcgggacatccgaaaatcatcgactcagccggccgatgtttatagcttcggcgtt

SEQ ID NO: 35050 - DNA, 389 bp, Gossypium hirsutum
  Clone ID: LIB3149-046-Q1-K1-E12
caaagcctggcccaaatgctagtaatgatgagcggaggaaattcattaagtccaagtatgaacttcaagaatttttgaagcccagcttgcggatcacatcagggaaggattcttcttcttcttctactcaatcgaacatttctggaaagattttggatactatcctatcaaattcgacacagaaggaaggcatggttgaatttattgggttactgaaggtcaaagtagtaaaaggcacaaatttagctgtccgggatatgatgacgagtgatccttatgttgtcctgactcttgggaagcagactgttcagtcgactgtaatatcaagcaacttgaatccagtctggaatgaggaattaatgttatcggttcctagcaactatgggcct

SEQ ID NO: 35051 - DNA, 308 bp, Gossypium hirsutum
  Clone ID: LIB3149-046-Q1-K1-E2
ggtgcaacctccaccaccaagtactgcaccatatatcctctatagagtccacattgaaagtcgggtgttgtgctttaaggacgaggaatccacatctcgtcaaaaggaacaactagctgtttaaggccttcaatttagtgtttagctctcaatgtcgtttcaattttggcgttttcttgtggatttccctttttttttttttgggggggggggtggttgtatctaaaattgataatgcatgtactgatactgggagttgcttttttttatacagcctgcctatatacatataaggaagtctttttttc

SEQ ID NO: 35052 - DNA, 404 bp, Gossypium hirsutum
  unsure (1)..(404): unsure at all n locations; Clone ID: LIB3149-046-Q1-K1-E4
catgaacaagctccagaccaagaaaccatggtcactctctttctcatttggacgtgcccttcagcagagcactctcaaggcctgggctggaaaggaggaaaacgtgaagaaagcacaagatgctttccttgttaggtgcaaggctaactcggaggccaccttgggtacatacaagggtgatgcaaagattagtgagggtgctgcagagagccttcatgttaaggactacaaatactaagaatttagtcttgtggtctgtgtatcagagaaattttctgtattgatgatagacgtttagtgctgtttttggaggttgtccgtttcttctcatggaatgtaggttgtgaaatcagactcaaataagctnggggggccctagttctcgctgagtgttcatgggtttt

SEQ ID NO: 35053 - DNA, 386 bp, Gossypium hirsutum
  Clone ID: LIB3149-046-Q1-K1-E5
cttcgttttcctccgcggctccatttctcgttccctcaatatcaaagtaggaatgaaggtgggcgccgcttacttgctcgccggactcggaggaaacgcttccccttccgccgatgacttgaaggttattctcggatcagttggtgctgaggctgatgatgataggatagagttgctattatccgaagttaaaggcaaagatattaccgagctaattgctagtggaagggagaagttggcttccgttccttctggtggtggtgctgttgcggttgccgctcctgcaggtggtggtggtggtgctgcacctgcagccgaggccaataaagaagagaaggtcgaggagaaagaagattccgactatgatatggggtttaggccttttg

SEQ ID NO: 35054 - DNA, 396 bp, Gossypium hirsutum
  Clone ID: LIB3149-046-Q1-K1-E6
gaaacgaattgtgaagttgaatgaaggatttgatctattttttgaaagagagcttgaaattgttggaagcataaaacatcgatgccttgtaaacttgcgaggatattgtaattcacctgcatcaaagctgttaatctatgattatctagcaggtggtagccttgatgaagctcttcatggtgaggctccttaaaactatttttattcaaaagcagttctcatttcctggtttgcctccatgtttctcacaactcaaaagtagtgcaagcaaaaaaaacaagcactaaatgagggggctcgaaatcagcagctgcagctttcacttgttcatttcattaaattctttatgcggatcgaagttggaaggtccatctgaactgttcaatggaagtagat

SEQ ID NO: 35055 - DNA, 416 bp, Gossypium hirsutum
  unsure (1)..(416): unsure at all n locations; Clone ID: LIB3149-046-Q1-K1-E7
aagaaatagaattcgaagcattcaatggagagaaatcttctaaacccgagaccttaaacgcgtgccacataatttcattgtcggaaggcttcnatttatctccgttgttcgaagagaaaaagagggaagagaaagaggagttgaggttcgccacgacgaggccggcaagcagcgtgatatcgaggctcgaagaggtggccaaatcggggaagttcagcgtcaaaaagagcgagtgtaaggtgaggttgcagggtcaagaatgtgggaggaaaggtaaacttgccattgctgccgatatatttgcggtgacgccgtcgttcttggtggtggaagttaaaaaggaccatggcgacacattcgagtacaatcagttttgcagtaaagagctccggccggcgcttaaagacatcctatgg

SEQ ID NO: 35056 - DNA, 233 bp, Gossypium hirsutum
  Clone ID: LIB3149-046-Q1-K1-E9
gtcgccgcggcgacatggccgtgcaggtcgcacgcgaccgctccgaccgtgccgtgcttgcggtccggatcgagcggttcggccggctgcgagtgcgcttgcgatttgccgaacgcgaacgccgccgcatcgtggtcgagcatcgtgccggccgtcgcgcgcgccttgacccactgcgcgtgacgcgtttcggtgtcgaagtagccgggctccgcgagttcgagcccctgcgc

SEQ ID NO: 35057 - DNA, 423 bp, Gossypium hirsutum
  Clone ID: LIB3149-046-Q1-K1-F1
ggaaaaccctaaaatctgatggtattgccgggctttatcgtggtttcaacatttcatgtgttggaatcattgttgaccgtggtctatattttggaatgtacgactctctgaagccagtgcttttgactggaagcatgcaggatagtttcttcgctagctttgctcttggttggctcatcacaaatggtgctggccttgcatcttacccaattgacactgttcgtagaagaatgatgatgacttctggtgaagctgtcaaatacaagagctcgctcgatgccttctctcagatcttgaaaaacgaaggtgccaagtctctattcaagggtgctggagctaacatccttcgtgccattgccggtgcgggtgtgctcgctggatacgacaagttgcagctcattgttttcggaaaagagtacggat

SEQ ID NO: 35058 - DNA, 391 bp, Gossypium hirsutum
  Clone ID: LIB3149-046-Q1-K1-F10
ctgatgcaaggaccttggtccaacaagcatggaatgaagcggccgagtttcggttcagatgtggatatgagatgcctgttgatgtattgtctaaatggattgctgacaaatcacaggtttatactcaacatgcttatatgagacctcttggagttgttgctatggttttgggtattgatgaagagaagggaccccaactctacaagtgtgatccagcgggccacttttacggtcacaaggcaactagtgctggatcgaaagaacaagaggcaattaatttcttggaaaagaagatgaagaatgacccagcttttacttacgaggaaacggtgcagacggccatttctgctctgcaatctgttcttcaggaggatttcaaggctactgagat

SEQ ID NO: 35059 - DNA, 370 bp, Gossypium hirsutum
  Clone ID: LIB3149-046-Q1-K1-F11
caaatctattgattatcggggctcgaacctgcccagcggagggacaaatgatggtgcattgtggatagatttgccaggagataataatggaagagataatgttaagaaaggaaacttggagagtgcagagctatatgttcatgtcaaaccagcagtgggtggaacatttacggatattgtgatgtggatattttgtcccttcaatggaccggccaatctcaagatcgggttaatgaacatacagatgaacaaacttgggcaacatgtaagtgactgggaacacttcactctccggataagcaacttcacaggggaactgtggcaagtttacttctcacagcatagcggtggtgagtgggttgatgctttc

SEQ ID NO: 35060 - DNA, 307 bp, Gossypium hirsutum
  unsure (1)..(307): unsure at all n locations; Clone ID: LIB3149-046-Q1-K1-F12
aatttattgtttttaaattttagcaaaaagggacaaatatgtgtncatgaaactattcctaaggcacttgccctaaattatcaaattatcttcctaaacaaacactactgccttcaaaaatcatattgaacagctccacatccaatacccttacaaccttatatcattaaccaaattcaatgtcccattgtcccatatcattatttctaatgattattacatttttctccctattaaattcaaaccatcccctctcattcaacttcatactattcaatatccaacacttccaattactacctctact

SEQ ID NO: 35061 - DNA, 363 bp, Gossypium hirsutum
  unsure (1)..(363): unsure at all n locations; Clone ID: LIB3149-046-Q1-K1-F3
ccgggncgagccacgcgtacgggaaagacgaaccaaccgaacgnacncccgctttcaaccgcagattcaacatataatgtcaggtaaacataattggaccgccgcgatattacaaagtctacaactctaaaaccccagcgctacccactggaatcatccaggaaacattcttctctagctatgctcctgaatagctaatcacaaatggcccagccctctcatcaaacccaactcacactgaacggagaataataatcaccacttatcgtgacactaacaactacaagagctcgctctacgcccactgtcacagctacaaaaaccaacgcgccaactctctatccaagggagctcgagctaaca

SEQ ID NO: 35062 - DNA, 419 bp, Gossypium hirsutum
  unsure (1)..(419): unsure at all n locations; Clone ID: LIB3149-046-Q1-K1-F4
gttgctcatgaattcattatagacttgagaggttttaagaatactgctggaatagagcctgaagatgttgccaaacgtcttatggactatggattccatgctcctacaatgtcgtggcctgttccgggaacgctcatgattgaacctactgaaagtgaaagcaaggcagagctggaccgattctgtgatactcttatctccattagggaagaaattgctgaaatcgagaatggaaaggctgatatccacaacaatgttcttaagggagctcctcatccaccatctttgcttatggcagatgcatggacaaagccgtattctcgggaatacgctgccttccctgcttcctggcttcgaactgctaagttctggcctactacaggacgtgtngacaacgtatatggtgatcgcaacgtcat

SEQ ID NO: 35063 - DNA, 412 bp, Gossypium hirsutum
  Clone ID: LIB3149-046-Q1-K1-F5
aaaaaagcatggcaaagagtgatgggaaggtgaaagtaatgggaagatggcagtgcccatttgcgatgagggcaaggatcgcccttaacatcaagtctgtcaactatgagttggttgaggcgaggccatgggatggccaaagccaggtccttcacgaatcaaagtcaaacccagtcatggttcatggtgataagtccatctgtgagtctctcaatattgtcgaatacatcgacgagatttggccttatgctccctccattgttccttctgatcctcttgaacgtgtcactgctcggttctgggctggctatcttaaagaccagtggtttccttccttgaaagctattggtactgctgaaggagaggatacaaggaaagcagcaataaggcaagtggagaaagggttagtact

SEQ ID NO: 35064 - DNA, 411 bp, Gossypium hirsutum
  Clone ID: LIB3149-046-Q1-K1-F6
aaaaaatccctctcttctcagctgctggtcttccccataatgaaatcgctgctcagatttggggtcaggctggtttggtgaaacgtttggagaagactggagatctgcttgaggatggtgaagaagataattttgcaattgtgtttgcggctatgggtgtaaacatggagactgcacagtttttcaaacgtgactttgaggaaaatggctcaatggagagggtgacccttttcctaaacctggctaatgatcccacaattgaacgtattattactcctcgtatagctctcactactgcagaatacttggcatatgaatgcgggaagcatgttcttgtgatccttacagacatgagttcttatgctgatgctctccgtgaggtgtctgctgcccgagaagaagtacctggaa

SEQ ID NO: 35065 - DNA, 374 bp, Gossypium hirsutum
  Clone ID: LIB3149-046-Q1-K1-F7
aaaaagagccttctctacttttatgctaaccttttccataacgaaatatggggttaaatatgtgggaagacgggaaagatcaaacgtccatataatactttaaatctgattgaggaggggcaataacataatattgccaatgccatcgcctttatgagtgtaaacataaccactgcacagtttatcaaacttgactcttacgataatgtctcaatatagaggaatacctctaccctaaacctccttaatcatcctacatttgaacttattatcacttctaacatagctctcactactgcagaatactttacatatgaatccactaatcacgtacttgtgatcctatcatacatgataactatgctaatcctcta

SEQ ID NO: 35066 - DNA, 268 bp, Gossypium hirsutum
  Clone ID: LIB3149-046-Q1-K1-F9
gagacttgacacaactcaaaattatgatcctttttagaacaagaccactcagacaatcaggacaaatagctgtgggacctgagaatataaacatgcttgaatgcattacactaatgaacttaattgttcagataaacaaacagaacagcgggaccccgatctgatgaaaccagacaatcagacgcgaccctgctacgctatacggctaatatgacaaaatcaacatccattccaccttccaactctatacatcacgcgaacagggaaa

SEQ ID NO: 35067 - DNA, 419 bp, Gossypium hirsutum
  unsure (1)..(419): unsure at all n locations; Clone ID: LIB3149-046-Q1-K1-G1
aattaattcaaaagcatttcctaatggctcttcgttcgtcaatcaccagaagaaccctaacattgggcctaaattgcacgatgctgctgcctctgtctcgatcattgcagactttctccctccccgatcttccttacgactatggcgctcttgagcccgccattagtggagagatcatgcaactccatcaccaaaaacaccatcaaacttacatcactaactataacaaggctttagagcagctccatgaggctattcagaaaggtgattcttccaccgtcgttaagttgcaaagcgccatcaagttcaacggcggaggtcacgtcaaccactccattttttggaagaaccttgcccctattcgtgaaggaggaggtgaacctccaaaagcttccttgggttgggctatngacacacac

SEQ ID NO: 35068 - DNA, 393 bp, Gossypium hirsutum
  Clone ID: LIB3149-046-Q1-K1-G10
atgataccaaagtagacgtgttttcatttgctctgatcttacaggagatgattgaaggctacccaccattttctgctaagcaagacaatgaagttcctaaggtatatgcagcaagggagcgtccacctttcaaagctccagctaagcattatgcccatgggctcaaagagttaattgaggaatgttggaatgagaaacctgccaagcgacctacattcagacagattataaccagacttgaatctattcacaacagtttcagtcatagaaagcgttggaaggttagaccactaaaatgctttcagaatctggaggcaatgctgaagaaagatcattctagtccaagcagccgtagcagttcatctcgatctactaacagcatatgaatgaatg

SEQ ID NO: 35069 - DNA, 385 bp, Gossypium hirsutum
  Clone ID: LIB3149-046-Q1-K1-G11
gccggatgagattttccatagggctaaaggggttcagttgtgcaacacccaggcatctcagtgcagtccagccttttttgctgattctttcttcctcaaccagttctcttttgatgttatccaagacaggccttttatacctcctacagcctgggtcatatgcgagagacatatgatctcagtggtgccggtgacacgtgtcaccatgtctcgtcatcgtcaatttttcagcttctacatcgttggattaagccgggaggtgtacttgaaggactactatcctgctaggttttgctggggcttgtgtccttgcctggaatggttgaagacgtattcactaggcagatacgttgtccaccttaaaggagattgcttctcaattatt

SEQ ID NO: 35070 - DNA, 428 bp, Gossypium hirsutum
  unsure (1)..(428): unsure at all n locations; Clone ID: LIB3149-046-Q1-K1-G2
cgcgtncgaatgattcaaaagcatttcctaatggctcttcgttcgtcaatcaccagaagaaccctaacggtgggcctaaatggcacgatggtgctgcctctgtctcgatcattgcagactttctccctccccgatcttccttacgactatggcgctcttgagcccgccattagtggagagatcatgcaactccatcaccaaaaacaccatcaaacttacatcactaactataacaaggctttagagcagctccatgaggctattcagaaaggtgattcttccaccgtcgttaagttgcaaagcgccatcaagttcaacggcggaggtcacgtcaaccactccattttttggaagaaccttgcccctattcgtgaaggaggaggtgaacctccaaaagcttccttgggttgggctattgacacacactt

SEQ ID NO: 35071 - DNA, 407 bp, Gossypium hirsutum
  Clone ID: LIB3149-046-Q1-K1-G3
gcttaagaggttcccaatgccctatgctttgtacttgatgggagtatctattttggctggctgctggggacagtatttcgtgagaaaactaataacaatccttaggagagcttcacttattgtgttcatcctatctggtgtcatctttgcaagtgctctcaccatgggtataaatttattaaagctcaatgattctgcattcttaaattttagcattacagaaggactaagttaataattttacttttttttccttttagttggtggaaactgataattgtttttattcatgtatattaaacaggagtcattggcattgagagaagcattctaatgattcacaaccatgagttcatggggtttttaaattgttgcagcagtcaatgatcgttgactaagtaagaatg

SEQ ID NO: 35072 - DNA, 429 bp, Gossypium hirsutum
  unsure (1)..(429): unsure at all n locations; Clone ID: LIB3149-046-Q1-K1-G4
cgcgtncgnaaggacgaaaagattggtgccaaactcccatcaactgataaaaagaagatcgaagatgctatggaacaagccatgcaatgggtggacagcaaccaactcgccgaatccgatgaatttgaagacaagatgaaggagttggagagtatttgcaaccccatcattgctaagatgtaccagggtgccggcggtgacatgggtggtggcatggatgaggatgttccggctggtggaagtggtgctggtcctaagattgaggaagttgactaaaacattgattttcttcatctggtttctctattgtgttctcgtatgttttttgggatttaaaccgtttggttccttttttgggatactctatcagtagcacctgtgattggtgtgttttggaaacaggtcccttttgaatgttatgaaatgctc

SEQ ID NO: 35073 - DNA, 406 bp, Gossypium hirsutum
  Clone ID: LIB3149-046-Q1-K1-G5
ggaaaacacccaagattcttaaatttaatcgtctgtattgataaccaaaagaatgaggcatcggggactggaatcaaagccattgtcagcactgtgttgcttggagtcgaacaggggaaaactagttcaacagggcctaatcgacgccctggtaacatatattttaaactcagaaaggagcttggcagcaatggcaatggcgatactagagcaagttttggggatagaaagagcaaaagaagcactgataaagaacccaaacggtgtgaaagcagtggtgaagatggtattcagggtatcagatcacgaaggaagtgaaagtgcggttaactcattgatgatggtgtgtcgggaatcattggaagcaagggaaaaagctatagcagctggagtttaacacagttgc

SEQ ID NO: 35074 - DNA, 360 bp, Gossypium hirsutum
  unsure (1)..(360): unsure at all n locations; Clone ID: LIB3149-046-Q1-K1-G7
ggaactaaaggagaccttgcaggaaataattggacaggggaagcaggttaagctggaacagaggatcgatcctagtattcttggtgggcttgtcgtanagtttgagcaaaaggtatttgacatgtccattaagactagggcacgacagatggagaggttcttgcgtgagcctatcaactttggttccctctgaaggatgttataaccgccaagtgaccatttcagtttccttgtgcaccaattgggttattccgagaactgcaaagaataattaatggtctttttgttttgcctctgttttcttctactcttgacattatatgatggaatgcatccattcacaataaaagaaactttctc

SEQ ID NO: 35075 - DNA, 416 bp, Gossypium hirsutum
  Clone ID: LIB3149-046-Q1-K1-G8
caagcactctttttcaggaatgacaatggcaagatgccaagtagagttacttacaagtctatgattttcgccatgctagcctgtactgcaaccatgtgtttttaaaaaaaaacacaagtgttgaagtttgattctttcaataagtttgattttatatattgaggtatatgagattctagaataaatgtgtcgttaagaggatcacaacaatttactagttgtatttaaacaagtaaatggttttgtcgaggagtgttgaagttggccagcatgctgcttgttgcaccagaaacagctcgagccagtgaagttgcagcagaagatcaagccactgtttcattttgttatttttgaattgatgatttgtaacttagttgaaaacaaaacaagttgtacctgatgttttaggtactgat

SEQ ID NO: 35076 - DNA, 365 bp, Gossypium hirsutum
  Clone ID: LIB3149-046-Q1-K1-G9
aagaaatgttactttagtgaaattataggcttcaattatttatttaaaaaaaaaaaaaaaaaaaaaaaaaaaaaaaaaaaaaaaaaaaaaaaaaaaaaaaaaaaaaaaaaaaaaaaaaaaaaaaaaaaaagaccaaagcataaaaaaaaaaaaaaaaaaaaaaaaaaaattaaaaaaaaacaaaactaaattggacggtggtaaaaaaaaccacaataccgaaaaaactaaaaatactgaaattaagaaaacttaagcgtgtttcacaataaaaaggttggcacaaatcgccctattcaaaaaaggcgcacacttaataaattttgcaacacacgcttatataaagagacaatcaatccaggtgt

SEQ ID NO: 35077 - DNA, 391 bp, Gossypium hirsutum
  Clone ID: LIB3149-046-Q1-K1-H10
gtcagaccgtggcagttggtgttataaagaatgttgagaagaaggacccatccggtgccaaggtcaccaagtgtgctgctaagaagaagtgaaccgtgctggttaaatctaatgaagtttccgcagatggagtattttattatcataataatagtttgatagactttatcatttatgatatagttggtcttttgcttggttttgcatgttatagtgtgttgccattgttgtctggtaactgttctcagtattgggtgcttgacagacggtggcatatctatgggtggtctctagcgttacctggttttgtttaatttactactgtatcttgtcattgtcaagaggtgcccccttggttttccaaggtggcttgaaacttttgtttatgatt

SEQ ID NO: 35078 - DNA, 120 bp, Gossypium hirsutum
  Clone ID: LIB3149-046-Q1-K1-H11
gcaaataattattagttcatgaaatgtatgttttagttatgatttttcattggatgtactgaattttggaatgggttgtgcttaacctaatttgaaatgacttttcttttaattaagact

SEQ ID NO: 35079 - DNA, 325 bp, Gossypium hirsutum
  Clone ID: LIB3149-046-Q1-K1-H2
ctcaaccattttatttataaaaaaaaacacaatgattaaaggtttacttgtcgctcccatacgtaaggggactaacatgtgattactcgtctgaagagttggtgattcttatcgtttgcgactagatgggcgcattctccagataccaaaccacattcccgatttgaacatgtacgcatgcatacatactatatccgatcatcgtggagctcgtatatgtactagattacatcttccgcatggcttaagttcatgaacataacgactagttttaacgatgtagactttctttagacattgcatatcacatggactgtttccgata

SEQ ID NO: 35080 - DNA, 384 bp, Gossypium hirsutum
  unsure (1)..(384): unsure at all n locations; Clone ID: LIB3149-046-Q1-K1-H5
aacagctgcggatccattgcttccctgtttcctgtaatcaaaaaagagagaaaatgaaggttggtgctgcttatttgttggctggacttggaggcaatgcctctccttcagctgatgatcttaaaaccattcttgccaccgttgaacctacccctaaaaaggaaaggttccactttttttattttgaggggaaggccaagatattacccaacttattgcatttgggaagggaaaagcttgcctctgttcccagcggtggtggtgtcgctgtggtgacatctgcacccggaggagccgccgccgcctctcctgttgcntgtgactctaanagggaagagagtgttggggagaaagaggaatccgatgatgatatgggctacagtc

SEQ ID NO: 35081 - DNA, 313 bp, Gossypium hirsutum
  unsure (1)..(313): unsure at all n locations; Clone ID: LIB3149-046-Q1-K1-H6
acaccgnggaacacctgctgactcaccaagatgatgttgcgaggttgatgaaaatggagaggagatcgggaatggatatccatagcaagcggtggtttccttacttggataggtttaagtgtgggagtgagtccctaaacagcagggaggttatagaggcagtcgcacctgtcttgatggaggaaaggaaagaaaggttgaagagggtggttagaaataggagctattcagtttgcttggtggtggaagggctgtgcgatttcggcaatgtttcagccacgttcaggtctgctgatgctcttggcttgcagtc

SEQ ID NO: 35082 - DNA, 392 bp, Gossypium hirsutum
  Clone ID: LIB3149-046-Q1-K1-H7
gtgagtttgctgactgagagtggagacactaatgatgatctgaggctcccaactgatgagaagttattgaaacagatcaaggatggttttgctgagggaaaagacctggttgtgtctgtgatgtctgcaatgggggaggagcagatctgtgctctgaaggacattggtcctaagtaatttgagattttattttcagacttttattgcaatcttagattataactttttattttttttaagaactttaatagctttgtgtcttggaatttgggtttttttttattttttttattttaatatatctggatacgagaaaaacaccattgctgttatcttattgttgtgatatgattctctcttttactacttcaaggttttgttcttgggttttc

SEQ ID NO: 35083 - DNA, 195 bp, Gossypium hirsutum
  Clone ID: LIB3149-047-Q1-K1-A10
aaaaaaaaaaaaaatttttaaaaaaaaaaaaaaaaaaaaaggagaataaaaatatagaggatggtaaaataaataacaaataaataaaaaatatattactattctataaaataaactatatttcacattacttttcatcattttaccttttttttactgcgaataccctgactttacccatattattcttatttt

SEQ ID NO: 35084 - DNA, 281 bp, Gossypium hirsutum
  Clone ID: LIB3149-047-Q1-K1-A11
cagaatttgagcagcctccgccgcctgagtttggatctgggtatcgacggagacccgggtttgagcagcctccgcctcctgaatttgaatctgggtatggccggagacccgaatatggcgaacaagagtccgagtacagatctgagtatagtaggaaaccagagcacggtgaatatggatccgaatatgggaggagacccagctatggtgaacccgaatctgaatacggatctgggtatggccgaaaggcagagtatgaaggaggcggatccgaatatgga

SEQ ID NO: 35085 - DNA, 194 bp, Gossypium hirsutum
  Clone ID: LIB3149-047-Q1-K1-A12
tcctcctactttttccaaaattttctcccccttctctttccatctagatgttttcaaaaacctagtcccccccatcccttcccctcctttatttctttttacatcttcccttaaacttccttccttctcactttctcttcctttccctcccttaattctcataaatatcttttcctttatctttttttctccct

SEQ ID NO: 35086 - DNA, 421 bp, Gossypium hirsutum
  Clone ID: LIB3149-047-Q1-K1-A2
gtgagttcaaatttaagcatgtgaaaaaggcagtagcatcttcatgtcaaattttctataggattttcccccccttttttaaacagatgaattcaagtaatggaaatggatccatgtcgactgctagctcaagcggtgcttggaacggtagagatcaattccctgctggtttgcgtgttctcgttgttgacgatgatcaaacatgtcttatggtctttgaaaaaatgctaaaaacctgcttatatcaagttacgaaatgcaacaaagctgagactgcattgtcggtgctacgtgagcacaaaaacgagtttgatatcgttatcagtgatgtccatatgccagacatggacggattcgaacttctcaagcatattaattcggagatggatctccctgttatcctgatatcggcagatgctag

SEQ ID NO: 35087 - DNA, 423 bp, Gossypium hirsutum
  Clone ID: LIB3149-047-Q1-K1-A3
ctggagtgtgaaggcaatcagaagaaagaccactggaaccggtaggatgaggtatctgcgcgatgtccctcgcaggttcaagactggtttcagagaaggtactgaagcagcaccgaggaagaaggttgcagcagcttctgcttgaggtattacaaggttgttttggatgaagccttctttttttaggaaaacttttacgagaacatttttcttgaggggtgtcattacattgaatgctttagctgtttttagtttatgattatggagttgcattaaattttgaacaaggatgaatgctttagtttttctctagtttatttttgaggagttgcttcaaattttgaacgaggatggacaaggctattgttggttgacacttagttacttgatacatttttttgggatgaaagtaatgtatgttct

SEQ ID NO: 35088 - DNA, 424 bp, Gossypium hirsutum
  Clone ID: LIB3149-047-Q1-K1-A4
ggtcaataagatatacaggaaagagctcactctggcattcctcctgcttacagcttcggttaggagcctgttatcggcacagggagtacatttctacttcctcctcttccagggggtgacttttctcctagtcggtctagatttaataggagagcagatgagctaatgctgcatggaagcttgaaagaaagcaaaatgtgctaagactctctccatttccactgacaaaacctggtttctggctgtgcagtcgaagtttttctcctcaggaaattgtttaacggtaccatcctggtgctcaataaccaaagtttcattctctacgtcagcattgaatgccgaattgaaggtttttattcgtcagtaactctactttctgtcttcacagtttctatctactttctaatatctttatatatatatt

SEQ ID NO: 35089 - DNA, 424 bp, Gossypium hirsutum
  Clone ID: LIB3149-047-Q1-K1-A5
aaaaatattttcgctagattctttaatccattaagatatcatgggcaaaggtccaggtctgtacactgaaatcggcaagaaagccagagaccttctttacaaggatttctaagacaaatggctttatatctccaatgtggggaggtgttattgtttggaatccccaaggctgtttaaaggattcagaattcaagcccagtgccaagaacataattcccatacaggaccttgagaatatgtttgaagtattcattgggcaattccggcaactatttggtttcaaatctttgaatgtttacacgaatgcatcaggcgattggaaccttctgcctagtgaaagaggttttaccgagtgggaattggacgtcttgtcatggcaacacacgtgttttaatcttcattcatgtgctacgacacttggatc

SEQ ID NO: 35090 - DNA, 422 bp, Gossypium hirsutum
  Clone ID: LIB3149-047-Q1-K1-A6
aaacacaattcatagaaagtaaaactccgtctccatgtccagctccgatcccaacaaggtgggttccaaagccgacaaaggaggaaggctaagtcttacaaggtggagtgcagattggaaaagtgctactcttttatatgaacaagctgcaaatggatttcgagtttcaaaggattatgagaaagcaaagttggcattcgagaaagcttccaaaggacaagaaatgctagcttctccctgggatgctgctaaacacatggagtctgctgctgctttagcaaaggaactacgcaactggactgaggttatcgacttttacagaaaggcatctgagctatacatgcagtgtgacagaccacagcctgcatctgattcacttgccaaggctgcccgtgctttggaggatgctttgcctgatgatg

SEQ ID NO: 35091 - DNA, 245 bp, Gossypium hirsutum
  Clone ID: LIB3149-047-Q1-K1-A7
ggaaaacccgaatatggttatatctgcataaacaggttggatgttatggaattcctggagggttttctattatataggtctgtatggtggagaattaccatgtttaggctggttgcttcttactgtcttttctgatgacctaatgtatgtcattggtactctctgcattcttagatatataattaaaatgctaaaagtttgtgttgaagtttgatcgatttctgtaattccatgtctctgtgttc

SEQ ID NO: 35092 - DNA, 215 bp, Gossypium hirsutum
  Clone ID: LIB3149-047-Q1-K1-A9
actacatctaaatctatgacggcctacctattttttttcgatgtacaaaaaaacgtgtgcttttctatcccacttcatcgtaacaacttcctacatcaccccctcaaataccaccctacccattgtccttcaaaacatctccataaaatagtctacatgacctccattatatcttcttctctttcatctgctttccaacttatcacctagattct

SEQ ID NO: 35093 - DNA, 408 bp, Gossypium hirsutum
  Clone ID: LIB3149-047-Q1-K1-B1
ctctttgcgcctttcttctctcagccgcagcactgatattgcaggtaagtcatggttaaggataacaatgtcgtgccaaatgggcacttcaagaaacactggcagaactatgtgaagacttggttcaatcagccagcacgaaaggctagaagacgaattgccaggcaaaagaaggctgtgaggatctttccaaggccaactgctggaccccttcgccctattgtccatggccagactttgaagtataacatgaagttgagagctggaaagggtttcaccctcgaagagcttaaggctgctggtatttcaaagaaacttgcaccgaccattggtatcgctgttgatcaccgccgtaagaacaaatcacttgaaggtcttcaagccaatgttcagaggcttaagacctac

SEQ ID NO: 35094 - DNA, 285 bp, Gossypium hirsutum
  Clone ID: LIB3149-047-Q1-K1-B10
gctttctggaattgccaattccatggaaactgttttgaagggcttgaaagatgggttgtcggctttgcatgttccttacgcttatggttttgcaattatacttctgactgtgcttgttaaggctgctacttttcctttgactaggaagcaggtagagtctgcaatggccatgcgatcattacagcctcaaataaaggctattcagcagcggtatgctggagatcaggagagaattcagcttgaaactgctcgactatataaactggcagggataaacccattagc

SEQ ID NO: 35095 - DNA, 178 bp, Gossypium hirsutum
  Clone ID: LIB3149-047-Q1-K1-B11
gccacctattcgttaacataaagacgctactgaccctaaaggacttttggagtctgcggcgtttcataacattacgtaaatagatcgtgttactgatactgacaaagacaatatccacttcgaaggtacccatgaacattaacacgaggcctgatgaaagcatataaggtgccgacga

SEQ ID NO: 35096 - DNA, 153 bp, Gossypium hirsutum
  unsure (1)..(153): unsure at all n locations; Clone ID: LIB3149-047-Q1-K1-B12
ctttgttcccccaactcccaattgcttgtgttctaatgatggaaaagactatgtggtggtaagcgtgtangaaaataaaaaaaaaaaaaaaaaaaaaaaaaaaaaaaaaaaaaaaaaataaaaaaaataaattatatggctaccaatatacaa

SEQ ID NO: 35097 - DNA, 404 bp, Gossypium hirsutum
  Clone ID: LIB3149-047-Q1-K1-B2
cttcttttgccgctcctgaacggcatgaacattccgtttctttgcctaatagatcgtggcggctctcttcctcctcgtccttgccgcttagggcctggaacttagttccttccgattcaaaaccggatcgctttgaagttagagccaaggcggcggagagtgcaagtgaaggcgagaagtcaggaagcctggtcaagatatcggagcttggtttgttgtttggtttgtggtacctcttcaatatctacttcaatatctacaacaaacaggttcttaaggtcttccattaccctgtaactatcagtgcagttcagtttgcagttgggacgataattgtttccctaatgtggacgtttaacttgtataagaggccgaaagttagtggtgaacagctagtagcaatt

SEQ ID NO: 35098 - DNA, 322 bp, Gossypium hirsutum
  Clone ID: LIB3149-047-Q1-K1-B3
tccctccaaagctccaattcaccgccaaccatgccttcacacaagacattcatgatcaagaagaagttggccaagaagatgaggcagaataggcctatcccttactggatccgtatgcgcactgataacaccatcaggtacaatgcgaagcgtaggcattggcgccgcaccaagctagggttctaagcaccatgagcttatttgggttcaagcttttcttttttcccaagtttatttgcagacattttgatgtggggtttaatataggaaactaccaaggatgaaggattcttaaattaaagattttgatgagatttttggc

SEQ ID NO: 35099 - DNA, 341 bp, Gossypium hirsutum
  Clone ID: LIB3149-047-Q1-K1-B4
gtgaaaagagaaagcttatagttgaaatactagtcagaatgtgttgattttttatgtataagagtagaaaaactcgttagtgttcatagacattggacatttatttgatatcttttcataagcttcgatacgaagtaagttttcctaaaaaaaaaaagaatctgaccaaaatacaacacaaaaataataagagaatggaaaaataaatgcaaaaccctattgagtacgaaaagaaaagagaaaaaggttaataacaaaaggggggggcccttttaaagaccccaggtttacctaccggccatctcgaagtattagctcttattagggacacctaagtccat

SEQ ID NO: 35100 - DNA, 424 bp, Gossypium hirsutum
  Clone ID: LIB3149-047-Q1-K1-B5
atcaaaccctaatattttgttcctttatttgagaattcttctcttcttctatcatcaggtgtctcctaccatcgtccatgtcttctctctctcgtctctgcaaatcaattgtgtttttcttcccttctcccaccgccgtgtccgctggtttttcctggatctgacccgtatccgacacggaaattatggtgtctggtttaataaatgcaaaccctattgtgtacgagaagaaagagcggcgggttcgtaacgaagcagctgtacctgatgaatacgctgttgaacctattgaccaactagaaatatttgatcatattagagatataaaggaccctgaacatccctattctttggaagagcttaaagtaataactgaagatgctattgaagttgataacgagcgaagttatgttagggtcacatt

SEQ ID NO: 35101 - DNA, 200 bp, Gossypium hirsutum
  Clone ID: LIB3149-047-Q1-K1-B6
gggttttctgcaagatgtcacctgcatactgtttctaggtttgtagagagttgaacgtatggtatttgcctttagaagaactgttctgttatgaatcttcccttcttctcagactttgtcaaaagaataagatattatgtaatgaatacaagaatgccccattcgtaaccctgccgaataatttggattattatgttgtt

SEQ ID NO: 35102 - DNA, 423 bp, Gossypium hirsutum
  Clone ID: LIB3149-047-Q1-K1-B7
gtaaaatagacgtatattgggacctttcttcagctaaattcggatccgggcctgaacctttccaagggttttatgttggtgttgttgctaataagcaaatggttttgcttcttggggacatgagtaaagaagcttgtaagaaaactggtgcaactcatatcccttgtaatgccagtttagtggctaagaaagagcttgtttttgggaagagggtatttggtaccaaggcgcagttttgcgataatggtcgaattcatgatctgataattgaatgtgacgcggtttgtatgaacgatccttgccttataattcgtgtggatggaaaggctttgatgcaagtgaagcggctgcggtggaagttcagagggaaccataccattttggtcgatggaatggctgtagaagtttactgggatgtgcata

SEQ ID NO: 35103 - DNA, 379 bp, Gossypium hirsutum
  unsure (1)..(379): unsure at all n locations; Clone ID: LIB3149-047-Q1-K1-B8
gtaaaatatacttatattttgacctttttttatctaaattcggatccgatcctgtacatgggcatttgtttaatggtgaggaggcctctaataancaaatggtcttacttctcgttgacatgagtaaacaaacttgtaatataactgatgcaactcatatcccttgtaatgccatcttagtggctaataaagagcttgtttctcaaaataagttatttgttaccaatgcacagttctgctataattatcgaattcatgatctgataattgaatgtgactcgttcttatttgaactatccttgccttataattcatgtcgatggaaattcttttatacaactgaatctgttgcttattaagtccaaatttaaccttacca

SEQ ID NO: 35104 - DNA, 375 bp, Gossypium hirsutum
  Clone ID: LIB3149-047-Q1-K1-C1
gcaggagataaaatatatgattaaaaagaagaagaagaagaatgaataaggattttgggatggaattttcaaaatccaaaatgagtctccactttagtgtagtgaggctttgtttattttgttttatgttttggtccctgcatgttggctctaattttatatcctctatgtattggctattttaatgttttaatgaattaaagtttatgctttgtcaatcaaaaaaaaaaaaaaaaaaaaaaaaaaaaaaaaaaaaaaaaaaaaaaaaaaaaatataaaaaataaaaaaataaaaaaaaaaaacatacaaaataataaattataatataataaaaactaaatttaatttaatttttcttgggggggcccctttta

SEQ ID NO: 35105 - DNA, 210 bp, Gossypium hirsutum
  unsure (1)..(210): unsure at all n locations; Clone ID: LIB3149-047-Q1-K1-C10
gtttattgctattctataggcaataaacacattcatnagggggggcaaatctagaaagaggatccatnnccaaagatttgaaggaaccttgaaggaaattttgggaacttgtgtgtgcctcggtgttcggttgatgggaaagaccctaaagacctgcaggaggaaatctctgaaagggaaatcgatgttcccttggaatgaaaaacaaag

SEQ ID NO: 35106 - DNA, 284 bp, Gossypium hirsutum
  unsure (1)..(284): unsure at all n locations; Clone ID: LIB3149-047-Q1-K1-C11
gatgacggttcaaacatagaagcatttgatgccaacactggagttgatgcgcggtgtggctgggaaggatatangatggttaagatctattacaaacttgccagttctgctcaagggagtacttactcatgaagatgcaataaaggctgttgaagtaggggttgatgggattgttgtctcaaatcatggagctcgccagctagattatgctccacccactatttctgttctagaagaggtggttagtgcagttaaaggaaagattcctgttttatttgatggag

SEQ ID NO: 35107 - DNA, 286 bp, Gossypium hirsutum
  unsure (1)..(286): unsure at all n locations; Clone ID: LIB3149-047-Q1-K1-C12
ctaaaacaatattgtacttcagcagtagactaactttngggagtcaccatagaggttggaggtctaattacaanatcaaaaaaatatcgaattaaattttattgagtctactttctcatagaagaaatggtgtaagcaatggatttgtaaatttcgagatataatgaattttgtgagacaaggtcagaatgatttctggttcccctgttctgactttgaaaaatcataaaaaattgaagaaaaataattatgggattaaatttatatttataaaatcctgaatgag

SEQ ID NO: 35108 - DNA, 421 bp, Gossypium hirsutum
  Clone ID: LIB3149-047-Q1-K1-C2
tcctccaccaggggagtatgagagaggactttttgctcatactgataaaccagtcagtacacttatttgtgaggatcaagtttcaggattggaaattgaggtcaacgacggccaatggatcaagttgaccaatctatctccttcttcttttgtttttatagttggagatcctctcaaggcatggagtaatgggaggttgaaatcagtaaatcacagagtgatgatgagcggagacaaagatcgatactctatagcagcctttgtcattccaaatgagggtactataatcaggacacccgaagagcttatagatgaccaacatcctcggcttttcaaggacttcgatttcatggatttcttcctttttgccttttccgacccagcaaagcacatcgacaacggtgagttgctccatgtcttt

SEQ ID NO: 35109 - DNA, 409 bp, Gossypium hirsutum
  Clone ID: LIB3149-047-Q1-K1-C3
gaacattaaaacatagcccaactcttcgttttcttcaagcggaaaacagaaaactgaggctttcccttctcaaatggcaccgagggagaaaacggcggccgtcaagggtactgggaataataacgaggttcatttcagaggagtaaggaagcgtccatgggggcgttacgctgctgagatcagagatccagggaagaagagccgtgtttggctaggaacctttgatacggccgaggaagcagccagagcctacgacgccgccgctagggaatttcgcggcgccaaggccaagactaattttccggtcccttgtgagaatctcagcaaaggtaataactgtaaaagtaatggtaacaacaaccaccatagccctagccagagtagcaccgtggaatcctcgagccgtgag

SEQ ID NO: 35110 - DNA, 332 bp, Gossypium hirsutum
  Clone ID: LIB3149-047-Q1-K1-C5
acctgtttcttccaagtgctgaatattccaaccaagattaacaagggtactgtctaaaggatcacccctgtcgagcttatggagaaaggcgtaaaggttggttcttctgaggctgcacttcttgccaagctaggaatcaagcccttctcatacggtcttgtcgtcctatctgcttacgacaatggctcagtctttagccctgaggtcctggatctcactgacgaagatctgattgagaaatttgctaccggtgtctccatggtcaccgcattgtctcttgccatctcatacccaactcttgctgcttcaccacacatgttcatcaatgcata

SEQ ID NO: 35111 - DNA, 322 bp, Gossypium hirsutum
  unsure (1)..(322): unsure at all n locations; Clone ID: LIB3149-047-Q1-K1-C6
aatatccaaactttcttacccgttttttctacaacataactcctctcttntaccgaagaatttctattaatctaaaagagagctttacaacantctaacttttaaaaccctttcatcacccaacttaattccctttcaacacatccccctttctccaactttcttaatatcaaagaaacccccaccaatcacccttcccaacaattacacaaccttaataaccaataatacacccccttttatctctcattaaactcatctaatagttataattacacacatcttaaccactacactttccacctccctaacaccccctcct

SEQ ID NO: 35112 - DNA, 256 bp, Gossypium hirsutum
  Clone ID: LIB3149-047-Q1-K1-C7
gctaaacaggcccctagctggccctctctttcttgcaacttgctgcccttcctaagccggcgcatggattttatgcccgggccgtctctaaacaacatcccgactcactcctccggggcctcaccccaccatcttgaactacatccgattccccttatacctcctggcctgcctgctaatataccaagaccgatcatgcttcataacacgatgcgcattgctatccgctgaacagtactcccagtttcatccatct

SEQ ID NO: 35113 - DNA, 292 bp, Gossypium hirsutum
  Clone ID: LIB3149-047-Q1-K1-C9
aaaataaaaaaaattttttataaaaaaaaaaaaaaaaaaagaaggatataaggagagatagaggaaaaaaaaaaaaaaaaaaaaaaaaaaaaaaaaaaaaaaaaaaaatgctttaatttttaatgagtttcttttttttgtccccttattttacatccctttaattttattttatatttcctttttttaaacttactttacttttaatttatttaccgtttctttgaaaaaacttcttttttaaaaaattttttttatcctagctttatttactttttttaacatttttatt

SEQ ID NO: 35114 - DNA, 418 bp, Gossypium hirsutum
  unsure (1)..(418): unsure at all n locations; Clone ID: LIB3149-047-Q1-K1-D1
aagcagactggcaggaagctggcgttgagtataatgagtccatggatggtaatgaagaagcctctgacaggcaccatgaagatggaggcttgcgcgggactgcacaggattggatggaagagtcttacaatcaagaacctgttactatcagaagaacagatacattttattttcctgatgatgataatgtacacagcatggaactgagggaactgttaagcaggagaagtgtgtctactcttcttcatagtggtttccgtgagagtcttgaccagttgatacaatcatacgtggaaaggcaaaatcatgctcctgttgactgggagttggaaggaacatctccttctcctgcatctcttgagcaagacctagaacagcaaagtggggatcagaatgatggccacggngatgctgagac

SEQ ID NO: 35115 - DNA, 181 bp, Gossypium hirsutum
  unsure (1)..(181): unsure at all n locations; Clone ID: LIB3149-047-Q1-K1-D10
tgcctattcttatcttattatcttccatttctatnataaaggtgaggaatccaaggtaggtgtcttcttcccttgatcctnctattccatacaaataacattttttctcatttgcccacatttttgcatattttaatgacactttcattcatatcacttttttatctggaagataaacttt

SEQ ID NO: 35116 - DNA, 60 bp, Gossypium hirsutum
  Clone ID: LIB3149-047-Q1-K1-D11
aaaaaaaaaaaaaataaaaaaaaaaaaaaaaaaaaaaaaagaaggaaaaaaaggaggaag

SEQ ID NO: 35117 - DNA, 396 bp, Gossypium hirsutum
  unsure (1)..(396): unsure at all n locations; Clone ID: LIB3149-047-Q1-K1-D12
ttcttccctctcttcctccctttctccctttttttttccttctctccttcatcctactgtaggccttntcctttttgtttgtttccnctccctcccccctcccttttcttctttttcccttttctttctttcctcctttcttttccttttatattctctctctttttttttttttttttctttcatcttcatttttttcctcttcccttcttttttttctcctttttctcctttcttttattatctcccttctttccctttttttctttttcctcttcttttctttcttttctctttttttttccttctcttttttctctcttcccctttttctctttattttcccctcttttttttcctttttcctcctttctctttttcctctttcctcctccc

SEQ ID NO: 35118 - DNA, 371 bp, Gossypium hirsutum
  unsure (1)..(371): unsure at all n locations; Clone ID: LIB3149-047-Q1-K1-D2
aaagcagactgtcatgaagctaaccttgagttttttgagtccatggatggtaatgaacaagagtctntctttcaccatgaagagagagtcttnctcatcacttcacaccattaaatggaatattcttacaatcaacaacctattactatcagaagaacagatacattttattttcctgattattataatgtacacagcatggaactgatggaactgttaaccatgagaaatgtgtctactcttcttcatacaggtttccatgagagccttgaccatatgtttcattcatacgtggaaatacaaaatcatgctcctgtttactagaagtttaaaagaacatctacttctactgcatctcttgaacaaaacct

SEQ ID NO: 35119 - DNA, 417 bp, Gossypium hirsutum
  Clone ID: LIB3149-047-Q1-K1-D3
aagaaaactccatggctaaacttgttgctactttcttcttggctctcattgccatctccatggttcaaactttggttatggcatcacatggacatggtggtcaccattatgataacaaacgttatggacctggaagtctcaagccttaccaatgtccatctcagtgcacaaggaggtgtagccagacacagtaccataaaccatgcatgttcttctgtcagaaatgttgcaggacatgcctttgtgttcctccagggtattatgggaacaaacaagtttgcccttgctacaacaactggaaaaccaaggaaggaggccccaaatgcccttaaattactcaaaagaagacccttttttttcttttttacattattatccctataaatttcctatttgaaattcaagtcattgaagcat

SEQ ID NO: 35120 - DNA, 392 bp, Gossypium hirsutum
  Clone ID: LIB3149-047-Q1-K1-D4
aaaagaaacttaccaggattcccctagtaacgacgacgctccggcgacaccaggtaagcccgctttctctccctgctcgttgattttggctgtttggttaaaaaagaagcagatgaaatgaacagggtacatgaaataaaaacagtataagaacagagaaagaaaacaatatcccaccttcaaaaatgtttcttttcgcctattatctttttgatttcggtataaaaattctgctaaccccatttactaaaatccaattggctgtaatagccgagataagggaatcaaaactcccaaatactactgtcttttttcctttgttcccttgtatttactgctattatctgtgttcgtggtcacgatctgttgcatgtgtgggcgttggagatcgt

SEQ ID NO: 35121 - DNA, 424 bp, Gossypium hirsutum
  Clone ID: LIB3149-047-Q1-K1-D5
ctttgaggggcttgaagttcatgcaaagggcagctcagagagaggagaaagtgaaaaaggaagaagaggttaaacctgaagggattagtactattactagaaaatgtgtggtgattatagaaggggatcctcgtcctggagcaactgttgggcggatgtcatttcgaagtttcaatccttctattgataaactgaatgaagaagcatcaaatgtgtctcagccggatgcctctggtggaagaactttgtctagtgaaaatggatctgcatctgaagcaactcactcaaaagttggcactgataaacacgaaggtaatggagaccttaagagaaaacaatctgtcatggtttctgaaccagagtatccaaataaatcaccaaaaaatggttatggcattcaatctacccctagcagcggtaaagc

SEQ ID NO: 35122 - DNA, 422 bp, Gossypium hirsutum
  Clone ID: LIB3149-047-Q1-K1-D6
acgatggtcaatctgggaagccctgttcaaatagctctatccgttctagaagttcaggtcaaaatggggatagctatgctgggaattcgcctgatctgcttccacccacaaatcggttatctggtcaaactgctgttaaagatgactcatggtctaacagggtgaaaaagagagagttattgttggaggatgtagttggtggtacttctttgtcaagcaatgcaaaaggtaagaggagtgagagagacagagaaggaaagggacatggtagagaggttttatctagaaatgggactaataagattgggcgaccagtgtccaatgttaaggggggaaggaaatcaaaagcaaagcctaagcagaaaactactcaactatctgtttctgtaaatggccttcttgagaagatgcctgagcaaccc

SEQ ID NO: 35123 - DNA, 419 bp, Gossypium hirsutum
  Clone ID: LIB3149-047-Q1-K1-D7
atcatatagttgatgtcaatagttgcggattgggttcaaggtcattcagaatgctttaattgtgctatctcacaaaggatgttgatggaattgtggatgcgctggcgaaagaggaaatgtattttccttctattttgagccaggaggtgaaatttcaattttatttgttgtctttgtttgctggttttgtgttttagggaggcgtttaaagcaaaactaatacattaataaggagggattgcagatgcgctggcgaaagatggaatgtatttactggttctattctgagcccggtggtagaatttcggctttatctgttagctctgtttgctagttgcgttttggcgaggcatttttcttgtatcttgcttcgagattttgtcttagttgtattttgtgtttttgttttcttttacttc

SEQ ID NO: 35124 - DNA, 232 bp, Gossypium hirsutum
  Clone ID: LIB3149-047-Q1-K1-D8
cccacgcgtccgggtaggctcagaggacaagctgctgccactgctgccaaggccgataaggcttaataggatactactagttgttttggcgtttatattgacatcaatgactgttaaagcacatttaagctagaaattttgtttgaaatttcagatatggtactgttttggagtttggatgacggttgtttatgttttgagtttgggtttttatgtgaaagtgttttatgcc

SEQ ID NO: 35125 - DNA, 286 bp, Gossypium hirsutum
  Clone ID: LIB3149-047-Q1-K1-D9
cccactcgtccgggctaaccctgatggtcgtaagataccgcggctcatcgggggggggattgctaactacactgatgtcgctgctcctttcaacggaatcattcgatcattgagagaaaaggaagccaatttaaaagcagcacgaatgcacatctatgttccaagaggtggcccaaactatcaaactggtttggcatggatgcgtgctcttggggaggaactaggagtaccccttgaggtttacgggcctgatgccacgatgactggcatatgcaagcaagctata

SEQ ID NO: 35126 - DNA, 419 bp, Gossypium hirsutum
  Clone ID: LIB3149-047-Q1-K1-E1
tgtgtagccaaacgctcccttactttgattctatcgtcgattcaaagcagctttcttatcgatggcgtctacatttttggcactacccaaaaccttcacttcaaacaagcctaccttcccttctctttcaacccacaaacttctcgggactcgaagaaattcacttagaatcaatgctgtggccactaaatgggaacccaccaaggttgttcctcaagctgacagagttcttatccgtctccaagaattacctgagaaatcagctggtggagttttgttgcccaaatcagctgtcaagtttgagaggtacctgatgggggagatagtttcggtcggtgccgaagtaaaacgtggaaactggaaagaaggttcttttctcagatataaatgcttatgaggtggatttgggaacagatact

SEQ ID NO: 35127 - DNA, 279 bp, Gossypium hirsutum
  unsure (1)..(279): unsure at all n locations; Clone ID: LIB3149-047-Q1-K1-E10
atcctattcttctcctctgccgccagcttttttcccgcaggggcatgaagatcggtgggaaangcnnatgccacacttctcatatctactccatccgtcaaagcattgctaaggccctcgtctctttctaccagaagtacgtcgatgagcaaagcaagaaggagattaaggatatcttagtcgggtacgataggactttgctggtggctgatccgaggaggtgcgagcccaataaattcggtggaagatgtgctagggcaaggttccagaagagttacc

SEQ ID NO: 35128 - DNA, 204 bp, Gossypium hirsutum
  unsure (1)..(204): unsure at all n locations; Clone ID: LIB3149-047-Q1-K1-E11
gcaggnnaccggnnccggaagtgtcgcgggtgcagacccatcgccgtccgagccttctctagttgttctcncatttcctgtttgattttagcctctggtagggttcctcgagatggtacggctgcgtccncnncttcctcatcnnnttcgtttcttcggtagagtgtagtgtgttttccataaaacccgaagaagcggtaattt

SEQ ID NO: 35129 - DNA, 288 bp, Gossypium hirsutum
  Clone ID: LIB3149-047-Q1-K1-E12
ctctcttgataaacttattacccaatattcatcacatcgtgggggtctatggggggaagtggctaaaacttcattaaacatcatctcccatggttaggtttgatctaaaccacgtttcatcaatattattcatcgcaatgggtacaagaaagctacactgctgctcagaagccaggtcaaaacttcttcaagcatgttttctgccaatgctattggatttacattttctgctaagatgcatataagtactcgacatgaatgcatctgacgaagcaacagatcaatccc

SEQ ID NO: 35130 - DNA, 182 bp, Gossypium hirsutum
  Clone ID: LIB3149-047-Q1-K1-E3
gttggtgttgctttgcatgtcagctgtgggagatcatctctatctggtgctctgtattgtgtgggtgagatgttgatgtagatacagtactttgcaggattaggatttccatgctgctaaaccaaattgttccatgttaaccattatgttaaggacataataaaaccataatgatttaattt

SEQ ID NO: 35131 - DNA, 414 bp, Gossypium hirsutum
  Clone ID: LIB3149-047-Q1-K1-E4
gagagataccttcgcttaagaataggcttctaaagcttcctgactctgacaaaatatccattgcttttcccgatgatggtgcttggaaaagatttcataaacagctgcaacattttccaactattgtttgtaataaagttcggataggggaccaacgaatcgtacgcatcaaagagggagatgctacaggacggcatgtggtgattgttgaagattaggttcaatcaggtggcactctgattgaatgccagaaagtattagcatccaatggagctacaaaaataagtgcatatgtgacgcatggaattttccctaaaagctcgtggcatcgctttgtacatgataatggagggcaacctgagaaagggctaacctatctctggatcactgattcatgccctcacacagtgaaag

SEQ ID NO: 35132 - DNA, 109 bp, Gossypium hirsutum
  Clone ID: LIB3149-047-Q1-K1-E5
gtgggatacccttgcttaagaagcggcttttaaagcatacagactctgacgaaatataggaggcttttcccaatgatggagggattaaactatttctaaaaagtgcaac

SEQ ID NO: 35133 - DNA, 263 bp, Gossypium hirsutum
  Clone ID: LIB3149-047-Q1-K1-E6
acaaagcaagaacaagaaaaccagatcgaaaaatgtcgggaatcatgcacaagatcgaagaggcccttcacatgggagggcagaggaaggaagaagagaagcacaagggagaagctcatcacgaaggcggccatggccatggttatggcgccgctgagcacaagggagaagttcatcacgaaggcggccatggctatggttatggcgccgctgagcacaagggagaagttcatcacgaaggcggccatggctatggcgccgct

SEQ ID NO: 35134 - DNA, 378 bp, Gossypium hirsutum
  Clone ID: LIB3149-047-Q1-K1-E7
aaacagcattggcatcttctgtaggcttgtaattgtaacttcccatatgtcaatatagaagaagctttttcaaagattggaggggatcacaatacacaatgcgcacagattttcaatgtatttgaggattcatacaaatcacccttgatcatcattatccttgatgacatagaaagactactggagtatgttactattgagccccgtttttcaaatttaatttctcacacattgttgtttcttctcaaacgtcttccacctaatgggaaaaaacttcttgtgataaatacaactaattatgtaagttttttaaattcaatttacacttattatactttttatttcacctaccatcttccttcatttaatacatataat

SEQ ID NO: 35135 - DNA, 417 bp, Gossypium hirsutum
  Clone ID: LIB3149-047-Q1-K1-E8
aaacagcattggcagctactgttggcattgacagtgatttcccatatgtcaagatagtctgagctgaatcaatgattggtctgcatgagagtacaaaatgcgcacagattgtcaaggtatttgaggatgcatacaagtcacccttgagcatcattatccttgatgacatagaaaggctactggagtatgttgctattgggccccgtttttcaaatttaatttctcagacattgttggtccttctcaaacgtcttccacctaaggggaaaaaacttctggtgataggtacaactagtgaggtgggtttcttagattcagttggcatttgtgatgctttttctgtcacctaccatcttccttcattgaagacagatgatgcaaagaaggtgttggaacaactgaatgtatttgctgaag

SEQ ID NO: 35136 - DNA, 208 bp, Gossypium hirsutum
  Clone ID: LIB3149-047-Q1-K1-E9
ctttaaaccaatgtttacttttacgatctatcttaatctggtggctttaagggagcggacgtgccttgaactctacatttaatcattacaaaatcttctacaacacaatttcttagtaatcatatcaatttctaattacaatttcaaacatgttcattacacaccgcgaccactatttgactctatcctaataactctctaaatatta

SEQ ID NO: 35137 - DNA, 383 bp, Gossypium hirsutum
  Clone ID: LIB3149-047-Q1-K1-F1
ctcacttgcgggactaatcggcgcgtgctgtcgcgtcacttggctactctggctttacctagtcgtcatgttcctcctcatcgtgctcggcatcgtcttcaccatctttgctttcgcggtgacgaataaaggtgctggagaagctttgtctgggaaagggtacaaggaataccgacttggtgattactccaactggttacagaagagagtcactagccagaagaactggaataagattaagagcttgttggctgatagtaaagtctgtactgatttccacgataagtatctgaatacttctgcctcggagttttcccagacgcatttgtcttccgttcagtctggttgcttgtagccatcaaacgactgccaattcatgtatg

SEQ ID NO: 35138 - DNA, 286 bp, Gossypium hirsutum
  unsure (1)..(286): unsure at all n locations; Clone ID: LIB3149-047-Q1-K1-F10
cgtatctggttttaattttctttgcatcttccctctcaggtggcttcactgatagggggggtctggatcnttgtactttacatcctaataacagacgaactgaacttaaatttgagcatcattttgattaaaacaaaccaaatgaagaggaaaagatgcattcttttgggtacagattaaatgatttgctaacatttgccgttactattctagcgctaatgttcgccatcacatgtctctcggacaacttcaacactccctctccctctgcagagatcaagattat

SEQ ID NO: 35139 - DNA, 284 bp, Gossypium hirsutum
  Clone ID: LIB3149-047-Q1-K1-F11
aaccttcttcgttttcctccgcggctccatttctccttcgctgaatatcagagggaggatgaacgtggtccccacttacttgctcgccggactcggaggaaacgcttccccttgcgccgatgacttcaaagttcttctcggatcactcggagctgacgctgatgatgataggatagagttgttattatccgaacttaagggcaaacatattactgagctaattgctagtggaaggcagaaggtagcttccggcccttacgctggtggtgctgttgcggttgcct

SEQ ID NO: 35140 - DNA, 286 bp, Gossypium hirsutum
  Clone ID: LIB3149-047-Q1-K1-F12
aaaagatgaagtttttattcaaaaagtatctcaattacagaaagtcctgaggtgatggggcaagaattgaatctgtcaaacagaaggcaatggattacgtagaaagtactctaacttgaagttattgagatttgagactcatctgatcagttgatctggaatatgcgagtacattggcgtagtcgtcgagataacattatttttgcattaaaatagctctagtatagaggaagaaattatatccatagtttcttctaattttttatttgaagagtctcttttaaaa

SEQ ID NO: 35141 - DNA, 420 bp, Gossypium hirsutum
  Clone ID: LIB3149-047-Q1-K1-F2
gatgaaagggaaggaaggagtttgggaagaaatagtgaaggagaaccagttgcagaagacgagtttgcaggaggtgggaaatgtggtggtttacagatgcgatgctttcggctccgttgccgatgccgctgctcagtatgaataagagcaaggagcatgggtttttggggtttaggaattctcagaattcgtttgttacttggattgataagatgaaggcttacaagattgtgccttgatctcattcaatctcttgttccaatttgtctcctgggttttcaaaacttttgttattgtacctctaaaataagcacataaggtaagctattatggcggtggaatgtggaaccgtaagatgttagacacactggctgaccttcaaatgttgtctccctgtatttgtttatgatgcattgtatt

SEQ ID NO: 35142 - DNA, 351 bp, Gossypium hirsutum
  Clone ID: LIB3149-047-Q1-K1-F3
gatttttgttagttgcaccatgttttagtaagttgctgtatgagtatttgaacggaggaaaagggcataaagtcatatgtggtctcaaattggatgcgaagtggggggtatcatgacgatttcagtggatccaaatcatattttatagtatgtaatttatgttctgaaactaaaatttgtaatttgccagcggattttcttggttcaagttcatgagaaaacaggatttcgactcggtatgttatttgttttcctcttaccagaataatcaactattgccgcttattaccgtttgtaacacacgatgattgaaagcagaaggtttaaatactagaggttgtgctccttttc

SEQ ID NO: 35143 - DNA, 423 bp, Gossypium hirsutum
  Clone ID: LIB3149-047-Q1-K1-F4
aattttctcccttactaacaacaaaaaccctgaaatgtcggacgacgatcatcatttcgaatccaaggctgatgccggcgcctccaaaacctatcctcagcaagccggtactatccgtaagaacggctatatcgtcattaaaggccgtccctgcaaggttgtggaagtttccacctccaagacggggaagcacggtcatgctaagtgtcacttcgttgggatcgatatcttcactggcaagaagttggaagatattgttccctcctcccataactgtgatgttccgcatgtcaatcgtactgactaccaattgattgacatttctgaggatggatttgtgagcttgctgactgatagtggtgatactaaggacgatctcaggctcccaactgatgagaacttgttgaaacagatcaaggatgg

SEQ ID NO: 35144 - DNA, 391 bp, Gossypium hirsutum
  Clone ID: LIB3149-047-Q1-K1-F5
cttcctcggtctctccggcctcgccaccgatgctcaaaccttgtatcaaaggcttgtctttcggcacaaactgtatcagctaagagaagaaagagacatgaaacctgagacttttgctaaccttgtttctgcgattctttacgagaaaaggtttggtccatacttctgccaacctgtaattgctggattaggagatgaagacaagcccttcatttgcaccatggattccatcggagccaaggagcttgcgaaagattttgttgtagctggcactgcctcggagtctctctatggtgcctgtgaatcaatgttcaaggagggcatggaacctgaggaattgtttgagacggtttcccaagctctcctttcatcagtagatcgcgactgtctg

SEQ ID NO: 35145 - DNA, 286 bp, Gossypium hirsutum
  Clone ID: LIB3149-047-Q1-K1-F6
ctcccttcatctcatctaaaccctttttataccacacaaccatcctcatttctaaaagacctctttaaacaggacgagaacctcctatccccacctaaccattactatccgaaagatcaactttatcaccattcaatacccctcctccatcacctaacaagtttccaccttccaatacctataaacacaatcattccaacaatcactttcatttcaaccacatcctcactaacaataatttaatcaatactgttcactcctaccataactttattatttcctcata

SEQ ID NO: 35146 - DNA, 421 bp, Gossypium hirsutum
  Clone ID: LIB3149-047-Q1-K1-F7
cccacgcgtccgtatgatctgtgtggttacaaaagggaatttaagctaactttcatctgagcaggttgctatgcctgatggggtccctttagctccttttgtcaattttcttcttgttctaagctgcattgcctataacctcggaaccagcagtggtacatctgtgcttgaaatagttgttgcttttgagaaagcttctggaaagaaaatccccattaaactatgccctagaaggctaggagatgctacagctgtttatgcttccactgaaaaagctgaaaaagaacttggttgcaaagcaaaatatggtatagcagagatgtgcagagatcagtggaagtgggcaagcaacaatcatggggataccagtcaaagacttaggctttaactaaatactaattttcttccccagtcttttaaa

SEQ ID NO: 35147 - DNA, 411 bp, Gossypium hirsutum
  Clone ID: LIB3149-047-Q1-K1-F8
cttcactctccctatgtcttgaagaaatggatcgtagaagtgcatttgccattgctgggatttgctttgtagtgaccggggtcgatgatcaatctccgtcagcctcacctactaaagctccggcggcagcgactactcctgccactgctcccgctactgcccctgtttgcaaacctaaatcaccggctccaactgctgcccctaccacttccccaccaacttcttcaccaccggctgcggctccgaagaagtctgcagctgttccaaccccatctaaatctgctccggcttcttctcctgcggctgctgctccggtaagttctccaccggctccagtacctgtgagctctcctccagccaaatcgcctaccgttgatgcaccgacgacttcaccacagagctcggcctctc

SEQ ID NO: 35148 - DNA, 284 bp, Gossypium hirsutum
  unsure (1)..(284): unsure at all n locations; Clone ID: LIB3149-047-Q1-K1-F9
gctaaagttgtttctatcaatgattatgaggattttccggtgggtgaccagaaggcggtgagaaaggcantcgctaatcaaccggtgagcgttgccattgaggcaggaggaaggagtttccagttatatcaatcaggtatatttgatggaaaatgtggaacacaactagaccacggtgtcactgctgttggatatggcacagagaaaggtaaagactatcggattgtaaagaactcatggggaagcagctgggcagaagcaggctatctcaggatggcatggaa

SEQ ID NO: 35149 - DNA, 420 bp, Gossypium hirsutum
  Clone ID: LIB3149-047-Q1-K1-G1
cagggaaccatcccaactgaacttgggaacttgaagagcctcattagtttggacctatatgacaacaacatctcagggaccatgcctccttcactagggaaattgaagtctcttgtatttttacagcttaatgacaacaaattaactggacctatccctagggaacttgtcggtatttcaagcctcaaagttgttgatgtctcaaacaatgacttgtgtggaacgattcctaccagtggaccgtttgagcacattcctttgaacaactttgagaaaaatccccgactggaaggtcctgagctgctggggcttgcaagctatgacacaaactgctcgtaaagggcatgttgacgctataaagctttgaattagatatgaatccgcatgaagtaatatgtaaatctgtataccagctcgact

SEQ ID NO: 35150 - DNA, 246 bp, Gossypium hirsutum
  Clone ID: LIB3149-047-Q1-K1-G10
gtttgctttgtatattgaagtttcctttctccattttctgtggatccaaacaagaggggggtcttcattaatactcttaccgtcctgacgatcactctccaggtctaaagctccaatacgatcgacatcgtgacagccaaaatccaaaataatgaatgcatccctccagaccaacatcgtctgatcttctcccgttaacagctagtatactggcggaccttggccgattacaacatccataaggag

SEQ ID NO: 35151 - DNA, 285 bp, Gossypium hirsutum
  Clone ID: LIB3149-047-Q1-K1-G11
aacagatcggagcatatcctgatgttgaaaaggctaagggcagccaaggagtccgacggggaaaaggaaaaatgaggaatcggaggtacatttcccgtaaaggtcctttgattgtttacggaactgagggagctaagcttgttaaagccttccgtaacattcctggagtggaggttgccaacgtggagaggcttaatctgttgaaactggcacctggtggtcaccttggaaggttcattatttggaccaaatcggcttacgagaagctggatacgatttacgggt

SEQ ID NO: 35152 - DNA, 416 bp, Gossypium hirsutum
  Clone ID: LIB3149-047-Q1-K1-G2
aaaagatgcagatattcgtgaaaaccctaaccggcaagaccataactctcgaggtcgagagcagcgataccattgacaacgtgaaagccaagatccaagacaaagaaggaatcccaccggaccaacaacgtctcatcttcgccggaaaacagctcgaagatggccgtaccttggctgactacaacatccagaaagaatcaacacttcatcttgttctgaggttgagaggtggaattatcgagccttctttgatggctttggctcgcaaatacaaccaagacaagatgatttgccgcaagtgttatgctcgtcttcatccaagagccgtgaactgccgcaagaagaagtgtggtcacagcaatcagttgaggccgaagaagaagatcaagtagatactgactggtgttatcctgtct

SEQ ID NO: 35153 - DNA, 422 bp, Gossypium hirsutum
  Clone ID: LIB3149-047-Q1-K1-G3
gtggactccagtcgtaactgccggctacttgtacatcccgcatcgtaacctccatggctgcgatttctgtgcaataagctttgacaaagctcactacttcattgacttgttcgcgggccccttcatggtaaattttgttccgattataccaaatagcccaataggcaataactctaattttacattcttcattgttcagactattgaactccatatctaaccactttttccaatttggttcactattgtgtgatgatactgtcccccccaaccccttcaagacctgctgtgaaaagagacaatctttgaataggtggctaacagtttcctcctctgcttgacaaaccggacataaagttttgctgccaactttcgaagttttagattatataaagtagggatgtagttattagctattttcc

SEQ ID NO: 35154 - DNA, 342 bp, Gossypium hirsutum
  Clone ID: LIB3149-047-Q1-K1-G5
cccgctccaccaactggagctcctggacctagcctcgatgcttcctctcccggtccatctgtcgctgccgatgagagtggagcagcggcaatgaagaacatgaagaagataattggagggttggcgttgggatgggcagccattgctttgagcttctagattggttttgatcacattccacattctgcgttctaattctttggttggtgtactgagaggcggaaactctagtttttttttcctatgtaatttccaccattcttttttttttccccttcatttacccattttctgtcttttatttctctattatattttaataaaatcacaatttattttact

SEQ ID NO: 35155 - DNA, 364 bp, Gossypium hirsutum
  Clone ID: LIB3149-047-Q1-K1-G7
gtccgagaaggcatgaagcagaggatggtaatgctccagaagagtcaaagaagaagggaaagaaagaaaagaaagaaaagaaggaaaagaaggatgatggaacggaccaccctgatccagagattgctgaagccaacaggattcgagcatccctaggtttgaaaccattgaaattgtaagcatggtagatgttatatgcggcaagattaactattatatcatatgaaggtacattggtgttgttttggtatgtattgttaatacaaaagctatgcgggagttggaatcagatgatgatggccatcttactaatatttttctcgttactatttgtctatgttagtatatttgtgcttagagcatc

SEQ ID NO: 35156 - DNA, 416 bp, Gossypium hirsutum
  Clone ID: LIB3149-047-Q1-K1-G8
cccacgcgtccgaaaggaacagagcagcagctgcagccatggttctcaagacggagctttgccgatttagtggtgccaagatataccctgggaaaggcatcagatttgttcgtggagattctcaggttttcctcttttccaattcgaaatgcaagaggtacttccacaaccgtttgaagccttcaaaacttacatggacagccatgtataggaagcagcataagaaggatattgcccaagaggccgtgaagaagagaagacgtgcagccaagaagccttactcccgatccattgttggtgccaccttagaggttatccagaagaagagaagtgagaaacccgaagtccgtgatgctgccagggaagctgctctccgagaaatcaaggaaagaatcaagaaaactaatgatgaaaag

SEQ ID NO: 35157 - DNA, 280 bp, Gossypium hirsutum
  Clone ID: LIB3149-047-Q1-K1-G9
ctccaaaaaaaattcctaatttttcatcttttggagcttacaccacataagctgatctgggttttttcccctctgtttctcattcagatcatagttaaaaaaataaaaaagaagcttccgttttgttctttaatggctttcacatttgaaaaaaaaatccattgaaagaaagagcaaaaaacccaactttttttattggggatttagttgcttcattgatttatacaatgggatttgtttcaaagatgcagattattgatctatatttcaagaaaatgta

SEQ ID NO: 35158 - DNA, 414 bp, Gossypium hirsutum
  Clone ID: LIB3149-047-Q1-K1-H1
ggaaatcacaaatcccatttctcttccttacatcttttctttccttttcaacaattgcatctgttgcttttgatcccaaattctgggtttcctcttctgtccatcaatcaattcatactagttactcgaaatcgttaattttaagttgaagaaaaatgggcggtggtagggaaggtgaatcaagtgacaaagggctgttttctcatcttgctggctatgccgccggacattatcctccgcctggatcctaccctccacaaggatatcctcctcaaggatatcccccacaaggatacccaccggctggatatcctccaccagcgggatatcctcctcatggcggatacccacctgcaggatatcctcctcatggaggataccctcatccacctcatggtggatatccaccagctg

SEQ ID NO: 35159 - DNA, 223 bp, Gossypium hirsutum
  Clone ID: LIB3149-047-Q1-K1-H11
atctaattaaactttttttgactttctattaaatttatggtggtcaatggatgcagggagggcattgatattattccttcaagaatgacgttatctatcatattaaataactgtgatcaaagctgccaaaactataaattcttccaatttgcaatcaaaattcgtacttaatcctgttctctttactaattctatattttactaaacatccacctataaacat

SEQ ID NO: 35160 - DNA, 238 bp, Gossypium hirsutum
  Clone ID: LIB3149-047-Q1-K1-H12
ccctctcttccgccctctcgtccgacaagttgtaatttagtgagctttctagtatgttggagctttaagatttcatagttttttcccttaacctttttactattgttatttgtgttattgaatgtctgtgatatgctcttgaaatttggaaaagaagaatgttcgtttgagtgaataaatctttgggtgaataaatttgattatatgtttctgtaatttaaattttataaattttttt

SEQ ID NO: 35161 - DNA, 287 bp, Gossypium hirsutum
  Clone ID: LIB3149-047-Q1-K1-H2
acacatatgtcatcactcttttaagaaccaaactttctatttattgaaagtacactgttcataagccattctttatacggcataagatccctaaattctctcttaaatttgatcacgtcttcatatctattgatctttcttatactcaaaacttgaaacttaaactacatccccaattaaaatccttcttctttaccaaaactgtcacgtacaaaatcccctataaaaatgattttgatctacatgacataatttacatttttcgtaccaacactattgcttaaaat

SEQ ID NO: 35162 - DNA, 149 bp, Gossypium hirsutum
  Clone ID: LIB3149-047-Q1-K1-H3
aaaaaaaaaaaaaaaaaaaaaaaaaaaaaaattaaaaaaaaaaaaaaaaaaaaaaaaaaaaaggggggacattataaaagagatcagaggttacatacacttacatacaaaaaaattaactcttctatagtgttacactaaattcaatt

SEQ ID NO: 35163 - DNA, 360 bp, Gossypium hirsutum
  unsure (1)..(360): unsure at all n locations; Clone ID: LIB3149-047-Q1-K1-H5
tcctaaaaatcatcaaatcccatttctcttccttactttttttctttccttttcaacaattgcatcaaagactttttatcccaaattataaagatttcctcttctctccatcaatcaattcatactanttactctaaatcgttaattttaagtttaaaaaaaatagaccctcttattttatgttaatcaagttacaaataactattttctcatcttacttactatacctccatacattatcctcaccctatatcctaccctccacaaagatatcctcctcaattatatcccccaacaaaatacccaccatcttaatatcctccaccatcaatatatcctcctcatatcatatacccacct

SEQ ID NO: 35164 - DNA, 421 bp, Gossypium hirsutum
  Clone ID: LIB3149-047-Q1-K1-H6
catcgctcatcactctttgaggaaccaaacaagctatttattgaaagtacgctgtgaatcgcccaaacatgagccgacatccgatagtgaaatgggctcagagattggatgacgtcttcataactattgagcttcctgatgctcaggacgtgaagcttaaactagatcccgaaggaaaattcttcttctctgccaaaagtggagcggacaaaatcccctatgaagttgatttggatctgcatgacaaagttgacgttgatggaagcaaggctagtgttggaaatagaaatatctgttaccttgtgaaaaaggccgagagcaagtggtggagcagattactgaagcaggaagggagacctcctgtgttcttgaaagttgattgggatcgatgggttgatgaagatgaggacgatgtggacac

SEQ ID NO: 35165 - DNA, 417 bp, Gossypium hirsutum
  Clone ID: LIB3149-047-Q1-K1-H7
gaaaaggatgagatttctgcaattaaagctggtctaagaaaagtgaaaatttttagagagagtgtttctaccaggggagcgaaaaaagcctgtcgtgaggatgaaggcagtgaaggaaggtgttctgccaggagtgatgatggcgagtatccattggacacagattcacttgacgattccgaggaaggagaatcggatgaggtaaaagatgactctgttgtcaggaagtcatttagttatggtactcttgcggatgcaaattatgctggaggatcagtttactctagcatgagggtcagtgagggagatgaggattgggtgtactacagtaatcgtaagtcggatgttggctgctcaaatgtcgaggattctgctaaactggtgtcagagccatccctactgcagagttccaagcgc

SEQ ID NO: 35166 - DNA, 422 bp, Gossypium hirsutum
  Clone ID: LIB3149-047-Q1-K1-H8
acaagttcctgcttgggatccaaattttcaggctaggctgccatatggatcagttcctggtcaaacatatcaatcgttgacagcccctacatacgttaatgtggcaagacctgcaggttcatcacccctttcacaacctggtgcatcttccatgcccatgcagcagcagcagcagccgccatgggctaatgttagacaaggaggtgcagcggagctgggtcagcctccttattacagtcgatgacctgtgtctattctataatgaaattaaatgatcctttgtctatcttatattcctcataaggattcgccaattggatctcttaagttatgactgaaattaaattttttttttttattggattggaagtgttgttttttttagttgttttggaaaccatctccaccattgatgccaaaaa

SEQ ID NO: 35167 - DNA, 285 bp, Gossypium hirsutum
  unsure (1)..(285): unsure at all n locations; Clone ID: LIB3149-047-Q1-K1-H9
ctcctctcaatactcttctcaaatgcatcttgagcatcggttttccgtcctgtcataggtgtatccgataacgtgccaatagagatgctcaagatgcatttgagaagagtattgagaggaggttaaggagaaagatcaagaacagggaatccgctgcacgatcacgagctaggaagcaggcttaccacaatgagctggttaacaaggtttcacgattagaagaggataatctaaagctcanaagagagaaggaatttgatacaaaatctcagtgtgaaacatctg

SEQ ID NO: 35168 - DNA, 365 bp, Gossypium hirsutum
  unsure (1)..(365): unsure at all n locations; Clone ID: LIB3149-048-Q1-K1-A1
gccattgatttcaccaactatacagtcactacctgctcggtaaaaggcgagcagaagatatcctttctcctcagtttgcattcaatagtagtctcaacttgcctccaggaaataaagcttgtaaacttgatccagttctacaagcaaaacatactgtcaaaagcagctcagtcttcacacctgttatcactagtatcattgcaccacaaaagaatattttcgatgatgatgatgatgacatgcctgaatggtgtccaccgaatgtaaagcacacatttcttgaatcagcaatggtagcaagaacttctattcatcctactntatcaaactcaaagttagtatgttcatttcaggtcagccaagtc

SEQ ID NO: 35169 - DNA, 252 bp, Gossypium hirsutum
  Clone ID: LIB3149-048-Q1-K1-A11
ggtttctcttttctcaccaaatggaaagggtgtccttagaaattgggtggtccataaaggcgttgcctttatttgtttgtttggtctcaaagccttaatcctgcagctttgtctctattatggccttcatttacatcttacttattggctaatttgtgggttttagtaaccaattgtcccaataacttttttatttttaatattcattcatacaatcattttaataaaagccttaaaagataatatttcgtg

SEQ ID NO: 35170 - DNA, 338 bp, Gossypium hirsutum
  Clone ID: LIB3149-048-Q1-K1-A2
cccacgcttccggcaccaccagagagaaagttcagtttctggatcggaggatctatcttgggatcagctcatcaccttccagaggatggggatttccaagggtgagtatgatgagtcgggtccatccattgtccacaggaagtgcttctaaatttacaagtcatttaatggtgagttacattttctgttacttggcttttcgtgtcgcgtgtcaagtgaactcaaggtcgggttgatgtgggaaatggattattgaaagagggttgtactttgatcttgatgtaatattagcctttcattctgctgtgattcgtgatgcccgcttgtgtcactgtgat

SEQ ID NO: 35171 - DNA, 374 bp, Gossypium hirsutum
  Clone ID: LIB3149-048-Q1-K1-A3
gcgtcatcgtcccgtttttatcaaactcgcaccttggccttaacacgttaatgggttgcatgcacactttgaatgctatgttccttatcctagatacccttcttaatagccttccatttccttggttccggcttgcatatttcgttcaatggagctgtctgtatgttgttttccaatgggttcttcatgcctgcggttttacatggtggccatatcctttcctggagcttaatacgccatgggctcctttatggtactttgccctggccctggttcatatcccctgctatggaatgtatgcacttattgtaaaagcaaaaaaattcgatcctccaaagattgttccttcatgctttggttagatcatactagtt

SEQ ID NO: 35172 - DNA, 246 bp, Gossypium hirsutum
  Clone ID: LIB3149-048-Q1-K1-A4
gtttaatgtcattgttattttggttttggtttaatgtgtaaaaggtttttatacttttttgtaaattaaaagtttagatcttgtacaaatttcgctttaaaggatatatcttttattttattttaaaaaaaaaaaaaaaaaaaaaaaaaaaaaaaaaaaaaaaaaaaaaaaaaaaaaaaaaaaaaaaaaaaaaaaaaaaaaaaaaaaaaaaaaaaaaaaaaagaattaatttttaaaatatttaaa

SEQ ID NO: 35173 - DNA, 388 bp, Gossypium hirsutum
  Clone ID: LIB3149-048-Q1-K1-A5
ctcaagcatacggtgagccatggtactgggataaccgctatgcccatgaatcagctccttttgattggtaccaaaaataccgtgccttagcatctcttattcacctttatgtgccccaccgccatgaacgcattctcgttgtcggctgtggcaactcagtgtttagtgaagacatggtgaacgatgggtacgaggatgttgttaacgttgatatatcatctgtggttattgaagctatgcaaaccaagtactctaattgtcagcagctaaaatatattaaattggatgtacgagatatgagtccttttcaagctggttcctttgcagcagttattgataaagggacccttgattctatcttgtgtgggaataattctagacagaatgc

SEQ ID NO: 35174 - DNA, 386 bp, Gossypium hirsutum
  Clone ID: LIB3149-048-Q1-K1-A6
agaagataataaagcgtttgtctcagatctcagaagatggcccgtaccaagcaaaccgcccgtaagtcgactggtgggaaggctcctaggaagcaacttgctaccaaggccgcccgtaaatctgccccaaccactggtggtgtgaagaagcctcatcgataccgtcctggaactgttgctcttcgtgaaattcgaaagtaccagaagagtactgagcttcttatcaggaaattgcctttccagaggcttgttcgtgaaattgcccaggatttcaagactgatttgcgtttccagagccatgccgttcttgctcttcaagaagctgcagaagcataccttgtgggtctctttgaagacaccaacctgtgtgcgatccacgccaagcg

SEQ ID NO: 35175 - DNA, 387 bp, Gossypium hirsutum
  Clone ID: LIB3149-048-Q1-K1-A7
caatacaagatcgctgtctccgaggatcatttggatgagatctgcgacgctgttctcgttaagagctcgcagccggagtgcgctgaaatgtcaccgggacgtgaacgtgcacgcgtggtcttgaccaacttcaacggcatttcatccaacacccgttttgccaacgcaatggggttcatggccaacaaggttgaagctggctgtgctgaggtaatgaaggtgtacctggaggaggatgattagagtggcggtctgtgaagtctaatttacttactagtttggcatatatgaatatgaacatgaatacgacatgcgtgctgttttctctgaattctattgaatttctaatataaaatatgcgatttcttctgtcaggatctttgtatt

SEQ ID NO: 35176 - DNA, 172 bp, Gossypium hirsutum
  Clone ID: LIB3149-048-Q1-K1-A8
tctaaatgcagcattgtgtgaatcttctcgcttctacacactttcacactttgagggttacgaatgcaccacatgctgtaaagataccagatgccatgaatcccctatatgagacgaagactaattctcatatatcaccactcgtgagaagctctctcgccatccccaaggt

SEQ ID NO: 35177 - DNA, 363 bp, Gossypium hirsutum
  Clone ID: LIB3149-048-Q1-K1-A9
tatgaatgctggattgggaggatctgctgcagctctcaactctcccaaattgagggttatgaatgtgatgcctaccataacagagaaagataccctgagtgtcatatatgagcgaggattaattgtcatctatcatgactggtgtgaggctctctacacatacccaaggacgtatgatatcattcatgcacatggtctattcagcttgtacaaggacaaatgtaatttggaagatattctataggagattgaccgaattcttcgtccataaggagcggctatattccttgatgaagatgatgttctaattaaagtgaagaagataacagctagtatgaggtgggacactcagatagcggacca

SEQ ID NO: 35178 - DNA, 296 bp, Gossypium hirsutum
  Clone ID: LIB3149-048-Q1-K1-B1
gctcagtctaccaagaataggaagccatggggcagcattaattaccacttgcagaggcttaataggggaaggaagtaatgtgggttttctttaaagatgaatgttgaatttatgcatcattcttctagttcatcacttctagtaagatgatgtgcattaggttgtagctacagagaacattcatttgtattttttttttcttgcggttggttgaaattttggagaaagatgctcaatgtagcttaaaccaattcctgtcacttcaaagagtagcaataaattggattatataccag

SEQ ID NO: 35179 - DNA, 426 bp, Gossypium hirsutum
  unsure (1)..(426): unsure at all n locations; Clone ID: LIB3149-048-Q1-K1-B10
tcagttttcattgaaaaccctagacctcccatcgaagtttcagagccgcagtttctctgtcggtatcctagacaagaaatgggtgtcacattcaacnacctgggttctgctgctggcttgaagaagctggatgagtatctccttactcgcagctacatctctgggtaccaagcttcaaaggatgatattaccgtctacgcagctctatctggtgccccatcgtctagctatgtcaatgtttctcgatggtacaaacacattgatgcccttttgagaatctcaggtgtttctgaagaaggctgtggtgtgactgttgagggatttgctcccgctgaggctgttgccactccttcagttgctgattccaaggctgcagctgctgaggatgacgacgacgatgatgtaaatctgttcggtgaagagact

SEQ ID NO: 35180 - DNA, 253 bp, Gossypium hirsutum
  Clone ID: LIB3149-048-Q1-K1-B11
ggggctcgcctgatagctcttctatagaccgctctgttgtcacccttcgttcctacaatggcgacgtgtgtcagaatctaaaggcaacatatctcacgcttgggcttcctggatcacagcctgctgaaagaaatactagagctatgcttgttaagctctgctcaactagatgagaaacccactttccctttgcatacttcaagtgactgacactgcttttcatctcaaaagactgtgggttcaagccacaaaa

SEQ ID NO: 35181 - DNA, 429 bp, Gossypium hirsutum
  Clone ID: LIB3149-048-Q1-K1-B12
gtttgtgagtgctggagttgagtcacaagccgatggtgggttgaaaacaacagcaaatcttgaagacattgatttgccagatgaaagtgattcggatgaagaaaaagttgaaattgcacaaaaggatgtcccgtctgctgtgtttggaggtattcggaagagggaagatggcgatgacattcaggatggagatgatgcctcggctgccaaagaaaaaggcggtaagagcctactgggtgcacttgagcgaattaaaaggcagaaacaagcttagaaatattacacatccaactcgtactactgagatatatctttgacaattctatgaactaactgtgtaatgtgtacactataagcgaaatttgagtgccgtctattggatcattttgtatatttggatcaaaatcatatccatttcaagttttggaa

SEQ ID NO: 35182 - DNA, 373 bp, Gossypium hirsutum
  Clone ID: LIB3149-048-Q1-K1-B2
cggacgcgtgggcttgggagctatatgtggggctggtgtggttaaagggttcatggggaagacaaggtatggtgctttgggtggtggagctaactctgtgaatcatggctacaccaagggagatgggcttggtgctgaaattgttggtacctttgttcttgtttacactgtgttctcagccactgatgccaagcgcagtgccagagactctcacgtccctattttggcaccattgccaattgggttcgcagtgttcttggtacacttagccaccatcccaatcacaggaactggtattaacccatctcgtagccttggtgcggccatcattttcaacaaggacaagggttgggatgacctttggtttttctgg

SEQ ID NO: 35183 - DNA, 325 bp, Gossypium hirsutum
  Clone ID: LIB3149-048-Q1-K1-B3
gctacttctgatcctcagatttataagaaaggaccggcgttcgggatgccgggtgttcatgtgaatgggatggatgtattgaaagtgagggaagtggctaaggaagcaattggcagagctaggagaggagaaggtccaacattggtggaatgtgagacatataggtttagaggacattcattggctgaccctgatgagcttcgtgaccctgctgagaaagctcactatgctgccagagatcccatcacagcactgaaaaaatacctcattgagaacagtctggccagtgaagcagacttgaaagctatagataaaaagattgatg

SEQ ID NO: 35184 - DNA, 299 bp, Gossypium hirsutum
  Clone ID: LIB3149-048-Q1-K1-B4
gaaaaacgtgccgacaatgtatggttggctgcagaaggtgtttatctccccattaccgaaagtaagtagtatatatgtttaacggatcactacttcagaaaagcaggtacatgggttttttggatttgtaggtggttggtgcctgtttatttagtacctataaccatcttatgaaatcaagtagtatatttgcaggacaattctctgctaagtactttataatgcatgcttatgtaacttgagagttgagactatgtattcatgagtttaattttttcactaaaaagcactttttcctc

SEQ ID NO: 35185 - DNA, 386 bp, Gossypium hirsutum
  Clone ID: LIB3149-048-Q1-K1-B5
cccacgcgtccgcttgttctcttctacattcagcaaaggggggctctgagatcacataccaaaatggtgaaagccgttgccgtccttagcagcaatgaaggtgttagcggaactgttttcttctcccaagaaggagatggtccaactaccgtgactgggaacctttctggtcttaaggccggactccatggcttccatgttcatgcccttggggacataactaacgggtgcatgtcaactggaccccattttaatcctgctggcaaagagcatggtgctcccgaagatgagaaccgccatgctggtgatctaggaaatgtcactgttggtgatgatggctgtgctagcttctccatcaccgacaaacagattccactcataggccc

SEQ ID NO: 35186 - DNA, 387 bp, Gossypium hirsutum
  Clone ID: LIB3149-048-Q1-K1-B6
aatggctgcaacccgggccctctgcaagggagatttccagaaagccttcgacgtcattaattctcttgatgtttggaagctccttaggaatagagagagcgtgcttgaaatgctgaaagctaatatcaaggaagaggctctgaggacttacctttttacctactgttcttcctatgatacactatgcctggaccagctcaccaaaatgtttgacctctcatatgcccagattcatagcatggttagcagaatgtgggtaaagaacaactccatgccagcttggacccagccacacgatgcattatctttcatgatggtgaatactcaaaggttcaagccttggcattccaattgacaaaaaagctttcaatacttgctgagagttat

SEQ ID NO: 35187 - DNA, 387 bp, Gossypium hirsutum
  Clone ID: LIB3149-048-Q1-K1-B7
ctcaaagcaagaagtttttttatttgccattaaacgagaaactgaaagttttgaggaatgaaaacatagaggctacactcccatgtttgatgaggttcttgaccctgacaatcaagtgcatgtttgcgtgcaactatagtatcaagctttttttcccctgttggggtagcaggagactacaaagaggggtattacataggcgtggacgtgcctgaaaatgatcctgaatccgagaagccgtttaatgggcctaatgtttggccggcagatggtgttttgcctggttggaggcagactatggagaaattccatcatgaggcattagaggtgggaaaggcagtttcaaggatcatagcgcttgcacttgatctagaggttgatttcttt

SEQ ID NO: 35188 - DNA, 335 bp, Gossypium hirsutum
  Clone ID: LIB3149-048-Q1-K1-B8
ccaaaaccaacaaggacaatagccctaacaacgcacctttttcatcatctggagcgttagagctagacagccaacaccaccttttgatatcatcttcttcgtcaccaacatcctccatggattgcttcaatttgacaaaaacaagctatcacccccaccagtccgtgaagatggaagaacataatttcttcactgcagaacaagcttgtaatttctttccagatgaacacgctccaagtcttcatcgacattctcctgaacaatggaactgatacgatgctccaagattttcgtgcgatgggattgatgtaagaagctaatacctagtacccatt

SEQ ID NO: 35189 - DNA, 311 bp, Gossypium hirsutum
  Clone ID: LIB3149-048-Q1-K1-B9
actaaatgaaaaatcttactgatctttaattttccttcaccaccacaccctaaccgttacaggtgcggggccttctggaaaagtggcagctcatttccctccactataaacacgaactacagtacctcataaccacctcatcaagataagaaccactaccattcacctgatcgtcaagttattaccatccgcgctcaacgtctaacatgcccagaagcgcatttccaaccatcacacatctatatggaaacttccaacatccatgagactacataccctgctataattatagtgcaacgatgatatcataa

SEQ ID NO: 35190 - DNA, 390 bp, Gossypium hirsutum
  Clone ID: LIB3149-048-Q1-K1-C1
atacaagctacgttggatttatgaaggatggagcagagtggttggttaaacacactgacataaaacttattggaattgattacttatctgttgctgcctttgatgatttgattccatctcatatagttttcctagaagaccgggatatcattcttgtggaaggtttaaaactcgataacgttcaacctggaatatattcagtccattgcttaccattaagattgcttggtgctgaaggatcaccaacaagatgcattctcatcaaatgatgttgttgtccttggcatgttgtttggaaagaggaaatgggcgggtgacattaagggtggtgtttgattggaacaaggcaaataacgggtttatgagttagaacttgacgctgttaggaat

SEQ ID NO: 35191 - DNA, 63 bp, Gossypium hirsutum
  Clone ID: LIB3149-048-Q1-K1-C10
ttgtttgcctcgtggtagctgtattattgggccgggtaaggtcaattgactggcagggggttc

SEQ ID NO: 35192 - DNA, 393 bp, Gossypium hirsutum
  Clone ID: LIB3149-048-Q1-K1-C11
cggacgcgtgggcttgaaatgggctgtccactcctttaggatcactaactgtggtgtccaggacactaggcagatccacacccacatgtgctactccaacttcaatgacattatccactctatcatcgacatggatgccgatgtgatcaccatcgagaactcacgttccgatgagaaactcctgtctgtcttccgcgaaggggtgaagtatggagccggaattggccctggtgtttatgatatccactctccaagaataccatcgaccgaagagatcgccgataggatcaacaagatgcttgcggtgctcgagaccaacatcttgtgggttaaccctgactgtggactcaagactcgcaagtatgcagaggtgaaaccggcactcaacaacat

SEQ ID NO: 35193 - DNA, 323 bp, Gossypium hirsutum
  Clone ID: LIB3149-048-Q1-K1-C12
acggacacattagctttaaatgggctttccattccttttttatcactatctctgctacccaggacactaggcagatttacaacagggtgtgctactccaacttcaatgacattatccactctatcatcgacatgtatgccaatatgatcaccatctagaactaacgttcctatgagaaactactgtctgacttacacgaatgggtgaaatatgcacccagaattgcccctagtgttcatgatatccactcttcaataataccatctacccaaaagatcttctataagatcaacatgatgcttgcggttctcgaaaccaacatc

SEQ ID NO: 35194 - DNA, 344 bp, Gossypium hirsutum
  Clone ID: LIB3149-048-Q1-K1-C2
cagatgtggagatacctgagtttaatgtttcatacaaacctcaaaagatcagtcccaaatttcaatctactgtccggcacttgctgcatcaaaagatacgtgattcatacatgcacccccagtttgtttcagatgtgatgaagcctcttctcattgagcaattaatggatcaggaagtggttaatctctctggaggagagttgcaaagagttgcattatgcttatgtcttggaaagccagcagatatttatctgatagatgaaccaagtgcttatctggactccgagcagcgtattgttgcttctaaagtcataaagaggtttatcctccatgcaaagaaaact

SEQ ID NO: 35195 - DNA, 392 bp, Gossypium hirsutum
  Clone ID: LIB3149-048-Q1-K1-C3
caatacaagatcgctgtctccgaggatcatttggatgagatctgcgacgctgttctcgttaagagctcgcagccggagtgcgctgaaatgtcaccgggacgtgaacgtgcacgcgtggtcttgaccaacttcaacggcatttcatccaacacccgttttgccaacgcaatggggttcatggccaacaaggttgaagctggctgtgctgaggtaatgaaggtgtacctggaggaggatgattagagtggcggtctgtgaagtctaatttacttactagtttggcatatatgaatatgaacatgaatacgacatgcgtgctgttttctctgaattctattgaatttctaatataaaatatgcgatttcttctggcaggatcttggtatttttta

SEQ ID NO: 35196 - DNA, 296 bp, Gossypium hirsutum
  Clone ID: LIB3149-048-Q1-K1-C4
gggaaagaaaatttgctaggagggaagagcgtttggcccagggacctggaggaggagaaaagccagttgcagcacagcctgcggcagctgtgcaatcagccgtgggttccaagaagtcaaagaagtaaaaaaaaaaaaaaaagtaagatttcttactgaagagtactgatcgaacgtgacttttagatatttagtaatgtcttaagtaattttgttgagccaatgttgtgtttttttgggttgatatgaacttttgttcttttaggcggattaagctttaaatgtttattattatt

SEQ ID NO: 35197 - DNA, 374 bp, Gossypium hirsutum
  Clone ID: LIB3149-048-Q1-K1-C5
gtcaaagcagaagttttttatttgcattaaacgagaaactgaaagttttgaggaatgaaaacataagctcactcccatgtttgatgaggtcttgaccctgacaatcaagtgcatgtttgcgtgcactatagtatcaagctttttttcccctgttggggtagcaggagactacaaagaggggtattacataggcgtggacgtgcctgaaaatgatcctgaatccgagaagccgtttaatgggcctaatgtttggccggcagatggtgttttgcctggttggaggcagactatggagaaattccatcatgaggcattagaggtgggaaaggcagtttcaaggatcatagcgcttgcacttgatctaaaggttgatt

SEQ ID NO: 35198 - DNA, 354 bp, Gossypium hirsutum
  Clone ID: LIB3149-048-Q1-K1-C6
cccacgcgtccggcaccaccagagagaaagtacagtgtctggatcggaggatctatcttggcatcactcagcaccttccagcagatgtggatttccaagggtgagtatgatgagtcgggtccatccattgtccacaggaagtgcttctaaatttacaagtcatttaatggtgagttacattttctgttagttggcttttcgtgtcgtgtgtcaagtgaactcaaggtcgggttgatgtgggaaatggattattgaaagagggttgtactttgatcttgatgtaatattagcctttcattctgctgtgatttgtgatgcccgctggtgtcactgtgatagagatgatgggtcttt

SEQ ID NO: 35199 - DNA, 386 bp, Gossypium hirsutum
  Clone ID: LIB3149-048-Q1-K1-C7
ctcaaagcaagaagtttttttatttgccattaaacgagaaactgaaagttttgaggaatgaaaacatagaggctacactcccatgtttgatgaggttcttgaccctgacaatcaagtgcatgtttgcgtgcaactatagtatcaagctttttttcccctgttggggtagcaggagactacaaagaggggtattacataggcgtggacgtgcctgaaaatgatcctgaatccgagaagccgtttaatgggcctaatgtttggccggcagatggtgttttgcctggttggaggcagactatggagaaattccatcatgaggcattagaggtgggaaaggcagtttcaaggatcatagcgcttgcacttgatctagaggttgatttctt

SEQ ID NO: 35200 - DNA, 381 bp, Gossypium hirsutum
  Clone ID: LIB3149-048-Q1-K1-C8
ccaaaaccaacaaggacaatagccctaacaacgcagctttttcatcatctggggtgttagagctagacagccaacaccaccttttgatatcatcttcttcgtcaccaacatcctccatggattgcttcaatttcacaaaaacaagctatcaaccccaccagtacgtgaagatggaagaacataatttcttcactgcagatgaagcttgtaatttcttttcagatgaacaagctccaagtcttcattggtattctcctgaacaatggaactaaaatgaagctccaagatttttgtaagatgggatttatgtaaaaagttaaaaactagtacccattaccatgatcttcagcctgtgatggaagccattattgcaaaaagaaa

SEQ ID NO: 35201 - DNA, 214 bp, Gossypium hirsutum
  Clone ID: LIB3149-048-Q1-K1-C9
gatatatatgatccatccttacacacccttttatacctcatggctgctgttttattttgctgccttagggtaattgattcacagggtgtgctcatctttaagacttttaaaaccatgacattcctcaacttattctcctccatttacatacccttgtttgcatctgtctatatatctaataggcccgcatctatcggccttaccaaattttgac

SEQ ID NO: 35202 - DNA, 391 bp, Gossypium hirsutum
  Clone ID: LIB3149-048-Q1-K1-D1
gggctgtctttcaccaagctattcagccggctatttgccaaaaaggagatgcgtatactgatggttgggcttgatgctgctggtaaaaccaccattctttacaagctgaagttgggagagattgtcactaccattcccaccatcggtttcaatgttgagaccgttgaatacaagaacatcagcttcactgtttgggatgttggtggccaggacaagatccgaccattgtggagacactatttccaaaacatgcaaggacttattttcgtggttgatagcaatgatcgtgaccgtgtggttgaagctagagatgagttgcacaggatgttgaatgaggatgagttgagggatgctgtgcttctagtatttgcaaacaagcaagatcttccaa

SEQ ID NO: 35203 - DNA, 288 bp, Gossypium hirsutum
  Clone ID: LIB3149-048-Q1-K1-D11
aaaaaaaaaaaaaaaaaaaaaaaaaaaaaattttaaaatttaaaaaaaaaaaaaaaaaaaaaaaggaaaaggtaaaatattaaaggtgaaaaaaaaaaaaaaaaaaaaaaaaaaaaaaaaaaaaaaaagataaaattttggggggccctttaatgtttccatgctaacctacccttatttactactttttagtttttctttagtgtccctcaacttaatttcttttacaaattttttataaccttaaaaccttggaaaatccctttcttttacccattttatttaatt

SEQ ID NO: 35204 - DNA, 391 bp, Gossypium hirsutum
  Clone ID: LIB3149-048-Q1-K1-D12
gtctgagatgggcaggacttggcctaatccagtctacccaacaaccatgccctgaaatcctagagcaaagaggatcctatctcgaggcaggtacaccatttatattttataatgcagacaccaaccattctgtactccgcctatccaccgctgtaaacataaacttcactcccatcaagaccaaactctgccgaacaacatccgtgtagaagattgacaattataatgattcacccgataaatggtgcatgacaaccgacggggctagagggaaccctgtctccaacactttgaccagttggtttaaaataaagaatgttggcattatgggttataagtctaagaattgtccttcagtatgtgaatcatgcacaacattatgcagaaaaat

SEQ ID NO: 35205 - DNA, 392 bp, Gossypium hirsutum
  Clone ID: LIB3149-048-Q1-K1-D2
gttaatatactacaagcaaagccatctgagatgccttacgagaaagaggaattgttgaatgctgccgtatgtcgtgttgatgccctagaagcagagctgattgctaccaagcaggcactttacaatgctttgatgagacatgaagaattgcttgctgaaattgaccgtcaagagaaagccaattttctgaaactgcagaaaaagaagttttgctggtgatgcttttgctgctgatggagagcttacaaaaaccactaatctatcgtcaatctgtttccacttcactggttaacatatcaactcctatatcgatctttgggagggtataagtctttaaccaacgtatttgccattccgagtacaaatcattctgcacagaaatgcacaaaaac

SEQ ID NO: 35206 - DNA, 391 bp, Gossypium hirsutum
  Clone ID: LIB3149-048-Q1-K1-D3
cggcggtggagcagtgaaagtggtgtttccaaatgggaacattcagatgtatacgaaatcagtcaaagcggcggatctaatggtggagaatccgggtcagttcgtgtgcgattccggcggtttaaaagtgggttttcgggttcattggttgacggcagatgaagagttggaacggcggcgactttatttccttcttcccatggaattgctttactcggtgctgacggaagaggaaatgagttgcctcagttgtaaggcagataaggcgttgaaacatgcgagctttaatattgggaagattttacctgtttttaatgagttttgcattttcccatttgaagctaagtccccgccgcaaaacgccgtgaacgacggtgcgaaagattccgtc

SEQ ID NO: 35207 - DNA, 210 bp, Gossypium hirsutum
  Clone ID: LIB3149-048-Q1-K1-D4
aaaaaaatatataaaaaaaaaaacatattttttttataaacaaaaaattcttttatcaaacaggacaatttcctattcacttaagggacgatcaaactcactaattacaaaaaaaactttgggccccccctctaaagattccaaattttcctccccttccattcaaatttattactttttttttgggccccctaaatttatttccccttc

SEQ ID NO: 35208 - DNA, 327 bp, Gossypium hirsutum
  Clone ID: LIB3149-048-Q1-K1-D7
gcaaccatggtactcctgggagatccaaattgaggccaaataaatgctatgaaaggcctgataaacctgctgctggggcaaaattctttaactggcattataatatcccttcattcgctgatggctacactcacatttttaatcaggttgcgagaagagcggaacaatggatgcaaggtaccatgcattcctggtcagcattctccatacaacactggccgcattcggaaacccactaacaacagtgcataagtctgttgcttcccattttggacgaaataagatctgtaaatcctcaaattccttaatcagtttccatggatcact

SEQ ID NO: 35209 - DNA, 251 bp, Gossypium hirsutum
  Clone ID: LIB3149-048-Q1-K1-D8
ctaaaaccaaaacagtttgaaggtggaacatctggtaaaccaagggtctattgctcaatctctacgttttccttagtcaagcgcagatttattttttgtatgctttgtatcaaggctttgttcttcaatattaggtggggaaaagggcatactactttcattatgatactgttaactaagttgatgctgatttaattgagtttgagaattttatcatataataaataaaaatattaattatttaataattt

SEQ ID NO: 35210 - DNA, 397 bp, Gossypium hirsutum
  Clone ID: LIB3149-048-Q1-K1-D9
gatacatctgggccatcactgaacatcctcatcaagctaatggctgttgaatctcttgtctgtgctccgtgctttgctacacatggtgggctgctttttaagatattttaagtgaagacaaacatcggctactagtctaccatttccgattcctgtctgttattctcttataattttcatttttaagtatatttaggtcgtagcacattttgactctagagatcatttcctctttaaagtcgtattggtagtaaaagtttaccctttgtaacgacattgttgttattgttgatgatgatgatgattacggtcaatctaggaaaaagagtgaaacttgaaaccacattgttactattattacttgtttgttcaatgaaaaaatgtatttttgctttca

SEQ ID NO: 35211 - DNA, 285 bp, Gossypium hirsutum
  Clone ID: LIB3149-048-Q1-K1-E10
gacagtccctccttttttttttctcccacctttctaaggatggaatttgttgctacacattggcattgggcattcctttataaagttttattaaaaaaaaaacagcaataggtatttctttaaatcgggttctgctatttgaaacttgatttttttttttttatggatgaaagtatttgaagttatacactgctattattaaattaaagacatgaatcaacaatcaaaaaactatagaatacacctcgtaacagaaatgtaccataaagattttaagctcatggg

SEQ ID NO: 35212 - DNA, 431 bp, Gossypium hirsutum
  Clone ID: LIB3149-048-Q1-K1-E11
ccagaatggagcccgagtgcaatcaaatcggctttaatgaccactgcctacacccaagacaacaccaaggcgactctcagggatgctgcggacggatcgttgtcaaacccatgggcacatggggctggccatgtcgatccccaaaaagctctttcaccaggcctaatatacgacatctcgaccgacgaatacatcacattcttgtgctcactcggctacaccgtcgaccatgtcaagaccatagtgaaacgccccaacgttacatgttcgaagaaattcaaggaccctggtgaactcaattacccatcgttttcagtcatgtttgggggaaaaagggttgttcgatacactcgtgaattaacaaacgtcggccctgcaagatccatgtacaaagtcacagtaaatggaccatcgacagtagggatctcagt

SEQ ID NO: 35213 - DNA, 395 bp, Gossypium hirsutum
  Clone ID: LIB3149-048-Q1-K1-E12
attgttttctctgtttgccatttgccttaatcatcttcctctttctttaaaacctcttcctatttaatgtccgactaaacttgcgctgaattccatggctactgcagaggttgtatcagctcagactgcaatccatgaggagaaacctgaagaagtggtcaaggttggagaaattgcaacagaagaggtaccggctgttgctcctgcagcagaacctgttgctgaagaaccaaaggaagcagtgcctgaagcagcatccggagaaccccatgctccagaaactgaagccacagttgaaactgaatcaaaggaggtggttaaagagcccaaggctgtgactgaggagccagaagttgagaaaaaagaagaagagactcctaaggaaacggtagcat

SEQ ID NO: 35214 - DNA, 314 bp, Gossypium hirsutum
  Clone ID: LIB3149-048-Q1-K1-E2
acagcagcaggatcaacttcccaagtatgccacacctgttctcttgtcagctgatgtgaggaagaaggctgaagcacttgacaggttttgcaggccaataatgatgaaacctaaaccggctaaaccagccacgcctgaagcaccggcaaccccaccacatcctggaagtgaggctcaaccacagggtgcaaacagcccgaaagcaagccctaaccgcaatggtgaccccagtgaaaatgtgccggcaggaagtggtgaggcacctccagcatccgtagaaccaatggaaactgacaaagcggagactacgagtg

SEQ ID NO: 35215 - DNA, 137 bp, Gossypium hirsutum
  Clone ID: LIB3149-048-Q1-K1-E4
ctgagctcaattttggtgctagagacatcaattatgatgcagatcttgaaattacaggatccgctgactacataactgatgcatgggctaaaaagtgctcctatgacgggcagctgattggactacttaaacagtac

SEQ ID NO: 35216 - DNA, 370 bp, Gossypium hirsutum
  Clone ID: LIB3149-048-Q1-K1-E5
gttggattttcaagagatgggtttgctaccagtcccactatgcgaaaattgcatctcatatgggtgaccgcacgcatgcagagtcgaagtatacaagtaccctgcttggagtgacgtgatcgaaatagaaacatggtgccaaaatgagggaagaatcggaaccagaagggattggatcctgaaggatgtcgctactggtgaagttataggaagagctacaagcaagtgggtgatgatgaacgaggacacgagacggttgcagaaagttagcgatgatgtcaaagaaaaatatctggccttctgtcaacaagaacctcaattaccgtttccggaggagaacattagaagttggaaaaaaatttttaaataa

SEQ ID NO: 35217 - DNA, 269 bp, Gossypium hirsutum
  Clone ID: LIB3149-048-Q1-K1-E6
atttgttaggcgtatcatatgcccctctttgatgccaattgttttccttttcttttttggttatttcccctctaaatattttgtatttttgggaatatatgaattaccttcaattactttgaaaggcacgaaatttggtagtgtatcttttatgagcctaatgaaaatgtcagtactggctgtggctgtggctgtggctgtggactgactatattagcttctttctctatttaaaaaaaaaaaatgtaaaagaacctacaaataaatta

SEQ ID NO: 35218 - DNA, 171 bp, Gossypium hirsutum
  Clone ID: LIB3149-048-Q1-K1-E7
gcagccatggctctcctgatagactcatatcgaggcccaataaaggctatgactgtcctggtaaagctgctgctggtgcaagattcggctactgtgctcagaataaccacttctccggtgctgctacactactattttatatccatgacgataaaagccgaacaatatacg

SEQ ID NO: 35219 - DNA, 429 bp, Gossypium hirsutum
  Clone ID: LIB3149-048-Q1-K1-E9
gcgggagctgatctgattgttactcaactgttttatgatactgatatctttctcaaatttgtcaatgattgtcgccaaattggaattacatgtcccatcgtgcctggtattatgcccattaataactacaagggtttcgtgcgaatgactggcttttgcaaaactaatataccggatgaggtcactgctgccttagagcctatcaaggacaatgatgaagcagtcaaatcctatggaatccacctcggaacagaaatgtgccgcaagattttagctcatgggattaagacgttgcacctttatacattaaacatggagaaatctgcattagctatactaatgaaccttggactgattgaagagtccaaaatttctaggtctttaccttggagacgccctgcaaatgtcttccgtgttaaggaagatgtt

SEQ ID NO: 35220 - DNA, 349 bp, Gossypium hirsutum
  Clone ID: LIB3149-048-Q1-K1-F1
ctcttgattctgccaaggatctgaaagcaagagagaaggaacttaaagcaaaagaggctgaactgaataagcgtgaacaggaattgagaagaaaagaggatgcaatagcacgagctggaattgtaatagaggacaaaaattggccaccgtattttcctattatccatcatgatattgcaaatgaaataccagtccacctacaaaagattcagtatgttgctttcacaacattgttaggtttggttctttgtctcacttggaatgtggtagctgttactacagcctggatcaaaggagaaggtccaacattttggtttcttgccattatatatttcatatctgggggtcc

SEQ ID NO: 35221 - DNA, 424 bp, Gossypium hirsutum
  Clone ID: LIB3149-048-Q1-K1-F10
accggaaagactggctttcactggttgctgtgcatagtgattgttggttgctttccgtgtctttctactttggagctcggcttaatcgcaatgaaaggaagcgcttatttagcatgataaacgatcttccaactgtctttgaagttgtaactggaaggaagcccataaaagacaagcccacagtagaaagtggaagcaaatcacgaaacagcacgaagagatcaatcgatggacagccaagaagcaatcctaagttagttgatgaaaattatgaggaggatgaagaagagcagggcgacaccttttgcgggatttgtggtggaggatataattctgatgagttttggatcggttgtgacaactgtgaacggtggtaccatggaaagtgcgtgaagataacaccagccaaagccgaattgattaa

SEQ ID NO: 35222 - DNA, 350 bp, Gossypium hirsutum
  unsure (1)..(350): unsure at all n locations; Clone ID: LIB3149-048-Q1-K1-F11
aatcattcaaggcatacaacaagctccgtgttgaacgtgcgaacgaacgtcatattggtgctaggttgaagaaagctgccgaggccgagaaggaagacaagaagtaaggttacccttttggggacagtgttttgttatttggcttgctaaaaagaccttaaattttgttttcattttgtcaagtgaactgagacagctttagaaaactttggtattatgacagtaatcctttttgttgagcattttattaaattgagaagtttcctgcnnnanaaaaaaatnaaaaataaaaaatataaataaatactattaataaaaatataaattaaaaataatatttttttttttaa

SEQ ID NO: 35223 - DNA, 345 bp, Gossypium hirsutum
  Clone ID: LIB3149-048-Q1-K1-F12
gagcttctaacttcacgccgggcatgatctatatcaatctcgcctttaatagatcaggacagtgtaggtgccaaatgactgcggcgtatggtcattcctgacgtgatgatcctgatttcacttctgagattgttaagcatcttaatcccaaatcctacaatactacttactaccatggccataatgtcatgacagtacgcatctaccaattcgttgtattctacattctttacttattagggggtaatatattttcccacccatgtattgcttgtcatgtatatattctcgtaagagatttctgcctactcattcaactcataatattctcctccattattgacg

SEQ ID NO: 35224 - DNA, 371 bp, Gossypium hirsutum
  Clone ID: LIB3149-048-Q1-K1-F2
gtcagcatctgttaacaacaattgctatgcattatcagctgtaaaggctggatttcttaagcacattctccaaagttcacagaagctttacaaggatataaaagaaaccgttgaaagttttcaggaattatcgttggaatacactttcggctgggaatctgaaaaatctttccccaaggtacttggtgacgtgatggagtcacttgctggagctatttttgttgattcaggatacaataaggaaatcgtattccagagtataaggccactgttggagcccatgattactccggagactctgacggttcaccctgtcaaagagctatatgagctgtgtcaaaaggagcattatgaactaaaaaaacccattg

SEQ ID NO: 35225 - DNA, 309 bp, Gossypium hirsutum
  Clone ID: LIB3149-048-Q1-K1-F4
gtttgagatggggggcttgccctatgcaggtctaccaaacaaccatgcccggaaatcgtcgttcaaagacgatccgatttcgacaaaggtacaccggtgatattttctaatgcagacaccaacgatactgtagtccgcctatccaccgatgtaaacatagagttcactcccatcaggaccaaactctgccgaacaacaacggtgtggaagattgacaattatgatgattcagccgggaaatggtgggtgacaaccgatggggttagagggaaccctggtcccaacactttgaccagttgggtaaaatag

SEQ ID NO: 35226 - DNA, 270 bp, Gossypium hirsutum
  Clone ID: LIB3149-048-Q1-K1-F6
gagatgctggtatgattaaaatgttttcctccaagcccatggttgccgataccttgtttgagtccccacccttgggccgggttgctgtgatggacatactttaaacctgagccgttggcgttataaagaatgttgagaaaaaggacccatccagtaccaagagtaccaatctttgctgataagaagaaatgaaccgtgctatgtgaaatactcttgattgttccgcaaatggaatattttactatcagtttaataggttgacagacttta

SEQ ID NO: 35227 - DNA, 296 bp, Gossypium hirsutum
  Clone ID: LIB3149-048-Q1-K1-F7
gcagccgttgcttggtttatgaactcattccaaatggcagtgttgaatcgcacttgcatggagttgataaggaatctgcaccccttgactgggatgcccggatcaagatagccctcggtgctgctcgtggactagcttatctccatgaagattcaagcccacgtgtcatacatcgggattttaagtcaagcaacattttgttggagcatgatttcacgccaaaagtgtctgactttggtttggctcgaactgctatggatgaggaaggcaggcatatatcggccccgtgtcatggg

SEQ ID NO: 35228 - DNA, 277 bp, Gossypium hirsutum
  Clone ID: LIB3149-048-Q1-K1-F8
agactggttccatcctctagccgcattagattcgaatcaaatcatgacaaatatttatcaattgcttgatccatgtttagcctccggcaaagtccgggactatactcatcaactccaagccatggctcgagccactttcttgtgcctaagtcatgatccagaatcacgacacccgatgtcaaagatacttagaattcttgaaggaggagataccaacgttcctttgagtttagacctgaactcgatcggcaatcgaagcggccatttacgtgggatt

SEQ ID NO: 35229 - DNA, 431 bp, Gossypium hirsutum
  Clone ID: LIB3149-048-Q1-K1-F9
ggaagagctaccttttttttctccttttccaccgccgtcgatctcgatccttatcctcgttgtcaaacaagctcaaaaaagatggccaacgctgcatcgggaatggctgtgcatgatgattgcaagttgaagttcttggagctcaagacaaaaagaacccaccgcttcattgttttcaaaatcgaggagaagcaaaagcaagttattgtggagaagcttggtgaaccaaccgaaagctacgaggattttactaaatgtctccccgctgatgaatgtcgatatgctgtgtacgattttgattttctaacggccgagaacgtcccgaagagcagaatctttttcatcgcatggtctcccgacacgtcaaggatcaggagcaagatgatttacgccagctccaaagacagattcaagcgagaactggacggaat

SEQ ID NO: 35230 - DNA, 278 bp, Gossypium hirsutum
  Clone ID: LIB3149-048-Q1-K1-G1
accaaatctccagtagtattgaaagaggagccaaatggttggttaatacaatcaaagggaaagtacaaaagccattaccagagctggtaaaggagtatgatttgccaataggcatcttcccttgtgatgccaccaactataagtcagaagaaagttcaagggatgtactttgatgcccaatattggctatggttcagacaagaagacccgacactatcttccaaatggctttaagaagtttgtcgtgcacaatgttggagagcttgaactgttaatga

SEQ ID NO: 35231 - DNA, 420 bp, Gossypium hirsutum
  Clone ID: LIB3149-048-Q1-K1-G10
gtgggaactttggactctgtgaggagaaccaatgcgttgcttgcccgtcaacaaacggattactcggttggagccagaattgtcagccgaagaaggtgaattgtaggccgaatggtttcagctactacaagctagaaggagttgaccatttcatgagccagtacaacgaaggagaagggataaaggagagtgattgtgggaggaaatgcacctctgattgcaagtgtttggggtacttttaccacagggaaacatccaaatgttggatcgctaatgagttgaaaacccttgctaaaacctctaactcttcccatgttggttatataaaggcacccaacaagtgacgggaatcctattaagtatttgtactttttcctctgtattttccagtttctttattgtaagctaataagtatttgt

SEQ ID NO: 35232 - DNA, 391 bp, Gossypium hirsutum
  Clone ID: LIB3149-048-Q1-K1-G2
ggattacaaggacgggaagtattcccaagtcgtgtctaatgctcttgacatgaagttgagggatgatttggagcgtttgaagaagatcaggaaccaccgtggtctgaggcactactggggccttcgtgtccgtggtcagcacaccaagactactggtcgcagagggaagactgtcggtgtgtctaagaagcgttgaaagcttcatatatattttggaaaaaattatgtagtcttgcagagtgttcatatctttgaatgtaagcactatttgcaggaagacaaattttggatgtgattttttttgttgtttctagacaaggggtaagactagtagtgttgggtctttatcggttgctattaggaatacttgcgttactgaatttaattgggt

SEQ ID NO: 35233 - DNA, 104 bp, Gossypium hirsutum
  Clone ID: LIB3149-048-Q1-K1-G3
ttttagagttaatataatgtatagcataaaatatcataagttctacttctcttttcttctgtaataaactaaagttagtaatggatgggcagatctatattatt

SEQ ID NO: 35234 - DNA, 185 bp, Gossypium hirsutum
  Clone ID: LIB3149-048-Q1-K1-G4
gggaaagtacttggctttttctactgagtcaaatttttgatattttcctttgttcttttttaatttcactccatgtagaacgtgatgctttactgcaattttaattttgtattgggagttataattatgtttttgggtataatgtttgagattatgaattagtggtttgccttaaattctttttt

SEQ ID NO: 35235 - DNA, 304 bp, Gossypium hirsutum
  Clone ID: LIB3149-048-Q1-K1-G6
gcaacctcaagtgaatgagagtttttgcagttgcagggaaaggaaaatcgaaggagcaagcaaagcagctgaaaggctaaaccgatttaccgaaacttactttccagtgacaagtttttgaagccactatggagtatacaaatctccattctcaatctaaggttgaagaacagtatgttaagtatacttctctattaactcaaactggccatcgagtatccaccgtggatgaatggaagcccgacctgttaccgaatattggtagcagataccataagaatccggttcataccttcctgaaatc

SEQ ID NO: 35236 - DNA, 376 bp, Gossypium hirsutum
  Clone ID: LIB3149-048-Q1-K1-G8
tctaaacccgattcaaatcctttacccccaaagccaaaatttgagcctcttaaggcacacgagatgtcagacggtcgagtgcaattcagaaaggtttcggttccacctcataggtattcacctctcaagaaatactgggtggatatctatactcctgtttatgaacaaatgaagatcgacatccgtatgaatctcaaagctcggaaagtcgaactgaaaacacgacaagacacgcccgacattagtaacctacaaaaatgtgcagattttgtccaagctttcatgttgggtttcgatgttccggatgccattgctcttttgagattagacgagttatatgtcgagtcgtttgaaatcaatgatgtgaaaacactta

SEQ ID NO: 35237 - DNA, 261 bp, Gossypium hirsutum
  Clone ID: LIB3149-048-Q1-K1-G9
aaaaaaaaaaaaaaaaaaaaaaaaaaaaaaattaaaaattaaaaaaaaaaaaaaaaaaaaaaaagggaaagggtcctcttgactgggcgctcttatctaccctttcttgcctcatcttgatttcttctatattgtatccttttttccaattcactactccgtttttttctggcattactttttgaaatacccatttcgttaccctcccttttttcctacctttacatccttttttaactacctcctttgccaactttagat

SEQ ID NO: 35238 - DNA, 390 bp, Gossypium hirsutum
  Clone ID: LIB3149-048-Q1-K1-H1
aaatcgtgtcatgctttttaggacagcacttgctttaatggagttatatggccctgcactggttacaactaaagatgcaggagatgctgttaccttgttacagtcattggctggctcaacattcgacagcagccaacttgtattgacagcttgtatgggttatcaaaatgtaaatgagaaaagactacatgatttaagagagaagcatcgatcagctgtaatagctgcagttgaggaaagatcaaaggggcttcaagcttggagggattctcagggcctagcatctaagctatataattttaagcaggatcctaagtccatgattatggaaacaaataagacaaaagcaaatggggatctctctcattctgagtctggttccacaaactc

SEQ ID NO: 35239 - DNA, 423 bp, Gossypium hirsutum
  Clone ID: LIB3149-048-Q1-K1-H12
ctttggtttgttcccaattcagacgatgtatagtagcaatggatgggattcgtatgcgtgggcattcgaggcttctgagtctgtaattgagatctcgatacataatccgggtgtggaggaagatgctgcttgtggccctcttattgattccatcgcattgaagaccttgtaccctccaaaacgcacccgagtaaatctactaaagaacggaaatttcgaagaaggtccttacatcttcgcaggaccaatatccgaaggtgtcataattccaccccacattgaagatgatcacagtccattacctggttggattatcgactccctcaaagccgttaagtacatcgacagcgaccacttcaccgtccccaaaggcaagcgagcaattgaactcatcgccggtaaagaaagttccctctcacaagt

SEQ ID NO: 35240 - DNA, 251 bp, Gossypium hirsutum
  Clone ID: LIB3149-048-Q1-K1-H4
gaggatcgttgcccatactatcttcctacttaagctggcaacctagcacactgagaccaggtgctggatgctttgactgcttttgataaggcatattcatcagagaatgctgattatataacaagtcagaatttctgtatatgaagctagtttctctttgctccatgtgtaatattttcatgcttgggagcacttaaataatagccagattcagtttcattcttacgcaaaaaaataacttttttataagg

SEQ ID NO: 35241 - DNA, 393 bp, Gossypium hirsutum
  Clone ID: LIB3149-048-Q1-K1-H6
gagaccgcatggagctcaagcagccatgggagcttacaagtacgtgtcagagctatggaggaagaagcaatccgatgttatgaggttcttgcagagagtgaggtgttgggagtaccgccaacacccgtccattgtgcgagttaaccacccaactcgtcctgacaaggctcgtcgcttgggatacaaagccaagcagggttatgttgtctatcgtgtccgtgtgagacggggtggaaggaagagaccagtacctaagggtattgtgtatgggaaacccacaaaccagggtgtcactcatctgaaatttcagcgcatcaagcgatcagttgcagaggatcgagctggtcgaaagcttggaggccttatggtcgtaaactcatattggatcaacga

SEQ ID NO: 35242 - DNA, 379 bp, Gossypium hirsutum
  Clone ID: LIB3149-048-Q1-K1-H7
gcagaaaggtgttgttgatggtgttgaagccaatttccctacagcttttcatggattttgcatgcgtcacttgagtgaaagttttagaaaagagttcaataataccatgcttgtcaaccttttatgggaagccgctcatgccttgactgtaattgaatttgaggcaaagattcttgagattgaagagatatcacaagatgctgcatattggatccggcgaatcccacctcgtttgtgggcaacagcctatttcgaaggcacgagatttgggcatctaacagcaaacatagttgaatcactgaattcttggattttagaagcttcagggcttccaataattcagatgatggaatgcattaggagacagcttatgacatgg

SEQ ID NO: 35243 - DNA, 284 bp, Gossypium hirsutum
  Clone ID: LIB3149-049-Q1-K1-A1
aaaccctgcattttcaaccaaaaaattcaaaaaaaaaattctaaataagtgatggggtttccggcaaatggctcatcggacaaaccattgaagttcctgatctacggtcgaaccggttggatcggtggtttgttaggcaaactctgcgaatcccagggaatcgattacgagtacggctccggccgtttggagaaccggatttcacttgagtccgacatagccaacgtgaaaccgacccatgtattcaatgccggcggtgtcaccggtcgtccgaacgtcgattg

SEQ ID NO: 35244 - DNA, 332 bp, Gossypium hirsutum
  Clone ID: LIB3149-049-Q1-K1-A12
tttagttttctcttcctccaattaagatgcagatcttcgttaagaccctgaccggcaagaccatcaccctcgaagtcgagagttccgacacgatcgacaacgttaaggcgaaaatccaagacaaggaagggatcccaccagaccaacaacgtctcatcttcgccggaaaacagctcgaagatggccggaccttggccgattacaacatccagaaggagtccaccctccatctcgtcctccgtctacgtggtggcatgcagatcttcgtcaaaaccctgaccggcaagaccataactttggaagtcgaaagctctgacaccattgacaacgtc

SEQ ID NO: 35245 - DNA, 401 bp, Gossypium hirsutum
  unsure (1)..(401): unsure at all n locations; Clone ID: LIB3149-049-Q1-K1-A2
aaaccctgcattttcaaccaaaaaattcaattaaaaaattctaaataagtaatattgtttggggcaggtggctcatctgacgggccagtgaanaacctaatctacggtctaaccggttggataggcggtctgttagtcaaactctgacaaaacattgaataagatctactagtactattgcacacattatgagaaatctatcccagttgatttcgacataaaaaactacacttcggccctattgctttgaattattcaagcatgttgtgttgcggaaaaattggaacttgatgatgatgattgtagagccatcaactgatactgaactgagcaacagaattccatgaantttgataaacgtattgctccccttgaataaaaatgctacagggtgtatcttt

SEQ ID NO: 35246 - DNA, 284 bp, Gossypium hirsutum
  Clone ID: LIB3149-049-Q1-K1-A4
gcgcccacgcgaacgcactccgaaaaattggaatctcttcactggaaacattgctatgggtgggacacgcatataccgagtaacgcgaaaaataaaacatgattacttttcggaggcagagccagccgttgcatctgaatgatgacaaaaactactgaaatcctttgtttttaatggaacaaattatcagcaatgttgccttgtttttctgcaaaataaaaaagacactttggccctatgggtttgaattattcaagcatgaagtgctgcggaaaaattggaac

SEQ ID NO: 35247 - DNA, 387 bp, Gossypium hirsutum
  Clone ID: LIB3149-049-Q1-K1-A5
ggcaattgatgcttttcctaccctggttgattttgtcatggaaatcctatccaaacttgtgagtaaacagatctggagaatgccgaaattgtgggttggattcttgaagtgtgtggttcagacacaacctcattcctttcctgttttattacagttgcctccgccacagcttgaaagtacactgaataaatatggtagtctcagaagttcccttgctgcttacgcaagccagccaactataaaaggttcactgcctagagcaacgcttgcggttctcggtcttgcgaatgagtcgcatatgcagcagcagcaaccacatatgtcaaatttgcattcttcggacacttcttcagttcagggggcaacatcaacataagaattcaaaga

SEQ ID NO: 35248 - DNA, 402 bp, Gossypium hirsutum
  unsure (1)..(402): unsure at all n locations; Clone ID: LIB3149-049-Q1-K1-A6
cccacgcgtccgcactccgaaaaattggaatctcttcagtgtaaacattgctatggctggaacaggcatataccaactaacacgaaaaataaaacatgattacttttcggaggcagagccagccgttgcatctgaatgatgacgaaatcttctgaaatcctttgtttttaatggaacaaattatcagttatcttgccttgtttttctgttaattaaaagttacactttggccctatggctttgaattattcaagcatgttgtgttgtggaaaaattggaacttgatgatgatgattgtagagccatcaactgatactgaactgagcaacagaatcccaaaaatttttaataatgcttttgttccctcnnaaaaaaaaaaaaaaaaaaaaaaaaaaacaaaaa

SEQ ID NO: 35249 - DNA, 370 bp, Gossypium hirsutum
  Clone ID: LIB3149-049-Q1-K1-A7
aagggatggatgaaatggagttcacagaagctgagagcaacatgaatgatttgggttcagagtaccaacaataccaggacgccactgcagaagacgaggagtatgaggaatatgaggaatacgaggaagaggcttaaaggatgctccttgttctttttatcatgtacggcattcggttgtgcaatctctgctttgctggtttccagcatctgaatcgcttattgctgctatctttgcgatttacagactagtattgctgctttgttttttatcaataattctcagcagtcaggttcgtttctctcacaaatttagcttacaaatgtgggagcaaatgttaggctgcgaatctatttattaaagtatgcct

SEQ ID NO: 35250 - DNA, 400 bp, Gossypium hirsutum
  Clone ID: LIB3149-049-Q1-K1-A8
aaataagagctcaggttagagcaaatccgtattgctacaaaggacggcttcgtttgaacacagccaatgaacttctaaacaccagcctggaaattgaacaaagactccatgaggtttcattaccatttctagttctacatggaggggaagataaagtaacagacaaagcagtgagccagcaattgtacaatgatgcagcaagttcggacaagagtttcaagttgtatcctgggatgtggcatggcctgttgtatggtgaattaccggaaaacatcgagattgtgtctgcagatactattggttggctgaaccagaggagtgagttcgggaactcgaggttggagagagaattgaaacttcaagatgatgagattttgatcttgaaacacaagtgaactta

SEQ ID NO: 35251 - DNA, 374 bp, Gossypium hirsutum
  Clone ID: LIB3149-049-Q1-K1-B1
gtgtcaatgagaaggaatataagcctgaccttaacattgtctccaatgctagttgcaccaccaactgtcttgccccattggctaaggtgatcaacgataaatttggcattgttgagggtcttatgaccaccgtccattctattactgctacacaaaagactgttgatggtccttccatgaaggactggagaggtggtagagctgcttccttcaatatcattcctagcagcactggagctgccaaggctgtcggcaaagttttgccagcactgaatggcaagctgactggaatggctttccgtgttcccactgttgatgtctctgtggttgacctcactgtgagacttgagaagaaggctacatatgatgaaatt

SEQ ID NO: 35252 - DNA, 371 bp, Gossypium hirsutum
  unsure (1)..(371): unsure at all n locations; Clone ID: LIB3149-049-Q1-K1-B10
gcgtacggccctcctcacctctgggtttagcctcgtctacccaaattctttnggcaacagaatccaggggatnttgaaacttgggttagacattgatgaagattcatgatatgctgatgccgactctgagatgccaccattcgatgatgctgatgccgagggcagcaagatggatgaagttgactaagctttttaacatgtttgtgaagagattcatttggtagtctcattttagcttttaatataatattctggaaaaatggtcaatgctgtgttttctttgaatggtaaatgaatctttagtgctcgtaaatggaatctaattcattgccttatgcttttttcaaataataattattatattttataat

SEQ ID NO: 35253 - DNA, 396 bp, Gossypium hirsutum
  unsure (1)..(396): unsure at all n locations; Clone ID: LIB3149-049-Q1-K1-B11
ctctgatgagtatttgagcttctgttacacttgcaagaaaaaactagagaaggatgaagaagtttacatgcacagaggtgaaaaggcattttgcagttttgattgccgcactgaggagatttttgctgatgaggaaatggagaaaacttgtaataattcctcatccaacagttctccagaacagagcaatgatgaagatgtcttcctaatggccattgatgatcggagcattcggagcataaatcacaattcatggatagcacagcatagagtttaatttataatccgaagatagatataatatcattagactggtgcattataattttgattaaatgaattagtaacggcaggaaaccccatctcatcaagtttccttttattatatnctttttg

SEQ ID NO: 35254 - DNA, 379 bp, Gossypium hirsutum
  Clone ID: LIB3149-049-Q1-K1-B12
ggataaggtagaagaagctgaagaattagaagagggaaagaaagaaaagaagaaagacaaagaggcgaaggagaagaagaaagaaaagaagaagaaggatgaggtagaagaagctgaagaattagaagagggaaagaaagaaaagaagaaagacaaagaggcaaaggagaagaagaacaaattaccaaaaccggaaggtcaaattgaagaaagacaaagaggcaaaggagaagaagaaagaaaagaagaagaaggatgaggtagatgaagatgaagaattagaagagggaaagaaagaaaagaagaaagacaaagaggcaaaggagaggaagaaagaaaagaagaagaaggataaggtagaagaagctgaagaattaga

SEQ ID NO: 35255 - DNA, 387 bp, Gossypium hirsutum
  Clone ID: LIB3149-049-Q1-K1-B2
tttttctaaaccattaatcaacatgatgaaagctgctggttgggaccttgatgctgccgctgactcaattgagcccaatgttgtttatgcgaagagagctcacaagaaatatgcatttgagtcccacatttaccagaggatgttcagtgggtttcaacaggagaacttctccattaaattggataatgttacagtcaataaagagagcttcttccagcaatatctggctctgagggagatggatccattggacatgttgggccagaatcctgattccttattcgggaaattttcccagagcaagtacctgatggttgttcatccaaagatggaagcttcattctttggaaatttagaccagcgtaattatgtaacaggaggtgggca

SEQ ID NO: 35256 - DNA, 210 bp, Gossypium hirsutum
  unsure (1)..(210): unsure at all n locations; Clone ID: LIB3149-049-Q1-K1-B3
gngggcaaaaccaggaataaacaccagactttaacattgtctccaccgctagtcacacgggcgagtgtcttgacccagtgggtgaggtgaacaacaagatctttcgcattattcatgtgattatgaccaccaccaaatgtattactagaacacaaaagactatacaaaatcctttcaacaaggaatagatacagtctgataattattaca

SEQ ID NO: 35257 - DNA, 405 bp, Gossypium hirsutum
  Clone ID: LIB3149-049-Q1-K1-B4
ccttcttcaacttgcggagtttgacattaagaaggaggctgcatgggccatctcgaatgccacctctggaggatctcatgagcagattcaattccttgtgagccaaggttgcattaagccactctgtgacctactaatctgtccagatccacgaattgtgacggtgtgcctggaggggcttgagaacattctgaaggttggtgaggctgataaggaaatgggaatgaacggtggaatcaatctatatgcacaaatgatagatgagtgcgatgggttggataaaattgaaaacctgcaaactcatgacaaccatgagatatacgagaaggctgtgaagatcttggagagatactgggctgaagaggaggaagatgaacagaatatccaagatggtgggaatgaaaa

SEQ ID NO: 35258 - DNA, 403 bp, Gossypium hirsutum
  Clone ID: LIB3149-049-Q1-K1-B5
cgccatttttggttccagcaacttggatttggaagaatggtgagagtcagcgttttgaacgacgcactcaagagcatgtataatgcagaaaagaggggcaaacgacaggttatgatcaggccttcctcaaaagtcatcatcaaattccttttggtcatgcaaaagcatggttacattggagagtttgagtatgttgatgatcacagagctggcaagattgtggttgaactcaatgggagactcaacaagtgtggggtgattagtcctcgtttcgatgtcggtgtcaaagagatcgagggttggaccgctaggctacttccttccagacagtttgggtatattgtgcttaccacatctgctggcatcatggaccacgaagaagctagaagaaagaatgttggtg

SEQ ID NO: 35259 - DNA, 310 bp, Gossypium hirsutum
  Clone ID: LIB3149-049-Q1-K1-B6
tgaaaataacagaagacattagttctgagtacactttattttgtgaattatgatttttgtgatcaattaatgattttgctttgaataaggttaaaacacacttccagttagtgattatgtttgatgcccttgattctgggtttatgatattgagaatcaaaacatgacagtttgtgccattgtttgccaattattagttaatgaacttaatgatggttaaggatgaaaaaaaaaggataacatcgcaaatgaagggcgaaaagcctgagtccgtataaaaaaaaaaaaacccaacgggggggcctcttta

SEQ ID NO: 35260 - DNA, 398 bp, Gossypium hirsutum
  Clone ID: LIB3149-049-Q1-K1-B7
tgcagctcctgattatgtagcaacaggtcatctgactgcgagaagtgacgtgtacagttttggtgttgttcttcttgaaatgttaaccggcaagcgagcagtagacaagaaccgaccatctagagaacataatttagttgactgggctaagccttaccttactagcaaacgtaagtttttccaaattatggatgttcgtatcaaaggccaatacacacctgaagcggcattaaaagctgcgtatcttgcggtgcaatgcctatctacggaaccgaaggttagaccgaaaatgaccgcggtagtgaaagcactagagcaacttcaagactccggtgtcgacaaaggggtccatcataatgcagcagctcatagttctcgtccgaattcgaagtatgctc

SEQ ID NO: 35261 - DNA, 387 bp, Gossypium hirsutum
  Clone ID: LIB3149-049-Q1-K1-B8
cttacagttgcttttcggcgcaacaagtcatagggatagagaactggaatcttgtggatgcgagaaatgtggcgcccgaagagttgaatacaaaggaaaaaagggacttaatcgtgggaagttcaatggcgtattggacgactctggcgcccaatgatgaagactatagcgggtctatagcaaaggcaatagcatcggggtcagggtacgttgtgaaggggattttgtggtgtggcgatgtcactgttgacaggttgaaatggggcaatgagttcttgagtaagaggataaagtcaggttcaacctctgagatctctccagaggccctgagaaggatgaaaagggttaagaaggtaacaaagatgtcagataaagtggccactggaa

SEQ ID NO: 35262 - DNA, 345 bp, Gossypium hirsutum
  unsure (1)..(345): unsure at all n locations; Clone ID: LIB3149-049-Q1-K1-B9
accggccctcctcacctctgggtttagncctcgatgtacccaaatacttttggcaacagaatccagaggatgttgaaacttgggttgagcattgatgaggatgcangagatgctgatgccgactctgagatgccaccattcgaggatgctgatgccgagggcagcaagatggaggaagttgactaagctttttaacatgtttgtgaagagttcatttggtagtctcatttttagcttttaatataatattctggaaaattggtcaatgctgtgttttctttgtaatggtaaatgaatctttagtgctcgtaaatggaatctagtccactgccgtatgcttttatc

SEQ ID NO: 35263 - DNA, 400 bp, Gossypium hirsutum
  Clone ID: LIB3149-049-Q1-K1-C1
ctgagattgatcccatctgtgcccttcaggctcttatggaaggacttcaggttttgaccctagaagacgttgtctccgaggctgatatcttcgtcaccacaaccggtaacaaggacatcatcatggttgatcacatgaggaagatgaagaacaatgccattgtttgcaacattggtcactttgacaatgaaatcgatatgctcggtcttgagacctatcctggtgttaaacgcatcaccattaagcctcaaaccgataggtgggtcttccctgaaaccaaaactggcatcattgtgttggctgaaggacgtctgatgaacttgggatgtgccactggacacccaagttttgtcatgtcctgctcgttcactaaccaggtgattgcccagctcgagctatg

SEQ ID NO: 35264 - DNA, 388 bp, Gossypium hirsutum
  Clone ID: LIB3149-049-Q1-K1-C10
ccaaaaacttacttcgtctcaaggactgcttttcaaatctctctgaatttgatgatgtccgaggccaccctggttttgatagacaaggaaccatatttaagcgacttataaaagatcagaatatgcactccgaccttgaggagggtatcagacggttggtactttgttccggaaaggtgtactatgagcttgatgatgagcgaaagaagaacaatgctaccgacattgctatctgtcgtgtggaacagctttgcccattcccttatgacctaatccaacgagagcttaagcgatatccaaacgcatagattgtttggtgccatgaagaaccgatgaacatgggtgcatacaactacatcgcccctcgtcttgccacttcaatgactgc

SEQ ID NO: 35265 - DNA, 394 bp, Gossypium hirsutum
  unsure (1)..(394): unsure at all n locations; Clone ID: LIB3149-049-Q1-K1-C11
gacccactcgtactccaaaaacttacttcgtttcaaggactgcatatcaaatttctctgaatttgatgatntccgagtcctcggtaatttttatagacaatgaaccacatttaatcaacttataaaatatcataatatgcactcctacctttaagattgtatcatacgattgttacttttttccaaaaatgtatactattaacctttttattaacgaaataaaaacaattctacctacatttctatttttcgtttgtaacaacttttcccattcccttattacctaatccaactagagcttaatctatattcaaactcatatattttttttttccattaaaaaccgattaacatggttttcatacaacttacatctccccctcattttccaatt

SEQ ID NO: 35266 - DNA, 289 bp, Gossypium hirsutum
  Clone ID: LIB3149-049-Q1-K1-C12
ggggccggtgcctcaacttctgcgagagtgaaatggggagggtacaaggtgatcactagtgcaagtgaagctcaagcttttactcctggcaagttcattgctggaggaagttggttaagctctacaggctttcctttcgctcttgggttgtaataattttaaagattgtattgtcaatgtagccacctacctacttcattgtttggtttgagatttgctttgcggccgtgtatctgttaaattattactaaattaatagtagtaataagcgaatgccaaagctttcttc

SEQ ID NO: 35267 - DNA, 302 bp, Gossypium hirsutum
  Clone ID: LIB3149-049-Q1-K1-C2
ctctgtctaagctacaatttacatgaccatatctctgctgcatagatctgactattgagcacccagatttttcagcactaacaagaccattgtgagacctgaattgactgattgctcctcttgtaggtgaaacgcatagcaaactcaagttcaacatgcggaatgatgtgttgaactgtagaggatcagaatgtatatggaagagagcttgatactagttatggaggaagagagcttagacggacgtaataaatggaaagcttatggatgctatggtgccaaatattggggaagaactggtg

SEQ ID NO: 35268 - DNA, 410 bp, Gossypium hirsutum
  Clone ID: LIB3149-049-Q1-K1-C4
gtttctataaacaaagagaaactaggtgtgaaacaatggcgtcctcggatcttattggcaagctcgagactgatgtcgagatcgatatttctcccgaaaagttccaccatatgtggtgccacaggccgcaccatgtccaccacactagctctgaaaaagtacaaggatgcgatttacatgaaggtgaatttggaactcccggcgtcgttatctgctggagatatgtgcatgatggaaaggctaaaactgcaaagcaggtagttgaagttatggaccatgagaaaaagtcaataactttcaaaatgcttgaaggagatctgatggaggaatacaaaagcttcgtgattacaatccaaacttcccccaagagcgacggtaaaggcagtatagtgcactggactctggattat

SEQ ID NO: 35269 - DNA, 396 bp, Gossypium hirsutum
  Clone ID: LIB3149-049-Q1-K1-C6
ggcaactcagctggcactgtcactgcttattatctgtcatctcaagggccaacccatgatgagatagactttgaattcttagggaatctgagcggtgacccttacattttacacaccaatgtctttacacaaggcaaaggcaacagagaacaacagttctatctttggtttgaccctacaagaaacttccacacctattccatcatttggaaaccccaacacatcattttcttggtggataacacccccattagagtcttcaaaaatgctgaatccattggtgtaccattccccaagagccaacccatgaggatttactctagtttatggaatgctgatgattgggccacaaggggtggattagtgaaaactgattgggcaaaagcacctttcaca

SEQ ID NO: 35270 - DNA, 396 bp, Gossypium hirsutum
  Clone ID: LIB3149-049-Q1-K1-C8
tcttcacaaaaaagaaaagaaaaattacagtgaaaatggcaacccttaaagttccagctcatgtacctgccccttctgaggatgctgagcaacttcgtaaagcttttgaaggatggggtacaaatgagcaattgattatcgacattttggctcacaggaatgcagctcagcgcaatttgattcgtaaaacttatcgtgaagcttatggggaagatctccttaagtctttggatgaggaactttcaagtgactttgagcgagctgtggtgctgtttactttggaccctgcagagcgtgatgcatttctggctcatgaagctacaaagaggttcacatcaagccattgggttctcatggaaattgcttgcactaggtcttcacatgaactgttcaatg

SEQ ID NO: 35271 - DNA, 396 bp, Gossypium hirsutum
  Clone ID: LIB3149-049-Q1-K1-C9
ccaaaaacttacttcgtcacaaggactgcaaatcaaatctctctgaatttgatgatgtccaaggccaccctggttttgataaacaaggaaccagatttaagcgacttataaaagatcagaatatgcactccgaccttgaggagggtatcagacggttggtactttgttccggaaaggtgtactatgagcttgatgatgagcgaaagaagaacaatgctaccgacattgctatctgtcgtgtggaacagctttgcccattcccttatgacctaatccaacgagagcttaagcgatatccaaacgcagagattgtttggtgccaggaagaaccgatgaacatgggtgcatacaactacatcgcccctcgtcttgccactgcaatgactgctttgggta

SEQ ID NO: 35272 - DNA, 296 bp, Gossypium hirsutum
  Clone ID: LIB3149-049-Q1-K1-D1
caatgacaatgttcacgattaatataaatttgttcttagcagctcttctcaatacactggggtacgtttaaggggaaagggcagcaggcttcatttttaaacacataaataatataaacatagctcatgaattgctcaaccttaacgatattaactttaactacaaaaaactgttgattcaactcaaacattacaacaaagctgactctcagttttatgaagcatacatccctactaattatgatagattgaagcatcatgaactacattataacacttaattaaccaacttatta

SEQ ID NO: 35273 - DNA, 339 bp, Gossypium hirsutum
  Clone ID: LIB3149-049-Q1-K1-D10
aaccgctgctgctcctcgcagaaggaggcgtgacacttaaaacagaggtgaatggtgataatctgtttttagtatgggaaaatttttgggctttagaagtggtcttcatagctgaaacattcatggtacctggtgatttttgtttttttttagttttacttgatgaaacattattagattgtattaattgaagagtgtaaacagagacaatttttcatgtcatgtgcctcaaaagcaaaaaccaagtagagggagttgaagtttatggtatgatggtgttgaagcccccaaccttaatggatatgctggaacttgtagaattttgttataactagtcag

SEQ ID NO: 35274 - DNA, 297 bp, Gossypium hirsutum
  Clone ID: LIB3149-049-Q1-K1-D11
gaaaaaaaaaaaatggaaggcagtgtgggttatgacaatgatctgaatctcaaggcaactgaactcagattagggttgcctggaacagaaccagtttccattgttagacgcaacaagagatcattgcaacaagtagctgatgatgattgtggagtaaatggctgcaaatctgatgatcaaaatgaaactggtcctcctccttccaaagcacaaatcgtgggttggccaccgatccggtcttatagaaagaaccatattcagaccaagaaaaatgagtctgagggtggtgggatttat

SEQ ID NO: 35275 - DNA, 388 bp, Gossypium hirsutum
  Clone ID: LIB3149-049-Q1-K1-D12
gaaaaaaaataatgctaatacaatgtaggcttataacattaaatctgaatctaaatgcaactggtctcatattagggttgccgagaacataaccattttacattgttatactcatcaagacatcattgcaacatgtagattattattattgtggagtaaatctctgcaaatctgattatcaaaatgaaactggatctcctcctaccaaaacacatatcgatggtttgccacctgatccgctcttatccatagaacaatattcagacaaataaaattgattctgttgatgctgggattctatataaatatgccataaatggaacaccatatctatgacataatcgacttaatgcttactcttgataccctgaattattacatgctattg

SEQ ID NO: 35276 - DNA, 403 bp, Gossypium hirsutum
  unsure (1)..(403): unsure at all n locations; Clone ID: LIB3149-049-Q1-K1-D2
tcttttccctttttgcagtttccattgaaactgtggctcaacaatcancatgaattacaaaatgaaaagcaacattttgtcttgttgagatatcaattttatnaacaccttgtaccacaactttcaaacttaactttttcttttcttttctttttttcctttttgtttttctttttatggctgccactacttctctatctctactgccttcatctcttggttttccaaatgaacgcccttccagcacttcacaatcctcttcatattcttgttcttgttctgttttcttcaatgctgggacccgtctcaggtcccacgacagcttcgcttgtgtgacttttccttcttcttcctctacatgttattggagattcaataatagggctggtactcaccggtttgg

SEQ ID NO: 35277 - DNA, 347 bp, Gossypium hirsutum
  Clone ID: LIB3149-049-Q1-K1-D3
ctctgttatccttcatgctcattacaaattttcccttacccaacaatcaaacatcaatgacaaaattaaaaacaacatggggtcctgttctcatatcaaatttattcaatactttgtaccacaactcataaatttaactttttcattattttacttttaattattatagattatatatatataactcacattacttctctacctctactgccttcatatcttagttcactaaatgaacacattttctactgaaacaattaatataacaatattatactattcatataatttctttacatgtgcaacccttaatatacaactagacttgcttctttacataacttaaa

SEQ ID NO: 35278 - DNA, 200 bp, Gossypium hirsutum
  unsure (1)..(200): unsure at all n locations; Clone ID: LIB3149-049-Q1-K1-D5
aaaaggacgccnacaaacaacactccactttacccccagccaccacncacaaggcgagagaacacaaacaaagggggaagcccaacaacaacaaaaacaacaaaaaaacaaacagcaaccaaacccanacaaagaccaaccacacccacaaaaaacaacaagaaaccacagccngacacacaaaaaaaaccacacacaac

SEQ ID NO: 35279 - DNA, 405 bp, Gossypium hirsutum
  Clone ID: LIB3149-049-Q1-K1-D6
ctctctttccctttttgcagtttccattgtttctgtttctcaacaatcaaacatgaattgcgaaaggaaaagcaacattggggcttggtgatatatcaattttatccaacaccttgtaccacaactttcaaacttaactttttcttttcttttctttttttcctttttgtttttctttttatggctgccactacttctctatctctactgccttcatctcttggttttccaaatgaacgcccttccagcacttcacaatcctcttcatattcttgttcttgttctgttttcttcaatgctgggacccgtctcaggtcccacgacagcttcgcttgtgtgacttttccttcttcttcctatacatgttattggagattcaataatagggctggtactcaccggttt

SEQ ID NO: 35280 - DNA, 397 bp, Gossypium hirsutum
  Clone ID: LIB3149-049-Q1-K1-D7
gactcactcaccctcaacagtttatacgatgaagcagcgtatagagcttctcagcagcctgtatacgggactgcagcaccagaacccgtttgaggtacaagatccatttgcggtatcaaataacattgcaacccctacagtagttcaaatggcagcaatgggtcagcagcagaacaacccttttggttcataccaacccacctatccgcagccgcatttggtgatgagcccatcaaatccttttggtgatgcagggttgggggcatttccagctaaccaaatggttccatttgctcaaccacatgcgaataatccatttggtggaagcacaggcctattgtagcgttaaatacgaagagttgatgggtgtgtattttggatgggagatgagaagagt

SEQ ID NO: 35281 - DNA, 396 bp, Gossypium hirsutum
  Clone ID: LIB3149-049-Q1-K1-D8
gtcggatgctcttcaggaggcaatgttggcagtggcatccagcattcggcggctggctgaggcaatggatcaaagtaaaagtacaatcaatccctctgaattgctacaggctgttttggagattgatggtctggaagaagctaaacagatgtatgcattcgagtatttgaatgccgaccctatcaaagctagggcattcatgacatataatgttcggatgaggaagatgtatttgtttcgtcagttttggtggtggaaatgaatgacaggtgctgaatttcgaaaaccttttggtatatgatctatattagatgttgacaaattgaaccttatttcattgatcattagaaatgaatgtacagatttcatatgtaaagaaacaatctgggagctatg

SEQ ID NO: 35282 - DNA, 315 bp, Gossypium hirsutum
  Clone ID: LIB3149-049-Q1-K1-D9
gcagccgttacccaaatttaaggatggattcacaaattaagtttgctgtggtggtgaaaattatgggaaggacgggatcgagaggtcaggtgactcaagtgagagtcaagtttttggatgatcagaaccgttttattatgaggaacgtgaagggaccggtcagggagggagatattctcaccttgctcgagtctgagagggaagctaggaggctccgttgataacttcctcttatctccgttttgttacgttattaatggatgagttgtttttaaagtataatcattatgtttaaatgaactaagttggtttttg

SEQ ID NO: 35283 - DNA, 395 bp, Gossypium hirsutum
  Clone ID: LIB3149-049-Q1-K1-E1
ggtgtttatcgttcgtggacgtataaaacgtatccaaagccttagcaaaggcgtggttgccacaagtttaatcgagccaggaggcttcctaggtgacgaattgttgtcatggtgtcttcgccgaccatttattgaccgtcttccagcctcgtccgcaacatttgtttgtgtagagccgattgaagcattcagtctcgactcaaaccatctcaaatacatcacagatcacttcaggtacaaatttgccaatgagagacttaaaagaacagcaagatactattcatcgaattggcggacatgggcagccgtgaatatacaacttggctggcggcgttacagaacgaggactcgaggtccgatgatttctgctgccgaaaacggcaacagcagtgacc

SEQ ID NO: 35284 - DNA, 395 bp, Gossypium hirsutum
  Clone ID: LIB3149-049-Q1-K1-E10
gttcgccggtgctggcggcgctttgggtcatccgccgccggattccccgacccttgattggtcggagcaggtctatatctggtctctcgccctcctcaaaatgctcaagcatggaagagctggagttcccatggaagttatgggtttgatgttgggagagtttgttgatgagtacactgtgcgtgtcgtggatgtctttgcaatgccacagagtggtaccggtgttagtgtcgaagctgtggatcatgttttccaaacgaatatgcttgacatgctcaaacaaactggaaggccagagatggttgtgggttggtaccattcacatccaggattcggctgctggctttctggtgtcgacataaacacacagcagagttttgaagctttgaatcaaa

SEQ ID NO: 35285 - DNA, 389 bp, Gossypium hirsutum
  unsure (1)..(389): unsure at all n locations; Clone ID: LIB3149-049-Q1-K1-E11
gatacttccgatatgttatttggttcatcgccatgggaacgtcgccgccaggctcaccagcgtccttccgagggtagctcaccttggattgtggctgctttcattgtgctgctgctgattttggtacagtatcagtcagtttttcgcgagagctggctggtatgatactgtatatgtgtttagatacatgataaaaactagttgtgaatttcttattttggttggtttttaggtgtttgatatgtgatagactgaactgggtttgcctttatcagatgaagtataagcatgtatgatagttttgtattgtaaataacattgcanaacacaaaagaagttgcttgtttaacacagagtatctcatggttttaaataatntctaccagaaa

SEQ ID NO: 35286 - DNA, 389 bp, Gossypium hirsutum
  unsure (1)..(389): unsure at all n locations; Clone ID: LIB3149-049-Q1-K1-E12
ggatcatttatattctccattatgacctgattgaaagttcatgatggagaatataaaaagagagtgagaaaggttttattcctttgcctgattagagacatggagaagtggagttttatgctagttattgcattagttgttgttcacgctagtgcaagaaatgtgcccacaactacaactgtgcccactagcactactcgcagtagtgtaccaagtggtgctactggtgttggcgaccaaaagaacttcctctaatggcttgccatttggtgggagtgggggtctgggtgggattactcccctcggtggtgcaagtggacttggaggtggagtcnggggccattggtggagtaggtggacttggaggangtaatgggactcgtgggctc

SEQ ID NO: 35287 - DNA, 312 bp, Gossypium hirsutum
  Clone ID: LIB3149-049-Q1-K1-E2
caatcggatcaagagtggaacgtactaatcaatccactctgtaattgactagcagtgctgtttctggacgatttgatggatctggaatgaaagctaaacagcatgtactgcatgtcgagtatttagaatgaccggaccctatcacaagctagggcaattatgaccatataatcgttcaggatgaggcaagatgtatcttgtttcgtcagtgtatggaggtggaaatgaatgacaagtgctgaatttcgaaaaccttctggtatatgatctatattacatgttgacaagacgaaccttatatcattgatcatt

SEQ ID NO: 35288 - DNA, 191 bp, Gossypium hirsutum
  Clone ID: LIB3149-049-Q1-K1-E3
gctgtttatctttcatatcgtctaaaacttttcttatcccaccaacacacatttcgggcaaggtaatcgaccgggggctggataatgacgaatcgttacatactatcttatccgtccattcattgaccgctttacactcttctacaacagaattagattgttgcaatcctaccagagactttcagaactcg

SEQ ID NO: 35289 - DNA, 404 bp, Gossypium hirsutum
  Clone ID: LIB3149-049-Q1-K1-E4
gccacgcgtccggttcgaccgcgaaccggtgacttttaacggtatgaccacttgtttgggtaccaaaacattggatatacgggttcaaactctaacatataactaagaaaaacaaagatgaaaaaaacaaaaaatgaagctgcaaaaaaaaaaagaagattggaatacacagattctgactttgttgtgatcggcgaagctgtaactcaaatgattggacgactcaaatggatgccccttcttgtactgagtgcaaaactttgtccttcaagtattgaaggcgcattctttgccttgctcatgtcgattgataactttggacttctatcatcctcatggggaggaggcttgctgcttcacacgttgaatgttactcgaaccaaattcggaaatctttggctggc

SEQ ID NO: 35290 - DNA, 399 bp, Gossypium hirsutum
  Clone ID: LIB3149-049-Q1-K1-E5
cgctctcatcattttccttctgctaccttctctcaacccaaacacatatttcccaggaaaaagaaaaagcttgagcgaacaagaaaatggccgatcagcttaccgacgatcagatctctgaattcaaggaggcctttagcctgttcgacaaggatggagatggttgcattactaccaaggagttgggaactgtgatgcgatcacttgggcagaaccccactgaggcagaactgcaagatatgattaatgaagtcgatgctgatggaaatgggaccattgattttcctgaattccttaacctgatggcaagaaaaatgaaggatacagactctgaggaggagcttaaagaggcattcaaggtgtttgacaaggatcagaatgggttcatttctgcagccg

SEQ ID NO: 35291 - DNA, 369 bp, Gossypium hirsutum
  Clone ID: LIB3149-049-Q1-K1-E6
ctttaacgcggttgacacacattggttgggtcccaaaacatatggagatacgcgggtcaaacatctcgcatataatcttaaaaaaaaaaaaaaaaaaaaaaaaaaaaaaaaaacaacaaaaaaaaaaagaaaaaagaaataccaaaatactgactttgttgtgaacggcgaagcagtaaactcaaatgattggacgactcaaatggatgccccttcttgtactgagagcaaagctttgtcctacaggtatagaaggcgcatgctttgccttgctcatgacgattgataactttggacttccatcatcctcatggggaggaggctagctacttcacacgttggacggtactcaaaccaaattcagaaatc

SEQ ID NO: 35292 - DNA, 291 bp, Gossypium hirsutum
  unsure (1)..(291): unsure at all n locations; Clone ID: LIB3149-049-Q1-K1-E7
aacacgcatcaaganccaccccctaccacttaccaacccaaacacaaacacaggggcagggcgaaaaagcatgtgggaacggcgacaaaaaccaatcacataacccaaaaacaacaaggtatatccatgccggtctatataacgctcgacccgaaaagataaaagctcagtacaaccaatatcaatggaaaacagaaccatatacatgagtcagaacgaagagcagaccaaactcagatacaaaagcactacacaacatccggccgcaaactagaccaatccactctcgca

SEQ ID NO: 35293 - DNA, 408 bp, Gossypium hirsutum
  Clone ID: LIB3149-049-Q1-K1-E8
tacattttctcatttggtgcagttggtgcactcttgggggcaatactctaccaaaatatattgaaggatcatccttttcgagacttgcttttctggattcagttattctatggtttggcagggatgttagatctgatattggtgctgcgaataaacttgaagtttggaataccggattctgtctttgttgtgatcggcgaagctgtaactcaaatgattggacgactcaaatggatgccccttcttgtactgagtgcaaagctttgtccttcaggtattgaaggcacattctttgccttgctcatgtcgattgataactttggacttctatcatcctcatggggaggaggcttgctgcttcacacgttgaatgttactcgaaccaaattcggaaatctttggctggcg

SEQ ID NO: 35294 - DNA, 390 bp, Gossypium hirsutum
  Clone ID: LIB3149-049-Q1-K1-E9
gttcgccggtgctggcggcgctttgggtcatccgccgccggattccccgacccttgattcttcggagcaggtctatatctgctctctcgccctcctcaaaatgctcaagcatggaagagctggagttcccatggaagttatgggtttgatgttgggagagtttgttgatgagtacactgtgcgtgtcgtggatgtctttgcaatgccacagagtggtaccggtgttagtgtcgaagctgtggatcatgttttccaaacgaatatgcttgacatgctcaaacaaactggaaggccagagatggatgtgggttggtaccattcacatccaggattcggctgctggctttctggtgtcgacataaacacacagcagagttttgaagctttgaa

SEQ ID NO: 35295 - DNA, 399 bp, Gossypium hirsutum
  Clone ID: LIB3149-049-Q1-K1-F1
atttccaagtcacgtgagtcgttgactacacgaacactccattccgaacttgtttacaattactctgggtctaagcatatcaccgaatccctgaaacgatgtggtatttctgaaagttcaaggtatgtccttgccgctcgatttaacgcttctcccgatgagatgaaagctgtggagaagcttatcaatggaaaagagatcgatttagatgagtttgaaggaagagcagaccaagctcagatacaaaagcactacaaaatatccggccccgagctaggcatatccactctcgcagatgccataacatgtcgaattgctgctcgagatgctttatgagatcaatttcagaaggcattgcttcttagacaaaaatggagcagagagcaaagaaatgtaaat

SEQ ID NO: 35296 - DNA, 382 bp, Gossypium hirsutum
  Clone ID: LIB3149-049-Q1-K1-F10
aacatccactcatggtaccgtcaattctttcccttccttttcttactttcacgttagctgcccttcatgagggcaaaaaggaggtttgagaagaagggccagagtccgtacttatgggatcaagtgttctgcataagtatattatgcaaaaggttctgcagctgtgaatgaaaaaagcgttatagtcactcttttagctggaggcaaaggcataagaatgggttttatatactttatcacgaatgattgaagtgaaagaaattggcgagggctgcgatccatcgtacgacgacatcttcaaagaagccagagacaaaatttatgtagaccttaagttcacgctccctgggaaggagagacaggattctgttcacagtgggct

SEQ ID NO: 35297 - DNA, 394 bp, Gossypium hirsutum
  Clone ID: LIB3149-049-Q1-K1-F11
gagacaagagacagctgcagaaaatggttcagctgaaaagatgaagaaagagacagccttgacagtaaatatctcagctgagaagatgaacaaagagacagccttgacaataaataactcagctgagaagatgaacaaagagatggccaggacagtgaatagctcagctgagaagatgagacaagagacagctacagtaaatggctcggctgagaagatgaagaaagagacggccttgacagtaaagagctcgaacgagaaggtgaagaaagatacagccttgacagtaaataactcggctgagaaggttaagaaagagatcgcttcaacagtgaatggctcagctgagaagatgaaaaagagaccactgtggcagtttcgaaatcacctgaca

SEQ ID NO: 35298 - DNA, 147 bp, Gossypium hirsutum
  Clone ID: LIB3149-049-Q1-K1-F12
gagactttccataagccataattatcatccactttagagcagtgaggctctgctcatcatggttaatgctatggtccctgaatgtataggctggctgaatgcattaatcaaaggaagattatgcttcatcataaaaaaaaaattaac

SEQ ID NO: 35299 - DNA, 402 bp, Gossypium hirsutum
  Clone ID: LIB3149-049-Q1-K1-F2
aatttgtggtgtgccatcactttgtttatcattcaactggaagaaagatgttagcagtgagagtgatttgaaaaatgcaggcgatttttgtttgcctttaatatcagcggctgtaagagatattgagaggggaaagttcccagaaagttgctttctgaatatagaaatcccatcttctcccctagcaaacaagggattcaaactgaccaggcagagcttatggaggtcacctttaagctggaaagctgtatcagcaaataggcaccctgctgcaggccaatacctgtcgaatcagcaaagtcttggtattaaacttgcacaacttatccgggatgcctccgctgccggtgcagcgaggcgcttgaactcgcataggaagaatgttgagattgaatctgttgg

SEQ ID NO: 35300 - DNA, 198 bp, Gossypium hirsutum
  Clone ID: LIB3149-049-Q1-K1-F3
ctccaccttacgtcaagagaatgcactgaaattttaggtttttaaattttgcacttttgctctttgcgtaataatatatatgtagaattttcctgaatcatttcaaagaaagtaatcgttcttgaattttcgaaatgctctttgctttccttatgtttatgtttctggttgggtttatctgagaaaagaattttgatt

SEQ ID NO: 35301 - DNA, 404 bp, Gossypium hirsutum
  Clone ID: LIB3149-049-Q1-K1-F4
gtttggtgccactgtgaatgtagctaaacccaaaaagggtcaatccgttgcaatatttggactacgtgctgtcggtcttggtgctgctgaaggagcaagagtttctggggcttccaggatcattggtgtcgatttgaaccctagcagattcgaactagccaagaacttcggtgttacggagtttgtgaatccgaaagatcacaacaaacctgttcaagaggtcattgctgagatgacgggtggaggagtcgaccgcagtgttgaatgtaccgggagcatccaggccatgatttctgcatttgaatgtgtccacgatggttggggagttgcagtgcttgtgggggttcccaacaaagacgatgcattcaaaactcatccagtgaatctactgaatgaaaggactc

SEQ ID NO: 35302 - DNA, 396 bp, Gossypium hirsutum
  Clone ID: LIB3149-049-Q1-K1-F5
tgagttcctatcttggaacaattatgatgtctgttcctatttttaagtgatcagtttactaatgtaaggaagaagcagatgagttgtgccgaacgctggaggagaaagaggacagttcatgtactgcctcagaaatggcagatgtgatctacgatgctatggtttataattatttttagctttctgcactaaatattcaagaaagttttatctgcttgagttgacctacgtatcttatgaggggctgacaacaagtgctttccttcctctttgtgggggccttcttcaggctcagggcctatacccacgggaaatgagatatagtttctcatgcaagaataaatggggaactcgtatcacaccaatggctctatggcctgacaaatcatttgcact

SEQ ID NO: 35303 - DNA, 393 bp, Gossypium hirsutum
  Clone ID: LIB3149-049-Q1-K1-F7
acccgcacgcgtccgaaggagtcattgctaacggagcaagtctagtggtgggatggacgtctagtcatatctagacggggaagaggattttatatcactctaacgtgctgacattgggacaccggagattggagaacagcatactgtgaacagcaacatcagcagctttagtagcgatggatacacttatctgaagaaatccacgtttgtgaaggtgaaaatggatggaaccccaataggaaggaaggtcgatctgaatgcccatgaatcgtatgaaaagttagcgaaaacgttggaagatatgtttctcgaaaccgccccgggtgtcaatccatctggatcaacggcgctgcagcttgatatgcagaacaggatgacaagacactcgagact

SEQ ID NO: 35304 - DNA, 360 bp, Gossypium hirsutum
  unsure (1)..(360): unsure at all n locations; Clone ID: LIB3149-049-Q1-K1-F9
ggcattttgggtaccagagcttcttcccctccccaaagagaaaaggaattttcctggaaaatcatatattgagcaagttgtacctctcaaatttgggagcagtaataagcaccacagtcaaagaagcaaatatggtgggagacactccgggttaggcaatagatgaaagaattcaactgttggaaacacatttttcatatgctgaaaatctttcaacttgcatcgcatcgggtacaatcaaattttaatttgacaaaaagaatacagatgcctgagaattataaattaagttactagtgaaaaaaacaattggataactataaaatatatcttttttaatttanaanannnnnnnnnnna

SEQ ID NO: 35305 - DNA, 404 bp, Gossypium hirsutum
  Clone ID: LIB3149-049-Q1-K1-G1
agagaactgctgaatctgttgctgttgctgctaacggatctagtcaagttgtggggtggcctcctatcagagcttatagaatgaatagcatggttaatcaagcaaaagtgctgacaatggagaaccgcaaaaaggagacctcgatggtcgagaacagcagcatcggcggctatcgtaacgatggtaacactaagctgaagaaatccacgtttgtgaaggtgaatatggatggaaccccaataggaaggaaggtcgatctgaatgcccatgaatcgtatgaaaagttagcgaaaacgttggaagatatgtttctcgaaaccgccccgagtgtcaatccatctggatcaacggcgctgcagcttgatatgttgaacaagatgacaagacactcgagactgctggat

SEQ ID NO: 35306 - DNA, 405 bp, Gossypium hirsutum
  unsure (1)..(405): unsure at all n locations; Clone ID: LIB3149-049-Q1-K1-G10
cttcccggagatggtccctttgttcggattcattggtaggctagaagagcagaagggttcanatgttttggcagaagctattccggaattagttgctgaaaattgccagatttgtttcctttggggcgcaaaaaaggactggtgaagcagattgagcagctggagatccaataccctgacaacgttagagcagtagccaaattcaatgtcccattggcccatatgattattgctggtgctgattacattttggtccctagtagattcgaaccatgcggtctcattcagctgcatgctatgcgatatggaacagttccgatagttgcctctactggtggacttggtgacacagtcaaggaaggattcacagggttcccaatgggagctttcaatgttgaatgtgat

SEQ ID NO: 35307 - DNA, 384 bp, Gossypium hirsutum
  Clone ID: LIB3149-049-Q1-K1-G11
ctcaaaagtaacaggaggtagtgctggtccgtttgcaatgggtggagttccagattatcgagtgcgacacagattttcaaacaatgttggtccaggtgccatttgtaggtcgcctaatccaaattgttccccaggtggccctgcagcatgcagagttcgatgaaaatgtcacctacttgtatacttgtttggtgtggcttttgtagcatgaccccctgtcaaaagtgacaaatttgcttgttaaaacaagggtggttttacttaattgtacctaatgtgtaagttgtctgtagtctgtgttgattatgtgttgattatgctattcaactgaagcttgtatcacttttttttgttttatcctttgccactggaatttcctgtcgg

SEQ ID NO: 35308 - DNA, 399 bp, Gossypium hirsutum
  Clone ID: LIB3149-049-Q1-K1-G12
ctcaaaagttacattgaagtagagctattccttttgcaatgggaggaattgcatattatcgggtgccagacactttttcaaagatagttgctccaaattccattattatgtcgcctaatccaaatagatgccctggtgaacctgattcatgcactgtacatccaatacgtcacctacttgtatacatgttccaagtggattgtgcaacttgaccatatgactattgctacagatgatcacattaaaacacctattgtattactaccatgcaccttaattcaaatgcatgctatgccatatgtaacaattcctatattatgctatactgctggacctggtgacacattctaagaatgattcacagggcaccaaaatgtaccttccaataaagaatgaaat

SEQ ID NO: 35309 - DNA, 407 bp, Gossypium hirsutum
  Clone ID: LIB3149-049-Q1-K1-G3
caggaggtgaacctgctggttgaagcagaccgacctgggaagcagcaggacggttatatatatagactgaatgctattttttcgcagaaggctgacgacgtcgtgcagttacaaacacaatttgctcatttcgagaagctttacaggagcataacattttagtatcttgttctggctattggtgttcagggatgaagagtagtaagccagagtggtgcaaccatgggtttgcttgatgattcactgattgccattcaacacccttcccttctttcttttaaattatatatatagccttcaagcaataggcaaaggaagtgatggatttacatgctattgtaaagttcagcagcattgtgattggatgcattatttgaatatgtcacaccatctttattttatgtaaa

SEQ ID NO: 35310 - DNA, 399 bp, Gossypium hirsutum
  Clone ID: LIB3149-049-Q1-K1-G5
ggagcagtgcctaggatcaaagagtctaagctctctctcctcacatacggcaaacttaacaatgtgcctgaagctgtttgcatgcaacatttgatggggattgatggagtgatagttgattttgttcaagagatctcgcatgcagtggatgacatgattatcaagcctttaaatgagggattaagagaaggggacgaggagactgggaccaagtcaaagctgcagttctcacagcaggagctctcttttctcttaaagctaattccagagttgatacagcactaacttgtccctaccactacagtttttttgtttttttaccaactttaccttcttttttaatattttggggctgtcttgctggataccttcgaagaagtcaaggtgacatttttatgt

SEQ ID NO: 35311 - DNA, 413 bp, Gossypium hirsutum
  Clone ID: LIB3149-049-Q1-K1-G6
cttctggatgcacagcctgtgttgcaataattcgaaacaagcaactagttgttgctaatgctggtgattcccgttgtgtaatatctagaaaggggcaggcatataatttgtctaaagatcacaagccagaccttgaactggagaaagataggattctgaaagccggtggttttattcaagtcggacgtgtcaatggaagtttaaacttggccagggctattggagatgcggagttcaaacagaacaaaagtttacctgctgaaaggcaaattgtaacagctaatccagacatcaacactgttgagatctgcgatgacgatgagtttcttgttttagcttgtgatgggatttgggactgtatgtcaagtcaacaactagtggattatgtacgagagcagttgaactctgaaact

SEQ ID NO: 35312 - DNA, 364 bp, Gossypium hirsutum
  Clone ID: LIB3149-049-Q1-K1-G7
gcaaagtactcgaggcaatcaaggcaaacttcaatgacaagtacgacgagtacaggaagaagtggggtggcggcatgatgggctccaagtcacaagcccgaaccaaagcgaaggagaagcttcttgcaaaggaagctgcacagaggatgacatagaggaattaatagaccttttgccgcagttcgtgtttttgattaaatagtcttttgtagtaaggtacgatcgattttcgactcgggtttactctcttttccggaggaacattcatatacttttgtggttgaactttctaaatgcctagtttgttgtttgtgctgaagttttgtgattttctaatgaattgtcaatcaatgtttttattttt

SEQ ID NO: 35313 - DNA, 226 bp, Gossypium hirsutum
  unsure (1)..(226): unsure at all n locations; Clone ID: LIB3149-049-Q1-K1-G8
caagaggagaacctgcttttggaagcagtattaccttttaagcactaggacngttatatggatacacttaatgctatataggtgcaagaatcttacaacaaccttcatttactaacacaatttgctcattactagaaactttacaagatcataacatcttaatatcttgttctggctattggggttcaacgatgaaaaataaaaacccagaatggtacatccacta

SEQ ID NO: 35314 - DNA, 391 bp, Gossypium hirsutum
  Clone ID: LIB3149-049-Q1-K1-G9
gaccttttgaataccagatcttctaccgcttcccaaatttaaatggtattttcctggaaaatcatatatgtgtcatgttggggctctcagatttatgaacaatattaagcaccacagtcaaataagcaaatatggtgggagacactcctggttaggcaatagatgaaagaaattctactgttgtaaacacattttttatatgctgaaaatctttcaacttgcattgcatctgttacaatcaaatttatatttgacaaataaaaatacagatgccctgagaattataaaattaaatttacttattgaaaaaaaacaatttggataacctattaaaaatataatctttgtttaattatctaaaaatatttatatatttattctatattttatt

SEQ ID NO: 35315 - DNA, 343 bp, Gossypium hirsutum
  unsure (1)..(343): unsure at all n locations; Clone ID: LIB3149-049-Q1-K1-H1
gcgagcagacaacnaggcctggaaagcaacggttggtattcaaatcaaacatcacctgcatcggaaaggttttcttgaaaagcaggaaagaaggataagatcaaatggtttagagaactagtaaacactcctctatcactcctaaaccagttggataaattatttgcatagcctactctgattgctgttatttgtgggaaaattagtctacattctttaagctgatcttcaactgcttcctacattgttttagcctagggaagaaagttcgcgagatgcacacgagtttggaaaacttgatctgttatagaacttggatacaacttactcttcaacagaagtg

SEQ ID NO: 35316 - DNA, 342 bp, Gossypium hirsutum
  Clone ID: LIB3149-049-Q1-K1-H10
cgagtctgttttccttgttaccctcgggattgcactgcttgttctcttcggtttatggcgtcacggtgaatttcagcggggctccaagaaaactaagagagctccaaaggtggaagtcggaaccaggactactgatacctcattggacgagtggcttcagggaactgcttacactcagtcagcttccaaatcgaagaaaaagaagtagatggggcagtgcttgcaggctaattgcaaactcatttcttggcattttggaaagtttaagtgagggcacaaatagtttgagaattaggcccagggaaaatggcatacctttgctattgtagtatgtgaaagatt

SEQ ID NO: 35317 - DNA, 222 bp, Gossypium hirsutum
  Clone ID: LIB3149-049-Q1-K1-H2
gagaagttcatgaggccatgggattactatttcgatacctgccctcccggtttaaaaacaggacctctatatggagaaccgaggggaatttccaagggccggaaatttcggcacactcggagacacacacaagggtcccctttgcgtatacccttatggatgattgaacaaagagtgggtgaacattgatccaaagaagcacacacaattatcaccacatgc

SEQ ID NO: 35318 - DNA, 402 bp, Gossypium hirsutum
  Clone ID: LIB3149-049-Q1-K1-H5
gtcaagtagccttgaaagcaatggtagttcttcaaatcaaacatcacctgcatctcaatggttttcttcaaaatcatcaaagaaggataggagcaaatggtttagagaactcgtaaacactcctctatcactcctaaaccagttgtttaaattattttcatagcctactttgattgctgttatttgtgggaaaattagtctacattctttaagctgatcttcaactgcttcctacattgttttagccttgggaagaaagtttgcgagatgcacacgagtttggaaaacttgttctgttttagaacttggatccagcttactcttcagcagaagtggagggtcatcctgaagaattaggatcacttgttgaagttttaaagagtggaatggttacaagtgatt

SEQ ID NO: 35319 - DNA, 407 bp, Gossypium hirsutum
  Clone ID: LIB3149-049-Q1-K1-H6
ggaacctactctctcaatctgcagcacccatatcttcacttcttttgcataaaatgggctggtggacgttattagaaggatttttgcttcttgcaaatgctttggcaatattaaatgaggatcgttttcttgctcccagaggatggagtttctcggatttctctgcagggcgtacaaagtcatttaaagggcaacttattggtctcatttacgccactcaatacatgagagttcctctcatactacttaatgcaatctgcatttttgttaagctagtttctggttgatgctgcgctagaacgcatgaagtcgaatatggagcataagaatttgccgaaggttgtgtaagacggaagcagtcagttcaaaaattaggtgatgtatctgttttacacttaagtttgtat

SEQ ID NO: 35320 - DNA, 279 bp, Gossypium hirsutum
  Clone ID: LIB3149-049-Q1-K1-H8
acgggaacatagccttgcaatcactagcgcgcttttacacaaatcatctgcttcaagtcctcgggcgtactgaaacacgtggaggatagctacctctagattctaacagaaccaccaatcacccctatatcagtctatccccacgattgaaaatcgattacatcgcttactgccaatcggcttaaatgtgagggcatttaactacattctttcaccacatttaacacaggatactccctttcattctacttggtactatccgcataaatgtgcacacaa

SEQ ID NO: 35321 - DNA, 226 bp, Gossypium hirsutum
  Clone ID: LIB3149-050-Q1-K1-A1
gtttaatgtcattgttattttggttttggtttaatgtgtaaaaggtttttatacttttttttaaattaaaagtttagatcttggacgagatttcgctttaaaggatatatcttttattttattttaaaaaaaaaaaaaaaaaaaaaaaaaaaaaaaaaaataaaaaaaaaaaaaaaaaataaaaaattaaaaaaaaaaaaaaaaaaataaaaaaatttaattaaaa

SEQ ID NO: 35322 - DNA, 297 bp, Gossypium hirsutum
  unsure (1)..(297): unsure at all n locations; Clone ID: LIB3149-050-Q1-K1-A10
tcccgaatcgacccactcctccgaaaatatggattgtttattcgacagggatttctaaagaggtctttaaaacgggaagtgccacacaantcccaacccatgctcaaaaatactttctccgactaatcaatctcaaccgtcatcatttcacatctagcctctttcatatcaccaccgatactgttcacgctattcctatggaacaatatcgaattgatctacaaaaaaactcaactcatccatctgaaaccaatttttttcccattataccatctatttttcccatggcctttaacc

SEQ ID NO: 35323 - DNA, 283 bp, Gossypium hirsutum
  Clone ID: LIB3149-050-Q1-K1-A11
ctttcctcacatgacgccaacgacaaaagaagcatagtaggtacaggatgatttgggagagattcttccctcacaactcggctagattgacagtccctggaggagctagcgtggcatgcagcactgctaaagctgttgagtgggatgttgcctggaagaacaaccttgatccttcagggagggctgccctgggagtccacctctcggcttacgatgcagaggctcctctcatcagcaacgtgccatccaaggttatcgatagtataccacggatggtggaagt

SEQ ID NO: 35324 - DNA, 285 bp, Gossypium hirsutum
  Clone ID: LIB3149-050-Q1-K1-A12
tgaagttgagggaccaggtggttttgtttggaatgggggaccaaacgcgatgtgggaggcagtgaaatatatgcaaagttgggagagcttagaaagtttattaaagaagcaggttatgttactgacactagctttgctttgcaagatacggatgaagaacaaaaggagcataatctttggaaccacagtgagagacttgcccttgcatttggattaattaatactccaaatggttcaactattaaagttttcaagaaccttcgtgtttgtggtgattgtcattct

SEQ ID NO: 35325 - DNA, 396 bp, Gossypium hirsutum
  Clone ID: LIB3149-050-Q1-K1-A2
gttaaaaggctcattattctctgtttcgtatttctcttaaaactctacaatggctaaaacctttgcttgctttgtcctattagctctcatagttagttgcgcacttggtcaggctcctagctcggccccaaccaagtcaccgccgtcttctaaccctactccggctcccaaggtttctccaaccatgtctccaaccactacaccaaccgcatctccgccgtcaacatccactcccccgtcttcagcccctgaatcttcaccaacttcctctcccaccacttctcccccagctcctcccgctggttctcccgctggttctcccgctggctctcccgctggctcttccgctagcgctgtttctcccacaaactccatcagcgatacaccaggcagctc

SEQ ID NO: 35326 - DNA, 402 bp, Gossypium hirsutum
  unsure (1)..(402): unsure at all n locations; Clone ID: LIB3149-050-Q1-K1-A3
cagatatcagttcctgagatcacaaacgctgtgtttgagccctcaagcatgatggctaagtgcgatccaaggcatggcaagtacatggcttgctgcctgatgtatcgaggagatgtggtgcccaaggatgtgaatgctgctgtcgctaccatcaaaacgaagaggaccgtgcagtttgttgactggtgcccaactggtttcaaatgcggtattaactatcagcccccagctgttgtccctggaggtgatcttgctaaggtgcagcgagctgtttgtatgataagcaataacacagcagtggcagaggtgtttgcacgcattgaccacaagtttgatctgatgtactcgaagagagcttttgtgcattggtatngtggagagggcatggaagaaggtgaattc

SEQ ID NO: 35327 - DNA, 371 bp, Gossypium hirsutum
  Clone ID: LIB3149-050-Q1-K1-A4
tcgaatatatcaattctctgagatcacatacccttttttttgatccctcaagcatgatggctaactgcgatccaatgcatggcaagtgggtggcttgcttcctgatgtatcgaggagatgtggtgcccaaggatgtgaatgctgctgtcgctaccatcaaaacgaataggaccgtgcagtttgttgactggggcccaactggttttaaatgcggtattaactatcatcccccatcttgttgccctggaggagatcttgctaaagcccaacgagcttgttgtatgataagcaataacacatattggcagaagtgtttgcacgcattggccacaagtttgatctgatgtacttcaagagagcttttgtgcatt

SEQ ID NO: 35328 - DNA, 139 bp, Gossypium hirsutum
  Clone ID: LIB3149-050-Q1-K1-A9
tttttcatccatttttttcacccccttcccttaccaggtcgttttaaaaaaaaatgttgactataatatcccccttcttctttacaacactcttcttcccccaatcaactatcttcctatccattttccttccacatat

SEQ ID NO: 35329 - DNA, 333 bp, Gossypium hirsutum
  Clone ID: LIB3149-050-Q1-K1-B1
gaaaaacgtgccgacaatgtatggttggctttagaaggtgtttatctccccattaccgagagtaagtagtatatatgtttaacggatcactacttcagaaaagcaggtacatgggttttttggatttgtaggtggttggtgcctgtttatttagtacctataaccatcttatgaaatcaagtagtatatttgcaggacaattctctgctaagtactttataatgcatgcttatgtaacttgagagttgagactatgtattcatgagtttaattttttcactaaaaagcagctttttctcaaaaaaaataatatataattaaaataatttaatt

SEQ ID NO: 35330 - DNA, 284 bp, Gossypium hirsutum
  Clone ID: LIB3149-050-Q1-K1-B10
gcaaaagccatgggttggcggccaactctacgtgatgggggcgaaggtgctgacggagggtacaggatcttgacatgtgacaagcgtcatggttgaacaaattggaactataagtattatctgtgatgtttggtaatgcaagttggaaagataattcgacaagcgcagtcatttgcaagcgaaagaaagaagcttgtgtatcgaaatttgaactgcagataagaggattgaaggatgcaagtcatgggacggggggatgctgatgagtttcagctcttataatt

SEQ ID NO: 35331 - DNA, 282 bp, Gossypium hirsutum
  Clone ID: LIB3149-050-Q1-K1-B11
acaatatgtacaaggaataccgagacacaaccctcaggggggctgtagaacagaggtgcacccagatggcgtctcttcatagggtgaggtttccttgtattcaaatcatcaagacagctaccatcccagcaaaactttgcaagagggacagcaccaagcagttccacaactccaaaatcaaattcccactggtattcaagaaggtcaggccaccaactaggaagctcaagacgacatacaaggcaaccaaacccaacttgtttatgtagttatttttcatgg

SEQ ID NO: 35332 - DNA, 282 bp, Gossypium hirsutum
  Clone ID: LIB3149-050-Q1-K1-B12
aagcgtttgtctcatatctcagaagatggcccgtacgaggcaaaccggccgtaaggggactggtgggaaggctcctaggaagcaacttgctaccaaggccgcccgtaaatctgccccaaccactggtggtgtgaagaagcctcatcgataccgtcctggaactgttgctcttcgtgaaattcgaaagtaccagaagagtactgagcttcttatcaggaaattgcctttccagaggcttgttcgtgaaattgcccaggatttcaagactgatttgcgtttcca

SEQ ID NO: 35333 - DNA, 288 bp, Gossypium hirsutum
  unsure (1)..(288): unsure at all n locations; Clone ID: LIB3149-050-Q1-K1-B2
aaaaagcatcaaggttatcgacatttccttttgtgcagtcataacatccacatggtatgtgtatttaattgcagtacatccatgtaagtatcattgatttctcacaatgaccaaaacttcttcctggtggcggtaacactagcacaggtctcagctggttgagaaagtcatcctgttgaatgaagtcgtacacatgttattttgagtgatttttttcccaattggatacttttcttaatcttcattaaattctatagaaatgttggagctagtttttctaannnaaaa

SEQ ID NO: 35334 - DNA, 294 bp, Gossypium hirsutum
  Clone ID: LIB3149-050-Q1-K1-B6
aaggggaaaaacaatttggccccaaaaaaaaaacccccccccccttgggtggggcgtttcattttacaaacccaggtttaaaattttttgcccaaattttttaaaaaaccggattaaaggggcccctttttttttttttaaaacccaatttttgggggggttgttcccccccagcccaaaatttcaaccgggaaaaaagggtttggaaaactttcccgggaaaaaaaaatttttttcccttttcccccgtggacaaaattttttttaggggccccgccttttgcccccccccct

SEQ ID NO: 35335 - DNA, 385 bp, Gossypium hirsutum
  Clone ID: LIB3149-050-Q1-K1-B7
gtggacaacccagtgctgaaagctgagcaagatgcacagattggaaaaggctcccgtggagatgtaactatactgccaacccttgtgataaacaacagacagtatagagggaagttggacagaggagctgttctcaaggcaatttgtgcaggttttcaagagaccacagagccagcaatttgcttaactgaagatatacaaactaacgagtgcttagaaaacaatggtggttgctggcaggacaaaagtgccaacataactgcatgcagggataccttccggggaagagtgtgcgaatgcccgttagttaatggtgtgaagttttctggagatggttatacacattgtgaagcttctgcggctttacgctgtgaaatcaacaatg

SEQ ID NO: 35336 - DNA, 395 bp, Gossypium hirsutum
  Clone ID: LIB3149-050-Q1-K1-B8
caaatgatggcattgagttcttaaggacttacctgaaccttccttctgagattgttcctgctactttgaagaaacaagctaaacctgctggtcgtcccatgggccctcccggtgactgtccacgcggcccaccacgctttggtgacggtgagaggagatttggtgacagagatggctatcgcggtggtcctcgaggaggcggtgattttggtgataaaggaggagctccagctgattatcagccttcattcaggggccctggaacacggcctgcttttggtcgtggaggtggtggttatggtggtgctggacctgctggtcttccttgagagatgatttttcatgatggataattttgtcagtttaggtttgttatcatatggagttcatagaag

SEQ ID NO: 35337 - DNA, 283 bp, Gossypium hirsutum
  unsure (1)..(283): unsure at all n locations; Clone ID: LIB3149-050-Q1-K1-B9
tgcacactgatattttacccaaatctctccttcaaaggaggatgaatatggtgcggggcgcaatcaaattgcacgtttcggttcgaacggtcaagccgacccacgtcttaccttcattccttcgcgaaccgccgaaacggttctccaccgaaccggatcaacagcaacaacagccgctacccgacgcctccatcaatcaatttctggattcagctagcaaaggttttgtttatgggaaactctntggaatcacaaagtatacaatgaagagcgatataatcag

SEQ ID NO: 35338 - DNA, 285 bp, Gossypium hirsutum
  Clone ID: LIB3149-050-Q1-K1-C10
cagcatcatggggtcagattccatttttttttaatcatgggcgaactggatgcagacagtttcagagaagtcaacgaacgcctgcataaagagaatatcttttggtcttgaatgagcggagtagggggagggaatcatgaatttggacatgcataaggagtggagtcaggtagctcgatcacacttacatgtcaacacgagcatcagttttgcctttatcgtggttttctcccagtaaatctagtttgatggaatggatgatcaatcatctggttcaaacaacga

SEQ ID NO: 35339 - DNA, 214 bp, Gossypium hirsutum
  Clone ID: LIB3149-050-Q1-K1-C11
agaccggccgaagccggtccccacctcgatcttccttaccccctcctctcggggcactgggaccgacgcttaaatttcccctatcccatacagaattttctcctactaccaacaaccatcccttctcaaacatctatacaagcaaccccttcccctactacacatactctcatccctatctaatacacacaaagcttttatattcatctatttt

SEQ ID NO: 35340 - DNA, 284 bp, Gossypium hirsutum
  Clone ID: LIB3149-050-Q1-K1-C12
ttaagaacttgcatgccaatgggatagaggtcttcctgggagtggtttttacccatagtgctgaaggtggagccctgcaaggacttgatgatttatcctattatcacaatagtgttgaagatttagaagctagaaatgctttgaattgtaactatcccgttgttcaacagtttattttagatagccttcggcagtgggtgactgaattccacattgatggtttctgtttcatcaatgcttcatgtctgttgagaggggttcgtggtgaacgcttgtctcgtcct

SEQ ID NO: 35341 - DNA, 257 bp, Gossypium hirsutum
  unsure (1)..(257): unsure at all n locations; Clone ID: LIB3149-050-Q1-K1-C2
gggaaacaatggttcgcattacggggtatgaaggtgaaagctgatagggatgagtcttccccttatgccgccatgcttgcagcacaagatgtttctcaacgctgcaaggagttgggtattacagcccttcatataaagcttcgagctactggagggaacaaaaccaagacacctggtcctggtgcccagtcagcacttagagccctcgctcgntctggcatgaaaattggacgcatagaggatgtcaaccccatttc

SEQ ID NO: 35342 - DNA, 394 bp, Gossypium hirsutum
  Clone ID: LIB3149-050-Q1-K1-C3
cttgaatttgtttgcttggggcttgtaaagaaggagaagaaaaagatggcagatgatagtacagctacctgcatagatatcctcttagccatcattttgcctcctctcggtgtcttcctcaagtttggttgccaggtggagttctggatatgtcttgtactcaccctgtttgggtacatccctggtattatttatgctatctatgccatcaccaagtagtcctctaatcccgtccttctcatctgtggagatttggagtaggattctggttttgtttgaatatgtgtcggttatagtattttatttcaattaatattttgtctgttaatttgatggtgatgtaaagcttgttgttatgttatgatgatgatttatattgtggggaggggggggg

SEQ ID NO: 35343 - DNA, 399 bp, Gossypium hirsutum
  Clone ID: LIB3149-050-Q1-K1-C4
aaaagcccctcaaaacagatcatccaattagatggaggagcaggatcgatcctctcaaccccgtcctccacatgtcctcatctgccccctcccattacagggccatataaacaccatgattaagctggctgaactgctacctatcgccggcttcaagctcactttcctcaactcccaccacaaccataaacgcttggtcaagttcaacaatattgctgcccattttgaaagatacccagggttcgaattcaagaccataaccgatggtctccctcttgatcatcctaggtcagggagctggttccttgatatgtttgaagaaaccatggaacctaagatgaagcaaagtttgagagaggtacttgtgaatagcagcccaccagtagattgcgtaattgc

SEQ ID NO: 35344 - DNA, 394 bp, Gossypium hirsutum
  unsure (1)..(394): unsure at all n locations; Clone ID: LIB3149-050-Q1-K1-C5
ccaaagaccaacaaggacattanccctaacttttcagctttttcatcatctggggtgttggagctagacagccaacaccggctgttgatatcatcttcttcgtcaccaacatcctccatggattgcttcaatttcacaaaaacaagctatcaaccccaccagtacgtgaagatggaagaacataatttcttcactgcagatgaagcttgtaatttcttttcagatgaacaagctccaagtcttcattggtattctcctgaacaatggaactaaaatgaagctccaagatttttgtaagatgggaattatgtaagaagttaaaaactagtacccaataccatgatcttcagcctgtgatggaagtcaataatgcaaaaaagaaaagaagggaata

SEQ ID NO: 35345 - DNA, 387 bp, Gossypium hirsutum
  Clone ID: LIB3149-050-Q1-K1-C6
ggtttccccccaggcttcctgagttgcatgcctctgattattttgatgctacagcatatgactcaaattttaattctgttgattcttttgttccgttaggaagcaggtcttgatgcccagactcgggggctactcatcacgtgtgccaaaatgcttcagatttacagggctctgctccgtatacaggtaattcttcttttttaatggggaatggagtctctactaaaatttcatttgtttggagtacaactattcctacgaaggcaaaattattacatctatcgaatgtgctatgtgtgccgagtattcgaaaaaatttattatctgtgtctaattttgctacagataacaatgtgttttttgaatttcacccctcgtattgtgtga

SEQ ID NO: 35346 - DNA, 395 bp, Gossypium hirsutum
  Clone ID: LIB3149-050-Q1-K1-C7
catgaagaggagtaatgacaagcaattaaaaatagagcatgaattgtgtgaaagggttaaggcatggcttgcagatgaaaaagatgttcgccttggggactggaaagcagctgatattgagatattgaatacttttcaattgcttagtgccaagccggttgtttatttggttaacatgactgagaaagattaccaaaggaaaaagaacaagttcttaccaaagattcatgcttgggtgcaagaacacggtggtgaacctatcattcctttcagtggtgtgtttgagagaaaccttgctgatatggaacctgcagatgctgcaaagtattgtgaggaaaacaaggtgcaaagtgctcttccaaagatcatcaagactggtttctctactattaatc

SEQ ID NO: 35347 - DNA, 395 bp, Gossypium hirsutum
  Clone ID: LIB3149-050-Q1-K1-C8
tgatttctttgagatcaaggctgttaaggaaattgagccatcattgaagaggcaacttatcatatccactgttctcatgactattggaattggggttgttagttgggtagctcttccatcttcctttaccattttcaactttggagatcagaaagttgtcaagaactggcaactactcttatgtgttgctgttggtctttgggctggtctaattattggttttgtaaccgagtactataccagtaacgcatacagccctgtacaagatgttgctgattcctgcagaactggagcagcaactaatgttattttcggccttgcattgggttacaagtcttgcattattcctatatttgctattgcagtcagtatttttgttagttttagctttgctg

SEQ ID NO: 35348 - DNA, 279 bp, Gossypium hirsutum
  Clone ID: LIB3149-050-Q1-K1-C9
gtttttatacattttaaaaaccaaatcggatggtgcggggtctggattctgatggctggcatttgtggatctatttggctttgtcaagctttctttggcttcagctattatgttatgcttggagttttggtacttaatgatgcttatagtcataacaggtcacctgtcaaaccctttggtacctgttgatgccatctccatttgcatgaacataaatggatgggatgcaatgattgcaatcgggttcaatgctgctataagtgtgagagtatcaaacga

SEQ ID NO: 35349 - DNA, 134 bp, Gossypium hirsutum
  Clone ID: LIB3149-050-Q1-K1-D12
tatatacttactttttcatcttctcttgtaccaaatgatgttttattagcgcgtagtgggaagccaatcttccggatttagtctctattgatctacctaaccttcctttacaagatattcagttcttcttctat

SEQ ID NO: 35350 - DNA, 131 bp, Gossypium hirsutum
  Clone ID: LIB3149-050-Q1-K1-D2
taggcttcaaattggagttaatctttcccttctcctcgggaccgcttgcatgtctgttttggccaaatgggcttaaattttgcttacccagcctttcagtttttaattaatagagactcttttctttttgc

SEQ ID NO: 35351 - DNA, 126 bp, Gossypium hirsutum
  unsure (1)..(126): unsure at all n locations; Clone ID: LIB3149-050-Q1-K1-D3
cttcaaattgnanttaatctttcccttttcttctccaccgcttgcatgtctgttttggccagattttcttaaattttggtggccancctttcantttttaattaatagagactcttttctttttgc

SEQ ID NO: 35352 - DNA, 389 bp, Gossypium hirsutum
  Clone ID: LIB3149-050-Q1-K1-D4
gttattttggttttaagaagccagcaactgatgatccagtgaaaactaataaaatcccaaggcaaattccagaacaggcttggtacatgaacccagccttctccatcctaattgggggtatacttcaattcggggctgttttcattgagctctttttcatcctcacttcaatatggttgcatcagttctattacatattggcttcctcttcattgtctttgtcattcttattatcacttgtgccgagatcacagtcgtactctgctacttccagctatgcagtgaggattacctatggtggtggagatcatacttgacttcgggttcttcagcattttacttattccactatgctgccttctacttctttacaaagcttgagatcacaa

SEQ ID NO: 35353 - DNA, 213 bp, Gossypium hirsutum
  unsure (1)..(213): unsure at all n locations; Clone ID: LIB3149-050-Q1-K1-D5
taaaaccaaaacanttttaannatttattatttttaaaccaagagtctatttctcaatctgtacattttacaaagtcgaccgacatttattatttntattcttttcatcaatgctttcttcttcaatattatgtttataaaatgtcatactactttcattattatacttttaactaagtttatgctcatttaatttagtttgagaattttatc

SEQ ID NO: 35354 - DNA, 397 bp, Gossypium hirsutum
  Clone ID: LIB3149-050-Q1-K1-D6
ctacgctgcagagattggctgttaagaaggttaaagggatttcaactgaagagatggctactcgtaatgatctggtccttgcagtgccggacaggattcaagctatacctgatggaactgctgctactaaacaaactgggggctggatgtcttcagcatcttcagcttctcgtactgcaattaagtttgattcagatgagcgatttgacaacgaatactttcaagaatctgagcagtcaagtcagttcaggcaggagtatgaaatgaggaaaatgaagcaggaccaaggtttggatatgatttcagaaggtttggatactttaaagaacatggctcatgatatgaatgaggaactagataggcaagttcctttgatggatgaaattgacaccaaggt

SEQ ID NO: 35355 - DNA, 280 bp, Gossypium hirsutum
  Clone ID: LIB3149-050-Q1-K1-D9
ccggaaccgtatttttcgtgaccgtcggcggcatatggaggggttaggcagggagggggatttgtttttaggggttagagatattaattgggttcaacgcaagatctatctgtacaatgtcacctttggactctacatgttggattggtgggagcgttaccttttcaacacactggttattgtgttggtgtggttcgtcttctacaacagctcgcgatacttaacggacttttacaagatgcatctatcctagggttgggaggtggcaattgtgatggaa

SEQ ID NO: 35356 - DNA, 366 bp, Gossypium hirsutum
  Clone ID: LIB3149-050-Q1-K1-E1
tacacataggaagaaagatggatctcctatgacatccgaagctggagaaattatggagaaactaaatgagaagaaggcgaaatatgaagcgattgcttcgagtgatagttcttttaatcttgagaacattgataacagaattatcactgaagttttgggtcctaaaaggtacggtcgggttcgatttcaaggatctggtaccccgacccaatattttggatctggctcccagcaatacatgccttctggaagtcaagctcaagctgaagttcagaggttaagagatcagatagctcagatgcaagcgaacacggttgagcaaattgtcgaggttcaatgaaaatatgaagaacttcagcaacaact

SEQ ID NO: 35357 - DNA, 286 bp, Gossypium hirsutum
  Clone ID: LIB3149-050-Q1-K1-E10
cttggtatgacaactaatggggttacagttcccgtggtggcgacttgatcggacgcgggtctaaagcttaagtgagtgagtgattgtgctttgtgtatccaagctttagcaattttaatttagaagagatgttatgagagaataaacgaattgtacggagcatatttttgtgtgaagaagggttgtttcagttttattacccaagtacttgaatgtttcaagtttcattgcagttgtttctctactttaatgcatatgttgtgattatggtttctctacttaaaat

SEQ ID NO: 35358 - DNA, 281 bp, Gossypium hirsutum
  unsure (1)..(281): unsure at all n locations; Clone ID: LIB3149-050-Q1-K1-E11
cgccaccgctcctccacctcctcccggtgtgaaacgggggcgcggtcgaggtccgaaggtgttaccgtcnntgggttttcagtaaagtaggcaagttaataaatcaaagagaatggagaaaatgactcattccgtcactactcctacccctgccgcgttaggtgtaataattttttaaccttaattttttaggtgtcgtttagttatctgctaattgacgttttagctttttcgtttttttcttttagttaactttgggtggagtactgtaatgaatttag

SEQ ID NO: 35359 - DNA, 370 bp, Gossypium hirsutum
  unsure (1)..(370): unsure at all n locations; Clone ID: LIB3149-050-Q1-K1-E2
tacacataggaagaaagattgatctcctatttcattcgaagctggagaaattatgganaagcgaggtgataataaggcgaaatgttgagcgattgcttctgagtgatagttcttttaatcttgagaacattgataacagaattatcactgaagttttgggtcctaaaaggtacggtcgggttcgatttcaaggatctggtaccccgacccaatattttggatctggctcccatcaatacatgccttctggaagtcaagctcaagctgaagttcagaggttaagagatcagatagctcagatgcaagcgaacacggttgagcaaattttcgaagttcaattaaaatattaagaacttcagcaacaacttat

SEQ ID NO: 35360 - DNA, 397 bp, Gossypium hirsutum
  unsure (1)..(397): unsure at all n locations; Clone ID: LIB3149-050-Q1-K1-E4
ggaacagttgcttacagtggtgtatcttcatcatctaacattaatgttaataatccagttaggttccttcatcttttaagctgaattctttctggttcataatcagtctatggaaatatgctgtgaattgttatttcttctcttctttttttttttgatgtaacgttatcctgtttcataatggttcacagaccaaggtgcctgtctacctgggtggcatttctgtttttgtatgttttatggctgctgtggtgtcccttggaatttctatcgcaattgtgcctccacaatgagtggacgtttacaatcttctttcttttgtttggagcttttcttcatttgatttatcagcggngaaggagaatagtgacgcaactgaccccagtttctgctgata

SEQ ID NO: 35361 - DNA, 218 bp, Gossypium hirsutum
  Clone ID: LIB3149-050-Q1-K1-E5
gtatgttcagagttgtgacattgttgcattcaacaaaatataatttgctatctgggatgcctgcaataggagtttcttggagaggccttcaaagttatgtttgagattttcatgttttttgttttgctagaacttaatttaagttgtcgttattcttgtgttggacaatggatcgtttatcatggatttggagcattaaacacctgatggtttttttt

SEQ ID NO: 35362 - DNA, 400 bp, Gossypium hirsutum
  Clone ID: LIB3149-050-Q1-K1-E7
ctaaacacccctacaagtacaagtctccacccccaccacctccagtttacaagtataagtctgcaccacctccacctccgtcaggacccaagcacccttacaagtacaagtccccaccacctccaccaccatcaccaccaaagcatccttacaaatacaagtccccaccacctccaccaccatcaccaccaaagcatccttacaaatacaagtctccaccaccaccaccatcaccacctaagcatccctacaagtacaagtccccaccaccaccaccaccatcaccacctaagcatccttacaagtacaagtccccacccccaccgtcaccacccaagcacccctacaagtacaagtcacccccaccacccccaccatcaccccccaagcacccttacaa

SEQ ID NO: 35363 - DNA, 252 bp, Gossypium hirsutum
  Clone ID: LIB3149-050-Q1-K1-E8
gacaggttaaacttgctcttatgttccgcatactgaaagcaagggaagccggcgagttgaataccgctgccactctcactgaaatgctccgtgaaatagtaggaaaagagaggaaggaaggaaaactgacatctgaatgactatgataagcttctcggtgcaacttgttccaaaggtaaaaaaataaaagggtgtgacaattaaccgcgtgttattaagtactgcaactaaatttcctatctacctcggttc

SEQ ID NO: 35364 - DNA, 281 bp, Gossypium hirsutum
  Clone ID: LIB3149-050-Q1-K1-E9
cttggttccagtactggagggcgaaaaattatccctgagggtcttgggggagcagtggatcgttgaaagctttgctcaaggtggaaggacagtcatcacatctcgggtttatccgacgaaagcaatctatggagctgctaagctgttcttattcaacaatgctactgaggccagtgtcagtgcctcacttaggatctggcaaatgaactctgctttcattcgaccttatccaaacgataaggagtcccaataggaccgaatagaagttaatccaaaagtca

SEQ ID NO: 35365 - DNA, 285 bp, Gossypium hirsutum
  Clone ID: LIB3149-050-Q1-K1-F1
gagggaccaagttgaacctcataaaccctctgttgtcatacgcccaccagcagataaagataaggatcaacctcaaaaaaaaattataatcaagcgaccgaacgaagttattgatttggatcaacttagtcaagagggaggcacttatcctgaatacaggaaaacaaaaaaaatagttgaattgtcaagctttgagaagcatgggaagcaagaaagcttgcgattaatggagccaaaagcaagacggaaagctaaagaggagagaagaggtgggaagaggaagag

SEQ ID NO: 35366 - DNA, 213 bp, Gossypium hirsutum
  Clone ID: LIB3149-050-Q1-K1-F10
atgagactaaaccttttaaagctaaaaaacaaaacaggaagttcactaaaagagaagaagaaaaaaacaaaatacttaaaaaaactaaaaacaaaaaaacaaaaacttaaatttaaaacaaaaaatatttttataacaaaaaaaaaaaatgggccgccccttcttaatattccaattctacttccccggtcttccaacattttacttttcttt

SEQ ID NO: 35367 - DNA, 193 bp, Gossypium hirsutum
  unsure (1)..(193): unsure at all n locations; Clone ID: LIB3149-050-Q1-K1-F11
cctcaccttattctatttttttctcctctccatttctccncaagagaatatcaaaaaaaaaaaggacaacatccccacttacttactccccttactcttaatattcacttccccttccacctattactttttttttattctcatatcaatttaatcttactcttataatcactattacatattcctttttatc

SEQ ID NO: 35368 - DNA, 236 bp, Gossypium hirsutum
  Clone ID: LIB3149-050-Q1-K1-F2
gatgcaccaagttaaacctcataaaccctttcttttcatacacccaccaacaaataaagatgaggatcaacctctaagaaaagttatgatcaatccacctaaataagttattgatttgcatcaacttattcaagaacgaggcacttatccttaatacactaaaacaaaaaaaatacttcaattatcaatctttcataatcattttaagcaacaaagcttgctattaatggaaccaa

SEQ ID NO: 35369 - DNA, 399 bp, Gossypium hirsutum
  Clone ID: LIB3149-050-Q1-K1-F3
ggaaaaagcatggccgcaaagcccggttcagctccggtaacgtattcgccgaatcttggccaaaaaactcgcccccctattttcaaagacaacgatctcgattgggtccgacctgatggccgtggcttccaccagtgccgaccagcatttttcaggacaggtgcagtaaattctgcttccggatctgcttatgcagagcttgggagtaccaaggtcattttatctgtatttgggccaagagaaagtaagaaagcaatgatgtacagtgatactgggagattaaattgtaatttcagctatacaacatttgccactccagttcgaggacagggatcggatcacaaagagttttcgtcaatgcttcataaagctttggaaggtgcaataatgttggaaaca

SEQ ID NO: 35370 - DNA, 392 bp, Gossypium hirsutum
  Clone ID: LIB3149-050-Q1-K1-F5
actggttccatcctctatccgcattttattttaatcaaatcatgacaaatatttatgaggtgctttatccatgtttagcctgccacaaagcccgatactatactcatcaactccaagccatggctccagccactttcttgtgcctaaatcataatccaaaatcactacacccgatgacaaacatactcagaattcttgaatgacgagataccaacattcctttgagtttaaacctaaactctatcagcaatcataaccaccatttacgtgaattgaaaactcaaacacaaccataatctactagacagttttctctaaaactttcgcattgaccaaatcgtttctaaagacctacacctatacttgtataaattgacagtatcatcacattc

SEQ ID NO: 35371 - DNA, 394 bp, Gossypium hirsutum
  Clone ID: LIB3149-050-Q1-K1-F7
gttagcagccggacaaagtagcactattactggcacttatgctgggcagtttatcatgggagggttcttgaacttgaaggtgaaaaaatggctaagagcattgatcactaggagttttgctattgttcctactatgatagttgctcttgttttcgatacttctgaggcagcgctagatgtcttaaacgaatggcttaatgtgcttcaatcgattcaaatcccctttgctcttatcccactactttgtttggtttctaaggagcaaatcatgggtactttcaaaattggctctgtgctcaagacaattgcatggctcgtggctgtactggtgatattgatcaacgggtaccttttatttgacttcttctctaacgaagtcactggcgtaatgttc

SEQ ID NO: 35372 - DNA, 312 bp, Gossypium hirsutum
  Clone ID: LIB3149-050-Q1-K1-G1
ctttctgtttcaaaacaatcatcgactcaatctatttcctcaacattagatcaaggttctaatgcccctgaagcttatcatatcggttgcttctcggataacacgtagtcaataagcactaaaactgatttttcacaattttcttcttctatttcaggcattgcaatactttggcttcatctaaagcttgaaccagccctctgttgtatattgtttcttcttcttttctgatctttttcctttgattaatgagatgtgatgatgatttggcattataatttctcaccaggatgaattatgttttagaaattc

SEQ ID NO: 35373 - DNA, 259 bp, Gossypium hirsutum
  unsure (1)..(259): unsure at all n locations; Clone ID: LIB3149-050-Q1-K1-G10
cttcaatctgcactcgtttcaaatctttatttcatggccganttgctgtagcgggagtgcattggtaacttctttgcgaacctgttgggcaagtggaaagaatccgaatattcaggtggtcagtttattcccgttggtggtctagcttactatgttactgcccctgcaagcttggcagatatggcagcaaatcccttccatgctctgttttatctagtgttcatgctttctgcctgtgcctttgtttcgaaaacttgga

SEQ ID NO: 35374 - DNA, 282 bp, Gossypium hirsutum
  Clone ID: LIB3149-050-Q1-K1-G11
gttgcggaatataatgaagccaacaacatttgcctcggcggaatgaatggggtggggtgtgtcatctctcagtagtttatgggcagttgttgcttgatgaatatgggtatttgcagttttattttgttgaacatgttaggtatgcagtattgttcattgagatttcgagattttgcatcttattatttctttggataggtttatagattcttccctgtaactagttttttttggttgaattctcttctgttttcattgatactattacatatattttactgt

SEQ ID NO: 35375 - DNA, 287 bp, Gossypium hirsutum
  unsure (1)..(287): unsure at all n locations; Clone ID: LIB3149-050-Q1-K1-G12
aaacaatggatgtggtgaagaacttggacatccaaaggtgcatgggagaggggggcgagatancttccttcccatctttctttcaacctaagaagggggagaacaccagcgctttttacactctgaaagaagatgggacggtgcatgtgcttaatgagacttttgttaatggcaagaaagattccatagaaggcaccgcctacaaggctgatcccaagagtgacgaatccaagctcaaagtcaaattctacgttcctcctttcttgcctatcattcctgttactggg

SEQ ID NO: 35376 - DNA, 341 bp, Gossypium hirsutum
  unsure (1)..(341): unsure at all n locations; Clone ID: LIB3149-050-Q1-K1-G3
gccaacacctgggttgtaagcggttctcctcaaacaaagaaattgcaagatattctccctggaatcatcaaccagttgggacctgataacttggacaacttgaggaaattggcagagcaattccagaagcaggcacctgctgccggttctggtgacggtaccggtgcagccactactcangaagaggacgatgaggaggtaccagatcttgtacctggcgagacctttgaagctgcagcagaaggccaagctgctaaatagagtttttatctntaattntcttttgttatatgtttttgatgaatttaactatttgtttctttttccaaaatttctctatc

SEQ ID NO: 35377 - DNA, 375 bp, Gossypium hirsutum
  Clone ID: LIB3149-050-Q1-K1-G5
tctaaacccgagtcaaatcctttaccctcttttccaaaatttgagcctcttaaggcacacgagatgtcagacgggcgagggcgattcataaaggtttcggttccacctcataggtattcacctctcaagaaatactgggtggatatctatactcctgtttatgaacaaatgaatatcgacatccgtatgaatctcaaagctcggatagtcgaactgaaaacactacaagacacgcccgacattagtaacctacaaaaatgtgcagattttgtccaagctttcatgttgggtttcgatgttccggatgccattgctcttttgagattagactagttatattgtcgagttcgttgaaaatcaacgatgtcaaaacac

SEQ ID NO: 35378 - DNA, 212 bp, Gossypium hirsutum
  unsure (1)..(212): unsure at all n locations; Clone ID: LIB3149-050-Q1-K1-G7
ccggggcgggccacgcgtacacaagggatccaacccnnaaaaggcaaattttttaaccggaggtacatttctcnaaaaggtccgtttattatttatggaacgtggggcccaaaactttttaaaaccttccgtaacatccctcgattccaggttgccaatgtctaaattctcaatctgcttaaactctctccttttgttcactctttactttt

SEQ ID NO: 35379 - DNA, 257 bp, Gossypium hirsutum
  Clone ID: LIB3149-050-Q1-K1-G9
cccacgctccatttcaaaagatttgaaaatggggattttaccccggaaggcactcattttttttctgcaacaattccaaaaaacgtcgtcttatctcacttatttaataggaacatctttattgatacattggatctatgctggtagaaactcataaaggttaaccaatctattcttgttgcaccacatgaattgcattttcagatagatcatcatcttttaaaaaacatatatctgtaacacccgaatacaaagga

SEQ ID NO: 35380 - DNA, 275 bp, Gossypium hirsutum
  unsure (1)..(275): unsure at all n locations; Clone ID: LIB3149-050-Q1-K1-H1
cacgcgtcacaaagatccttgcccaaattataatccaactatattttgcaaccaaacacactaatatcaagggctggattcttagacaactttggatgacacatattcatcanaaaatgctnattatataacaagtcaaaatttctgtatataaancttgtttctctttgctccatgtgtaatattttcatgctttttaacacttaaataatatcctaaattcctttcattcttacacaaaaaaaaaacttttttaaaaaataactctcttccaa

SEQ ID NO: 35381 - DNA, 286 bp, Gossypium hirsutum
  Clone ID: LIB3149-050-Q1-K1-H10
gacagcccaaggcttgaccgatcctaaccaaaacacgggcgttgtgatccagaggtgggggataggtgccacctctgatttacagcctgttcgtaaaaacttcccaacatatcttgggaggccctggaaggaatactcgaggactgtggtaatgcaatcaacaatcagtgacgtgattcaacctgctggctggcacgagtggagcgggagtttcgccctgaaaacactgttttatgccgagtaccagaacactggggccggtgcctcaacttctgcgagagtgaaa

SEQ ID NO: 35382 - DNA, 392 bp, Gossypium hirsutum
  unsure (1)..(392): unsure at all n locations; Clone ID: LIB3149-050-Q1-K1-H3
gacaggtctatgctcgaactcgaatttttttttttatcagattgatacatgatttgtatttggcatccaacaacccgggagggcgggatagaactttaatttcttttgttttatattactaccatgaacattttatttgacccaatcagttcatcatcttattggtgcctaagggctaagattatatgtagatataaatgcatttgtcagatcaaggtttagcttctagtctttggtttcaagttccctccattcattcactttatttgttgtctgttaccactttttgactcttcatatttatacataaatgtattttagttgtaccgattgttatcaatcatgttcttgttctttgtatcgncaataacaaacatcaaatgtatggtttt

SEQ ID NO: 35383 - DNA, 395 bp, Gossypium hirsutum
  Clone ID: LIB3149-050-Q1-K1-H5
caaaagtatccagcgctgtacattcgaccgatcccgtcgcgatatatcaggtgaataaggtccttcttcctgaggctatctttggtaccgatatacctccaacgcctgcaccatccccagctcctgatattagcccagctgcggattctccatccgcagactcgaaagaaggcggttctccgtcgaaggctttgccatcggattcagcttctcatagggttatgaagttgagcatttggagtcatctggttttggcagtcttaggtgggttggttctgcttttctaataataagacttcattttgagtcttaaagttatgttcatggggggcagcacacctctgagtttctcaattgaatttacttcgattataaaaccattttttcttgtatat

SEQ ID NO: 35384 - DNA, 282 bp, Gossypium hirsutum
  unsure (1)..(282): unsure at all n locations; Clone ID: LIB3149-050-Q1-K1-H9
atttgatcgtatatatggcggaggattcaaaatcctgaggtataaaaccggggcggggcgtatattgtttttgtaaatctcnaaaataactccatacaaaaaagctcgttgacgttgacggtcctccatccgtggagctcctccgtcgacgagttgtctcatattccatcgccttgtggagcagcgtcactgcttttacctcttgggactggccatgagacgaacatttattatttacgctttctttagatctcgtagttttttttttctgatctaattaat

SEQ ID NO: 35385 - DNA, 226 bp, Gossypium hirsutum
  Clone ID: LIB3149-051-Q1-K1-A1
ggggaagcagtggaatgaaatcaatggctgccaaagtccttgcccagttgaatgttctaggtgagcagtcttcatatttctaaatctgagatatgatccaatgcctgtaattttcaaataaatatctatttttacactggtgaaaaaaaaaaaaaaaaagaaaaagaaaacaaaaccaaaaaaaactacgtgtaaaaaccaaaaaaaaaattttaaatttaaaact

SEQ ID NO: 35386 - DNA, 306 bp, Gossypium hirsutum
  Clone ID: LIB3149-051-Q1-K1-A10
cacagagcttgtttcagtcaatgggaagccatcgagtggggaggatacaagtgaagatgagcgtatagttgctttgttcattagcgtcaacttttttttttatatattttactacgcttgttttccagtaaaaaacgctattatgatggcgtaacctcaacaggccttctgtctaggattcagataatatttttggggggttttttttttccacaaggaaaactatttgtttgttagaatgttggagaaacattctttttggatggttcttcctttgattattataatatgtgggcagataaggtg

SEQ ID NO: 35387 - DNA, 329 bp, Gossypium hirsutum
  Clone ID: LIB3149-051-Q1-K1-A11
ggcgctctcatcatcttcctcccccggaatccacaatgtttcatttcctcctacctcttccgaccaggggacaagaaatggtgcgtcgaggaatttaacggcgacagagcgggagaatttcacgccacgatttgatgggttgagattcatagaaacattgatcacagctcacagataggacgagatgattagtaacacaaaataccgtcctttctctgcgtttattaattagattttatttattttgttgggtaaaattttaattgttacatattgaagtaacgtttttcttggtattgtttaataattcctatcgttttttgtttttg

SEQ ID NO: 35388 - DNA, 202 bp, Gossypium hirsutum
  unsure (1)..(202): unsure at all n locations; Clone ID: LIB3149-051-Q1-K1-A2
cactcctcanaaaattttttaaaaaaaaaaaaaattcctaccgctctaaaaaaaaacaagcgggccgccctcattcattcaactaccatacatcttctatacccccacctaaaattcacatcactctcctatcatttcacaccattttaaactcgtaaaaccctgacataacccaacttaatcacctttaacacatccccct

SEQ ID NO: 35389 - DNA, 315 bp, Gossypium hirsutum
  Clone ID: LIB3149-051-Q1-K1-A5
cgagactccttacaatcctccacaatcggccccgtctcactatccatcatcctatcaaggttcggagactccttacaatcctccccagtcagctcctccgacaacaagctatccatcaacaaccgctcaatactcttcaagtagcagaaacgggaaaatcgcggaaccttcaccacctccttctgagaaataccaatacgacagcaattaccaaccgccgccggagaaaatcgccgaggcacacaaggctgctcggtttgcggttggggccttagcatttgatgaagtgtcgacggcagtcgagcacttaaagaa

SEQ ID NO: 35390 - DNA, 298 bp, Gossypium hirsutum
  Clone ID: LIB3149-051-Q1-K1-A6
gatccggccaaggaagctgccaacttcacctcacaggttatcatcatgaaccaccctggccaaagcggaaatggttatgccccagtcctcgactgccacacctctcacattgctgtcaaattttctgagctgttgaccaagattgacagaacaatctggcagggaactcaaaaaggacccaagttcttgaagaacggtgatgcaggtatggtaaagatgattcccaccaaacccatggtggttgagactttctccgaatacccaccactcggacgttttgctgtccgtgacatgcgcc

SEQ ID NO: 35391 - DNA, 293 bp, Gossypium hirsutum
  Clone ID: LIB3149-051-Q1-K1-A7
gcagaacatatgcagaattgcgaatgccgtacgtgtgctgtcaactttaggtttcagtatcgaggcagatttgatcttggagacagttgagttgagcagcacagtgaaaattgacatacatgacatgctaggctcagagtttcatgttttggttgcggaaagggaagctgagcggagaagcttggtgggaaagcggaaaagatgatgtgatattcaactggcagcagttatctttcaagggaacatcgcttatttggttccatgccaggaaaatggtgaacctagtgcaaaat

SEQ ID NO: 35392 - DNA, 117 bp, Gossypium hirsutum
  Clone ID: LIB3149-051-Q1-K1-A9
atgatttgtttgcttttatcgtgtgtttttgcttattctatggggtgaacttcgactcttgggggctttgttcaagactctatatggactgcaatagatttgacgagtagttcggct

SEQ ID NO: 35393 - DNA, 268 bp, Gossypium hirsutum
  Clone ID: LIB3149-051-Q1-K1-B1
cttgaatccttgatgatttcatcaagaagggtgtctgaaaggaagctaagacgactgggagagaatctggaattcttgtgtattattggtaagtctcttgcatccatatacatgaagtaattaatgactcaacaaactgttaaccgaatgcacaaacattcttgttagaaatagcttagtcaatatgtcagccacttgttctatggctggtacatagttaaagctctacatgctttgatcttgcatggaagactgtatttcttgacat

SEQ ID NO: 35394 - DNA, 204 bp, Gossypium hirsutum
  Clone ID: LIB3149-051-Q1-K1-B11
catggaatgatatactaatggagatggtaattagaggggcacattaataatttagccattttgtgggggactggagttgccaaaatgcttttatttttatttttgtttttttttaattttaaatttttgttgagaaggaagggatcatggtatccaagttgcttgtaattacttatttttttaacatcaccataaggtcctatt

SEQ ID NO: 35395 - DNA, 307 bp, Gossypium hirsutum
  Clone ID: LIB3149-051-Q1-K1-B12
cccacgcgtccggttaccttcggctctaccccgcctctgcataggtctgttatattttgattggagatcccgatcgaaaatctttgtgatcttcaaagatgggagaaagaaaagtactgaacaaatattacccgccggacttcgatccgtcgaagcttccgagggcccggcggccgaagaatcaacagatgaaggttcgtatgatgcttccgatgagcatacgttgtaatacctgcggaaactatatttataaaggcaccaagttcaattcacgcaaagaagatgttatcggcgagacatatttggg

SEQ ID NO: 35396 - DNA, 222 bp, Gossypium hirsutum
  unsure (1)..(222): unsure at all n locations; Clone ID: LIB3149-051-Q1-K1-B2
cccgggatattncccctatccgtaaaaanctnggaaaagggtaancaattantgcanaangcaatataaaaaatttggaggagaggaaaaaaaatcactgttgaggttagaaatgcaatagtctatgaaggattcggcatttgcatactaattttgtagttatggaatcaaactacataagttgcactcaataggcatcgttttgtccgttcctgtcaatgc

SEQ ID NO: 35397 - DNA, 189 bp, Gossypium hirsutum
  unsure (1)..(189): unsure at all n locations; Clone ID: LIB3149-051-Q1-K1-B4
ctactaattcattatcgttttaaaccgagctgntacccgtcgagagcttatttacgcggaaagggaaagtacangcttgcgttaacggggtttcccgatgagttttacgatactgagtgggatttgataattattttttctacttgaggatacataccggaggctttatggtagatttctaaatttttc

SEQ ID NO: 35398 - DNA, 314 bp, Gossypium hirsutum
  Clone ID: LIB3149-051-Q1-K1-B5
gctcggaaaccaaactcatggcagaaaaacatggtgacagcccgaggcaggaccgaccctaacgaaaacacgggcattgtgatccagaaatgtaggataggtgccacttctgatttacagcctgttcgtaaaaacttcccaacatatcttggcaggccctggaaggagtactcgaggactgtggtaatgcaatcaacaatcagtgacgtgattcaacctgctggttggcacgagtggagcgggagtttcgccctgaaaacactgttttatgccgagtaccagaacaccggggctggtgcctcaacttctgcgag

SEQ ID NO: 35399 - DNA, 121 bp, Gossypium hirsutum
  Clone ID: LIB3149-051-Q1-K1-B6
aaagtaaatgcaattaaaatgctgtaaaaaggggaaaaaaaaagaaaaaggggaaaaaaaaaaaaaaaaaaaaaaaaaaaaaaaaaaaaaaaaaaaaaaaaaaaaaaaaaaaaaaaaaaaa

SEQ ID NO: 35400 - DNA, 303 bp, Gossypium hirsutum
  Clone ID: LIB3149-051-Q1-K1-B7
gtgtgaggatttttattgctgatatcatttatcacttattcgacgcaattcaaagcatatatggatggtcttaaagaggagagaaagagggaagcagcggatgaagcagtcttcccttgtgttttgaagattttacctaactgcattttcaacaagaaggatccaattgtcttgggggtggatatccttgaaggcattttaagggttgggacgccaatttgtattcctcaaagagaattcattgatattggtcgaatagcttcgattgagaataaccatagaccagttgattctgccaagaaa

SEQ ID NO: 35401 - DNA, 310 bp, Gossypium hirsutum
  Clone ID: LIB3149-051-Q1-K1-B8
ccttccaaacattggaattttccttaaccttgacctaaagaaggcgcttgaattgaaggcggtcacaatctctgtggatgattacatttaagcccttttggaggaaattaagaaagttgttgacctttacgaagagcttgacattgatgtcttggttcatggagagcctgagagaaacgatatggttgagtactttggtgagcagttgtctggttttgcattcactgttaatggatgggtgcaatcttacggatctcgatgtgtcaagccaccaatcatctacggtgatgttagccgccccaagccaatg

SEQ ID NO: 35402 - DNA, 303 bp, Gossypium hirsutum
  Clone ID: LIB3149-051-Q1-K1-C10
aagaggggaaaggttccatgtgaacggcacttgcacatgggttggtcgatcctaagagacgggggaagcccgtccgacagcgcgtccagcgcgagcttcgaaagggaatcgggttaaaattcctgaaccgggacgcggcggctgacggcaacgttagggagtccggagacgtcggcgggggcctcgggaagagttatcttttctgtttaacggcctgcccaccctggaaacggctcagccggaggtagggtccagcggccggaagagcaccgcacgtcgcgtggtgtccggtgcgcccccggc

SEQ ID NO: 35403 - DNA, 318 bp, Gossypium hirsutum
  Clone ID: LIB3149-051-Q1-K1-C11
cattctactcgattaggaagaagtccaatttctctggaatcatggattgttgctctcaattacaacattcaaaaagtgagatgaagagtcacttagccttggcaatgctaggagtttcagagtttgaggatgacaatcacctttattgtcggtgaaacatggaatcgattttcatccatggaaattttcacccacacccttttctttgttgcttgcttgaccagaaagttttaggcattagaagaaaaagaaaaagaaaaagtgttgaagtgtaaataggaaaaaggggtctgatgaaagctggtttgtatgtacata

SEQ ID NO: 35404 - DNA, 357 bp, Gossypium hirsutum
  Clone ID: LIB3149-051-Q1-K1-C2
gaccgggcccgaaatcccggggcgaaccaagccgtccgttaaaataaggggaatgtgccaatgggcttaacctagtcaatggcgaccattggttcacccccagtgatgccatgctgttcccttctcaatggccttgtcgacctcgaagccgctgcatgcctttgcaccgctatcagagctaacattttaggcatcaaccttaacatcccagtttcccttagcttgctcctcaacgtttgttcaaggaacgttcctactggcttccaatgctaaaccatcactgttccctacactttttatcgtctttcttatggtgtttgtgtttgattttagaaagttattatttacagagtgttt

SEQ ID NO: 35405 - DNA, 284 bp, Gossypium hirsutum
  Clone ID: LIB3149-051-Q1-K1-C3
aaaaattttaaaaaaattttttaaaaacaaaaaaaaaaaaaacccgccatttttacgcccgccggcctaaaaaatccaaacttacttacacttccattcaaccttataactcttttataacctcacctaaattaaattcactcaccctttttttacaaccctttaacttcaaaaaccctttctttacccaatttaattcccttccaaaaaatccccttttctccaactatcttaataacaaaaaatcccccaccaatcgcccttcccaacatatctccaaccta

SEQ ID NO: 35406 - DNA, 72 bp, Gossypium hirsutum
  Clone ID: LIB3149-051-Q1-K1-C6
acccttccggcctgaatgggatgtttgaacttctgaggattttcaacagtttgggcattatatatgggtctt

SEQ ID NO: 35407 - DNA, 325 bp, Gossypium hirsutum
  Clone ID: LIB3149-051-Q1-K1-C7
caaggccgtgaccaagtttacttcatcttgaaaaggctatttggtgatctgtagttgggggtggggttaggaggctgctttttaaattagatcggtgtggtttttatgtttatttttctgaaatttccgcatatttattttgatatatggtttgtattagcgagatggatctactcgatcctgatatggctattgtagaaattaatgctattaacgacaacttaatttcttggagcttgtttttggctagtttttaaatttatttttttcttagataatttcgattaaaattaaaaattttagtttcatcaaattctttactaaa

SEQ ID NO: 35408 - DNA, 67 bp, Gossypium hirsutum
  Clone ID: LIB3149-051-Q1-K1-C9
aaaaaaaaaaaaaaaaaaaaaaaaaaaaaaaaaaaaaaaaaaagggggaaaaaaaaaagaagggggg

SEQ ID NO: 35409 - DNA, 299 bp, Gossypium hirsutum
  Clone ID: LIB3149-051-Q1-K1-D10
aaacccctaattttaactccgcctcagatatccccgtctccacaggcatggctaccaagcaggcaaatactggcctctttgtaggactgaacaagggccatgttgtaaccaagaaggagttggcaccacgcccctctaatcggaaaggaaaaacgagcaaaagagtccatttcgtgaggaacttgatcagggaagttgctggttttgcaccgtatgagaagaggatcaccgagcttttgaaggtcggtaaggacaagcgagctctcaaggtagctaaaagaaagttgggaactcacaaa

SEQ ID NO: 35410 - DNA, 147 bp, Gossypium hirsutum
  Clone ID: LIB3149-051-Q1-K1-D11
aaaacatatttgaccattttaatgatatggatcctgcacatttggcagaaaaaaaaagaaaggataaaaaaaaaaaaaaaaaaaaaaaaaaaaaaaaaaaaaaaaaaaaaaaaaaaaaaaaaaaaaaaaaaaaaaaaaaaaataaat

SEQ ID NO: 35411 - DNA, 317 bp, Gossypium hirsutum
  Clone ID: LIB3149-051-Q1-K1-D12
gaaaaatcggggcttatgagatggttgatgcagtttggagggtgtaaagaaaggcttttggctgatgatcttttcttagctaaagttgccatggagtgtggtgttgggatcttcaccaagactgctgcagaatatgaacgtcgcagagaaaactttttcaaggagctggaaatcgtttttgctgatgtggtaatggccataattgcagatttcatgcttgtgtatcttcctgctcctactgtttctctccggcctcctcttgcagtcagtgctggagctatttccaagttcttctatagctgccctgataatgcttt

SEQ ID NO: 35412 - DNA, 237 bp, Gossypium hirsutum
  Clone ID: LIB3149-051-Q1-K1-D3
gctcttaagtaccgcaagctggctgaatcagttccattggcagaggagtaaatttaagctgtggaataacattgggccggtttttcttggagaataatattctgttttgtaatttcaattggagaagctcttttgtatttcatcttgtcttttccttttccttttttcgccggcattgtttgaacatggggttgtgcgcccgtcaattccagttaaatatggtgacttttgtttttc

SEQ ID NO: 35413 - DNA, 171 bp, Gossypium hirsutum
  unsure (1)..(171): unsure at all n locations; Clone ID: LIB3149-051-Q1-K1-D4
taacatttnnccaatttttcttanaaaataatattctgttttgtaatttcaattggagaacctcttttttatttcatcttctcttttccttttccttttttccccaacattgtttcaacattncgttntacacccntcaattccacttaaatatcgtgacttttgtttttc

SEQ ID NO: 35414 - DNA, 345 bp, Gossypium hirsutum
  unsure (1)..(345): unsure at all n locations; Clone ID: LIB3149-051-Q1-K1-D5
atcgccgggtcgacccacacattcnactcttatttaccgcattttttctcaatcacttccattaccacgggggtttatttaagctggcgggtaacattaaacctttttttcttcaacaataatattctgttttgtaatttcaattgcagaacctcttttttatttcatcttatcttttccttttccttttttcacctccattgttttaacatcgtattgtgctcccttcaattccatttaaatatcgtgacttttgtttttcaaaaaaaaaaaaaaaattgccgcctctctaaataatccaatcttacttactctttcattctacttcatacctcttttattttc

SEQ ID NO: 35415 - DNA, 303 bp, Gossypium hirsutum
  Clone ID: LIB3149-051-Q1-K1-D7
aactacatctatttcaattaaactttcacctaccattagcatgggaaactaacatcgcagggggaacaactcccatcaatgtcttcaaacaaatttacacaagcttaaaacttattaacccaaacttgctgcttttccaaaacaagctctcatcttttaggctagctattcaatatctaaccagcttgccactaccacccaagtgcagggataatacatccctatttattttgagaatcctctaacagagcttttatagatcacaaatgtcatcaactcattcaaagcctatcacactcttcc

SEQ ID NO: 35416 - DNA, 320 bp, Gossypium hirsutum
  Clone ID: LIB3149-051-Q1-K1-D8
ctcttagcaaagacttcagccacccacgcagcccctttaccgggccaaacaatgggacgcgtgcgtacgaagactgtgaagaaatcgtctcgtcaggtaatcgagaggtactactctcgcatgacgcttgatttccacaccaacaaaaaggttatcgaagaagtagctattatcccatccaagaggctccggaacaagattgctgggttctcaacccatttgatgaaacggatccagaagggtccggttcgtggcatttctctgaagcttcaggaagaagagcgtgagcgtcgtatggattttgtccccgatgtatcggc

SEQ ID NO: 35417 - DNA, 250 bp, Gossypium hirsutum
  Clone ID: LIB3149-051-Q1-K1-D9
gtgagaaagctggtgagttgatggatcgagtttcttcatttcggaatctttgaagctttgaaacttgaaattccccaaggatcaaattgtaaaatggtcaacttttagagccagcattgttgaaataaaagcgccattagtaggatttcttctgtgtgtttttattattggctaaatcctgctattagtctttatactttgtgaaagttgtggatttggtcccattactttaatttgatcaattttagtc

SEQ ID NO: 35418 - DNA, 312 bp, Gossypium hirsutum
  Clone ID: LIB3149-051-Q1-K1-E11
gccaccaccactgcaaattcagatttgcctccaactcacccagtgagacttggcctggctttgaacttctctgttttctactatgagatattaaattctgctgagagggcttgccatctggctaaacaagcttttgatgaggctattgctgagcttgatagccttaatgaagaatcttacaaggatagcaccctaattatgcagcttctcagggataatctcaccttgtggacctcagatctgccggaggaaggaggtgagcaatcgaaagtagatgagcctcaggcagagagttaattcgatggaagagca

SEQ ID NO: 35419 - DNA, 311 bp, Gossypium hirsutum
  Clone ID: LIB3149-051-Q1-K1-E12
gtccaccatcattttactaggcgttcctttcctgctaccaggtctctctccactccagtcggaacttcatctcattccaccaggcttttatatgctaagatggatggtaccaggaggagctgaagcagattttggccgctttgacgaagacggttattcgcaaggtttatattatgttctctggaagtttacccccggttgctgctgataatcaagagataatggatttggtcgactcatctgcacctgtcccaccatggttgagcgaggaggatcttgcagaatatggttctttatacgagaaaagtgga

SEQ ID NO: 35420 - DNA, 330 bp, Gossypium hirsutum
  Clone ID: LIB3149-051-Q1-K1-E2
agccttccgttcggagaagggaaaattttaaccaaccaactttttcgccatccaaacaccaaaaaggaaaagggcttatatagtattccaaacctctcaacttcccaagacgttgttattaaaaccgagtctaccacctccggttcatcctttatcaggtaaacttagaaagaatcttacggtggtgaaatgttcgtcttcttctttaattgacggtggagattcctccgtcgctgctctcgagcgatgtttctcggcaccaccggctccagtggagactggttcttcaggttcaggtgaggttggaccggttatgaaaggaggaaaata

SEQ ID NO: 35421 - DNA, 294 bp, Gossypium hirsutum
  Clone ID: LIB3149-051-Q1-K1-E3
cttccgtttaagtaacctctattcttaatattaaaataggggcttttagttcttagagaatcatctctgggcttgggattcctacttctacttggaatagaaatactctctttttcccttttcaaaaaaaaaaaaaaaaaaaaaaaaaaaaaaaaaaaaaaaaaaaaaaaaaaaaaaaaaaaaaaaaaaaaaaaaatgcaaaaaaaaaaaaaaaaaaaaaaagagacctaaattaaatagagctggccgacttttaacaacgggggcgactggtaaaaaaatgcacgcacccaa

SEQ ID NO: 35422 - DNA, 317 bp, Gossypium hirsutum
  Clone ID: LIB3149-051-Q1-K1-E4
ccaactacaaatgaaccatattactacaggatgattggggagaggtttttccctcagaactcggctagattgactgtccccggaggagctagtgtggcatgcagcacagctaaagctgttgagtgggacgctgcctggaaaaacaaccttgacccttcgggccgggctgccttgggggttcatctctctgcttatgacgcagagactcccctcagcaacaagccatccaaggttattgatagtataccacggatggactttcctggagttgccatacagagttaatgcctgcctactggaagacaacagaatgtatg

SEQ ID NO: 35423 - DNA, 65 bp, Gossypium hirsutum
  Clone ID: LIB3149-051-Q1-K1-E7
accccccggtcaacccactcatcctccacattttccaacatctaaatcccaacccccaacacaaa

SEQ ID NO: 35424 - DNA, 57 bp, Gossypium hirsutum
  Clone ID: LIB3149-051-Q1-K1-E9
tgcatcgatttgttatggtcggacagttcgctaatcccggtctggacattctgactt

SEQ ID NO: 35425 - DNA, 317 bp, Gossypium hirsutum
  unsure (1)..(317): unsure at all n locations; Clone ID: LIB3149-051-Q1-K1-F10
gtgctttgggtacatggtttccaagaagaaatacatctatacgattgatgatgactgctttggtgctaaagatccatctggcaaagacatcaatgcattggaacagcacatacagaacctactgagtccatccactccatttttctttaacactctttatgacccataccgatccggtgctgacttcgttcgtggctaccctttcagtctccgtgagggtgttcccactgccgtctcacacggtctctggctcaacatcccggattatgatgctcccacacagcttgtcaagccactcgagaggaacaccangtatg

SEQ ID NO: 35426 - DNA, 306 bp, Gossypium hirsutum
  Clone ID: LIB3149-051-Q1-K1-F12
cccacgcgtccggtgctagtataataagtaatgatatttttggagtgcattttaaagaaatgggcaaacttttgtgcttattagataagtaagctgcctatatgttgccaatcatggggggtatctgtagctcaaaatattggtaactttgggataatatttatctcttgcatagagagtaacttatggagctgcttctttgtttgttggtcgcttatatgcgttataggtcgctattaagcatattttgttatgtttggaattgcttaatccttttattttattttctttgtctctaatttgttt

SEQ ID NO: 35427 - DNA, 295 bp, Gossypium hirsutum
  Clone ID: LIB3149-051-Q1-K1-F3
tgtgggaaccaaaaaaatcaaacaaacttttgttgaaggaaaggtgagataagggacttactgtgttgaaaaaatccaacaacattcggcgtcgaggctccatgagcttgacgattgcagatatcttattttagtgtagacatctatagttgtggagtattttgtaatgtctgtaaggataaacgtgttgttaagatctgttttgaagatggctgatccacttctgttccaaaagccctatgtattaatgcaaggttttgattaatatattgccttaaatcatcacccattgatt

SEQ ID NO: 35428 - DNA, 344 bp, Gossypium hirsutum
  Clone ID: LIB3149-051-Q1-K1-F4
gcccgaatttccgggtcggcccaagccttccgcaagccttaaattggtttttgcatctctcgtttaatttctcggggattaatggcgggtcggggtgagactctcggatccggagcctcgaagaaggcaacatcaaggagtagcaaggctgggcttcagtttccggtgggtcgtattgctcggttccttaaagctgggaaatatgctgagcgggtcggagctggagctccggtttacctcgccgccgttcttgaatatcttgccgctgagtttcttgagctagccgggaatgcagccagggacaacaagaaaacccgaatcgtgccacgtcacatccaacttgc

SEQ ID NO: 35429 - DNA, 312 bp, Gossypium hirsutum
  Clone ID: LIB3149-051-Q1-K1-F5
ccacgctttaatttaatttttcatctctccttttatttctcgaacagtaatttcacgggcgggggagactataaaatccaaaacctttaataatgcaacatcaatgaacatcaagactgcacatcatttatctttttgtcgaattgcttagatccttaaaactttaaaatattcttatcgaattacaacttgatctcctctctatctaaccttctttcttcaatatctttccacttactatcttgatctatccaggaattcaatcattatcatcaagaaaaccctcatccttccactttacattcaactttt

SEQ ID NO: 35430 - DNA, 337 bp, Gossypium hirsutum
  Clone ID: LIB3149-051-Q1-K1-F6
attttaatgggcatgacctttgcttacagcacataagcagcagggacagtggaaccgaattcgtgacaagtggagggggatcaaaggcatggaggggagacgtgagttggtggaatccacaagaactgaaattttatcatgatggacaaggtttcatgtcagtggaaatgactcccactgaagttagcattaaattctatgacgtttttggtaatgttttgcacaattggagcagttccaagcaactttcttttgctatctaagccaacgttttaagcctttaaaacaccttccattgcctgaccaaagagctggcatatcagaagcaggggaaatg

SEQ ID NO: 35431 - DNA, 320 bp, Gossypium hirsutum
  Clone ID: LIB3149-051-Q1-K1-F7
ccatattggtcatcacctaattcagatggcacaacggagaccgggatgtaccgattcggttcggttggacaggacacacaattgctattgtgggacttggaaatggatgaaattgtggtgccattacgtcgatgccctcccggagggtctcctacttacagcaccgggagccagtcttcccattgggacaatgtatccccattgggtaccctgcaacctgcctcgagcattcgagatgttccaaaaatttcgccagtggttgctcatcgcgtacacactgaacccctctcgggtttgatttttacccaggaatctgtact

SEQ ID NO: 35432 - DNA, 320 bp, Gossypium hirsutum
  Clone ID: LIB3149-051-Q1-K1-F8
cccaagtcttcgttgtacagctcttgaagcatgtgcacatcccgtctttgatgagcttcgagaacctaacgctcgcctaccaaatgggcgacctttaccaccaatattcaactttaaacaggaattatctggggcttcaccggagctcataaataagttgattcctgatcacgtgaaacggcaaataggacttcaacatttcatgcatccgcctgggacatgagacttcaaaaccgttttcaaattcgatgtctgtagtttgatgcgtgacacaaaaagaattactatctttggattatcatcagttgatttgaggccta

SEQ ID NO: 35433 - DNA, 312 bp, Gossypium hirsutum
  Clone ID: LIB3149-051-Q1-K1-F9
cccatattcatcttgttttcgtaaagaagcttgttcacatgggggggatactcagggaagggggccgaatcatcaatttcaaaaagtgcaacaattatccattaccattccaaatggtcatgaatcctgtgacattcatcaggaaatgattaaaaactctaatgcttattatcacatactaaaacttccatatcaacacttgatgcttgcttctggtgctcttaatgatgctactgccaacaaatatgacttctaaacattgattccagcctctcaaacttacacagagttagtgtcatgctcaaattgtac

SEQ ID NO: 35434 - DNA, 317 bp, Gossypium hirsutum
  Clone ID: LIB3149-051-Q1-K1-G1
accatgtggaagctgcccatgttcgggtgcaccgactcggctcaggtgttggaggagcttgaggaatgcaagaaggcataccccaatgcattcattagaatcattggcttcgacaacgtgcgtcaagtgcagtgcattagtttcattgcctacaagcctccaggcttctaagctttttattaactttgtctctccatttgtttgaatttgtactcagaaaaaatcatgttctttacttttgcttttccttttctttgagttattggcctttgtttctcgatttccgggttttaatcctgagaactaatgaataaaaa

SEQ ID NO: 35435 - DNA, 120 bp, Gossypium hirsutum
  Clone ID: LIB3149-051-Q1-K1-G10
aaaaaaaaaaaaaaaatttaaaaaaaaaaaaaaaaaaaaaaaggggaaaaaaaaaaaaaaaggggaaaaaaaaaaaaaaaaaaaaaaaaaaaaaaaaaaaaaaaaaaaaaaaaaaaaaaa

SEQ ID NO: 35436 - DNA, 309 bp, Gossypium hirsutum
  Clone ID: LIB3149-051-Q1-K1-G11
tcggatctaagcttcgtgcgattgcagaaaaacataacttcatgatatttgaagaccgtagatttgcagacatcggtaacacagtaacaatgcagtatgaagggggtatcttccgtattttggaatgggctgatattgttaatgctcatataatctctggtcctggaattgttgatggtttgaaattgaagggtctgcttcgtggtagggggctgttgctacttgctgaaatgagctctgctggtaaccttgccacgggagactacacagctgctgccgtaaaaattgccgaacaacactccgattttg

SEQ ID NO: 35437 - DNA, 283 bp, Gossypium hirsutum
  Clone ID: LIB3149-051-Q1-K1-G12
ctcctgttttaaaatgggtgagttgtattagttgttgatattgcaatattgggggttggggagagttcttttgtcttcttttattctttctctctaaaggctatacaactctttttaatccttagattatgaagatggaaaagagatagagaaaaggtggaggattttttctgttgttgttgggattttacttatgacaaatggtggatattttcattgtttcgattttaatgtatatctgattgttggtgagctaatgaagtttttgttactttgttgcatt

SEQ ID NO: 35438 - DNA, 311 bp, Gossypium hirsutum
  Clone ID: LIB3149-051-Q1-K1-G2
ttccaacccaattcaactcacaaatttcaaagttgtaaattccgaaacgggtgaaatcctcccacttggctccaagggcattataaaggtcaggggaccgccagtgatgaaaggttattataagaatccattggctacgaggcaagccctagacgaagatggttggttaaatactggtgatataggttggattgctcctcatcattcggtagggcgaagtcgtcgatgtggaggtgtgatagttttcgaaggacgtgccaaggacactattgttctttcttctggtgaaaatattgaacctttagagattg

SEQ ID NO: 35439 - DNA, 296 bp, Gossypium hirsutum
  Clone ID: LIB3149-051-Q1-K1-G3
acaggcagaaaaacacaatttttagactttttgagcattctaaaggctataaatactaattaggagaagaaataagggggccaccagagaagatcgaagaaaacactcgaagaacactaacgaaatcaactcggaagtggatctctatcaagatcaaagacctccgtttaatttcttctaaagtttttatgagtttttatgaatttttttgcttcttgtcatttttctaactttgagatgtttttatttacgattatgaaacctatgatgaatcttattatatgatttttgattta

SEQ ID NO: 35440 - DNA, 317 bp, Gossypium hirsutum
  Clone ID: LIB3149-051-Q1-K1-G4
cttccgcggcggttaacgccttttaattcggccgagtcaacccacaaaaggatagcgttgttgagatcggtgactcaatccctctatttcactctaatcttgccttgttgccttcccttgagatcgccctcatcatgatagaggagcattatggatctaagggcttgggaattgtgggttatttccatgcaaatgagagatttgatgatgcatagctaggcattgttgcaaagaatataggtgaccatatttgccggtacttccctcaagctgccattttcttgatggataacaaaatgcttgaagctttgcccatg

SEQ ID NO: 35441 - DNA, 331 bp, Gossypium hirsutum
  Clone ID: LIB3149-051-Q1-K1-G6
aaggacatcatcaaggtgaactcggaggccttattggtcgtttcatgtgccaccgagcttttccttcgattcctcgccgagagaacagcccaagtcgccgccgagaagaagaaaaagacggtgaagctcgatcacctaagaaccgccgtcaaaaggcatagaccaacgagcgattttcttctcgactcacttcctattccagccgagtctactcaatccgttgctcgcttcgcgacggatcgagatcgttcccggtccgttggtgataaatccgcccccgctggaacccgccgcatagaccactttttttcgtaagccagaaaatgaagct

SEQ ID NO: 35442 - DNA, 309 bp, Gossypium hirsutum
  Clone ID: LIB3149-051-Q1-K1-G7
tgagacggggggtgatgctgctgagtttattcttcttggtgcaggtactgtccagggctggggtggtgttatgatgcatggctatggccttgtgaagaaactctgtgacgagctcaaggattttatgaagaagcacaatttcaaatcaatagaagatttcagaggggtttcccttcagtattttacgactcatacggatttagtgcggaggcagcaagaagcaatacgagagaggaaagctatcaagaaaggtttgcagtccgacaaggaatggaccggagatggcttcgtgaaagagactgagagcat

SEQ ID NO: 35443 - DNA, 325 bp, Gossypium hirsutum
  Clone ID: LIB3149-051-Q1-K1-G9
cagttcgcgaattttacttgtaatcaagcgttactcgaggtttgcgaagggtgtaataggctgcatataatcgatttcgatgttggttatggtggacaatgggcttctttgatgcaagaacttgttttaagaaatggtggtgcaccttctatgaaaattactgcctttgcttcaccttcaagtcatgatgatatcgaactcggtttcacaatcgaaaaccttaagcattatgctagtgaaatcaacatggattttgatatcgaaatcatgagccttgaggccttgaattcgggttcttggccgttgcctttgcacttgggcgaaa

SEQ ID NO: 35444 - DNA, 312 bp, Gossypium hirsutum
  Clone ID: LIB3149-051-Q1-K1-H1
cgcagaaaaagcactcattgttgatagaccttctgacagcatgcatgcacttcattcaaatgagcaggttaatgctgctgcttatcctagccagctggatagtgcctgtaaaagctcaaagccaattgtgagtgagctgatctcctctcactcgctgcctcctgaaatcacaaatcaggatttggttgttgtgagaggaagaaagcggaaaagtatggtatttgagcttctaccatggcatagagaagtgaaacaagtttctcaaagatctcagaacatcagtgtggcagaggtggaatgggtgcatgcaac

SEQ ID NO: 35445 - DNA, 336 bp, Gossypium hirsutum
  Clone ID: LIB3149-051-Q1-K1-H10
attcacctatgatgttgaataccaggagagtgatgtgaagtgggcatctaggtgggatgcatatcttttaatgaatgatgaccaaatacactggttctcaattgtcaattctttgatgattgttctcttcctttcgggaatggtagcaatgatcatgctaaggacactataccgtgacatttctaggtataacgaacttgagactcaggaagaagcccaagaagagacaggatggaagcttgtccatggggatgttttcaggcctccatctaattctgatctactctgtgtctatgttggcacttgtgttcaatttttggcatggtacttgttacc

SEQ ID NO: 35446 - DNA, 309 bp, Gossypium hirsutum
  Clone ID: LIB3149-051-Q1-K1-H11
cacggctagggaggtcatgaacatggtcacgagggcgaaaagaaaaagaagaaccagaatggtgggaggaagaaaaagagtaaaaagtcaaaggctttgtccagtcaacaatccatggatatctaagtacattgactttccgaaagttagcattttgttcgtatatcttctcctcattgaaagctttttaagccaattgaacccttcatgaggtataatgtgtagttcaccattccccttttttgttaacaatgtcatcttgtctctttatcgaccgaaatatcgaaatgcaaaatgaaaattttggtg

SEQ ID NO: 35447 - DNA, 341 bp, Gossypium hirsutum
  Clone ID: LIB3149-051-Q1-K1-H4
ccggggaggaccaccctcttgcttttggtggtccaagaaatcataggaactgagggtgctcgtctgtccgatgctgaccaaactcaaagctccactgtaaacgaagatgctcggtgtaggaagctcggtttacaagttgtttctagtctcagttcagagctcaccaatgtgaagaaagctgcagcaatggattccgaggtacttaacagcgatgtcttgaagctttctagaggcattgaaaacatcagcgacgttctaagattaaatgaaaaaatggcattggatgagagcctggagaagttttccgaatcaatgaacaagttcatgaaaatggccgagga

SEQ ID NO: 35448 - DNA, 312 bp, Gossypium hirsutum
  Clone ID: LIB3149-051-Q1-K1-H7
aaaaaaggcaatcatgctatccttactgccattgaagtctttcaggttatagttgctgaatccgaaacttcttctgaagaagttagggctttgcagtcattgaagaaatcattggggctgcctaatcgttttgggtggaatggagacccatgtgttcccaaggagcatccatggagtggagcagactgtcattttgataaatctggcagaaagtggttcattgacggccttggtctcgacaatcaaggtctgaggggttccttgactaatgaaatatccaaactacatcacctgcagagcataaacttgagc

SEQ ID NO: 35449 - DNA, 310 bp, Gossypium hirsutum
  unsure (1)..(310): unsure at all n locations; Clone ID: LIB3149-051-Q1-K1-H9
gtttatttgatatttccccctcatggccgccgctgatgtcgaggtccggtgcttcgtcggagggctcgcatgggccaccgacgaccgggccctcgaagaagccttcagtgcgtttggtgaaatcgtcgaatcgaagatcattaatgatcgtgagactggaagatcccgaggctttggattcgttactttccgtgacgagaaagctatgagggacgcgatcgaaggaatgaacggtcaaaatcttgatggaaggaacatcaccgtcaacgaagcccaatcgcgcanaagtggaggcggtggcggaggattt

SEQ ID NO: 35450 - DNA, 292 bp, Gossypium hirsutum
  Clone ID: LIB3149-052-Q1-K1-A1
gtcaaatgtcaaggctgcttcaacataacaaccgtattgagccactctcaaactgtggtggtgtgtggaaactgccagacggttctgtgccagccgaccggcggtagagctagactcaccgagggctgctctttcaggaaaaagggtgactaaatccgatccagcggcaacgattcgaggaagaggttttttttgtatgatcccactctggttatctttttgatgtggtaaaatttgtctcaaatcttcgaagtagaattaaggattttagaatgactattatgtgctattg

SEQ ID NO: 35451 - DNA, 234 bp, Gossypium hirsutum
  Clone ID: LIB3149-052-Q1-K1-A9
ccgagattgaacttccgccagtggcttaaagccgatgatgactgttatgatagtcagctatttgatatttggagcatgtcaagtgtcttagattttgtagtttttaagtttggcacctaaaatgaacttatgctggatgctcttttatgaattttcctttggtgtttctcaaattttgttatacttaaaacttattacttgataattttattcaaggattttttattccttttt

SEQ ID NO: 35452 - DNA, 244 bp, Gossypium hirsutum
  Clone ID: LIB3149-053-Q1-K1-A1
ggggggtatcagtaaggaattggaatgtaataatattgattcatataggaggaaaaggttctctattgattcaaatgctgtacctatgggatagggatagagaaagaggaaaaaccgaagatttcacatagtgcttttgatcgaaaaatcaatctgatttatttcgtacccctcgctcaatgagaaaatgggtcagattctataggatcaaacctatgggacttagggaatgatggaagggaat

SEQ ID NO: 35453 - DNA, 112 bp, Gossypium hirsutum
  Clone ID: LIB3149-053-Q1-K1-A10
ctttgttgtcatagcttattgtttatgtgtgtgtgtgtgttttataattattattccttttgcttctacccccactcagttttaatgctaatggtactttttttcccttccc

SEQ ID NO: 35454 - DNA, 294 bp, Gossypium hirsutum
  Clone ID: LIB3149-053-Q1-K1-A11
aagggctcaggttgcatatgagaggaagattcagcttaacaagcttagggtaaaagccgaggggacggctgaagagaaactcggctctcaactcgacatccttgccccagttaagtactgaatttctagtggctagctagtttcatagaattttgttaaaggttattggtttcactatttagttccttttgagatgtggaggttaaaatttttgatgaatcttgggttgtccctttttcttaatgaactttttggtgtaggatcattcaaatataattcatatatgccttttat

SEQ ID NO: 35455 - DNA, 309 bp, Gossypium hirsutum
  Clone ID: LIB3149-053-Q1-K1-A12
gagccaggcgtacgcatggctgatgttgcttattaaataaagatgtctctttacaagctgagggtcaaagccttgagtacggcttaatacaaactccgctctcaactcgacatccttgccccagttccagttctgaatatctagaggctagctagtttcatagaatcttgttaaaggttatcggtttcactatttagttccttttgagatgtggcggttaaaatttctgtcgaatcttgaattgtccctttttctcaatgaactttttggtgtatgaacattcaaatataattcatatatgcctttcat

SEQ ID NO: 35456 - DNA, 354 bp, Gossypium hirsutum
  unsure (1)..(354): unsure at all n locations; Clone ID: LIB3149-053-Q1-K1-A2
cgnntccgcagaaaaaagttgggaaaggggcttggtttggtcaagagagaagggtcttttggcacctacaaagagataaagatgttatacatatgagccactgtgcgaattcaaggggcttgtaaccatatttattcgtggaggaaacaagatgatgatagaggagacaaagcgcaatatccatgatgcactttgtgtggccaggaatctaattcgcaacaattttatcgtctatggtggtggcgcaactgagatttcttgctcaattgcttgtgaagcagcggcagataaatatccaagagttgagcagtatgcaatccgagcattcgcggatgctttagatgctgtccccat

SEQ ID NO: 35457 - DNA, 394 bp, Gossypium hirsutum
  Clone ID: LIB3149-053-Q1-K1-A3
cagaaaagttgggaagggctggtttggtcagagagaggtcttttggcactacaaaagataaagtgttatacattgagcactgtgcgaattcaagggctgtaaccatatttattcgtggaggaaacaagatgatgatagaggagacaaagcgcagtatccatgatgcactttgtgtggccaggaatctaattcgcaacaattttatcgtctatggtggtggcgcagctgagatttcttgctcaattgctgttgaggcagcggcagataaatatccaggagttgagcagtatgcaatccgagcattcgcggatgctttagatgctgtccccatggctctggccgaaaatagtgggctccaacccattgagacgctatcagcagtgaaatctcaaca

SEQ ID NO: 35458 - DNA, 419 bp, Gossypium hirsutum
  unsure (1)..(419): unsure at all n locations; Clone ID: LIB3149-053-Q1-K1-A4
ggaaanccgcggcgaccttgcgtccgcagaaaagttgggaatggctggttagttcacaatgaggtctaccggcactacaaaagatacggtgttatacattgagcactgtcccaatacaagggctgtaaccatatttattcgtggaggaaacaatatgattattgaggagacaaagcgcactatccatgatgcacttcgtgtggccaggaatctaattcgcaacaattttatcgtctatagtggaggcgcaactgatatttcttgctcaattgctgttgaggcaacggcagataaatatccaggagttgagcagcctgcaatccgagcattcccggatgctatagatgctgtccccatggctctggccgaaaatagtgggctccaacccattgagacgctctcagcagtgaaatctcaac

SEQ ID NO: 35459 - DNA, 391 bp, Gossypium hirsutum
  Clone ID: LIB3149-053-Q1-K1-A5
tgaaaataaaaaagaccaagaatatattcaaataaaaggaccaaaaaaaaatgaaatgaagaggaaaatgctaaagagggggggcggttgtttgggttccaaacttgcttccgctggcgtgcaaggagatgttttttatatcgggtcagcctaaattcaattgattggcctatgaattacaacgaaatcgactgtggtaaaacctctgctgttgccaaatttaatttccatgaccaacattccccttgcttcggatggattaatagctaataggccattgcagactgcctttcctaacatttatggcataacagaatggtaaatgggacgcaaccctatagaggggcattaagagcagcgggagtagcggttactctcactaagaccatta

SEQ ID NO: 35460 - DNA, 161 bp, Gossypium hirsutum
  Clone ID: LIB3149-053-Q1-K1-A6
ggtggataagcacgaccgtgtttatgttctaatcaaaggacccctacacaggagagggtgatgtacagctagcgctttgcttacattactgctgttaccaattgattccgttggagaacaacgataggtttgttatagacaaagcactgtattcattgatc

SEQ ID NO: 35461 - DNA, 405 bp, Gossypium hirsutum
  unsure (1)..(405): unsure at all n locations; Clone ID: LIB3149-053-Q1-K1-A7
gaaggccccccacgacccacgcgtgcgcgaatatttaatgtatcnttttttttttaaaataaaaacaaactnnacgggtatggttttttttctcctcatacccactttatatttcatacattccacatatattatattgtatattgagttagataaaatttcatgttattcactaaacataataaaaattcaattccatcattattatatccattcttacgattccattaaaaattaaaaaaaaatttgattttttttacaaattctaaattcaaaattctttctgattaaaaaagggaaatttctacaatacctttgttgaatcaaatacaattttaaagatttttttggttcattgatctgtgcttaacacaagaactttattatttttcaaaaaattaaaat

SEQ ID NO: 35462 - DNA, 356 bp, Gossypium hirsutum
  Clone ID: LIB3149-053-Q1-K1-A8
acgggttgatcttctttcaacctctcctaataaccgctcggatttttctcaggggggagaaaaatggggctgtctttcaccaagctattcagccggttatttgccaaaaaggagatgcgtatactgatggttgggcttgatgctgctggttaaaccaccattctatacaagcttaagttgcgagagatagctactaccatgaacaccatcggctctatgaaagaaccgtgctatactatgactatatcttcactgtttgggatgatcgtcgccaatacaagatccgaccattgtggagacactaatttcaaaacatgcaacgacttattttcgtgggagatatcaatgatcgatac

SEQ ID NO: 35463 - DNA, 401 bp, Gossypium hirsutum
  Clone ID: LIB3149-053-Q1-K1-A9
cacaactggccgccctcgtcgttgtggttttctcgatttaattgctctcaagttctgttgtgagattaacggcttttcttctctaaacctcaccaaattggatgttttatctgatcttccggaaattaaattaggcgttgcttataaacatgttgatggtacaccggtggaatcgttcccagctgatcttcagcttctcgaacagttgaaggtcgaatactaagttttgcctggatggcaatccgatatttcttctatcagaaattattcggatcttccgaaagctgcacgacaatatgtcaagaggatagaggaacttgttggtgtgcctatccattacatcagtgtcggacctggtcgtgatgctctcatatacaaataaataatcacttttttttttt

SEQ ID NO: 35464 - DNA, 324 bp, Gossypium hirsutum
  Clone ID: LIB3149-053-Q1-K1-B1
gttattgtgttttttttaattttatatcattttttattttattaaatgtttttttttttattttttattgatatccataaaatttttgttttttagttcttaaaaaaaaacataaaagatttattataaaaaactttcgggggagtttattaaaattgtataaaaaatggttcaataagaaaaaataagaatgtattatatataaaaaaaaaaaaaaatagatgtgtaaatttttttgaaaagaaaaaaacatttttaaaaaaatttttattaaataaaaatctcacaacataagtattttattttgtttcaaaaaatgaataa

SEQ ID NO: 35465 - DNA, 308 bp, Gossypium hirsutum
  Clone ID: LIB3149-053-Q1-K1-B10
accacgcgtccgcaaattcataatcgacaactcttttaggatttattgttgtccggaacaccctacttacttaggatgggagtaatgacaggatagggtttttaaatactaattgttctgaactaaggaggagagttcagctctctggtgctcctgcaccaactactttattctccccaagcaaagatactaaaatggaaattccttctgtactatccccaagtgggtcaccatcaaatgttcttccaggttcatctcatgtgtgatttataacatttcatatgtcaattatcaccactgattcaaac

SEQ ID NO: 35466 - DNA, 236 bp, Gossypium hirsutum
  Clone ID: LIB3149-053-Q1-K1-B11
ggggggcggacgcgttgggaatgatcaactttgagacagggttttttttttttcatccccagaagaccatcaaaggcacaggtttttcttattttccccaccactctcattccaagtctaaaattattttcatgtccccagaaaatcatatttttcttttccaacttacaccccagagttataaccattttttcagccatattttatggcgagaccattatgtttccaaaagaaac

SEQ ID NO: 35467 - DNA, 257 bp, Gossypium hirsutum
  Clone ID: LIB3149-053-Q1-K1-B12
cccacgcgtccgcaatgccaagaattgacagtgaaggggtgatgtgtggtgccaatttcatggccgatgctcagtcgagaacaagtaggatgccccgagttggtagcgaagccaattgggcactgcgaggctccaaagcttgaataattcaatactaaatgacccacattttattatttgtgttttttttttttggggggggtgtttatttcctcgtttatgaaattgtaaaatgccttgtaaaaggcatgtttgat

SEQ ID NO: 35468 - DNA, 301 bp, Gossypium hirsutum
  Clone ID: LIB3149-053-Q1-K1-B2
gggaaatgcatatgcacaggttgctattagcactgatgatgtatacaaaagcggcgaggttgtggaacatgttatacaagagcttgggggaaaggttactcgtaaaccggggccaattcctgggatcaacactaaaattacctctttcctagatcctgatggctggaaaactgttctggttgacaatgaggactttctgaaggaactcaagtaggcactaagaaagagtaatgctactatatgaataaatcagtatcttgttgtgtaagcgagcagatatgtctgttaaaatatggtgttt

SEQ ID NO: 35469 - DNA, 394 bp, Gossypium hirsutum
  Clone ID: LIB3149-053-Q1-K1-B3
cttttgcttgatgtaactcctttgtcacttggtattgagacactaggtggaatatgcactaggctaatcaaccggaacacaaccattccaacaaagaaaagtcaggtgttctctactgcagctgataaccagactcaagtaggtatcaaggtgcttcaaggtgagcgtgaaatggctgctgacaacaagcttttgggtgagttcgacttggtaggcattccccctgctcctagaggtatgcctcagattgaggttacatttgacattgatgccaatggtattgtcactgtttcggccaaggataaggccaccggtaaagaacagcaaattacgatacgttcctctggtggtctctcggaggatgagattgagaagatggtcaaagaagctgagt

SEQ ID NO: 35470 - DNA, 357 bp, Gossypium hirsutum
  Clone ID: LIB3149-053-Q1-K1-B4
ataaaaataaaaaaaacaaaaaaaaatttttaatttaaaaaacaaaaaaaaaaaataaggagaaaggataataaacaaaaaacacaaccataccaacaaaaaacatgtcaggtgttctctactgcaatctgataaccagtcttcttgtagtttcaatgtgcttcaatgtctgcgttaaatggcttctaacaacatgcttttgtgtgcgttttacttggtatgcattttccctgcttctcccggttttcttaatattgaagttacattccacatttatccccatggttttgtcactccttcggcctaggataaggccacccctttataacacctatttactattcgttccttttgttt

SEQ ID NO: 35471 - DNA, 389 bp, Gossypium hirsutum
  Clone ID: LIB3149-053-Q1-K1-B5
caaatcttttctgactgtgagcgttataaatataaatgcaaatatgagtgtaatgtttgtacttgcgatcatacacatgatatatttcatacattccacatatattatatggaatatggagatagataaaatgtcatgtgagtcactcaacagaatagaaataacaattccatcattattagatcgattcgaaggattcgatgaagaatgaaaaaagaatgggattattttgagaaatgggaaattcaaaatgcttggggatgaaaatggcgaaatgtctacaatacctgggcagaatcagatacaatttgaaggaattagtgggttcatggatcggagcttaacagatgaactgtataagtttacaaaaattgaagatacagatcaag

SEQ ID NO: 35472 - DNA, 188 bp, Gossypium hirsutum
  Clone ID: LIB3149-053-Q1-K1-B6
acgccaactcctccggactccgttcgcattttaactaaatgcaaacataagggggctgggtgaacttgcgatcactcaccttatacaaaacgttcattgaatacatgtgctaattaatctgatcaacacataaatacctgtatctacatactatatcgaaaacttcttatacataggactttaagact

SEQ ID NO: 35473 - DNA, 352 bp, Gossypium hirsutum
  Clone ID: LIB3149-053-Q1-K1-B7
gagtgttttggttgttaaccactatgcggttatggtatcatgtcgttgcaactacgcagaatcaagattgtttttcaagcagccaacaagttggagaccacgagtttcaagggatcttatgatctctgtagcatctgagatgtcaggacaatattctggacccaatgaaggaatcactccgcttccagttcaggttttaactcttcaggcttcaaatttgtctgatgaagatctaactatgacagttcttgctccaacatccttaacctcacctccatctgtggtgtccttgagttcttctccaacaacaccaatgagcccatttgttggtttctctgagcttgcaaggaaa

SEQ ID NO: 35474 - DNA, 346 bp, Gossypium hirsutum
  Clone ID: LIB3149-053-Q1-K1-B9
gaccaacgcgtccgggtggttattggaggtgctgtaggcggagctttcatcgggggtggaggtgctgctgctgcggcgggtggaggcgctgccgctgccgctgaagctcctgcagctgaggagaaaaaggaagagaaagaggagagtgatgacgatatgggattctctctctttgattaagctcctttactgccttactgcctgtttagatcttagcaagttgttacattttcatttttcatttatgcgtgaattagactattttgggtgacattgggcacttttcctagttaggagaagccatttttcaggataaatttgacaatattatgagtatgttttttgg

SEQ ID NO: 35475 - DNA, 392 bp, Gossypium hirsutum
  unsure (1)..(392): unsure at all n locations; Clone ID: LIB3149-053-Q1-K1-C1
cacgccgnntccgggaatanntaacaagaagggaagcncnnaaatttctatggctatacatgtttgccaagaatgaatagagaatggagttctgggnngattccagtaaatcacgctgcaaanggaacccccgaaccaatgagcatnagatagcaaggcatanggtggagatgaagcaaagcttggagaccttaatcaattaaagtgaagttgatgatccctagccttttatggtcttttaactacgtttgttctatttgcaggacaacttatctttgacatagagaatttgagttgtaatggattcgtttctatctgaggtttgttgacattttaaaaaaaaaagatttctgtttattggagatttattttcaattaaggggtactgcccc

SEQ ID NO: 35476 - DNA, 179 bp, Gossypium hirsutum
  unsure (1)..(179): unsure at all n locations; Clone ID: LIB3149-053-Q1-K1-C10
cggaancccggccgacccacgcgtccgaaaaaaaaaatacataaaaaaaaaaaaatatatccatttttatacaacaaaagatgataaaatcggagtgtgtctggggttgacaaattcaaggtcccctatttataaccaggttcctgaaaaacttgacttctttctagctgttacccttt

SEQ ID NO: 35477 - DNA, 219 bp, Gossypium hirsutum
  Clone ID: LIB3149-053-Q1-K1-C11
gctctatgcatactattatccctaggaatttttcatttttaacaagtgtatgtacaaagaagaactgtgtcaacaagcttcttatcaagatttccacaccacaacctctcttaagagtatagattaatttcccatacacatacaatattatggtatttgcaaattgtgaaaataactctactcttttaacaccaaatattaaagaaaaaccaatatgcg

SEQ ID NO: 35478 - DNA, 269 bp, Gossypium hirsutum
  unsure (1)..(269): unsure at all n locations; Clone ID: LIB3149-053-Q1-K1-C12
gaggccctcctacttgctaagttcaaattctttggtcttcaaaagattattgtcagcaggtagtggggtttcacaaaattcaaccgaactgattcttttaaatataagtcagagaataacattgtccttgatggagttaatgctaagcttcttggatgtcatggacctctagctaattattagccaagaagagcattcctacatgctgccagataagatctgaccatactgtaaatcctgaactagctggctgnctcgatatttatctc

SEQ ID NO: 35479 - DNA, 390 bp, Gossypium hirsutum
  unsure (1)..(390): unsure at all n locations; Clone ID: LIB3149-053-Q1-K1-C2
agnnncngaaaacatgagccangnncttgggggttnncacnggnncttgttcgagggtgttagcaaacaactgaaagatccaagtagaaacatgctagcatggtcagcatgcatttgtctaagtggatcttcaattattggtttctttttgttgttatgtgatttgttgtttgtttaagctcatgcttttggatcgaattctgttgatttaaatttctttctttactgttggggaatatgttctaaataaactttaaatgcaactgcttgtcagttgatttttatgtcaaattaattttataatcggcatgtcattgtgttaaatgttataatctgttactgactgggtggcttgaaacaaaaatatcggaaaaattaaaaaaaaaaata

SEQ ID NO: 35480 - DNA, 396 bp, Gossypium hirsutum
  Clone ID: LIB3149-053-Q1-K1-C3
cataaatgaggacatcttccgcgacatgagcgatttgcttgtgaaatacaatccgggtcataagaaagtcccggttcttcttcacaaccggaaaccaattgtcgagtctcttgttatacttgaatacattgaggaaacttggaagcataatccctatttgccacaagatccttatgacaaagctaccgctcgattctggatcaagttcatcgacgaaaagtgctttcctaccctttggctagctgcatggagcgccgagaatgagcgagaaaaagtgacgaatgaagcttgcgagtatctgaaaacgcttgaaagtgcgcttaatggaaagaaattctttggtggagaaaccattggaatggtagatattgttgctagctctgttgggtatttcat

SEQ ID NO: 35481 - DNA, 396 bp, Gossypium hirsutum
  Clone ID: LIB3149-053-Q1-K1-C4
ggagaggtacggctttgacggaccatttactattaaccctctcatctttgacagcgcttactttaaggagcttttgtccggagagaacgaaggccttcttcaactaccaactgacaaagttctcctgtcagatcctgttttccgtccattggttgaaaaatatgctgccgatgaggatgccttctttgctgactacaccgaagctcacctgaagctctctgagctaggatttgctgatgcataagctgatggttgcggaatagaatgaagccaacaacatttgcctccacaaaatgaatgtattgggttttgtcatctctcagtagattatgggcagttgttgcttgatgaatatgggtatttgcagttttattttgttgaacatgttgaattgag

SEQ ID NO: 35482 - DNA, 390 bp, Gossypium hirsutum
  Clone ID: LIB3149-053-Q1-K1-C5
agattgagcgtgagagacgtcgtcgttttgctcaagctcaggctgaatatgagaaggcgaagaagcaggagcaatcatcctccagtcgaaaacctggaggcatgcctggtgggtttccaggtggaatgcctgggggttttcctggaggtatgcccggaggtatgcctggaggtatgcctggaggcatgccgggtggcatgcctggtggcatgccgggtggcatgcctggtggcatgccgggtggcatgcctggaaatgttgattttagcaagatattgagtgatcccgaattgatggcagcatttagtgatccagaagtcatggctgctcttcaagatgtaatgaagaatcctgctaatcttgcaaagcatcaagcaaatcccaaggtgg

SEQ ID NO: 35483 - DNA, 390 bp, Gossypium hirsutum
  unsure (1)..(390): unsure at all n locations; Clone ID: LIB3149-053-Q1-K1-C6
tatcagcgagttaatcagaatggaagttgtggccgtcaaggtggtgcaggtgccgcggcgaaaccatgatttgattcttcataattgactgagaaagtgaccagatgatttttttttgacaatataaaacaaaggaaatggaaggcactataagaattgaagttcttgattttcataaattcaactatttatgactactgagttcccccccgcccctaccgcccctaaactctctttttcttgtgttatttgttcaagtaatgtgtttgaggattatatgatcaaattttttatataatcgtcatgtcattgttatatagttttaatctgttactgactgattccttgnaacaaaaaaacnngcaaaaaataaaacaaatacaaaagtgg

SEQ ID NO: 35484 - DNA, 388 bp, Gossypium hirsutum
  Clone ID: LIB3149-053-Q1-K1-C7
gttggatataagtggggtacaaacttatgtgataaatagtgccagggttctattcttgaatgaaaggcctcaaccaaaatctgggaaattaggagtttctcatttatgtgaaatctgtggaagaacactcttggacccttttcgtttttgctcattgggttgtaagcttgtaggaataaagaggaatattgggaatgcaagttttaacatagaagaagaaggcataataatatcgaaggaagaagaagaagaagaaatgcgtgaagggtcacaacgagacattaacccttcgacgcctcccccacctccttcaaatgcaaggcgaagaaaaggaattcctcaccgagcaccgtttgggtcctagaacccaactactatcaactatttt

SEQ ID NO: 35485 - DNA, 295 bp, Gossypium hirsutum
  Clone ID: LIB3149-053-Q1-K1-C8
ctctttggttcctattgtcggaggaattctgctaacatctgttacagaagggagttttaacatgcttgggttttgtgctgccttatttggatgtttagctacttctacaaagactatccttgctgaatctctactgcacggatacaagttcgacagcataaacacggtttactacatggcaccttttgcaaccatgatcttgggagtaccagcactgttactcgaaggaaatggggtaatggattggtttcatgctcaccctgccccgtgggcattcctcatcattattttcagc

SEQ ID NO: 35486 - DNA, 405 bp, Gossypium hirsutum
  Clone ID: LIB3149-053-Q1-K1-C9
gcggaagagataccttttcagcttggattgtctaaaatggatctccggaagatgttaaaatccagtttgtctggggttgacaaatcaattactgcaatgtataagaagttgcagaagaacttgacatctgaggagctgttaccctctttgtgggacaagtgcaagaaagagtttctggacaagtatgatagctttgcccaacttgttgccaaaatttaccccacggaaaccatcccatcggttagtgaaatgagagacctgcttgcttccatgtaaaagggacagattttgccttctgtataatctttctttattttccatttggagtggagagccgtattagctggctctaattattaaaattgtaatataatagacaatcgccctccaaaacccatatttcaa

SEQ ID NO: 35487 - DNA, 396 bp, Gossypium hirsutum
  Clone ID: LIB3149-053-Q1-K1-D1
gctttacagaagctaaagaaatcttggttggtgggaagacagacgcctggaagatggcatcatctgaatcagattctctcaacagatgggctgaaaaatcccgtttccgcatcggcgactctctcgtgtggaaatatgatggtggcaaagactcagtgctgcaagtgactaaggaggcttatgcaagctgcaatacctcaaactcaattgcagagtacaaggatgggaacaccaaggttaagcttgataggtcagggccattttacttcagtggagcaaagggtcactgcgagcaaggccaaaagttgcacgttgttgtattgtctcaaaagcataggtacactggaatctccccagcaccttctccggcagaaattgagggtcctgccattgctc

SEQ ID NO: 35488 - DNA, 400 bp, Gossypium hirsutum
  Clone ID: LIB3149-053-Q1-K1-D11
acttccctcaggtttcatgttggttccttatgcagccttctttgtcccatctgggggacggggtaccggtggtggcaccgttgccaaggacgcaatcggaaatgatgtaattgccgaagaatggctcaagactcatggccctggggaccgaaccctgactcaaggattgaagggagacccaacctacctagtggtagagaaggacagaactcttgcaacatatggtataaatgctgtgtgcacacaccttgggtgtgttgttccgtggaatcaagccgagaacaagttcatatgcccctgccatggatcccaatacaacgatcaaggaagagttgtgagaggacctgcccccttgtccttggcattggcacacgctggtgttgaagacgggaaggtagta

SEQ ID NO: 35489 - DNA, 421 bp, Gossypium hirsutum
  Clone ID: LIB3149-053-Q1-K1-D12
gataaatttacgtcccaagatctacatcgataacaaacagcatggtccactactcgttcagagcgcagattaactagagtaggcatatagtctccatgatgctctgcaaactgtgatagtgatctctgagggttactgtgaattccagagcgtaccgtgcaaattgattaaatcgggatgtcataataagtagttaggattcgagctagtgctttgcaatatattgtatgcactcttgacccacaatcaactccttggagttcccgtggaatcaagccgagaacaagttcatatgcccctgccatggatcccaatacaacgatcaatgaagagttgtgagaagacctgcccccttgtccttggcattggcacacgctggtgttgaaaacgggaaagtagtatttgttccatgggtggaaac

SEQ ID NO: 35490 - DNA, 141 bp, Gossypium hirsutum
  unsure (1)..(141): unsure at all n locations; Clone ID: LIB3149-053-Q1-K1-D2
aaaaaaaaaaaaataaaaaaaaaaaattttttattttaaaaacaganacataaaaaattgggaaagagtaaaaataaggtgtctgttcatcttttcaaactcaaaattaccttttccttctttgcggcccctcccttttgg

SEQ ID NO: 35491 - DNA, 394 bp, Gossypium hirsutum
  Clone ID: LIB3149-053-Q1-K1-D3
gaacaactgagcaagttaaggctgcactagctgcctgcaatgatttgaagttggatggccttgtaattattggaggtgtaacatcaaacacagatgctgctcaacttgctgaaacatttgctgaagctaaatgtccaacaatggtggttggtgttcctgttacactgaatggagacctcaagaatcaatttgttgaaaccaatgttggttttgatactatatgcaaggtcaattcccaactcatcagtaatgtctgcactgatgctctctctgcggagaagtactattattttatccgtcttatgggaaggaaggcatcacatgttgccctggaatgcaccctccaatctcatcccaatatggtaattcttggtgaagaagtggctgcatcaaa

SEQ ID NO: 35492 - DNA, 399 bp, Gossypium hirsutum
  Clone ID: LIB3149-053-Q1-K1-D4
ccacaaaatatctttataaccaagcattttgcgaaatttgcgaggatactttgcagggggggagcatgatcgaacagtgaccatgcatcactggcttttcaaaccaaagcatccccagaagcagccactccctcacataaaactgcgggagcaaaggtaacgctgaatttacacgagacgttctagcgaatcgttcaaaaactaaacattgaggatcaaagctatgatgcacaaatgctaatctgaagccctactataacaacaatactcaacttgatcaaataagctgatctttagttgaagatatattatcagatctatggcacttaacccacgcttggatgttcctattatcgataaaatttgcaaaaattggtggaaagttgctatcataaatgt

SEQ ID NO: 35493 - DNA, 389 bp, Gossypium hirsutum
  Clone ID: LIB3149-053-Q1-K1-D5
atttctcaaagaatacatggccgtcgatgatgttgtaggaactgaattgcacactggtgggaaccgattcacaggcttgttatccagctccggtttgctggtaaagcacaaagctttaaaggcatactttggtgataaaaagccagatgttggcctcggaagttcaagcctccatgaccatcactttatctccctttgcaaggaagcctatgtggtgcacaaggaagatggtagaaacaatcaaagttgtttgatgccaagggacaagtacccgaagccacttatatttcatgatgggagactagctttcttgccaacaccatttgcaacactttgcatgttcttgtggcttccatttgggatagttctcgctatatttaggattctgg

SEQ ID NO: 35494 - DNA, 385 bp, Gossypium hirsutum
  Clone ID: LIB3149-053-Q1-K1-D6
atttatcaaagaatacatgtttgtcttttatgtcgtaagaactgaattgggcacgggggggaaccgattcacatgcttgttatccagctccggtttgctggcaaagcacaaagctttgaaggcatactttggttataaaaagccgcatgttggcctcagaagttcaagcctgcatgaccatcactttatctccctttgcaaggaagcctatgtggtgcacaaggaagatggtagtaacaatcaaagttgtttgatgccaacggacaagtacccgaagctacttatatttcatgatgggagactagctttattgtcaacaccatttgcaacactctgcatgttcttgtggcttccatttgggatagttctcgctatatttaagatt

SEQ ID NO: 35495 - DNA, 311 bp, Gossypium hirsutum
  Clone ID: LIB3149-053-Q1-K1-D7
accgatccaatcaatcgcttcaactatctcaccaaacacatatccaatggctccgatcgctgtcggcgacgtgttaccggacggactctctcctacttcgacgccgatgataagctccagcaggtgtccgtacattccctggctgcggaaaaaggtatcatctttggcgttccgggcctttacccctacttgcagcttgagcatgttcctggattcatcgaaaaacagggtgagctgaaatcagggcgttgatgaaatatttgcattagcgtgaatgatcccttggatgaagcatggaccaaaacttaccc

SEQ ID NO: 35496 - DNA, 371 bp, Gossypium hirsutum
  Clone ID: LIB3149-053-Q1-K1-D8
gttgctgataatgaatggcttgccaattaactagctaaagaaacatgggggaagcggaaggatgctgaaaaggcatcatttgaggaggcggagaaaaagagagaggcggaggaattatacgatgtccctctttacttcactgctgcagatgaagacaattcctcacatgctgactggaacgagtctttatcaccatactaacatctacgatcaggacctggaacaagcacataatgagctctaggcactgtaatatgtcgatgacaaatcgatttgaagataaatacatctaaatattttactacagtttatttaaaaaacaaacctagtacataggagatgtcagttacagaaaaaatgaattgaatgct

SEQ ID NO: 35497 - DNA, 342 bp, Gossypium hirsutum
  Clone ID: LIB3149-053-Q1-K1-E1
gacaattcggccatgcctagttgaactaagtgaggatccagatgttgatgtcaggtgtttcgccacccaagctctacaatcaagtgatcagcaaatgatgatgtctagctagaaccctacattacttgtatcacacttctacatcctttcctttttcctttttaaatttattttaccttaaagcttttgttttgtttttttccttattttaattgtatatctttttttcagattgaaacactcctttgctatatatgtaatttttctaaaattggggaaaaaaaaaaaaataaaccaaaaaaaaaaaaaaaaaaaaaaaaaactaacaaaaaacaaaataaa

SEQ ID NO: 35498 - DNA, 391 bp, Gossypium hirsutum
  Clone ID: LIB3149-053-Q1-K1-E10
ccacgcgtccgaatgaacaaaccgaaaacatgaaacagatcctagatttactgtcaactcctattggatctgcggctggtgttgacgaggatgaattggaagcaaaactcgaagagcttgaaggtgctgagtaagaagaacagcttgtccagcctgcatcaacagctcctgcagcaccaattcatgtgcctgctggaaggcaaccggctcgttctattcctcaaaagcacacatccgatgtagatgcactcgccacattgcaggctgagatggctaattaaggcttacagtatagaactgatttttttttttgcggtgcctacagaaaatagacggcctatttgtattacttaaagaacgcattttatgttttacagacaatttcaaaaat

SEQ ID NO: 35499 - DNA, 369 bp, Gossypium hirsutum
  Clone ID: LIB3149-053-Q1-K1-E2
gacaattcggccatgcctagttgaacttattgtttatccacatgttgatgtcagggattggggcacccaagctctacaatcaacttatcagcaaatgatgatgtctagctagaaccctacattacttgtatcacacttctacatcctttcctttttcctttttaaatttattttaccttaaagctttcgttttgtttttttccttattttaattgtatatctttttttcacattgaaacactcctttgctatatatgtaacttatctaaaattgacaaaaaaataaaacattaaattaagataaataaatatatttaaaaaaataaaacaaacactaaaaaatttctattggggcgccccttttaaaga

SEQ ID NO: 35500 - DNA, 294 bp, Gossypium hirsutum
  Clone ID: LIB3149-053-Q1-K1-E3
aagggctcaggttgcatatgagaggaagaagcagctgaacaagcttagggtaaaagccgagaagactgcagaagagaaactcggctctcaactcgacatccttgccccagttaagtactgaatttctagtggctagctagtttcatagaattttgttaaaggttattggtttcactatttagttccttttgagatgtggaggttaaaatttttgttgaatcttgggttgtccctttttcttaatgaactttttggtgtaggatcattcaaatataattcatatatgccttttat

SEQ ID NO: 35501 - DNA, 385 bp, Gossypium hirsutum
  Clone ID: LIB3149-053-Q1-K1-E5
cccacgcgtccgggaggggcataaaataattctagtggccacagatttggttggagggggaattgacattgaacgtgttaacattgtcatcaactacgatatgccagattctgctgatacatacctgcacagggttggtagggctggtaggtttggtaccaagggtctcgcaattacatttgtttcatctgcttcagattctgatgtgctcaatcaggtccaggataggttcgaggtggatataaaggagcttcctgagcagattgatacatctacatacatgccatcataatgaagttgcttacagtcggcaatactggagtcacgcctaaattagcggggttttcggaggccatgtggcttctgactgctgtttaaaagagtg

SEQ ID NO: 35502 - DNA, 390 bp, Gossypium hirsutum
  Clone ID: LIB3149-053-Q1-K1-E6
tttcaatctttgttacacaaattatcttcaaagcttgaaaatgaagaaagtggtgctgaaattggattttcacgacaacaaatgcagacagaaagccatgaaaacagcctctggtctttcaggggttgaatcagttgccctggacaaggaccaaaaactcacactcacgggagacgttgatccagtcgtggcagtaaggaaactaaggaaggtatgttacactgaaatagtctcggtcggaccggcgaaagagccggagaagaagaaagatgagcccaagaaagacgaaccgaaaaaaccggcggatacgagcaaagatccgcccaaaggcgcggtggtacagtacgtttatcacccctcaatgccccagtactacccgccggtacccga

SEQ ID NO: 35503 - DNA, 391 bp, Gossypium hirsutum
  Clone ID: LIB3149-053-Q1-K1-E7
ccaaaaaacacttcaaccctctagccatgacattcaagcgtcggaatgggggccggaacaaacatggccgaggccatgtcaagttcatccgctgctctaactgcggcaaatgttgccctaaagataagtcaatcaagaggtttcttgtgaggaacatcgtggagcaagctgctgtcagggatgtccaggaagcctgcgtctatgacacgtacactctgcccaagctgtatgtgaagatgcaatactgtgtttcatgtgcgatccatacccatgttgatagggtccggtcccgcactgacaggaggaaacgtgacccacctcagcgcttcattagacgcagggatgatatgccaaagcctggtcagcctgttcaggctcctcgacctggtgt

SEQ ID NO: 35504 - DNA, 170 bp, Gossypium hirsutum
  Clone ID: LIB3149-053-Q1-K1-E8
gttcataagcttgtaaaaagctgccttttgcggcaaagatactatgaccctcaacgtatactacctgaagtagaaacttttactgttttctttgttagctaagtaataaacttgtcacttactgttttcatgctataaaattgtccactcagattttttaaaaaaaaaca

SEQ ID NO: 35505 - DNA, 117 bp, Gossypium hirsutum
  Clone ID: LIB3149-053-Q1-K1-E9
gaaaaagacttgtattattcccttgcttttgtttctctatccatttactaatggattttgtgtgtgaaccaatctagtttgaacgaataataaatctttattcgtatttttattctt

SEQ ID NO: 35506 - DNA, 274 bp, Gossypium hirsutum
  Clone ID: LIB3149-053-Q1-K1-F1
acggtctccgattccatcttacatgctttagctttccacccaaccgctcgtatagggcgcggtgtctattcaatagaatctccgctcttaaataaacatccttcccccaaaccactgctgaattccaaataactcctctttcaacacattcctcttaaccagtctggcctaaactctaaaggtcctgtccaaacgcccaggccaacaattgcgcaacctctatgcagaatcgtactcacaatggaacatctcattcaacgcccatccaaacata

SEQ ID NO: 35507 - DNA, 150 bp, Gossypium hirsutum
  Clone ID: LIB3149-053-Q1-K1-F10
gagatagacttggactagatccctaccactattgttttataatcttacataaaataatatttgggtgatccatgttaaaaagaacgaataataaatcactattaaaatttttattcttaaaaaaaaaaaaaaaaaaacatagtcccgcat

SEQ ID NO: 35508 - DNA, 285 bp, Gossypium hirsutum
  unsure (1)..(285): unsure at all n locations; Clone ID: LIB3149-053-Q1-K1-F11
gcacagttgagcaatatcatgaccaatttgtaagtcttctgaaccaattgcatctacctgagagttatgtgttgagtatatttgttcataaccttaagtccgagattggttagtagttgtagttgtttaaaccaaccaacttggaagaagggttaattctagctttgcaaatagaggacattattagcacaggttcttccaaaactgtttctataacagggaattcaaattattccaaaactttgtttcctcaaaananaaaaaaaanaaaaaaatttttttttt

SEQ ID NO: 35509 - DNA, 319 bp, Gossypium hirsutum
  Clone ID: LIB3149-053-Q1-K1-F2
gaaattggctgcacaataaagaagtttccccttttgacacccagagagtatgttcttgcttggagattgtgggagggaaaagatagaacattctactgttttatcaaggaatgtgaacatccatctgcaccaagacggaagaagtacgtccgcgtaggatattttagatccggttggcaaatcaggaaagtacccggtagagatgcctctgagatcagaatgtttcaccaagaagatgctggtctgaatgtggaaatggcaaaactagcatttgcaaagggcatatggagttatgtatgtaagatggataatgcattac

SEQ ID NO: 35510 - DNA, 273 bp, Gossypium hirsutum
  Clone ID: LIB3149-053-Q1-K1-F4
gggggacccacgcgtcccgtaaatcgctagcgattattatagtgtatccattcttacccacacgaaaatgcgagggcgtggctattttataacgtcacctaacttcaattcacctgccgtctctctacaacttcacaactcacaaaaccctgtctgtacccaacttaatagatttgatacacatccaccttttgacagctgacgaaatagcccccaatcctgaacctatcgttcttcccaacacaagaacaaactttatggctaatgggacac

SEQ ID NO: 35511 - DNA, 357 bp, Gossypium hirsutum
  Clone ID: LIB3149-053-Q1-K1-F5
cattatgctgatgttcctcacaaaagtctaacagatgagaacgctggctagaactggggtccgttcaaaagaaatgggttcaaatttcccggaggaggaactatgttccctcaaagttccaattcctttattgattagcttgcctctgtcattccaattacagaccgttttgtcataacaacatttgattcttgttgtggagttgccaattggggtgcctacattcttaacagaaatgttctggctatttcttttgcacctctggacaatcattaagcacaagttcagtttgcactggaaccaggtgtgccttctgtaattggtgttcttggatccaataatgtttcatatccaaca

SEQ ID NO: 35512 - DNA, 392 bp, Gossypium hirsutum
  Clone ID: LIB3149-053-Q1-K1-F6
gccttggatgttaaggctggtggaattaagaagaaaaagaaacataagaagcagagtcaacatgatgaccaaattacccagaacgatccctctggtgccgctttcgctggtgaaaccacagaagtttctgttgatcccaatgaagaagatatcaacaatgcggacatgtcaagtggggagaaggcggctcctcattatgatgatcatcttaccccagcagaaagacgatacattgagcagagggagcaactcgacgttcataggttggctaagcaagctaataaatctcattgtgatagaatccaggatttcaaccaatatctggcaaacatgagtgagcattatgacatttcgaaagttggtcccggttaattcaggcaagaccaaggtaa

SEQ ID NO: 35513 - DNA, 391 bp, Gossypium hirsutum
  Clone ID: LIB3149-053-Q1-K1-F8
aagagatgcggtttcacgatccaccatacaggtatatcctaaatcatggagtgctatttacatggctcttgataatgttggaatgtggaatgtgagaagtgagttttgggcaaggcaatatcttgggcagcaattttacttgagagtttatacacctgtgaactcactcagggatgaatatctcattccaaagaatgctttgctttgtggcagagcccaaggaagaagcacaaggcctctttgaaacatttccagtagccgaaattgttgagaatcaaccattagtcaattataaaatatgcctcaattcttttcattttttgtttcaccagaatctgtatttggttttgtatctaaagaaatgaaaataattgtattaaattagaacatt

SEQ ID NO: 35514 - DNA, 397 bp, Gossypium hirsutum
  Clone ID: LIB3149-053-Q1-K1-G1
gcagggccaatgtaccaggctgggaccttgagtgggaacccattggcgatgacaggcgggatacagacccttaagcggttgaaagagccaggaacatacgaatacttggataagatcaccggacaacttgttcaaggcattttagatgctggaaaaaagacaggacacgcaatctgtggggggtatatcaatgggatgtttggatttttcttcacagaaggacctgtttacaactttgacgatgcaaagaagagtgatacggcaaaatttgccaggttttataggggaatgctggaggaaggtgtatacttggcaccttcacagttcgaagctggatttacaagcttggcacatactcaggaagacatccaaaagaccattgcagcagctgagaaag

SEQ ID NO: 35515 - DNA, 185 bp, Gossypium hirsutum
  Clone ID: LIB3149-053-Q1-K1-G10
gtgagtttcccgtacttacggagatgtgcattggtgtggaagtcgcttaaatcgtcttcgcgagcggctttctgcgaaagagatgatgtgtgggagtcctctcatgcagcaactgacatgatggatacagttgaaagtgcttcagtggggcttattgaattgaacaacctggagatttttttaaa

SEQ ID NO: 35516 - DNA, 378 bp, Gossypium hirsutum
  Clone ID: LIB3149-053-Q1-K1-G11
ggaacatttctggtgtttagggcttggtcgtttggatagatgggaggaggccatggacagagtgcagcttacaaaggactaactttgcatcatccaaagcgatggcatgttgccaccggcaaaggctcgagtgccgttatgtggttgtgggtcttgtacagggctaagcaagatggtactgttgtattgggttggctacaccctctggtgggccatgatgatcattctcacagtcatggagataagcattatgatgttgttccaaatgtcttttgtcaatttcttccgttgcaataaagagattgtgactgcagattcgaagcataatgtgatgaaatctgaaactacatttgaacattttgaaacttcaataaacat

SEQ ID NO: 35517 - DNA, 343 bp, Gossypium hirsutum
  Clone ID: LIB3149-053-Q1-K1-G12
agaagatgctggcaaaccctccagagagagctgggacagtaaactggttaatacatgcgggtgttgaaattttggtgctaagatgtctgacgtcatccaaagaaagtgcaaaaatgtgattagcaagcttcagaggagaatagataaggagggtcaacatatagtaccacttttgacggacttgtggaagagaattgaagactctggttacacaggtggaagtggaagcaatcagttggatttccggaagattgatcagcggtgtgacagattagagtacagtggagttatggagcttgtttcagagatgcaactagttttaaaaagtgccattcatttttac

SEQ ID NO: 35518 - DNA, 397 bp, Gossypium hirsutum
  Clone ID: LIB3149-053-Q1-K1-G2
gcagggccaatgtaccaggctgggactttgagtttgaacccattggcgatgacaggcggggggcagacccttaagcggttgaaagagccaggaacatacgaatacttggataagatcaccggacaacttgttcaaggcattttagatgctggaaaaaagacaggacacgcaatctgtggggggtatatcaatgggatgtttggatttttcttcacagaaggacctgtttacaactttgacgatgcaaagaagagtgatacggcaaaatttgccaggttttataggggaatgctggaggaaggtgtatacttggcaccttcacagttcgaagctggatttacaagcttggcacatactcaggaagacatccaaaagaccattgcagcagctgagaaag

SEQ ID NO: 35519 - DNA, 398 bp, Gossypium hirsutum
  Clone ID: LIB3149-053-Q1-K1-G3
gtcgaagttgcggcatatcctttttagtactccctactgtaaagatgaacaaggagaggctcatgaaaatggccggtgcagtccgcaccggcgggaagggtagcatgagaagaaagaagaaggctgtccacaagacaactaccacagacgacaaacggttacaaagcaccctcaagagaataggagtcaatgctattcccgcaatcgaggaagtcaacatcttcaaggacgatgttgttatccagtttattaatcccaaagttcaagcatctattgctgccaacacctgggttgtaagcggttctcctcaaacaaagaaattgcaagatattctccccggaatcatcaaccagttgggacctgataacttggacaacttgaggaaattggcagagcaa

SEQ ID NO: 35520 - DNA, 66 bp, Gossypium hirsutum
  unsure (1)..(66): unsure at all n locations; Clone ID: LIB3149-053-Q1-K1-G4
gcctggtgaaaaaacattaatactattattattttacgcgtccnaaaaaaaaaaagggaagggggg

SEQ ID NO: 35521 - DNA, 224 bp, Gossypium hirsutum
  Clone ID: LIB3149-053-Q1-K1-G5
cttattctattttttctcttgctttttattaaaacggtaccagtactaggactaggcttggtcctgctgatctgagagtaaaaatctatatctatctatctatatgtatgtatgtgcgtatttcttagtgctatacaagatgtgcgtatttcttcgtgctaaccaaaaaaaaaaaagaaaaaaagctaataccaaaataaaagaagaaaaaaaattcaaagaca

SEQ ID NO: 35522 - DNA, 51 bp, Gossypium hirsutum
  Clone ID: LIB3149-053-Q1-K1-G6
ctccgaataactgtactagagaggcacctaaatgtaattcggtggcccact

SEQ ID NO: 35523 - DNA, 390 bp, Gossypium hirsutum
  Clone ID: LIB3149-053-Q1-K1-G7
ctttctcatttctatcttattgtttggtcacccaaccaagaaaagcaatgatgtgggaaaccccaaacagccatgaatcaagccaacatggccaagccttagacccccatgagccccaaggttaccctgaagactatgatagcacctgttccacaccctatgttagtgctccttcaagccctggccgggcacctggaccaggatccatcaatggcgggttcttttatagtgcaccagctagccctatgcacttcgcaatgacctcagtagcttcaattgtgtcctcaacccgaccatcctcccctgataacttagtgcctctaggttttgagtttgagttctctgggagatttgggtcttcagggttgggtcaaacagggtccatgagct

SEQ ID NO: 35524 - DNA, 271 bp, Gossypium hirsutum
  Clone ID: LIB3149-053-Q1-K1-G9
gcaatatcaaagaaacaaagcaagaactagataaccagatcgaaaaatgtcgggaatcatgcgcaagagcgaagaaacccttcacatgggagggcacaagaaggaagaagagaagcacaagggagaagctcatcacgaaggcggccatggctatggcgctgctgagcacaagggagaagttcatcacgaaggcggccatggctatggttatggcgccgctgagcacaagggagaagttcatcacgaaggcggccatggctatggcgccgct

SEQ ID NO: 35525 - DNA, 346 bp, Gossypium hirsutum
  Clone ID: LIB3149-053-Q1-K1-H1
ctttaatatgatccaatcttactaacctttttattcgccggtataaaacatgtatagggtggcctatgtaaaatatactcatcgctgccgtacgacgggaaacttggcattacgactaagattcgaacatattcgtgtgtatacgcatgcaccccgcggagtacttttggtattttatgatcttggaacggacaatgctacattttactttgaaacgcaacctgatgattgaattaatggcgccgacacctttctcactaaacgaggtaggagcatattctacatgctgcaaaacggttacactttgcagcgcaaaaaattattgtgcgttgattgtaaagccttc

SEQ ID NO: 35526 - DNA, 262 bp, Gossypium hirsutum
  Clone ID: LIB3149-053-Q1-K1-H10
ccaaaatttccagattgaattaaaatgcataatttctataatatggattataagagatcaaattcatgcttcatggttatttctacggttaaaaaaaaaaaaaaaaaaaaaaaaaaaaaaaaaaaaaaaaaaaaaaaaaaaaaaaaaaaaaaaaaaattaaatatctataaaaaaaaaaaaataattaaaaaaaaaaaacgggggcggactttttaaagattcaaagttaactacacgttctttgaaagtggttatattttt

SEQ ID NO: 35527 - DNA, 414 bp, Gossypium hirsutum
  Clone ID: LIB3149-053-Q1-K1-H12
gctgagtgtcatattccgtttcaaattgattcatccaccaacgatgaagagacctgcctggagggtggcgtttattctgtcgatggagatgggaccgtaccagttctaagtgccggttttatgtgcgccaaagcttggcacggtaaaaccaaattcaatccttctggaatccgaacataccttatggaataccgtcactctcctccgacaaccttactggaaggacgcggcactctaagctgtgctcacgtcgatataatgagaaattttgcattaatcgaggatgttataaggatcgcggctggggcttcgggtgaagaactgggaggaaatcgagttcattcaaatatcttcaaatggtccgagaagatcaacttgcaattataagcctgcactgatacatacatactctcc

SEQ ID NO: 35528 - DNA, 261 bp, Gossypium hirsutum
  Clone ID: LIB3149-053-Q1-K1-H2
ctttaatattataaaatcttactaatttttttatttgccggcctaaaacatgcgtgggtggggcgatataaaattttctcatacctcccataaaacgtccactctttcactattcaaaccttcctcacccttaaaaccacatcctaacacctccttattttcttcttaaatcaaatcaacttgtcacgcactattacatttttaaattgaaaacccatccttacccctaaataaattgcttcccccccatttccattttac

SEQ ID NO: 35529 - DNA, 385 bp, Gossypium hirsutum
  unsure (1)..(385): unsure at all n locations; Clone ID: LIB3149-053-Q1-K1-H3
tggttctagtttagcatcttctatttttatcctctctgttttttctttttttcttggttggggggtcacacaaaaagggaaaggtggatcactctggccaccaaaagggccgtggttgctataaaaaaaaccaaaatcttttttagcaaacagggaaaaccatgaagtctaatggatagagacaaccacacacgcacgccccaagagagagagagggggtggctacttttgttgggttgtagtaggtgtgaattaatgaaggcacgaggttcacgcgaggatgctttgcttaagatcctcttttatctactaaaaatttcctcnnnnnaaaagaaaaaggccaaaaatangnggggtnncaacccatggaaactctttccccaat

SEQ ID NO: 35530 - DNA, 389 bp, Gossypium hirsutum
  Clone ID: LIB3149-053-Q1-K1-H5
caaaaatgctgcatgtgagggttccttcaagtccttttgcctcctgaatgcatggggtgatctcatgatgcttccatctgagatgcttgcggataggtccacaggaaaagagccccaagttcagcgtatccctcatcatcagggttcttaacgattttgtaccttatgagttcaaccctaatccagcttcacaggccgtttttgaagcattggaaaaggatctttctgagggtggggaagagtctatcacaaactatccatgtatggctactgctattgtctattagccaccttccgcaacttccataaccaacattataggaagccaagtcatggaaaggagtaagtcattggtacttagaaaatcatacactagtgatgatgagctt

SEQ ID NO: 35531 - DNA, 90 bp, Gossypium hirsutum
  Clone ID: LIB3149-053-Q1-K1-H8
ttctgttttaaaaaaacaaccttttttattttttcctcccacgacatatctggggtgtgtgggtatctaaattcaattcactttccttcc

SEQ ID NO: 35532 - DNA, 353 bp, Gossypium hirsutum
  Clone ID: LIB3149-053-Q1-K1-H9
cgctggtctcatctacgagttcatcttcatcagcaacacccacgagcagctcccaaccaccgattattaagcctaatcagggtttaattgatttgtctgtcactttgaaaccggattttctccgatctcatttgagtttcctatctctttccttgttttttgtgtttaatttgtggcccgtcgatcttggttacttttttttcattccccatcctctatcatgatcatcatgcatggcagatgttgtttacaattgcatgccctgaaaaaatagtatatgagtgactcactgtaagtctttttttcttatattattcaaaaccagcatcagggctgtaaatgtgacttttctc

SEQ ID NO: 35533 - DNA, 108 bp, Gossypium hirsutum
  Clone ID: LIB3149-054-Q1-K1-A10
tgactatggtgaaaattaactggtcctcaatacttatttgaatttctgcataaaagaataagaatgataacagatggcattaatttgaatgacctatggtttctcttt

SEQ ID NO: 35534 - DNA, 423 bp, Gossypium hirsutum
  unsure (1)..(423): unsure at all n locations; Clone ID: LIB3149-054-Q1-K1-A11
ccaaaagggtggtgagaccagcacgaacagcatagcatctatctttgcttggacgcgtgggcttgcacacagggcaaaattggatgacaatcctaaactcttggatttcactgagaaactagaggcagcttgtattggaactgtggaatctggaaagatgaccaaagatcttgcactaatcattcacggctctaagcttgctagggacaagtacctgaatactgaggagttcattgatgctgttgcagcagatctaaaagcaagactttcttaagcataaatttgaaaatggtcgaaaatggaagggggtggttttgcgggtttgcaggaaaaataataataaaaagcatcantggaggtggcgtggatgaggtgaggatggcggttgtcaatagatgaatttaatcaccattttatgagata

SEQ ID NO: 35535 - DNA, 354 bp, Gossypium hirsutum
  unsure (1)..(354): unsure at all n locations; Clone ID: LIB3149-054-Q1-K1-A12
tgtggttttgcaggccgtggctatgtacaaatcaaaggaccccaagacatcagatgaagaggaaatgctagagaatttgtttgattgcttgtgttgtttattgatgccattggagaacaaggagaggttcgttaaggccgaaggagtggagttgatgatcattattatgaagcagaagaaatctgcctatgcctctgccatcagggcacttgatttttccatgaccaagtatccccctgcttgcgagcgatttgtggatgttctgggattgaagactgccttcgctgctttcatgggtaagatacctataagtaagaagaacangaaggaaaggtaccaagaggagttggaaga

SEQ ID NO: 35536 - DNA, 395 bp, Gossypium hirsutum
  Clone ID: LIB3149-054-Q1-K1-A2
cccacgcgtccgattacaaatatgttatttcccagtatgtggaagggtctagtagccatttttatggccggaattctcgccggatcagtgtcggtaaaggctcaaatggtggctgatatagtaacagacgagttctttgatgggattttgaatcaagcagatgccagttgcgaagggaggaatttttattcaagggctgcatttcttgaagctctcagttcttttactcaatttggtacagctgatgatactaggcgtgaggttgctgctttctttgctcatgtcacccatgaaactggacatttttgctacatagaagagataaatggtgcaaccagggactactgtgatgagaccaacacccagtatccatgcaaccctgataaaggctacta

SEQ ID NO: 35537 - DNA, 328 bp, Gossypium hirsutum
  Clone ID: LIB3149-054-Q1-K1-A3
agaagaggtacgccgttgcctcggcaatcgccgcttctgctgttccttcactcgtgatggcacgtggtcaccgtatcgagtctgttccggagatgcctctggtcatatcggatgctgcggagagtgtggaaaagacctcggctgcaattaaaggttttgaaacaggtcggagcatatccggatgtggaaaaggctaaggacagccaagggatccgacccggaaaagggaaaatgaggaaccgtaggtacatttctcgtaaaggtcctttgattgtttacggaactgaaggggcaaagcttgttaaagccttccgtacatccctgagtc

SEQ ID NO: 35538 - DNA, 230 bp, Gossypium hirsutum
  Clone ID: LIB3149-054-Q1-K1-A5
aatagaatcttatttgtgaagtagcagtggaagaggacttgcctttcttcttcaaagatacaccttttgatctttgttccttcaaggtgatgagtatggttgacaattctaacggtgataaaagtgatgatgaaagggaaaagaaagaaatattacaatgcatggaatgttttaaccgattatttgttgttgcatattattctgtacaattatattatgagaagtatata

SEQ ID NO: 35539 - DNA, 308 bp, Gossypium hirsutum
  Clone ID: LIB3149-054-Q1-K1-A6
cggaatcagtgctcttatgaccgggttttacttgtacaagatcgctactggcggcaatcatttcccagccaagactgaatgatgaacactggtacattgacattaccagttgcaacagatctctcaagatcattgaagtttagctgcttgaattggaaaagtttagttacacaacatgtgctgtactttctttattttttggacaatacatgtgttgtactttgatgcgtgcatgaagttaaaatatagcctgtcttgtataccaaagaacctcggtttattcttttaccaaagttatgctgttccgt

SEQ ID NO: 35540 - DNA, 359 bp, Gossypium hirsutum
  Clone ID: LIB3149-054-Q1-K1-A8
catcattcaatccagttacagctctcaatcttctcatttcaatcaacttgtacggaaaaggaggcaaccaagaaatcaactgagattcatgagaaaccggtgtttgttgcatcgaggctaaaggaagaagctattgcacaattaaggttggcgatggcagaaaaagcttatgctgaagaggcaagaaagcaagcaagaaggcaggttgagttagcttagcacgagttggccaaggcaaagagaatcatgcaacaagcacaagctgaatcagcaaaggctcaagctttaaagaaccatgcagtcaagcaaatcaactccactattttttaagtcacttgccatgcttgtagacaccgatt

SEQ ID NO: 35541 - DNA, 238 bp, Gossypium hirsutum
  Clone ID: LIB3149-054-Q1-K1-B1
gcgatgggttttaattagcagtgtgtttctgttaataagtttagtcggctgatggataaattctgttaattatagttctggaattagagagtgcctgcaggtgtggagcttagtagtttaaaataagctgaaaaagcttgtactaagaattcctcagtatatatggtgcctggtcccagtggctgtgcttaaatgagatgttggctgtcgaagtgacaaattatattgtatgaaaaat

SEQ ID NO: 35542 - DNA, 412 bp, Gossypium hirsutum
  Clone ID: LIB3149-054-Q1-K1-B11
aattcatcataacgtaaaagggtttttcgattcacaatgggagaggtcagttaagcaacaatttattctcatttcccccatctcttttaatctcgttttattttttttttgccgttccatttccttctatttctagttcatgacttacaccagggatttaaattgcggtcgcggtcgcgttttcggtcgcgtcgcgtttgtcgcggtcgcggacataacggactcctattgcggtcactgcggtatcgcggtcgtgaattttacattacttattgtgtattgcgggtatagcgggtttcggcagtaacggtttcggacggtgccgttaccgctatataacggccgctatttcggtaacggaccgctatttaaatccctgacttacacaccatctctttatcttgtatcttta

SEQ ID NO: 35543 - DNA, 395 bp, Gossypium hirsutum
  Clone ID: LIB3149-054-Q1-K1-B12
cccacgcgtccgaacggcgagcgtctcggcacttaccgtggccataacggcgctgtttggacttgcgatgtctcaagggattcgatgaggcttataactggaagtgctgatcaaacggtgaagttatggaatgttcagaagggaactcaattatatacgtttaattttggttcaccggcgaggtcggtagagtttgccattggggataaacttgctgtcattaccacggatcccttcatggaattgacatccgctattcatgttaaacgcattgccggagattcaaccgaacaaaccgaggaatctgtgcttgtcatcaagggtcctcaaggtagaataaatagagctgtttggggacccctcaataggactatcattagtgctggagaagatgc

SEQ ID NO: 35544 - DNA, 213 bp, Gossypium hirsutum
  Clone ID: LIB3149-054-Q1-K1-B2
gttttacttgagtaacaacttgtaatcctgccatgttgatagctaccttcaatccgctaaataactggtttttttttttaattattacttttgaacaggggtataattgagatagttatgctctcaagtcattcaagtttagcttaaaaagaaaaatgaattcaatttaatcgttatcgagttgagcttgaacagcttgagctcattcatctg

SEQ ID NO: 35545 - DNA, 418 bp, Gossypium hirsutum
  Clone ID: LIB3149-054-Q1-K1-B3
cccacgcgtccgtttggatctatcattgcaatcaagggagaaaaagaaaaaaaaaccaagcgatgtttttatttgattggttttatggggttcttgcatctttgggtttgtggcaaaaagaagccaagattttgtttttaggacttgacaatgctggcaagaccactcttcttcacatgttgaaagatgagagattagttcaacatcaaccaacccagcacccaacatctgaggaattgagtataggcaaaatcaagttcaaagcttttgatttgggtggtcaccaaatcgctcgccgtgtctggaaggattactatgctaaggttgatgcagtggtatatttggtggatgcatacgacaaggaaagatttgcagagtcgaaaagggaattagatgcgctgctttcagatgaagcatt

SEQ ID NO: 35546 - DNA, 355 bp, Gossypium hirsutum
  Clone ID: LIB3149-054-Q1-K1-B4
gccacgctttcgtatcaatctatcattgctttttatggataaaaacaaaaaaaaaccaaaccgtgcttttgtttgattggaattatgacgatctcacatctgtgtgtttgtggcaaatagaaaccaagattatgtctctaggacttgacaatgctcacgagaccactctacttgacatgtagaaagactagagcttagttcaacattagccatcccagcacccaacatatgtggaattgagtataggcaaagaaaaatacaaagcttttgatttgagacggcacctattcagtaaccaagattggaaggattactatgctaaggttggtgcttttatatatttcctggatgcata

SEQ ID NO: 35547 - DNA, 391 bp, Gossypium hirsutum
  Clone ID: LIB3149-054-Q1-K1-B6
caggtaaattcggtcattctttgcatgcacaacccatgtatgcatatttattggataaaaacccaaaaaggaagagagaaacactgaatatgctaataaagctagatatgtctaaagccataaactactaaacgaggtagttttgtacttgtgttctagacaattttgacattggttaaattattgtttgggagatgggaggacattgagcattatagtcatatgttatttcatttctttgaagaatcatacttgtggtcctgtaggacactgatgttttagagaaaataaaaatttgtgctagaactttgaagttgttgaactataaagactttttaggctgtttaaattttggattaccactgataatggggttctaaaactttcaatc

SEQ ID NO: 35548 - DNA, 135 bp, Gossypium hirsutum
  Clone ID: LIB3149-054-Q1-K1-B8
cttcttctacgtgcaaactcatcggaggaaacgccgaaattcaatagacagaccctcaatatacaactaaagctagattaaaacaatccctaaaccccacttcgacgccttgcagcacatgcgccctacaccatc

SEQ ID NO: 35549 - DNA, 233 bp, Gossypium hirsutum
  unsure (1)..(233): unsure at all n locations; Clone ID: LIB3149-054-Q1-K1-B9
ggatcatgaactttgggacatggaatcagctggttttggcattgttcggtgggtgggtgatgttcttctaagttcaaagggactttcatttcgagtctaatttatgttcatgttggaggaaaatcatatttgggtttttcaatttacttttgatttttagaaccattttttcatttatatgttatggagagattattatgtgttgaaaagaatgtgagttcttgttttgcnna

SEQ ID NO: 35550 - DNA, 261 bp, Gossypium hirsutum
  unsure (1)..(261): unsure at all n locations; Clone ID: LIB3149-054-Q1-K1-C1
gtcgttgtcatcctttccacggagagccaaggaaatttttgctgttgataattcttacatgtgaagtgtaggataaaaataatacttgtgggagacagacttctaaacgtatgcatttgaaggagaaattgaacaatttcatttcctgattgcgaggtgtaaaactagaaatacttggtctgttgataatggtatccagtggaatcctatatgtaagttggggttaatattatatattggttattaatgttaggccgnccc

SEQ ID NO: 35551 - DNA, 330 bp, Gossypium hirsutum
  Clone ID: LIB3149-054-Q1-K1-C11
ggcacttgacaacgtaggaatgtggaacttaaggtcggagttttgggcaagacagtatctgggacaacagttttatttgcgagtatacaccacctcaacttcgctaagggatgaatatccgatccctaagaatgcactactctgcggtagggcaagtggccgacacacccgacccctctaacccagcatataataaaatctccaggtttgggtttaggattgaatagcagagttttggcattaatgttgctagtgtgaattatggaggaacttttatgcttttaaccttaaattaatagacctcaactcgaggtcgcattttttttttct

SEQ ID NO: 35552 - DNA, 233 bp, Gossypium hirsutum
  unsure (1)..(233): unsure at all n locations; Clone ID: LIB3149-054-Q1-K1-C12
gacagtttacaacctatgtatcttttactttacttcggagttntaggcaagacagtgtgtcgaacaacattaatatttgcgagtatacaccacctcaacttcactaagggataaatatccgatccctaataatgcactactctgcagtatggcaagttgcctacacacccgacccctataacccaccatataataaaatcttcacacttttttttcatgattgaatagcaaat

SEQ ID NO: 35553 - DNA, 296 bp, Gossypium hirsutum
  unsure (1)..(296): unsure at all n locations; Clone ID: LIB3149-054-Q1-K1-C3
gtcgttgtcatcctttccacggagagccaatgtaaattttttctgttgataattcttacatgggaagtgtgggataaaaataatacttgtgggagacagacttctaaacgtatgcatttgaaggagaaattgaacaatttcatttcctgattgcgaggtgtaaaactagaaatacttggtctgttgataatggtatccagtggaatcctatatgtaagttgggtttaatattatatattgtttattaatgttaggcngaaaaaaaaaaaaaaaaaaaaaaaaaaaaaaataaataa

SEQ ID NO: 35554 - DNA, 375 bp, Gossypium hirsutum
  Clone ID: LIB3149-054-Q1-K1-C4
aaaagactcactgtgctttttgatgatgtttccttttaacttaaactatattctctgatctgcgttttcgtttatttctcatttagatcattgttttcgaggggcgggggccggggggggggggggaagcttatcttgttctttgttggcttcattctcgtaaaaccattgagaggaacacgtggtccattttcttctttcttcttggggttttagcaacttccttgactttcattatgagattctgaaaaatgggattttgtgtcaaagatgcagaatattggtgtgtgttttaaggaacctacttcagttgtttgagattgttttgtaactggttcttgtacaatgagaaaaggcagaggaaaagcaaagaag

SEQ ID NO: 35555 - DNA, 391 bp, Gossypium hirsutum
  Clone ID: LIB3149-054-Q1-K1-C5
atttgcctccaactcacccaattagacttggcctggctttgaacttctcagttttctactatgagatattaaattctcccgagagggcttgtcatctggctaaacaagcatttgatgaggctattgctgagcttgatagccttaatgaagaatcttacaaggatagcacccttatcatgcagcttcttagggacaacctcaccttgtggacctcggatctgccagaggaaggaggtgagcaatcaaaagcagatgaacctcaggctgagagttaattggatgaaagagtattcttttaagactgggcttgtcgagataggaaaggggcttgctgctagagtgacctgctttcaactcatggtagtagtaccaggatttgttacctatgaca

SEQ ID NO: 35556 - DNA, 407 bp, Gossypium hirsutum
  Clone ID: LIB3149-054-Q1-K1-C6
cccttctctccgtttcttccttcccgacggagattcatcaagtgagccaatgctattattccccaaaagaacatatcagcctagtaccatcaggcgcaagagaaatcatggattttttgcccgcaaggcaacgaagggcggtagaagagtcattgctcgaagaatagcaaagggtcgttcaagaattaccgcttagaatctggattttcagtgatgcgttcatcagaatcaaaatccggaagctgccttaaatagggtacaactaaacaaaattcgtatcaacttttttggttaattcaataagctctggctattctaaagacactctttggaggaatttttttctttcttcaaatagaattatgttcacttttagatttctttttgatacataaaacttgcaagaa

SEQ ID NO: 35557 - DNA, 396 bp, Gossypium hirsutum
  Clone ID: LIB3149-054-Q1-K1-C7
aaccttcccaaatccccaattccatgtcaagtaaaatcatcaaaacatagaaaactagaagaatcagagaaaaccaatgacggtagcggctgggatcgggtacgctttggtagcgttaggaccgtctctctcccttttcatcgcttttatctccaaaaagcccttcttgatcctcactctcctctccagtacattggtttggcttataagtttgataatattatctggaatttggagagctttccttcctttgaattcaacaacatggtggccttttgcaatacttatattctcatcaattgcttttcaagaaggtcttcgccttcttttctggaaagtttataagaggttagaagacatattggatgcttttgctgatagggtctcaaagccacg

SEQ ID NO: 35558 - DNA, 391 bp, Gossypium hirsutum
  Clone ID: LIB3149-054-Q1-K1-C8
gcaaaattatttcgtgcaaggtcatgcgtgaccctagtggagttagtaaaggctctgggtttgttgcattttctacacctgaagaagcatcacgagcccttgctgagatgaatcataaattggttgttagcaaaccactttatgttgcacttgctcaaaagcaagaagagagaagagcaaggctacaggctcagttttcacaaatgagacctcttgctatcccctcggttgctcctcatatgcccatgtaccctgctggtgcaccaggtcttggccaacaatttttatatgggcaagcaccctccactatcattccttaaacctggtttgggtattaacaaccacttggttcttgaatgaaggcccgggggccttctgtaccaaaattctt

SEQ ID NO: 35559 - DNA, 412 bp, Gossypium hirsutum
  Clone ID: LIB3149-054-Q1-K1-D11
gtttgcattgtattttggatcattgctcaatgcactaaggcggcgtgttgctgaggaggagagatttcttaaagacaaagctgccaagaaaatgggtcggatacctctgctgctaacaaagttgtttgccaagcttagaggtagacatttggaaggtcctcaagcacccccagcttcatcatccttcattaactctaaatcagtactcaaagtcatactcatatctggactcgcagcgcgttggcaatactatttttcatgaagatataatagaagttttcagtgtacaatacaaggaaaacgaaagcacagtgtacctcaggttagggaaaaaggatcttgtgtatcatgttgagctattgttcatttcgttttagtttaagaaactttgaaccatttttataatttttct

SEQ ID NO: 35560 - DNA, 258 bp, Gossypium hirsutum
  Clone ID: LIB3149-054-Q1-K1-D12
gatcaagattatgatgcaaacgattctaaatctcacgagggaatggacttgacaagggtgtgaactagggcactaattgcgaaatatggactcgatgatacacactgtggacttcattggtcatgcattgtcacttcacagagatgaccgttacctgtatgaacctgcattggatactgttaaaaggatgaagctttatgcggagtctcttgcccgttttcaaggtggatctccatacatatatccactgtatggatt

SEQ ID NO: 35561 - DNA, 323 bp, Gossypium hirsutum
  unsure (1)..(323): unsure at all n locations; Clone ID: LIB3149-054-Q1-K1-D2
cttgtggtttgccgacattcgcaacttgcaatggtggacctgccgagattatcgttcatggtaaatccggcttcaacattgatccttaccacggcgaccaagctgctgagatccttgtcgacttctttgagaaatgcaagacagatccatcttactggaccaagatctccgagggaggtttgaaacgtatcgaagagaagtacacatggaaaatttactctgagagactattaaccttgaccggtgtctacaggttctggaagcatgtgttcaacctctaccgcctcgagagccgtcgntaccttgagatgttttatgctctt

SEQ ID NO: 35562 - DNA, 367 bp, Gossypium hirsutum
  Clone ID: LIB3149-054-Q1-K1-D4
actgcccaaagcatgactaaacgcccaatgaagggaatgcttacgggccctgtcaccattctcaactggtcctttgtcagaaatgatcaaccgagattcgaaacttgctaccagattgccttggccatcaaggatgaattggaggatcttgaaaaagctggtttcaatgttatccaaatcgatgaggctgctttgaaagaagggttgcctcttaggaagtccgagcatgccttctaccaaaaatgggctgcccactccttcagaatcaccaactgtggtgtccaagactctacccatatccacacccacatgtgctactccaacttcaatgatatcatccactcgatcattgacatggatgccgatg

SEQ ID NO: 35563 - DNA, 347 bp, Gossypium hirsutum
  Clone ID: LIB3149-054-Q1-K1-D5
atgagattgaagaaggcttgtctcatcgtggatttcaggttttgaggctaaatacttacacaactgtacctgttgatcatgttgaccatattgtcttggagaaggcccaatctgcgccggttgttgctgttgcttcaccttctgcggttcgatcttgggtcaatctcatttcagagcctgattcttggagcaatgcagtggcctgtattggagagacaactgcctccgctgcaaaaagattaggattgagaaatgtgtatttcccgatgcagcctggacttgatggatgggttggtagcatccttgaagccttaagggctcatgacaaattttaggattgaaagata

SEQ ID NO: 35564 - DNA, 338 bp, Gossypium hirsutum
  Clone ID: LIB3149-054-Q1-K1-D6
actacgcgtacgctaagtcgaatcgtggagtgtagcagaatgcaagcaaaatgaggaccatggtttcttcagagacaatggacatccctgatggggttgatatacaaggtgaaggccaagatgatcgatgctgaatgtaccaggggtaaactcatcctgaacttcaagcaccttaacctcgattttcatcttatcaaggacgaggagagcgtgctaacgcaatctcaggatcgaggcttggattgactctagaaagactatctccgccatccgtactgctgtcagacacgttgagaatctcatcaccggcattaccaatggctaccgttacaagatta

SEQ ID NO: 35565 - DNA, 293 bp, Gossypium hirsutum
  Clone ID: LIB3149-054-Q1-K1-D7
gctgcagggcgtggaggtggagctgcagctgctggtgggcgtagcacaagaggacctggtgctagtgctgccgtcagacctctgcctgccctcaaggaaaatgtcaagcgtgttatgttctactgttaagggagtgcttgtattttgagcatctattttgttgggctttgcttattggtatttcgaacaatatctagtttgtttggtgttgcgtggattattgaactaaacttgttgaactttggtgttaaaactatgttaattttatgattattcgcttgtgaacattactt

SEQ ID NO: 35566 - DNA, 364 bp, Gossypium hirsutum
  Clone ID: LIB3149-054-Q1-K1-D9
tggcccaactagtggacagggtaggggtgttttcacccttgccaaagacacaatctgaaatgatgtaattgcctaagaatggctcaagactcattgccctggggaccgaaccctgactcaaggattgaagggagacccaacctacctaattgtagagaaggacaaaactcttgcaacatatgttataaatgctatgtgcacacacattgtgtgtgttgttccgtggaatcaaaccgagaacaagttcatattctcctgccatagatcccaatacaacgatcaatgattaattttgagaggacctgccccccttttctttggcatttgcacacacttgttttgaagacaggaaggtaaatttttt

SEQ ID NO: 35567 - DNA, 405 bp, Gossypium hirsutum
  Clone ID: LIB3149-054-Q1-K1-E10
aggaaagggtataccagtgacgaggaactggaggaattgaattctccactttcatcaataattgagaaattgccattgtcaccaacaattgttaccaatggagaagtgaatggaaaccatgaacatgcaggctattgtggtataaatgcaagatacgaactccttcgcgaggtatggtccgtgtgagtgtttatgttagatcgttgtgtatatctctcatgttttttagccatggaaaagtgagggtgaaggtgaaaaaactcaaggtgaaaagtttagatgatcaaaattacaggaaattctcaaacatcgtttattggcttgattgtacagttggaagaacttgctttctttttgttgaatgctgagaggcttgaaatcaactgcaattatgtcttcgatata

SEQ ID NO: 35568 - DNA, 420 bp, Gossypium hirsutum
  Clone ID: LIB3149-054-Q1-K1-E11
ggtgaacgtacctaagacgaagaagacttattgcaagagcaaggagtgcaggaagcacactgtgcacaaggttacacagtataagaagggtaaggatagtttggctgctcaagggaagcgacgttacgatcgcaaacaatcaggttatggtggtcagaccaaaccagtcttccacaagaaggcaaagaccaccaagaagattgtgctaaggctgcaatgccagggttgcaagcatgtctcacagcatccgatcaagaggtgcaagcactttgaaattggtggagacaagaaggggaagggaacatcacttttctagatgtgatgatattcatgtcaaattttatgttatgggtttttacttggaacttaacgcagaatggagttttgttaagtttggtattagtattctaatgttgtttt

SEQ ID NO: 35569 - DNA, 165 bp, Gossypium hirsutum
  unsure (1)..(165): unsure at all n locations; Clone ID: LIB3149-054-Q1-K1-E12
gcccgacccacgcgtacgggtttacgtacctaanactaacaattcttattgcaagagcaaggagtgcatgaagcagactgtgcacattgttacacagtataaaaaggataatgatagtttggctgctcaagggaagcgacgttactaacgcaaacaatcaggtta

SEQ ID NO: 35570 - DNA, 409 bp, Gossypium hirsutum
  Clone ID: LIB3149-054-Q1-K1-E2
gatacaagtcagaaatctccaccagcagtgccctctttgttcggagaggatgtcgaattcgtaggggtggaattagaaggtacagagaaggcaatggaacaagctttaaaagaaggaatagttggggaagctggaccgttaaagaggaacattattccaaaggtaccacagaaggagaattcggacgacgatggggctggaatgaaggagttcaatgatgcaaactattggaaggttgatcaagaggtcgctgttttagagtaatggtggttgagtcgaaagtaagatcgacatcacagttttgttcgctctgagggctgaagcagcaaaactcacatgtatttggttcttctcgttgccctgatttaaggtaagggcttctcaatattatttatgttagtctttatgg

SEQ ID NO: 35571 - DNA, 392 bp, Gossypium hirsutum
  Clone ID: LIB3149-054-Q1-K1-E3
ctcttcatctggtcctgcgtcttcgaggtgggatgcagatcttcgtcaagactttgaccggtgagacgattactttagaagtggagagctcggatacgattgataacgtgaaagcgaagattcaggacaaagaaggaattccaccagatcagcaaaggttgatttttgctgggaaacaactggaagacggaaggactttggctgattacaatattcaaaaggagtccactcttcaccttgttcttcgtcttcgtggtgggttctaagccttaaggtctcccttaatgtgggttttctggttttacgtgaaggactgtgccctgtaatggccttttaaataatttctagtctttgtttaccggttgcatctatgtatggtttctctttgaaaa

SEQ ID NO: 35572 - DNA, 324 bp, Gossypium hirsutum
  Clone ID: LIB3149-054-Q1-K1-E4
gtttcttgttagttaatcagccaagtattctttcaaaatctcctctctctctctctctctggctgtctggctctctctctctctctctctctcactctctctgtctctctatctctatttaatcgggggatttgggcatagggtcgcgtctttgttaatgagcgatctgtgaagaggggtaagcgtcggtgtgaaaaaaaagcacggctaatgatcttgggagtacaatgaggatcgctatccctatgcatgagaaacatattcttcactcgtgctcgggcgaaatgcaatacagggtctatggagccccaaggactacctctt

SEQ ID NO: 35573 - DNA, 386 bp, Gossypium hirsutum
  Clone ID: LIB3149-054-Q1-K1-E5
acagcgtagaaaaatcagttctctaattgagaaagcaaggatagagaaagggcacgaagttctcgacattgggtgcggttggggaagcttagctattgaaactgtgaaaagaacaggatgcaaatatactggcatcactctatcagaacagcaactgaaatatgctcaagaaaaagtgaaggaagctggactccaggataacatcaaaatacttctctgtgactatcgccagttacctaaggaacaccaatttgacagaatcatatctgtagagatggtagaacatgttggtgaagaatatattgaggagttttacagatgctgtgaccaattactgaaagaagatgggctctttgttcttcagttcatatctatcccagaagagc

SEQ ID NO: 35574 - DNA, 213 bp, Gossypium hirsutum
  Clone ID: LIB3149-054-Q1-K1-E6
gtgattttgccaaaagggcatgaactaaatctgtctgtagtagtaaaattgttttggtttgtagttatattgtcatcgcttttgaaacaaatttttatttgatcaaatgacgtgagttatggtctttgtaaaacttctaatactttcttatgtctccttccatggagaactgaaaattccttatggaaaaaaaataaatttacgttcagttcc

SEQ ID NO: 35575 - DNA, 409 bp, Gossypium hirsutum
  Clone ID: LIB3149-054-Q1-K1-E8
tcttagccggtacttgccacagtgccaagatggtcaggacaatcattgttcgacggaactagccttcattatatcaagaaataccaaaggtatgagaagcgccattcaaacatccccgctcatatttcaccatgcttccgtgtgaaggaaggggatcatgtcattattgggcaatgcaggccgttgtcgaagaccgtgaggttcaatgttttgaaagtgattccagcaggatcttccggtggtgggaagaaagctttcaccggaatgtaagcttttctatggtagtccatggttataggaaccaatagagaagataatcaaagaaattaagttcttaaactgcatttagctttgaggatattttactgttagaattgttttctttttttgggttattttcttggtttga

SEQ ID NO: 35576 - DNA, 297 bp, Gossypium hirsutum
  Clone ID: LIB3149-054-Q1-K1-F1
cgggtcttttatcctcccttatattatccgtgtcgatctctaccaacacccagctcgacatagtcagtaagaactttcacttttacagttacaggtactttagtattgttattggtgttgaaaagtgttttctagaaatgaaaatctattatattttactgttattttttttattctgttttcgttcttattgtaccataaaagttcgtaacaagattaatatactattggttatctgaggttttaaaaatataaaaaagaattaaaaaaaaaaggaaacgttaataaaaacaaaat

SEQ ID NO: 35577 - DNA, 410 bp, Gossypium hirsutum
  Clone ID: LIB3149-054-Q1-K1-F11
gcttgacgttcccctttgctcccttcttccataagccaaaagtttgagttaagaacaatggcttatgctacaatgaagccgaccaaacctggtttggaggagtcccaggagcagattcacaagatcaggatcactctctcctccaagaatgtgaaaaaccttgagaaagtttgtgctgatttggttcgtggtgccaaggataagagactgagggttaaggggccagtgagaatgcccaccaaggttcttcacatcacaacgaggaagtctccctgtggtgaaggaacaaacacatgggatagatttgagctccgtgttcacaagcgagttattgatcttttcagctcccctgatgtggtcaagcagatcacctctatcaccattgaacctggtgttgaggtggaggttac

SEQ ID NO: 35578 - DNA, 374 bp, Gossypium hirsutum
  unsure (1)..(374): unsure at all n locations; Clone ID: LIB3149-054-Q1-K1-F12
cttcctcaggccaaaggtgcttttaatttattctatcagcactttggctggatcagtgggtgattgagacatctccaaagtccggtgcacttgcaatttagttgctcattgcaacttacacttgctttactgattgctatttttctatttgtgccttttgtgctttattcgagttgagagcaagtggctgtcatgtgctgttgatcaagagaggtgttgtatctattcccccagggttcggattccctttggaggcatacattgcgagctttaacctctntccctgtcattttcaagatctgggtgaaacttcatctcgagctaagcttgaacaagaaaggttggttgccatcttcattgctacactgtaaatg

SEQ ID NO: 35579 - DNA, 430 bp, Gossypium hirsutum
  Clone ID: LIB3149-054-Q1-K1-F2
gacccacgcgtgcgcgggtgttttatcctcccttatattatccgattcgatctttaccaacacccatctcgacatggtcagttgtaactttcacttttacagttacaggtactttagtattgttattggtgttgaaaagtgttttctagaaatgaaaatctattatattttactgttattttttttattctgttttcgttcttattgtaccataaaagttcgtaacaagattaatatactattggttatctgaggtttttaaaaaaaaatattaaattttaatttaatatttatttatatataattaataaatttttaaatttattatattttttattaatttttatttaatttttttatattatattaatttattttttttattttttttatatttttttgtatttatttttatatttattttatttta

SEQ ID NO: 35580 - DNA, 377 bp, Gossypium hirsutum
  unsure (1)..(377): unsure at all n locations; Clone ID: LIB3149-054-Q1-K1-F3
ctaatattagtctccccccccaccctccccttttatttgatattttcttttcgagtatgctggtatttagatacaaattttcatataacgtgtcttgaattttgtttttcattgatttggaagttgactttgatttctgaattcataaaaaaaaaaaaaaaaaaaaaaaaaaaaaaaaaaaaaaaaaaaaaaaaaaaaaaaaaaaaaaaaaacaaaaaaaaaaaaaaaaaaaaaaaaaaaaaagaaaaaaaaaaaaaaaaaaaaaaaaaaaaaaaaaaaaaaaaaaaaaaaaaaaaaaaaaangggggggggcccttttaggggaacaaattttcgttcccggggatggaaaaaataatttttttttttggggaccc

SEQ ID NO: 35581 - DNA, 116 bp, Gossypium hirsutum
  Clone ID: LIB3149-054-Q1-K1-F4
ctgatgttcaattctcccttaacccactctatataaactttttcaacgcccacattgtcctgacattttgatacatttcttgagatcccttacacattcatctattccctcattga

SEQ ID NO: 35582 - DNA, 406 bp, Gossypium hirsutum
  Clone ID: LIB3149-054-Q1-K1-F6
ctgacatggttaacaaatactattatctcgtgtccagcttttatgagtttggggggggtggatctttccattatgctcccagatggaatggggagtctctcaaagaaagcataaagcggcatgaacattttcttgctttacaacttgggttgaagcctggacacaaggtgttggatgttggatgtggaattggtggaccacttagagaaattgctcgattcagttccacatcggtcactgggataaacaacaatgaatatcaaataacaagagggaaggaattaaaccgcattgctggagtggaaaagacttgcaactttgtgaaggctgacttcatgaagatgccatttcctgacagcgcctttgatgcagtttacgcaattgaagctacttgccatgctccgga

SEQ ID NO: 35583 - DNA, 409 bp, Gossypium hirsutum
  Clone ID: LIB3149-054-Q1-K1-F7
atgactccctgaagccagtgcttctcactggttatctgcaggatagtttctttgctagctttgctcttggttggctcatcacaaatggtgctggtcttgcatcgtacccaattgatactgtgcgtagaagaatgatgatgacctctggtgaagcagtgaagtacaagagctcactcgatgcattttctcagatcttgaaaaatgagggagccaagtctttattcaagggtgctggagctaatatccttcgtgctattgctggtgctggtgtgcttgccggatatgacaagttgcagctcattgtgttcggaaagaagtacggatctggtggtgcttaatatctctttttcattttttacttgtttatgtttagatggtgatgaaaaagctcactacccagaaatttatt

SEQ ID NO: 35584 - DNA, 433 bp, Gossypium hirsutum
  unsure (1)..(433): unsure at all n locations; Clone ID: LIB3149-054-Q1-K1-F8
aaaaaccaggccgacccacgcgtacgatgattttattaacccaattttttttacattctacaagcacnccaacngcctggatgttttggatattaatacgggctccacagatggtactcacaccatgcttgtattctttaatccacctcctgggcatttggctccacaaaaacagatagtggcctttgacaaaatgcattttccagcatggtcacaacgaccagtaggaatcaacattcatgttttcaagtttttaagtgttgctgataattcttgggttctaagaatcccaacttgtgttcacaatatccatatcggttgcgctaatcattctttatatcttcatcctgtaactttaggggtaaataagtcctatactttttcaatgcaaaataaaggatacatttttataaatgccaaattcaacaattac

SEQ ID NO: 35585 - DNA, 255 bp, Gossypium hirsutum
  Clone ID: LIB3149-054-Q1-K1-F9
cgttcgggacagatgttgaatttcattacctaaacgtttttcttttgaaccaactgcatttaccagagagtggtgttttgtttatatttagtcataaccttaaatccgagattggttacttgttttacttgtttaaaccaacccactttgaagaaaggtttatttctaactttccaaataaatgtcattattaacacaagctcttccaaaactgtttgtataacacggaattcaaatttttacaaaactttgttt

SEQ ID NO: 35586 - DNA, 340 bp, Gossypium hirsutum
  Clone ID: LIB3149-054-Q1-K1-G1
gcggagcaaagcaagaaggagattaaggatatttttttcaggttctataagactttgctggtggctgatccggggaggtgcgaaccgaaaaaattcagtgggagaggggctatggcaagggtccagaaaagttacccctgaagaaattttacggtttgttttcagaaaactcagtttttgaaccttttttttcaagatttgatatggatatgaagttggttgtgattaattaactgttcctgctgtcagaaatttaaatgtttgtggtgtattaaacttaatgtagacattgtgattgaatctatacatgtgctatgcaaagatgattgtaggctctttt

SEQ ID NO: 35587 - DNA, 172 bp, Gossypium hirsutum
  Clone ID: LIB3149-054-Q1-K1-G10
actacacaaaaaccaattctacatgttgatttcaaattcattcggaaaaaaatgtgcctggtgctgtcgtggaaactgtgatacgaaatgtacagagctcatctaatttttacagtcctgtatgaaagatgtctggggtcagcagcaggcaattttagaccaatccaatttg

SEQ ID NO: 35588 - DNA, 327 bp, Gossypium hirsutum
  Clone ID: LIB3149-054-Q1-K1-G11
gtcatggacactcccacccctctcttctccttgctttgtttcttcctcttctccctcttcttaggtgaggagcaacatgttgttgaagggtcaagggtgtggacctttggtttcagacccaagatgttgtttgtgttcggggattcctacgctgatacagggaacaacaggaaagctttggcaagttcctggaaacttccttatggaattacattccctgggaaacctgctggccgtttctctgatggtcgtgttttgactgatttcatcgcttggtacttggggattaagacaccggtgccctacagatacaagaaagaactgggt

SEQ ID NO: 35589 - DNA, 160 bp, Gossypium hirsutum
  Clone ID: LIB3149-054-Q1-K1-G12
cttattctattttttctcttgctttttagttaaacggtaccagtactagaactagacttggtcctgctgatctgagagtaaaaatctatatctatctatctatatgtatgtatgtgcgtatttcttagtgctatagaagatgtgcgtatttcttagtgct

SEQ ID NO: 35590 - DNA, 388 bp, Gossypium hirsutum
  Clone ID: LIB3149-054-Q1-K1-G2
ccatttcagggaaggcgatcaaagtaaatcatgtgagatgcaacaagctctcggttgggcttcaagtcgacgtgaaaaatacgggttccaaggagggtactcacaccatgcttgtattctcgaagccacctgctgggcattgggctccacaaaaacagctggtggcctttgccaaagtgcatgttccagcaaggtcacaacgacgagtaggaatcaacattcatgtgtgcaagtttttaagtgttgtggataggtctggggttcgaagaatcccaactggtgttcacaatctacatatcggtggcgctaagcattctttatctcttcagcctgttactttaggggtaatcaagtcctagacttctccaggcaaaagaagggatgcatt

SEQ ID NO: 35591 - DNA, 166 bp, Gossypium hirsutum
  Clone ID: LIB3149-054-Q1-K1-G3
gtgagcttttgttgaaaaggcaagggattcaaccaaaagtgaagaaaactgtaagctttgctgaaaatgggaatgtttataggattattagcaatggagatgaggttaattcaagtggagatggtagtttaaccgatgagagtgtttcgagtgatgaacgtggaga

SEQ ID NO: 35592 - DNA, 174 bp, Gossypium hirsutum
  Clone ID: LIB3149-054-Q1-K1-G4
gcgtgctatggaaggcaattcaaggaattctttttaaattcaacaagccctcaggcggtggtgaagttggcgatgttcatacggttatcaacgatggtgctcacgccatgctagaatgctataagccaccaaccgatcatagtgctccacagaaacaactggaagactctgtca

SEQ ID NO: 35593 - DNA, 405 bp, Gossypium hirsutum
  unsure (1)..(405): unsure at all n locations; Clone ID: LIB3149-054-Q1-K1-G5
aaaaaagaatcaccccatgggatcaaagagcaagaatctggttctgggttttgttgtcttagctgtattcttgatttcaggtgtaaaatcttggactggtgagattcacggtagagtagtctgtgatgtttgcgctgattcttccattggtcctgaagatcatattttagaaggtgctgaggttgctgtactttgtattacaaaatctggtgaagtagtaaattaccaggctttcacaaacgccaaggggatatacaccgtggccgaaacaatgcctgagagtgaccgttggaatacatgcttggcacgaccgatcagtagtttccatgatcactgcaaccatcttggggatcgcagcactcgtatcaagttcacctatagtcgcccatcangtcatttccacac

SEQ ID NO: 35594 - DNA, 255 bp, Gossypium hirsutum
  Clone ID: LIB3149-054-Q1-K1-G6
aagttttggtggcttgtttcaatttttactgaaaatggaagcaatcttcactccattaaaaatctaaaactagcgatttttcaatgctaaattttccatagcatgtattatccgattttcttcgtggttctacaaccgtttgtgtagatacccgattatcagatttccgagtctttagcatcccttttcatgaagttaggacttgttactgtaactcaaattctgttgtttatctgaatttacttcatttatagc

SEQ ID NO: 35595 - DNA, 254 bp, Gossypium hirsutum
  Clone ID: LIB3149-054-Q1-K1-G7
tttacattgaaagggaaggtggggttttcttttcgttggcatttttagtgcgttccaagcaaccttcaaagaaaaaaaaaaggaaaagaaaggcattaatttttgaagatttcttttggtgttgtgttcttgttcctttaagaggttgtcttggttataacacaacaccaatgtgctttttaggtccttatttggagatgttgatttattcctttctgaaaaagcctaataaatgcaagtttctaaattaatgt

SEQ ID NO: 35596 - DNA, 190 bp, Gossypium hirsutum
  Clone ID: LIB3149-054-Q1-K1-G8
gaattatcctgacttgaatccatttgaactttataagaaggcactgggatctggcttgaggggcaaatcctcaggatcataccatcataaaacatggctagcatgtcatatgcgagtctgctagccgttatacagccattagagtaacacacacacatgttagacatctcagggattgggcatgttattt

SEQ ID NO: 35597 - DNA, 423 bp, Gossypium hirsutum
  unsure (1)..(423): unsure at all n locations; Clone ID: LIB3149-054-Q1-K1-G9
tttaaatcagagttacttaatgtcaaccccccagacaaattcttcaatccctaaaaccccatttccagtttggacccctgaaaaccttaatctctcccgatacttctcggactcttctcctgattttttcaaaccatccttcatggaaaccgaaccggtgccggttccagagaatgttgtccccgttaagtcagaagaagattttgatgctgcacttagcaaaactaaagacgaatctgtgccggctgttttctatttcactgctacatggtgtgctccatgccgattcatcggtcctgtcatggacgagttagctcggagaactcctgaagtaacagtttataagatggatatcgatgaggaaggccttgcaagaaaactgaaagagctaaatattacagctgtgccaactgntcaatactt

SEQ ID NO: 35598 - DNA, 265 bp, Gossypium hirsutum
  Clone ID: LIB3149-054-Q1-K1-H1
accgccataagcgaaatcaaaagccagcagcgctgcagcttaaagagcagtcgtttgacaattattcgccatgggtaaggttcacggatctctagctcgtgctggtaaggtgagaggccaaactcctaaagtggccaagcaagacaagaagaagaagccccgtggccgcgcttacaagcggatgcaatacaaccgccgcttcgtcaccgcagtggttggatttggcaaaaagaggggacctaactcatctgagaagtaagagatc

SEQ ID NO: 35599 - DNA, 354 bp, Gossypium hirsutum
  Clone ID: LIB3149-054-Q1-K1-H11
caaaaataaagaagatcagctatcggaaaatgtctacgtcaccgtccgtcaccgaactccaggtggagaactttacgttccctccgacggtgaagcctcctggttccaccaaaaccctgttccttggtggagcaggggagagaggattggaaatccaagggaagttcataaagttcaccgcaattggagtttacctggaagatagcgccgtgaattgcctcggcgttaagtggaagggtaagagcgcggtggagttaacggaatccgatgagtttttcagagacgtggttacaggtgattttgagaagttcatacgggtgacaatgatattgccattaacgggtcaacaatact

SEQ ID NO: 35600 - DNA, 318 bp, Gossypium hirsutum
  Clone ID: LIB3149-054-Q1-K1-H12
caaaaatgctgcatgtgagggttccttcaagtacttttgcctcctgaatgcattgagtgatctcatgatgcttccatctgagatgcttgcggataggtccacaggaaaagagccccaagttcagcgtctcgctcatcatcagggttcttaacgattttgtacctgatgagttcaaccctaatccagcttcacaggcagtttttgaagcattggaaaaggatctttctgagggtggtgaagagtctatcacaaactatccatgtatggctactcctattgtctatacgccaccttccgcaacttccctaaccaacatta

SEQ ID NO: 35601 - DNA, 382 bp, Gossypium hirsutum
  unsure (1)..(382): unsure at all n locations; Clone ID: LIB3149-054-Q1-K1-H3
acgaccgcgataagcgaaatcaaaagccagcagtttctgtatctttaagagcattcgtttgacaaggattcgccgggggttaggttcacagatctctaactcctgctggtaaggtgagaggccaaactcctaaagtggtctcacttgacaagaagaagaagccccgtggccgctcttacaagcggattcaatacttccggagcttcttcacagcagatgttggatgttgcaaaaagagtggacctaactcatcttagaaagaagagagcgatgnaagtgaattatattttttacgccttgaagaaagcaccgatggattttaagtcatcgcaatcttaagagaacgcttgtatgatactggtttcaaggcttggattgaact

SEQ ID NO: 35602 - DNA, 415 bp, Gossypium hirsutum
  unsure (1)..(415): unsure at all n locations; Clone ID: LIB3149-054-Q1-K1-H4
cccacgcgtncgggaaaatnnnnnacctgttctgcacgctgatattttcagtagttgttttggggactaccatcaaaatgttgcgcagcatactcgaagtgctgatggagagtacgcctcgagagatcgatgcaacaaagctggaaacagggctattgcaaatgggggatgttgttgccattcatgagctgcatatatgggccattacagtggggaaagtcctcttggcttgccatgtcaaaatccgacccgaagctgatgcagacatcgtcttagacaacgtaatcgaatatatcagaagggagtataatatcagtcatgttaccattcagattgagcgttaaaatggtagacaataatttagagcatgcatggacctcattactctacatatatttatagttgccataaatac

SEQ ID NO: 35603 - DNA, 361 bp, Gossypium hirsutum
  Clone ID: LIB3149-054-Q1-K1-H5
cccacgcgtccgcccacgcgtccgctcgttgctaagcgtatctcgcttgatattttagagggcgaactggcgaaacataagtcttacgccgaatatctgcttcaacagctatttcgtgcgaagaatatacatttaagggagggggaaacttttaagggagtagtacaaaatcatttggtttttgaagagcccttaaaagagcaaattgatgggctctatcaaatctgctgcgatctcattctaaatggggccaacagaagctactttctaaaaattgtggaattttatggatccacgcttggtgtgtagccaagcccaagaaaaaaggaacgaggggaagaatcgacaaggaatccataac

SEQ ID NO: 35604 - DNA, 359 bp, Gossypium hirsutum
  Clone ID: LIB3149-054-Q1-K1-H6
gttttggttgttgctaaccctgccaacaccaatgcattgatcctgaaggaatttgcaccttcaatccctgcaaagaacattacctgtttgacaaggctggatcataacagggcactaggtcaaatctcagagaaactaaatgtccaagtttctgatgttaagaatgtgattatttggggtaatcattcatcatctcaatatcctgatgtcaaccatgcaactgttatgactccatctggagaaaagccggttcgcgagcttgttaaggatgatgcatggttgaatggagaattcataaccactgtccaacaacgtggtgctgcaatcatcaaagctaggaaactctcaagtgcactatc

SEQ ID NO: 35605 - DNA, 286 bp, Gossypium hirsutum
  Clone ID: LIB3149-054-Q1-K1-H7
ctcagtcgaatcgggaaaacccaccatttacacacctttttgctgtccatttctcttccaccaaaccaataaccagacccagagaaaagatggccagcaaatccgagggtaaggaacctgtgaacgaacaagtggttgcgaatatgtacggagctatgagatccgaactaaatcaaatttattctaagatcactgagttggagatggaagtgagcgagcattcgctagttataaatgccattcagccacttgaccagtcgaggcggtgctaccggatgattggagg

SEQ ID NO: 35606 - DNA, 412 bp, Gossypium hirsutum
  Clone ID: LIB3149-054-Q1-K1-H8
tcgactaaccgaagcagaagcaaagcaaaaaaagaaaagggcaaaaaatggctgtgcaattcaatcccatggcttctcaaactaagaaactcccttcatatgctcttccacccatggcaagtcttagatctcccaaggtttctatggtctccactcttccacctcgctccaaaggggttgaagatctgaaacggcctttcatggctccaaagctggtacaccagtcttcccacaccatgccacctgagaagattgagatctttaaatctttggatgattgggctagggataacattctgattcatcttaaacaagttgataaatgttggcaacccaaggattttcttcccgatccttcgtccgatggatttgaagatcaagttagagaacttagagaacgggcaaaggagat

SEQ ID NO: 35607 - DNA, 156 bp, Gossypium hirsutum
  Clone ID: LIB3149-055-Q1-K1-A10
tgtcgcagtgggtatacaaaggccgacgacgccttcaaagtgccacctgaggaaggacccctgacggcattaccgggtgggggacccagggcgtaatgaggctacgcgtcttgttttctctttgacttgcgttccgagttaatggtcttagtcata

SEQ ID NO: 35608 - DNA, 234 bp, Gossypium hirsutum
  Clone ID: LIB3149-055-Q1-K1-A12
tcgccacgcgtcgcagacagaggcaatgctggaataactgggcagagtctttgctgtgctatactggaaagggaatcattatgagaagatggaaaccatgcggtgatgccctcagaaagaatccgccctgagccatcattggatttgaccacccagcagagtggttctgcgcggagaagttatcaagttttagaagacagcgatatgtgcctgtgagtggaccatctgattcgt

SEQ ID NO: 35609 - DNA, 338 bp, Gossypium hirsutum
  unsure (1)..(338): unsure at all n locations; Clone ID: LIB3149-055-Q1-K1-A3
gcgtccgaaccaccactctcacattaaatattgttagtgaaacaatggcgtcttcagctctgataagtaagctngaggcagatgtagagataaggcttctcctaagcagttgcatgaaatggttgcccacanaccgcaccatgtgcaccatacttgttatgacaagattcaaggatgcgatttacatgaaggtgaatggnggaaagtcggtaccattgtccattggagttatgtgcatgatggaaaggctaaaaaggcaaaggaagtagtggaagcagtagaccctgataagaaattggcactttcagagtgatcgaaggagatctaatggaagagta

SEQ ID NO: 35610 - DNA, 260 bp, Gossypium hirsutum
  unsure (1)..(260): unsure at all n locations; Clone ID: LIB3149-055-Q1-K1-A5
gacttccaccatgttccaggctagtggcgccgctcctggttcctctggctacatcaacatcactgatcttaaaggcggaaaagtcggcttcggcgctgaaaacaacgatggaaatatcgatgctgtttacgttaagtccgttgcagagattccttacaacatctctgtcttacaaatcagtcaggttntgaattcagctgaagctgaagcctcaacggcggagccaagcaagcttaatctaacagagataatgtcaaagc

SEQ ID NO: 35611 - DNA, 387 bp, Gossypium hirsutum
  unsure (1)..(387): unsure at all n locations; Clone ID: LIB3149-055-Q1-K1-A6
gaccacgcgtncggcagaacagaaggcanatgctgagaaatcaactggagcagagtcttctgctgctgctaatactggaaaagggaaatcatctagtgagaaggatggagaagccatgcaggttgatagccctccagagaagaaatccgaccctgagccatcatttgagattntgaccaacccagcaagagtggttcctgcgcggagaagttcataagtttttaaagacagtcgatatgtcctgtgaagtggaccattgattgtctttaagactggcctataaccaggcttttaaaatcacaatacgatccgtggataaaagtgagaaaatatagctgcgtgtataactacctacatagctatctttacattaataaagcaattttc

SEQ ID NO: 35612 - DNA, 173 bp, Gossypium hirsutum
  unsure (1)..(173): unsure at all n locations; Clone ID: LIB3149-055-Q1-K1-B1
gcgtccgttctcctctggtccttcatttcatagtttctaataagcacttaatatctntcaattnttattatagttcaattgttntatatataatggaacaactttcacatggtgttatctatatataaaattaatagaagcattattttattgcnnanananaannnnaanna

SEQ ID NO: 35613 - DNA, 228 bp, Gossypium hirsutum
  unsure (1)..(228): unsure at all n locations; Clone ID: LIB3149-055-Q1-K1-B11
tcggcngtgcactgactacagagacccaccacatcatcaacagggaagtcatcgatgcattgtgtccaaagggtgttctcatcaacatcgggagaggccctcatgttgatgaacccgagctggtttctgcattggttgaacaccgattaggaggtgcagggcttgatgtgtttgaacatgaacccgaagtaccggaagagctttgggctgatatgggtctctacctat

SEQ ID NO: 35614 - DNA, 254 bp, Gossypium hirsutum
  unsure (1)..(254): unsure at all n locations; Clone ID: LIB3149-055-Q1-K1-B2
caaacgccgacgaanatggctttcgagggattagttctccgcggaccatgcgagcccacactgacatggtcacagccatcgccactcccatcgacaactccgatatgatcgtcacttcctctcgcgacaagtccatcatctcttggcactngaccaaagacgaaaagacctacggtgtcgctcgccgccgtctcaccggccattcgcaccttgttcaagacgttgttctctcttctgactcccagttcgctctc

SEQ ID NO: 35615 - DNA, 272 bp, Gossypium hirsutum
  unsure (1)..(272): unsure at all n locations; Clone ID: LIB3149-055-Q1-K1-B3
gaccacgcgtccgcttcctgccacatgagttgantttgtccgagaaggaagaacctgtcaaaaaagagcctgagactcaattggcagcaagcaagtccaagaagtcccaagcttcttcttgagtgaacaaagtttgaaactttatcaagtcagttaatgtagtgatgtctggtctttggatttcatacactatttttgagtttttgacattagatgtgttggatggtttatttaaagcatgtttatcaaagtgctgatatgttttgaattgt

SEQ ID NO: 35616 - DNA, 353 bp, Gossypium hirsutum
  Clone ID: LIB3149-055-Q1-K1-B5
tcgatctcgatccttatcctcgttttcaaacaagctcgaaaaagatggccaacgctgcatcgggaatggctgtgcatgatgattgcaagttgaagttcttggagctcaaggcaaaaagaacccaccgcttcattgtttcaaaattgggagaacaaaacaagtattgggaaagctgggaacaccaaagttgagttactaagttccgtgtaatgcattctggacattgatttacgcgacgccaacaattttatatgctcacctagtagaaagaacccctcaatatacaactgtgataggatgagacacactgatgctaggtaacgcacgacgcttagtcacgagtctctctcgtg

SEQ ID NO: 35617 - DNA, 283 bp, Gossypium hirsutum
  unsure (1)..(283): unsure at all n locations; Clone ID: LIB3149-055-Q1-K1-B6
aatcaaagtagagaatgcgaatgtggtcgagatgatcaaganatggtacttacgaggaacaaggngagtgtctgcaactaccatttcctccttagctaataccctctccgctgagccttgcaaatgaacctatgctgtttngttaccaagtctntcctactaagaaccatcctgtttgttgtgctttctcttccaataaattatgatatgattggagttttcgcttatttacaaatccatntccttcactcccatgnatgagtgaagcccaaaaatgaaaatg

SEQ ID NO: 35618 - DNA, 353 bp, Gossypium hirsutum
  unsure (1)..(353): unsure at all n locations; Clone ID: LIB3149-055-Q1-K1-B8
gaccacgcgtccgttttntttttttttttntttttttataaatatcccagaaacagaacagcaattatcattaagaactttctccaaaatcactaacaaaacctcccaaaaaggcacaaaacagaatattaaacctaaggataacttcaataataattaaaaaaaaactagtaaaaagttccaacaagaagagtggtgcttagtcaacttcttccatcttgctgccttcagcatcagcatcctctaatgggggcatatcagcatcagcttcaccttcacctgcatcctcgtcaatgctcaagccgagtttcagcatcctgtggattctgttgccaaaggtgttaggctcatca

SEQ ID NO: 35619 - DNA, 376 bp, Gossypium hirsutum
  unsure (1)..(376): unsure at all n locations; Clone ID: LIB3149-055-Q1-K1-B9
agcctaatgccaaaacttgggagatctntntggatntattatttgaaaatggagacaccaagctggctgttgattgtgtggccaatgaatttcactggcagaggagatggcagaaagtgggtcccatcatctgaaactattgggacagtgatgcgtcattttgagcaaggaaagatgttgatggggccaagttttgtgagatttaaagaagctgtgaccgtttgggaggaaggttgaatatgataactatcactgtgaagaaagtcatatcgtgcgtgaaataaagtaatataccagtacatgtgatattggtatatttttatgtgttaattatctgaatattatattatcttgttttttaaatcatgatatgtac

SEQ ID NO: 35620 - DNA, 212 bp, Gossypium hirsutum
  Clone ID: LIB3149-055-Q1-K1-C10
cctacgaccgtgaagcacgcaaaatcaggggcatgaaaaccaatgacaatttcccaaacgaagacgactccttctccaccccgtacaatcagaaccgtaccacgcgcaattcgaaccactgcgtttatcaacagcatataaacagtaactatggattcaactacgatttgaatgaaatcggagggtacgcaactgacccgatcgtatatctg

SEQ ID NO: 35621 - DNA, 405 bp, Gossypium hirsutum
  unsure (1)..(405): unsure at all n locations; Clone ID: LIB3149-055-Q1-K1-C12
atntcttcaagagttctcaagggccattactctcctctctgagaacaatcctctcactggtagcaagggtgagatcaggaagcaatgcaatcttgcaaacaagctgtactaatatgcctcgccaaagagaaagccgagagtggccgaataaaatggttgtttacttgtttcttttccaagagacaagtttgttaatgtgcagtgagtaatggtgcaatggtactagttngatacgatcgacccattgcatttttttntagcataagccaggttgccttctcttgatgttggtcatgggcgtagtggatgtagggatggatgtaatgtatgtatgtaaggatggtgtngactgtgtatgatgcatgannattcaaagattaaaagntatgatgattcatgcataaa

SEQ ID NO: 35622 - DNA, 374 bp, Gossypium hirsutum
  unsure (1)..(374): unsure at all n locations; Clone ID: LIB3149-055-Q1-K1-C2
ctgattccgttctcacaataccctcgctttcctcattctttatattctattgtctccaaagggtaggcggttacacccgccgagaaagggcgggcggatattgctccggcggagaagaggccaaaggcggagaataagatctcaaaagaaggcggcgcagataagaagaagaaggctaagaagagcgtcgagacttacaagatttacatcttcaaggtattgaaacaggttcatcctgatatcgggatctcgagcagagcgatggggataatgaacagtttcatcaacgatatctntgagaaattggctcaagaagcatcgagattggctaggtataataagaagccgacgatacatctagggagatccaaacc

SEQ ID NO: 35623 - DNA, 296 bp, Gossypium hirsutum
  unsure (1)..(296): unsure at all n locations; Clone ID: LIB3149-055-Q1-K1-C3
cgaccacgcgttcgggaaaaatctntacagaggcataaggcaacggccgtggggcatatgggcggccgagattcgcgaccctcgaaaaggggttcgtgttagtgggcactttcaacactgccgaggaagcggcccgcgcctacgaccgtgaagctcgcaaaatcaggggcaagaaagccaaggtcaatttccccaacgaagacgactccttctccaccccgtacaatctgaaccgttccacgcccaattcgaacccttgcgtttatcaacagcatataaacagtaactatggattc

SEQ ID NO: 35624 - DNA, 334 bp, Gossypium hirsutum
  unsure (1)..(334): unsure at all n locations; Clone ID: LIB3149-055-Q1-K1-C5
cgtccgcagcaatgagcanagggaaacgataatgttacctggttgtgattataaccatnggcttatcgttatggagttccctaaagaccctgctccaacaagagaacaaatgattgagacctatcttaacactcttgctactgtgcttggcagcatggaagaagcaaagaagaacatgtacgcttntagcaccactacatatacgggattccaatgtaccgtttcggaagaaacctcggaaaagttcaagggattgcccggngttctntggggtttaccggattcatacatagacgtcaaaaacaaagattatggaggtgataaatatgtcaac

SEQ ID NO: 35625 - DNA, 401 bp, Gossypium hirsutum
  unsure (1)..(401): unsure at all n locations; Clone ID: LIB3149-055-Q1-K1-C6
attcctcaaggagttctcagggccattactctcctctctgagaacaatcctctcactggtagtatgggtgagatcaggaagcaatgcaatcttgcaaacaagcttcactaaaatgcctcgccaaagagaaagccgagagtggccgaataaaatggttgtttacttgtttcttttccaagagacaagtttgttaatgtgcagtgagtaatggtgcaatggtacctagttgatacgatcgacccattgcatttttttntagcataagccaggttgccttctcttgatgttggtcatgggcgtagtggatgtagggatggatgtaatgtatgtatgtaaggatggtgtngactgtgtatgatgcatgaatttcaaagaattaaaagttatgatgattcatgcat

SEQ ID NO: 35626 - DNA, 383 bp, Gossypium hirsutum
  unsure (1)..(383): unsure at all n locations; Clone ID: LIB3149-055-Q1-K1-C8
gcgtccgtcgagtctttcttcattctgatccgtctcanaaaccctcgtttccccattcctatatcctatggctccaaaggttggggagaacccgccgagaaaaaaccggcggaaaaggctccggcggagaagaggccaaaggcggagaagaagatctcaaaagaaggcggcgcagataagaagaagaaggctaagaagagcgtcgagacttacaagatttacatcttcaaggtattgaaacaggttcatcctgatatcgggatctcgagcaaagcgatggggataatgaacagtttcatcaacgatatctntgagaaattggctcaagaagcatcgagattggctaggtataataagaagccgacgattacatctagggagat

SEQ ID NO: 35627 - DNA, 109 bp, Gossypium hirsutum
  Clone ID: LIB3149-055-Q1-K1-C9
tttttcagcctacgtacccggacttagacggtgaagaatgccattcatactgatagttttgtagcgcgatgcacactaaaattattcttacgtcagagtttatatttta

SEQ ID NO: 35628 - DNA, 315 bp, Gossypium hirsutum
  unsure (1)..(315): unsure at all n locations; Clone ID: LIB3149-055-Q1-K1-D5
aagagggaagccgnnaagnactctgagaagctcatggactggacaaagcaatattggaccatccccgtggcaattgttggcatctctgtgttggttggtttcttatacctgcataagaagtaaaccagtataatgttttcccctattggctgctgaatggaaattgtaccccaatttttgataattaattgatatgataagaacagtacaaaagttttttaaattgaggcaggttgacataatatattattattgttacagggaaaaagaacattcngaagtatacactgatcacactgtaataatcatattata

SEQ ID NO: 35629 - DNA, 387 bp, Gossypium hirsutum
  unsure (1)..(387): unsure at all n locations; Clone ID: LIB3149-055-Q1-K1-E1
gagcctcctacactcgactgtgcgaagccggttgaggataagatcatggacatcgcttctntggagaagttccttcaggaaaggatcaaggttggtggcaaagctggtgctctaggtgactccgtcactgtcacccgcgacaagacccgtatcacggttacctctgactccaacttctctaagcggtaccttaaatactngactaagaagtacttgaagaagcacaatgtccgggattggcttcgggtgattgcttccaacaacggaccgtaatgttatgaactccgctacttcaatattgctgagaatgaaggggaagaggaagaatgagcaatcagttcaagtacttttctctngtacctatctggttaatagttctgaggaaac

SEQ ID NO: 35630 - DNA, 255 bp, Gossypium hirsutum
  unsure (1)..(255): unsure at all n locations; Clone ID: LIB3149-055-Q1-K1-E10
agttgcagttgcctcaactgaggttgctgctgccatnggtgagccaatggacatcaacgcatccttgcctcttgtgattaggaagtccaaagctcatggtgggctggcacgtggtttacacgaagctgccaaggcaattgataagcacaatgcacatctntgtgttttagctgatgattgtgaccagccagattatgttaaactggtcaaggcactctgtgctgatcacaatgttaaagtgctacgtgcacctag

SEQ ID NO: 35631 - DNA, 146 bp, Gossypium hirsutum
  Clone ID: LIB3149-055-Q1-K1-E2
aaaggatcaaggttgctggcaaagctggtgctctaggtgactgcgtcactgtcacccgcgacaagacccatatcacgggtacctctgactccaacttcactaagcggtacctgaaataccacactaagaactacttgaagaagcac

SEQ ID NO: 35632 - DNA, 313 bp, Gossypium hirsutum
  unsure (1)..(313): unsure at all n locations; Clone ID: LIB3149-055-Q1-K1-E4
tctctctctacatgttttttgttgctcatgctgaaggttcgctaacgccaaggcccttcaacaacaagattactggctgctttgtctntggagattcgacggtagatcctgngaacaacaactacgtaaagaccctgtttaggggcaattntcctccttatggaaagngatttagagaccacgtgccgaccggaaggtttactaacgggaagctntccaccgatctcattgtttcttaatgtaggcataaaagaatattgccaccatatttggatcccaaccttagcattgaggagctgatgacaggagttag

SEQ ID NO: 35633 - DNA, 335 bp, Gossypium hirsutum
  Clone ID: LIB3149-055-Q1-K1-E5
acgcgtccgctcaagtttaccgttaagtccttaaagtcgactattctggaggaatatcttcctatccacttattgtattgcaggtaactaagttcaaatgcggtggagttagtcttggagtagggattcaacatactttaggagatggcgcagcggctcttcatttcatcaatagttgggctgacacttcacggggcttgacgcctgccattgtaccattcattgatcgaactcttcttcgtgctcgggacccaccaacgcctaagctccaccatgttgaatatgacccttcaccggcattgaagtctgcattaaaatctcaatcagatgatcat

SEQ ID NO: 35634 - DNA, 291 bp, Gossypium hirsutum
  unsure (1)..(291): unsure at all n locations; Clone ID: LIB3149-055-Q1-K1-E7
aaagaattcgctcaagccgagtagtccgggaagctatctctgcgttcaatgtctcgtctgatgggaagttccttgcagttggaactcngaggagacctttttatcatagattctgccaatatgcgggttcagatgatggttaaaaaagctcaccttggtttggttacagcattgacgttctcccctgattcaagggccttggtttctgcatcactggactcaagtgctaggttgaccccaatcaaggacaagacgagtagtggtggaatgacatggatgatcatattaatg

SEQ ID NO: 35635 - DNA, 178 bp, Gossypium hirsutum
  unsure (1)..(178): unsure at all n locations; Clone ID: LIB3149-055-Q1-K1-E9
cgacgagcgtggtagagggaagcagcggctgttttctctttnntgctgaaaattagttagtttgggctgtttgggctctagggttaagtntattttgggcttataattgggttagttgtttttgtaattttggactcttttttttgaattttttatgtcgattatttgggttttattt

SEQ ID NO: 35636 - DNA, 130 bp, Gossypium hirsutum
  Clone ID: LIB3149-055-Q1-K1-F1
ccgtgattcagttggacacatgactgatctgcaagagtggcctggtgcgggatgcatggttgctgccgtttgtgggtcaacggaacaagagcctattgtagttggaaaaccttcaaccttcatgatggac

SEQ ID NO: 35637 - DNA, 278 bp, Gossypium hirsutum
  unsure (1)..(278): unsure at all n locations; Clone ID: LIB3149-055-Q1-K1-F10
ccacgcgtccggcttctggctgcaggactggatggatacgttaatcaagcatagcgagttgaggaatngctcgtctatgattggccacctccaaatgtctaaagtggctcgtctgcggggcaaagtatctctcgtgtggcatagaataagaaggtggtggtaccctgctccattatgttgttntaacanaccttgcttcaattgctgagaacttntagctggtttaaatatngaatgctaatcnncttatattctctgtatcaatgaacatgatgttg

SEQ ID NO: 35638 - DNA, 287 bp, Gossypium hirsutum
  unsure (1)..(287): unsure at all n locations; Clone ID: LIB3149-055-Q1-K1-F12
cctaactctgctatcaganagtgtgctcgagttcaattgatcaagtatggttaaaagatagccgcattcgttccaaacgacggttgtgtgaatgacatcgaagaaaatgatgaggtgttgattgctcggattggacgaaagggtcatgccgtcggtgatattcccggtgttagattcaacgttgtgaaggtgtctggtgtttcattattggcacttttcaaagagaagaaggagaagcctagatcctaagtttgcaacaatgaggatattctttatgatgttttcat

SEQ ID NO: 35639 - DNA, 387 bp, Gossypium hirsutum
  unsure (1)..(387): unsure at all n locations; Clone ID: LIB3149-055-Q1-K1-F2
gaccacgcgtccgccgacatcttcaatggccagtccttggtccgtaaccgccaacgcgacacctctttttgctttgccggagcgccgcgcggcgccgtgaagaacgatttccgaggcttgctgttgaaccaatgtatgaacgcttccggtttatgccgggtcgttgattgcgccggtacccgttgctccaacggcacatcggcgatcctcgaaaccattttggattctcgattttgcttgcaacccagaggcgacagtttcactcgtaggtcaattntcgactgcatggtcaccggttccatcctcgtcttcttctggcaccgaacggcttatctcagtaccaatggtttaccgaatgatccaaagtnactcgtttatcaccggaca

SEQ ID NO: 35640 - DNA, 388 bp, Gossypium hirsutum
  Clone ID: LIB3149-055-Q1-K1-F4
cgaccacgcgtccgcccagcgtccgaaggaatcactgcactggcccttagcagcatgaagatcaaggtggttgcacttcccgagagaaaatacagtgtctggattggaggatccattttagcatctcttagcaccttccagcagatgtggatttccaagggcgagtatgatgaatcaggcccagctatcgttcaccggagtgctttaattgaatgtatcgaagccacattttcagcattgctggtagtcagtgtgacattagcttgtttataatgagaagtatggttcagctgttataattagttaatcaatcttgctgtgtgagatactaatgtgcttattggtgcacttattgtcatgaactcctaaatctgtggatagatattat

SEQ ID NO: 35641 - DNA, 407 bp, Gossypium hirsutum
  unsure (1)..(407): unsure at all n locations; Clone ID: LIB3149-055-Q1-K1-F5
cataccttcctgtcattgagtctcttggattctctagctacttgagggctgcaacatcaggacaagctntcccacagtgtgtgtttgatcactgngatatgatgtcatcagacctcatggaacctggctctcangcagcagcccatgtcgccgaaatccgcaagaggaaaggattgaaggaacagatgaccccactttccgagtacgaggacatactgtaagctaagagagagtaactgtgattgtgcggcataaccttcgctgcaattaaagtttggtttctgtctgggtatatnntggtagcatggatgctntttcacccatatgatgtaccgtcgtttttagaccgttgtgtntngatgatgatcatgatgtactacaatcgacattacgttgaactttttata

SEQ ID NO: 35642 - DNA, 248 bp, Gossypium hirsutum
  unsure (1)..(248): unsure at all n locations; Clone ID: LIB3149-055-Q1-K1-F7
gaccacgcgtncgcaactatcaatctgaggtttatcgcattaaatagatcatgaaatctttcctttctttntttgtattcctctcacttctcctgtttgtagacaccattgcagcggcgtgggaaagatgctggagagtactggggagctgtaacgaaagatcagcctatgcctgaggcactccaagagcttgttcggattgaggctgccgttgtcagccccgatgagaaaaccaagtgccatacatc

SEQ ID NO: 35643 - DNA, 258 bp, Gossypium hirsutum
  unsure (1)..(258): unsure at all n locations; Clone ID: LIB3149-055-Q1-K1-F8
tcccaccagatcagatagagaagatgaacagtggggataacannagccaagacagntnttccaaagtgaagctattaacattgagaatggaaaccaaagctttcagcaggatgctccaccagggttctcatctcctctcaatgcatctntggtgtcgtctactttatcatcaactgctacaggtttccctacacctaaagttggccagttgaagtgccctgatgtggttcttgctattcaagaagaattatttacgtt

SEQ ID NO: 35644 - DNA, 174 bp, Gossypium hirsutum
  unsure (1)..(174): unsure at all n locations; Clone ID: LIB3149-055-Q1-K1-G10
tntcagtctattctcaactcttccatngttattgtgatgcgatgcaatatgctgtcattttcagagttntctttgaaatggtgttcttatgtactaataatggcagaggctacttggaagcgtttangtgttgattgcctgatttggacgaaaggatcatgccgtcggtgatat

SEQ ID NO: 35645 - DNA, 182 bp, Gossypium hirsutum
  Clone ID: LIB3149-055-Q1-K1-G12
tggtctcggctgctggggagtggggggagaggagctgcgcgcggtggggtggggtggaaaaatgaatggaagttcccaaaaccaccgggaaaaggctctcgagactgtgattgagcttatcttagtctaagaacgtgcatggatctgaatcagaacctagaaaatggttcaaaagaaaagaa

SEQ ID NO: 35646 - DNA, 339 bp, Gossypium hirsutum
  unsure (1)..(339): unsure at all n locations; Clone ID: LIB3149-055-Q1-K1-G3
gaccacgcgtccgagccctaaatcctncctncctctcaatctcagtcgaaaccaccctaaatcacacacttaaactttcactcacacactatttctcttacgccggagtcgccgagtcagagtgtcggaccaccacaccaataggcaatacccagacccaaggccagaatgtcaaccgaaccaacatctattgagggtagtgttacacctcctacttcggtagcttctgaaaattcggggttgagctcaatcaaacaaggggctcgtcgggaagaaagccctctaaggcaagttggctactatattataatggggctgaggtatgatatggtagattgt

SEQ ID NO: 35647 - DNA, 306 bp, Gossypium hirsutum
  unsure (1)..(306): unsure at all n locations; Clone ID: LIB3149-055-Q1-K1-G4
gtgtgctcgagttcaattgatcaagaatggaaaaaagatcgccgcattcgttccaaacgacggttgtttaaattacatcgaagaaaatgatgaggtgttgattgctcggattggacgaaagggtcatgccgtcggtgatattcccggtgttagattcaaggttgtgaaggtgtctggtgtttcattattggcacttttcaaagagaagaaggagaagcctagatcctaagtttgcaacaatgaggatatctnttatgatgttttcatagttntttttgggatcgaatntaaagcaatgtgtttctc

SEQ ID NO: 35648 - DNA, 426 bp, Gossypium hirsutum
  unsure (1)..(426): unsure at all n locations; Clone ID: LIB3149-055-Q1-K1-G6
acgcgtccgcctctatttcttaacaaacatcaactccagagatcgccaaacatgctaggaactgagcatgatttgaacttcaaagagaccgagctgtgtctcggcctgcctggtggaagtggtggaggaggaggagctgccgccgccggtggtggtggtggtggtaaaaatgaagtggaaagttccccaaagaccaccgggaaaagaggctactccgagactgttgatttgaagcttaatcttcagtctaaagaaggttgcatggatctgaatcagaacctagaaaatggttcaaaagaaaagaatcatctcactgcanaaccaccagccaaggcacaagtattgggttggccaccagtttcgatcttataggaagaacattatggctaaccagaagaacaacagtgacgaaattagtgacagagc

SEQ ID NO: 35649 - DNA, 296 bp, Gossypium hirsutum
  unsure (1)..(296): unsure at all n locations; Clone ID: LIB3149-055-Q1-K1-G7
tccttcagcgtatggttgaatggtcgattgccttctgcttatcaccgcttgatgatgaagggaaacgagaccaggtatagcatcggatngtttgcaaggccgagaggagggtacctagtaaaggttcccaaagagcttgttgatgacaaaaatccgatgctcttaaacccttgatctgaaaattttgaaattactccccaactgtcagggctactaacacctaaactatcaggcaaattgcatataacgggcttttagaataacagttcactacatatgcatacgctaagtgaaag

SEQ ID NO: 35650 - DNA, 244 bp, Gossypium hirsutum
  Clone ID: LIB3149-055-Q1-K1-G8
ctacgcgtgcgctcgatgtcgatctctctcataaccaacattctctaccctcaaatccgccattaacaaaccaacccttaaaccaaaacccgcctcttctctgcgtggttctcgcacttctcccacattttcaaggtctgtttctcaattgggttgtcttcaatctctgctgcctctccactcagccgtgtcttcagctcggttaacgtcgtgtctaggcatcgattcgaggagctctaggtcg

SEQ ID NO: 35651 - DNA, 281 bp, Gossypium hirsutum
  Clone ID: LIB3149-055-Q1-K1-H1
agatgattcattcggatccgcatgaaagcccaactccattgcattgccagaatccatgttgtatatttgaaagagggtgacctccttgcttctctcatggtacaatcctcttcccgctgagccccctttctcctcggtccacagagacaaaatggaatgtaggactaggactggcgccaacagttaatcacggaagaaaggactcactgagccggatcactaactaatactaatctaatctaactaatactaatctaatactaatagaatactaatctaat

SEQ ID NO: 35652 - DNA, 374 bp, Gossypium hirsutum
  unsure (1)..(374): unsure at all n locations; Clone ID: LIB3149-055-Q1-K1-H10
gtgctgcgagctaggngttgcggcgctggattgngggaaacctctaggtttctacttcggcaaagaaaggaaaggaaaaagttgacgaagagtgactcgngaaattacggttaggttaaagttcaaacattgaatcagcgtccaaggccgatcccgaactcattgtggtgaaattgctttgtggaacgtccaagctggatcaagtttnaagctacactatccatactatgtagatgacaacgttgaattggtggcatttcctgatgtgaatgattatttatatgttattattaaaagtaaccgtagttgactataattgaaatactatagtatgatagaactatgatttgatgtattatctagattgtataaaa

SEQ ID NO: 35653 - DNA, 265 bp, Gossypium hirsutum
  Clone ID: LIB3149-055-Q1-K1-H2
aattcggtaaccaatctccatttcaaaatgcgagatatggtgtatctgttggtgcatacatgtgaagtaaaggtaaatggtcagaggacaaaaaaggacatactcaaatccaatgggaaatctgaggtaaatgagtccttgagggattctgaaaaaggtcagatagaaaagatgcctgattatctatgatggcctgattgagacaattgaagccattgatgtcatgggataaaactgactcatatgagaaattgaattgacatat

SEQ ID NO: 35654 - DNA, 250 bp, Gossypium hirsutum
  unsure (1)..(250): unsure at all n locations; Clone ID: LIB3149-055-Q1-K1-H7
gaattataacanttgaagaatggagagatttccttctactctatcctcatgaagctactatggagaacatctatcatcattgggaaaaggaggaatagccggagcagcttctcgcactgcaactgctcctctcgatcgcctgaaggttgttttacaagtgcaaactacaaatgctgatattctgccagctgtaagaaaaatatgaaggaagatggtatttgggttttcgggtagggtaatgtgaagactc

SEQ ID NO: 35655 - DNA, 113 bp, Gossypium hirsutum
  unsure (1)..(113): unsure at all n locations; Clone ID: LIB3149-056-Q1-K1-A11
cgcaagccactcacatattcgccaacanaatccgtctggcggtgtatgtagcagccaccatgctaaaatcaggcttcttgactgatcaagataccaaagatggagtacctgat

SEQ ID NO: 35656 - DNA, 226 bp, Gossypium hirsutum
  unsure (1)..(226): unsure at all n locations; Clone ID: LIB3149-056-Q1-K1-A12
ggaaactctagttggttttcgcttgtgatttccactattctcgtgtttatcccttgaggacgcgaggtctggcttttatttgtcgattatataataaaatcacaatttaatttactaataccaangagagctgagcaacctacaaccacgtgcatggggaaagaggaattgcgacgtagaatcatgtagcaaaggagccggcaagaggatgcgactgtagcagcac

SEQ ID NO: 35657 - DNA, 256 bp, Gossypium hirsutum
  Clone ID: LIB3149-056-Q1-K1-A4
atgaccctgctatctgtctgtctgtctagagaccttccaggccttacatgggtacccaacaatccagcaccgtaactggatgatggagcacaaatgatgcgcatatcatttacatctgtgacagaagtcacctcatatttcgttcaattctcagagaatcatactatataaagctttgagccattatgattcattaatattgagtattattattagtaattgcatatatatagtatatataataggattctcatat

SEQ ID NO: 35658 - DNA, 53 bp, Gossypium hirsutum
  Clone ID: LIB3149-056-Q1-K1-A6
ccacgcgtccgcctgaaaccaaactggcatcattgtgttggctgaaggacgtc

SEQ ID NO: 35659 - DNA, 71 bp, Gossypium hirsutum
  Clone ID: LIB3149-056-Q1-K1-A8
atatgctgaataacatgaaagtgatatattacagccgaacgtatatgtctatcatccgaggagttattgct

SEQ ID NO: 35660 - DNA, 459 bp, Gossypium hirsutum
  unsure (1)..(459): unsure at all n locations; Clone ID: LIB3149-056-Q1-K1-A9
gagggtggcagacattctcccttcttcgcaggttatagacctcagttctacatgaggaccactgatgtcactggaagggtggcttccattatgaatgataaggatgaggagtctaagatggttatgcctggtgaccgtgtaaagatggtagttgagcttatcatgcctgtggcttgtgagcaagggatgcggttngctattagagaaggagggaagacagttggagccggcgttattcagtctattattgagtgatcttaggatactttggcgtngcaggatatngtatntgctgtgcagtgatgtcaaagaaccttcatatgccaaatgtcaaggtcatgcaattagtttcgtcaccatttatagaacctctntcattccaatgtcatnnatttggaagtttgtatttcttttgcttcagactcatgtctaatctagttggatgggtaatatcatgtc

SEQ ID NO: 35661 - DNA, 209 bp, Gossypium hirsutum
  unsure (1)..(209): unsure at all n locations; Clone ID: LIB3149-056-Q1-K1-B10
tctgaggaactacaaccggtgttagaggcttatcagatgcaggccaatggaacctngttgttccctgctattaatgtcaatgactctgtcaccaagagcaagttcgataactngtatggatgccgtcactctcttcccgatgggttgatgagagctaccgatgtcatgattgctggtaagggtcgctgtgtctgtggttatggtgatgt

SEQ ID NO: 35662 - DNA, 156 bp, Gossypium hirsutum
  unsure (1)..(156): unsure at all n locations; Clone ID: LIB3149-056-Q1-K1-B11
ngaagaaggcaagcctaaattactatgcataatgcgagagcatatcagtgtaagaatgtgaaggttggttgtgttgagaataggttgatatacatattctactctctgccgaattatattgtgttaggttttcctggtatgcacgtatatttatat

SEQ ID NO: 35663 - DNA, 248 bp, Gossypium hirsutum
  unsure (1)..(248): unsure at all n locations; Clone ID: LIB3149-056-Q1-K1-B7
attcacccgtagctatggcactccttctcgccagttccagacgcagatccctcgccaacccttcactctccgccttttctccacttcttcaaatgaccgaacaacgagtggcgcgtccacgaacggcaaccactccggcaataatccctcttcagactcttcttacttcggcgatgtcaaaactgaccaaccccaacanagacccagaaaccccacanatccttcgactcccaattccaaacccatgt

SEQ ID NO: 35664 - DNA, 343 bp, Gossypium hirsutum
  unsure (1)..(343): unsure at all n locations; Clone ID: LIB3149-056-Q1-K1-B8
ctttcatcctcaacccttcgagttcagctatgtagtttcaaactntaagagatatactccctccctgtttctgttttctgttcatgtatgagattatgccttgagttccaaataaaccacatgccacaacagtaaatcttacatngctcagaggtactcgttctgaanacccaggacaatacctaaagatgtgggtgatgtcttcttcctctcttcacatcaggacatgccgcgtatactacccgttatgtttaaatactagagaggattagtctagaatctcatatgtatgcttgtngcagagtgtaatcatactcgcgaaatcttaatagcatataataaa

SEQ ID NO: 35665 - DNA, 257 bp, Gossypium hirsutum
  unsure (1)..(257): unsure at all n locations; Clone ID: LIB3149-056-Q1-K1-B9
catacattaagtgcctttcttggaactctctcataccttacatnggctgtttccccttttgatagcattgctgtgtttngctgttaccgcatgtttccgttgctggatggtcaagattactggaatgctttatatacaggttgcaatgtcattcctattaagggaacagttctagtgccttttgtaattttggattgttaaaatgtctaaactatatggctcggatacgaagtgtcattctaatcacttactgggtt

SEQ ID NO: 35666 - DNA, 398 bp, Gossypium hirsutum
  unsure (1)..(398): unsure at all n locations; Clone ID: LIB3149-056-Q1-K1-C11
cgtcaccacgcgtccgatagaatggccctcactggcactgtttcaatctcgggtcgtatcnttagccgtacttgccatagtgccaagatggtcaggacaatcattgttcgacggaactaccgtcattatatcaagaaataccaaaggtatgagaagcgccattcaaacatccccgcacatatttcaccatgcttccgtgtgaaggaaggggatcatgtcattattgggcaatgcangccgttgtcgaagaccgtgaggttcaatgttttgaaagtgattccagcaggatcttccggtggtgggaagaaagctntcaccggaatgtaagctnttctatggtagtccatggttataggaaccaatagagaagataatcaaagaaattaagttcttaaact

SEQ ID NO: 35667 - DNA, 236 bp, Gossypium hirsutum
  unsure (1)..(236): unsure at all n locations; Clone ID: LIB3149-056-Q1-K1-C3
ctgtctcccagatggcccataacgcgcagcataacagttngcagagaggttgagggtggagaacaagagtcatggacaatgacgganaagatggttcatcgtttctggttcttcaccacattgagggcataatgtgcttgttgtcagttcttacannagcatgtcactcgagtaggcagataattccatgaaatcttncagatgggtgataaaatttatgtgtagatctatgctca

SEQ ID NO: 35668 - DNA, 307 bp, Gossypium hirsutum
  Clone ID: LIB3149-056-Q1-K1-C7
cccacgcgtgcgataatactctctgaagatgttgatcctggcaccagattgatagatgcactctagatgatgaagcagggtgtgagacgacttcttgttccaaagagcaaggtatggaaaggcatgagcaagcgattctcaattctttataatgggaaatggctcaagaacattgataactgtagcggaacaacctgattgctatgcaacccccttctcttatctgctgcgttaatgctgaaagtttgctgtcttaagaaaacatgatcattctatcggtgcttgggcactactctttcctctctta

SEQ ID NO: 35669 - DNA, 243 bp, Gossypium hirsutum
  unsure (1)..(243): unsure at all n locations; Clone ID: LIB3149-056-Q1-K1-C9
gtacaagtctccgccaccaccacctccatcctcacccaagcacccttacaagtacaagtctccaccacctccaccgccatcaccacccaagtacccttacaagcacccgcgaccaaagcaccaactccagcaccagcaccaccaactaaagcaccaactcccccatataagcccncagttcctacacctncagttaagccaccaacaactccagcaccgtcttacaagccaccaagtccacca

SEQ ID NO: 35670 - DNA, 94 bp, Gossypium hirsutum
  unsure (1)..(94): unsure at all n locations; Clone ID: LIB3149-056-Q1-K1-D11
gaaaaaagacgaggganatgcctccctgctgggaaatatatagatatgtaataaaagatgctttcaacagtaganaaggaaaattccagttcag

SEQ ID NO: 35671 - DNA, 169 bp, Gossypium hirsutum
  unsure (1)..(169): unsure at all n locations; Clone ID: LIB3149-056-Q1-K1-D7
ggaagaaggaaaacagaacctaggctatatatgaatccaacataataaagtatatacatatatatatatactaatatcagggagtatactagtgtgattntattacgtgtttgcgtattgtatttaatgaaagattatccttataaaaccttaattactggaataattt

SEQ ID NO: 35672 - DNA, 266 bp, Gossypium hirsutum
  Clone ID: LIB3149-056-Q1-K1-D8
catatggacaacctaaagttgctgcagccgccatcatgcagctatcgactgtttttcttgccatttctctactgttttgaagccgtcgaaaacctggccttcccctaacacgttttacccccttgttgtcgtatgttattgcttccgtaccgagtagctcgaaggtcttattgcggagtggtgtggcaaataccacttgtcttttggttctctcccttcaaagccaaacaaataatcttcacctttatttgaagtgtatctttttg

SEQ ID NO: 35673 - DNA, 406 bp, Gossypium hirsutum
  unsure (1)..(406): unsure at all n locations; Clone ID: LIB3149-056-Q1-K1-D9
atccggtcaccacgcgtcgccatgaacgggaagtgcaccctgctagctcaggaagttcatgcagttgaggaaatggtcatgagaatgtgcgggacatgctgcatcaactagaatatatatggaggttcgaaatggacaactgcaggaatggcgacaacccgtgttgatggctttggtggtgagcttcctaaacccgagttgtgatatcataaggccggatggtaaaaagaatagaagttgaaacaggaataaaggtaaacagaaacaacctttggaaacttaattttgtagttgaatctttcttgaacctaatgttgtgaaaattcccgatgaataagcaaattaactatgtgtttttttgcggggtgangatgatcctattcgacttcctgattactacaatgta

SEQ ID NO: 35674 - DNA, 337 bp, Gossypium hirsutum
  unsure (1)..(337): unsure at all n locations; Clone ID: LIB3149-056-Q1-K1-E10
ggttagggctctntattttctctgttcatcagtttctttttatctcnttcgaatttcattacagaccctgatcctaaactctcaatcatgtcnttccaagcaaggtggcaaagcanagctcttgaagcaacctaaatctgagaagaaagaatatgacgagcatgatttggctaccatcagaaaagaagaggagagaaggcctaagagctaaacaagcttacaaggacattgtgtctgtctaaaaggcaaatagttaaacactacactaagatttgatacaattcttgttgtatgaatgaatgagatattatgtaactgtatcactaaatattatgtt

SEQ ID NO: 35675 - DNA, 401 bp, Gossypium hirsutum
  unsure (1)..(401): unsure at all n locations; Clone ID: LIB3149-056-Q1-K1-E12
ataagctagcttccaagctgaccggagctggtggcggaggttgcgtgctaacactcttgccaacccatatatcaggagaagtcatcgataagctagtggaagagctcggatcattcggtttccagtgtttctcagccggaattggtggtaaaggtgttcaaatttccttcgattattcttcctaattttccgtccccatatnttagtcgtaataagactctcttcgaataacaacatgaagcacattatatcgatgttatagttatttcccttccctttcgttttctgtacacttcactttcggattagccgttttctagttaaaccagaacgaagaanaactactgctacagaaaacaatgttgtagctgtttctatttctccttgtacattagtttact

SEQ ID NO: 35676 - DNA, 86 bp, Gossypium hirsutum
  Clone ID: LIB3149-056-Q1-K1-E3
caatggacgcctctgtacggccataacccgcggtgtgtggtacccacgtaccctccttccaccctaccccctcttccttcttcttc

SEQ ID NO: 35677 - DNA, 259 bp, Gossypium hirsutum
  unsure (1)..(259): unsure at all n locations; Clone ID: LIB3149-056-Q1-K1-E4
tctctggagtgtacttcgagccncaatattcacttggtagaaagatgttgacanaagtgatagcaatggcatccattgtagatgatacatatgactcatatgcaacatatgaagagctcattccctatacanatgcaattgagaggtgggatatcaaatgtatagatgaaattcccgaatacatganaccaagctacaaggctctattagatgttatgaagaaatggacaatggtggtgacatggaacaatatcggtca

SEQ ID NO: 35678 - DNA, 200 bp, Gossypium hirsutum
  unsure (1)..(200): unsure at all n locations; Clone ID: LIB3149-056-Q1-K1-E5
acagcaatggcatccattgtaaatgagacatcggactcatattcaacatatgangagctgattccctatacaaatgcaattgataggtgggatatcaaatgtatagatcaaattcccgtatcatcataccaactacaaagctcttatatgttataaaaatgtcatgtcctacatgaacaattccatcattcaaatcatat

SEQ ID NO: 35679 - DNA, 265 bp, Gossypium hirsutum
  unsure (1)..(265): unsure at all n locations; Clone ID: LIB3149-056-Q1-K1-E7
ctcaatgtcaattttatccttaaacgcttagaannaaaaaaacaactaanaagatggcgaggagaccggacgaggaatacgattacttgtttaaggtagtactaatcggcgattctggcgttggaaaatcttaattgctttctcgatttactcggaacgaggtttgcttagaatctaaatctaccatcggcgtcgaattcgccacccgcactctccaagttgaagggaggactgtgaaagctcagatatgggacactgctggtca

SEQ ID NO: 35680 - DNA, 466 bp, Gossypium hirsutum
  unsure (1)..(466): unsure at all n locations; Clone ID: LIB3149-056-Q1-K1-E8
gtttactcgaaaagatccctctccaacaatggcttctaatcccaaggtcttcttcgacatgactcgtcggtggccaaccagctggtcggattgtgatggagctctgtgccgattgcactccccggactgctgagaacttccgtgctctctgcaccggcgagaaaggggtaggccgtagcggcaaacctctccactacaaaggctcatccttccaccgggtgatccccaatttcatgtgtcaaggaggcgactntaccgccggaaacggtaccggaggtgaatccatctatggagccaagttcgcggacgagaacttcatcaagaagcacacgggacctggcatcctttccatggcgaacgctggacccggaacaaacggatctcaattcttcatctgcacgaccaagacggagtggctggacggaaagcacgtggtgttcggacaggtagttgaaggcatggatgt

SEQ ID NO: 35681 - DNA, 267 bp, Gossypium hirsutum
  unsure (1)..(267): unsure at all n locations; Clone ID: LIB3149-056-Q1-K1-E9
gctactcctttcattttgcactgaattcactntcctactcttcgatttagagctttcaatcaaaattgatctaagcataaatacccatctccgaatagatctgctggtttatcgcctcttgctttcgtctcttgtcaccagaaaaaactattcctcatagtccaaagcttacaacggaggtttcttgagagttctgattgagtcacattgctatgcataaacagtgagacaatgactcgatagtgacgcatgtaaatgtttgtctgg

SEQ ID NO: 35682 - DNA, 214 bp, Gossypium hirsutum
  unsure (1)..(214): unsure at all n locations; Clone ID: LIB3149-056-Q1-K1-F10
caganatagatatggttgtagggttgtatgtgaggcgtggatggaaggatgcatgtntgttgaaagtctntaataaaaggataagtgtatgtgaatgaataaaaactgtatttcagcacatacaccttatgtatttcnntttattctctaaaatgcttcctctgctgcttcggaaattcttgaatcttcttgtaatatgtcaataaatttcctg

SEQ ID NO: 35683 - DNA, 232 bp, Gossypium hirsutum
  unsure (1)..(232): unsure at all n locations; Clone ID: LIB3149-056-Q1-K1-F12
gcagttnttaccctagagttaaaaacacaggtgagggagggtcgttttgattaaaaatgtacagttaaattggaattggataaatagatatgcatgcagttggggggtgaaatgaacacanaaganatccacccattttgtctatttttggtcttaagatggtgggataaatagcttgtaatcactaaattataaaaaccctttttattttaatttaatatattctttgctg

SEQ ID NO: 35684 - DNA, 208 bp, Gossypium hirsutum
  unsure (1)..(208): unsure at all n locations; Clone ID: LIB3149-056-Q1-K1-F2
ggtcgancacgcgtccgcaaagggacatatggcaacagggaaatgtgtggcanatgttatactgatatgagaacccaccgtatcaagcacanatgtccttgaaaagcccaactcaagcccccaaaaaacgacacttctggagtatggtgttttaatattggtaatagcaaaaaggcttgcagtattaagtcttgtaggaggagaggaa

SEQ ID NO: 35685 - DNA, 374 bp, Gossypium hirsutum
  Clone ID: LIB3149-056-Q1-K1-F7
cagaaatccagaaacccaccctagcgcggcggcgttactttcaacaattgaggctaccctataaacataagtatgtcttcgtccattatgatcactaaacgagttttgtttatcaagtatctatttcttataaaaatccttaccctgatctaatataaaattgggaaataatcaaaataatatcgattggtctatgatctcaaaggctaacataataatctccttctgactcctcatatattttctactattttgtaaaaactcctggaagtctatctattggttactctacaaatttattgggttacccattaacaccccccccttagtataaactcataatggccacaccatcatttctactatattacata

SEQ ID NO: 35686 - DNA, 166 bp, Gossypium hirsutum
  unsure (1)..(166): unsure at all n locations; Clone ID: LIB3149-056-Q1-K1-F8
ctggtggtgcggctaaagaattacacatgatttaatattcaagttattgtactctttgattctgaccttcatacatactgcaccatgaagaatccttatgtacagatntatgtttctnttcgtaaatctaatatttagttcatatagctntttgaattactcanaa

SEQ ID NO: 35687 - DNA, 412 bp, Gossypium hirsutum
  unsure (1)..(412): unsure at all n locations; Clone ID: LIB3149-056-Q1-K1-F9
gcaaagaagctggaattgcagatggnggaagatcgngacgatagctngcaatcgaaggaacatatcgaagcgagcttattgagcaaacacatagctgcaatgagacgagaaagggcaatggcttattcatttactcatcagcaaacttggaagaatggttcgaaatccatgaatccgttattcatggatatgaacaatccgacatggngttggagttggttagaacgatggatggccgctcgaccatgggaaggacatggcgtgacgggaaaagaaccgaacaacgaccagtcatcggtaaagaatgcacatttcgaaggagaaatcagcaaagcttaacgctcgtactcaactcaattggataataaacaatccccgaaatcaagccaaaagccaaaccgaacatcaagtc

SEQ ID NO: 35688 - DNA, 189 bp, Gossypium hirsutum
  Clone ID: LIB3149-056-Q1-K1-G10
gacataggtgattgttaggccgcaacattaacaggatcaggaacgagacggcaactcctgtggagatggatgatcagctcgacattcgtcgttcagagcatggaagaactgaatcaaagagctagcaatcggaacaggtactaaacgtgtcatataggtaatgtaatttcgcagtagacaagctaattc

SEQ ID NO: 35689 - DNA, 233 bp, Gossypium hirsutum
  Clone ID: LIB3149-056-Q1-K1-G11
tccggcgacacgcgtcgtagttgcagcggcttgtcactgtcgggtgaggttggaaaggaatttggagctcggaggacctgctgcactgaaggatatgaaaatcgtgctgataggcgagggatagaaggaaatgatctaataagtatgttgagggagctgcattgtaccaagatgttctttatgggtttgtattatgggacttactttaacttgtaaatttgacgataatgcag

SEQ ID NO: 35690 - DNA, 243 bp, Gossypium hirsutum
  unsure (1)..(243): unsure at all n locations; Clone ID: LIB3149-056-Q1-K1-G12
catagaggagcataatatngaggagcaataccctattgatccacttcagaagcgggttctcctattggagaaggttaaagcagacaagaagggatcaactgaagctgcggagcctcaaacaaagagagctcgtgccaatggtgcangatatggtccacgagtcactaatgtagctgctgacaaaccattctattctagaacatcactctctngcgcggcattcttactggatcgccaacttct

SEQ ID NO: 35691 - DNA, 104 bp, Gossypium hirsutum
  unsure (1)..(104): unsure at all n locations; Clone ID: LIB3149-056-Q1-K1-G5
cttctggcaaaggcaactgctggtgaatctggtgtgcctntcctctctatgtctggatcagantttatggaatatgttgttggagttgggccgtcaagagtgag

SEQ ID NO: 35692 - DNA, 275 bp, Gossypium hirsutum
  unsure (1)..(275): unsure at all n locations; Clone ID: LIB3149-056-Q1-K1-G7
attcccgtcgaccacgcgtcgcactctcagctgattcactcgtgggttcttattaaccctcatcagctaggctgttatgattgattatgttcaattaaaaggtcgcatatctatgtaaggttgctagtggcaacgtcagctcaatttgatctgatgtatatatatatatatattctacagatgcccattttaacaaataaaactggnatatgtttaaactctactgntnggattatngcttagttctctgttngaacactggaaattctaaatct

SEQ ID NO: 35693 - DNA, 432 bp, Gossypium hirsutum
  unsure (1)..(432): unsure at all n locations; Clone ID: LIB3149-056-Q1-K1-G9
caagatggtaggtcaagaatntaccaaaagtggctcggcgtttgcatttcctcgggactctccattggcaatcgatatgtcaactgcaattctagcactcgctgagaatggtgatctgcagcgaatacatgacaagtggctgatgcanagcacctgcagtttagagagtacagagatagaaacaaaccaacttaatctatccagcttctggggtctgttccttaattgtggcgttgcttgcatcattgcccttttcatatattttctgcagatattgcagcagctacctcctgctcctgaatctgcttcaattcctggtcaagatagctcacattctcgacggctgcggaggttnttgtcactaatggatgagaaagaagagcaatcaagtaagatggtactggatgactggaaaaggctntactctaacac

SEQ ID NO: 35694 - DNA, 286 bp, Gossypium hirsutum
  Clone ID: LIB3149-056-Q1-K1-H10
gatcaagcacagaagaagaggtcaagctcgctggctacattctacaggtggatgaatcggtaggttcagaggctgggaaagagtgccctaatgctgatgtgggctggaacttcatggctacattcgatggactatgcggagtggactactatttacagaggtgtgaataatggctcgcaaaatgatcttaggttcaattgttagttaaattagatgcgattgtaacatatttgtggtgaattttaactggctttattgattataaaaaaaaaaaaaagcgcgttaa

SEQ ID NO: 35695 - DNA, 305 bp, Gossypium hirsutum
  unsure (1)..(305): unsure at all n locations; Clone ID: LIB3149-056-Q1-K1-H7
tcgatgattgaagtgcanaatctcagtgaanactgcaccaaagtcagcttctcacccttcgaataaggcctctatggatagtcagtacgagttcacattcactgcttcatattcctatcaacaggcacaacatccatacatttggacactctgcagtgcttgtggtatcaagtaccagttctanttggattgtttgaacagattgttagattgcaagagatgtgggtcttccttcatcgcctntgacttgngtccttacggccactcttggagtcagttctccaatcagaaagagattccaaatg

SEQ ID NO: 35696 - DNA, 264 bp, Gossypium hirsutum
  unsure (1)..(264): unsure at all n locations; Clone ID: LIB3149-056-Q1-K1-H8
ggactcaggctctgcctggctccaccgatggtctcgtaggccaaagcactccagttcgcttacattgggtgggtaactcccagacccagtgccccggcaagtgcctggcgttcaccagccaatctcggaccaanacgcccttgatgcaccaaacacacggggtctgaggcatggcataaactgctgcctttgccggccgcacaaccttcgaaatggtcttcaagcaccgagacgtgaggttatcgtgtcgaatatgaagctatc

SEQ ID NO: 35697 - DNA, 258 bp, Gossypium hirsutum
  unsure (1)..(258): unsure at all n locations; Clone ID: LIB3149-056-Q1-K1-H9
gaccacgcgtccgcaaggcggaaccaactccatcatcagcctataactcgaagatgcctacggcgggtccgtcgagatcagcaacctggaaacatggggtgggttaatggagccaggacacgactatttcgagaggggtaacttggacattntctccggtaggggtcgttgcttggatgctcctgtatgttccatgaactngacctcgatgggtgggtcggccatggaggactgaactactggagtacatgacagctc

SEQ ID NO: 35698 - DNA, 266 bp, Gossypium hirsutum
  Clone ID: LIB3149-057-Q1-K1-A1
ctttgatcatgctattggtatcaacgtacctcgatcgcgattccttccagtgaaggcaacttcagatttgcttcttgttcagtctgacctttacaccttagttgatggatttgttatccggaataaagatagagcgaatcctacaaacccatccatagaattggggcctgaattcaagaaggttggtaacttcttaagtcgattcaagtcaatcccgagcatcattgagcttgatagccttaacgtgactggtgatgtttggtttg

SEQ ID NO: 35699 - DNA, 75 bp, Gossypium hirsutum
  Clone ID: LIB3149-057-Q1-K1-A10
aaaaaaaaaaaaaaaaaaaaaaatttaaatttgaaaaaaaaaaaaaaaaaaaaaaaaaaaaggaaaaaataaatg

SEQ ID NO: 35700 - DNA, 351 bp, Gossypium hirsutum
  Clone ID: LIB3149-057-Q1-K1-A11
gtttcattgtctttgctcctcaattcctgttaaaagcaaatgcctgctggttacaaatgtgcttaagctcatttccactgtttcctcagcaatgtttgggtttttcttttacgtgttctttttttttctgggcttgtttaatttggtattttgatatgtcaagggttagataaaatggtaaaggtttcttttaccttaaccaatagtcaattctcatctatttatacaatatttgtcatgttagtaagaaagaaggcttctcgccttccaatccaaattatgtaccttacaaatcagtgaaataattggatgaaaaaataagttaatttatatttgtttcattttcctctc

SEQ ID NO: 35701 - DNA, 171 bp, Gossypium hirsutum
  Clone ID: LIB3149-057-Q1-K1-A12
aaccttcagaatatccgtttacttgagcctcctttttctgatcctgtgcaacttctaatgctactgtgtcaaggggttttttaaaaagtaaatggatctatctccttcactaactgccaaaaatcatatatgcatactttttaaaacataaaaaaaaaaaacaacccttct

SEQ ID NO: 35702 - DNA, 361 bp, Gossypium hirsutum
  unsure (1)..(361): unsure at all n locations; Clone ID: LIB3149-057-Q1-K1-A2
cgccagtcgccggtcaccatcagctgatcgtctccttttccagcaatggcggaagctcaaacagaaactccgccttccctatctgagcaatattcactgaaggaaaaagcggagaaatcagatgtggctacaaaagcagctgatgcagaagaggtcgaaaattcagctaatacttcttccaaggaagtggtgaccgaggaagtcgagactcctgctcctcttgtggaaagtactgaggttcctcctgctgttgctgaagaaaacaccgaagccaatcctgttgctgagaacagtgttgaagatgctcaagttgctgtggaagaaagtaatgaacgtaccgaagagagctcangtgatgctg

SEQ ID NO: 35703 - DNA, 368 bp, Gossypium hirsutum
  Clone ID: LIB3149-057-Q1-K1-A3
cttgtcaagagatgccacaagcccgatcgaaaagaatttacgaaggtggcgtttcgtacagcgatcggattcgtggttatgggattcgtagggtttttcgtcaagctcatcttcatccccattaacaacattattgttggatctggttaggaagcatgagaatcagtaccaagtttcagactgtaggcaaaagatagaagttagaagtggatgcaattgactgagaggtacatcatctgatttcatgaactaattcaaacttagacatggaaatttctagttttctttatattcaatatgtttgagattatttttgttttagcattgtaatagaatcttgttgaaataaacacaatcattctgacctc

SEQ ID NO: 35704 - DNA, 317 bp, Gossypium hirsutum
  Clone ID: LIB3149-057-Q1-K1-A4
gggcgaaccacagcgagttgatttttaaatatagcacccccaacccactcaacaaactcatcttcatccccattaacaacattattgctggatctgcattaagaagcataaaaatcagttccaactttcacactgtatgcaaaacataaaaattacaaatctactcaattgactgagaagtacatcatcgtatttcatgaactaattcaaacttacacatggaaatttctagttctctttatattcaatatatatcaaattatttttgttttaacattttaataaaaatcttgttaaaaaataacacaatttatttt

SEQ ID NO: 35705 - DNA, 236 bp, Gossypium hirsutum
  unsure (1)..(236): unsure at all n locations; Clone ID: LIB3149-057-Q1-K1-A5
gtttttaactaggggtggaactggataattggattttgggtttggccattaatgcaatagctgtgggactcattatggcgttttcatgttttatgctgaatcatgttcctttatattcaatagaattccagattttatcaaaaaaaccatancagaaaaaataaaaagcgtcaaaccatagaaaaaaaaaaatgttgatgacaaaaacagatgaagacatattgggtgatgatgac

SEQ ID NO: 35706 - DNA, 322 bp, Gossypium hirsutum
  Clone ID: LIB3149-057-Q1-K1-A6
aaaccgcaaaacctcggaaaccaaagaagtttttctttgcctgtatgattggattatgtatgtccaacgatacattcctgtccatctgcaacgagcccacgctacggctattcgtagagttttgtgagtcttctctctctattttcttttaccttcctgcatcggttgagtttcgatgaatggttgcttattcatgccaatttatccatatttctgggtttcatcgtttgcatttcttcccatggcccttttttttctgcgaatgtaatcagccaatgttggttactttgatatggaccatgaaatttgagtgtttcgtgct

SEQ ID NO: 35707 - DNA, 338 bp, Gossypium hirsutum
  Clone ID: LIB3149-057-Q1-K1-A8
acgcgtccagaacatatgagagtggctcatcggaaactaatgctgcactggaatttgctgtaaattcacttgaagttgaaaacgttttcatcattggtcatagctgctgtggtggcattcgtgccctcatgagtatgcaagataaagcggaatcaagtagctttatccggagttgggttattgtcggaaagaatgcaaaactaagtacaaaggctgctgcttcaaacctcagttttgaccagcaatgcacacactgcgagaaggaatcaatcaacaattcattgttgaacctgcttacttatccatggatagaaaaaaaagtgaagaaagggatgctt

SEQ ID NO: 35708 - DNA, 327 bp, Gossypium hirsutum
  Clone ID: LIB3149-057-Q1-K1-A9
ctcagtttttattgaaaaccctagacctttcaacgaagtagcagagccgcagtgtctctgtcaaatatccgaaacaagaatggctgtcacattcaacgatctgggttctgctgctggcttgaagaagctggatgagtatctccttacacgcagttacatctctggataccaagcttcaaaggatgatattaccgtctacgcagctctatctggtgccccatcatctagctacgtcaatgtttctcgatggtacaaacacattgatgcccttttgagaatctcaggtgtttctgaagaaggctgtggtgtgactgtagacggatttgc

SEQ ID NO: 35709 - DNA, 111 bp, Gossypium hirsutum
  Clone ID: LIB3149-057-Q1-K1-B1
ttttttctcatatggtatttgtgttttttatttattcgttgttgtatttatatttgatagaaactatatgttttgatacctataaataacaatgctaattttttagttttt

SEQ ID NO: 35710 - DNA, 342 bp, Gossypium hirsutum
  Clone ID: LIB3149-057-Q1-K1-B10
ccggaacattgtaaacgtggaccagctgatggagattggtttcatagtgtactcaattggcaagccacttgatgcatggctcaaggacatgcctgcagtggcataaatgatgcatgcagaggttatcgatgcgcgtcaatgtcagtttgattctttactacctatctttttgacaagttttattgtttccttgctttcccttccccatggtagccaagcatttgaaggcagtaaacggctcttcgttgtgccacacattgtattcaataatatttaccatctactctgttgtttgttagaaaacttgatattatttttggatttcatctaatttcatattca

SEQ ID NO: 35711 - DNA, 395 bp, Gossypium hirsutum
  Clone ID: LIB3149-057-Q1-K1-B11
gtcacatcagagtcggaaggcaggtggttaacatcccatcctttatggtgagggttgactcccagaaacatatcgacttctctctgataagtccgttcggaggtggccgtcctggaagagtgaagagaaagaatcagagagcagctgccaagaaggccgctggtggagatggcgatgaagaggaagacgagtaaaccttaagctagtattggcaatagggcactcctaaaagagcctctgatgggaacttaccatttcctacattattagacatggtttgagttttgtttcaagaccttttatgtagtggatgttcgcatttgtatttgtctcggattttatgttacattgagcaattttgttattttgagattaaaattgttaaaatataattc

SEQ ID NO: 35712 - DNA, 325 bp, Gossypium hirsutum
  Clone ID: LIB3149-057-Q1-K1-B12
cgctccttaaaacactcttagaaggagtttaaatgactgagaagcagcttggagaggtatttagaaagtttggagtggaaaaattcgatcctagaaatgaaccatttgatccacacaggcacaatgcggtattccaaataccggataattccaagcctcctggcacggttgctcatgttttgaaggcaggttacatgctctatgatcgagttattcgaccggctgaggttggtgttactcaagcaacggatgatggtgcaaccgagaataacacaggtgacaaagtctctgatgtttgattgtaagttaagttgagttattaatg

SEQ ID NO: 35713 - DNA, 281 bp, Gossypium hirsutum
  unsure (1)..(281): unsure at all n locations; Clone ID: LIB3149-057-Q1-K1-B2
ccagtcttgatcctttacggncagaacccctgtgttgagggctactaaactcctgggggttattttggcaaagcaatcaatcctttggacctgctaaagggtaaccttgcaaaatggtaaatcgagttatggcaggatactacttcgcctggggggtgaacggggtatctctgatatttttgtcaaactgcagtgcggttatctgttgctgaaacttcactagtttaaccatcatataataaggtctagttcatacgttgcggcagaacaaagagttaaag

SEQ ID NO: 35714 - DNA, 342 bp, Gossypium hirsutum
  Clone ID: LIB3149-057-Q1-K1-B3
ctaagtgagaattctaggtggtggaaggatttagactttcaaagaaagttgccatacgcaagagatagagtggttgaaggctatttttggatctcaggagtgtactttgagccccaatattctcttggtagaaagatgttgacaaaagtgatagcaatggcatctattgtagatgatacatatgactcatatgcaacatatgaagagctcattccctatacaaatgcaattgagaagtgggatatcaaatgcatagatgaacttcctgaatacatgaaaccgagctacaaagcactattagatgtttatgaagaaatggaacaactggtggctgagcatggg

SEQ ID NO: 35715 - DNA, 239 bp, Gossypium hirsutum
  Clone ID: LIB3149-057-Q1-K1-B4
cgattgagaaggtggggtctaccgggggtaggacttccaagcctgtggttattgctgactggtggccagctttaaaaaaggccttattgaattgtgtttccttcataatatctggtctgtttaggctccttttttttatgctatgctgcttctatggctactgcgttttggtgttttttaagaagttgcttgatgtagctttttcattaactgccataaataagataggctttattttc

SEQ ID NO: 35716 - DNA, 220 bp, Gossypium hirsutum
  Clone ID: LIB3149-057-Q1-K1-B5
cacgccttccggtgccaaaaaaaaaaatttaactaaaaatttttttttttaaacaaaaaaaaaaaaaaaaaaggaagggagattaaaaaaaaagactaataaaataaaaaaaacctaaaaaaaataaaaaatataaaaaaatcaatattttaaaaaagggccgccccttttaaagactcaaattttacttccccttcattccaaggtaaatgtttttttt

SEQ ID NO: 35717 - DNA, 239 bp, Gossypium hirsutum
  Clone ID: LIB3149-057-Q1-K1-B6
cgattgagaaggtggggtctagctgtgggttgactttcaagcctgttgatattgctgactgtgggcgagctttgaaaaagggcttattgaattgtgtttccttcataatatctggtctttttaggctccttttttttatgctatgctgcttctatggctactgggttttggtgttttttaagaagttgcttgatgtagctttttcattaactgccataaataagataggctttattttc

SEQ ID NO: 35718 - DNA, 372 bp, Gossypium hirsutum
  Clone ID: LIB3149-057-Q1-K1-B7
gtcaggcgggattacccgctgagtttaagcatatcaataagcggaggaaaagaaacttactaggggatgcttaaattttgacggcacccccaacctacacatgttatttgcttttctggattttgtcactgatctgatgtttttttttaatgcttaaaacatgtctgaatttgagaatttttaatctttagtaaaacaaaccaaattttccataaaaggaaaagaacagtaccagagattttcaggatctgattttgtatttgttttataatattctaagtaaagcttgtacaaaaatgaaattggataacttcaaatttggacaaggtggacggtctaaattaatttaaatttttaaatatttcatatggt

SEQ ID NO: 35719 - DNA, 404 bp, Gossypium hirsutum
  Clone ID: LIB3149-057-Q1-K1-B8
caagcagcagcagcttgtgtcagagcatttatcaccagaatcacctcaaggagaaaattctaaacccgagactgaaaaagttgttaactcttcagggaaagatgttaaaaaagtagataccctcaggaatacacgaagaaaccagaaacagtctttcccgacgtggatgatgttgttgcttgtttccatctttggtattgtaatggcgttgccactgcttcaactttgatataggtgtcacaacatggaaaaaaaattgtagtgagtggttataacagtctctactttagggaatccttttaaatgctccaaaggtttgctctgtactagaaattatgtatagggggtttggttccttgggagggagggtcagtggatcttgactgatgtttctactatgttaa

SEQ ID NO: 35720 - DNA, 271 bp, Gossypium hirsutum
  Clone ID: LIB3149-057-Q1-K1-C1
ctagaggtaccgcgtatgcgaggcacgagatgagttgtacaagatgttgaatgaggatgaactgagaggtgctgatttgctcgtatttgtcgacaaccaggaccgtcgcactgcagtgaatgctggcgtaataaccgatatgctagaacatcattctattcgctagcgccacgtggatattcagagtacgtgtgcaacctgtggagaaggtctctattagggcacagattggatatccaataacattgttcgtgacgcatgacaaaggatc

SEQ ID NO: 35721 - DNA, 270 bp, Gossypium hirsutum
  Clone ID: LIB3149-057-Q1-K1-C11
gattccccttttacttcttcaaataagtttataggcaccataaccatattagtgagaaatgtaattattgtattttatttctccattgttgttctcatatatgtatatatagtcgttagccatagtcatagatgatatgccatcaacgaggcctccaatcccccccccccaaagatttttgtattctgaagcaagagtaaaccatattcttattaacacttaatcaaatttcacgaggtagttttgtcctcgtagtagattgcaagaacc

SEQ ID NO: 35722 - DNA, 432 bp, Gossypium hirsutum
  unsure (1)..(432): unsure at all n locations; Clone ID: LIB3149-057-Q1-K1-C12
taagcgctgccattaagacgccatgtccggtttgcttgccatttttgcttgaaagatcaaaaccagccgttaagttcaatctgtggaaaaggagaatttttcttctgttatttcatgtaagcaaatgaatgccagtggttgaaaatcttataacatatatcacgaacatcggcaaaatggtttcttagcctcgaacccggagataactcgtacaccgggcaatattcttactctccacattgaagaaatttcttttctaattatgcatatccatatatgtaaccgagtatagagtcgtactttgttatgatctttgctgatcgtgaggtcaataattgcgaaaatgtactgaaaaagaaggtaaaaattccatgtatcatgatcaatgctncgcaagaatatgtaaacactgattagtaatatatgcttttt

SEQ ID NO: 35723 - DNA, 392 bp, Gossypium hirsutum
  unsure (1)..(392): unsure at all n locations; Clone ID: LIB3149-057-Q1-K1-C2
ggttatggcggtggatccggtggatatggtggagggggaaggagaggcggttatggtggaggaggcggtggtggtggtggtggaggccccggatgttataagtgtggtgagatgggccatttagcacgggactgtgggcagggtggcggtggcggtggaggcagatatggcggangcggaggcggtggcggcggtgcttgttacaactgtggaggctctgggcatttcgctagggagtgccccaacagtggtcgctaattttgaggagggatttaaatgtgtcactcgcatctcctccgatccatcctttttttcctcttccgctactggttctgtcggtttggttattattgtatggnttgctttttatgttttccttttccagtttatgc

SEQ ID NO: 35724 - DNA, 217 bp, Gossypium hirsutum
  Clone ID: LIB3149-057-Q1-K1-C3
ggggatcaccgacacttgccaaagctccattgcttgtagtgcttattttgcaggttggaggaggatggccacattgttattttatcatattattaccgagtttagaacaataaaaaatggatggctttatggcttcttatgtatttggcactagaaattgatggcttatatcttaaattatttttatttatacaatgattgggattgtttctttttg

SEQ ID NO: 35725 - DNA, 280 bp, Gossypium hirsutum
  Clone ID: LIB3149-057-Q1-K1-C4
gcttatcaccttcaatttccaaattataatgtttgtgataagcacaagcagcaattgggaggggggcggacactttattattttatcatatcataacctataaataaaacaattaaaactcactggctctatgccttattttaaattccccactataaaaaacatagctgatatcttaaataatttttataaatacagtgattgctatactatcttttttaaaaaaaaaaaaaaagtgaggtcactctaaaagatccaaattttccaacccatacttaca

SEQ ID NO: 35726 - DNA, 294 bp, Gossypium hirsutum
  Clone ID: LIB3149-057-Q1-K1-C5
taaaccccctcccaattaaatggcggcgtaaccttgccctgaattccatgcctcctgcaaaggttgtttcacctcaaactgcattccatgaggagaaacctgaagaagtggtcaaggtgggagaaattgcaacagaaaaggtaccggctgttgctcctgcagcaaaacctgttgctgaagaaccaaaggaagccatgcctgaagcagcatccggagaaccccaggctccagaaactgaagccacagttgaaactgaatcaaaggaggtggttaaagagcccatagctgtgactg

SEQ ID NO: 35727 - DNA, 247 bp, Gossypium hirsutum
  Clone ID: LIB3149-057-Q1-K1-C6
gacccacgcgtccgaaataaaaaaaaaaaattaaaaatttaatttttttatcatttaaccaaaaacaaaaaaaaaggaggccgcgccatcttaaaaagccaatcctccaaacacgggcaggcaaagagaaaccaacactattttcttctcccacacccaatacactgacctcccttttaaaacctcatcactacaaaaaccaagccctttccaaaccaaacccctttgcacaacatccccaataccc

SEQ ID NO: 35728 - DNA, 400 bp, Gossypium hirsutum
  Clone ID: LIB3149-057-Q1-K1-C7
gaaatcatcaagtttggcagcctttaaattcaaatctgaaggaacctcaaccggaaccgaaggagaagggttggaaggttgggaggtggtgatgaaagagaggttgttgaatgtgaaggaaatgatagggttctccaaagagttgctctcatggctcgatgacatgacttctgcaagtgatttgcaagaggctttcgacatcattggtgccttgggtgatgttttatcgggtggattttcccggtgtgaggattttgtccaagctgctattgctgcaggaaaaatgtgagtttccttttgatgcttgtattcggttaccacttaagtttgactttttggaactaataagtcaaggttgccatgtaaaagtaaaacttgctcttttatgattctttaatgc

SEQ ID NO: 35729 - DNA, 243 bp, Gossypium hirsutum
  unsure (1)..(243): unsure at all n locations; Clone ID: LIB3149-057-Q1-K1-C8
aaaaaaaaaaaaaaaaataaaaatttaaaataaaaaaaaaaggaccaacaagcacgagagagccaaacataaaaacgcgaccatccaaaataccaanctctataacaataaaaaataaatgccattcacgccccttatacatacaacacctcaactggaaaaaccatatcttaacccaacttaattgatacaaagaacatcaatctttcgccagcaaaaaaaaaaacaaaaagccgcccccct

SEQ ID NO: 35730 - DNA, 354 bp, Gossypium hirsutum
  Clone ID: LIB3149-057-Q1-K1-D1
catatttggaggttttgcttctcaaccttgggagaggcatggtgatttctatggggacatgaagacttttctctttcagctctacccaaaggcatctattttcaggccaactggagcaaacagtaatttgcaatggtgtgctgtgaacttcagttccgagaccatccctaatggcattggttttggaggacgcataaatcactttggcatgtttctctcagcaagctttgatcaagggcataccttttcctgtaccacttttaatagcccttgcctctcgaagaccgccaaaatctgcccagaagttatagaattgctgggagttgttagaaaaggactggaacaagaaacaac

SEQ ID NO: 35731 - DNA, 274 bp, Gossypium hirsutum
  Clone ID: LIB3149-057-Q1-K1-D11
cttaaatatttcagaggccaatgttaattttcttgtatatgatcaatggactggaaggaaaagactgtacaggtaattttacattctttttaaagatgaataccatagccaaaattaagtgtttcataggagaatattggtttcctctattaaattacttgaatagtttagctaatgctagggtaactgataaattgcacaatcattgatgttaataggctgtcagccctatttttgtttttatactatctttggcattccactttcatgcttt

SEQ ID NO: 35732 - DNA, 345 bp, Gossypium hirsutum
  unsure (1)..(345): unsure at all n locations; Clone ID: LIB3149-057-Q1-K1-D12
gttgaatggaggatcatggcttcgacctttttacctatagactttttcttttttgttatgaatcagataaagagtgcttctatgagaatattttgatatctcttgggttttcttggtgcatgcccaaatttataggagtcgtagttgcatcacattgtttaagttgcacactggttcaacttgcagtnaaaaaaaaaaaaaaaaaaaaaaaaaaaaaaaaaaaaaaaaaaaaaaaaaaaaaaaaaaaaaaaaaaaaaaaaaaaaaaaaatacaaaaaaaaaaaaaaaaaaaaaaaaaaaaaaaaataaaaaaaaaaaaatttnaaaaggggggcccttttaaaaa

SEQ ID NO: 35733 - DNA, 273 bp, Gossypium hirsutum
  Clone ID: LIB3149-057-Q1-K1-D4
acatcccacctgaactcacggggagggtggcttttaaaagcaattccccccccattccaaaccaacttattcactgcaaaaaccctgtttacacccaacttaattgcctcacaaatcaccattcattcaatagatagaaaattaacaaacatgcaaatacctatttcccttataaacacttccataatcttaatgccgaaagagccgcccattgaagagtttcacaatgcacaccagataatctattaacccccactaaaacagtttcactag

SEQ ID NO: 35734 - DNA, 189 bp, Gossypium hirsutum
  Clone ID: LIB3149-057-Q1-K1-D5
ttcttacattagaaggattttgttttaagaaatggaaatacttggggggggggggtttttttccataaaattccaaatggaatcaaggttaatgttttaaattaaaatccattaattttaatattaactttggaggtttaattaaaaaaaaaaaaaaaaaaaaaaaaaaaaaaggggcggccgttttaa

SEQ ID NO: 35735 - DNA, 412 bp, Gossypium hirsutum
  unsure (1)..(412): unsure at all n locations; Clone ID: LIB3149-057-Q1-K1-D6
ggaaatnngggncgaccacgcgtccgtgaaatgggtgcaaaataactccttgattttcaatttctgcaatgatgctaagagatttgctcagggtctacctctagagtgcaatatgtcttaaaagacttaaaagagcctattagatcaaattgttttagagattaatattcaattatattcttttattattttttctttattcaaaacgaggtcatgattcttttatcttttgaaatttcccatcactctgtatgtgataagttattatgaaaaagatacgaaaaattagaaggattttaatgtcctttaaagagaatggtggtgtacagtctccttcgttcctagcttttcacatagaaaaaaaaaattgttttatatccttataattattatttccatacatccatcacgt

SEQ ID NO: 35736 - DNA, 266 bp, Gossypium hirsutum
  Clone ID: LIB3149-057-Q1-K1-D7
aaactatgtgagactagttgagcttgagattttaggttatgaattcattgattttcctctctttttttatcatcttttttatgaatttggttcgtgtgggtcgatatggatggtgataacctcgggcgatacgcacgcacgcctcttcccagatgactcgaaagattgctggtattttgtatttgaatgttgtattcatatatgaacatttgaataagtcagttggaaatggttttatctggttatgaatatgcattttgagtttt

SEQ ID NO: 35737 - DNA, 387 bp, Gossypium hirsutum
  Clone ID: LIB3149-057-Q1-K1-D8
cctctcccaattttttcttcactttgaggtttgagcagatcggatggcaccaaagaaagataaggcccctccaccttcttccaagccagcaaagtctggtggtggcaagcaaaagaagaagaagtggagcaagggaaagcaaaaggagaaggtgaacaacatggtgttgtttgaccaggctacttatgataagcttttatctgaggctcctaaatataagctcatcactccctcaattttgtctgatcgtatgaggattaatggatcccttgctaggaaggctataagggaattgatggcaagaggatcgattcgtttggtgtctgcccattcaagccagcagatttacactagggcaaccaacacctagatgttttgttatagttt

SEQ ID NO: 35738 - DNA, 292 bp, Gossypium hirsutum
  Clone ID: LIB3149-057-Q1-K1-D9
aactttgttaagcttgtgacttgttatgataacgaatggggttacagttcccgtgttatggacttgatccgacacatgtctaaggcttaagtgagtgagtgattgtgctttgtgtatccaagctttagcaatttttaatttagaagagatgttatgagagaataaacgaattgtacggagcatatttttgtgtgaagaagggttgtttcagttttattacccaagtacttgaatgtttcaagtttcattgcaaaaaaaaaaaatacaaaaaaaaaaaaaaaaaaaaaataat

SEQ ID NO: 35739 - DNA, 218 bp, Gossypium hirsutum
  Clone ID: LIB3149-057-Q1-K1-E1
ctgctctgcttcctttccgtaagcccctctcatttggatcatttttagccacttatcagcctccaacaaataattgtcttcatgcaagtggctgcttctttctcacttggtttgatttattatgtagtgtttcataactggcggcttcactcactgggtcttgtatgtgttttcaatggtatatttgggcatgttttagtaacagcaactgctcctta

SEQ ID NO: 35740 - DNA, 119 bp, Gossypium hirsutum
  Clone ID: LIB3149-057-Q1-K1-E10
tgccaatcccttcgcgtgctatacaaaggccgacatccccttcacagtccacctgagcaaggacccctgacggcattaaccgcgtgtgggtacccactgccgtcactgccagccctacg

SEQ ID NO: 35741 - DNA, 152 bp, Gossypium hirsutum
  unsure (1)..(152): unsure at all n locations; Clone ID: LIB3149-057-Q1-K1-E11
tcggtnntatttactaggggttcgaaccttgattatttggattttcgtgttttgccatttagtgcaatgagctcgttggactcatntatggcgttttcatgttttatgctgaatcatgttcctttatattcaatagaattccagattttatc

SEQ ID NO: 35742 - DNA, 336 bp, Gossypium hirsutum
  Clone ID: LIB3149-057-Q1-K1-E12
gggccaaattaagaccggagctcatgcaggtctgagcgttagccaagtacaatcagcttctgcgaattgaggaggagcttggtgcggaagctgtctatgccggagctagcttccgtgctccagttgcaccctattaagatgcttgtttagatgataatgtgctgagactggatgcgtgcggcagagcttcagtggtttgttgagaccctaaaacatatttcaataattttgatagcaattttgtacttgtgttcagaattatatcgatctccgtgttatttttgttggactttgcctgcatatatgctcgctatattcataaatacatgatgcttg

SEQ ID NO: 35743 - DNA, 285 bp, Gossypium hirsutum
  unsure (1)..(285): unsure at all n locations; Clone ID: LIB3149-057-Q1-K1-E2
aactttttaagcatgacgctggaattgttggagcttgacaggtacggatgaagcagatgcatgagctcgatgggttgatttcatgcaaagcaagtgtttcggagttctgcacatgatgaaaagcagccataaagcttggatattggtgcttaaaagtaaatcatatatgcagctgagcacacaaggtaaggtatttgtagaggaagatctaaatatataattgaaagttacaaagttgatagtttgtctgatactattctctgactttatctgctttnnanaaaa

SEQ ID NO: 35744 - DNA, 275 bp, Gossypium hirsutum
  Clone ID: LIB3149-057-Q1-K1-E3
aaatatttatgcattaggcgggaaatgagagagattccatgatatggttgaggaaatcgaaagagcttggataataaagatgatggaaagcaagtgtttcggagttctgcacatgatgaaaagcagccataaagcttggatattggtgcttaaaagtaaatcatatatgcagctgagcacacaaggtaaggtatttgtagaggaagatctaaatatataattgaaagttacaaagttgatagtttgtctgatactattctctgactttatctgca

SEQ ID NO: 35745 - DNA, 181 bp, Gossypium hirsutum
  Clone ID: LIB3149-057-Q1-K1-E4
aagatcatcgacccgcaaaatttcggagttctgcacatgatgaaaagcagccataaagcttggatattggtgcttaaaagtaaattatatatgcagctgagcacacaatgtaaggtatttgtagaggcagatctaaatatataattgaaagtaacaaagttggtaggtcgcctgatactat

SEQ ID NO: 35746 - DNA, 211 bp, Gossypium hirsutum
  Clone ID: LIB3149-057-Q1-K1-E5
aacttaaaacttaagggtgaataacaatttccgatcacacctgtttgtgaggggatttgttccacatttttttaccagacgccttctacgttggccttgtttggtcttggtgcaaatggtgtgcgtgtttttaatgcctgtatatattccatttcattttgatttttatattcagtgttttccggataccattacataaaagtttttatga

SEQ ID NO: 35747 - DNA, 400 bp, Gossypium hirsutum
  unsure (1)..(400): unsure at all n locations; Clone ID: LIB3149-057-Q1-K1-E6
ctccgtcgcccaattccccaaacaaagcatatcgatggcgtctcctcctggaccatactccggcaccagcactctcgctctcgtggctcgtgcatctgctttctcttttggactcgtttatggtagcattaagctcaagtatctcaaggccaaggcaaggtctcaaaggaaagctgaagcaaaggctcaccactgaagcaggggtggtttttgttcatagttggtttgcatgagtgaattgagtttggtgtaggaataaagcatatcaatggtattgtaccagattttcatttcggcttaaagcttctacggacaatgacattcttgtccncaaatttttttagtattacgaacttggcatttcaagtattagtttttcggttggcaatggcactactga

SEQ ID NO: 35748 - DNA, 241 bp, Gossypium hirsutum
  unsure (1)..(241): unsure at all n locations; Clone ID: LIB3149-057-Q1-K1-E7
ggggccgacccacgcgggcgatatttcgactaattcttcaaatttattataataaccccgacgactccngaaccgagcggctgaattatcactctcactctcatcacacgagcatctgctttctcttttggactcattaatagtaacattaaactcaagtttcttaaggccaaagcaaagtctcaaatgaaagctcaagcaaaggcttaccactgaatcaagggagatttttgatcataat

SEQ ID NO: 35749 - DNA, 266 bp, Gossypium hirsutum
  Clone ID: LIB3149-057-Q1-K1-E8
aacaatttctgctgctttttcattttcacttccgtctgaatgtgtgctctcattttcggatttaaattgcaagtagggaggagtgacggaagatgaatatgtagtgtaggattttacgaatataattggtgttatgggggatctttggtcgggttttcgacttttgctttttgttggtatggattttgctggctttagtgaaatccttatgtgattgctctatatggttttgaatatgaaattcttgagaagaatattggaattac

SEQ ID NO: 35750 - DNA, 350 bp, Gossypium hirsutum
  unsure (1)..(350): unsure at all n locations; Clone ID: LIB3149-057-Q1-K1-F1
gcaaacccgaacgagttcttgagcttagattgagcttggacagtcatccagataatacaaggatgaaaaacaagttttagaaatgccttcaattgccggctagaatgatgatgtttttgtaatcaactttggccgaccatcaccagcacgacccagcgagtatcggaactccgaggccaggatgtacaatgatgtcatggaaactttcttggaatgaaatgtattangattgtggaagaggacataggtgtgttcttttttatgttcttttatgaatgtctcttaaagccactaaactcaactttctaatcatttgttgtagtttatccttaatgtaagtcctttttaaa

SEQ ID NO: 35751 - DNA, 310 bp, Gossypium hirsutum
  unsure (1)..(310): unsure at all n locations; Clone ID: LIB3149-057-Q1-K1-F11
acccacgcgtccggctgatcagtcacttattgctttttaggtttttcactnccactgcaagctcaggtgggccggcaacttacccaattagacttggcctggctttgaacttctcagttttctactatgagatattaaattctcccgagagggcttgtcatctggctaaacaagcatttgatgaggctattgctgagcttgatagccttaatgaagaatcttacaaggatagcacccttatcatgcagcttcttagggacaacctcaccttgtggaccttggatctgccatatgaaggaggtgagcaatc

SEQ ID NO: 35752 - DNA, 296 bp, Gossypium hirsutum
  unsure (1)..(296): unsure at all n locations; Clone ID: LIB3149-057-Q1-K1-F2
cgggattaaatattctgctctatcntggttacatatattccttcttaacccctcctcttctccatatgttaattagttccttcataaatattctactattattggaatgtaattccacttaataaagtgtgtgaatttgtatggtatcttttttactttctttcaactttgcatctatttagtaaatattaataaggttaaattttgttattagcccctaaaaaaaaaaaaaagataaaaaaaaaagacataagagagtaatattttatgatattatataaataaaaaatgggggc

SEQ ID NO: 35753 - DNA, 380 bp, Gossypium hirsutum
  Clone ID: LIB3149-057-Q1-K1-F3
ctagagaagtcaaccaatgttactaggcctatgaacactccattaagctcaagaagcttgagggtagaaaataccttgaatcccaaatcaaatccacaaaagaaattaaggcaacaagatccttatggtattttcaatatggaagggtctattccaagggacattggtccttataagaaccttgccatattcacatcaagctctatggacccgaaatgcatttcgagttcaagttctattcctttacttaaaaagctaagggtcttgatgagcaatctccagaaagtggatttaagggcattaacttaccagcagaaattagcattttggatcaacatgtacaatgcctgtattatgcatgtatagtatggaaatgaagc

SEQ ID NO: 35754 - DNA, 325 bp, Gossypium hirsutum
  Clone ID: LIB3149-057-Q1-K1-F4
ccaatatcactagactttttaatattccaaccagcccaagaagcagaggggcgtaaaattccttaaaacccaaatccaatccacaaaagaaattaaccacaacaagaaccttatggaatttgcaagatggaagggtcaattccaaggaacattgcatcttataagaacctagccatattcacaacaagctctatggacccgtaatgcatatcgagttcaagttctattcctttacttaaaaagctaagggtcttgatgagcaatctccataaagtggctttaagggcataaactcaccaccaacaaataacatttgcaacaacat

SEQ ID NO: 35755 - DNA, 355 bp, Gossypium hirsutum
  Clone ID: LIB3149-057-Q1-K1-F5
acgccttcggattgattattacccgagattggaaccttgacaggttccgaccctcttaattcagggctctctgacatgtacagattttgatctggaagattgaaattcctttttttttttttgggtgagagaatgaactgtattacggcttttttttcttagctattctttttcttggtagcgaaataagagtgaattcggaatgaggggtaggttcatatagctgatgatcgattgagtcaataacacgccgccgccacgttttgtcgttgagacatctttgtttcacatctcgagctggagaagccattgcttctcgtcgatattccaagcacggtatcgatgtacgagaact

SEQ ID NO: 35756 - DNA, 355 bp, Gossypium hirsutum
  Clone ID: LIB3149-057-Q1-K1-F6
gaaatgggaccatcgatttccctgaatttctcaacctgatggcaaggaaaatgaaagatactgattctgaggaggaacttaaagaagctttcagggtgttcgataaggatcagaacggtttcatatctgctgccgagcttcgtcacgttatgacaaatcttggcgagaagcttaccgacgaggaagtcgatgagatgatccgtgaagccgatgttgatggtgacggccagatcaactacgatgaattcgtcaaagtcatgatggccaagtaaggatctctccaaccaaaaaaaaaaaaaaacagagtagataaagttgcagagatttcaatctcgtaattggtcgtgggtcgtcg

SEQ ID NO: 35757 - DNA, 378 bp, Gossypium hirsutum
  Clone ID: LIB3149-057-Q1-K1-F7
gaaagaagctaggataatcatagtccaaatattccaaggccttgtatacttgaacaaaagagcacaaaagattattcattatgatctgaagcctggcaatgttctctttgatgagttaggtgtagcaaaagtgactgattttggtcttagcaaaatagtagaagatgatgttggatcccagggtatggaacttacatcccagggagctggaacatattggtacttgcccccggaatgctttgagctcagtagaacgcctctgatttcatcgaaggtggatgtttggtcagctggtgttctactttaccaaatgctttttggtaaacgcccctttgggcacgaccaaacgcaagaacgaatattgcgtgaggacacaat

SEQ ID NO: 35758 - DNA, 360 bp, Gossypium hirsutum
  unsure (1)..(360): unsure at all n locations; Clone ID: LIB3149-057-Q1-K1-F8
gtttttcagtagtaaagagcaaaaaacagtttggaaaccaatggaagggaaagaagaagatgttagattgggagctaacaagttctcagagaggcagcctattgggacagcagctcagtcccaagatgataaagattacactgagccaccaccagcacccttgtttgagcctagtgagttgacctcatggtctttttaccgagctgggatcgctgagttcgttgctactttccttttcttgtatatctcggtattgaccgtgatgggagttgttaaggacaaaaccaagtgtacaactgttgggattcaagggattgcttgngcttttggtggtatgatctttgctcttgtttactgcac

SEQ ID NO: 35759 - DNA, 278 bp, Gossypium hirsutum
  unsure (1)..(278): unsure at all n locations; Clone ID: LIB3149-057-Q1-K1-F9
gggccgacccacgcgtgcggtttttcagtattaaagtgcaatttacagttgttaaaccaacggaagggaaacagcaaggtgttatattgggagctaacaagttctcacaaaggcantctattgggacagcagctcagtcccaagatgatatagattacactgagccaccaccatcactcttgtttgagcctagtgagttgacctcatggtttttttaccgagctgggatcgcttaattcgttgctactttcctttttttgtatatctcggtattgacc

SEQ ID NO: 35760 - DNA, 215 bp, Gossypium hirsutum
  Clone ID: LIB3149-057-Q1-K1-G1
tgcctgcaacaccggagggggtatattgttccacatccattcctttcactgcccgaagaatgacaacaacgtgactatgaaaacccgtgcgttccttaactgaatcgccaaggatcacaatcacattgctccagctggcaataacatcaaaattctatcaccaaccgcacttctcatcaaccacacatgccaaatgacgaacaagactctcacaa

SEQ ID NO: 35761 - DNA, 362 bp, Gossypium hirsutum
  Clone ID: LIB3149-057-Q1-K1-G10
attggaaaagccctaatttgacagctctctcagtctctcattttgcctgaaaaccatgtcgaggagaaaggttagggagcccaaggaggagaatactacccttgggccggctgtacgagacggcgaacatgttttcggggtggctcacatttttgcttcatttaatgacacatttattcatgtaacagatttgtctggaagggaaacaatggttcgcattacgggtggtatgaacgtgaaagctgatagggatgagtcttccccttatgccgccatgcttgcagcacaagatgtttctcaacgctgcaagggagtgggtattacagcccttcatataaagcttcgagctactggagggaaca

SEQ ID NO: 35762 - DNA, 291 bp, Gossypium hirsutum
  unsure (1)..(291): unsure at all n locations; Clone ID: LIB3149-057-Q1-K1-G11
aaaagatcaccatttttatccttccggttgtactttcagttttgttttcgattttgtttagattaaatggtcctctttttaagtaaaagctgcaatcaactttcaaactttagtttcttttctttttaactgaggaatatttatagatttctgtttgaacttttgaaataactttctagctactgttttgatgaaattttgtgggcttataatgaaaaactatcaattatgcggttgnnaaacaatacatataatgtttgcttccaatatagagatacttactgatcaaaa

SEQ ID NO: 35763 - DNA, 302 bp, Gossypium hirsutum
  Clone ID: LIB3149-057-Q1-K1-G12
attgttttctctgtttgccatttgccttaatcatcttcctctttctttaaaacctcttgctatttaatttccgactaaacttgcgctgaattccatggctactgcagaggttgtatcagctcagactgcaatccatgaggagaaacctgaagaagtggtcaaggttggagaaattgcaacagaagaggtaccggctgttgctcctgcagcagaacctgttgctgaagaaccaaaggaagcagtgcctgaagcagcatccggagaaccccaggctccagaaactgaaaccacagttgaaactg

SEQ ID NO: 35764 - DNA, 317 bp, Gossypium hirsutum
  Clone ID: LIB3149-057-Q1-K1-G2
gggaaggctgccaaggatccaaacaagccaaagaggcctgctagtgccttctttgttttcatggaggagttccgtgagcaatacaagaaggatcaccctaaaaacaaatccgttgcggctgtcggcaaagctggtggagataaatggaagagcttgtctgaagctgaaaaggcaccttatgtagctaaggcagaaaagcggaaggttgagtatgaaaagaacatgaaggcctacaataagagacaggctgagggtcccaaaaacgaagatgttgagtctgacaaatcagtgtctgaggtgaatgatgaggatgatga

SEQ ID NO: 35765 - DNA, 341 bp, Gossypium hirsutum
  Clone ID: LIB3149-057-Q1-K1-G3
gattagagttgggggttttcgggtttattttttggttgaatcaatagtaagcaaaagaaagaaatggcaaccgttaatgggtaccaaggaaacactccagtggccactagcactggatcgaaacatcctgcctccactgctaaaactgctgatgctcaatctgttcttaaaaggttgcaatccgagttgatggctttgatgatgggtggagattctgggatatcagcattcccagaagaagacaacatattttgcttggaaggaacaataacaggaagcacagacacagtgtttgaaggaacagaatacaagctatctctttccttctccaatgattaccc

SEQ ID NO: 35766 - DNA, 334 bp, Gossypium hirsutum
  Clone ID: LIB3149-057-Q1-K1-G4
aaacgaatatctcgaaattggatatgtaaaaacaaataatcaaaaatttctgattatacagaaaaaaagatcgagaaaaaagacgaggccaaaagagaaaaatacaaaagagaagagaaaatgaggatagaaatagcagaagcttgggatagtcttttacttgctcaagtaataaggggctccgtgttaataacccaatcaattcttagaaaatatattatattaccttcactgataatagttaaaaacattgcccgtatgttattatttcaatttcctgagtggtctgaggatttaacggatcggaatcgagaaatgcatgtaaatgcactat

SEQ ID NO: 35767 - DNA, 275 bp, Gossypium hirsutum
  Clone ID: LIB3149-057-Q1-K1-G5
tccggggtcgaccaagccgtcggttcaaacctccttccttccttcctcctccttcttcctcagccaagaaaacgaaaaaggaaagggctcccacaccatctttttcttcgaaattaagccaaacccatatgagaacaccccaatcgaagcagcgtttaaacttctcgtcaacacgaaacaacccccaacacccatctcctaacccaaactccattgcagccaaagaaaacccaccaggggaacacccagttgaagtcatcggcagaataagaaac

SEQ ID NO: 35768 - DNA, 309 bp, Gossypium hirsutum
  Clone ID: LIB3149-057-Q1-K1-G6
ttccaatctcagataaaagagccaatatttgggaagaaatctcgctcggagtttgcacttctatggaacaaagctgtggaccagatatttgtgccggtaattgagtccattagttcacttcgatggtagaaatttggagtaattttaaagtcaactattgatgcgtctattactacaaatcattgcgtgcattagcttgtactcagctgtatctctctaaatcttttgaacttaaaaaggaggaatgtatcctggggctatgctatgttgtattacataacataaaataatggtaaattctactttcat

SEQ ID NO: 35769 - DNA, 254 bp, Gossypium hirsutum
  unsure (1)..(254): unsure at all n locations; Clone ID: LIB3149-057-Q1-K1-G7
cgacccacgcgtacgntccaaacttacaaaaaaaagcctttatgtgggaagaaaccnagcacgnaggcgcggccgcgatcttacaaacctgcgcaccacatcaccgtaccgacaaatgactccatgatgtcagcatgacggtagaaataagaagtaatagcaaagccaacgaccgaagcgcccaatacgacacatcagcgcaagcaccaactggtgctcagcaaaataactcgaaagccttcgaacgtaaacag

SEQ ID NO: 35770 - DNA, 271 bp, Gossypium hirsutum
  unsure (1)..(271): unsure at all n locations; Clone ID: LIB3149-057-Q1-K1-G8
ntccaatcttatataaattaacttttttttggtaagaaatctaactcggagtgcgcaccgctatttatacaaacctgcccaccacatctctgtgccggtaattgactccattacttcactttgatggtacaaatttcaaattatttcaacgtcaactatttatgcaactattactacacatcataccgttcattagcatcgtctcaactatatctttttaacatctttcaacttataaaggaaaaatcgatccataggctatactattata

SEQ ID NO: 35771 - DNA, 366 bp, Gossypium hirsutum
  Clone ID: LIB3149-057-Q1-K1-G9
atttgcttaaaggagagcacaaagaccctgaatttctcaagctccagccttttggaacagttcctgtcactcaagatggagattatgttttatatgaatcccgtgcaatcataagatactatgcagaaaaatacaaatcacaagggactgatctactgggaaagacagtagaggaaaggggtcaagtggaaaattggctagaggttgaggcacacaatttcaacccaccaatttacgccttgaccctacatttgatgtttgcttccaagatggggttccctcctgatgaaaatttgatcaaggaaagcgaggaaaagctaggcaaagttctggatatttatgaggagaggctgtcaaaagacaagt

SEQ ID NO: 35772 - DNA, 348 bp, Gossypium hirsutum
  Clone ID: LIB3149-057-Q1-K1-H1
aaggttggggtgtccctccaaacaccctggctgaatattcacttaatcaatttggaaacatggatttctacgacatttccttaattgacgggtttaacatccccatggtgtttggtccaactaatggcggttgtcacaacattcggtgcacagcagacctcaagggacaatgcccgaatgagttaagggctcctggtgggtgcaataacccatgcacagtgttcaaaaccaatgagtattgttgcactcaagggtacggaacctgtggtccgacctatttctcaaggtttttcaaggaccggtgccatgattcatacagttatcctcaggatgatccttcaagcacct

SEQ ID NO: 35773 - DNA, 408 bp, Gossypium hirsutum
  unsure (1)..(408): unsure at all n locations; Clone ID: LIB3149-057-Q1-K1-H10
tccacgcgtccgaccatcaccacccaagcacccttacaagttcaagtccccaccacctcctcccgtttacaagtctcctcctccaccaccaccccattatgtctactcttcacctcctcctcctcaccactactaagtgacgacggctttgaccatactcctaggagaagagaagattgtgattcaaataaagccacaaaagatggtttgaaaagaaatctagagggaatcataaagaagaatattgcctagtctccacgtttgaagtgaataatgttagataaattgtgtgttattcggtggcttcactcgnatttatttctttatttctttttaaaagaataatatatgtaactgtgtattgtgtaatgcacccattttgcaaatgccatggttggtttttccttt

SEQ ID NO: 35774 - DNA, 282 bp, Gossypium hirsutum
  Clone ID: LIB3149-057-Q1-K1-H11
gcaggttctaaatccggccgatggggccatcagcggcgccgccgtgcccctcaccgtcctcggtgatcggagcaacgcaaaggtcgtccctttggtccgtttttgaaacgcttgaaggcctaaactcctaggcttcaaggccgaaaggagaagaagaagccatgccctgtcccgtcccgatttcggcgaccgaacaaggctccggcgacgggctttgcgggcgacctccggtggtctgacacgcgtggagggccagcgattggcgatcaacttgggtgggca

SEQ ID NO: 35775 - DNA, 136 bp, Gossypium hirsutum
  Clone ID: LIB3149-057-Q1-K1-H12
gtttagatcaatatgcagtcacggggaggtgctttgtattttcttgcatgtttgtctttgtaattctgtatgaattcaatgtgtcctatgcttttatttgtgttctaataaatatttgtaagtatgatatcgttca

SEQ ID NO: 35776 - DNA, 357 bp, Gossypium hirsutum
  unsure (1)..(357): unsure at all n locations; Clone ID: LIB3149-057-Q1-K1-H4
aaagaagagaagaaaatttccccttttttttttataaaaaaaatggcgtattcgggtgttctgaaaaccctaatcaggtcatcgcatttgggatctacgactcgtaatttcagccttgttagcagccaaatcagcaatcacactgcgaaatggatgcaggattcaagcaagaaatctcctatggagttgatcaatgaagtccctccaatcaaggttgaaggccggattgtagcttgtgaaggagataataatcctgctttgggacacccaattgaattcatatgcctngacttgaaagagcctgctgtatgcaagtattgcagcctacgctacgttcaagagcaccatcactagaaa

SEQ ID NO: 35777 - DNA, 142 bp, Gossypium hirsutum
  unsure (1)..(142): unsure at all n locations; Clone ID: LIB3149-057-Q1-K1-H6
catcccacacccctccacttctcgtaatttcagacaagtagcaggcaaaacatctatggctctgngaaatggatgcaggatacaagcaagaaatctcctatggagttgatcaatgaaggcccaacaatcaaggttgaaggcc

SEQ ID NO: 35778 - DNA, 344 bp, Gossypium hirsutum
  Clone ID: LIB3149-057-Q1-K1-H7
cgcagagttatactgcccattatattccctgccttggagcaaaatgggcataaccattggaaccaggttgtacagagcttgacgcttaatgttcgcaagattttttctgataccgatcctgagctattcgaggaatgcttgaacaagtttcaagaaaatacagaaaagcgggaagagatcaaaacaaaacacgaagcggcctggaagcgcatagaagagattgcggtatcaaatgctgcaaatggtgaagcagttcttgttcctcatgtcgtagcttcagaaacatcatgagtacccttggtgatttgactggactctagtcaagtgtctatttcttttatcgt

SEQ ID NO: 35779 - DNA, 118 bp, Gossypium hirsutum
  unsure (1)..(118): unsure at all n locations; Clone ID: LIB3149-057-Q1-K1-H8
ccgacccacgcgtccctatatccaagcgcctcccttttttttttctttttatcaatanggacataaggagttcgatcattttaatacatatctatactctcaatgaacacaagattta

SEQ ID NO: 35780 - DNA, 251 bp, Gossypium hirsutum
  Clone ID: LIB3149-057-Q1-K1-H9
ccttaatgtgggttttctggttttcgtgtaggattgtgccctttgatggcctggtaaagaatttctagtctttgtttaccggttgcatctatgtatggtttctctttgaatggaatttgcatatttacctaaaaaaaaaaaaaaaaaaaaaaaaaaaaaaaaaaaaaaaaaaaaaaaaaagaacataaaataataaaaaaaaaaaaaaaaaaaaaacaaaatatcaaaattaaaattctatataaaataaa

SEQ ID NO: 35781 - DNA, 77 bp, Gossypium hirsutum
  Clone ID: LIB3149-059-Q1-K1-A11
gccaacttcaaaaaaaaataaaaaatttatatattaaaacaaaaaaaaaaaaaaaaccgcacgactaaattttacaa

SEQ ID NO: 35782 - DNA, 371 bp, Gossypium hirsutum
  Clone ID: LIB3149-059-Q1-K1-A12
tgccatcgagaaccctcaggacatcattgttcaatctgcaaggccatatggtcagagagctgtactgaagtttgcacaatacactggttgtcatgcaattgctggaaggcacactcctggtaccttcactaaccagctccagacatcgttcagtgagcctcgtcttcttatcctcacagatcccaggactgaccaccagcccatcaaggaagcagctctcggaaacattccaaccattgctttttgtgatactgactcaccaatgcgatatgttgacattggtatccctgccaataacaagggaaagcacagcattggttgccttttctggcttgtagctatgatggttcttcagatgcgtggaacaattg

SEQ ID NO: 35783 - DNA, 401 bp, Gossypium hirsutum
  unsure (1)..(401): unsure at all n locations; Clone ID: LIB3149-059-Q1-K1-A2
gccaagatcttttggcgcactgttcgcggattgattcctcataagattaaggttttgaggcttcagaaggggcacaagtactgcttgttgggccgcttgtcatctgaggttggatggaaccattatgacacaatcagggagctggagaagaagaggaaggaaagggctcacgttgcatatgagaggaagaagcagctgaacaagcttagggtaaaagccgagaagactgtagaagagaaactcggctctcaactcgacatccttgccccagttaagtactgaatttctagtggctagctaagttcatacaattttgttaaaggttattggnttcactatttaattccgtttgagatgtggagtttaaaattttttgtgaatctctggttgtcccttttttt

SEQ ID NO: 35784 - DNA, 336 bp, Gossypium hirsutum
  unsure (1)..(336): unsure at all n locations; Clone ID: LIB3149-059-Q1-K1-A3
tcgaaaaggattcaaaccccttttcccttagcaaaaatgaagtacaacccacgggtctgctcctttcttcncaagagccgcaaggcccatttcacggcaccctcgtcggtccgccgtgtgttgatgagcgccccactctcatccgatttgaggtccaagtacaacgtccggtccatgccagtgcgcaaggacgacgaggtccaagtggttcgtgggacttacaaaggccgggaagggaaagttgttcaagtctaccgtcgcaaatgggtgatccacatcgagcgcatcacccgggagaaagttaacgggtcgaccgtcaacgttgggattaaccca

SEQ ID NO: 35785 - DNA, 140 bp, Gossypium hirsutum
  Clone ID: LIB3149-059-Q1-K1-A4
gtccgctcagattctatttaaaccgagttgtgattttgtttcgattttcatgtttggaaactcttcgttggcccctgttaaaaaccaagattctggtctttttgattgaatggtaatttatggatattttgcatttcttg

SEQ ID NO: 35786 - DNA, 268 bp, Gossypium hirsutum
  Clone ID: LIB3149-059-Q1-K1-B10
gtttgattgaatattaaaacacataaatattgcatacagaaacaattactacatggcgaagggctaaaactataattattgatctcaacatgaaaatttcataccatttatgctattaaggataaacagaacattaaaactataaacatgaagactataataactaatgatttaaatgcttacactttcattgttgactcaacatacttatcctccattgcttaacatattataggacgtatgaacatgccccgagaagtaatgaacc

SEQ ID NO: 35787 - DNA, 373 bp, Gossypium hirsutum
  Clone ID: LIB3149-059-Q1-K1-B11
cgacctttctatagccgatcgatcactaccttcccccctcccagaatgttgcgtccggcagcgatgctattgacctgtcgatccattttgacagcaagggctcgacccttctccactgatctgccagcggcaccctctgcggatgccacattcacggaggcgtggactaaagtgatccccaacatggaccctcctaaaactcctctctctttcatgcaacctcgtcctcccactccttcctccattccttccaagcttactgacaatttcgtccttccttatgcttctgagttggccaccaaagaagttgacatggttatagtaccagccacaactgggcagatgggtgttctttcaagacatgtaacaacaa

SEQ ID NO: 35788 - DNA, 393 bp, Gossypium hirsutum
  Clone ID: LIB3149-059-Q1-K1-B2
gcttcacaaaactcatcatcttcaggtttccaggatttcttgcccgtgatggctgacaagcgtcgggggggatggcttgataggggaactgtgcaatgggttcaacctgttgatggatagagaaaaaggggtcattactttcgacagcttgaagaagaattcggccccgttggggttacaggacttgacagatgacgatttgaagtgtatgatggaagaaggtgattttgatggcgatggggctcttaatcagatggagttttgtgtgttgatgttcaagttgagccctgagttgatggaagcatctcggtttttgtttgaagaagcttttcaacatgaattcaaggattttcattgattggtcttgtttcatccataaattgtcgtttaatg

SEQ ID NO: 35789 - DNA, 303 bp, Gossypium hirsutum
  unsure (1)..(303): unsure at all n locations; Clone ID: LIB3149-059-Q1-K1-B4
ggagtgattgaaaattttcttggagaatgtgattcgtgatgctgtgactaataccgagcacccgacnaggaagaccgttaccgctatggatgttgtttatgccttgaaaaggcagggcaggactctctatggttttggaggttaagtttaggatcattcttaagttcgtaactgtaatgcctttagatcttgactctagatctatatcgttatgtacttgtttgtgtactctgagtgatgttataatgatttgtaaccttaagattgatcgtataattntcatttgcaaagctttctttgggc

SEQ ID NO: 35790 - DNA, 352 bp, Gossypium hirsutum
  Clone ID: LIB3149-059-Q1-K1-B5
gccattttcctggatgcagggctaaacttttggtttttatgcttttaaaattaaaagaacgggtgcatttgtggtttgaaaatgagatacttgggaggcaaaatattttgtttagtgtgtcagaattgtgtttagtttttttccttcaagttgaaatgttttatttttggtgtttttaatcttgtcgtttatttgcttttaagatctagggacgtaccaagcttagctggactcaagctcaagcgtctcgttcagtcccccaattctttcttcatggatgtcaaatgccaaggctgcttcaacataacaactgtgtttagccactctcaaactgtggtggtatgtggtaact

SEQ ID NO: 35791 - DNA, 365 bp, Gossypium hirsutum
  Clone ID: LIB3149-059-Q1-K1-B7
ccaaagagctggcacaatagtgccaagaaaagaccggttccgtagaagctccacacaaatggtgcatgatccttacacactggtaatagctctgaacagttcccaagcagctgaaggtgaactctatgttgatgatggaaaaagctatgacttcaaacatggggcatacatccatcgccgctttgtgttctcgaatgggcatctaacatcctctcccgttggcaactctaggttttcgtctgactgcattatcgagcgggttattcttcttggatttacccctggggctaaaactgctcttgtcgaaccaggaaatcagaaagctgaaatcgaacttggtccacttcggttcgggggacaacatg

SEQ ID NO: 35792 - DNA, 287 bp, Gossypium hirsutum
  unsure (1)..(287): unsure at all n locations; Clone ID: LIB3149-059-Q1-K1-B8
ccaaagatctggtacaatattncctttatatgactctcctccnnacaacctccacccgcccgcttcattatcattacacactcacccatacactctnaacaaactcccaagcagcattaaagtaaaactctatcattacttatcgaaaaatctattactaaaaacatcccccatacattcatcgactctacatattactcaaatgaacatctaacatccataaccatattcaactctacattttactctcaactaaatatagatctggttattcttcttcaatttac

SEQ ID NO: 35793 - DNA, 365 bp, Gossypium hirsutum
  Clone ID: LIB3149-059-Q1-K1-B9
gcttgctcattttgctttgttctttaatcatgggcaatgttgctgtgccgggtctggcacgtttgttcacgaacgtgtttacgatgaattcatagagaaagcaaaggcacgtgcattgaagcgtgttgttggtgatcctttcaggaagggtgtcgagcaaggtcctcagattgacacggagcagtttgagaaagttttaagatacataagagcaggcatcgaaagcaacgcaacccttgaatgcggaggtgacagacttggaacgaaaggatactttgtccaaccaaccgttttctcaaacgttatggatgatatgctgatagcaaaagacgaaatcttcggtccagtacaatctatcctaaagt

SEQ ID NO: 35794 - DNA, 380 bp, Gossypium hirsutum
  Clone ID: LIB3149-059-Q1-K1-C1
taatctcaagagtgtgagggaattgatttacaaaataggttttgggaagttgaacaaacagagaggtgctttgacagacaatgcaatcgtggagcaagctctgggcaagtttggcatcatctgtgtggaagatctcatccatgagatcatgactgtgggacctcattttaaggaggccaacaatttcctctggcccttcaagctcaaggcacctttgggaggtctgaagaagaagagaaaccactatgttgaaggaggagacgctggcaatcgtgagaattacatcaatgagctaattcggagaatgaattagacgttggctttatttgttaattcagtatttttggtttgttttgaaggatcctgatatgatttctttt

SEQ ID NO: 35795 - DNA, 422 bp, Gossypium hirsutum
  Clone ID: LIB3149-059-Q1-K1-C11
gagagaagcagggaaacaagggaagagtttgttgagaaaaaccaaagatggcaaaatgctggctggaatgttgaaactgatgattcattttgtacattggctgaaaccttccagaaagttgatccttctttaggtttcaatattgaattgaaatttgatgaccatattgtttaccaacaagaccatctcatccatgtcctccaagtcatcttgcaggtggtatctgagtatgctaaagataggcccataatcttctctagctttcaccctgatgctgctcaactgattaagaaattgcagaacacttaccctgttttcttcttaacgaacggcgggactcaagtttactatgatgtaagaagaaactccctggaggaggccataaaggtgtgcatggaaggaggtttacaagggattgtttt

SEQ ID NO: 35796 - DNA, 236 bp, Gossypium hirsutum
  unsure (1)..(236): unsure at all n locations; Clone ID: LIB3149-059-Q1-K1-C12
ataaaaaccaaanannncaaaccgggcgactgttttattaaaactcccgacccattttatacattnncttaaaccttccanaaaattnatccttctttanntttcaatatttaattnaaatttcataaccatatnttttaccaacaaaaccatctcatccatntcctccaantcatcttncaccttttatctcattattcttaacataaccccataatcttctctaactttcaccc

SEQ ID NO: 35797 - DNA, 389 bp, Gossypium hirsutum
  Clone ID: LIB3149-059-Q1-K1-C2
gtcaaaaggtgccaaggcaacactaaatgctcagattctcgacctaccagctcctggtaggttcgacaggtgaaatggagtggtggcgataaactgacacttaatttgccaattagtataagaactgagcaaattaaagatgaccgacctgagtatgcatccgtgcgggcaatactttatggcccatacctgctcagcggttatagcagcggtgactgggacataaaaaccggctcaacaggttcagatgcggactggatttctccagttcctgcttcttataacaatcatcttgttactttttcccaagagtctggtgaatcaacttttgtcttaacaaacatgaaccaatctatccgaatggagaagtttcctaaagctggaactga

SEQ ID NO: 35798 - DNA, 420 bp, Gossypium hirsutum
  unsure (1)..(420): unsure at all n locations; Clone ID: LIB3149-059-Q1-K1-C3
tacgattttggttgtgtggaaaaaaaaaattgactcccttgacaacgtggtaaatcctccgaaagacttctccaaggacagcgtccgcctcntcaagcgttgtcacaaacccgatcgtaaagagttcacgaaggtggctttccgtacagcgatcggtttcgtagtgatgggattcgtcggattcttcgtcaagctcatctttattcctattaacaacatcatcgttggctccgcttaggaattgcaggctcgtagaaattggtgggggatatgaccagttggcgtagttgcagattctcatagaaaatgaatgttagaatgcagcagttgggggctgtccctcttcccttctcattttacattttattagttgaaccaatagtcttgaatctaaagtaaactctcttggaatttctttga

SEQ ID NO: 35799 - DNA, 336 bp, Gossypium hirsutum
  unsure (1)..(336): unsure at all n locations; Clone ID: LIB3149-059-Q1-K1-C6
cgagaagcttctcnaaaacatggaaaacattatcacttatctgcagtctgttatatccacgtgtacgcatgattcattacttgctgatgaaaaacttaaggctctacaagaggaggtacgtttgctttgggatgcttcgagaaaaaacaactttgaacttcatgttttggaatcggaagcacaggacactgaagatagggtggaagctgttaatttaaaagttgaaaaggtttgatggtcagaggatgctgatggtgattgggattgtgtgcaaactttaggtgaatctagcaagtactaagcctagaactctttctatttgttctgtttcaattc

SEQ ID NO: 35800 - DNA, 295 bp, Gossypium hirsutum
  Clone ID: LIB3149-059-Q1-K1-C7
cttgatttcaggattgatgctattgtggggttaaaagaagttacaagggaacatgtgttcggctcattcagtcttgttctcttctagtgtatggtgtttgatctaagaacatgtttgctaagggttttttttttttttttggttatggattttaatcattttaaaagcatgacttttatgggtatggaattttggttttctaggttttatgtacatttaattggaaattgttatttttaggaggatttggcaccacaaaatcatcctcttattagtaattggccgtagcaatttt

SEQ ID NO: 35801 - DNA, 157 bp, Gossypium hirsutum
  Clone ID: LIB3149-059-Q1-K1-C8
aaaaaaaaaaaaataaataaaaaaatttatataaaaaaaaaaaaaaaaaaaaaaaaccgcgcgccctaattttaaaaaaatccaaacttacatacacattctttcaacttaaaaacctcttttataatctcacctaaattcaattcacttacccttt

SEQ ID NO: 35802 - DNA, 176 bp, Gossypium hirsutum
  Clone ID: LIB3149-059-Q1-K1-D1
gaatcccggtcgaccacgcgtccgcaaatttatctgcaaattttagacagtgtcatattgtgtttgaatgtggtgttccattttggtttgggtctggtttcgagcattaatcaatcaagcctgcggaccctttttatttactattgttgcttcgttaagttttgcttttttttgtt

SEQ ID NO: 35803 - DNA, 238 bp, Gossypium hirsutum
  unsure (1)..(238): unsure at all n locations; Clone ID: LIB3149-059-Q1-K1-D10
ccaaaggatgttttttttatatcctttgatgaaccttccatgaaggctcagaattatggggtttgagtgaaaaaaaatantgccattgctaaataagcaaataatcataattgtggtttttacggggaaatggttcaataaggtatgttttatttcaatgttgggttttaatgtattatttgaaagttttcatttaagtcattagacttataaaattgtagtcgtttgactttttctg

SEQ ID NO: 35804 - DNA, 364 bp, Gossypium hirsutum
  unsure (1)..(364): unsure at all n locations; Clone ID: LIB3149-059-Q1-K1-D11
cccacgcgtccgagcaggagagatttgcactggagcatattgctaagtgccagcacgcatgggttagcaaacttaacaataatagtcaaattgctagctgggatacaagattcgagacaggtacaagaactgccttgctgcaacctttctctcctattgtgattgcggcagatgagaatgaacggatcagggtatggaattatgaggaagccaccctcctcaatggttgataatcatgattttccggaaaagggaatatctaaactttgtcttttgaatgagcttgatgacagcttgttgcttgttgcttcaagtgatggaaatatacngatttggaaaagatatacactgagggggaaacaaa

SEQ ID NO: 35805 - DNA, 394 bp, Gossypium hirsutum
  unsure (1)..(394): unsure at all n locations; Clone ID: LIB3149-059-Q1-K1-D12
atccgtttcgactagtggtagtgtcggctctccttcgagccggagtgagctagctgtggcgacgcctgctagtgagaacacttttttaaggttgaaccatctcgatattcacggagatgatgctggatctcaaggtgctgttggtagtaaaaagaaaaagagaggtcaacgtgcagttggtggtgataagagtggcagaggactccgtcaatttagcatgaaagtttgtgaaaaagtggagagcaagggaagaaccacgtacaatgaggtggcagatgaacttgttgctgagtttactgatccaggcaataacatagcatcaccagatcagcggcagtatgatgagaaaaacnattcgcgaagggttatgatgcccctgatgtactaatggcga

SEQ ID NO: 35806 - DNA, 389 bp, Gossypium hirsutum
  unsure (1)..(389): unsure at all n locations; Clone ID: LIB3149-059-Q1-K1-D2
ggtaaaaccactggattttctttcttcctaccaaccttcaaaagtttcaaggttaatggcgcctcagagaaacctaattaattanttaacatcaaantcttcacaaatttattaccccttatgacagcaggggtgtgtggtaatactattaatanngacaaactgcatgctatcatatcatcacacacattttatgatcttctatccgaatctggcttgctgtgtgtggattatgagaagcaagtgatacgtctattgttggaacctgctcaaaaatttttctctaaggcttattgctttgagttcattacaagatttccttgattaagtaaatgtattatatcttttattaccaagattcacttgattaagaaaatgcattcttgttt

SEQ ID NO: 35807 - DNA, 288 bp, Gossypium hirsutum
  Clone ID: LIB3149-059-Q1-K1-D3
agccttcgggggaaaggaatgggaggggctgatttcctttgttgtggttgcaccacggtggcgatcttgctggaaaaggttaaaacctaaaatccgaaatacaaatcatagattatatggtggctgttcgaaacattttcaaatatttattatattccaataactataactgaatgggtgtaattaattaaaagttatattatttgattttttgaaaaaaattataactatttaaataattatatttgaatagttataatattaaatgaataattatgtgtttatttt

SEQ ID NO: 35808 - DNA, 377 bp, Gossypium hirsutum
  Clone ID: LIB3149-059-Q1-K1-D9
gatggctgttgcacttggtggaaggattgccgaagaagtaattttcggggaggaaaatgtgacaacaggagcatcgaatgactttatgcaagtctcacgagtggcaaggcagatggttgaaagatttggattcagcaaaaagattggacaagttgccattggtggaggtggtggcaatcctttcttaggtcaacagatgtcatcacaaaaagactattccatggcaacagcagatgtggtggatgcagaagtaagggatttagtagagactgcatacacaagggcaaagcagataatcacaactcacattgacattctccacaagcttgctcaacttctgatggagaaagaaactgttgatggagaagagttcatga

SEQ ID NO: 35809 - DNA, 423 bp, Gossypium hirsutum
  unsure (1)..(423): unsure at all n locations; Clone ID: LIB3149-059-Q1-K1-E1
cccacgcgtccgcccacccgtccggcaaatgttaatcatcctggttctcataataatactagcccgtccattgctgccgtagtagcaacaatgaactggcctgaagctaatcgttatgcagcaagggttcgaccccagatccatcgcaaagaacagatcctagagttcggtgaaatgtgtttggagcttgtcgaatcttatgctcgtctaaataatgttaaaccagaaaaaattgtgctcttccgtgatggggttagtgagggtcagtttgatatggttcttaatgaagagttaatggatctcaagagtgcattccagagaatcaattattttcctacaatcacccttattgttgctcaaaagcgacaccaaactcgtttttttcccgagggaaagggggatggnggtcccacgggtaatatt

SEQ ID NO: 35810 - DNA, 255 bp, Gossypium hirsutum
  unsure (1)..(255): unsure at all n locations; Clone ID: LIB3149-059-Q1-K1-E10
ttttntttttctctctctcactttagaattcccaagtttctgttggcccagggagaaatgaattattgttggtgggaaaagatcaagatctggccttaagtctaagcttgagttcttctcaaaatcatcatttgcttcagttaaatctaagcccatctctcgttccatcttctgctaatcaatgctattctccttctgatccaaacaccgaatctttacgggccgagactagatcatttcttaaagggattgacg

SEQ ID NO: 35811 - DNA, 381 bp, Gossypium hirsutum
  Clone ID: LIB3149-059-Q1-K1-E11
agcgagctgtggaggaagaatgggcatctatgcagcgagagttaaaaattcaggctgaacgcgctcaaagattgcgaaaaaggaaaaaagctgaaagtatgcgtgtattggatatggagagacggcaaaagcaacgtctggatgaaatgagagagacacaaaagaaggatgaggaaaatatgaacctaaaggaacaactaagaatggaagtaaggaaggagcttagtaaattggaaatttcatgcatcgatatggcctcattgcttcgtagcttgggaatccctgttgatggtggttcttatcccttgtccaatgagattcacgcagcttataaaagagccttgctaagatttcatcctgaccgagcatcttaaactgata

SEQ ID NO: 35812 - DNA, 334 bp, Gossypium hirsutum
  Clone ID: LIB3149-059-Q1-K1-E12
gtttgagaccctcaagcaccgtgcggaagaattttgtggacaggaccatggcaatgaaggcgcccatgctgctttagttagcaccattgctcgttctttccacaacatgccttatcttgtagtggcatccccttgttcgttgactgccatgaataacaatggcttctactattgcaatgaggaagattacaatgctgctgtcgattctggggctagtgaggacgagcagtggtcctattgctacgcctgaggcagtgttctactatttgctttattgcatggtttgccagtccttgaatgtctagttattttagttttttgttccctttttaat

SEQ ID NO: 35813 - DNA, 339 bp, Gossypium hirsutum
  unsure (1)..(339): unsure at all n locations; Clone ID: LIB3149-059-Q1-K1-E3
cacgagccgtagtgcgccgtttgcatcaggaagaaatggcggtccctttgctgtctaagaagatggtgaagaagcgtgtcaagaagttcaagaggccccaaagtgaccgcaagatctccgtcaagacaaactggcgaaggcctaaaggtatcgactcccgtgttaggaggaagttcaagggatgcactttgatgcccaatattggttatgggtccgacaagaagactcgccactatctttccaatgggtttaagaaatttgtcgtgcataacgtccaagagctggagcttctcatggtgcacaacangacatactgtgctgagatagctcatgatgttt

SEQ ID NO: 35814 - DNA, 365 bp, Gossypium hirsutum
  unsure (1)..(365): unsure at all n locations; Clone ID: LIB3149-059-Q1-K1-E4
gaagagaagatggagcaaacattcatcatgatcaagtctgatggggtccaaagaggcctgggtggggaaatcattggcagatttgagaagaaaggcttctatttgaaagggttgaagctcatcagtgtggatcgatcttttgccgagaagcactatgctgacctgtctgcaaagcccttctttaatgggctcgtagagtacattatctccggtccggtcgttgctatgatttgggaaggtaagaatgttgttaccacaggtcgcaagattatcggagccacaaacccagctgaatccgctccgggaacaatccgtggtgactttgcaatngacattgggaggaatgtgatccatgggagtgattc

SEQ ID NO: 35815 - DNA, 295 bp, Gossypium hirsutum
  Clone ID: LIB3149-059-Q1-K1-E5
gcccctttcattaccatcaaaatcactccatttttttttatcactgaaaaatgtcttgcggggggggaaactgtggctgcggtactggctgcaagtgtggcagtggctgtggaggatgcaagatgtatccagacctgaacgctgccgagatgaccacaactgagactctggttcttggtgtagcaccccagaaagcacactttgagggagctgagatggaattcggggctgagaacggctgcaagtgtggagacaactgcacctgcaacccttgcaattgtaaatgattagagac

SEQ ID NO: 35816 - DNA, 64 bp, Gossypium hirsutum
  unsure (1)..(64): unsure at all n locations; Clone ID: LIB3149-059-Q1-K1-E7
cggaattacccgggctcgagcccacgccccgtccgaggcagttgtncaaaagttgaaccgggat

SEQ ID NO: 35817 - DNA, 402 bp, Gossypium hirsutum
  unsure (1)..(402): unsure at all n locations; Clone ID: LIB3149-059-Q1-K1-E8
ggtagaaaagcttgatgaagaggaataaaatgagaatcctttgaactatcatagtgagaagcttgccattgccttcggtttgttgaaaacaaaagcaggggacactttcaggataacgaaaaatcttcgagtttgcagagattgccaccatgctagcaaacttatctcaaaggtttttgatcgtgagatcgttgttagggaccggaatcggtttcaccatttcaaagatggggagtgttcctgcaaggattactggtagtactaggtggtgtgcttgtggctgttaacttangtgttaacagtgtgtgtatatatattgtatcaatctgattcgatctancccgatacttatatgttaaaaaaaactcatttgaattttatatggagtattatttatatatc

SEQ ID NO: 35818 - DNA, 228 bp, Gossypium hirsutum
  unsure (1)..(228): unsure at all n locations; Clone ID: LIB3149-059-Q1-K1-F1
gtccttttaaaagtgttgtgacatctttctggtcttatttcatttcttggtttcccttaagaaagctgcatttttgctatttaaaattcnacattattgagttgcccgaacaagcagagatatataagtatcatgatggattttattttattttctttgataatgcgggatgacatttaatgtagggatattatgattttattaaaatgttttttgttggctcccccc

SEQ ID NO: 35819 - DNA, 367 bp, Gossypium hirsutum
  Clone ID: LIB3149-059-Q1-K1-F10
gggattttaagcttaaaaccctaaccctagtaatttattcggaattcatcgctggggctgggtgacctcattcaaaatgcctcgccgtagctctggaaggtctgcttctcgccctgcccctcgtcctgctcctgctcgcaaccctccacctcaaccagctcatcatgctcctcctccagctcctgctcagagtggaagtggtggatccttgctcggaggcataggctctaccatagctcagggcatggcatttggtactggaagtgctgtagctcacagggctgtggatgctgtgatgggtcctcgtactattcaacatgaaactgtggtttccgaggctgcagctgcccctgcaccagcaactact

SEQ ID NO: 35820 - DNA, 392 bp, Gossypium hirsutum
  unsure (1)..(392): unsure at all n locations; Clone ID: LIB3149-059-Q1-K1-F11
gcttagggttttaggagctgaaaactgaggaagagacagcgatgatggctacatcgggacgggtttggaaggtgcggcggattgttagaagcggcgaaggctttctctgcttccttcgcttattcgtcttcttcttcttccagtggaaatggaagggggcttatgcgggtgatacctgtctctccacagctgggcaagttccttggagcctccgaagcttctcgcaccgacgccattaaaaggatttgggactacatcaagctccacaatctccagaaccctgcaaacaagaaggagattatttgtgatgagaagttgaagacgatattcgccgggaaagagtctgtcggaatgttagagatcagcaaatatctctccccacattntctgaa

SEQ ID NO: 35821 - DNA, 315 bp, Gossypium hirsutum
  Clone ID: LIB3149-059-Q1-K1-F12
aactggaaaaactaccttcgggaataggcatctaactggagagtttgaaaagaagggccagccaaccattggtgtggaggttcatcccttgcacttcttaactaactgtggcaaaatccgtttctactgctgggatactgctggacaggagaagttcggtggtctcagagatggttactacatccatgggcaatgcgccggaattatgtttgatgtaactgcccggttgacatacaagaatgttccaacatgtcatcgggatctttgcacagtgtgtgagaatattcctattgttctatgttgaaacaaggttga

SEQ ID NO: 35822 - DNA, 296 bp, Gossypium hirsutum
  unsure (1)..(296): unsure at all n locations; Clone ID: LIB3149-059-Q1-K1-F2
gtgaaagctggaaatcatagaacaaaggtggcagataagttaacagtttcatccgcatggggtcggttctatttcagtcggttgatactcgcattccctggttgaatccttaaggaattggggttggttttataagcattacttgtagatactgtggtatatttctggttgtgatagagttgcttaaatcttttcctcttaggttttggaagtcttgggtaaaaccgcagagaatgatattgttgtactggtttgtactgttaaatggttgtattgaattatttgatcatgtnggt

SEQ ID NO: 35823 - DNA, 195 bp, Gossypium hirsutum
  Clone ID: LIB3149-059-Q1-K1-F3
atccttaaacaattggggttgtttttataagcattacttgtagatactgcggtatatttctggttgtgatagaattgcttaaatcttttcctcttaggttttgtagtcttgggtaaaaccgcaaaaaatgatattgttgtactggtttggactggtaaatgggggtattgaattattttgatcatgttgggaagc

SEQ ID NO: 35824 - DNA, 396 bp, Gossypium hirsutum
  unsure (1)..(396): unsure at all n locations; Clone ID: LIB3149-059-Q1-K1-F4
aattgactttggaaaggcagtagatgaaaatgatgaaagtcagttggtccatgaagcatgggtgaagcttcaaggctctatcaccaataagaaattgaaatatttgttgatagatggtcgtcaaacagagtcaaaacatactagtagaaaaaataattttgagataattggttttagagacccagttttatttattggacacctttctaaaaattccatcttgatggtagacaaaccatggatggaagtagttaaatcttttgatactgccccagttcagagacatatatatgggacataacttcctgtggacgaaaggatgttcatcacttgagtgcctngttaggagaagaaaaaaatgcagcatccaattaccccatttggagtcccacttta

SEQ ID NO: 35825 - DNA, 321 bp, Gossypium hirsutum
  unsure (1)..(321): unsure at all n locations; Clone ID: LIB3149-059-Q1-K1-F5
ggtgcaagagcttgggaggttctcggtggttgagtataacaggcggagccaagggcgggtgcgtgtcagtttggccaatggtgggccgtcgacggcgttggttttctctcaagtggtgggagctgagaaacaggtggttgctgggatcaagtattatctcaagattaaagccatgcaaggtggggtaaccaagacctttgagtcagtggttttggttaaaccttgggttcaatccaaggacttgcttaatttttccccttctactcattaaaaagagaagtctntttccctttgtatcttaattaataaagcgattgaata

SEQ ID NO: 35826 - DNA, 384 bp, Gossypium hirsutum
  unsure (1)..(384): unsure at all n locations; Clone ID: LIB3149-059-Q1-K1-F6
gctgtgggtccaataaaagatggtgatgcttttgttacttttaacttccgagcaaatcgagtggtgatgctcgcaaaggcactcgagtatcaaaatttcgacaaatttgatcgcgtaaaggttcctaaaattcgttatgctggaatgctccaatatgatggtgagttgaagcttccaggccgctaccttgtttctccccccgagattgacagaacatccggcgaatatttggtgcacaatggtgtacgtacttttgcgtgcagtgagacagttaaatttggccatgtcacattcttcntgaatggaaatcgctccggctatttcaaccctgaaatggaagaatatgtggaaatcccaagtgacgttggcattacattcaatgtt

SEQ ID NO: 35827 - DNA, 381 bp, Gossypium hirsutum
  unsure (1)..(381): unsure at all n locations; Clone ID: LIB3149-059-Q1-K1-F7
tgcctcttanaaagtcggagcacgccttctacttgaaatgggctgtccactccttgagaaggaccaactgtggtgtacaggacactacccagatccacactcatatgtgctactccaacttcaatgacatcatccactcaattatcgacatggatgctgatgtgataaccatcgagaactcacgttcagatgaaaagctcctttctgtattccgtgaaggagtgaagtatggtgctggaatcggccctggtgtctatgacatccactctcccagaataccatcaaccgaagagattgctgaccgaattaacaagatgcttgctgtgcttgagacaaacatcttgtgggttaacccagactgtggtctcaagactcgcaagt

SEQ ID NO: 35828 - DNA, 309 bp, Gossypium hirsutum
  unsure (1)..(309): unsure at all n locations; Clone ID: LIB3149-059-Q1-K1-F8
ccgggcccgacccacgcgntccgaaaaaaaaaaaaaaaaaataaaaaataaaataaaaaaaaaaaaacaaaaaaaaacttccccgcccaccttttaaaaacaacaacacaccacccaaacccacactcatatntactactccaacttcaattacatcatccattcaatcattaacatccatactactctgatcaccatccacaactcaccttcatattaaattctcctttctctatttctctaaatattaaaaaattcctctctaatccctcctcccatctattacatacactttaccacaataccatc

SEQ ID NO: 35829 - DNA, 323 bp, Gossypium hirsutum
  Clone ID: LIB3149-059-Q1-K1-F9
gttatgggattgcaagaaaatcttcttaggtgcatttatgcttatggttttgagaagcccgctgcaattcagcaaagaggaattgtacccttttgcaagggacttgatgtaattcaacaagcacaatccggaacaggaaactgcaactttttgctctggaattctacagcagcttgactacagcttagttcagtgccaagcattggtccttgcaccgacccgtgaactagcacaacaaattgagaaggtcatgcgggcattaggtgattaccttggtgtcaaggttcatgcttgtgtaggtgggaccagtgttcgtgaagatc

SEQ ID NO: 35830 - DNA, 359 bp, Gossypium hirsutum
  Clone ID: LIB3149-059-Q1-K1-G1
aaagaaagtattctctgagatgggttcttccttaatctacaaggtgggaacaatgattgagaacggagagcagccctagttgctgatgagattgcaaaggaagcagaattcttctcctttgggactaacgatcttacacaaatgacatttgggtatagtcgagatgatgttggcaaatttctccccatatacttgtccaaaggcattatacaaaatgacccatttgaggtacttgatcagaaaggtgtaggccaactcatcaaaatggccaccgaaaagggtcgccaagctaggcctagtttgaaggttggaatttgtggagagcatggaggggaaccttcttctgtagcattctttgc

SEQ ID NO: 35831 - DNA, 322 bp, Gossypium hirsutum
  Clone ID: LIB3149-059-Q1-K1-G10
tccaacggttaataaccgacattttttaaacgttggttcaagaatcttcaaggctggcgcgcggtaccaggaaacccaccattacctcccgtgagattcagactgccgtaagattggtcctacctggggagttggccaagcatgctgtttcagaaggtaccaaggcggttacaaagttcaccagttcttagtttccaaaaatctaaaatacaaaaaaaaaaaaatctgggaaatatggttttgttgtaaaaatcattagctttttgtaggtcttcctgttatttgcagagcttaaatggaaatttaatcatattttgaattt

SEQ ID NO: 35832 - DNA, 425 bp, Gossypium hirsutum
  unsure (1)..(425): unsure at all n locations; Clone ID: LIB3149-059-Q1-K1-G11
gtccgctcttatggttacttatccttcaacacatggagtgtatgaagaaggcatggatgagatatgtaagattattcatgacaatggaggtcaagtttacatggatggggctaacatgaatgcccaggtcggtttgacaagtccgggttttattggagccgatgtttgccatctgaatctccacaaaaccttctgcattccacacggaggtggtggacctggcatgggacctattggtgtcaagaagcatttggcaccatttttgccttcacaccctgtggtacctacaggaggtatcccagccccagaaaaatcagaccctcttggtaccatttncgctgcaccttngggctctgcacttatcctgccgatatcttacacttacatagccatgatgggatctaagggactcactgatgctttaa

SEQ ID NO: 35833 - DNA, 386 bp, Gossypium hirsutum
  unsure (1)..(386): unsure at all n locations; Clone ID: LIB3149-059-Q1-K1-G12
gaaggcttcggcggcaaaacgtacatacgaaagcgacaagaatctcanatcgttgcgaatgacgacgaggctgcccccgccgccgcttccatggacgtggatgattcttgccccccacccgcaaagcgttcagccgtgccttcctcggacgaccccaataaacccaccttcggtcaacccacctacgacggcgtgattgcgggtaaggtgtctggtaggaactggaagcagccaagaaagcagcgtgcgtcagcgaagcacgtgagcataaggaggacgagcttggaggagagggagaggcaaaaggagatcaagagagcttatagagagaggattaacgagttgaaggaagagatacggcaaaataaggtggggaagagaaagaa

SEQ ID NO: 35834 - DNA, 389 bp, Gossypium hirsutum
  Clone ID: LIB3149-059-Q1-K1-G2
gccacgcgtccgacactttcagtatgtctgctttaaaatcctccttttttttggggataatcaaatcaactgcacggcgacccattccttgttgcctgcagcttcatctttcaagcccatcaaaaacccttgtttacctcaaacccacaagcttttcacatcaaactccaacactttctcagctcccaagcgaggtttcacttgcaaaagccaggctattccatctgataactcagctccggaaaaagttcaagaactacatgtgtatgagttgaatgagagagatcgtgggagtccagcttaccttcgtttgagtcagaaatctgtgaactcactgggtgatcttgtcccttttagcaacaaaatatataagggagatttggagaaac

SEQ ID NO: 35835 - DNA, 207 bp, Gossypium hirsutum
  Clone ID: LIB3149-059-Q1-K1-G3
gaaatgggtgatattcccggccttgttaaggttgacccggttgctgtttcggttcctcaggtggggttcggtcgcggtggtggacccgggaggaggttttgagtggtgggtctacatggatttaatgggtttcatgggttttttttttaagcttctatgtttttttgttctgttttgggggtaatttctaattttgcgttttttatg

SEQ ID NO: 35836 - DNA, 358 bp, Gossypium hirsutum
  Clone ID: LIB3149-059-Q1-K1-G5
gttgaatggtggcattgcttaaagaaaattttgagtgccagaagattgacatacttttttaggctgaattgaatgtgacatttcctagacccctaagtacacatgtaaacattttttttaattagagttttgtcaacagtaaaaaaggcccttacatctctaagctccccctccccctcccttaagaggaatatattgtgtcctcatttttcgaagctgcacaaggtcaaaggtgaaagtatcatgataaccaagcattaacggtgtagcttttctttggtactgctgtctgactcacatttctctttgaaatccttgggttgaattttatcctgcaggttgattatgcatgcacact

SEQ ID NO: 35837 - DNA, 403 bp, Gossypium hirsutum
  unsure (1)..(403): unsure at all n locations; Clone ID: LIB3149-059-Q1-K1-G6
gagctttgggacgtanacatcaaagcagatttcattgttcataaaaaggtgatgaagcacgtcgaggatgccatagactcaaagatcccttggatggtgatcgtgggcgagcgagagctgaatgaagggatcgtaaaattgaaaaacatcgaaaccaccaacgaggaagtgattcctagaagtaatcttgttggtgaactacagcaacgattgaagttgaacccatgaaaaaggggtcaatgctcttctattctcaacaaaggtagagattctcaaatatttttgtctgaacatacaaatttactttagtaattgntgtattgcaaataaatccatgtactcatgcttttgatttttttttatttacccataattatatttaaggggtttatacattttattt

SEQ ID NO: 35838 - DNA, 177 bp, Gossypium hirsutum
  Clone ID: LIB3149-059-Q1-K1-G7
tttttattttatgcttattatataccatgacctcatgttgaattcaagttatcaagtgatgttatggatttttttttgttttatgcttttattatgtaccgtgacctcatgttgaattcaagttatcaagtaattttatggattttttttaatttaaagaagttatgttgttgattt

SEQ ID NO: 35839 - DNA, 332 bp, Gossypium hirsutum
  Clone ID: LIB3149-059-Q1-K1-G8
cgcttctggaagagcattggtttgggcttttagactcctcgtgaagctattgaaggggccggcattgacaagaaatgcccgtttgccggcactgtttcgatcaggggtcgtatcttagctggtacttgccatagtgctaagatgattaggacaatcattgttcgacggaattaccttcattatatcaagaaataccaaaggtatgagaagaggcattcgaacatacctgcacatatttctccatgcttccgtgtgaaggaaggggatcatgtcattattgggcaatgcaggccattgtcaaaaaccgtgaggttcaatgttttgaaagtgat

SEQ ID NO: 35840 - DNA, 391 bp, Gossypium hirsutum
  unsure (1)..(391): unsure at all n locations; Clone ID: LIB3149-059-Q1-K1-G9
aaacacttctccagtgaccaaaaaagcttctttgtctcttctatcgaaaaccccatggccgctcttaatctagtttgtgctctagtgttgtgcatgttggtggttgagcccattgccacaaccaccataacatgcggcgatgtgacaagcaaagtggccggttgcttatcatacttgcagaacggagggaacgtgccgaaggcttgctgcgacgggatccggtccctgaacaacatggctcgaaccacccctgaccgccaaaccgtgtgtgggtgcttgcaagctgccgctaangctgtcaaaattaaaggcaacttggctgagaccctcccagccaaatgtagtgtcaacatcccttacaagatcaacactttcactaactgcaaaaatg

SEQ ID NO: 35841 - DNA, 243 bp, Gossypium hirsutum
  unsure (1)..(243): unsure at all n locations; Clone ID: LIB3149-059-Q1-K1-H1
tttctctgcgatcttaactttcttctttgctttatttggtccattgttaggagccatgactggggctttgataggacaagaaaccgagagtggtttcgttcgaggggctgcggtcggngctatatccggagccgttttctccatcgaagtcttcgaatcatctcttcttctttggcaatctgacgaatccgggatcttatgtnttgcttacttgattgatgtcattgcaagccttttaagtgg

SEQ ID NO: 35842 - DNA, 331 bp, Gossypium hirsutum
  Clone ID: LIB3149-059-Q1-K1-H11
agatggtgaaggggaggatgttgttttggttcttatggagaagagtaaggatcgaggttagattgtaaattgggcaccacaagaggcagtcttgaaccacccggccattggcgggttctttacgcataatggatggaactcgactttagagagcgttgtcgcaggggtgcctatgatttgctggcctcagtttgctgaccaacacgtcaatagtagggttgtgagtgtggtgtggaaaatagggttggatatgaaggatgtatgtgatagcaagatagtggagaaaatggtaaatgatgtgatggtggatcgaaaggaggagtttgcaaaa

SEQ ID NO: 35843 - DNA, 371 bp, Gossypium hirsutum
  Clone ID: LIB3149-059-Q1-K1-H2
caacaaggaaattgaccggctgcaccccatgcttgtcaggtcactaaccccaccaaaagcggatgaattcacgataaagaagaacatcctatcaacatttgcatcttcttagatcaatgtatttcacctcgtctagtgctgcggtgggttcaagtttcatcgacgttttcaaggactgggaacatcttagcgttttatgttttgggtatctttcagcagcaaatcgctaggccttgattaagacttgagcaccatttgcgtgccgcagcaccagtaactagtaaaagttcttatgatggaattctctcctaaaactagttttgaccagtgatttcactcggcatttattcgaattttgctcctgttttact

SEQ ID NO: 35844 - DNA, 94 bp, Gossypium hirsutum
  Clone ID: LIB3149-059-Q1-K1-H5
attccggctagacctacgcattattaaactgtaaaaaaaaaaaaaaattttaattattaaaaaaaaaaaaaaaaaaaagggaaaggtggtatat

SEQ ID NO: 35845 - DNA, 191 bp, Gossypium hirsutum
  Clone ID: LIB3149-059-Q1-K1-H7
atccagttggcgcagcataggaaatagctatttgcagggcctgtgctcgatttggggctcgtttatatctctatcatgaaaaacaatagatacacacaaaagcatattggaaatatggactatgcttttagtcttactgttcaagcacattttaattacccaaatgcgcctaataattaaatgaaggtttt

SEQ ID NO: 35846 - DNA, 443 bp, Gossypium hirsutum
  Clone ID: LIB3149-059-Q1-K1-H8
aaaacccgggccgacgcacgcgtccgcttttccaaacaatcaaaagattcatataccttctcttttcgaccatggcagtatcaagagtgtcttttgctttgagccttgccattttctcaatctgggccgttgatgcagctcaccaccatgcgacagcgccgtccccttcttcttcttcttcatcctcctcttcctccactgtggactgctcgactctgatactgaacatggcggattgtttgtcgttcgtgtcaagtgggagcgaggtgtcgaaaccggaaggaagttgctgttctggattgaaaaccgtgttgaaaacgggccctgagtgtttatgtgaggcatttaagagcagtgcttcaatgggtgtttcattgaatgtcactaaggcctccactttgcctgctgcttgtaaagtttctgctccttcttctactaactgc

SEQ ID NO: 35847 - DNA, 313 bp, Gossypium hirsutum
  Clone ID: LIB3149-059-Q1-K1-H9
atggatttgaagcatctaacaagatcttggttctgatggccaccaatcggattgatgtcggggatcaagctcttcttaggccaggacgaattgacaggaagattgaatttccaaatcctaatgaggagtctcgtttcgacatcttaaaaatacattctagaagaatgaatttgatgagagggattgatctaaagaagattgctgagaagatgaacggtgcttctggtgcagagcttaaggctgtgtgcacagaatcaggaatgtttgctttgatggaaaggagagtccacgtaacacaagaagtatttgagat

SEQ ID NO: 35848 - DNA, 411 bp, Gossypium hirsutum
  Clone ID: LIB3149-060-Q1-K1-A1
ggaactacacgagtacaggccttttgtaacggatgagaagtatcttctaagataattgcataaggaaaagttacatcacttacttacattggtgtaagacctcagggagattgtaattgacttcctatttcccgtttaccatgaagacataaaaccgatttgtcttcatagagcaaacaaatgtggtagggcttgaagcagtgcaacttctaggggttatgtttttgtaaggcataggagctttgatagacttgaaaaccatggttggtcatgttggtctattgcttcggccttcacattgtatttattccattcaatacatttttatctatcaatgaatctgaaagaaagaataatatattggaattgtattatacctttcaatgaaatggattgcagatgtttatcact

SEQ ID NO: 35849 - DNA, 169 bp, Gossypium hirsutum
  Clone ID: LIB3149-060-Q1-K1-A12
atttgacctgtaaatattatatataaagaaaaatatataaataaaaaattagttgatgaggatatgatatataaatgagctattaattaaaaaaaaaaaaaaaaaaaaaaaaaaaaaaaaaaaaaaaaaaaaaaaaaaaaaaaaaaaaaaaaaaaaataaaattaaaca

SEQ ID NO: 35850 - DNA, 387 bp, Gossypium hirsutum
  Clone ID: LIB3149-060-Q1-K1-A2
gtgatggactctgggatgttgtgagtgacatggaggtgacaaacatcatcagagacacggggaaagagccggcattgtgctcgaaaaggttggcaacggaagctgcaaaacgtggcagtaaagataacatcacagtcattgttgtgttcctttgtccagtatccacagcagagagagtttactaagggtgtttttgattgttttttgtgaattcaattcgcttgaaataaagatgaattaaatcgtccatgttatgagcaacagcatttggcctttaggagctggttttgcttctaaaatattcatttaatattgatatatttattcgggcgatactttattctgaaataataaaattgattttaggtcaaaaaaaaaaaaataaaa

SEQ ID NO: 35851 - DNA, 222 bp, Gossypium hirsutum
  Clone ID: LIB3149-060-Q1-K1-A3
gtaatgaactctgtactgtccttattgacttgatgttttcaaacatcaacaaaaacaccgtgagggagtctttcatgtgctacatacatttgtctacgaactctgcgaaacgttacgttatacataacatcacattcattgtgctgatcttaagcccattatccacaatagagacattttactgttgtatgacttgaaacaattctactaatacaattcatt

SEQ ID NO: 35852 - DNA, 413 bp, Gossypium hirsutum
  Clone ID: LIB3149-060-Q1-K1-A4
ggagagaatacaaggttgatgcaactgttggaaagcctcgtgtgaatttcagggagactatgactcaacgtgctgagtttgattatctacataagaagcaatctggaggacagggtcaatatggacgagtgtgtgggtatgttgaaccacttccgcctgggtctccaattaagtttgaatttgagaacatgattgttggacaagctataccatcaaattttattcctgcgattgagaagggtttcaaagaagctgcaaattcaggttcattaattggacatccagttgaaaatatccgggttgttataactgacggtgcttctcatgcggtagattctagtgagcttgcatttaagttggcttctatctatgctttcagacagtgttatagtgctgctaggcctgtgatattg

SEQ ID NO: 35853 - DNA, 418 bp, Gossypium hirsutum
  Clone ID: LIB3149-060-Q1-K1-A5
cccacgcgtaccacacatgtacaatccttttttaacttatgtttaacatctccaaagataattgcatagcggagagttacatcacttacttacattgatataagacctcagggagattgtaattgacttcctattacccgtttaccatgaaaacataaaacccatttgtcttcatagagcaaacaaatgtggtagggcttgaaacagtgcaacttctaagggttatgtttatgtaaggcataagatctttgatagacttgaaaaccatggttggtcatgttagtctattgcttctgccttcacattttaattattccattcaatacatttttatctatcaatgaatcttgaagaaagaataatatattgtaattgtattatacccttcactgaaatggattgcagatgtttatcactt

SEQ ID NO: 35854 - DNA, 420 bp, Gossypium hirsutum
  Clone ID: LIB3149-060-Q1-K1-A7
aaaaaattcttctctctgcttacaactcctgataattatcttcaaattttggaatatagaaatggaaggagtgggctccaccaggctgggccgagcttccgctaggtacggtggttcaacggcggtgttcaatggaccggtgaggaagtggaagaagaagtgggttcacgtgtcgccttcatccaccgctaaactctctcagtccaacgggaacggttccgccgcctccagcatccttctttgtaggtggaccccactctcctttgctgattccgggtcctccgccgtcgatggcgaggacgaggagcaacccccaaagcgcaagtaccgctatacccctgttgctgtgttagaggaagagcgtagaagggcagctgctgcgaaacaggttgaaaatgaagctaggacagatgagaataa

SEQ ID NO: 35855 - DNA, 97 bp, Gossypium hirsutum
  Clone ID: LIB3149-060-Q1-K1-B1
ccacgcgtccgcactgataaactatccattaccatgattctttttatttagtcccggctgggtcaccatgttggcggaggtattgtttctgacaagc

SEQ ID NO: 35856 - DNA, 286 bp, Gossypium hirsutum
  unsure (1)..(286): unsure at all n locations; Clone ID: LIB3149-060-Q1-K1-B10
gcacagtggaacaagaaatggttgaagtaggtggggcataaatgggatctactcaacctaggccaagttgataagatggatgaatgggatatcttcttatatacagtgaatacttggccttaaaagacaatgtgatgatgttgagtttgttatttgatgttgaaaattttaaggaatctcgggttttagtaaccccaacatttgaaatattcagtgttcatgtgtagggtcatttggcttgggaaatttggtaagaggggggnccagnnncaattnanttttattt

SEQ ID NO: 35857 - DNA, 385 bp, Gossypium hirsutum
  Clone ID: LIB3149-060-Q1-K1-B11
gatgaggaagtcgacgagatgatccgcgaatccgttgttgatggtgatgggcagatcagctacgaggagttcgtcaaagtcatgatggccaagtaaaggacctctccaactataaccaggattaaaaaatggggtttaaaaaaaaggaagaaagtaacagggcagataagtttgctaaaatatctattaatgaataggacatcaatgtttttaagttacaagcttttgttggatggttctttgtttcatgtttgcatttttttgtggaccggaccttagtattatgcttgtttgctctgcttttttgttcagtagtgctgggttgttagtgtcaatatttttatgctttgtgctttctttcgaacaaactggaagattcgatgtt

SEQ ID NO: 35858 - DNA, 405 bp, Gossypium hirsutum
  Clone ID: LIB3149-060-Q1-K1-B12
caggaagagaaacaaggaaagaaaaaacgaaacagatgggaatcagattcatattaatggggaacaagcaagggcagactcgtcttgcccaatattatgaatggctcaccctcgaagaacgacgtgccctcgaaggcgagatcgtccgcaagtgcttggcccgcaacgagcaacagtgttcatttgttgagcatcggaattacaaaattgtatacaggcgttacgcttcgctgtttttcttagttggagttgacaatgatgaaaatgagcttgcaatattggaatttatacatctcttggttgaaaccatggaccgccattttggcaatgtgtgtgagctagatatcatgttccacttagagaaggcacatttcatgctggaggaaatggttatgaacggttcta

SEQ ID NO: 35859 - DNA, 355 bp, Gossypium hirsutum
  Clone ID: LIB3149-060-Q1-K1-B2
agcttgtgtcagctaccaaggaaggtcttaaacttgatgagagtgaggatgagaagaaaaagaaggaagctttgaaggaaaagtttgagggtctttgcaaggtcatcaaggatgtgctgggtgacaaggttgaaaaggttgtggtttctgatcgtgtggttgactcaccttgttgtttagtgactggcgagtatgggtggactgcaaacatggagagaatcatgaaggcccaggctttgagggataacagcatggctggttacatgtcaagcaagaagacgatggagatcaacccggagaaccccatcatggaagagctgagaaagagagccgatgcagacaagaatgataaatc

SEQ ID NO: 35860 - DNA, 105 bp, Gossypium hirsutum
  Clone ID: LIB3149-060-Q1-K1-B4
aaccccccttgtaccggcccattaaccccggcggttgggggggttacccccagggggaccgttccatttgcaggggccttaccgccggttccttcggtttttttc

SEQ ID NO: 35861 - DNA, 399 bp, Gossypium hirsutum
  unsure (1)..(399): unsure at all n locations; Clone ID: LIB3149-060-Q1-K1-B5
gaacagagcagcagcagcagccatggttctcaagacggagctttgccgatttagtggtgccgagatataccctgggaaaggcatcagatttgttcgtggagattctcaggttttcctcttttccaattcgaaatgcaagaggtacttccacaaccgtctgaagccctcaaaacttacatggacagccatgtataggaagcagcataagaaggatattgcccaagaggccgtgaagaagagaagacgtgcagcaaagaagccttactcccgatccattgttggtgccaccttagaggttatccagaagaagagaagtgagaaacccgaagtccgtgatgctgccagggaagctgctctccgagaaatcaaggaaagaatcaagaaaactaangatgaaaa

SEQ ID NO: 35862 - DNA, 354 bp, Gossypium hirsutum
  Clone ID: LIB3149-060-Q1-K1-B7
agatcatgcttgactgggatccaaatggttttcaagggccaacaacttcacttgcggatcttgtcaccatccaccctcccaaggatgatgaagttatcaaggtggaagcacccgtgccgaccgagattgaacttccgccagtggcttaaagccgatgatgactgttatgatagtcatctatttgatatttggagcatgtcaagtgtcttagattttgtagtttttaagtttggcacctaaaatgaacttatgctggatgctcttttatgaattttcctttggtgtttctcaaattttgttatacttaaaacttattacttgataattttattcaaggattttttattccttttt

SEQ ID NO: 35863 - DNA, 399 bp, Gossypium hirsutum
  Clone ID: LIB3149-060-Q1-K1-B8
gcgaccctctttttcctctaccaggtgattttagctttgtgttagctcctttaagcgatccggcaagatgcaaaacgaagagggtcaaaacatggatctttacatccccaggaagtgttccgccactaacaggctcatcacctctaaggatcatgcttccgttcaaatcaacgtgggacacttggatgagcttggcagatacactggcacattctccacttttgctctttgtggatttgtccgcgcccagggtgatgctgacagtgctcttgacaggctttggcagaagaagaaagctgaagttcgacagcagtagttggatacctttttaccctagtctatctccgagcttgggaaagaacaatctcatggcagcgactattatgttctaggtttttc

SEQ ID NO: 35864 - DNA, 205 bp, Gossypium hirsutum
  Clone ID: LIB3149-060-Q1-K1-B9
tgttcttataatctttgaacatagaagcaatgaatacatgcctgtctcttgtggtgtaatattgcaggtcttgtggtggttgttttgttgattcaatcaaatgagttctccagattaggtgcacaaacatctaattctgcagagctgggttaaaaagaacattgttatatttttcatgttatgcatagttttgtcgtttttcctt

SEQ ID NO: 35865 - DNA, 423 bp, Gossypium hirsutum
  Clone ID: LIB3149-060-Q1-K1-C1
ccagaccttatgtgaagaaaatggccaagagccaagactatttcttcaaggagttctcaagggccattactctcctctctgagaacaatcctctcactggtagcaagggtgagatcaggaagcaatgcaatcttgcaaacaagcttcactaaaatgcctcgccaaagagaaagccgagtgtggccgaataaaatgtttgtttactcagtttcttttccaagagacgagtttgttaatgtgcaggtgagtaatggtgcaatggtactggtttgtaacgatcgatccattgcatttttcttttagcataagccaggttgccttctcttgatgttggtcatgggcttggtggatgtaaggatggatgtaatatatgtatgtaaagaatggtgtgactgtgtatgatgcatgaatttcaatgattta

SEQ ID NO: 35866 - DNA, 408 bp, Gossypium hirsutum
  Clone ID: LIB3149-060-Q1-K1-C10
aaaagatttgatcttttagtgaagttttatgagggaaaatccaaatcaaagaagaaagaggcgaagaccttccttaaagtgtccgattcattactggactgacccataagtgaaaaaaagagggaccccaatataataacctctttgtctttggtggtttagccattgaagaaacgaagcagaagagaaaaagaaaattaacagagttggaagaaagaatgttcgcagcggagaatggactcaaaggggacccgaggctacaagccatatctgacgccattagagtggttcctcacttcccaaaaccagggattatgttccaagacataacaactttgttgctggatcacaaagcgttcaaagataccgtcgacatatttgtcgatcgctacagagacatggatatat

SEQ ID NO: 35867 - DNA, 406 bp, Gossypium hirsutum
  Clone ID: LIB3149-060-Q1-K1-C11
ctcaaaccaaaaatctttgtcctctttttttgtgtctctttcaaattttcatttcaaggtttttggtatgaggagatacagtcctcaatactatagtccaccaaggagaggttacggaggcagagaaaggagtcccccaaggaggggctatggtggtggtggtggtggtagtggtggcggcggcggcggtggaggagggtatgggagaaggagggagcagaataatggaagccttttggttagaaacattcctttggattgcagacctgaagaacttcgaattccattcgagagattcggacttgttcgagatgtgtatattccgaaagattactatacaggggggtatattggtttgaagtaaaaaacaagccgaagccccacatttgatgaatccgaggatttt

SEQ ID NO: 35868 - DNA, 422 bp, Gossypium hirsutum
  Clone ID: LIB3149-060-Q1-K1-C3
cttgttaatgttttgaagtctctttgcaaggggaaggactggatacttttcctcaaggtgtgtttttctttactgctgcttagcttcattggagccttaccatttcaggctatttttttcataggacttccacttgcctttatagctttctatgtatatgacaaaaaagagcaagaaattgatgctttcattctagaaactttctcaatgggatgcaaattgaaatctggtattgccaggaaattggtggcctccaagaagaatgattgatagtatactagaattggactttggagccccaattttccttaagaaaaaggggggggggagctcttttcgaggattttaagcatttggaccattgttacttgtattgtaggcatttcactttgagaccccttcatatcacttgtatgtattcc

SEQ ID NO: 35869 - DNA, 405 bp, Gossypium hirsutum
  Clone ID: LIB3149-060-Q1-K1-C4
cttgttaatgttttgaaatctctttccaatgtgaatgtttggatactttccctcaaggtgtggttttggttactattgcttatcttcattccaaccttaccatttcaggctatttttttcataggacttccacttgcctttatagctttctatgtatatgacaaaaaagagcacgaaattgatgctttcattctataaactttctcaatgggatgcaaattgaaatctggtattgccagaaaattgctggcctccaagaagaatgattgatagtatactaaaattggactttggagccccaatttaccttaagaaaaacgggtgggggagctttattctaggattctaatcattcgaaccatagttacttgtattgtaagcattttacttattgacccctttata

SEQ ID NO: 35870 - DNA, 390 bp, Gossypium hirsutum
  Clone ID: LIB3149-060-Q1-K1-C5
gcaaagtaaaaacccctttgttttaaaaatctgatcgctgctgctactctggtccggatcaagaaaaggaaatgttaggtgcgcttagtgctgcaagtttaacacttggtctggctggtgcgccagcagcattcaccgcccaatgcggcaatggtggcgctgccaaagccttagcgtttcctagtagcagcaacagcaacaaccgcgcccaattgttggttaagagctcattcacttccacttccaggactccaccatcctttaggacagccgttgctgcagtcgactccgaccagctcagtcccgacatgcaacaatccaaaaaatactattttgttgttgcgaatgcaaagttcatgcttgatgaagaggagcacttcaaagaacttt

SEQ ID NO: 35871 - DNA, 397 bp, Gossypium hirsutum
  Clone ID: LIB3149-060-Q1-K1-C6
gcaaattaaaaacccctatgtttttttaattttatcgctgctgctactctggtccggagcagtaaaaggaaaagttaggtgcgcttacttctacaagtttaacacttggtctagctgttgcgccagcagcattcacctctcaatgcggcaatgtgtgcgctcccaaagccttagcgtttcctagtagcatcaacagcaacatccgttcccaattgttggttaagagctcattcactttcacttccaggactgcaccatcctttatgacagactcagctgcagtcgactcctaccagatcagtcccgacatgcaacaatccaaaaaattactattttgttgttgctaatgcaaagttcatgctagatgaaaaggagcacttcaaagaacttttgtttg

SEQ ID NO: 35872 - DNA, 108 bp, Gossypium hirsutum
  Clone ID: LIB3149-060-Q1-K1-C8
ctaaatcacaagccccctttctagattattttaactgacgcacacatgcatgccagggcgtaggtcttttatagtgtcacctacctccaattcactggaccgcaatta

SEQ ID NO: 35873 - DNA, 404 bp, Gossypium hirsutum
  Clone ID: LIB3149-060-Q1-K1-C9
cttggcaggttatccaaatctgagtccggtagttgaggaaggaatatgtcaggttttggcgcatatgtggttggactctgagatctatgctgcggcgggaagtgatgcagcttcatcgtcatcctcgtcatctgcatcttcttcttcatcatcatcaccatcatcatcctcttccacatcatcaaagaaaggaaagcgctcggattttgagaagaaacttggcggcttttttaagcaccagattgagtcagattcatccacagcgtatggagagggattcaggcaaggtaatcaagcagtgaacaagtacggtcttaaaaggacccttgatcatattcggatgacaggaagcttccctttttgattcacgaatctttcttttcacataattcgagaaccagatt

SEQ ID NO: 35874 - DNA, 338 bp, Gossypium hirsutum
  unsure (1)..(338): unsure at all n locations; Clone ID: LIB3149-060-Q1-K1-D1
atcggtggntcagcccgctggtcnggattgtgatggagccttttcgcagattgcacatcctcgcactgcggagaacttccgtgccctctgtactggcgagaaaggcgtcggccgcagcggtaagcccctccactacaaaagctcttctttccatcgtgtgatccctaactttatgtgccaaggaggtgacttcaccgccggaaacggtaccggaggtgaatccatctacggatcaaagttcgctgacgagaacttcatcaagaagcacactggtcccggtattctctcaatggctaacgctggaccgggaactaacggatctcagttcttcatttgca

SEQ ID NO: 35875 - DNA, 394 bp, Gossypium hirsutum
  Clone ID: LIB3149-060-Q1-K1-D11
ccgagttaccaacacccctgacgttttgactgaggacgtggcggatttggcgatcggtgggatgttggcggtgttgaggaagctctgtgagagtgatcggtttgtgaggagtggcaagtggaagagagggcaatatgtgttgactactaagtttactggaaaaagagttggcattattgggctgggaagaattggcatggcaattgctacgagagctgaagcatttagctgccctattagttactactctagaacagagaaaccagagatcaaatacaaatactatccaagcgttgttgagctggctgccaactgcgatatcttggttgttgcttgtgcactgactacagagacccaccacatcatcaacagggaagtcatcgatgcattgggt

SEQ ID NO: 35876 - DNA, 406 bp, Gossypium hirsutum
  Clone ID: LIB3149-060-Q1-K1-D2
gagagaatcatgaaggcccaggctttgagggataacagcatggctggttacatgtcaagcaggaagacaatggagatcaacccggagaaccccatcatggaagagctgagaaagagagccgatgcagagaagaatgataaatctgtgaaggaccttgttctccttctcttcgagactgctctcctcacctctggcttcagccttgatgagcctaacacctttggcaacagaatccacaggatgctgaaactcggcttgagcattgacgaggatgcaggtgaaggtgaagctgatgctgatatgcccccattagaggatgctgatgctgaaggcagcaagatggaagaagttgactaagcaccactcttcttgttggaactttttactagtttttttttaattatta

SEQ ID NO: 35877 - DNA, 406 bp, Gossypium hirsutum
  unsure (1)..(406): unsure at all n locations; Clone ID: LIB3149-060-Q1-K1-D3
ggaattnccgggctcacccactcgccctgaggtgatggatcttaccgaggatgacctgtttgataaatttgctagtggacgtctccatgggtactggattgtctcttgccatctcatacccaacatttgcagctgtaccacacatgttcatcaatggctacaagaatgtcttggctgttgcagtagcaacagagtattctttccgtcaggccgataaagtgaaagagtatttgacggatccaagcaaatttgccgtttctactgcccctgttgctgctgctggtggagctgctccggctgctgctgtccctgcaaaggagaaaaaaccagacccacaataagagtctgatgatgatatgggattcagtctctttgactaagtttgtctttattagtataaaaattc

SEQ ID NO: 35878 - DNA, 350 bp, Gossypium hirsutum
  Clone ID: LIB3149-060-Q1-K1-D4
gcttgcgcctcgtttccaactgcccagttcttaactttagcggcaaagagagaaatttcggcgccagggccgcgccatgggtcgcatgcacagctgcggcaagggtatttctgcctcagctctaccttataagagaactccaccaagctggctcaagatctcttctcaagatgtcgaggagaacatttgcaaatttgcaaaaaagggcttgaccccatctcagatcggtgtcattcttcgtgactctcatggcattgctcaggttaagagcgttactggaagcaaaatcttgcgtatcctcaaggctcacggtcttgcccctgaaattcccgaggatttgtaccacctta

SEQ ID NO: 35879 - DNA, 344 bp, Gossypium hirsutum
  Clone ID: LIB3149-060-Q1-K1-D5
ggccgacgccacggcgtgcgaatgatctcacctaggataacccgttttatttttatgctagttggcaattacatggcgactaggatagtttctagccatctcatacccaacataagcagctgtaccacacatgttcatcaatggctacaaaaatgtcttggctgatgcagttgcaacagactattctttccgtcaggccgataaacataaagagtatatgaccgatccaaacaaattttccgattctactgtccctgatgctgacttctatggtactgctactgctgctgctgtccctgcaaaggataaaaaaccacaaccaaaaaaagagtctgatgattata

SEQ ID NO: 35880 - DNA, 343 bp, Gossypium hirsutum
  Clone ID: LIB3149-060-Q1-K1-D6
gaacaataggtgcctttttcttgccatcgtttgctaggaatattttctcatcaatgagcagggtgcaacctaatttttatccattatcaaggcatttccaacacttacccttggaaaaattaaccagcttttctgctcattttcccagagaaaacatgctgatgagcattctttaaaactcagaaccttgcactgtctttgcccgatgatttgagattcaagatccaaatcttataatggtgtactttgtgaccgcagattgatgtgctaagaaacagaatatgcatatcctacttgtcttcaatacaagaaccaataccatggttgtcagcttatgggtttt

SEQ ID NO: 35881 - DNA, 413 bp, Gossypium hirsutum
  unsure (1)..(413): unsure at all n locations; Clone ID: LIB3149-060-Q1-K1-D7
cagctagcaacaaaggccgcgcgtaagtccgttccggcgaccggtggagtgaagaagcctcgccgtttcaggccaggaactgttgctttgagagagatccgtaagtatcagaagagcactgagctgttgatcaggaagcttcctttccagaggttggtgagggaaatcgcgcaagatttcaagaccgatctgaggttccaaagcagcgccgtcgctgctcttcaagaagcggcggaggcttatctcgtcggactgtttgaagacactaatttgtgtgcaatacatgccaagagagttacaatcatgcctaaggatatccaacttgctaggaggattagaggtgagagagcttangttgcttgtatttgctcgatcgattttaaaattcagaaagacctagatcttggatttag

SEQ ID NO: 35882 - DNA, 414 bp, Gossypium hirsutum
  unsure (1)..(414): unsure at all n locations; Clone ID: LIB3149-060-Q1-K1-D8
gatctacaggatgttttaatcgcagtaggagttaccattctgcatagaaaacccatgtcaggggatccgggagccccattattgggttcctctgcatttccaatcttcataatttatagcgtcgagttgcctgtcaagtgtgaccccagcaagaagcacatgattttaagccgcaggcaattaaatgcggaagctctggcaagttcaacaggagccaaagcagtaagcaattcttgggttttgagctccatatctgcatgcaaattgagtcttggcgaataatgatacagattatagaacgtccctttccttgtatgtctaagcagttctataatttgtatcttatgtttaaatatggcttattccagcaataggttttatattttatcgatagctntggctgcaagtatgatc

SEQ ID NO: 35883 - DNA, 337 bp, Gossypium hirsutum
  unsure (1)..(337): unsure at all n locations; Clone ID: LIB3149-060-Q1-K1-D9
caagcgtacgcttagaccaaaaatctttttcctctttttttttttttcttccaaaaatccatttcccgaagatagtttttattaaattcaatcccccatcccattntccaccaatgataagtttccgaagcaaaaaaaagaatccccccaaaaatgactatcaatccaagagcaacaatcaatcatttcaattgctccttttccataccatcttcaataacaacacaaccttattctccaacacttatatgttcaaaccttcctttctattaaataccaaacatacttttcatcccattcaacatattcgaactcctttcaaaatacatttttttca

SEQ ID NO: 35884 - DNA, 392 bp, Gossypium hirsutum
  Clone ID: LIB3149-060-Q1-K1-E1
gacaacttttatccccttttccattactatttatactttctcaaccccaacccttaaacgcccaaatgtgtaaccctatatcattctctgcacaacttttcttaatccacaacctttagctgctctatgctattccatcacggatccaaataacttttcaacatgtacagttccatttcactgccccccctcttactgatcctgttacttcaactgaaattgcaaattttgatagtcatactgttaacagaagcctgcaactagaaagacaatgagcatgtcaatattctcatttcagtgactgtgcttctattagcaacaattatgaaaaatttataggtgcgttcagttcgccgttacaattgagaaaagactgatatctctagagtctt

SEQ ID NO: 35885 - DNA, 225 bp, Gossypium hirsutum
  Clone ID: LIB3149-060-Q1-K1-E10
acccaacggccgcaaaatcccaccacaatccaatcgattttgtttctacaattacctcatctaagaaagttttttttttcttactcaaacacccacattttcactctctacaccatataagtgtcccttatctctcttatatttaatctcttatcccacaaccatctaggatcctatacccaacttttactcacattcccacacaagaactcaaactacaataaa

SEQ ID NO: 35886 - DNA, 341 bp, Gossypium hirsutum
  Clone ID: LIB3149-060-Q1-K1-E11
gaaagctcaactccggtgctacttagaaaatgaaggaaaaagaataaaaaagaaacgacggaaaagttggagagaagtcaaaagaaaaaaaaagtttatttatttatttaatttagattatgacatcgtcatggtttcatttaaaaaaaaaaaaaaaaaaaaaaaaaaaaaaaaaaaaaaaaaaaaaaaaaaaaaaaaaaaaaaaaaaaaaaaaaaaaaaaaaaaaaaaaaaaaaatatagaaaaaaaaaaaaaaaattaaaaattaattataaatatatataaatttttttatttataaataaattaaatttaattaaatataattttacaaattttttt

SEQ ID NO: 35887 - DNA, 400 bp, Gossypium hirsutum
  Clone ID: LIB3149-060-Q1-K1-E12
gcgattgattccttcatttaatcgcattttggttgagaaaataatccctccttctaaaagcaacgctgggatcttgcttcctgagaagacccccaagttgaactctggaaaagtggtagcagttggaccaggagctcaagacagagatgggaagcatatcccagttaatctgaaggaaggagatacagttcttttgcctgaatatggtggcactgaagtcaagcttggtgaaaaagagtatcacctatacagagatgatgacatcttgggaacccttcatgactgatttttgcggctgtgggactggagaatttgattctcattcaaatatgtctctgttcttgaaagaaacaaatatttaccttggacttgtgactctatcagtaattttacatgttta

SEQ ID NO: 35888 - DNA, 360 bp, Gossypium hirsutum
  Clone ID: LIB3149-060-Q1-K1-E2
cgacaatttcatcatgtccgatgtgccggcagccaataacgacacgcctgagactgtatacgtaattgggagctgatttctggttctgttgagtgctgtgaagcctattcaggacaggaccctttacaaaatctcagtcattatacaatatgcataaagtccagttttatttctattagagattctcaaatccaaaggtggccatgttactgaactggtcaactttttttttacaaagggtttgcattggactattttgctcccccaaagttctttgcgttgtttgaataaagtatttgtatttggaatgtgcattgcaacttgccaggtgcagaggttacgggaaaaaatggaaaattt

SEQ ID NO: 35889 - DNA, 413 bp, Gossypium hirsutum
  Clone ID: LIB3149-060-Q1-K1-E3
gggaaatatcgattccgaggatcgagtcaaaattttgaaatttttattcaatatagttatagctaatcccaacaatcaaacaattagaaaaaaatctattggaataaaagaaataagtaaaaaagttcctcgatggtcatacaaattaatcgacgatttagaacaacaggagggagaaaacgaggaaaatgtaacagcagagcatgaaattcgttcaagaaaatccaagcgcgtcgtgatttttactaataaccaggcaaacgccgatacttatactaataccaaggatgctaatgatcctgatcaaacagacgaagtggctttgatacgctattcgcaacaatcggattttcggcgcgacataataaagggttccatgcgtgcccaaaggcgtaaaacaattacttgggagc

SEQ ID NO: 35890 - DNA, 240 bp, Gossypium hirsutum
  Clone ID: LIB3149-060-Q1-K1-E4
caaaatattatcacctattatctaccctttttattatcccacacccaaaactgtatacgcaaatgtgtacatttaaacccttctatccaaatctattaaacccatacaaaacaacaacctttacacaaaatccacttactaaacaatccacataaaatcccttcttctttttattaaaaaaaataaaattccaaaataccctcaattcttaacaagacaactttattattacaaaatctt

SEQ ID NO: 35891 - DNA, 364 bp, Gossypium hirsutum
  Clone ID: LIB3149-060-Q1-K1-E5
acttaatggtggtgactttccatatgtttcttgtgatggtggcagattgttcgaagctaaagatgttgtatttgaatgtggtccaaattgtggctgtaggcctgagtgcgttaaccgttcatctcagcagggactaaaataccagcttgaggtctatcgcactaaagaaaaaggatgggcagttagatctttggactttatttcttctggcgcaccagtttgcgagtatgttggcatcctaaggaagaatgatgaattagaagatatttcagaaaatgactacatatttgagattgattgctggcacactatgaaagggattggaggaagagagagacgcctatgtgacgtttctctttctatg

SEQ ID NO: 35892 - DNA, 364 bp, Gossypium hirsutum
  Clone ID: LIB3149-060-Q1-K1-E6
atcagccattagctcccttgctgcacatttgtgagcaagtaaaaatgcttcttgcaccttgcgtcatgttctgtgctcttgttctctcttttgttgctgcctcttgcaccaacaattggtatcatgagcctatgtcttacgggaccattgattttgcttcccctgcttgttgaaaagaaagaagctgtcaaagcacaagcaagtcattaaggactgcttgtagagaagataatatcggctcaaacttataagatccccaaactagcttgaataagctgaaggaggagtttaaaggaaaggtgtgagctttccaaatgtgaaagcttagcaagatgtcaaagctgcaagcttagcaaagtgcgag

SEQ ID NO: 35893 - DNA, 402 bp, Gossypium hirsutum
  Clone ID: LIB3149-060-Q1-K1-E9
gcaaaatcccacgacaggccagataggatgattggctcgtccagtttacctgaaactgggagctgtcatcttcatggctagactgaaatatttcacattttctgttctctactcccagttaaggtgtcgtgttatctctcttatattttaatctgctaatagtgtcaaccatcttgggtcctcggagccaaaggttcagtcacattcccacagaagagctgaaaagacaataaaatcttttgctgcacgcattgtccaagagaaataatcttgtttgggtggttttcgattgacacgtcaatgctgccaagaataaggtggaaatcatgaatttgccgacatgaaaatagattccccaaggaagcactcatctattcatatcgttaaacgagaatatttctg

SEQ ID NO: 35894 - DNA, 404 bp, Gossypium hirsutum
  Clone ID: LIB3149-060-Q1-K1-F1
tatttttcttctttctcttgtttccttttctcttcctcctttattgtcctttataacaaaccgctgccgctgccgctgcctctgcctctgcctccacaccttccagcgtcttgccttcgattgaaggtcagcttccttcccatcaaccttttcctgtcattcttttttagctttgggtatccacaggccaaacaaacacacgctacaggaggaagagagttttcgtgagagagaaaccctaaattttctctggcgtttctggtttttgtgatttttgaaatccgctgcttcatcggagactcatttcaggatttaagaacagatatatggttatggaagtactgttggatccaaataaagaaatgtcaggggatgattccattgtaattactcaatttaacatc

SEQ ID NO: 35895 - DNA, 403 bp, Gossypium hirsutum
  Clone ID: LIB3149-060-Q1-K1-F10
gagcaatcaatgttgtttgctcatcaccttatgcttctgcaagggtaaagagccaactgaaaagagtagctcgaccaatgtactcgaatcctcctgttcatggggcaagaattgtcgccaacattgttggggattcagctctcttcaaggaatggaatgctgagatggaaatgatggcagggagaatcaagaatgtgagacataaattgtttgatagtctttcttccaaagataaaagtgggaaggattggtctttcgttcttaagcagaccgggatgttttctttcacaggcttaaacaaagctcagtgcgataatatgacaaacaagtggcatgtttatatgaccaaggatggaaggatatcacttgcaggattatctttggctaagtgtgaatatctagc

SEQ ID NO: 35896 - DNA, 387 bp, Gossypium hirsutum
  Clone ID: LIB3149-060-Q1-K1-F11
ccgtttcccaactgtccaaggaattgttcgccgaggtctgaaaatagaggccttgattcagttcatcttggaacaaggggcatccaaaaatctcaatcttatggaatgggacaaactttggacccttaataagaagatcattgatcctgtttgtcctaggcatacagcagtgattgaagaacgacgtttgttattgaccttaactaatggtcctgataagccatttgttcgcattatccctaggcataagaaatatgatggtgctggagagaaggcaactacatacacaaagaggatatggttagactatgctgatgcagagtgcatctcagtggatggaggaggaaccttaatggattggggaaatgccatcgtgaaagaaatcat

SEQ ID NO: 35897 - DNA, 402 bp, Gossypium hirsutum
  Clone ID: LIB3149-060-Q1-K1-F12
cccacgcgtccgggctgaccgagtagtcactgttagccatggatattcttgggagcttaaaactgcagaaggtggttggggtttgcacaggatcataaacgaaaatgattggaagttgaggggaatagtcaatggaatcgatacaaaggaatggaatccacaatacgatattcacctcaaatccgatggttatactaactactccttggaaacactgcaaaccggtaaacctaaatgcaaggccgcgctacaaaaggagctcgggttgccagttcgcgaagatgtcccactgctcggctttatcgggagactagatcaacaaaaaggtgttgatctaattgccgaggcaattccctggatgataggccaagatgtgcaattagtcatgttaggcaccggcag

SEQ ID NO: 35898 - DNA, 353 bp, Gossypium hirsutum
  Clone ID: LIB3149-060-Q1-K1-F2
aattaagggaatgacctttgttatccagggttttggtaatgttgggtcttgggcatcaaggctcatacatgagaagggtggtaaggttattgcagtgagtgacataactggcgctcttaagaacccaaacggaattgatataccagaactgttaaagcataaagaagctactggaagtttgaaaagcttcaatggtggagattccatggatccaaatgaactgcttgtacatgaatgtgacgttctcatcccgtgtgccttaggtggagtccttaacagggaaaatgctgcatatgtgaaggcaaagtttataatagaggcagcaaaccatcctacagatccagacgcatatg

SEQ ID NO: 35899 - DNA, 322 bp, Gossypium hirsutum
  Clone ID: LIB3149-060-Q1-K1-F3
gtgaagtgttcggatcgcggcgacgtgggcttttcgttgcccgcgacgtcgcgagaagtcgggtgaagcttatcatttagagggagagagagcgagagagagagagggagagagtttgactagaaaaaggaaccatacaacgggatggcttgtttttactaaaatttattgatgatttgtggttagatggttagattttgattttggtaggagtttgtgtgtggggtggatggaaagtttcggtggaagacaaatgacgtcagtgcttgaactaaaccaaatggggcttgaatagggaaatgatgattgattggaagatcat

SEQ ID NO: 35900 - DNA, 294 bp, Gossypium hirsutum
  unsure (1)..(294): unsure at all n locations; Clone ID: LIB3149-060-Q1-K1-F4
gaccatgaactagaattgttggcctcttatttagcaaatataattcaagtgangagcaaagaagaaaagaaaaagaagaaattagtgttgatgagaactttaaagcaccttttttttagtgtggctgaacaaaggcgttcaagccccatttttattgtatcttcatttttgttgcaatgttaataatagtaaaaaaaaaaatataaactatcaaactncnnaaaaaaaaaaaaaaaaaaaaaaataaaaaaaaaaaaaaaaaaaaaaaaaaaaaaaaaaaaaaaaagataaaaa

SEQ ID NO: 35901 - DNA, 394 bp, Gossypium hirsutum
  Clone ID: LIB3149-060-Q1-K1-F5
agcgctacagagaagaggaagaagagatggctgtgagcgcaacggtgatcggagcacttctgggactgggcacccaaatgtactccaacgctctccgcaagctcccttatatgcgacatccgtgggagcacctgttggggatgggtctgggagccgtgttcgttaaccagcttgtgaattgggacgctcagctccaacgggaccttgacagtatgctcgaaaaggccaaggctgccaacgagcgccgctactttgatggagatgatgattaatgctttccccctatcatcagataagatattcatgcgccaagctactgtggtcataaaccggttcagattgtgagtggatgattttggacttgttgttttggaaacttcttttgctttttctt

SEQ ID NO: 35902 - DNA, 320 bp, Gossypium hirsutum
  Clone ID: LIB3149-060-Q1-K1-F6
ctctagcattttgactgcatgccttggtaccactccttccaggtaaaatcctctcatttgctgtagactttcaatggctatgatgtctgccaaagtgtttgctatttgatggacatgttgaaattttacgtcttcataacatgtgcatgtgcctctactgcgaaagtcaaattaacattctcgtgtatgatcgctctaaaggcaatcactcttccttttctgtttctggcaactatccccgagcttgatctaaaaagatcttgattaaaccctgcgtcaaattaatttttatgtcttctcagcaattggacccatgagtc

SEQ ID NO: 35903 - DNA, 89 bp, Gossypium hirsutum
  Clone ID: LIB3149-060-Q1-K1-F7
gacgaggtaaatttactatcgcgtcgacctacaaccaattcactggccaaaaccctacaacgacccaactgaaaaaactctcaccacat

SEQ ID NO: 35904 - DNA, 286 bp, Gossypium hirsutum
  Clone ID: LIB3149-060-Q1-K1-F8
atcagattgatacaaatggtatgggagacaatactttttaggccattggataacgagaaatggggtccttatttcatgtgagagatttgaaattttctttttcttttaatttctttggtggtttgtgagcaaaagagcaataagtgatgagtcccacttgcatggggtcattttctttattcttttttatttattcccgtttgtcattattagcttgtaatgtatagaataggttacattgcatcttgtttgagctgtaaatgcaatattctttttgtttcttttt

SEQ ID NO: 35905 - DNA, 300 bp, Gossypium hirsutum
  Clone ID: LIB3149-060-Q1-K1-G10
aagaaatgcttccaaccggataagttgttttctcactcgagctaccctcccacttcttattgttcacaatacaggaagactgccgccacctattattttaatctcttatctactcacactgctaaagatccaacttttggtcacttcaagtacccaaaacatactctttgattaataccctatccccaatttaatcccactcttatttatttgtctctatacacacctaacaattattcttctgttaccaaaaactttcaaatattgtatcatgaataattaccatatcttcctaattta

SEQ ID NO: 35906 - DNA, 387 bp, Gossypium hirsutum
  Clone ID: LIB3149-060-Q1-K1-G11
aacggaaagtttgggcctgcgctccttactattatctaaagcgtccttgggaatagacgggtgggaaagaggaaatcaagagcaaagcctgctcctaagaagcggatggataagcgtgacactgtggtcatattccctttttgtaaccatggaaccagtgttgagtgccgacttgatatgaagaacttgattggagaatcctctagcagaatatgccaagaaagctttagcactgttataacagctttgactgaaccaatagacatatacagtgaatggattgatgaatgtgaacgtgttaacaaccttgaaaaaaaagacgatggggatcatgatgaaagctatgtgcctagaaaacgggtttcgacatctgtatgggactagcag

SEQ ID NO: 35907 - DNA, 393 bp, Gossypium hirsutum
  Clone ID: LIB3149-060-Q1-K1-G12
gaatcatataccacaaaatcttcgcactttttcctcaatgtgaaacttgcggtcatgctggaggagggaccttattatcctggatttatgtgagattctcattgactactaggctgcggtcccatgaatgtagacactcctgtactatcaatccacccttaaagaaaagaaacggtgctacctacttgtaacgcacataataattgaatatggtgttggggtgtacaaatcaaaaaccatcctgattgacgacactggtagacaagaccattgccaatgctaatgctatgtgacatgatcaacaggtgcatgtaactgatcctaaactcactcacagccacgagatctttgcttctttaccaccgatactaaccaaatatcttatgccatatt

SEQ ID NO: 35908 - DNA, 399 bp, Gossypium hirsutum
  Clone ID: LIB3149-060-Q1-K1-G2
gttgcctatgcccgacaatgccctcttttgcggtgccctaagcaagttacaaaagccgcaggatgtatcatcatcattggcaacatcaatcatagagggtagatcaaaactgttctttacagtgctgatgatttcctcgacccttttcctcgtttcccgctaggtgcttttctttcgggggtggtctgtgcttgtccgaacacgtgcttcacacgtaaggtttgtgtttgtatgtttaggcgtgcgggtgtagtgttgttgatatgaatctttggtgattttgataagttctattaatttttttttccttttttgggttttggttcagaatgttgttaatgcattgcatcaagggtttccttgtttaatttattgggagcataccattcttttagtacc

SEQ ID NO: 35909 - DNA, 273 bp, Gossypium hirsutum
  Clone ID: LIB3149-060-Q1-K1-G4
attttaaacagcgactccaacatcattctgtataagcttaaacccctctttcaattttccatcgcacaggcatatgaacgtatataccagatccagatattcaacgtcttaagataattcgtgaaggaatatatggaatattatgcctaccctgaaattattttcataatttgcttaaaaaatttaattgggatttttattattcaaaacactttttttttttttttttggaattttaaacctaaaaatttattaaaccaattcttttacttt

SEQ ID NO: 35910 - DNA, 389 bp, Gossypium hirsutum
  Clone ID: LIB3149-060-Q1-K1-G5
aatggaaacaactgtggtgagcttgtaaaataagaagatattgatggatttcttgggggtggtgcttctttgaaggggcctgagtttgctacaattgtcaactctgtaacaaccaaaaaggttgttgcttaaatatatgtaaagtggattctggtcaatgaataaaaggacgaagagaagctgtttcaggttgaagcttcatggtgatgtatgagttccagtgttatccagtggggttttgattgcttattgagttccttttccccaaaataacacgaaaaagtatgttcgttctcatgtgctatagatcaatttctttaaactgcttgtggaaatatatatagcttattcacatatagaaaaaaaaaaaaaaacttaaacaggggctc

SEQ ID NO: 35911 - DNA, 332 bp, Gossypium hirsutum
  Clone ID: LIB3149-060-Q1-K1-G6
gagagattgatgaggttccatatttcactgattgcaggacaaagacaaaagatatggctactgtcttcctcttcaagtctgcaccgaggacaccaagcgtactttgttactttcttagatcttagattaactagtaaatgaatatagttccaggaaattcgccagaccagtatctttattttacctggtatctgtaaatcctataatttctaatagaaatttcttgtttcgggttgtaaaagataaacattaggattcaagctagcattatgtaatggtttataggcgcttctgactgagaactcctctgaatgcttctctctccacacctg

SEQ ID NO: 35912 - DNA, 282 bp, Gossypium hirsutum
  Clone ID: LIB3149-060-Q1-K1-G8
gctatccatgaaacccaaagctggaaagaatttgcggaaggctgccaaggatccaaacaaggcaaagaggcctgctaatgcctactctgatatcaaggaggagttacgatagcaatacaagaagtgatcaccctaaaaacaaatccgttgcggctgtcggcaaagctggtggagataaaaggaagagcttgtctgaagctgaaaaggcaccttatgtagctaaggcagaaaaacggaaggttgagtattaaaagaacatgaaagtctacaataagagacaag

SEQ ID NO: 35913 - DNA, 391 bp, Gossypium hirsutum
  Clone ID: LIB3149-060-Q1-K1-G9
gttcgcaggggaataagacttgtgacccgattcaacccggaaagaaatgcttcaaaccggattcattgttttggcacgcgagctacgcgtttagttcttattggtcacaatacaggaagactggcgccacctgttattttaacggcttggctactcagacggctaaagatccaagttttggtcactgtaagtttccaagtgttactctttgatgaatacccaatcacaaattgaatcgaattttatttatttgtagtaagacagacctaaaaattattctaaagttagtaaaaaattttaaatattgtataaggggtgattacgatttcttcaaattgtatgatctcattcattaaatgaattaataaatttattataattttatcttgct

SEQ ID NO: 35914 - DNA, 319 bp, Gossypium hirsutum
  unsure (1)..(319): unsure at all n locations; Clone ID: LIB3149-060-Q1-K1-H1
gaaactaggctgttcaatttaagctatacagaagtgattgaggaagtgatctagagcaagaatgggaacttcaatcaagcacggggagcaacaaaccatagcagccctggacgctggtctttctattgatgaccaggctcattcaagtgttattatgggcatcattgatgtgtgtgttctttgttcctctattgtatattttacctgtgacacagttttctggaatggtggttgttcctttgaataaaaaaatagtttatttcttatagtaaaaaacaaagacnagagctacgacacgatcgacaacgttaaagaaaat

SEQ ID NO: 35915 - DNA, 269 bp, Gossypium hirsutum
  Clone ID: LIB3149-060-Q1-K1-H10
ggtttattagttctgaggaaacttgtttgtgtcaaatcgttggacttgtttgggtttgctttttgacccttggctttattttcaatgaagttttggttgctgatagttaatttttttgtttatgtattaatatattagattctataaaagaagtatgcacatttcttttcaaaaaaaaaaaaaaaaaaaaaaaaaaaaaaaaaaaaaaaaaaaaaaaaaaaaaaaaaataaaaaaaaaaaaaaaagaaaaaaaaaaaaaaattaaatgg

SEQ ID NO: 35916 - DNA, 326 bp, Gossypium hirsutum
  Clone ID: LIB3149-060-Q1-K1-H12
gggagatccatgtgactattattgctacaggcttctcacagtcatttcagaagacattatgaactgaccccaaggctgcaaaacagaatgacaaagttgcagggggacaagaaagaaaggggatacccttacccctcaaaccatcttccccttcaactgttccgtccggatcatctcaacgaaagctattcttttaatttccctgatctcttctttctacctgctttttgctgttagatgtgtaaagatcttgaagctcatgagtctttagttgccatttgttttatatgattgtgcgcctcttcaataattaacgagtttttgag

SEQ ID NO: 35917 - DNA, 358 bp, Gossypium hirsutum
  Clone ID: LIB3149-060-Q1-K1-H2
agaaacttctgcaatgcaaacgtctcagaaacataaaattacaggcaagtgcattgactggcccgtgcaagagctggagtcctattgttggcctcccaaccagagcttagagccataccagtcaggttctgatgatggcagcaatagtgtgcaacattcagttcctaacctggagcgatactgcacccttgattcatcgtccagtatgcagaattcttcttcgacagccagtttttcacccgatggcagtcctgtttcgcagcaaaactacacttacccattggaccttcatcattccccggaaaatacgtgtgcttcaccaataagtggttcttgtgtaatagacaatgaaaatgac

SEQ ID NO: 35918 - DNA, 389 bp, Gossypium hirsutum
  Clone ID: LIB3149-060-Q1-K1-H3
accaatttggcgcaagttcatgcagcagaaaatgcaaagagctttgatgaaattgagttagagacgatgctccgcaagaaatttgcacgccgtgatgaggaatatgattcaatgcttggggttgttcgtgagacacctcctgagcttatccttcctgataacattataccagataaagcgccaaaagctgcttaggagtggtaattcaatttttttttttgagattcaatgttactggatattttgtaatcagctgagaatggctgcattttagctgcaataattttggtggtgctggctgaggtgttgaaaagtgaattatagagcacacttattcgctaaccttatcatccgtttgggtattagaagtcgaacttcattttgcaact

SEQ ID NO: 35919 - DNA, 406 bp, Gossypium hirsutum
  Clone ID: LIB3149-060-Q1-K1-H4
cccacgcgtccgcgaatcatgggtgttttaagtggattaattgctgtcggaaaatggttcgagcaaatctgtaactggagaaacccgcttacgacgattttaatccatatcctttttatcatcttagtcctttatcccgagctgatacttccaacaatctttctttaccttttcttaattggaatatggaactatcggtggagaccacgacaccctcctcatatggatactcggctttcacatgctgatgcagctcatcctgatgaactagacgaagagttcgatactttcccaacttctcgaccttccgatatcgtacggatgaggtacgatcgtttaagaagtatagctgggagagttcaaactgtgatcggtgacctcgcaactcaaggggaacgatttcagt

SEQ ID NO: 35920 - DNA, 372 bp, Gossypium hirsutum
  Clone ID: LIB3149-060-Q1-K1-H6
gctgctgttactagttcttcttaagaggggttcatggcaattatgaacggcttgtgatcagattcattaattaagtaagatgggttcggtttgcttgctgctttagctgattcttcaggttacagaattttgtagctggattttaatctttaaaccttgaagctgttttataactgtattaatgtcatataaaacataaatcttttagcttgagagtactgtctttaattgaccatatggcaagaactgaatttatataaaaagcaaaagaacggtctctaatcacccttttcttgaaaaaacgtgtgcttcaccaataagtggttcttgtgtaatagacaatgaaaaatgacttggggcttatgataaggg

SEQ ID NO: 35921 - DNA, 286 bp, Gossypium hirsutum
  Clone ID: LIB3149-060-Q1-K1-H7
gcaaacgataaggagtcccaatcagaccggttagaagctaatccaaaagtcaccgtggatgagttaattattggacctactgctattcaaaggaaaacgaagtttcttggtttttgtactaacaatactttcctggttgtgtagtctgccaataaaaattctatcagaaatcgttgcgttgggtgtttttgattgttttttgtgaattcaattcgcttgaaataaagatgaattaaatcgtccatgttatgagcaacagcatttggcctttaggagctggttttgg

SEQ ID NO: 35922 - DNA, 338 bp, Gossypium hirsutum
  Clone ID: LIB3149-060-Q1-K1-H8
gaaaaagcggcgaaagatgatgaagaaaatggctgctgcagccaaggatctgccaagtgagtacggtgaaaatgcagaagaagaaagtagtggtgcttcttctgttccagttcccatgccagatttggtgttgcctgcttcttttgattctgataatccaactcatcgctatcgttcccttgattcctccaacccatggcttgttaggcctgttctagatacacatggttgggatcatgatgttggttacgaaggtattaatgtcgaaagactgtttgttgcaaaagagaaatttcctatttcattttctggccagattacaaaggacaaaagggatg

SEQ ID NO: 35923 - DNA, 355 bp, Gossypium hirsutum
  unsure (1)..(355): unsure at all n locations; Clone ID: LIB3149-060-Q1-K1-H9
atttaatttttcttctccaattataaaaaaaaaaaatcatattttgcttcttgcatgttcgatgtaccatgtcttctctaaatgtattgttttatatatagtcaatgaattttggccttttcttatgcctaaaatgttggtttcatatccaagtttcagctgattctttacttgttcaaatgcttattatatgattatgaatgtttgaggattgaatactactcaaactcatgttgtaatttttgtattagaaattaaattatattttattttacaaaantnaaaaaaaaaaaaaaaaaaaaaaaaaaaaaaaaaaaaaaaaaaaaaaaaaaaaaaaaaaaaaaaannnnnnnna

SEQ ID NO: 35924 - DNA, 323 bp, Gossypium hirsutum
  Clone ID: LIB3149-061-Q1-K1-A1
ctgtcaccaatacttcctctcatatataaacaaaccccctttttactcattttttcctctcaattctcacttcctttacctccgttcttttgccgtcgtattttttttccagagatttgttcttttcgcttctttcgttatggggaagatcaagatcggaatcaacggatttggaaggatcgggcgtttggttgccagagttgctctccaaagtgaagatgttgagctcgttgctgttaacgatcctttcatcaccaccgattacatgacctacatgtttaagtatgacagtgttcacggtcaatggaagcaccatgagctta

SEQ ID NO: 35925 - DNA, 393 bp, Gossypium hirsutum
  Clone ID: LIB3149-061-Q1-K1-A10
gaggaggtggagagagaagaagctggatttcagtggcggagaacggcgtcgctcgcggtggaggaagagtgtgaaattggcggggctgatggtggtggtagatcggacagtggtgatgataacgaatggagctcgtgggattcgaataacggaaacgatagtaccgagttgtattatcagaaaatgatcgaggctaatcctggaaattcacttctcctcagcaattacgctagattcttaaaagaggttcgtgaggaccttgctgcacttgagaaggattatgaagaagtcggtgctgagtcaggcgagggtgatgaggaagatgaagatgagtactaaataagtaatgtttgagtggagggcttgcattttgctacccaatgatttgtttgc

SEQ ID NO: 35926 - DNA, 410 bp, Gossypium hirsutum
  Clone ID: LIB3149-061-Q1-K1-A3
gcggtgtcaccaatacttcctctcatatataattttaccttttttttactcattttttcctctcaattggacttcctttacctccgttcttttgccgtcgtattttttttccagagatttgttcttttcgcttctttcgttatggggaagatcaagatcggaatcaacggatttggaaggatcgggcgtttggttgccagagttgctctccaaagtgaagatgttgagctcgttgctgttaacgatcctttcatcaccaccgattacatgacctacatgtttaagtatgacagtgttcacggtcaatggaagcaccatgagcttaaggtgaaggactcaaaaacccttctctttggtgaaaagcctgtcactgttttcggcatcagaaaccctgaagaaatcccttgggg

SEQ ID NO: 35927 - DNA, 404 bp, Gossypium hirsutum
  Clone ID: LIB3149-061-Q1-K1-A5
gaaagatacacctatatcattggttgaagatccattcgaccaagatgactggagctcatgggcttcgcttcagtcttccatcgatatccaactcgttggagatgatttgttagtcacaaatccaaagaggatatcggaagctattcaaaagaaggcttgcaatgccttgcttcttaaggttaaccagattggaacagttaccgaatctattcaagcagcacttgactcaaaagctgcaggatggggagtgatggtcagccaccgaagtggtgaaacagaggataacttcatcgctgacctttctgttggtttagctagtggccagatcaagactggagctccttgtagaagtgagaggttggccaagtacaaccagcttcttcgcattgaagacgaactcggaa

SEQ ID NO: 35928 - DNA, 366 bp, Gossypium hirsutum
  Clone ID: LIB3149-061-Q1-K1-A7
atttgaaatgccattcccatgccttaatagtagtctaataaagatgttcgacacgaacacgtgaaagtcagagaaacttagttcaccatgtactaataaccaaaatggctggtcattttaatgatccttcgcttataacacattgtttattgacctctcaaaaaaaaaaaaaaaaaaagaaaacaaaaatagaaaaaaaaaaaaaatatataaaaataaaaaaataaaaaaaaaaataaaaaataataaatataaaaaaaaaaacaaggggggggccattttagaggatccaattttacttacccggctgtggaattaaatagtttttttttggtggaccttaaatttatttcactgtccggaggt

SEQ ID NO: 35929 - DNA, 410 bp, Gossypium hirsutum
  Clone ID: LIB3149-061-Q1-K1-B3
agtcccgaaatctctgtatatttcaacatgcctaaaaccttctcaaaattatcttcctctactttcttctttcactttactttgctcttcttctctgcaacctctagtggttccttctccaacattttgtctcccaaaaagttcggtctcaagcgagagaagctcacccatcttcacttctacttccatgacatagttagctcacgaaacccaaccgctatccctgtcgccagctccgcctcgaccaacaaatcccatactggctttggcgttgtcatgatggccgatgaccctttgacggccgcacccgaccccaactccaagctcgtgggaaaagcgcaagggatttacgcatcagcagcgcaagacgaagtcggtttattaatggtaatgaacttggctttcatgga

SEQ ID NO: 35930 - DNA, 405 bp, Gossypium hirsutum
  Clone ID: LIB3149-061-Q1-K1-B5
accaacgaatttttactttaattttacatttttaacacaatcccaaaatctacgcaatctggtcactggtctcactgcacttctcctttctagtccggaatccttagcggtctcccgcaccacaccttctcgaaagaaaaagcgccggcaaaacgcagcaagaagcttccatatggtggaaaatactgccattgaatatgaggctgacgaaacctttcaccagtacttgattacagttaagccttcacaaaacaatgcgaaaaaatatgtgattctgttatgatacccgatgaacttcacattggctggccccacacacactactgatttcagtgaccagtatgaagaatttacgaatctaaacaccaagacaataggtgtttataaagacagaggaacctgtca

SEQ ID NO: 35931 - DNA, 402 bp, Gossypium hirsutum
  Clone ID: LIB3149-061-Q1-K1-B7
tgaagattgtgaacagctaagaaaagccttttcaggatggggaactaatgagggcttaatcatagatatattgggtcacagaaatgccgagcaacgaaacttgattcgaaaaacctacgctgaaacctatggagaggatctcctcaaggcactagacaaggagctctcgaatgactttgagaggctggttttgctttgggctcttgatcctgctgaacgtgatgcccttttggctaatgaagccaccaaaaggtggacttcaagcaatcaggtccttatggaaatagcttgcacaaggtctgccaaccaactgcttcacgcaaggcaggcttatcatgctcgttataagaagtcgcttgaagaggatgttgctgatcacacgactggcgacttccgtaagct

SEQ ID NO: 35932 - DNA, 405 bp, Gossypium hirsutum
  Clone ID: LIB3149-061-Q1-K1-B9
cttcgacattttcacgcgctcacactggtcttgcgtctcttatttccattcaaaggggtttgaagataaaccagtgaagttaatctcatgttgaagatcttcaagaagaaaacatctcccaaagatgctttgcggacgagcaagagagaaatggcggttgcaacacgaggcgttgaacgggagattgcgtctcttcaactggaggaaaaaaaattggtggcagagattaagaagacggccaaaactggaaatgaggctgctacgagaattttagctcgccaacttgtacgactgcgtcaacagataactaatttgcaggggagtcgtgcccaaattagaggtgtcgcaactcatacacaggcattatatgccagtacctcgatttctactggaatgaaaggagca

SEQ ID NO: 35933 - DNA, 233 bp, Gossypium hirsutum
  Clone ID: LIB3149-061-Q1-K1-C1
aaaaaaaaaaaaaaaaaaaaaaaaaaaaaaattaaaatttaaaaaaaggtaaaaaataaaaggggaaggggaaattaataacgcatgcatgcaaaataatatactgtttcataaaatccaattaatttcaatgaaatgtcatgacgtttttcaacgtgaaagactgtaaaaaccgcgggggtttccaaaattaatggtcttacatcgtttccccttttcgacatatggctttt

SEQ ID NO: 35934 - DNA, 238 bp, Gossypium hirsutum
  Clone ID: LIB3149-061-Q1-K1-C10
gcctaaaggcctatgcccaagccttcaattttctccaaaagcccttgcgatcagcgaagcagggtcctccgacggtgtgagcacaatgcgcggtactgtgatgttgtagaggagtgcatgatcgtggggcgtggacgtgcgagctaggggtcgtgcgtgggcgtgtcgatgtacgtggtggagaggcgtataacgtgggggctacagctcaaggagaaagaagggtttgttgtttctg

SEQ ID NO: 35935 - DNA, 230 bp, Gossypium hirsutum
  Clone ID: LIB3149-061-Q1-K1-C12
tcgggcaaagttttagggttttgcctttaaaatttaacataggattttgtattttacggcaaagagttacctgggagtaagaatcttgcattgggacacagccctttagagggctacttatggtgccaacttggcagaatatgattcttctgtgctattggatttatgaaaaagaatattttcggatgatgtgaaaaagacaaaaaaaaagtcctgcgttctaaaagagg

SEQ ID NO: 35936 - DNA, 311 bp, Gossypium hirsutum
  Clone ID: LIB3149-061-Q1-K1-C3
gagcaaaccagggtgctacccagcctaaacccgagcaagagagtatactccagcatgcacagcagcagattgctttgcagaggctaattttgcaaccacaaggtgtgccgacaaaggttgtgtgtttgactcaagcacttaatgttgatgatctcagagatgatgatgagtacgaggacattgtggaagatatgagacaagagggtggaaaatatggtgcattggtgaatattgtcatcccacgcccaaatccgaatggagaacctgccccaggtgtcgggaaggtatttctggaatactcggatgttgaa

SEQ ID NO: 35937 - DNA, 375 bp, Gossypium hirsutum
  Clone ID: LIB3149-061-Q1-K1-C7
ctttcctttggcacatagaaaaccggtttaccatcctcttcatttcttgtttggctgtttaagtctttctgaattatcttttaacgtgaaatcttactgctatgttgctcaaatttttcgttttttcttgaagtatccatgtccggtgctcatattttgactcatatgtgtacatgggtatgtggatatgaccttctactaatcccgtcctggccaaatgtagttagtggtgttggttgtttaccaatatcacagtattcgtttgttgcatttattcttatccttgctgcagggtgcattactaccaaggagctgggaaccgtgatgcgatcacttgggcagaacccaactgaagcagaacttcaagatatgatt

SEQ ID NO: 35938 - DNA, 80 bp, Gossypium hirsutum
  Clone ID: LIB3149-061-Q1-K1-D10
ttttcttttaatttctttggtggtttgtgagcaaaagagcaataagtgatgaatcccacttgcatggggtcattttcttt

SEQ ID NO: 35939 - DNA, 109 bp, Gossypium hirsutum
  Clone ID: LIB3149-061-Q1-K1-D12
gagttttagtatatctaggagtccctatatatataaatatgcgagagtcgagagaggtagttttgttatctaccgcacagattattcatggtggatgatgtttggactt

SEQ ID NO: 35940 - DNA, 412 bp, Gossypium hirsutum
  Clone ID: LIB3149-061-Q1-K1-E10
gaagttggatagatttaataagcagcaggagaagtgtcagtcgatgctctccaacatcgccgggaaatcattatcatctagggcagccgcagctccaaaaccggcatctgcaccgcctttttctggtgcaaggccttctgctcctgtcaaattctcaaatgataccgagaggcttcaacatattaatagcatcaggaaatctcctgttggagctcagatgaaacgtgttatcgacattctttttcagacaaggcaagctttcacaccggaacagatcaatgaagcatgttatgtcgatgtgaatggcaatagagatgtttttgagggcctgaggaaaaatccaaaagtgtactatgacggaaagcgcttctcttacaaggctaagcatgatgtaaaaaacaagaacgaactt

SEQ ID NO: 35941 - DNA, 407 bp, Gossypium hirsutum
  Clone ID: LIB3149-061-Q1-K1-E11
tacacagcatgctcttgacccgttgaccacagtgaaggctcgactgaacaactacggcagagcaagtggtcttatccagcatgagtggcgcccaaaatccctcttcactatctctggagacgtggacaccagagcaattgaaaagagtgctaaagtcgggctggccttggcactcaagccgtagggaaaggtaatatcattgtttgaatgaagggagggctttacttttgattggtgaaaccggaagtctggaagactggggagagtaataatgtgctttgacggatttttcatgatcttggattaaaaaaataattgtgattggcgaactgaaattggcaatttgttatgttaaattcgctagggcgtacgttgttttttttttttttagaaaaacaaggcttcat

SEQ ID NO: 35942 - DNA, 408 bp, Gossypium hirsutum
  Clone ID: LIB3149-061-Q1-K1-E9
aatccctccctctaggtcaaaagccgcatcaaaatagatagccaccttcgccctctacatgttctgtatgggtctcgtttttgcttccaagataagtactttgtcctctataccatccaactctgaaatgtaactggtaacttgttttgagatatcttgactggtgcttgatttgccttcatagattaacttgtttctatttgtccatattaaccagagtccgcaacaaaagattctacattgctcattcgtcccttgattgaaaaccaaagtaagccaagtccaaaaatctggattgctattattaagaacccatgagaagtttaaatgtctccacacttccttcgttgtagggtacaatcagaagacatggttactgtctccttcaccttgatggcatctaataca

SEQ ID NO: 35943 - DNA, 191 bp, Gossypium hirsutum
  Clone ID: LIB3149-061-Q1-K1-F10
cgtgattcctatgagttgggtgttttacatatggacaatcaagtttttgcataaatggatctggagggttccaggaaaatgtctttaagatgtaaggtttgggattttaaatctagatttggatttccagattctttgtattactcaaattgaggatattttgaattaatggagttttcatatttagatct

SEQ ID NO: 35944 - DNA, 310 bp, Gossypium hirsutum
  Clone ID: LIB3149-061-Q1-K1-F11
cactagtctgtcacttgttgatacttgctcttgcattactcttcttgtggtcaaatgctgctaccttcatccacaagtctccacctcgcatccctgaagttcaaatccccaaggacccagttttagagtttgcccaagcgcttaggtttgagattaaccggggtttcgccgtcctgcgggatattgcatcaagaagagatcttaagaagttcctctctgtgatcgctggcttgtgggtcttgtctattgtgggaagttggtgcaacttcttgacactgttctacatagtattcgtactactacacaccct

SEQ ID NO: 35945 - DNA, 404 bp, Gossypium hirsutum
  Clone ID: LIB3149-061-Q1-K1-F9
gcaagacgaacagacctttcaactgatattttgatccacctaaagcaaacaaatgtgggagtgatttattacaagatattagcctctaaagaatgcaatgagacacgatgatgcttatccatcatttccgcatttgaatgatgaataccaacatgcactaccatctgatctcttgcatgtttctcttgaaaaattgtggtcaattttcagtgattataactgattctagtgttctttttgggcgggaattttctgcaatctatgatggaaatgaatcatcagacctgatctacctgtgatgattatataaataatcaccatctttcgactgagaatgcacatattctctaaaaaaggttcctttatgctaacattgatttagtacgtcaagcattcatgtattt

SEQ ID NO: 35946 - DNA, 209 bp, Gossypium hirsutum
  Clone ID: LIB3149-061-Q1-K1-G9
aaaaaaaaaaaaaaaagaaaaaaaaaaaatataagaaaaaaaaaaaaaaaaaaaaaaaaaagggaaaaaaaaaagggggggggggtgcaaggagaaaaaaaaggaaaaaaagagggaaagcaaatgattattatcttttatatggtggcaacaaggtgttacttttgggggcgtcaatataaatttagagggggggggggacgcttggg

SEQ ID NO: 35947 - DNA, 419 bp, Gossypium hirsutum
  Clone ID: LIB3149-061-Q1-K1-H12
gaagtgtaaaaaccaatatcatgagggaagtcccttcgtgtctttcgagtttggcatttcaagttttgaagtcttcgggccttttgcagtcaccaaagaatggggttagctctcttattgatgcagcccttgccccacctgaagcctctggggtatacttttttggtggaaagggtaggactgtggattcatcagtgctatcacacaataccaaacttgcaaaagaactttgggacatatctgataatttgttcatggaagcaagccttgctttcaaagaaacagctagctccgagtcagataattggttgtaaaatgaaggaagtcaagaccatgagaaagaaatgtgaaggtgatttccaggaaaaagatttccccctcgtctacttcgactgatatttgaaccagaaaacatactt

SEQ ID NO: 35948 - DNA, 407 bp, Gossypium hirsutum
  Clone ID: LIB3149-061-Q1-K1-H9
ccttacaatagtgttctgtccactcattcctttcttgagcacacagatgtggccgtgctcttggacaatgaagcaatttacgacatatgccggagatccctcgatatcgagaggccaacttacaccaatttgaacaggctgatttctcaaaccatatcgtccttgacgacttctttaaggtttgatggagccattaatgtagacattacagagttccaaaccaatcttgtgccatatcctcggatccatttcatgctctcttcttatgcgcctgttatctcagctgagaaagcataccatgaacagatatcagttcctgagatcacaaacgctgtgtttgagccctcaagcatgatggctaagtgcgatccaaggcatggcaagtacatggcttgctgcctgatgta

SEQ ID NO: 35949 - DNA, 139 bp, Gossypium hirsutum
  Clone ID: LIB3149-062-Q1-K1-A1
ctttctttatttcttccttagatccattttttctactgttgtagtgttgggctatatgtgtaatgctttgtcacgtggaactgctgggttatatatataatattgatttgtgacactttgttgtggttcataaaacaaa

SEQ ID NO: 35950 - DNA, 228 bp, Gossypium hirsutum
  Clone ID: LIB3149-062-Q1-K1-A10
gaaaagacacacattaacaggtggtttttataccacgtttattcacataaaacaaccactactgtccaccagatttacacaccccagatatagacaatcgcaagattaaaaggttcgtaaaagaaacagatgatataaacatgaagtcatacaagtatgctttaattcttaacaaactcaatgcttaacattaacaatttatcaccatagatattgccttgatatatt

SEQ ID NO: 35951 - DNA, 419 bp, Gossypium hirsutum
  Clone ID: LIB3149-062-Q1-K1-A11
agacaactgacagttacactttgagaatgttttgcatcgggttcactaagagacgaccaaaccaggttaaaaggacttgttatgcacagtccagccagattagacagatacgccaaaaaatgagaggataatgactgctcaggcaacatcctgtgatttgaaggaattggttcaaaagttcattcctgagatgattggaaaagaaattgaaaaggcaacatctagcatctatcctttgcagaatgttttcattcgcaaagtcaaaatcttgaaggctcccaagtttgatcttggaaagttgatggaggttcacggtgattactctgaagatgttggtgtgaaattagagaggccagctgatgagacaatggctgagtctactccagaagttgttggagcttgaacttattaatgctttt

SEQ ID NO: 35952 - DNA, 421 bp, Gossypium hirsutum
  Clone ID: LIB3149-062-Q1-K1-A12
cccacgcgtccgaaattctttgctcttctttactcagttcactgaaaccgtaaggagaagatcggagagaaaatatggcggccggcgatcgcaccgttttgcagtttaactcaccgtcatcggcggcctgtcagcgaaagttcaccctctcgtcatatttaacatctgcgattgctacgtcaggcgtcccgaccaagccgagcgcgtcatcggcacgcttctcggctccgtcctccctgacggaaccgttgatatccgtaactcctatgcagttcctcacacggagtccgctgaacaggttgctttggatattgaataccatcataatatgttagtctcccaccaaaaagtgaatcctaaagaagtcattgttggatggtattctaccgggctaggagtcacaggcggcagtgcattgatc

SEQ ID NO: 35953 - DNA, 274 bp, Gossypium hirsutum
  unsure (1)..(274): unsure at all n locations; Clone ID: LIB3149-062-Q1-K1-A2
tatttagaagagaagtttagtcagaattcaaattaagaggtattggaagaaattcaaactcgaaaagagtanncctaccgtaggcattgaatagagaactttggtgagtcaaatttgtagtagtaatagtatgaagttggcatatagttaatcacttcagagattaaagagagactttgaagtaatntgggattggcgtcgagtcttctccttgatgaaatttgacgccattcctgtaccaaaggttttgagtgctattgtgccaaaaaacaaa

SEQ ID NO: 35954 - DNA, 187 bp, Gossypium hirsutum
  Clone ID: LIB3149-062-Q1-K1-A4
agacaagttgtatggtcaataaaaaacaaggggttcatcgttttcacatttttattattcagtggttctcgtatttcttgctgctttagtatacaatgtttcctagattttatgagtttttcttttccgacctttttgcaaatgcaggggtgatgggttttgatcttaattaaatattaggatcttt

SEQ ID NO: 35955 - DNA, 427 bp, Gossypium hirsutum
  Clone ID: LIB3149-062-Q1-K1-A6
cttcgggttaaggaccccaaagattttgtcaatttttattttcttgaggttttatttaccagagatgtatcccacattgcttaggattctgtttttggacaatgatattgttgtgcaaaaggatttgacagggtgtggaagattgatatggatgggaaagtgaatggggcggtggagacttgctttgggtctttccataggtacgcgcagtatatgaatttctcgcatcctttgatcaaacagaagtttaatcccaaggcgtgtgcttgggcttatgggatgaatttcttcgatttggacgcttggaggagggaaaaatgtactgaggaatatcattactggcagaatctgaatgaaaaccggaccttgtggaaattaggaacattgcctcccggtttaatcacattttattccacgacgaaaccac

SEQ ID NO: 35956 - DNA, 388 bp, Gossypium hirsutum
  unsure (1)..(388): unsure at all n locations; Clone ID: LIB3149-062-Q1-K1-A7
tttgtggctgagcccattgatgtccggtccatgtcttttgtaaggacacatgaatatttggcaccgaaaattgtgtccggtgagggccatggtancctgtggattggtggacattggggatctttatgtatgaactgttttatggggtaacaccgttcaagggcgtggaccatgagctaaccttagccaacattgtggctcgagcccttgagttccctaaagaacccatgattccagcagcggctaaagatcttatttcccagctgttggggaaggatcctccaaggcgtttagggtccacaatgggtgcatcagccattaagcaccacccattcttccaaggggtcaattgggcattgctaagatgcacgaccccaccatatgtacc

SEQ ID NO: 35957 - DNA, 432 bp, Gossypium hirsutum
  unsure (1)..(432): unsure at all n locations; Clone ID: LIB3149-062-Q1-K1-A9
cttttagttgcctcgatttcaagtgtatcataatgggtaaggaaaagactcacattaacattgtggtcatcggccacgtcgattctgggaaatcaaccaccactggccacctgatttacaagcttggnggtttgacaagcgtgtgattgaaaggttcgagaaagaagctgctgagatgaacaagaggtcattcaagtatgcttgggtgcttgacaagctcaaggctgagcgtgagcgtggtatcaccattgatattgccttgtggaaatttgagaccaccaaatactactgcactgtgattgatgcacctggacaccgtgactttatcaagaatatgattactggtacgtcacaggctgactgtgctgttttgattattgattccaccactggtgggtttgaggcttgtatctcaaaggatggtcagactcg

SEQ ID NO: 35958 - DNA, 421 bp, Gossypium hirsutum
  Clone ID: LIB3149-062-Q1-K1-B10
cttaagcactgtctgcctctatcaatagtgacgaacagattcgggcttcaagggacaacaagctcgaccacgagattccttctacgctccgatttcaacgaagaatacggaatctcttagcacattgcaaggtacaaacggagccaactagaggtggtgacacacatgggatgaggcgtgaagatgcatgtggggctgacccggagacaacagtagtgctggaggctactggaagttgctgcagcgcaggtgacctagggcttccaccgaaaattccataggtgttttgggcctggggtattttgggttatttgggttaattgggttaggtttaatttaggtttgggcttgtaatgggtttatttgtaaaatggaatataatttagactataatttgtataaagactgtatttggactttg

SEQ ID NO: 35959 - DNA, 403 bp, Gossypium hirsutum
  Clone ID: LIB3149-062-Q1-K1-B11
cgagctggtcagcaggctaatagcctttcttatttctatgaagtttgcaaaggattggaacttgctaggaacttccagtttcctgttcttcgggagccaccgcaatcttttcttgctaccatggagagtacattagagaagcgccacgtgtggtttctgttccaacagaacctgtgcttcaattaacatacagacctgaggaaggtccttctgaagatactaaatcattcaatgatgaacctgaaccatctgctcctgctgatgatgttgcagtttccagtgtcgagactgctcctcctccccctcttgtgcctcagaccaagttggacactgacgacttactgggattgaatgatgctgctcctaatgcctcggcaattgaggaaagtaacgctttaacact

SEQ ID NO: 35960 - DNA, 423 bp, Gossypium hirsutum
  unsure (1)..(423): unsure at all n locations; Clone ID: LIB3149-062-Q1-K1-B2
aaatatttccttctacatctcttgagcagtttgcctaactaggtagaaaagatgctggaaatcatggtgatccatatgactctgggaatgatgacattaatgaccacagtgatgatgaaaatgatggtcnnnnaatgaaaatgaagatagagaggatgatgaagatgacaaagaagaaccaagtgcataactgcgaagactgaataacttatgcaggataaggaatctgtgcgtaccccagaatctttaatagttttcgtcgacctctgctctagactagtttccagttatatgttttgcgatggtcgtatcttttaaccattctttttggtcgtaagctttgatggaaacacatgcccttaccctacagcttgtggtaaagatgttctgttggcttaacaagttcttacaattgtcttaaga

SEQ ID NO: 35961 - DNA, 369 bp, Gossypium hirsutum
  Clone ID: LIB3149-062-Q1-K1-B3
cccgattcaacgacgagcatccggtgctacctctattaacatccccagcaacctcctcagggggaggatgcgtgagggtgaaattcggcagatccacctgttgacgaatcgagggatttgtttgcctcaccgagatggccgccatcgcaacattttcgccgtggcttaaaaaaaaccaagatatgagaacaaaaatgtgagaggagagagggagatgataaaattaagtaacaaccttggaatagtgtgggtagtgttggatctgtaaatagaaaatttaaaatgagattgatgggtgttaaattggtgggtctttgatgattttgggatggggatttcctttgcgtaaaagaactagaggggagcaaa

SEQ ID NO: 35962 - DNA, 330 bp, Gossypium hirsutum
  unsure (1)..(330): unsure at all n locations; Clone ID: LIB3149-062-Q1-K1-B5
gcccgtaggatgcttcacaatgggtgtctcaatattatttttctgaacaaggagcacaccctctactgttcggaggagggatccaatctttgccgtgtgagctattgtgtctcttgttgaaatttaactgtttaaaagtgtttggatgatgaaaagagttttgttaacactgttggaagaactatgtaacanacttatttcaaaagcaccctagcattctttggctgattgttctttattgatgatttttcagttagcattttgcattatgatctaacattacctgcggtgtgcctacaatttatggtgaatggattactccaattgcgt

SEQ ID NO: 35963 - DNA, 346 bp, Gossypium hirsutum
  Clone ID: LIB3149-062-Q1-K1-B9
aacgtcaccattctaaagagattattgtaaattcgagtacaaagcgctaaccaagatgagagccaagtggaagaagaagcgtatgaggaggctgaaaaggaagcgccgaaagatgagacagagatccaagagatgcgccttggactgaaatagttttgccctgacaatcccttgtcttcataattatcctgcatatgttgcttgaagttgtgaagattgaagggtattttcaggaaaccttatctgttgtcttctaaatctaggttaaagttttaagactatttgagctgtttgtctagtactattagatattatgttgggggtttgtgggttgatctgtgtaagc

SEQ ID NO: 35964 - DNA, 343 bp, Gossypium hirsutum
  Clone ID: LIB3149-062-Q1-K1-C12
cccactcttagattcgtgggaattgtgttgttgactcctaggaatctcacaaaaagttacccgatttactagatgagtattgatctcagatccggatgtgaggccttttggattgttttttgttttgtttttgttgtgttaggtttggaataaattctggcttcatattgaaaaacaccatatataaaaaattatgatactgcagtgaatacttggtttgaactttcagattattttgaagtgacttgaaaagggcgcataacatatttggcatatatatatgtatctatttgttgagatcttaaatgaagaaaaaatttaagaatgtcattgatgagctcaa

SEQ ID NO: 35965 - DNA, 341 bp, Gossypium hirsutum
  unsure (1)..(341): unsure at all n locations; Clone ID: LIB3149-062-Q1-K1-C2
gcgtccggagaaggaagagcccgtcaagaaagagcctgagactcagttggcagctagcaagtcgaagaagtcccaagtatctgtgtagacggtcagcaaaagataaagattgaaattttagtcgatgaaggaagnnngatcgggaattaatttctgtcttactctttgagtaagtagttttgatgtttattcaaagtagaaagagttgttatgccttttgaaaccttgtttagtcaaatgttattgatctgagattcatgttggagatttttgttttaatccatgattttatatgaagttattttgttgagggaaaaaaaatttaattaaatttaatataa

SEQ ID NO: 35966 - DNA, 433 bp, Gossypium hirsutum
  unsure (1)..(433): unsure at all n locations; Clone ID: LIB3149-062-Q1-K1-C3
tccgtttggggatcgtgagaaagctctcttggcttttgtcccttccgtaagtcgttttaaatcttataagaagagtgtgtcgacactgaagagaattggggatgttcttacagttgttgtagtaacaggttgntncatgaaatttatgtcaaggcagtaatgcgagaagaagctaggaacaaggcaaaggctggtggtggaagtaaatgaggctgtgcaagctttggcctgtgtgtggaaacgaaaaagtggatgtcagcatttcatcttgtttttggcaatgctgttttagattttaaagattttgcctagtgataaataagcaaaactgacatatgttatgacattgttgaaaaccctaggctgcaaatttccatcatgttctcatcatatgaattctgtcataaaaaanaatgatgattccaataattat

SEQ ID NO: 35967 - DNA, 444 bp, Gossypium hirsutum
  unsure (1)..(444): unsure at all n locations; Clone ID: LIB3149-062-Q1-K1-C4
cggaanncccggggcggccccacccgtccgaacaatgcctacaagcttttatatctgctatcttttctaactcaaacccttccttattaatcctactccccatatccagttttgccctacagactttaatcactatagatttaagttaactttgtcgatatggctgctgctacgaagcttcaactgtccttggaggaaagcagaattcgaggttcagatttaggcatgtgtcctgatcgggtgaagcctctggcttgggcacctatgaaaggaaaataccgacgaaattgttgtggttgatgtggacacagcagccgcactcatcatggacatgttttctcttcaataggttgtttttgttttatgccaatcaaacatctttctcttctaggccctttggtgttcttttcaacttttaagacttagggatggttatatgtgatt

SEQ ID NO: 35968 - DNA, 404 bp, Gossypium hirsutum
  Clone ID: LIB3149-062-Q1-K1-C5
aagatcaaatcaagttccttgccaaattttttttcgctgatgtatccaaccagatccagcggatggtgagattcatccgccaggaaccggaggaaaaggctaacgagatctctgtttccgctgaaaggagttcaacatcgagaagcttcaattggtggaagcggagaagaagaagattaggcaggagtacgagaagaaggagaagcaagttgaaatccgaaagataattgagtattcgatgcagcttaatgcatctaggatcaaggtccttcaggctcaagatgatgtggttaatgcaatgaaagaatcagcatccaaggaccttcttaatgtgagccatgatcaccatgtttacaaaaggcttttgaaagatctaattgttcagagtttagttagactgaaag

SEQ ID NO: 35969 - DNA, 377 bp, Gossypium hirsutum
  Clone ID: LIB3149-062-Q1-K1-C6
gtcttattaccaaaggttttttaaccacttttgttttcgtcctaagctccctcccatggagtgggagctcctgttgcaccttaatgatcatcataatcaccatcaaattcttccggttccaagaaaccctttcttctccttctagatccttctccgtgcggaaacaagcgagcttcacagtggtcagatctgatggaagtgtaaacttcgatcttaattccaaaggttgaagagctcaacaattgattgctaatgcagttgcagtaatgattttctttttcttttttttttatttatcgtttgaattttaattagttttttttatgctaaatttgattgtatttttgtttatttcttttagactaaagctgatagct

SEQ ID NO: 35970 - DNA, 329 bp, Gossypium hirsutum
  unsure (1)..(329): unsure at all n locations; Clone ID: LIB3149-062-Q1-K1-C7
ggattgcatacgtgctgatgctggtggcactggtgctcacatacctcattcacgccgctgatctctgcttcaccttttgagcctgcaaatttcaaagattgaaatggggttgtgacattatatttgnnnttatagggagagaaggatggatgatgtgtaaccaattcatggctcgtcgtctgatacatacatacgagagtacaaaagggttataattagagaatgagctggacttcagacgaatcattgttgtggattttgagaatgaaaatgtttatgttttgtggtcntnaaaaaaaattaaatataaataaatttaaaatatttaa

SEQ ID NO: 35971 - DNA, 316 bp, Gossypium hirsutum
  Clone ID: LIB3149-062-Q1-K1-C8
agctcagaggtatctttgtgtataggcgttgcttcatcattcctttttcatttcattcttcattgtcgccattaaaggtggccaagttgagagtgaccctgtccatggtccatttcgttgcagggtcctcgactccctttgtattatagtatatataggttttctaaattttcacaatcttttttctttttccttctgttagcaattttacaatatatataaaatataaaatatatatttatattaaaaaaaaaaaaaaaaaaaaaaaaaaaaaaaaaaaaaaaaaaaaaagaaaaaaaaataaagaataaaattt

SEQ ID NO: 35972 - DNA, 344 bp, Gossypium hirsutum
  unsure (1)..(344): unsure at all n locations; Clone ID: LIB3149-062-Q1-K1-C9
gcaacagtagatatcccttttgatacatttttatgaggatcacgtaatcaggattgagagaggaatgttaaggaacttcgggccatggtagctgatctgaataggtgggtacaggaattttgatnnnnaatgaggcagtggcaagagctggagttgtgctggaagagaaaaattggccaccttttttttttatcattcatcatgatattgccaatgaaattccaattcatctacatagattgcagtgtgttgcgttttcaacatatttaggattggttctatgccttctatggaatatcatagctggtactacagcatggattataagataaggtgttaggatc

SEQ ID NO: 35973 - DNA, 402 bp, Gossypium hirsutum
  Clone ID: LIB3149-062-Q1-K1-D10
gttttcttctgatattttggccaccatggacaagtacagcaacgatgtggcgggttgtgtcatcgagaaggccaaaaggatgtgcagagagcaaggtgatcctgaggttaaagtagaggtgatatagagagcggtgatccaagggacgtgatttgccaggttgccgacaagatcaatgctgatgtgcttgttatgggaagccatggctatggcctgattaagagggcattcttggggagtgtaagcaatcactgtgcacaaaacgtgaagtgccctgttttgattgttaagaagcccagatgttcgtcttctgcaagtggaaccaaatgattggaatttcggtttacatagtcatactttgctttatttacgtacaaatttcactttagtgggtatgtttct

SEQ ID NO: 35974 - DNA, 229 bp, Gossypium hirsutum
  Clone ID: LIB3149-062-Q1-K1-D11
aaaaaaaaaaaaaaaaaaaaaaaaaaattatttaaaaaaaaagacaaccgctctcgatgaggggggcttaagttcacgtgcgtgcgcctacaataactcttctttttttttaccgtaaacctaattcaattcacgtgcgctttacaacgacaacgattgggaaaaccataaccttacccatccttatcttaatcggagttcatccccttttcgccttctgccgttatag

SEQ ID NO: 35975 - DNA, 411 bp, Gossypium hirsutum
  Clone ID: LIB3149-062-Q1-K1-D12
gatttcatgggtggtgctgagatcatcaagtcagaccccgttgtgtccttccgtgagactgtccttgagaggtcttgcaggactgtgatgagcaagtctcctaacaagcacaaccgtctgtacaggaagctcgacccttggaggaaggtcttgctgaggccattgacgaaggtcgtattggtccaagagatgatcccaaggttcgttccaagattttggccgaggagtatggttgggacaaagatcttgctaagaagatttggtgttttggccctgagacaactggtcctaacatggtggttgatatgtgtaaaggagttcaataccttaatgaaatcaaggactctgtagttgcggggttccagtgggcatcaaaggaaggtgcgatggctgaggagaacatgaggggta

SEQ ID NO: 35976 - DNA, 425 bp, Gossypium hirsutum
  unsure (1)..(425): unsure at all n locations; Clone ID: LIB3149-062-Q1-K1-D4
gaatgggtggtagcttcgaacaatggcttccaagtgttttcttgaaggaaagatttaagaccttcaatgcttgttttgaggacatatataggattcaaacaggttggaaggtcccagatcctcaacttcgtgagagcttcgaatttccatatcagagaaagtaattccagcttatcgctccttcatggngaggttcgggagtcagctagagagtggaaggcattctggaaaatacattaagtatacaccagaggatttagaaaactatctattggatttgtttgaaggctcacctcttgttcttcaccatatgagaagaaagagtacataggatacaaagtttctcaatgcaggtatggcccttccgctcatcgaggactaatcagagcaagagttntacctatatatgtattttttttaatcag

SEQ ID NO: 35977 - DNA, 247 bp, Gossypium hirsutum
  Clone ID: LIB3149-062-Q1-K1-D5
gatttggcctgagcctggagggcacatgcatttgactgctcctgattacgccgagccttccgtgaagattggagtgtcggaggtggatctggttgcgttgtcgatcttacatgtggctgctgacaagagatcgaacgcatggcgtcgcaagttggggaaaacttgatgaactgtatgcactagctctgtggagtcgatggggctaacgtggttgtccctctggacattccgtatagtatggttaaga

SEQ ID NO: 35978 - DNA, 421 bp, Gossypium hirsutum
  Clone ID: LIB3149-062-Q1-K1-D6
caaactcgtgccaaatacaattagagtgacaaatgaccatgatatcgtccctcatctgccaccatactattattatttccctcaaaagacataccatcactttcctagagaggtgtggctgtattccctggactgggaagtctggtttatagagttgagaaggtctgtgatggttccggtgaagatccaacctgtagtaggtcggtgacaggtaacagcatcatggaccatttgaactattatggtgtcgatttaatgtgccaagaatggagatcatgcagaatcgtgatggatcctcgtgttgcgaagtatggcaaaacggatcacaaaggaaatttcattttgtccagagcaccagccacgcgtgttcggtcgaatgaaggggaagttaaagctagtgcataattgatcaatttatggt

SEQ ID NO: 35979 - DNA, 422 bp, Gossypium hirsutum
  unsure (1)..(422): unsure at all n locations; Clone ID: LIB3149-062-Q1-K1-D9
gaagattgaagacaacaacactttggtttttattgttgacattcgtgctgataagaagaagattaaagatgctgtcaagaagatgtatgatattcaggccaagaaagttaacaccttgatcaggcctgtggaacaaagaaagcatacgttaggttgacacccgaatacgatgccttggacgttgcaaacaaaattggtattatctaagctagttagtagctaccttgttgagcatttattttccttttctttgcaaagagaaattatttcgagacattgagcaggcatttttatttttattagcacttaaaagtttgtaatattgcattgttgttgccaattagccatctctggttcaacttaagacagaaggtgatttttgatttacatgctntggggcattttgttaaaaatggttcact

SEQ ID NO: 35980 - DNA, 300 bp, Gossypium hirsutum
  unsure (1)..(300): unsure at all n locations; Clone ID: LIB3149-062-Q1-K1-E1
ggaaaattgctggaggcatgagatgggacatctatgatgaatgatcacgaggatcggcccctcgggccagagaagattctaggtgcagataaacagcactggggtggtaggctcaaaggaaacagnncatncaggctgaataagccaccatcaacaggtcgaggggatcaaggtaaaacttaattgctgaggtgaaaatctcggactgatgatgaagttggttcagactgaaggactagagagatgcgatcatcaaccctgacaaagataccgaagctgctacattgggttattcactat

SEQ ID NO: 35981 - DNA, 71 bp, Gossypium hirsutum
  Clone ID: LIB3149-062-Q1-K1-E10
gacgggatatcttttatatagagcgagctacattcaactgaccggccgtcgacaaacaacgtactgacaaa

SEQ ID NO: 35982 - DNA, 416 bp, Gossypium hirsutum
  Clone ID: LIB3149-062-Q1-K1-E11
gttaagaccgactggactcaagctcctttcactgcctcttacaggaacttcaatgccgatgcttgtgtgtggtccaatggggcttcttcgtgtaaatcgaatgcttcaccatcttctgcatcgaaaacagtgcatggttctctcaagaaatggattcagctaagcaacaaaggttgaaatgggtgcaaaagaactacatgatatacaactactgcaatgatgctaagagatttcctcaaggtctacctccagagtgcaatatgtcttaaaaaacttgacaagcctattagatcaaattgttttagagattaatattcaattatattcttttattatttgttctttattcaaaaccaggtcatgattcttttatcttttgaaatttcccatcactctgtatgtgataagttattatg

SEQ ID NO: 35983 - DNA, 410 bp, Gossypium hirsutum
  Clone ID: LIB3149-062-Q1-K1-E12
tgcagtaaatggaaaagctaagccagatggaaaaacagccaaggctaatgctgggaaacctgatgctgttaaacaatctggcaagatagcagaacctagcagtaacaagaaatctgaggatgaaatgatgatgatgagtccgaggatgagagtggttctgatgaggaagatgattctgatgacgatgacgagtctgatgagatgtctatggatgaaagttcagatgacgaggatgaggagacacctaagaaggtcgagtcaagcaagaagagacctgctgaagctgcaacccctgcttctgcaaaaaaggctaaatctgcagttacacctcagaagacagatggtaagaagggtggacacacagcaacaccgcatccagcaaagcaatctgggaaaaattctgcaaagtc

SEQ ID NO: 35984 - DNA, 231 bp, Gossypium hirsutum
  unsure (1)..(231): unsure at all n locations; Clone ID: LIB3149-062-Q1-K1-E2
gccgaaggaactgtaacatgcattttcaagtctgaaacttggataaagggaaacattccaaacattacttagtagaatatatgtaaaccgtagtcgactgtgaaattaatctgtctgcaattnttgctctttaatgcatcgcagtggttttaagaaaaaaataataatatttaaaaattatttaatttttattttatttaaatttttataatataatttaatttaattaat

SEQ ID NO: 35985 - DNA, 336 bp, Gossypium hirsutum
  Clone ID: LIB3149-062-Q1-K1-E5
gaccacgcgtccgctcctatactaactacttccactgaaaagcacgttagctagctagggatttttgagccagagagatggggtcgaaatgaacagcatacctagccctcctctttgcactcaacatcctcttatcttcccgctgagtgctggaggctcctgcccttaccccaaccccaaacctaaacctaaacctcaaccaaagccaaaccctactccctgcccatctacttctggcaagtgccctagagatgctcttaaactccgtgatgtgctgatttgctgcgcggctcgctcaacgacaccataggtacccgtactgatcaaccctgctgc

SEQ ID NO: 35986 - DNA, 416 bp, Gossypium hirsutum
  Clone ID: LIB3149-062-Q1-K1-E6
ggcaaagatattaatcttaacgagtgcccaagattgaagcttcgacaacaatgcatcaagtatgtcggaccccaagagagggtaaagtatgagtacattgttgttgaaggaaagatgatccataaacaaccagaaacgtactcgatacaatcgaaggattgaaagaagggaaatggatattcgttatgagcacctcgaagaaattgtacgccggcaagaagaagaaaggaatgtttcatcattcgagtttcttagccggaggagcgacgttagccgctggtaggctggtggttgaacacggagatcttaagtccatttctgcgtatagcggacattatcggccgacagatgatagtcttgacagttttctatcgtttcttaaagagaacggagtgaacctcaatgaagttgagata

SEQ ID NO: 35987 - DNA, 322 bp, Gossypium hirsutum
  Clone ID: LIB3149-062-Q1-K1-E9
tttattcttagatgtttgataaaattctttcgttctcttttatttatttaacatctaagggtgagtcctttgaaccattagagaaaaaatgtaataaaatcatgtagcttttaattgattgcccatacttatgggttttttttttattttttttaaactagtactagattatctctcttaagttagcattattactacaaaaaaaaaaaaaaaaaaaaaaaaaaaaaaaaaagacaaacaattaaaaaaaaaaaaaaataacataaatgtgctatgcaattataatatattcataaataaaaaaatgggggttttgtttaaa

SEQ ID NO: 35988 - DNA, 124 bp, Gossypium hirsutum
  Clone ID: LIB3149-062-Q1-K1-F10
gttccattatatgtatactgcttcatctagttctaaaattttataattgtttttgccattgtatcaatcgagttaatcccttgtggatgaatattggaagacattcaacagctttgatttattc

SEQ ID NO: 35989 - DNA, 413 bp, Gossypium hirsutum
  Clone ID: LIB3149-062-Q1-K1-F12
agatcatgttggcttacaatctctccccatctttcaattgggatgcatcgggaatgaccgatgaacagatgagagacttcattccaagaatagccaagcttggtttctgttggcagttcataacgtagctggtttccatgctgatgcattggtgaccgacacatttgcgagagatttcgccaggagggggatgctagcgtatgtggagaagatccaaagagaagaaaggaacaatggagtggacacattggctcaccaaaaatggtcaggtgccaacttttatgatagatatctcaagacagttcaaggaggtatatcatccacagcagccatgggcaaaggggtgactgaggagcaattcaaggaaacatggactagaccaggtgcagggaacattggaagtgaaggcaatc

SEQ ID NO: 35990 - DNA, 414 bp, Gossypium hirsutum
  unsure (1)..(414): unsure at all n locations; Clone ID: LIB3149-062-Q1-K1-F2
gcaagaaccttctcaaaggttcatggctgggagactgatgatgttgcagagatagccctgaagatttcacagtggccaaaagcttctggaacatacaagaggactactgttattactcagggtgcanatccgtaattgttgccgaggatgggaaagtgaagcaattccctgttattttgttacccaaggaaaagcttgttgatacaaatggtgcaggtgatgcctttgttggaggctttctttcacaattggttcaagggaagtccattgaggattgcgtaagggctggttgctatgcatccaacgttatcatccaaaggtctggatgcacatacccagaaaagcctgaatttaaataaagctattccactttcctgatctcctctccactgttgntttcaagtttctgattgt

SEQ ID NO: 35991 - DNA, 430 bp, Gossypium hirsutum
  unsure (1)..(430): unsure at all n locations; Clone ID: LIB3149-062-Q1-K1-F3
tgcaaatgcctttttaaaaaaaaaaaaaattctgatgtttgtaatccggatttatggttggataggaacctttttttaattgaaatgtcttcttacttttggcttaaatggaaccttttaattaattttgtgccatgtttcccctggtcaactttacctggattgatgcattaaggataatagacactaaaatattcgatgttggctttatgtgcaattggtaaagatagttggttatgtgcccctgccctcaacttattgctttgaatttgatttagatgaacttaaactcttcttcgcttacttgattttggttttctttgataataactttggatagactagattcttttgaattacctatttcttgcaatattgntatttcatttagaactgatttagtcagtttttgaggcatctttcctatgga

SEQ ID NO: 35992 - DNA, 412 bp, Gossypium hirsutum
  unsure (1)..(412): unsure at all n locations; Clone ID: LIB3149-062-Q1-K1-F4
aaatccctatttaaaaaaattaaaaatttttttgtttgtactgcggatttatccttggataggaacttttttttattggaaagacttctactattcgctaaattgacctctttaattattttgngaattgtttcccttgttcaactttacctggattgatgcattaaggataatacacactaaaatattcgatgttggctttatgtgcaattggtaaagatagttggttatgtgcccctgccctcaacttattgctttgaattttatttagatgaacttaaactcttcttcgcttacttgattttggttttctttgataataactttggatagactagattcttttgaattacctatttcttgcaatattgttatttcatttagaactgatttagtcagtttttgaagcatc

SEQ ID NO: 35993 - DNA, 418 bp, Gossypium hirsutum
  Clone ID: LIB3149-062-Q1-K1-F5
gagaaagaaaaattcgaagagagagaaaaaaaatgtttggatacgatcgcgtaagccactcgagtgccaacaaggcggatgagatagatttagaatcaggggagactttgtacccgggactcagctacgcgagaaccaactccggtggggttttatccgcaaggtgtacggcatcttggcggcgcagctggttctaaccaccgtggtctccgccttcgtggttctttctgctccggtcaacgagctccttcgtggaaattctggcctcttgctcttcctctgtttaatccccttcgtcttgttatggcccttgcacgtctatcaccaaaagcaccctgtgaacttggttatcctcggcctcttcaccgtgtcattgagtctcacacttggtgtgagctgtgcaaatactgatggaaga

SEQ ID NO: 35994 - DNA, 437 bp, Gossypium hirsutum
  unsure (1)..(437): unsure at all n locations; Clone ID: LIB3149-062-Q1-K1-F6
aatnnccggggcggaccaaggcgtccggaattttttttcgagggagaaagaactgcattttttggtgcttcaactgcaacagagtattgggaacctacttgaggaattgctgagacagaaaatgaggaacgctcagttagagaaacaattaaatgattggccaacaacaaagagtgaatgtgaaacagtggtgaagatgtttgatacttaaattgccagataatttcttgatcgatgttagggatcatatttttttttctttaggaaaatagaagtgtatttgttagcgtttttatttcccttggtgtacaccatatccatggcagtatcttaagctggaactcgagcaaattttgagatgccattgcttggatctcagtagactttgttgcattgattgacaccatattgtaatataattacactctctctctaag

SEQ ID NO: 35995 - DNA, 340 bp, Gossypium hirsutum
  Clone ID: LIB3149-062-Q1-K1-F9
atcgttcttatgtacactttcgccaacaacactaagaatctccagaaatttatgggaaatcgatcctacgtagtgtatcctccggagggaccaagacctccatcacctgaggagttgagagagatggccgggagctcgctcggaagaaaaataatcattgaggctctttagggctgtaagtgatctatgtagcttttccggtcgtacctattagttgacctattactactctacgaaaactgcattatgtaaaattgctgtaataagtatcgagtttctgttaaaggaaacactatgtctggcttgtaccccattactgattaaaaaaaattttatagct

SEQ ID NO: 35996 - DNA, 407 bp, Gossypium hirsutum
  unsure (1)..(407): unsure at all n locations; Clone ID: LIB3149-062-Q1-K1-G1
gaagactacgaggagaagctcaaggaggttgaggctgtatgcaacccaatcatcacagcagggtcccaaagatctggtggagccccaggtgggggatcaactgaagaaaatgatgattctcatgatgaacttaaaaaactggtaatgccattttgattgctgaaacaagcaaagaaaagcaaagggtgagaaggatgagagcatangtaggtgagatgaggatatactgtaattgttctccatggtagaagttaaaaaagggagaagtatatccccctttgttcggatgttatttttgggtgaatgaatacgttntaacggatatttnttttgttttcatgactttgtcccctgcaacttgaaatctcttttatctatgattgaatctggtactcttgatccaaaaa

SEQ ID NO: 35997 - DNA, 419 bp, Gossypium hirsutum
  Clone ID: LIB3149-062-Q1-K1-G11
aaaaggaacagcagaaaatgaaaagataattaaaagccaaaacatcgaaacccagaaataaagattttgaatttgcaatggcggtactcaactataagctcgttgtgatctgcgcgacgctcatggagcagctgcggcggcggtaatgactgttgatgcgagtggggaccaccacctgcaacacccgatcctggggaggataccgaccagatcgccatgcaagggctccatagccgaatgcttagccggggaagagttcgagctggattctgagagcatccggcgcattttagccaccaccaggtacatcagctacggcgcgcttcagaggaacaccgttccttgttcccggcgtggcgcttcctattataattgcaagcctggtgctcaggctaactcttacaaccgtgggtgcagcc

SEQ ID NO: 35998 - DNA, 370 bp, Gossypium hirsutum
  Clone ID: LIB3149-062-Q1-K1-G12
gtcaaataaaacgcgtaatcgttgaatattctcatttctcaggtactcataataattcttggttatttttcccatattctggctgtctagaaccttttatcatttgaaactcagtctaaatctctatttaatcatatccctttgacctaaaaaaaaaaaaaaaaaaaaaaaaaacaaaaaaacccaaaccaaaaaaaaaaacaaaaaaaaaaaacaaaacaaaaaaaaaaataaaaaaaaccataaaaaaaaaaaataaaaaacctaaaataaaaaaagaaacaaacaaaagggggggccccttttaaaagatccaatttttccgccccgtgtaggaaaaaatattttttttttttggggcgccctaaaa

SEQ ID NO: 35999 - DNA, 420 bp, Gossypium hirsutum
  unsure (1)..(420): unsure at all n locations; Clone ID: LIB3149-062-Q1-K1-G2
gtcaagtggcgtgctctcaggctcgacactgtaaactactcgtggggaagtgaggctatgactcgtaagacccgaattttggatgtggtgtacaatgcatccaacaatgagttggttcgtactcaaactcggttaagagtgctattgttcaagttgatgctgcaccattcaagcagtggtatctccagcactatggtgtcgacattggtcgcaagaagaaaacagcagccaagaaagaaggagaggaaggtgaaactggcactgaggaggtgaagaagagcaaccatgtcttgaggaagctggagaaacgacaacagaatcgcaagctcgatccacatatcgaggatcaatttgcaagtggtcgnttgttggcttgtatctcttcaaagcctggtcagtgtggccgcgctgatgggtata

SEQ ID NO: 36000 - DNA, 417 bp, Gossypium hirsutum
  unsure (1)..(417): unsure at all n locations; Clone ID: LIB3149-062-Q1-K1-G3
atccttaaagtgccggcttcggatgtcatggaagcgctcaagagtagcaacattaaaaaccgccaaatttgtatcaaatgggggaagctcggcagatggttctatggattccgtatgcgggatgaattccttttcgatgtctctctctagaagatcttgcatcgtcaaaagacgatttagacgggctgngggtgcttcaacgaggagccattcatgaggttttacaagttcagatatccattgttagttccagaagcaatccctgggcctaatcaaagctcgcaagcaccagtttaaacaatggggagaataagggtaaagaatcatagaggtctttgtattaagagtcagattatagtttgtccctttcagattatagttngtcccttttactcaaaaaatggataaattaatcac

SEQ ID NO: 36001 - DNA, 406 bp, Gossypium hirsutum
  unsure (1)..(406): unsure at all n locations; Clone ID: LIB3149-062-Q1-K1-G4
cttaaagtgccggctttgtatgtcattttattgttcaagagtagcaacattaaaaaccgtcgatttatctcaaatggtggaggctctncanatcgttctatggattccgtatgcgggatgaatccattttcgatgtctctctctagaagatcttgcatcgtcaaaagacgatttatacgggctgcgggtgcttcaacgaggagccattcatgaggatttacaagttcagatatccattgttagttccagaagcaatccctaggcctaatcaaagctcgcaagcaccagtttaaacaatggggagaatcaggtaaaagaatcatagaggtctttgttttaagagccacattatagtttgtccctttcagattatagttttgccctttcactcaaaaaatggataaat

SEQ ID NO: 36002 - DNA, 415 bp, Gossypium hirsutum
  Clone ID: LIB3149-062-Q1-K1-G5
cgatttggtacggggggattccgccattttgccgccggagtttatcgaggaaactaaagaccggtgtttcatggcaagctggtgcccgcaagaggaagtactgaaccatagcgcggtggccgggttctgacgcacagcgggtggaattcgactgtggaaagcatttcgagtggggtggcgatggtttcttggccgttcttcgcggagcaacaaacgaattgttggttcgcttgtaatgaatggggtatcggcatggaaatcgacaacgatgtgaaaagggagaaagtggagaagctggtgagggagttgatggaaggaaggaaaggggaggagatgagggaaaacgtcatggaatggaagagaaaagctgaaagagctgcgtgtttggatggaccgtccttgttgaatttggata

SEQ ID NO: 36003 - DNA, 418 bp, Gossypium hirsutum
  Clone ID: LIB3149-062-Q1-K1-G6
ccttgatcggttggtggatgtgctgcattttatccgagatatcgtttttgtgagcttggtcggcatcaggtatgcaaattgaaaatctttaataggagttggttgagtttgtgacattaccagccttttagtgtgtagtgtgtgttgtatggtacctggtatcaagttttcgatctcgagaccattgtttccccatgcaaacaaagatggttctcacttctcacatcacatggttttgcatttaaatgatggcgtgatagggtcgcataatatacttcatttcttatttatctttgagcgtgttaaattatgatgtgtgattgttgtattgtactctcctcttcttttccattgcattactgctcaaaatttttctaccttgctttgctacgcgagtgaaaatatactctctttttta

SEQ ID NO: 36004 - DNA, 422 bp, Gossypium hirsutum
  Clone ID: LIB3149-062-Q1-K1-G7
caagataggggtgactcagggcgtggtatgaaagggaagcttaacaatttgatgattcagcttcggaagaattgcaaccatccagatctcctagaagctgcctttgatggatcatatttttatccactgtagagcagattgtcgaacagtgtgggaaatttcaattgcttgaacggttgttgactcggttatttgagcgtaaacacaaggttctcatctttagccagtggacaaaggttctggatataatggattactattttagtgaaaagggatttaatgtttgtaggattgatggtagtgtgaaattagaagaaaggagaagacagatccaggagttcaatgatgtgaacagtgactataggatatttattctcagcacaagggcaggaggtctgggtatcaacctgactgcagctgat

SEQ ID NO: 36005 - DNA, 425 bp, Gossypium hirsutum
  Clone ID: LIB3149-062-Q1-K1-G8
tttctgaacctgatagtgttgtggcctcagatgtgtcaaaattggaggattctgcaagccatgctgagaatgtatcaggaaagccaaacttgatggagttcagatcattttcatcttctgatggagcgcagagggcccggtcttattttcttctgtggctgtctcatcagatgcatccctcaagaaaactcctgcttcaaatgctaaatctgaaaggattaataaggggaagttcgcaccatctggtgggaagttggcaaaaatcgaggaaaatgttttcaatgatgatacaacaaaaacaagttctgaaggtgttgaacctcgtagatctaatcgcaggattcagccaacatcaagacttttggaagggctacaaagctcgttggccatctcgaaaattccttcgggttcattcgacaaaagtc

SEQ ID NO: 36006 - DNA, 223 bp, Gossypium hirsutum
  Clone ID: LIB3149-062-Q1-K1-G9
ctcaacgatacatggacttgacactcatcattatgaaacgcgttcagtcaatgcagtaacctggaggagactatgcctgcagtcgtggttacaagttgtgagcttttcttgcaaaatctgctgtatttttaaaccaatactcgtattctgttaaaattcctacagaaggacatcctttgcaatgggttacaaattaattatctcaagattctatgcgggcttt

SEQ ID NO: 36007 - DNA, 398 bp, Gossypium hirsutum
  Clone ID: LIB3149-062-Q1-K1-H10
ctaccatggaagctaaagcaaagaaccagcaccgagatccgtaaaagggtttacgtctgccctgaaccatcatgcgtccaccataacccagctcgagccctaggtgatctcaccgggatcaagaacatttttgtcgtaaacatggtgagaagaaatggaaatgcgataaatgctccaagaaatacgctgttcaatctgattggaaagctcattcaaaaacctgtggcacaaaggaatataaatgtgactgtggcaccattttctccagaagagacagttttataacgcatagggctttttgtgatgccctaacagaagaaaacaacaaagcaagccgaggacttataaacgtgggatcaaatttacaaggccaagttgttgctgcagatcagctcatc

SEQ ID NO: 36008 - DNA, 424 bp, Gossypium hirsutum
  Clone ID: LIB3149-062-Q1-K1-H11
cacgcgtccgtcatccctggctgaatcccagtattacatataaaacccagactaaacaaaaacagagattgaaccatcatgtcacggcgatcgtcaggaacatggttgaggttatgcctcgtaatatttgctagttcagcactggcagtatgtggacctgctctttattggagattcaagaaaactctcagattcgtcgattccaaatcctcttgtcctccttgtatctgtgattgtcctcctcctctttccctcctcaagattgcccctgggttggccaatctctcagtcacagattgtggaagcaacgaccccgatctcaagaaagagatggagaagcaatttgtggaccttttaaccgaagagttgaagttgcaagaagctgtcgccgaagagcacactcaccatatgaacattacctttg

SEQ ID NO: 36009 - DNA, 446 bp, Gossypium hirsutum
  unsure (1)..(446): unsure at all n locations; Clone ID: LIB3149-062-Q1-K1-H3
cggggccgccccacccgtccgtcctcctcgtttttcctattctccaagtggctaggtggtcaatctgaaccggaggcaaatgtggcagaacctgttgaaaaaggggaccttggaatggttggtgaggaacctcaggatttcggttctgggattttgactcggctccaggagttgaaactctctgtctttttccctaaaaacagtgccaaatttatatcagcccggagaagagactgaactccttgttgggggggaaaatgttggtgagtcacctgtgaatgtcattgcaatcacagccagtgttcatcttccttttgatcatcgnatgctngttcaaaatctatcagcacaggcctttaacaatgcatccgtacccccttcaaagcaagctactttcccttacatatttgcgggtagcaagtacttgcagcctggaacttttgatc

SEQ ID NO: 36010 - DNA, 172 bp, Gossypium hirsutum
  Clone ID: LIB3149-062-Q1-K1-H4
aatcggactaagctggtccataaagcgggcttagttaaagaataaaacccacaatagctgcttgagctattggtgtatggatgatgcaaccttgaaacaaagaagctaggcgtgcccctgaatctgaattgaacactcttctccctttgaatcggcattcataccgacatat

SEQ ID NO: 36011 - DNA, 414 bp, Gossypium hirsutum
  Clone ID: LIB3149-062-Q1-K1-H5
gctgatggctataatggttttctagaacaacgtgcaggaaataatgttggtcaaaattggtttaggggtggtcaaactaattgtgtgtctggtcaaaatgtgtgtgctcatggctataattgtgcaggacgaatgttgggctacatggatggctcaggccaggtagtcttgagtttagaccacctactaatgggccgcatgatgttgggtcacctgatggaattaatggcagttttggtcccactgatattgggccaaatgctccccttggaccgaatgctcctattaggcccactaatcctatgttgaatcatgtgcagcttggttcatctacaccgaccagcaatgctgtagttccatggcgcactaagccgcgtgctcaggtgttttcagcgtcaaatccatgttttgggc

SEQ ID NO: 36012 - DNA, 417 bp, Gossypium hirsutum
  Clone ID: LIB3149-062-Q1-K1-H7
gttagtgagtttcttagtttccctagaagttaagcatggctcaaattaagaggatggagtgccaactcgagatcaagtcctcagctgataagttctttgatgcctacaagaccaaagcccagcttatccaaaaatggccaatcaagtcgttagagatgtaaaacttgttgagggtagtggttgggattccgagggttcggttagacaatggtattttgttgccggaggtaagcttgagacttgtaaggaaatgatggaaaaggtgaatgataaagacaggactattgtttacaaattggtggaaggtgaaatcatgaaagctttcaaaagctggaactccatcctcaacgtgatgccgataggggagggaagtttggtgaaatggactatggaatttgaaaagcaaaatgatgatgt

SEQ ID NO: 36013 - DNA, 423 bp, Gossypium hirsutum
  Clone ID: LIB3149-062-Q1-K1-H8
ctttggaatccccaacgtataatcttctctgttgacggtacacccattagagagttcaaaaacatggaatcatttggtgtcccgtttcctaagaaccagccgatgagaatttactctagcttgtggatgctgatgattgggccacaaggggtggtttggttaagaccgactggactcaagctcctttcactgcctcttacaggaacttcaatgccgatgcttgtgtgtggtccaatggggcttcttcgtgtaaatcgaatgcttcaccatcttctgcatcgacaaacagtgcatggttctctcaagaaatggattcagctaagcaacaaaggttgaaatgggtgcaaaagaactacatgatatacaactactgcaatgatgctaagagatttcctcaaggtctacctccagagtgcaatatgt

SEQ ID NO: 36014 - DNA, 246 bp, Gossypium hirsutum
  Clone ID: LIB3149-063-Q1-K1-A1
cccagggttcttggtccacttaccaacaatcccaatcactggaactggcattaacccggctcgtagtcttggtgcagccatcatcttcaacaaggacaagggctgggatgaccattggattttctgggtggcaccattcattggtgcagcactagcagcactctaccacgttgttgtgatcagagccattcctttcaaatcaaagtgattaggtcaagatcaagagtcatgattgtatgattatga

SEQ ID NO: 36015 - DNA, 418 bp, Gossypium hirsutum
  Clone ID: LIB3149-063-Q1-K1-A12
gagagactgagtctgttgttcaaaggtcatggcatctggtatggaaatcaaggaggtggatggatatagtgtcggcaattgcgtcaaagttgaactgggattatgactctgttcacattgtgagaggggagaaggcgaggaacagggacctgtggcctaatcttgcccaagatacctcacctgatgcccttatctcaaccttgcagaataagattgaagatgggaggaatgtttatattgcaacaaatgaacctgatacatccttctttgatcctcttaaagacaaatattcaactcactttcttgatgaatataaggatctttgggatgagaacagtgagtggtattcagaaacaaaaaaccttaacaacggagtaccagttgaatttgacggttacatgaaggtctctgtcgatac

SEQ ID NO: 36016 - DNA, 384 bp, Gossypium hirsutum
  Clone ID: LIB3149-063-Q1-K1-A2
cgaccgtgcattgttcttggtacatttatcaacattttctatctttggaactggcattaacccgggggggagtcttggtgcagccatcatcttcaacaaagacaagggctgggatgaccattggattgtctgggtgggaccattcattggtgcaacactagcagcactctaccacgttgttgtgatcagagccattcctttcaaattaaagtgattacgtcaagatcaagagtcacgattgtttgattatgagctcaagttaaaccaaatctaaaacatggaagaagagaatccctacaaccctattaagtttctttgatttgtttgatgcttgtgttttctattgtaagaaaattattcttatgcctatgttttttatttatt

SEQ ID NO: 36017 - DNA, 418 bp, Gossypium hirsutum
  Clone ID: LIB3149-063-Q1-K1-A3
cccacgcgtccgcctgaatattattacaaaatccaagttgtcgtaacaatcacgcgagaatatatacagttttaaattttatcaaatatataaatcggatctctctgtcgttgaaaagaaatttcagaaatctgtaaacagggagaaatggcgagtggtggaaaagtgtctttcaaagtcactcttacatccgatccaaagctccctttcaaagtgtttagcgttcctgaagcagccccatttacggctgttttgaaattcgcagccgaggaattcaaagtccgtccccaaaccagcgctatcatcaccaacgatggtgtgggaatcaatcctcagcaaagtgcaggaaatgtctttctcaaacacggttcggagcttcgcctgattccccgtgacagggtgggagccttttgaatgc

SEQ ID NO: 36018 - DNA, 432 bp, Gossypium hirsutum
  unsure (1)..(432): unsure at all n locations; Clone ID: LIB3149-063-Q1-K1-A4
cacgcgtccgnccactcgttcgcctgattatttttacatattcttttttgtcgtaacaatcacgcgagaatgtaggcagttttaaattttatcaaatatataaatcggatctctctgtcgttgaaaagaaatttcagaaatctgtaaacagggagaaatggcgagtggtggaaaagtgtctttcaaagtcactcttacatccgatccaaagctccctttcaaagtgtttagcgttcctgaagcagccccatttacggctgttttgaaattcgcagccgaggaattcaaagtccgttcccaaacccacgctatcatcaccaacgatggtgtgggaatcaatccttaacaaattgcaagaaatgtcttttttaaaccctgttcggagctttgtcctgtttcccgtgaaaggggggagcctttttaatgcttaaa

SEQ ID NO: 36019 - DNA, 396 bp, Gossypium hirsutum
  unsure (1)..(396): unsure at all n locations; Clone ID: LIB3149-063-Q1-K1-A5
gttgaatggaggatcatggcttcgaccttgttacctatagactttttcttttttgttattaatcagataaagagtgcttctatgagaatattttgatatctcttgggttttcttggtgcatgcccaaatttataggagtcgtagttgcatcacattgtttaagttgcacactggttcaacttgcnngttaaaaaaaaaaaaaaaaaaaaaaaataaaataaattaataaataaaataatattaaaaaatttaattaaattataataaaaaaatattttaaaaattttttataaataatttaaattttataattatttatttttttttggggggggcccttttaaaggatccatatttttttcccgggtttcgaaaccttataattttttttttgtg

SEQ ID NO: 36020 - DNA, 224 bp, Gossypium hirsutum
  Clone ID: LIB3149-063-Q1-K1-A6
gaagtctcatcgattctgtctgtggaatgtctctttgttgacagtgtatactggcctgcatgattaactagtgtggaaggcctatcatggcggcttctttttaattttgatgactacactcggtttttgaagtaaaagaacctgcggttctacctgtgctagctctgctctagggatgcctattgcatgacgagtatcattcatgatctttgggttacatttgg

SEQ ID NO: 36021 - DNA, 388 bp, Gossypium hirsutum
  Clone ID: LIB3149-063-Q1-K1-A7
ttctgattcttttaatttgtttttgtatttcatgtagtttaagttgaattagggaaataggggaggtaaggttgaatttatttataattagggcactctgattctgttctgagttcatttaggaccttcgacttctgttttaaatcctattctgattttcttttttggcttagaagttttctagtttgaagattagggcttttgggaattatacagtaattatctaagatctggcttttccgtgttatgtttggtagttaatgagaaaatgtaacttttttatattttttaattgtcttctgaaattattcatatctttgcagagatggcccgtaccaagcagacagcccgtaagtcgactggtgggaaaggctccaggaagcaactt

SEQ ID NO: 36022 - DNA, 172 bp, Gossypium hirsutum
  unsure (1)..(172): unsure at all n locations; Clone ID: LIB3149-063-Q1-K1-A8
ntctcatnctcttaattttatcatattttatatctacccgacaatgaactacggggggccgggatgtaaagattaaattatgctataattatggcactttgattcttttctacaataatttaaaacctacaactaaaatcaaaaatcctattctgtacatcttctttgcctt

SEQ ID NO: 36023 - DNA, 413 bp, Gossypium hirsutum
  Clone ID: LIB3149-063-Q1-K1-A9
gtgccttgaacgtggatgtaacagaattccagaccaacttggtcccttacccaagaatacacttcatgctttcttcatacgctccagtcatctccgctgagaaggcttaccatgagcagctatcagttgctgaaatcaccaatagtgcctttgagccctcatctatgatggccaagtgtgatcctcgccatggcaagtatatggcttgctgtttgatgtaccgtggtgatgttgtgcccaaggatgtcaatgctgctgttgccaccatcaagaccaagagaactattcaattcgttgactggtgcccaactggattcaagtgtggtatcaactaccagccaccgactgtcgttcctggtggtgatcttgctaaggtccagagagccgtttgcatgatttccaactcaaccagc

SEQ ID NO: 36024 - DNA, 425 bp, Gossypium hirsutum
  Clone ID: LIB3149-063-Q1-K1-B1
caagctttgaggtttttttaggttgctcttggaacatttagcagccaaccaaaaatggttctccaaaacgatatcgatttgttgaatcctccagcagagcttgagaagaagaagcacaaactcaaacgtcttgtccagtctccaaattctttcttcatggatgtcaaatgccaaggctgtttcaacataacaatagtgtttagccactctcaaacagtggtggtatgtggtaattgtcagactgttctttgtcaaccaacaggaggaagagctagactcaccgagggatgctctttcaggaagaagggtgattgatctcatattttgctattttatgattcacaaaaacaaaaagaagtaatctttggatcaaatatgggaatcatatgagtaatctttttcatgtgtttcaggtatgacatatg

SEQ ID NO: 36025 - DNA, 382 bp, Gossypium hirsutum
  Clone ID: LIB3149-063-Q1-K1-B10
cttctcctgaagcttcttcaccttctccttcaatcgcttcccctccaggtcctaccccatcaagtggacctgctccagcctccgagcccactgccgaccaaggccctcctccctctgctgcctccaccaacggtgttttcattggtgcaatcgctcttgccgccactttcttcgctgccgttttggcttaagaaagtgaagtgaagtccagcttttttgggttttggatcatgattcttgagaatctttactttcatgctctcttttgttctttcgagtagtgtttttttctcttactttatatttttcattgcaccctactttttggtttttggttaatttatttgttatgtatggttgatgatgacgattctattatttt

SEQ ID NO: 36026 - DNA, 347 bp, Gossypium hirsutum
  Clone ID: LIB3149-063-Q1-K1-B11
gaagaaaccatgccgaataacaaggtaattgtaggaaagaacaggaagagaggaaagaatgaagctgacgatgagaagcgtgaacttgtgttcaaggaagacgggcaagagtatgcccaagtgcttcgtatgctaggcaatggccggtgtgaagccatgtgcatagatggtactaagcgcctttgccatatccgaggaaagatgcacaagaaggtttggattgcagctggtgatataattcttgttgggcttcgcgactatcaggatgataaggctgatgtgatccttaagtacatgcccgatgaagcaaggctcttaaaggcatacggtgagcttccagagaacac

SEQ ID NO: 36027 - DNA, 408 bp, Gossypium hirsutum
  Clone ID: LIB3149-063-Q1-K1-B12
gagcaaccgagcagctggatgcagcacaagaagcaaacaccgaaatggaggcagagttgcggagactgaaggtgcagctggatcagtggagaaaggcagctgaggcagctactgccatgctttcatccgggaacaaagggaaacattcagacaagacaaaatctgttgacaacaactataaccctggaaatggctcgccgaactcggaagacatggatgatgattcaccaaagaagaagaatggaaacatgttaaaaaagattggtgtgttatggaagaaaggtcagaagtagcagcaaatgcatcagaggttgcaatgcatatataatataatatatatttctgctctaaaaagtaaacttgaaatggctgtggatggtttcaagttatgaaaaagtaccttccttt

SEQ ID NO: 36028 - DNA, 356 bp, Gossypium hirsutum
  Clone ID: LIB3149-063-Q1-K1-B2
gcgcaggttggagtaggagatacatccggaggcagtactacacccaatgatcattattgctggatgcgccctgaggacattgattacccgcgccctgtctatgaatgtcacagctgctccgatcttgctgctgaaatggctgctgctttggctgctgcttccattgttttcaaagacaacaaggcgtactctcaaaagcttgtccatggtgcacggacagtctttcagtttgccagggatcaaagaggcagatatagtgctggtggttctgaccctgccctcttttataactcctccagttactgggatgagtttgtttggggtggagcttgggtatactacgccactgggaattc

SEQ ID NO: 36029 - DNA, 115 bp, Gossypium hirsutum
  Clone ID: LIB3149-063-Q1-K1-B3
acccccaaagataatttggggtgggggcgccctgtggacatggattaccctccccctgactatgaatggaacaagtgctccgatcttgctgttgaacaggctgctgatttggctg

SEQ ID NO: 36030 - DNA, 411 bp, Gossypium hirsutum
  Clone ID: LIB3149-063-Q1-K1-B4
cacatgaggaagatgaagaacaatgccattgtttgcaacattggtcactttgacaatgaaatcgatatgctcggtcttgagacctatcctggtgttaaacgcatcaccattaagcctcaaaccgataggtgggtcttccctgaaaccaaaaccggcatcattgtgttggctgaaggacgtctgatgaacttgggatgtgccactggacacccaagttttgtcatgtcctgctcgttcactaaccaggtgattgcccagctcgaactatggaaggagaaggcaactggaaaatatgagaagaaggtttacgtattgccaaagcacctcgacgagaaaagtgctgcacttcacctcggcaagctcggagctaagctcactaagctcactaaagatcaagctgattacattagt

SEQ ID NO: 36031 - DNA, 402 bp, Gossypium hirsutum
  Clone ID: LIB3149-063-Q1-K1-B5
cgcacatgatgaagatgaattacattgccattttttttttcatcggccactttgacaatgaaggggggatgcttggtcttgagacctatcctggcgttaaacgcgtcaccattaagccttaaaccgatcggtgggtcttgcctgaaaccaaaaccggcatcattgtgttggctgaaggacgtctgatgaacttgggatgtgccactggtcacccacggtttgtcatgtcctgctcgttcactaaccaggtgattgaccatctcgaactatggaaggagaacgcaactggaaaatatgacaagaacgtggacgtattgccaaagcaccctttccgagaaagttgctgcacttcaccttggttagcttctagcttagcttacttaactcactaaagatcaagct

SEQ ID NO: 36032 - DNA, 386 bp, Gossypium hirsutum
  Clone ID: LIB3149-063-Q1-K1-B6
aatgaaatagaccaagtggctgaaatatcccctgcagaggtggatctacttgaggaagctttgaatcatttttacgatcccatgatggagccactattttctccattacacaatcagattgaagcagagcaagcaccttggatgtttgatcatgtgggaaactgttacaatgtggaatttggacacggcacaaacgaaaatgatccttatatttctaacttcctggagtctatacttaaaaattcggatgactaccatggtgatgacactggtagtcagaagaattcagaatctgagacccatacaaccctgaccattggcaaggatggtggattttgcagtaaacctgattctgaagtggcccaagtgctgcttgggacagacac

SEQ ID NO: 36033 - DNA, 422 bp, Gossypium hirsutum
  Clone ID: LIB3149-063-Q1-K1-B7
aaattcttaaaatcttcaaggaccattccatcaagacatgcatccttgatgactttgaattttacgaggctcgtcaaaagatgatccaggagaggaaggctaagcatcagctgttacaaaaacaagttctgagtagggaacctaaaggagaaaacccagcaatggcaaaggagacattggaaaaacctgtcgaggcagccttgacagaacgaacggttgcatcaacagcagaagcagtaaatgcaacgaacggagacgcaaaacccattgaagagaaaggatcagttgctacaactgaagacagctctcaatgaaaccaggttgttttcgatagtcggctttggtagaaatgggataggattgtactttttgattggttaattctagttgctagatagtgtgatcatatcatttttagctta

SEQ ID NO: 36034 - DNA, 410 bp, Gossypium hirsutum
  Clone ID: LIB3149-063-Q1-K1-B8
agccctgctccggttgttgctaagattgttattgttgaggaaggtgaagctgaagttgagaggaatgagaaaaagaagaagaaacataagaagagtgaagaggatgctgatgctgaaactgaagagaaggttgggaaggaaaaaaagaagaagaacaaggataaggttgaagcttcttcaccagatacagagaagtctgagaagaagaagaagaagaagagctaggagagcgaggaaactcctgttgctgttaatggtgcaggggatgataaaagcgaaaagaaaaaaaagaagaataaaagcaaagatgcagtaaagccgtacgtgatgaggttttaaaacatttccttttagtaggaactcaaattgttttgcagttgtatgtttggtgcctacaattaaccttttaa

SEQ ID NO: 36035 - DNA, 416 bp, Gossypium hirsutum
  Clone ID: LIB3149-063-Q1-K1-B9
cccacgcgtccgcttcccttttctaaaaaaatagagtaaaaaatttcaaagccattaccccattcggctaacccctaaaactttgagcaaatcaatcgccaccactgtaataggtggttatcgacatgcacggatcacacttagaaccttggttcaaagattaccaatctcagcccttgaaatctcatcttgacctttgatttcgacaaaggagatgaagattccaatggcctatttgcgaaggtaagcactccccttcccttttttgtttttaaatgcaaataaaaaaacaaaaatgcacataaaaatgaaggaagcagataaaaaaggcaaaagatccagagacttaaaaacagaaatcaccttttaaattgcttttgaatttttcttttcaatatgcttctctcagtgtgcat

SEQ ID NO: 36036 - DNA, 351 bp, Gossypium hirsutum
  Clone ID: LIB3149-063-Q1-K1-C11
tgcttgtcttcttttacaggtacggaggcaacgtggcgggggtagctggcgcgtacggaggctgctggtggcgcagttgctgctagggttagggtttgctgcaaacatggtttaggttttgggcctttttgggcttagggttttattagttttgggtttttaatttaggttatataatttggattttgatgatggactattaattatttggttttttttatgttttttaattgtttgggctggttaatagtttgggcccgggtaaatttgggtacttacaacggtaattatacttttttaatataaaaataaattgatgtatttatttctttaaatgtatagaattgaatc

SEQ ID NO: 36037 - DNA, 363 bp, Gossypium hirsutum
  Clone ID: LIB3149-063-Q1-K1-C12
gttgatggagggcctgcagctaaggcactcaaaccaaaattcaatgtcttctcaaagactgtgacagctcatacaggggtggaagtaccagaatttgatattaaggttctagttgctgctgctgtagccttcaagggtgttgggggtatcctttttatctttggcagcactatcggtgcttatcttctggctctgcaacaggtaattgttactaccatattgtacgacttctacaactatgacacggaaaagaaagaatttgggctactcttttcaaagttctcacagaacttggcattgctgggggcattactcttcttcatcggcatgaagaactcaatccccagcagacaactcaagaaa

SEQ ID NO: 36038 - DNA, 391 bp, Gossypium hirsutum
  Clone ID: LIB3149-063-Q1-K1-C2
gctccttcagctcccatggcaaactcaatggtccttgtttcattgatggctttaggcctcttgatggcattttcaacgacgactcaagttgaagcagccgccagggcattttttgtatttggcgattctctggttgataatggcaacaacaattacttagcaacaactgctcgagccgattcaccaccttacggcattgacactcctacccgtcgccccactggccgattctcaaatggcaaaaatattcctgattttatcagtgacgcacttgggtcagagccaacattgccatacttgagccctgaactcaggggagaaaagctgcttgttgtgccaactttgcttctgccgtgtggaatcctcatgacactgcattcaattataacat

SEQ ID NO: 36039 - DNA, 276 bp, Gossypium hirsutum
  Clone ID: LIB3149-063-Q1-K1-C3
gcggcggcttacccacgaccaacaacgctgttgcttgtggcggaagatcccgtgtattagcaggaatgccgcgtgggaggcagatccacaagaccttcaacaacattaaaatcacgatcctctgcggcttcgttaccatacttgttctacggggtacaatcggcgttggcaatttgggaagctccgaagccgatgctgttaaccaaaacctaatcgaagaaacgagccggatcctagctgagattcggttcgacttcgaccctaccgatccggacg

SEQ ID NO: 36040 - DNA, 304 bp, Gossypium hirsutum
  Clone ID: LIB3149-063-Q1-K1-C4
agagaatccattcgactgatcatcttcgtgcaaattattagtatttcaagcgatcacagcgaagaagagcattcgagttaggttttttgtagctttccttcaggtcatatgattgataggacccttttgttttagcctgtattgttttatttattctgggtttttcacttttctgtttgctttgagatttcctggtatgttttttcacctgcaaagtttggaacttgttatccaaataaaataacctagaaacaaacatgatatgatacaaattaattcaatccattaaattggctggatcaat

SEQ ID NO: 36041 - DNA, 376 bp, Gossypium hirsutum
  unsure (1)..(376): unsure at all n locations; Clone ID: LIB3149-063-Q1-K1-C5
cgcccgaacccaagggattttgtcttctacgcatcttacagtcttcagtgannaatctagcctaaatatcgagtcgcgatgcaactaattgaggatgatgatgnnatgtagaagaaanccgagacagagtcnggagacanaatagacagtgcagtcaaaggaatgatgttgtagattggcctgaaancctcggggacantgccttctgagttagttttaccctctgatgacaagccgaaggaactgtaacatgcattttcaagtctgaaacttggataaagtgaaacattagttagtagaatatatgtaaaccatagtcgactgtgaaattaatctgtctgcaatttttgctcttttaatgcaccgcagtgctctt

SEQ ID NO: 36042 - DNA, 182 bp, Gossypium hirsutum
  unsure (1)..(182): unsure at all n locations; Clone ID: LIB3149-063-Q1-K1-C6
cgacccacgcgtgcgnccaaacctaatgaactttctatacccatgttttttttaaccaaagccagcctaaataacggggcgcattcatcaaaagacgatgaccccaaactataataaacctatacatagcctgacacaaaagacagtgcacccaaatactactacgctattgcctcaaacct

SEQ ID NO: 36043 - DNA, 417 bp, Gossypium hirsutum
  Clone ID: LIB3149-063-Q1-K1-C7
ccagaagccatctacctcgaggacgatcaaattaaggatgggtatatgttgacttgtgtttcaaagccaacctcagattgtgagattcacactcacaaagaacttgatctttactctccatcaaaataaaaagttaaatattgttattagtattttggggtaccaaaaaaactgaaattagggtctggggagttgtctgaaacttctttttttgtccgagtttagggtttgggaagttgagggtattgtaggggctctcatgggcaataagtttggctagtgttcgtttgtaattttctgtttatgaatgccattttccttgttgattgactgattggttcgaaaaaggacattcagttaaattgagaatcgtttgttgagttagattttttttatttttcatgaattttttaattg

SEQ ID NO: 36044 - DNA, 362 bp, Gossypium hirsutum
  Clone ID: LIB3149-063-Q1-K1-C9
gaaaccgccttccctgattggtttgttgcttttcagttgaataaggctacccccgggttgcaaaagatgtactccttcaacggcacagccttggagatgaatggtgttaacaatactatattcatgcaaggtctgcccggattaaactatatcgttgcagaaaccgatgcagctaaccctcagaaagatcctagggtgcccggaaaacaacagacagttatctcattcaccaagaaaactaccccttccattaacattgctgcaggtgatggattcccctctaaagtgttctttaatggcgaggagtgtgcactcccttcaatgctgccaacaaacagcggtaatcgaagggctcaatgact

SEQ ID NO: 36045 - DNA, 317 bp, Gossypium hirsutum
  Clone ID: LIB3149-063-Q1-K1-D1
attgtctacgaggggaagccttcagtggattgtattgcaaacgctcctcagtccttgttaactggcatgaatctgttcctatctcatctggacatcacttttaggcgggacccaaccaattaccgaccgagaatcaacaaactggactcaaccaaggatagagagcaaaagtctgctgggtcatattattacctagatgattgatcgacacatctactggcagttgtcaattgtgatgagatgaacaacaagacgtgaatgttgggtattcccgggatctctgagtggagcagtgatggtatgttgataagctgaga

SEQ ID NO: 36046 - DNA, 381 bp, Gossypium hirsutum
  Clone ID: LIB3149-063-Q1-K1-D10
gctttatttctggtgttcttcttctcttcttcctgtttcttatttcctcttcccatttaggtgctcgttccctagcaaacaaacaaggaaaagaagaggtagagcttactcaaacagcggatatggaagacaatgaactaatgaatcagctattgggggtagaagcttgtgatgctggagatgatgaatgcttgaagagaagaataatctcagaggctcacttggactacatttacacccagcatcataagccttgaggactattccttgtatatattcttgttaagttgttccatgtataattaagttgtctgggaacctccagaatggattatggttaaggttaatgaatatgtatgttagtataaacttaattatgat

SEQ ID NO: 36047 - DNA, 419 bp, Gossypium hirsutum
  Clone ID: LIB3149-063-Q1-K1-D11
tcaactcacacggacgggagggagacgagaaaaggaagacaacgatggtgtctttgaagttacagaagcggctcgccgctagcgtcctgaagtgtggccgtggcaaggtttggcttgatcctaatgaaatcaatgaaatctccatggccaactccaggcagaatgttaggaaacttgttaaggatggttttgtcatccggaagcctaccaagattcactcccgatctcgtgcacgcagaatgaaagaggccaagagaaagggtcgtcattctggctatggtaagaggaagggtaccagggaggcaagattgcctacaaagatcctttggatgaggagaatgcgagtactaaggcgtttgcttcgtaagtacaaggaatccaagaagattgacaagcacatgtaccatgacatgtacatg

SEQ ID NO: 36048 - DNA, 51 bp, Gossypium hirsutum
  Clone ID: LIB3149-063-Q1-K1-D12
tacgccccctggatcggcacattaaccgcgacgagtgtgatggttacgcac

SEQ ID NO: 36049 - DNA, 197 bp, Gossypium hirsutum
  Clone ID: LIB3149-063-Q1-K1-D3
tcttccattaatttcgtcatcagattgtgtgtgaagctttatgttttatatttgtgaaaaaaatagagtgggttgttatgaatatctatgattctgtgaccactatcattacagtagaatggcaaaggaactgtgaccactattgggatctttgtgatgttaactctttggaacatcaaatcaactattattgcaac

SEQ ID NO: 36050 - DNA, 282 bp, Gossypium hirsutum
  Clone ID: LIB3149-063-Q1-K1-D4
actttcaataatccaatcttaatatcgctatcattcttccacacaccacattcctaaaaaagaccgattttttttaaccaatctcaaccatacaacaaccacaatcataacaccataacgtcaccccacctaattcacctattgcactcacccctatatttacttctaaaaacatctaatacaccattattcctacaccttacaaacaaacacccaccctcaatatataatccaatttaacctatccacccatacttaaatacttacctctttttcattatt

SEQ ID NO: 36051 - DNA, 164 bp, Gossypium hirsutum
  unsure (1)..(164): unsure at all n locations; Clone ID: LIB3149-063-Q1-K1-D5
cgatcgatggagntccaaatattcggaatgagcatgtagtagctttggnttttatcaaatttatgtcttcgcgggggtgtgttttncttaacnaataacgcataatatgatacantcgtgttgtgttctgttacanaataattgagagagtggctttttgtttc

SEQ ID NO: 36052 - DNA, 384 bp, Gossypium hirsutum
  Clone ID: LIB3149-063-Q1-K1-D6
gggaaagtcgttgggtaaaatctgactggaagaaagatgagaacatggctggggaatggaattacacttctggaaaatggaatggagatcttaatgacaaaggtattcaaactagtgaagactacaggttttatgctatttcagctgagttcccagaagttaacaacaagggaaagactctagtcttccaattttctgtgaagcacgagcagaagcttgactgtggtggtggctacatgaagttgctcagtggtgatgttgaccagaagaaatttggcggtgacaccccgtacagcatcatgtttggccctgatatttgcggctacagcaccaaaaaagtacatgccattcttacatacaatgggacaaatcacttgatcaaaa

SEQ ID NO: 36053 - DNA, 360 bp, Gossypium hirsutum
  Clone ID: LIB3149-063-Q1-K1-D8
atctccccgaggtttacattgttagttggaatgaccacttttttgtcctaaagggggacgcgagaagcttactatattattgacacgttaggagagaggctttatgagggatgcaatcaagcatacatcttgaaatttgaccgcaatactgtaattcacaagctaccaaatgtagctcaatcatcaggtgataagtcaacgggtgatcaacaggtcaatgggaaggagggttgtgttgcaggggctgtagtaaccaaacctgagaaatcaatcaagagtgaggacagtgaggaggttgtttgccagggtaagaagtcctgcaaggaatacataaagagctttttggctgctatacctatt

SEQ ID NO: 36054 - DNA, 327 bp, Gossypium hirsutum
  Clone ID: LIB3149-063-Q1-K1-D9
atctcaactggcatgacctccaaatttgtttatacacccctttcgccaggacggaggacgggccattttataaccaagaaggaactttttccacattcatctaacataaacggaaaaactaccacaagagtccattttgtgaccaacttgataaggcgaagttgctcattttgcaccttatgaaaagaggattacggaacttttcaaggttggtaatgacaaccaaaactctcaacgtatctaatagaaaatttgaaactcacaataaagccaaaaataaccctgaggatatgtccagtgttctcctcaagattaagtctcatcatc

SEQ ID NO: 36055 - DNA, 151 bp, Gossypium hirsutum
  unsure (1)..(151): unsure at all n locations; Clone ID: LIB3149-063-Q1-K1-E10
acgcatgcatgcggcgncgttgcttttttatagtctcacctaaatacaaatcactggccgtcgcttaacaacgtcgcgactggtaaaaccctgccgttacccaactcaaccgccttactgcacatccccctctcaccagctgacctaataa

SEQ ID NO: 36056 - DNA, 343 bp, Gossypium hirsutum
  Clone ID: LIB3149-063-Q1-K1-E11
gcactttctaatctttagaatccacaactagtttcaaatggcacccaaagccgagaagaagccagccgagaaaaagccagctgaggagaaaaaggccgagaaggccccagctgagaaaaaaccaagagccgagaagaagctccctaaagaagccggggacaagaagaagaagcgaagcaagaagagcattgaaacctacaagatctacatcttcaaggtgctgaagcaggtccatcctgatatcggcatttccagcaaagccatgggtattatgaacagcttcatcaacgacatcttcgagaagctggctcaagaatcttcgaggctcgcacgctataacaag

SEQ ID NO: 36057 - DNA, 378 bp, Gossypium hirsutum
  Clone ID: LIB3149-063-Q1-K1-E12
atctcgaagctgaatctagtgggatgactctataattctgactgtgtgcacttgaagctttaattgcttctcttatagagtaggaaataagtaacacaagaatgccaagtttaactttaattttgaatgccctttttagacttggtgcaaattttgatgtagtccatatctaatctcctaccgtaaaagtttatgatattataaatgcggcagtgcattttgctgataggattcaattactttcgaaatcagagatgctctttggatccccataattttgcacgttaaacaaaacgcaatatcctttgggcatttaaatttggagtattcaaattgtaaaacaaagctacttataatctactccattggttagcacgt

SEQ ID NO: 36058 - DNA, 348 bp, Gossypium hirsutum
  Clone ID: LIB3149-063-Q1-K1-E2
catcgtgatattaaaaagtgaaaacattctgtttgttttggatggaaagagagttgatgggagccctgttgtgaagctctgtgattttgatagagcagtacctcttaggtcttccctgcatacatgttgtattgctcatttagggatacctcctccagatgtttgtgttggaacacctcgttggatggctcctgaggttctaggcgcaatgcataagcgtagtccttatgggctggaggtggacatttggtcatttggatgcctgctttatgaattgttgactctcgaagttccgtattctgggttatctgagcttcacattcatgaacttattcagatgggtgagcg

SEQ ID NO: 36059 - DNA, 352 bp, Gossypium hirsutum
  Clone ID: LIB3149-063-Q1-K1-E4
gctgcgcctaccatcaaacctattatacctatattatatgtagactgctgcccagccgtattaacgtgtggtattggctatgatgcacgaactgcttgtactggtggtgcaattagtaaggatcatagaggcggtcgcttcataaccaaccgctccaactaatgtatggtgttgtacgacatcgaccacatgtttgatctcatgtatgccaagcgtgcctttgttcactggtacgtgggtgagggtatggaagaaggaaaattctcggaagctcgtgaggaccttgctgcacttgaaaaggattatgaaggggccggcgctgagtcaggccaaggtgattacgaaggtgaag

SEQ ID NO: 36060 - DNA, 401 bp, Gossypium hirsutum
  Clone ID: LIB3149-063-Q1-K1-E6
gcggagcctgcctactcttaccctttttcagagctttgatagaggaagagcagctcacctaatccatcatgggtcactctaatgtctggaactctcaccccaaaacctacggccctggctctcgcgcctgccgtgtgtgcgggaacccccacgccatcatcaggaaatatggactcatgtgttgcaggcagtgcttccgtagcaatgccaaggaaattggattcattaagtaccgctgaagaatttatgttgggaagaactttgttagagtatgagcctttggtaatgtgattattgaattagaaggataatgtttattggtttcagtctggacatctaaaagggttggtgaactaaggatactttgttgtttctcaatcaagaatcatactgtttttttt

SEQ ID NO: 36061 - DNA, 316 bp, Gossypium hirsutum
  Clone ID: LIB3149-063-Q1-K1-E7
aacgatcctttcatcaccactgaatacatgacctacatgtttaagtacgacagtgttcacggtcaatggaagcatcatgagcttaaggtgaaggactcaaagacccttctctttggtgaaaagcctgtcacagttttcggtatcagaaaccctgaggaaatcccatgggctgaggctggagctgagtatgttgttgagtctactggtgtttttactgacaaggacaaggctgctgctcacttgaagggtggcgcgaagaaggttatcatttctgctcccagtaaggatgctcccatgtttgttgtgggtgtcaatg

SEQ ID NO: 36062 - DNA, 408 bp, Gossypium hirsutum
  Clone ID: LIB3149-063-Q1-K1-E8
cagattcatctagttgtaccaatggtcttttctggttgacacgagcaatggatttcctcgtagaattgttccgcaacttacttgcacatccagattggactatgactgaatcttgtaccgactcctatggcaaaaccctgaaaaagttccatggctggattgctagttccgctttcacggttgcattgaagttggctccagataggaagaagttcatggaagtgatagctgggactggagatgttaatgctgacatggagaaattttgttcgactttccccccatttcttgaggagaatcacaaatatctggccaagtttggcttggatgatatgaaggcatgatgggataagtttaatgaatagaggagagactacctacctatatttactcccgtgttcgaacttt

SEQ ID NO: 36063 - DNA, 413 bp, Gossypium hirsutum
  Clone ID: LIB3149-063-Q1-K1-F10
aaaaaaactctctgaaatggcgatgaaaattttcagcgttttcttctttgctctcctcttcgctcgcatctcctttccttcaagttgctaggtgtcaatcagaagcagaggcagatgttgcagaagctgttgaaggaggtgatctcggtattgttggggaggatgttcaggattttggtgatcctaattacagttcagctcctgaagttaaaactgtttgcgttttccccaaaaatagcgccaaattggttctggctggagaacagactgagctccttggtgggatggaaaatattggggagtcacctgtgaatgtcattgctatcaaagccagtgttcatctcccttttgatcaccgtatgcttgttcaaaatcttacagcagtggctttcaacaatgcaactgtaccccct

SEQ ID NO: 36064 - DNA, 395 bp, Gossypium hirsutum
  Clone ID: LIB3149-063-Q1-K1-F11
ctacactgacatggttaacaaatactatgatcttgttaccagcttttatgagtttggatggggtgaatctttccattttgctcccagatggaaaggggagtctctcaaagaaagcataaagcggcatgaacattttcttgctttacaacttgggttgaagcctggacacaaggtgttggatgttggatgtggaattggtggaccacttagagaaattgctcgattcagttccacatcggtcactgggataaacaacaatgaatatcaaataacaagagggaaggaattaaaccgcattgctggagtggaaaagacttgcaactttgtgaaggctgacttcatgaagatggcatttcctgacagcacctttgacgcaatttatgcaattgaagcta

SEQ ID NO: 36065 - DNA, 312 bp, Gossypium hirsutum
  Clone ID: LIB3149-063-Q1-K1-F12
ggccgaccgacgcgtacgatacacacacattgaaatcaaaaactatgatcttagcaccagcttctatgatctgggatggggtgaatcttatcatcttgctcccatatggaaaaggcagactctcaaacaaagcataacacaacctgaacatttacttgctctacaacttgggctgaagcctgtacacaatgtgttagatcttaaatatagaatatgtcgaccacttaaaaaaatttctctattcaacaacacaatcgtcaatgggattaacaaccatgaatttcatcattccactagggaaggaattaaacc

SEQ ID NO: 36066 - DNA, 368 bp, Gossypium hirsutum
  Clone ID: LIB3149-063-Q1-K1-F2
gcttctctggactcttgagcggccagcaaaaatccaatccagatttctacaattggaaccggattaaggttaggtactgcgatggatcatcgttcaccggggatgctgttgatcgagctaataatctctttttcaaaggaaacagcatatgggaatttatcattgctgatctactagcaaaaggaatgagaaatgctaaaaatgctattctttctggctgttccgctggaggattggcttcgatattgcactgtgacaggtttcgagctctccttcccgcttctactaaagtaaagtgcatttcagatgctggcttcttcctccatgcgcaagatgtctcgggagggaagcacatagaagaattctat

SEQ ID NO: 36067 - DNA, 123 bp, Gossypium hirsutum
  Clone ID: LIB3149-063-Q1-K1-F3
gaattagactattttgggtgacattgggcacttttcctagttaggagaagccatttttcaggataaatttgacaatattatgagtatgttttttgccatcggaggttttgtatcaagtgattt

SEQ ID NO: 36068 - DNA, 194 bp, Gossypium hirsutum
  Clone ID: LIB3149-063-Q1-K1-F4
gaattacactattctggttcacatagccttttactattccacacgacaacccattctaccggacggatgttacaaactgcggcccatccttcttcacctcggatgcttttgatcaagctctttccctctttatcaaacgaaacaccatatcgcaatttatcatttcttctctactatcaaaagcaatgacaaat

SEQ ID NO: 36069 - DNA, 359 bp, Gossypium hirsutum
  Clone ID: LIB3149-063-Q1-K1-F5
cctcaatgtttgctcaaagaaagttccttatggcttccaatgctaatttaagtcaatcattttcccctacattctttctcaacttctctatggtttgtgtctggtttttttcaagttatgataccataacttcattgttttaatgtgcaataaattagtgttttcatttctaattttgttgttttaatttcttcgtgggggatagatatagaataagtttaatacttatcttcaagtgttgtttgaagtttttttatatctccaaagaacatggaaagacttgtattatttaagctcgtaatttattcccttgtttatttatcagtttattaatatgagccccatttcatatttgtacc

SEQ ID NO: 36070 - DNA, 384 bp, Gossypium hirsutum
  Clone ID: LIB3149-063-Q1-K1-F6
accggtttcaccagctatgggtatcgacttggtcgtcggcggcaagagcaagaagacgaagagaactgctcccaagtctgatgatatatatctcaagctccttgtcaagctttaccgttttctggtaagaaggactggcagcaaattcaatgcggtgatcttgaagcggctatttatgagcaaaaccaacaagcctcctttatctctttctaggttgattcaattcatgaagggcaaggaggataagattgctgtggtagtcggggctgtcaccgatgacattcgtgtgtatgaagttcctgcgctgaaggttactgcgttaaggttcactgaaacggccagggcaaggattgagaaagctggtggggaatgtttaacatttga

SEQ ID NO: 36071 - DNA, 283 bp, Gossypium hirsutum
  Clone ID: LIB3149-063-Q1-K1-F7
accgtattcaccatctattaacattttctttgtcgcccccggcaaaagcaagaagaccccgagaacttttatcaagtctcagcctatatatctcaagctcctagtcaagctttaccgattactccaaataaggactggcagcaaattcaatacattaatctttaaattccttttgatcatcaaaaccaacacaaccatctttaattcatatctaagttgatttaatcccttttatggcaagcgtcgattaatatgttttttataatcctcaactatcacccct

SEQ ID NO: 36072 - DNA, 366 bp, Gossypium hirsutum
  Clone ID: LIB3149-063-Q1-K1-F8
attcatttgcaggttgggtttgatgagctcgggggaacagacgagttttccactgaagatttggcggacagattggcgaaagttcaagtcatcttctctgaaggcgaatcgtcatcgaaacccagaacacaaaccaaaaggagtgtccgacagagctcgaacccagactcgtccgattcggattaactgtgggttgtctcggtttgtaagctttctttacctgtttcagtggaaatcaataggatttatcatcattccgtgtttaaatactttaaaagcaaatgaagagaatattgtttgttgtatgaatgagatcatttaatcatctcgatatttatatatatgtgctcaatctaattttgctgg

SEQ ID NO: 36073 - DNA, 193 bp, Gossypium hirsutum
  Clone ID: LIB3149-063-Q1-K1-F9
aaaaaacgggccgaccgcacgcgtactatacatttccatcttaattaagattttttttctcaaacagacaaaccttccactgaggacgcgtcttataaattgacgaaagcctcaacaaatcttatctgaaggcctaatcctcatccaaacccacaacacaaaccaaaatgaatgtcccacataattcaaaccc

SEQ ID NO: 36074 - DNA, 371 bp, Gossypium hirsutum
  Clone ID: LIB3149-063-Q1-K1-G1
gaccgacccgcgcggccgccataagctatctaccttttggtcgaacattttatttatgggtatatgttgacttgtgttgcaaggccaacctcagattgtgagagtcacactcacaaagaacttgatctttactctccatcaaaataaaaagttaaatattgttattagtattttggggtaccaaaaaaactgaaattagggtctggggagttgtctgaaacttctttttttgtccgaatttagggtttgggaagttgagggtattgtaggggctctcatgggcaataagtttggctagtgtccgtttgaaattttttgtttattaatgccattttccttgttgattgactgattggttctaaaaatgacat

SEQ ID NO: 36075 - DNA, 383 bp, Gossypium hirsutum
  Clone ID: LIB3149-063-Q1-K1-G10
ccgaaggctggttcaatccacccttcagttcttcgacatggctcaacctgcctggggaaagatcggtatatacagaggcggaattgtgcccgttttgttccaaaggtagcgtcctccataacatttccttgcccttattatttttcattactctttattaaacgtcttggccttcttacaatacagggttccttgcaagaagcatggtggagtgaggttcacgatcaatggaagagactatttctagcttggtatgattagcaatgttggtggcgcaagatctatccagtctgtgtccattaagggatccaaaactgtgttgatggcattgtcaaggaactggggagctaactggcaatccaaccccgatcttaatggccaat

SEQ ID NO: 36076 - DNA, 391 bp, Gossypium hirsutum
  Clone ID: LIB3149-063-Q1-K1-G11
tgcatcgaatggaatgcatggcacaggaacctgtgctctttgaggacatcttatgtcagataattgatatgattaagccggaggctgagagctatatcacattgcgtgacctgaagggctctaaactttctggaagtgttttcaatatccttttcaatcttaacaaattcatggcctttgaaactcgtgatccattcctcatacgtcaggagcgtgagaatcctacattgacggagtgggaccgttttgcacatagagaatatattaggctttcaatggaagatgatgttgaagatgcctctaatggaagtgcagaagtttgggatgaatcacttgaggctcccttctaagttgaataggatgctcagagaagagctcaacacacttatat

SEQ ID NO: 36077 - DNA, 83 bp, Gossypium hirsutum
  Clone ID: LIB3149-063-Q1-K1-G12
gattttcaatttttattttaaaaaaataaaagctacgatcttaatcagattaataagcatgaagctaagctccattgaacgat

SEQ ID NO: 36078 - DNA, 376 bp, Gossypium hirsutum
  Clone ID: LIB3149-063-Q1-K1-G3
caccgacggccgctccgcccgggctcgcgccccgggttttgcggcgaccgccgcgccctcctactcatcggggcctggcccttgccccgacggccgggtataggtcgcgcgcttaagccgggaacatcactctcttgcgcggcattctttactggatcgcccaactcctaggctcaaccgtcgcttgcctgttgcttaagttcgctaccggcgacctggctgtacccgcttttgggttgtcatcaggtgtgggcgtgtctaacgcattggttttcgaaatcgtgatgaccttcggattggtgtacacagtgtacgccacagccgttgatcccaaaaagggaagcttgggaacaatcgcaccattggcaattgggtt

SEQ ID NO: 36079 - DNA, 378 bp, Gossypium hirsutum
  Clone ID: LIB3149-063-Q1-K1-G4
cggggaaaaacgaaagttgtcgactagcagccccgtcccgttttacgacgttcgagattatggattcatgttacgagctcgggaatcgtcagaggagcttatcacactattgacagtcttcggtatcattgaagtgaactttcgaatttatggcatgtatatgctggagtttacttttgaaatgtttaattttggttatatattaaaagccatgcgaaaatggcttaactactttgtttgaatttggttttagtttagttatgttttaaattgatgttgggtcatgatgtcgtatgctataaagagttatgagtggtgctatgtgattgtatatcaaggttggtttatgatttagtaagtgacagagtagtttcgatc

SEQ ID NO: 36080 - DNA, 417 bp, Gossypium hirsutum
  Clone ID: LIB3149-063-Q1-K1-G7
aagaaagacaaagcccctcctccttcatccaagcctgcaaagtctggaggtggcaagcagaagaagaagaagtggagcaagggaaagcaaaaggagaaggtgaataacatggtgctgtttgatcaggctacgtatgacaagcttctctctgaagctcctaaatacaagctcatcactccctctatcctatctgatcgtatgaggataaatggatcacttgcaaggaaggctattagggaactgatggcaagaggatcgattaggttggtgtctgcccattcaagccagcagatttacactagggctacaaatacctagatggttcgttgtatttttgcttagttccatgcaatagtgctgttggttgttgagttgacttctaagtgaaattatttacttgctggcgctttttttttt

SEQ ID NO: 36081 - DNA, 367 bp, Gossypium hirsutum
  Clone ID: LIB3149-063-Q1-K1-G9
gaaaagggtagccgatactacaccaagaatttccgtggggcagtcgatgctttccatgtcagtaccgtggacacaactggcgccggtgactcctttgttggtgcattgctatgcaagattgttgaaaacccaaccattcttgaggatgaagcaaaattaagggaagtgttgaaatttgcaaatgcatgtggagccatcacgacgaccaaaaagggagcaatccctgcactaccaaccgaggccgatgcccttgccttaatcaatggagcttagattttaagcaacttgaataatttgcacattgttttgccttccgtgattatcctttcatttcaaagagttctcaatttattccccttttgatatg

SEQ ID NO: 36082 - DNA, 65 bp, Gossypium hirsutum
  Clone ID: LIB3149-063-Q1-K1-H11
aagcaagagaaggaagacgataaagagctgaaagaagatgaacacaaagagaagaaagatgacag

SEQ ID NO: 36083 - DNA, 336 bp, Gossypium hirsutum
  Clone ID: LIB3149-063-Q1-K1-H12
ctcaatatcaaaaaggattgaggatttacgggacaatgagccgcaaccaccacctggaggagttgattgaagggttgagtcgaatgtgggaagtaatgtctgaatgtcataggcgtcagtttcaaatcatctcagttgcatacaagaatggcatcatgagaatctctgtgctgtcagaatcacatcggcatgtcaccgctcatctcgaacatgaactaagcttgctgtgttcgagttttacaaagtggattggtgccctgaaagcttatctgaaagccataaacagtgggctcagtaaatgtgttaccattggaaaatcttggaaaagatcaaaga

SEQ ID NO: 36084 - DNA, 423 bp, Gossypium hirsutum
  Clone ID: LIB3149-063-Q1-K1-H2
agccagtggaagcaccggctgagtcacccaagccatccaaatccaaatccaaatccaaacacaagatagccgatgcaccggaatccgatgcaccagcggagagtgatccagctgatgatcagacggcagacaatgacaatggggttgcaggactggacggtaggagattggtgatggggatgctgagcctgtgcattggggtattgctgatttgaatacactgatatagaaatatttatcagattgatacaaatggtatgggagacaatactttttaggccattggataacgagaaatggggtccttatttcatgtgagagatttgaaattttctttttcttttaatttctttggggggttgtgagcaaaagagcaataagtgatgagtcccacttgcatggggtcattttctttattctttt

SEQ ID NO: 36085 - DNA, 382 bp, Gossypium hirsutum
  Clone ID: LIB3149-063-Q1-K1-H4
ctttggaaagtcagcgacgggccgacatggcattacttgaggctaagaagatagcatcacagtaccaaaaggaagcagacaagtgcaattcaggtatggaaacatgtgaagaagcaagggagaaagccgaagcagcactggtagctcagaagaaattgacagcaatgtgggaaacacgagctcgtcaaaaagggtggagagaaggggttgccaaatctcatacagactcgtaaggtaacattcaagctgtccaaatgacccgtcattgcctcgtaaaagaatttcaaacaagaattccagagtcaatcctataggtagtcttaagtatagttacccttgttttctacggagccaaacatcgtcatccattaaaaagcccaaa

SEQ ID NO: 36086 - DNA, 421 bp, Gossypium hirsutum
  unsure (1)..(421): unsure at all n locations; Clone ID: LIB3149-063-Q1-K1-H5
cctagagctcttagaaggttgagaacttcttgcgagagggcgaaaagaactctttcgtccaccgcgcaaaccaccattgaaatagattcgttatacgaaggtatcgacttttactcaaccataacccgagccagatttgaggagctcaacatggatctattcagaaagtgtatggaaccagttgagaaatgcttaagggatgccaagatggacaagagcagtgtccatgatgtcgtcctcgttggtggttccactagaattcccaaagttcaacaactattgcaggatttcttcaatggtaaagagctttgcaaaagcatcaaccctgacgaagctgtcgcgtacggtgccgcagtccaagccgcaattttaagcggcgaaggcaatgaaaaggtacaagacctnctgcttttagatgtca

SEQ ID NO: 36087 - DNA, 248 bp, Gossypium hirsutum
  Clone ID: LIB3149-063-Q1-K1-H6
gccatttttgaagcatcaaggcgaaataaattttcatcctaaggcagtccaaattatgtatattaagtcatgatataattaattttaatttatatccaatttaatttggattacataaattattattaattaattatgaaaaaatggtctagttgagccgaaccgagtaaatcgaactggccaagaagtggacagcccaaaatcatccatatgttgacccaaatcagcttattagctgattatttagc

SEQ ID NO: 36088 - DNA, 407 bp, Gossypium hirsutum
  unsure (1)..(407): unsure at all n locations; Clone ID: LIB3149-063-Q1-K1-H7
ctcattaatgaagtggagaaaatgtttgatttcaagggagagcttcgccccagtggtaaatggtccgttgttttcactgatgatgagggtgatatgatgcttgttggcgatgatccatggatggatttttgcaagatggtgagaaagatcttcatatattcaagcgaagaggtgaagaagattagtccaagatgcaaatttgcagtgtcgtctttggagggtgaagggactgctgtaaccattgattcagagcataaatctgaaacatgaaataataaagtttgaagacccttcttatttacgttacatatatatattgntttatttntggtttccttggtagattatactctgattagaacagtgaatgaaatgctgcattgaagaaaaagtacacagttgatgca

SEQ ID NO: 36089 - DNA, 385 bp, Gossypium hirsutum
  Clone ID: LIB3149-063-Q1-K1-H8
aaagcaccaaaaaaagcaacaccctctccttcacgggttttcaacctcgccatggctacacgagactccgatgtccccatggtacccgtcggcgagtcttccaacagctccgccgcttcctcttccactaagaaacccaagcgtttcgagatcaaaaagtggagcgccgttgccctttgggcttgggatattgttgtggataattgtgcaatttgcaggaatcacatcatggatctctgtatcgaatgccaagcaaaccaagccagcgccaccagtgaggaatgcactgttgcttggggggtctgcaaccatgcatttcactttcactgtatcagtcgatggttgaagactcgtcaagtgtgtccattggataatagtgagtggg

SEQ ID NO: 36090 - DNA, 384 bp, Gossypium hirsutum
  Clone ID: LIB3149-063-Q1-K1-H9
cgggggattatggaaagaaatcaaagctcgtgttcaccatctatccttcgcctcaggtctgaactgcagttgaggagccttacaatagtggtctgtccactcattcccttcttgagcacacagatgtggccgagctcttggacaatgaagcaatttacgacatatgccggagatccctcgatatcgagaggccaacttacaccaatttgaaccggctgatttgtcaaaccatatcgtccttgacgacttctttaaagcttgatggagccattaatgtagacattacagagttccaaaccaatcttgtgccatattctcggatccatttcatgctctcttcttatgcgcctgctatctcaactgagaaagcataccatcgacaga

SEQ ID NO: 36091 - DNA, 412 bp, Gossypium hirsutum
  Clone ID: LIB3149-064-Q1-K1-A1
gtcgcttatcgcatctaagccctacaagtttttttgggttacctattatgaagttaaataaaaaataaatagatattaataaccccactagtataaattgatttacttgtataaagcccaatacttgcttttgtgttttttacttagttttttgcacttaaatctcttttgatggcagatgctattcgattattatcatcgccgtcgtcttctttaattcattcgctgcgtttctcttcgccttcactgctcaccactttccacttcgcttcgaattatccactatcgtctcttggaccaaccaatcagaattcggataagattttttcttattcttcttctattgggcttgctccgcttgctctgattcccagaaaaccatcgctctctttcaaggtgcatgcaacagtcg

SEQ ID NO: 36092 - DNA, 423 bp, Gossypium hirsutum
  Clone ID: LIB3149-064-Q1-K1-A11
gttatcagttgctttttcttagtgcacgtgcaatagcccaggcatatatcaccagacaatttttagtcaaccttaagcaggatggtaaggcattaccagatgggccaattgttatatcccctgatggactttttccatccctatatcgagaagttattagaagagctcctcatgagttcaagattgcttgcttagaggagattaaggcattgtttccatctgattgcaatccattctatgctggtttcgggaatagagacaccgatgaaatcagctacgttaaggttggaatcccgataggaaaaatcttcattattaacccaaagggtgaggttgccgtgaaccgtcgtgttgacacaaaatcttatacatctcttcacgctcttgttcatggcatgttcccaccgactacctcctccgagc

SEQ ID NO: 36093 - DNA, 433 bp, Gossypium hirsutum
  Clone ID: LIB3149-064-Q1-K1-A12
gtgatgtgaagtgggcatcgagatgggatgcatatcttttaatgagtgacgaccaaatacactggttttcaattgtcaattctctgatgattgttctcttcctttccggcatggtagcaatgattatgttaaggacactttaccgtgatatttctaagtacaatgaacttgagacccaggaagaagcccaagaagagacaggatggaagcttgtacatggggacgttttcaggcctccatctaattctgacctgctctgtgtctatgttggcaccggtattcaatttttgggcatggtactagttaccatgatctttgctgtttttggatttctttccccctccaaccgaggtggtctgatgacagctatgctcctgctttgggtcttcatgggcatttttgctggctatgcctcttcacgtctatacaaaat

SEQ ID NO: 36094 - DNA, 421 bp, Gossypium hirsutum
  Clone ID: LIB3149-064-Q1-K1-A2
gcgaccggtcgcttattgcatctcatccctacaagtttttttttgttacctattatgaacttaaatggaatgtaaatagatattaatgggcgcgactagtataaattgatttacttgtataaagcccaatacttgcttttgtgttttttacttagttttttgcacttaaatctcttttgatggcagatgctattcgattattatcatcgccgacgtcttctttaataaattcgctgcgtttctcttcgccttcactgctcaccactttccacttcgcttagaattatccactattgtctcttggaccaaccaatcagaatgcggaaaagatattttcttattcttcttctataggacttgctccccttgctctgattcccaaaaaaccatcgctttcttttaaggtgcttgcaacagttta

SEQ ID NO: 36095 - DNA, 261 bp, Gossypium hirsutum
  Clone ID: LIB3149-064-Q1-K1-A4
gcgtccgttaaataataaaaaacccattctcatacgttttgtttaatcaccaaatacattcttcatgggagtgataattaaaatcttggggagcataacaaccctatatatccacttttaaacttacctggtccgttcctacttctaaacgatcctattccaaccgactggcattataactacactcactgatggctgctcaatcttgaaaaatgtttactaaatcatatccatcgcctactagaacttgaagactagttt

SEQ ID NO: 36096 - DNA, 375 bp, Gossypium hirsutum
  unsure (1)..(375): unsure at all n locations; Clone ID: LIB3149-064-Q1-K1-A7
tcagattctatttggatgtgttgctcagtacacaattatgccaacttttgctatggttattagcaaaactttggggctttcaccatctctttctgttggtttgattttgctaggttgttgtcctggtggtgctgcatccactgtggtgacctttattgcacgaggagacgtttcgttatcgacggtaatgacggtttgcactactcttggtgcagtgatcctcacacctcttttgactgtgattctagcaggaacatatgttcctgttgatgctattggactntccatcagcaccctgcangtggttgtggctccggttttgctcggttcttacctacaaagcacattttctttggtgtgaaaatgattacacca

SEQ ID NO: 36097 - DNA, 394 bp, Gossypium hirsutum
  unsure (1)..(394): unsure at all n locations; Clone ID: LIB3149-064-Q1-K1-A8
ggcgtgtcaagcgtcgaagtttgtggcaaagaacggaactgcttactacaagcaattgttggagcagaataagcaatatattcaggagccaccaacagtggagaagtgcaatgagctgtctaagcagctgttttatactcgacttgccagtatccctggccgtaacgaggcattctggaaggagcttgattatgtcaagaatctgtggaagaataggcaagaactgaaggttgaagatgctggtattgctgcattgttaggactggaatgctttgcatggttttgtgctggtgagatagggggaaagggttntacttttactggttactatccctaaagaaaaacagctagtataaagcagggagtctgatggatgtgtatgccttttattatc

SEQ ID NO: 36098 - DNA, 164 bp, Gossypium hirsutum
  Clone ID: LIB3149-064-Q1-K1-A9
tatgactgcaaggatgcagatatttttcttttacctggctgccaacaccataactgtcgaggttcatagcattacctcgaacttacaattcttaactcttgatacactataaataagggatttgaccacaacaacaaaatatcatattgcctacaaaaaagatc

SEQ ID NO: 36099 - DNA, 416 bp, Gossypium hirsutum
  Clone ID: LIB3149-064-Q1-K1-B1
gattcccggtcaccacgcgtccgggagagagaggatgaagattttggagaaggtcagatgaagcaaccatgtctggaactacgagtgtagcaggaagtgatacttatgaggttgataggaaggctggtgagtttatagccaagttcagagagcagattaggcttcaaagaacaacatcaattgatacactaaaagggttcaacgtgaattttttagagtgagtatttgctggctgtaaatttctaatagaagagttatatcactcgtcactcttaggaagttgaggattcttcattctcgtagtcctagcgtggtgaccttaatatttgtcattctataatgtctttctttatatggttgaagaaatgatttattaggattattcttttttgtttgaacaagttcatgaaaaacca

SEQ ID NO: 36100 - DNA, 402 bp, Gossypium hirsutum
  Clone ID: LIB3149-064-Q1-K1-B10
gtactaagaggattggttgaatggctttgcacacagctgaagaagccttaccatcctagtcgtggtattccaactgctattaactgtcttgcagcattgctgaaggaacctgttgtcagatcctcctttgttcaagcagatggagtgaagttgttgattcctttaatttgtccagcatccacacagcaatctatccagcttctttacgaaacatgtctctgtgtgtggcttttatcttactatgaaccggtaatcgagtacttggcaacatctagggctctaccccgactggttgatgttgttaggagttccacgaaggagaaggtacatgtggtgctcagatggttgaccttggattgccacaaattattcagagtttgaaagcacaagcatggagtgatg

SEQ ID NO: 36101 - DNA, 194 bp, Gossypium hirsutum
  Clone ID: LIB3149-064-Q1-K1-B11
atagcactaataaccaactcatcgcttcggattatctggatccaaagaatcagtcaagatatgatatattggtcatatcattatagcaactgaattttttttgcattaagtaaaagacaaaaccaatctgattatgaatagatcgaaattgtgaagcaaaataaaaagtatgtggataaatagaaggatgagag

SEQ ID NO: 36102 - DNA, 324 bp, Gossypium hirsutum
  Clone ID: LIB3149-064-Q1-K1-B12
ggccgacccacgcgtacgtagtgctgacacacctgttaccgcttttgtttttacccacccacacaaccagtcgcgggcggatatttccgtggtgaggccgaagcacccatcctttgagcgagctcaccggaccgacattacgactgggtttatcaatccagaaatatgcaaactaactctcctctctatgctgactatcgctgtgtggaaagggattacaggcgagattcctaaatgcatgaccatcctactatttgttcgcatccttgatttgatcggttacaagctttttcgtataaattcctgctgatttcagcaagttga

SEQ ID NO: 36103 - DNA, 405 bp, Gossypium hirsutum
  Clone ID: LIB3149-064-Q1-K1-B2
cattctcattctctctccactgaactcttgctaaacggtatcgttttagtcagtctttcatcaatggcgaaagaaccagttcgcgtcctcgttactggagctgcaggacaaatcgggtatgctcttgtacccatgattgctaggggagtcatgttgggtgctgaccagcccgtgatccttcacatgcttgatatcccacctgctgcggaggctttgaatggtgtcaaaatggagttggtggatgctgcatttcctcttctaaagggtgttgttgctacaactgatgctgttgaggcatgcactggagtcaatgttgctgtcatggttggtggtttcccaaggaaggaaggaatggagaggaaagatgttatgtcaaagaatgtgtctatttacaagtctcaggct

SEQ ID NO: 36104 - DNA, 362 bp, Gossypium hirsutum
  Clone ID: LIB3149-064-Q1-K1-B3
acccttccggcaggacagggctgaaaaaaatgaaagaggcctaacaatggacctggaaggtacctttaggatccatccaaaaaggtagatttcaatcacttgatcagggtctggcacgtgaatatcggatttcccttgcctggatctccaaatcggtctctaatgatttcactgagggtgttcgggctaggttagtggacaaggattttgctcccaagtggtaccccgcaagcctggaagaggttagtaaagacatggttgagtactactttacgccactcggggaattagagcctgaactggtgctgccaacttcactaagagaaccttacatctaaggaagatatctttgtaggggaagc

SEQ ID NO: 36105 - DNA, 428 bp, Gossypium hirsutum
  Clone ID: LIB3149-064-Q1-K1-B4
gttttctctgtttgccatttgccttaatcatcttcctctttctttaaaacctcttcctatggaatttccgactaaacttgcgctgaattccatggctactgcagaggttgtatcagctcagactgcaatccatgaggagaaacctgaagaagtggtcaaggttggagaaattgcaacagaagaggtaccggctgttgctcctgcagcagaacctgttgctgaagaaccaaaggaagcagtgcctgaagcagcatccggagaaccccaggctccagaaactgaagccacagttgaaactgaatcaaaagaggtggttaaagagcccaaggctgtgactgaagagccagaagttgagaaaaaagaagaagagactcctaaggatacggtagcagagccagttgccgaggagtccaaggagtccaaggaga

SEQ ID NO: 36106 - DNA, 117 bp, Gossypium hirsutum
  Clone ID: LIB3149-064-Q1-K1-B6
agacaggagatgattttttggacttatgattattcctactgaacatgggccattttaatgattggaatgcctttttttttagtatatttttctgggcgaacggtggttttataaaaa

SEQ ID NO: 36107 - DNA, 317 bp, Gossypium hirsutum
  Clone ID: LIB3149-064-Q1-K1-B7
ggaaactataggagctctgctgaatgtgttatgtgtggtcttttgccaaagtctccctcagccacatccagcagaacagatggtggtcttgtatggatcagtgaatggaatgctctgcagcaccctgttgcctctgcatttttagctgctctttacagtgattacctgcctaccttacaaaactgaaaaaataacctgtggtgaccattcattcaaaccgtcggatcttagaaagtttgccaaatcacaggctgattatgtattgggcaaaacccctttgaaaatgagctttttgttggggtatgggggataagtac

SEQ ID NO: 36108 - DNA, 391 bp, Gossypium hirsutum
  unsure (1)..(391): unsure at all n locations; Clone ID: LIB3149-064-Q1-K1-B8
gggctgtccactcctttaggatcacttactgtggtgtccaggacactactcanatgcgcacccacatgtgctactccggcttcaatgacattatccactctatcatcgacatggatgccgatgtgatcaccatcgagaactcacgttccgatgagaaactcctgtctgtcttccgcgaaggggtgaagtatggagccggaataggccctggtgtttatgatatccactctccaagaataccatcgaccgaagagatcgccgataggatcaacaagatgcttgcggagctcgagaccaacatcttgtgggataaccctgactgtggactcaagacttgcaagtgtgcagaggtgaaaccgggactcaacaacatggttgctgccgctaagtt

SEQ ID NO: 36109 - DNA, 362 bp, Gossypium hirsutum
  Clone ID: LIB3149-064-Q1-K1-B9
atgcttgctacaaggctttgaatgatttctttgtcatgctagaaggtactcttttgaagcctaacatggagacccctggttgcgactccccaaaggttgccccagaggttattgctgagtacactgtccgtgccttgcagcgtaccgtccctgctgcagtccctgctattgtgttcttgtctggtgggcaaagctaggaggaggctactcttaaccttgatgccatgaacaagctccagaccaagaaaccatggtcactctcattctcatttggacgtgccctttatcagagcactctcaaggcctgtgctggaaaggatgaaaactgtgaagaaagcacaagatgctttccttgataagtg

SEQ ID NO: 36110 - DNA, 429 bp, Gossypium hirsutum
  Clone ID: LIB3149-064-Q1-K1-C1
gccgtcgggaagaacaagaggatttccaagtgaaagaagggaggaaagaagaaggcagcggatccttttgctaagaaggattggtacgatatcaaggctccttcagttttcactaccagaaatgtggggaaaactctcgtctcccgtactcagggtaccaagattgcttctgaaggactcaaacaccgtgtgtttgaggttttccttgctgatcttcaaggtggtgatgaggatcatgcttacagaaagattcgtttgagagctgaagatgttcaaggaaaaaatgttttgaccaacttttggggaatgaattttacaactgacaggctgaggtctttggtccgtaaatggcaaaccctgattgaagctcatgttgatgtgaagacaactgacaattacactttgagaatgttctgcattggattcact

SEQ ID NO: 36111 - DNA, 376 bp, Gossypium hirsutum
  Clone ID: LIB3149-064-Q1-K1-C12
gatttccctcattctcctccgaaaggctactttctgaccaagatttttcatccaaatattgcacccaatggtgaaatttgtgtaaacacactaaaaaaggattggaatccaagtcttggattacgacatgtactcattatagttaggtgtttattgattgagccatatccagaatctgcactaaatgaacaggctggcaagatgctgcttgaaaattatgacgagtatgcccggcatgccaggctttatactggaatccatgcgaaaccaaaaccgaagttcaaatcaggagctatttgcgagtcaactacagcattaaacgtggagcagcataacacctcggttctgaatatcgagcagaaaaatgcagcaagtg

SEQ ID NO: 36112 - DNA, 441 bp, Gossypium hirsutum
  Clone ID: LIB3149-064-Q1-K1-C2
ggccgaccacgcgtccggccgtctttaagaacaataggatttccattttttataagggaggaaagaagaaggcagcggatggttttgctaagaaggatgggtgcgatatcaaggctccttcagttttcactaccagaaatgtggggaaaactctcgtctcccgtactcagggtaccaagattgcttctgaaggactcaaacaccgtgtgtttgaggttttccttgctgatcttcaaggtggtgatgaggatcatgcttacataaagatttcgttgagagctgaatatgttcattgaaaaaatgtttagaccaactatttggggaatgatttttactattgacatgctttatgtttttggtccttaaaaggcaaaaccttgttgaaacttcatgtttatgtgataactactgacaattacaccttatatattgttcttcatt

SEQ ID NO: 36113 - DNA, 429 bp, Gossypium hirsutum
  Clone ID: LIB3149-064-Q1-K1-C3
cccacgcgtccgcagaaatgcctcagaaatgctcactacttgaaagaccgactgcacgaggctgggatcagtgctatgctaaatgaactcagcagtacggttgtgtttgagcggccccgggatgaggagtttgttcgtaggtggcaacttgcttgtgaagggaatatagcacatgtggtggtgatgcctaatgtgacaatcgaaaaactggatttcttcttgaatgaattagttgaaaaacggtcgacttggtatcaagggaatgttcaacctccttgtattgcagcagagatagggaaagcgaattgcgtttgtgctctgcacaagtgaaaaaaaatatcagtctatgattcgggaattcctctattttcatgcaacttgtcatttgggtttaatgaaatatagattatattcataagtttttcgttt

SEQ ID NO: 36114 - DNA, 382 bp, Gossypium hirsutum
  Clone ID: LIB3149-064-Q1-K1-C5
gcgtccggacgggctaggagccatggagttggccatgtgttcttgggcagactgggtagcatcgaaagtcgttcctcaaaagaaacgtgtcttttttgttacaatgtcaccaacacatttctggagtcaagagtgggaaccaggaagtgaaggaaattgctataaccaaatgaggcccatcactttggagggctactggggaagtggttcggacttgcctactatgcgcatggtggataaagtgctttctggtttgggttcgaaggtatctgtcatcaacattactcagctcttagaatattgaaaagatggtcacccttttatctataaaaaattttggagacacttgacccccagcaattggctaaccctgcaagctact

SEQ ID NO: 36115 - DNA, 108 bp, Gossypium hirsutum
  Clone ID: LIB3149-064-Q1-K1-C6
cggggcggaccacacgcgtccgttgggtttggtggttttcaagaacttgctttatttagtttttatgattaactaccattaaataagatactctttttcatcatcttg

SEQ ID NO: 36116 - DNA, 417 bp, Gossypium hirsutum
  unsure (1)..(417): unsure at all n locations; Clone ID: LIB3149-064-Q1-K1-C7
accgaaggatactatgcgcttgggtaaatgaatccgatagtatggaagatgatctaaagaaaggatggtctggacttcagtcgattccgaggcagatttggcttgacctaaatggcaagcaactagtgcagtggccagttgaagaactcaatagtctacgtggcaatgaagtctatgtttatgacaagcagctcgaaagcgggtcggtttttgaagtttcgggcatcactgcttcgcaggccgatatcgaaataatgtttgaattgcccaaactagaagaggccgagttcatagacaccagtttggttgatccccaactaatctgtgacaaacaagatgcatctgtgaccggaaaattcggaccattcggtttattagctttggcaacanaagacttgactgaacaaactgcgattt

SEQ ID NO: 36117 - DNA, 416 bp, Gossypium hirsutum
  Clone ID: LIB3149-064-Q1-K1-C8
catttcccctaaattccgtcttttttcttcaaattccccacaaatggccgtcactttctcagatctccacaccgaatctggccttaaatcccttaacgacttcctcaccggcaaatcttacatctctggggataagctgactaaggatgacataaaagtttatgctgctgttttgaaaaatcctggtgattcatttcccaatgtgagccaatggtataactgtgtgtcttcccatctcgctgctagcttccctgggaaagctgttggcgtttcacttgctggcaaagctgatccagctcaatctgctgaagctaagtctcctgctgcggatgacgacgatgatgacttggatctgtttggtgatgaaacggaggaggataagaaggcagcagaggaaagagaagcactaaaaagtc

SEQ ID NO: 36118 - DNA, 427 bp, Gossypium hirsutum
  unsure (1)..(427): unsure at all n locations; Clone ID: LIB3149-064-Q1-K1-D10
ctttttgactcagcgattagatgcctacctggaatttcaggctgcaaattctaccttaatgaaaagctatggtcttgttcacgaagattgtataacaaagatgaggttgatgtcattggttgatcttggctctaatgaatctggacaaattccatatgccctcatcaaggatgctcttaggatcaatgatgatgaggtggaattgtggattgttaaggctataactgctaagttaatcgactgtaaaatggatcagatgaaccaggttgtgattgtaagccgctgtactgagcgcatttttggacagcatcagtggcattctcttcggttgaaactagcaacatggaggggtaatgttgctagcctcatcagcaccatccaagctaacaaggttgtggaagaaagctcacaagctatgcangggatg

SEQ ID NO: 36119 - DNA, 268 bp, Gossypium hirsutum
  Clone ID: LIB3149-064-Q1-K1-D11
tggaaaggttcttgacctcagtgtggatttgagtgctgctagtgctgcggaagaataattaccctgaagcatggtatttgccaatgtttgtgcttgtttaagcttcttaacagtgttgaatgttgctggtgggatttatgtctattacaccatgtttttttttactactcaagacactatatttaatgatttgatgatatttaaacgtttgttggagctctgtgtttttagatgaaatacatgaaaacgtctctgctaagcctatttt

SEQ ID NO: 36120 - DNA, 391 bp, Gossypium hirsutum
  Clone ID: LIB3149-064-Q1-K1-D12
ataggaacccttttttcggtctgccttttttttgctttcaaaactggataaattctcgttgctaagcgtatctcgcttgatattttagagggcgaactggcgaaacataagtcttacgccgaatatctgcttcaacagctatttcgtgcgaagaatatacatttaagggagggggaaacttttaagggagtagtagaaaatcatttggtttttgaagagcccttaaaagagcaaattgatgggctctatcaaatctgttgtgatctcattctaaatggggccaacagtagctactttctaaaaattgtggaattttatggatccacgcttggtatgtagccaagcccaagataaaaggaacgaggggaagaatcgacacggaatccataac

SEQ ID NO: 36121 - DNA, 437 bp, Gossypium hirsutum
  Clone ID: LIB3149-064-Q1-K1-D2
gtccggtgaaattggccagaaatctttgggcatgttgattggagtcatggcaataccttaacagagggtgggggaatccactaaagatggcatgaactggaaaaatgatggtaactggcaacgaaacgatagcgagaagaatggatattatcaggagtttaaacaggagaataagggatggaattctacttctggtggacaaacctcctctggtgtaaattataattcttataactcaaattcttgggatgattgggacacaaaagacaataggaaggaacatactacaaaagtgactgcttctcatagcaatgatggttgggctggttgggatgaccccaaggatgatggatatgatagtttctataatggtgcatctgataaaaatgccgttggtcgtaatggaaaatcagatgccgcatggactggtggaggct

SEQ ID NO: 36122 - DNA, 186 bp, Gossypium hirsutum
  Clone ID: LIB3149-064-Q1-K1-D3
acccttccggcaagagggcgagcggtagatttaaaggttccttcctcatgtatgcgtgcttgtaactttttagttttgttatatagttacataaatcaggtcgactggccgcagcttaacaactgggaaactggtgaaaccctgcagttaactagcttagtagcctttcaccatttccccatttgg

SEQ ID NO: 36123 - DNA, 417 bp, Gossypium hirsutum
  unsure (1)..(417): unsure at all n locations; Clone ID: LIB3149-064-Q1-K1-D6
cggaattgagttcaacctgtggtaacctgatgttttttcattncactaggattcccaagctgggggcgtttgtgaagttctgcgcgaaaataaggtacacgagcttactgaagtttgtgagacactcgaagaagaaagtgctgtaaagagtgcacaaataggacagatgaaggaaagggttgagttcttggaaagtgaaattggagggttgaaggtctcaatgtctgcctatgttccggtcatagtttaactgaaagatagtttaatatcccttgagcaaacttgccctttttcagcctaagctttgtgttccaaatggtgaccaatataaagatgtggaaatggttgatgaactttatgtggtgaggctcggagaaactcgaagaaggaacaccaggtatgtcgacgcttttatga

SEQ ID NO: 36124 - DNA, 291 bp, Gossypium hirsutum
  unsure (1)..(291): unsure at all n locations; Clone ID: LIB3149-064-Q1-K1-D8
cggaanacccggggcgccccaagcatccggagaatggctcagcacgcggctgtgaaaattgtgcctcacaaggcgtggcttacgagctgatgtgctctgtcgggtggcatagcaaagggtccctgaacacagatcctcctgatgatacacagattggaaagaactcaaaatccgctcctgaaggtccgccttccacacaagattatattcatctatcgtacaatgcatgtgcgaaggaggaggctgtctattgctataagcctaaagataaatgcttcacgacatataaaa

SEQ ID NO: 36125 - DNA, 424 bp, Gossypium hirsutum
  Clone ID: LIB3149-064-Q1-K1-D9
agactttgagcaaagcagcctcatttcatttctccaatatggctagagggttgaagaaacatttgaagaggctcaatgcccccaggcattggatgcttgacaagcttggtggtgcttttgcacccaagccatcgtctggtccccacaagtccagggaatgcttgccattgatccttattttgcgaaaccgattgaagtatgctctcacctatagagaagtcattgctattcttatgcagaggcatgttatggttgatgggaaggttaggacggataagacctatccagctggtttcatggatgttgtgtccattcctaaaacaaatgaggactttcgtctactttacgacaccaaaggccgatttcgtctccatgccatcactggcgatgaaaccaagttcaagctctgcaaggttcgatctgt

SEQ ID NO: 36126 - DNA, 357 bp, Gossypium hirsutum
  unsure (1)..(357): unsure at all n locations; Clone ID: LIB3149-064-Q1-K1-E10
gttttatatcttgaagcaaaggaaaaaaaataaagaactgtgaaactttgtcagttgtgaattttgagcttgggaaatgcttgaagaaaaggaaattgtgtaccatatgttgtgaatgtgtcgtagttagctagattaagattctttgttaaataattagtgagagagagagggagagagcattttgttattgattgttttcattgatcaaggttggtaataatgcttatagacttggtaacttttttatcanaaaaaaaaaaaaaaaaaataaaaaaatataataaaaaaaatatttatttaaataataaaaaaaatttaataaatattaaagggggggcccgttctaaaggatcc

SEQ ID NO: 36127 - DNA, 430 bp, Gossypium hirsutum
  Clone ID: LIB3149-064-Q1-K1-E11
taggaaaggaccaaaagggtttaatctgctgtgcacgttgtagatcaccacccaaactgtaacaatggccgtcggtaagaacaagaggatttccaagggaaagaagggaggaaagaagaaagcagctgatccatttgcgaagaaggattggtatgatatcaaggctccatcagtttttacgagcagaaatgttgggaagactcttgttacccgtactcagggtaccaagattgcttcagaaggactcaaacacagagtgtttgaggtttcactgggtgatcttcaaggaggtgatgaggatcatgcttacagaaagattcgtttgagagctgaagatgttcaaggaaaaaatgttttgaccaacttctggggaatgaattttacgactgacaagctgaagtctttggttcgtaaatggcaaactctgatc

SEQ ID NO: 36128 - DNA, 434 bp, Gossypium hirsutum
  unsure (1)..(434): unsure at all n locations; Clone ID: LIB3149-064-Q1-K1-E12
aatcaaactgctacaaaataattctccaccatgagctctccgggaagtggaatgtttagtggatttacaaagttatgtaagggattggctgtgatattaatcggtggccacgttgtggttcagcttcttcctacttctgttacttaccttgctcttattcccgccaggactattccttttggttggaacctcataactgctggttacattgaacaatcagtgcatggggtggttgttagcacccttggtcttcttttcatggggaagttgcttgagcctatatggggttctaaggagttcttgaagttcatcttcatagttaactttctgacgtctgtttgtgttttcattactgctattgctttatactacctaacaatgcaggaaaagtacctttacatgcctctttccggctttcatggngtgctggcggg

SEQ ID NO: 36129 - DNA, 401 bp, Gossypium hirsutum
  Clone ID: LIB3149-064-Q1-K1-E2
gagatcccggtttgttttcccctgctttcagctgtttttagtaagttacctgttcctttgattttgtctgcaggagcaccgacaggcacgggagagagatactgttccaccctctgtgccgaaagctggtcatccgaagcgtttcggcaatgttgacatagagaaatcaagatggagataagttattgtttgttaaaaggcattacgattgatggttcctgaggtcagcttatgttgtagaataagttttatatgaaaagatcttacacacctgcgatgtgcatacgcatatacatatatataatctttcttacattgttgttgacacactgcagcgttttagaattcaaggagccttgtaaatatgtagttgccatttttaatatttgatattatagatt

SEQ ID NO: 36130 - DNA, 132 bp, Gossypium hirsutum
  Clone ID: LIB3149-064-Q1-K1-E3
aaaaaaaaaaggggaaaggaaattcaaggttttttttttttcaatggacccctccattttgctctcatttcctttcttcccaaccaacaaagtttaaggaaaatgccaccggatacaggcaaacccatgaaa

SEQ ID NO: 36131 - DNA, 358 bp, Gossypium hirsutum
  Clone ID: LIB3149-064-Q1-K1-E4
agccttccgaaaggtttccgttccacatgttccctggtcttttgggcgcccggggccgtaattaatccaatgagtttttcaacaaaaaactgggtcggccccgtacaatatggttcaaggatgggctgagacttacatatttctggatcacaggaacacttggacaaataaatggctcaaggcattgatctatctgatgatggatcatctaaggtggccggaacccaagcaccgagtcagcactgggtcactatgtgctgctgacagctaagaatgaagatcacttgctattgaaccgagtcttattatgatatagctatgctaatggcatcgaatccaaaaagtgtcaacccatatc

SEQ ID NO: 36132 - DNA, 425 bp, Gossypium hirsutum
  Clone ID: LIB3149-064-Q1-K1-E5
aattcatcataacgtaaaagggtttttcgattcacaatgggagaggtcagttaaccaccaatttattctcatttcccccatctcttttaatctcgtttaattttttttttgccgttccatttccttctatttctagttcatgacttacaccagggatttaaattgcggtcgcggtcgcgttttcggtcgcgtcgcgtttgtcgcggtcgcggacataacggactcctattgcggtcactgcggtatcgcggtcgtgaattttacattacttattgtgtattgcgggtatagcgggtttcggcagtaacggtttcggacggtgccgttaccgctatataacggccgctatttcggtaacggaccgctatttaaatccctgacttacacaccatctctttatctgggatctttattgcagaaaaaga

SEQ ID NO: 36133 - DNA, 442 bp, Gossypium hirsutum
  unsure (1)..(442): unsure at all n locations; Clone ID: LIB3149-064-Q1-K1-E6
cggttatttcttcgtcgcagtcacacagnttcataaagagcattttgtcaaaagaaaaaatcccgatggttttcccgagaaaatctttgccgggcaaagaaaaaaaaaggaaaaatggagttatgccctacaattaagaacatccttcttttggattccgaagggaaacgtatagctgttaagtattactcagatgactggccaacgaatgctgctaaggaagcttttgagaaagctgtgtttaccaaaacccagaagactaatgctcgaactgaagctgagataacaatgtttgacaactatattgttgtatacaagttcgttcaagaccttcactttttcgttactggaggtgaaaatgaaaacgagatcatcttggccacagtgctccagggattttttgatgctgttggactcctccttagaggcactgaggacaaaa

SEQ ID NO: 36134 - DNA, 431 bp, Gossypium hirsutum
  Clone ID: LIB3149-064-Q1-K1-E8
cacacacatgacagaaaaaaaaccctaacttttcaagtttcaaactcctaattgaaaattgcaaatctctcaaaaccttcaaaatcttcaaaatctcccaaaaccttcaaaagtatcatagctggaggctagagctacagctggccgctgcccgctggtgttgccgtcgaagcacgggagcagaatgtccaccgaaccaacatctattgagggtagtggtacacatcctacttcgatagattctgaacattcgggagttggagcttcaagccaagcaaaggtgactactaggaaaagaaaagccattccttaaagatttaatgcaaatggagatcttgtggagagaagaaatggatacaaatggaaaatattaaagacttaaatttcaattatgtgttaatttcaagacttatgtaatgtttttaattatg

SEQ ID NO: 36135 - DNA, 281 bp, Gossypium hirsutum
  Clone ID: LIB3149-064-Q1-K1-E9
cgacaacaagctaaccgttaaattataaggctttgtttgtattgctaggagccggacatcttgtatgcggtgcagataatttccatcatcttgctcaaatctatattttaatttcaagtttacccctgtattactaaaacctcaaatccacatcccaacacatattgcaagcttatttctctttgctcaaaacgggaacaagaatgacttaaccaaacatcccaacaagatgccacatggtgaataaaaacaatcttaagttcaacctgcttggtacttta

SEQ ID NO: 36136 - DNA, 432 bp, Gossypium hirsutum
  unsure (1)..(432): unsure at all n locations; Clone ID: LIB3149-064-Q1-K1-F11
ctttcttctcttctttcaactcaaagaaaactcccaagtaatattagaatcatgggtgttgtcacttataactatgagtctacctctccagtcgcccctgccaggcttttcaaagctttttctcttgaagctgacaaggtttggcccaaggctgctcctcaggcagtcaagagcgttgaggttgaagctaatcctggccctggaagtatcgtaaagatcaactttgctgaaggccttccattccaatatatgaagcaccagattggaggacatgacgacaagaatttgtcatacagttatagtttgatcgaaggtggacctttgggggacaagcttgagaaaatcagctatgacaacaagtttgaggcagctgcaggtggaggaagcctttgcaagagctcgatgaaattttacacntgtggcgactatgtg

SEQ ID NO: 36137 - DNA, 357 bp, Gossypium hirsutum
  unsure (1)..(357): unsure at all n locations; Clone ID: LIB3149-064-Q1-K1-F2
gtgaggaagtacctaattccaaggtggggtctcttgttcgggtgggtttggtggaccctatggtggtggtggttcaacccggcaccactggtctggaccaatcacagaccttttttttccaggtgctcaatattcccaccaagattaacaaaggtactgttgaaattatcactcccgttgagcttataaagaagggtgacagggttggttcttctgaggctgcacttcttgccaagctcggaattaggccattctcatacggtncttgttgtctggtctggttatgacaatgngtcagtctttagccctgaggtgcttgaccctactgaggatgacctgattgagaaattcgctact

SEQ ID NO: 36138 - DNA, 226 bp, Gossypium hirsutum
  Clone ID: LIB3149-064-Q1-K1-F3
ccacgcgtccgcggacgcgtgggttagttttagccatggcatgtggaacatagattggtacagtctgtgttaagcacatgggtcctcttgtaaccaagatgaatattaaagtcattcggagtccatggtcagattctaacatctttgcacagtggggaccccatattcccacctcgcattgtcctaaccccgaaacctctactgggggtgaatgctcgaagaatcc

SEQ ID NO: 36139 - DNA, 392 bp, Gossypium hirsutum
  unsure (1)..(392): unsure at all n locations; Clone ID: LIB3149-064-Q1-K1-F4
gggatgaaaaactcaaattttctgaggacgtttatatgcataaagagctgataccatcaaatgacagtcttacttttggagagtattcagagatgctccttgacaaatattaccacaggaaaacataaagaactgtaaatattttcctcttttaccaactttaatctttattttatcctataacgctataggtacactctaaaatacaataatcaataatattgctttgtaaacttcatgttattttcnaaaaaaaaaaannataantaataaaatattaaataaaataaaaatttaaaaaaaattttnttaaataaaaattattatttttatttattaaatttttttaaaaattattaaaaattttaatttataaattattttttaataat

SEQ ID NO: 36140 - DNA, 451 bp, Gossypium hirsutum
  Clone ID: LIB3149-064-Q1-K1-F6
gccgcccaacccgtccgttgagctaaagagaaacgtggttgaagcttcattagttggtaacacaaatgttgaaagttctgacagcacagcaatctcagttcaagatgatgctttcgaaaaggagatgatggggctaaccggggggttccccggtggtgaaaagggattgaaaaagttcattgaggaaaacccaccaccggcgaagcaatcagtttccgattcggtaagtattgctaggcttgggaagccaaaatcaccggagttgccactgttaatgccgggaatgatcgcgattgttaagaacccgaacaaccccttctacatgtactgcggcattgtgcagcggatcactgatgggaaagcaggggttcttttcgaaggtggaaactgggatagattgatcacgtttcgactggacgagcttgaacgcagagaaaaaagcccttcaatg

SEQ ID NO: 36141 - DNA, 253 bp, Gossypium hirsutum
  Clone ID: LIB3149-064-Q1-K1-F8
aaaaaaaatacatttctttttcatttttcttttgcgggccgggcctttctaatttgcgtgggctcttttcagatgggtcatctacaataaattgagtcattatcaaaatatatgatgccatgattaaaaacaccatgactgtaaaaaccaatgcgtaacccaattttaatttacttgcaacacattcccctttctccatctggcgtaatatctataaggcccttacctatctcccttaccaacagttttgcat

SEQ ID NO: 36142 - DNA, 372 bp, Gossypium hirsutum
  Clone ID: LIB3149-064-Q1-K1-F9
cgattgtgcttcttaaatatttattgagtttgtatatcacccacatatatgctatcttaaatttttaatagaaaaaaaaaaaaaaaaaaaaaaaaaaaaaaaaaaaaaaaaaaaaaaaaaaaaaaaaaaaaaaaaaaaaaaaaaaaaaaaaaaaaaaaaaaaaaaaaaaaaaaaaaaaaaaaaaaaaaaaaaaaaaaaaaaagggggggggccgttaaaagggaccaaattaaaagacccggggggggaaaaaaaaaattttttttttgggtgaccaaaaataaaatcccggggcggggattaaaaaagggggaggggggaaaaaccgggggtaaccaaaataaaaacatttggaaaaaaaaccccttttgg

SEQ ID NO: 36143 - DNA, 425 bp, Gossypium hirsutum
  Clone ID: LIB3149-064-Q1-K1-G10
gttgctgggcattttcaacgattgcatttgttgaaggcataaataaaatcgccaccggcgaactaatctctttgtcagagcaagagctagtagattgtgaccgatcctacgacgctggttgcgatggaggcctaatggattatgccttccaattcattattgacaacggtggcattgactctgaacaagactatccttaccttggtgctgataataaccaatgcgatccaacgaggaagaatgctaaggttgtcagcattgatgggtacgaggatgttgttcaatatgatgagaaagcattgaagaaggctgtatcacatcaacctgtgagtgtcgccattgaagctagtggcagagctttccaactctacgaatcgggagttttcagcggtgaatgcgggtcagcattagaccacggcgtgatt

SEQ ID NO: 36144 - DNA, 433 bp, Gossypium hirsutum
  Clone ID: LIB3149-064-Q1-K1-G11
acaagtttggtggtcgatttcaagaaccgtcaagaatgccttctagaattaggccctctacaagcccagagtccttatgattcaagggggatgggatggatgagtgtttgtatctactaatgtatcacgtaaaattactgcagaagaaacaagtgcaaaattgatccaagggagattgttatttatggtccggaaaagggaatgttcaagattagctagctgatctctcatccaaaacctggagcggagtgcagagcaaagaatgttggatatatgaagtttttgaaggtattgtcagcttcttgtttattcagagtattactatgattgtaaaaattcaatcaacggatagcttagatttctttcttttgtcgctttgaaattgttctttcttatacgagctccttactacccgatgaaatgtcttttttgc

SEQ ID NO: 36145 - DNA, 436 bp, Gossypium hirsutum
  Clone ID: LIB3149-064-Q1-K1-G12
gcttcggaaatggagaagtactttgggaatgcgtatagaggtgacccgggggtgccccatgcgggcccggaccggttcgtgaatatatggatagggtcggctgctttctctgtactcacttggttcaacccttacatgtggcagctcacaaatcaattcaattggcatgacaaagcaatgatatttgaacattaccattggaagaaggcaaaggctaagaaccaaccatacaaatttaagtggaatgagtacatggacaaggatcacagggactcgtattatttcaactggcctgtctacttcccatagtgtttctttcatgtaggcatgctctttgataagtagttcagacaaagaagactttacctgcctaaaaaattatgttatctttattgctttgtcccttcttcccgactcattatgcttgtttaactct

SEQ ID NO: 36146 - DNA, 66 bp, Gossypium hirsutum
  Clone ID: LIB3149-064-Q1-K1-G2
cgggggaaaaaaattattttaatacttttttttcccctttctttttcccccccccaacacaacaac

SEQ ID NO: 36147 - DNA, 291 bp, Gossypium hirsutum
  unsure (1)..(291): unsure at all n locations; Clone ID: LIB3149-064-Q1-K1-G4
aaaacccgggccgacccacgccttcggccctttttttttttttttttttttttgtttttttcctttnnnnnnncctgggccggcaaaggaggataccacctggttagtaaatcttcttttggtaaacaaatttaaaaaatagagattgttttcggtcactgctccaaccaaaattaaatcatagtttcaccaagggtcgtatataaattttggaatctcatcatatacttgagaaaattggaaaaagaaaaaaagaaaagaattttgttttaacgggtcatattttttcac

SEQ ID NO: 36148 - DNA, 376 bp, Gossypium hirsutum
  Clone ID: LIB3149-064-Q1-K1-G5
gggggggttctcagagtccttatgattcaagggggatgggatggatgagtgtttgtatctactaatgtatcacgtataattactgcagaagaaacaagtgcaaaattgatccaagggagattgttatttatggtccggaaaagggaatgttcaagattagctagctgatctctcatccaaaacctggagcggagtgcagagcaaagaatgttggatatatgaagtttttgaaggtattgtcagcttcttgtttattcagagtattactatgattgtaaaaattcaatcaacggatagcttagatttctttcttttgtcgctttgaaattgttctttcttatacgagctccttactacccgatgaaatgtctttttt

SEQ ID NO: 36149 - DNA, 457 bp, Gossypium hirsutum
  unsure (1)..(457): unsure at all n locations; Clone ID: LIB3149-064-Q1-K1-G6
ccggnctggaanggccgggccgagccttccgaacgatttaacaataccttattatggccaatcattttatctaaaccaccttaccttccagccatggccaatttttaggaaaaattgggatttttcaaggccaaaatcctttttaaaaaaaaatcaaaacccctttttacattactgggaggttaaaacactgaagttttaccttagaaatcttaaaggtttcttaatttctccaggatggggtttctcttccaacacaagctcaagaattatatgagtggcgtaaaaaagaaatcttaaacattacttaactcctcgaagattgggtttctcttttcacacaagctcaagaattctatgggtggcataaaaaaatcagggttgctttaaactccacccactttgggtttttaccctagaattgcattcttctttttttatcgggcaccattttgag

SEQ ID NO: 36150 - DNA, 417 bp, Gossypium hirsutum
  Clone ID: LIB3149-064-Q1-K1-G7
ggaaggtcctgattttatcccatctcgtgttagtacatatctcttgtgtgagtgcgggtatgctatcatcaactctccaccttgtccttcgtttgcgcggcgggatgcaaatcttcgttaagacgcttaccggaaagacgatcactctcgaggtcgagagctctgacacgatcgacaacgtgaaagccaaaatccaagacaaggaaggcatcccgccagaccagcaacgtctcatcttcgccggaaagcaactcgaggacgggcggactttagccgattacaatatccagaaggaatcgactcttcatctggttctacgtcttcgaggtgggatgcagatcttcgtcaagactttgaccggtaagaccattactttagaagtggagagctcggatacgattgataacgtgaaagcga

SEQ ID NO: 36151 - DNA, 323 bp, Gossypium hirsutum
  unsure (1)..(323): unsure at all n locations; Clone ID: LIB3149-064-Q1-K1-G8
agggaactgcttacactcagtcagcttccatatcgaagaaaaagaagtagatggggcagtgcttgcaggctaattgcaaactcatttcttggcattttggaaagttttaagtgagggcacaaatagtttgagaattaggcccagggaaaatggcatacctttgctattgtagcatgtgaaagaattaaaaaaaaaaaaaaccttcagatttaattttcacgaggattccgaaattgagcctttttgaagcaaaactaacttgtgtattagaagtggtaggaacctgnggaattttgctaatggtcaatttctggttttggtcc

SEQ ID NO: 36152 - DNA, 432 bp, Gossypium hirsutum
  Clone ID: LIB3149-064-Q1-K1-G9
tgttaagcagatctggagctatatcaaatcccagaaccttcagaatcctgctaacaagaaggagatcttttgtgatgagaagcttaagaccatttttgatggaaaagaaaaagttggtttcctagagatcgggaaaatgctatcccgccattttgtgaagtccagctgacctctattttcatgtttaaccactggttgccctaccaacatcaagctagctcttgttattctgaactgaactttttttatgtatgttcatgttttgcctttcattttgcgagctaaactctcttgtagccttgcaactgaggaaatgttcccagctggacttgtgtaaaaattctgtagggactagggagtgaaaaagtaacattttcatttggtttcctgattttcatttgtactggtttatggaaactggatctttgatca

SEQ ID NO: 36153 - DNA, 430 bp, Gossypium hirsutum
  Clone ID: LIB3149-064-Q1-K1-H10
ctttactacatatttgccagcgtgtggggtcataggatctacaccatatacagcatcctgtttattgtctttatcattctcttgattgtcactgcttttatcactgtggctttgacttattttcaacttgctgctgaagaccatgagtggtggtggaggtccttcctttgtggtgggtctaccgggctgttcatatacacctactgtttgtattattacaatgcacggtcagacatgtcaggcttcatgcaaacttcgttcttctttgggtacatggcctgcatttgctatggcttcttcctcatgcttggggctattggcttccgtgcatctctgctctttgttcgacacatttaccgttcaatcaagtgtgagtaggaagttggatggtctttcctgttcacaagaagtaagcatacttttgcttatc

SEQ ID NO: 36154 - DNA, 209 bp, Gossypium hirsutum
  Clone ID: LIB3149-064-Q1-K1-H11
catatttttttttacatattttctcttcgcatttttttataagaccgacaccaaatacatcgggctgtttattttctttatcatgctggggacatacacttcttttatcactgtctctttgacttattttcaactttcttctgataaccatgattggattgtgatgtcctttctatgtttattctctactcgtctgttcatattcacct

SEQ ID NO: 36155 - DNA, 398 bp, Gossypium hirsutum
  Clone ID: LIB3149-064-Q1-K1-H12
tcgtccacgcgttgcgttgggggacatgggtagtctgaatggaacactgttgaattcttgtccaattcatcatcctgatcctggaagtaggctatggggtgacccagtggaacttgcaagtggagacacaataacagttggcacaacctcaaacatttatgtccatatttcatcccacaatgagcgtctggtcccttttggagttggtatgacttcagaccctatgtcattgcgtcgaggaggaaagaagcttccaatggaagatgtttgctattatcattggcctcttcctggcattaatcagtttggagtttttggtatctgtgatggccagccaccgcagtggtgaaacggaggatacttttattgctgatctttcagtcggtttggccacgggc

SEQ ID NO: 36156 - DNA, 335 bp, Gossypium hirsutum
  Clone ID: LIB3149-064-Q1-K1-H3
cgaagagcacactcaccatatgaacattacctttggtgaagccaaaagggtggcttccaaatataaaagggaggcagaaaagtgtattgcagccatagaaacctgcgagggagccagagaacgggctgaggcgttgctaataaggagaggaaagtaccacgatatggaacaaaagctcgacaaatgggtggaagggaaaacttctaacagtcaatgatatatagtctagattgaattatgaaaggagctagtgctgcctgacaggtgtaggcaaggccattattgtactaaatctgcagtgaacatttacttatttcaacatgctgatatctatt

SEQ ID NO: 36157 - DNA, 268 bp, Gossypium hirsutum
  unsure (1)..(268): unsure at all n locations; Clone ID: LIB3149-064-Q1-K1-H4
ccggaacggaanggccggaccgacccatgcgaacaaggccagtcgaaaagatttcaaggtttggttaacaagtaatggcctgatgaataggaaaaatattagtctatatagtataattgctagacttggcaattactgtattcgtactgcatttgggtattttctcttgttataatcatgtgctatttacttatttgatatcgtgtaatcatgttgctagatctaatcttttcttgttgtgttttaccagccactaagatggttgcac

SEQ ID NO: 36158 - DNA, 304 bp, Gossypium hirsutum
  unsure (1)..(304): unsure at all n locations; Clone ID: LIB3149-064-Q1-K1-H5
gcgtccgttacaaggaanctgatttttactaggtattttttggttggaaacacagagaatctatcgggagggacccaaaaatttcatcgtgagtttgttgcaaaataaagggtaaatgactaaatgtttatcagggacaatttgttgcttaatatgcttagggttcgctctaaagtttgtagctgaaattacggtttcaataatttttgtggattcgccatacacaatatataccaatattgtcttttatgatctaaattggtttcaaaaacgaatcttcaaagtatcattgctcatgttgtta

SEQ ID NO: 36159 - DNA, 440 bp, Gossypium hirsutum
  unsure (1)..(440): unsure at all n locations; Clone ID: LIB3149-064-Q1-K1-H6
ccgggccgcccacgcggccgnctatgccttgtttttgggtnatttttcatgtctgctaggagtcaacgggccaaatttcggttttggtgcaaaggggcgagtgaaagtcgaccctcggccgacgttcgcgcgagggcacacttggtggctgtggcgctcgagagagagctagggtttctaccctagctgagagtggtttatgtttttgggccttttgggcctctaaatttgggcttagtttttttttgttntgggtttcgatattttttttgaggcctggtcaaatttgggcatgtacattcacaagttcaccttttgttcatttcaaatttttgttttaaaattaattattcatctcgtttcaagtaaaaataatgccttttaagctggttntataatcatatncttaaaaaatctataaaacgaaagcaagttcgatg

SEQ ID NO: 36160 - DNA, 444 bp, Gossypium hirsutum
  Clone ID: LIB3149-025-Q1-K1-G3-F2A
gggagtaagttaaaatcatcttataattccaaattcaaaattttacaaagcaaacaaatcattgtctaaataggattgaaggcagaaattacttattctcgaccaaaggtatctgccaacacactaatatagtgaaaatttacacttctgtggtaccactaaagggggtgactgaaaaaaataagccaagaaagaatccccaaaagctcctataacaagaactctcaaatccccccctctagaaaaaaactagggttttcatctaatgtgatatcactaagctggtaatatttcccttgatttgcagcatcatcaaaaagccatttctcaagcaatgaaagttggggactaagatctggctttgtttcatcttgcaaactaaggcttgcctcagttgatatggattgtgagaaatcatctgaatttgaagaatcaaaagattca

SEQ ID NO: 36161 - DNA, 456 bp, Gossypium hirsutum
  Clone ID: LIB3149-025-Q1-K1-G3-R2A
aggcaacagatgttctgcaatagcatcttacttgcctcaaagaacagacaatgacattaaaaactactggaacactcatctgaagaagaagctgaagaaactccatggaagtgaagtttattgcagagatgggttcacatcatcagctgcatcagaccagatttcacgaggtcaatgggagagaaagttgcagactgatataaatatggctaaacaggctttatcagatgcattgtcccctgagaaatcaagtgatttaactgagttgaaaccttgtcatgggaacacttatgccaaaccagaagggtatgcatcaagcacggagaatatagctaagctgttgaaagggtggatgagaaagaacccattaaagcctgcttcaacaaactctggtgtcactcaacaatcatatgacaacagggtggctactggggtgaccactgattcagctaattc

SEQ ID NO: 36162 - DNA, 364 bp, Gossypium hirsutum
  Clone ID: LIB3149-030-Q1-K1-H10.9C0
tttgctagtgctcatacgctttgcttgcattccctgatgggctggcatccgctgaagtttggtcggtctggcagccgctgataagaattccactgtcaggaagagagtgcttaccagctcctgcataagcctcttgcttgctactcacttcagtctcaagtgccggtttaccgtatccttcgtcatcatccagcttttgtttaagaaactgtagtgccagattcccaaccttccccatgaaaccacccccttcaccgtcatcgccactcccctgcagtttggtcataatgatgttcataaacttcttcactttggggcttgcatcttcgccaaacatatcaaaaagggttggccttagcttccc

SEQ ID NO: 36163 - DNA, 363 bp, Gossypium hirsutum
  Clone ID: LIB3149-030-Q1-K1-H10.9U0
ttgctagtgctcctaagctttgcttgcattccctgatgggctggcatccgctgaagtttggtcggtctggcagccgctgataagaattccactgtcaggaagagagtgcttaccagctcctgcataagcctcttgcttgctactcacttcagtctcaagtgccggtttaccgtatccttcgtcatcatccagcttttgtttaagaaactgtagtgccagattcccaaccttccccatgaaaccacccccttcaccgtcatcgccactcccctgcagtttggtcataatgatgttcataaacttcttcactttggggcttgcatcttcgccaaacatatcaaaaagggttggccttagcttccc

SEQ ID NO: 36164 - DNA, 995 bp, Gossypium hirsutum
  Clone ID: LIB3149-029-F9_FLI
gattataaaatatttataaaaacctcaataatataaaagcttaactttgaagctgcattaaatagttccacaactttttcctgtctagcccacgcgtccgtcttctttcactcagttcgacaacaccaaggccggttccaaagccaagaaccttgaaaaagtggcaaacgagacgactcagaagacaagccgagggagagagaaagaagggaagactcagcgaactcgaaagaacatttacagaggaatcaggcaaaggccatgggggaaatgggcggctgagataagagatcctcacaaaggtgtccgagtctggctcggtacatacaacacggctgaagaagcggctcgagcctacgatgaagccgccaagcgcatccgtggggagaaagccaagctcaacttccctcaaactccacacctaactcagcctcctgctaagaaaaggtgtatgatggctcctgagttgactccgccgagttctgaaacaaagagcccaccaaccccacaactttttatgggttttggttacgagaatggagtttacagaccgagtgaagcaatggaaagcgagatggagctgaaggagcaaatctcgagcctggagtcgttcctgggtttggagcctgatgagacaacaactgagttgagtggaagtgctgagcctgactcagtggacctttggatgcttgatgaccttgtgacacatcatcaacaacagcctcagctcttttattagaaattaaaaagttttaattagggtaatgttatgtttgatatgattatgcttaagactttaatgtttgtattaatgaagggtaaatagttgtgacaataaaaagattggccacccagttttaatttatatttatttctaatttgggtgacatgtaaattggtttcgagaaacattgaagtacccataatgttggttcatgtatcagatatagtaaacactttggattaataaaaaaacctcctaatattttattttc

SEQ ID NO: 36165 - DNA, 404 bp, Gossypium hirsutum
  Clone ID: LIB3165-028-P1-K1-D9
cgcgtccgggcgggattacccgctgagtttattcatatcaataagcggaggaaaagagactgaccaggattcccctagtaacggcgagcgaaccgggaaaagcccagcttgagaatcggtcgccatcggcgttcgaattgtagtctggagaagcgtcctcagcgacggaccgggcccaagtcccctggaaaggggcgccggagagggtgagagccccgtcgtgcccggaccctgtcgcaccaagaggcgctgtctacgagtcgggttgtttgggaatgcagccctaatcgggcggtaaattccgtccaaggctaaatacgggcgagagaccgatagcgaacaagtaccgcgagggaaagatgaaaaggactttgaaaagagagtcaaagagtgcttgaaattgg

SEQ ID NO: 36166 - DNA, 402 bp, Gossypium hirsutum
  Clone ID: LIB3165-028-P1-K1-G9
ccacgcgtccggtcgacggcttccatcaacggttgttgccttacctcctcttcttcctccagcaggcacctcctctttttccgctcgtcgacgacctacattgcggccttcggtcgtcgctagccttaactcttctccttctcctccgactcttatccaagaccgcccggttttcgctgcccctgttcctttgctcaccccgagagaagagatgggaaacaagtcctacgacgaagccattgaagctctcaagaaacttctcagtgagaaaggagaactgaaagctgaagcagctgcaagggtagatcaaataacagcagagttaaacacaacatcagctgacggcaaaccatctgactcttctgttgagagactgaaagaaggcttcgtttacttcaagaa

SEQ ID NO: 36167 - DNA, 403 bp, Gossypium hirsutum
  Clone ID: LIB3165-028-P1-K1-H9
cccacgcgtccggctcagtaaggctcatcaaagtccattcactcccaatactttcataacatttcacgaacttcactctccagtctccaatggcggctgccgtctccaccatcggtgctgtcaaccgagcaccgttgagtttgaatggatcaggtgccggagcttctgctccaagctcagctttcatggggaacagcttgaagaaagtgagcgctaggttcaacaacaacggcaaggctccagtgggaagtttcatgattgtggctgccaaagaaatcgacgaagacacacagaccgaccaggaccgatggaagggtcttgcttatgatatctccgatgaccaacaagacattaccagagggaaaggtatggtcgactcattgttccaagctcccatgaacga

SEQ ID NO: 36168 - DNA, 456 bp, Gossypium hirsutum
  Clone ID: LIB3165-001-Q1-K1-A11
ccaacgtccagctccccggtatgtacaacaaggaagagaacccccgtgtccccattatcgtcactggtaacgatttctccacactgtatgctcctctcatccgtgacggtcgtatggagaaattttactgggcaccaactagggacgaccgtgtcggtgtttgcaaaggtattttcaggaccgacggcatcccagatgaagacattgttaagctcgtcgacaccttccccggccaatccatcgatttcttcggtgccttgagggctcgggtttacgatgacgaagtgaggaaatggatcagtgatgtcggagttgcaggcgtagggaagaagttagtgaactcaagggacggacctccaacatttgagcaaccgaaaatgaccattgaaaagctattggaatatggaaacatgcttgttgctgagcaagagaatgttaagagagtccaattggctg

SEQ ID NO: 36169 - DNA, 400 bp, Gossypium hirsutum
  Clone ID: LIB3165-001-Q1-K1-A2
cccacgcgtccggttttccaatagttcgtaacaatggcggtctcacttcaagctgcagctaccctgatgcaaccaatcaaggttgctgcaccatcaaggaccaatgtgccgctcaggtcctcccagagcgtttctaaggccttcggtttggagcctgttggtgctaggcttacctgctctttgcaaactgacctcaaggacttggctctgaagtgtgttgacgctaccaagctcgctggtttcgctcttgctacatctgctcttgttgtctcgggagcaagcgctgaaggagtttcaaagcggctaacctacgctgaaatccaaagcaagacatacatggaagtcaaaggaacaggaactgctaaccagtgcccaaccatcgatggtggtgtcgactctt

SEQ ID NO: 36170 - DNA, 405 bp, Gossypium hirsutum
  Clone ID: LIB3165-001-Q1-K1-A3
tggagatggcacaagcaatggcatcaatggctggtttacgtggctcttcacaggctgtcctggacggcagccttcaactcagtggccaaacccgcttcaacattcctagcaacaaccgagtggctgtgggtaggtctggtttcactgtcagagctcatcagacaccggccgagcctgagactggacgcagagccatgttgggtcttgttgctgctggtttggccactggctcctttgttcaagctgtgcttgccgatgccagaagcatcaaggttggcccacctccccctccctctggtggactgcctggaactctgaactctgatgagccaagagaccttgttctgccatacaaagacaggttcttcctccaaccagttactccagctcaggcagcacagagag

SEQ ID NO: 36171 - DNA, 412 bp, Gossypium hirsutum
  Clone ID: LIB3165-001-Q1-K1-A4
ttcgagagaaaaaaaaaacagcagttaaaagcaaaaaaccatggtggctttaggcctccaacccacacatttgattgcccctcaaaagttaccaatacgtaaacaaagaacctttagcaacattatcatccggtgtagtattgcagagccgtcgggagaaccagcatcattgggacaaaaaactaaatacaacgatgggttgtttgccaaggcatttatgggtcttttcgcccgcaagatggagaagttcgcggcttcaccaaaagctggaacagaaccaaagaaaggggttttcgactatgactatgagagctttgttgaggtgtcaaagagagtaatgcaagggaagtctcggttgcagcagcaacaagtggtccgacaagtgctcttgtccatgctcccaccgggcgca

SEQ ID NO: 36172 - DNA, 330 bp, Gossypium hirsutum
  unsure (1)..(330): unsure at all n locations; Clone ID: LIB3165-001-Q1-K1-A5
tctttctcagtttcctcattcatttccagttctcaacacanattttcatcacccatcaagcttttcatcaatggcttcccttcaacaagcttcaatctctcttcaacccaagcttctttcatcttctcaacaccccagatcccttccctctctcaacctctctttttcagccactttccctttccttaaactcttcaccactcgccctctttatggcggtgccaaaatgtcagcctccgccgctttcagctacgccaccgctttagccgatgtagccaagtccaacaacacccttgatgccaccagctccgacgttgaaaaagtcgagac

SEQ ID NO: 36173 - DNA, 462 bp, Gossypium hirsutum
  Clone ID: LIB3165-001-Q1-K1-A6
ctcaaattcagttaaaaatttcacccttgttttcttcagtctctctctcagccatggctgcagccatctccaccgtcgctgccgctgccgccgccaaccgagctctgggagtgtcagtcccaacctcagctttcatggggaagaaagtgagctcaagattcaacagcaccaggcaggttccttcgggaagttttaaggtgatggcggcggagaaagagatagacgaagagacacagaccgaaaaggaccgatggaaagggttggcttacgatatttcggacgaccaacaggacattactcgagggaaagggatggtggattccttgttccaagctcccatgaatgatggaactcactatgctgtcatgagttcctatgaatacctcagccaaggtcttaaaacgtacaatttggacaacaacatggatggtttctacattgctcctgcattcatggacaagc

SEQ ID NO: 36174 - DNA, 431 bp, Gossypium hirsutum
  Clone ID: LIB3165-001-Q1-K1-A7
ggccgccctttttttttttttttgtaaaaaaaaaagttgattggaacaaataaagtgaaacatttaagacaagaacaaagtggagattttataacacaaaaatagaggatgcaaatccacttaaaacacaaaaggaaaacaacattcaattaagacacaaaggggggatttcctttgtttgtgcccaatatagatttttttcttcccttagagcttaatttcccatttagaaagctcctctcttgatagcatcgtcattagcatttccaagggcagcttcactcaaatatttgtcagccaattgaaccctcttcacattctcttgctcagcaacaagcatgtatccatattccaacagcttctcaatggtcatcttcggttgctcgaaagatggtggcccttccctcgagttcacgagctttttcccgaca

SEQ ID NO: 36175 - DNA, 372 bp, Gossypium hirsutum
  Clone ID: LIB3165-001-Q1-K1-A8
aagacaagaacaaagtggagattttataacacaaaaatagaggatgcaaatccacttaaaacacaaaaggaaaacaacattcaattaagacacaaaggggggatttcctttgtttgtgcccaatatagatttttttcttcccttagagcttaatttcccatttagaaagctcctctcttgatagcatcgtcattagcatttccaagggcagcttcactcaaatatttgtcagccaattgaaccctcttcacattctcttgctcagcaacaagcatgtatccatattccaacagcttctcaatggtcatcttcggttgctcgaaagatggtggcccttccctcgagttcacgagctttttcccgacaccattg

SEQ ID NO: 36176 - DNA, 307 bp, Gossypium hirsutum
  Clone ID: LIB3165-001-Q1-K1-B1
cccacgcgtccgcccacgcgtccgggcaaactcgggatttccgagttatgccataagacttttatcagtctcgatgatgataaacccgtagtttcgggtatatgtgatttgttatctatagaacctatgtgttgagtgcctttgtgtagtctttatctctttcaacgctaaatgcaactgtttgtgagggttagacgacacatttagttcgttttcaagtttttttttttttaattttctttgaatattgacccttgtttattgtttcggagtgttaaagagggcatgcttttatgtctttcaagtc

SEQ ID NO: 36177 - DNA, 456 bp, Gossypium hirsutum
  unsure (1)..(456): unsure at all n locations; Clone ID: LIB3165-001-Q1-K1-B12
cccacgcgtccgcccacgcgtccgatcggctaccattgccactgcctctccggcacaggctaacatggtcgctcctttcaccggcctcaagtctgcctctgctttcccagtcatcaggaaggccaacaacgacattacttctctcgcaagcaatggcggcagagtgcaatgcatgcaggtgtggcctcctactggaaagaagaagttcgagactctctcatacctccccgatcttacacccgtgcagttggctaaggaagtagattaccttcttcgctcaaaatgggttccttgcttggaattcgaattagaggagggattcgtgcaccgtaaatactcgagcctacccacgtactacgatggacgctactggaccatgtggaagctgcctatgttcgggtgcaccgactcggctcaagtattgaaggagctngaggaatgcaagaaggaataccc

SEQ ID NO: 36178 - DNA, 385 bp, Gossypium hirsutum
  Clone ID: LIB3165-001-Q1-K1-B2
ccacgcgtccgtttctcccctgcagctccttcgcagctatgcgccggcaagagtggcatgttctgcccatcacgagcgtttcttgtgaaaccaacgagaacccatatggtcaaaaacgaaaagggaatgaggatcacatgccaggccactagcatccctgctgatagagtgccagacatgggcaagaggcagctcatgaatctgcttctgttgggggctatttcacttccctcaggtttcatgttggttccttatgcagccttctttgtcccatctgggggacggggtaccggtggtggcaccgttgccaaggacgcaatcggaaatgatgtaattgccgaagaatggctcaagactcatggccctggggaccgaaccctgactc

SEQ ID NO: 36179 - DNA, 423 bp, Gossypium hirsutum
  Clone ID: LIB3165-001-Q1-K1-B3
cttctttgctttcttggattaaccagctggggtaggggaaaaaaataatgaaaagggtttcctttgtggccttggtgtggggggcactcgcggggggggctgttttcgggtgaaagtcgcacgggggaagcagtgacatgtaatcccgtggagcttgccccctgctcgccggcgcttacgtcgtcctcgcctccatcaagcgcttgttgcagcaagctgaaggcgcagcagccatgcctctgtggatacattaagaacccatctcttaaacagtatgtcaacagtcctaacgctaaaaaggttgcttcgacttgtggagtcccatatcctaagtgttaaatgttgcttaatggtgtatctactatctactggcagcaaataagtgattctttttgctgtcaagtactgttctgaataaaagaa

SEQ ID NO: 36180 - DNA, 423 bp, Gossypium hirsutum
  Clone ID: LIB3165-001-Q1-K1-B4
cccacgcgtccgagacgtgtgttgatgctaccaagctcgctggtttcgctcttgctacatctgctcttgttgtctcgggagcaagcgctgaaggagttccaaagcggctaacctacgatgaaatccaaagcaagacatacatggaagtcaaaggaacaggaactgctaaccagtgcccaaccatcgatggtggtgtcgactcttttgccttcaagcctggcaaatactacgccaagaagttctgcttggagcccacttccttcactgtcaaggctgagggtgttaacaagaatgcccctcctgagttccaaaacaccaagctcatgacccgtttaacctacacccttgacgaaatcgagggccctttcgaggtatccaccgatggcaccgtcaaattcgaggagaaagatgggattgattatg

SEQ ID NO: 36181 - DNA, 458 bp, Gossypium hirsutum
  Clone ID: LIB3165-001-Q1-K1-B5
tcggaccaacccttccgcccacccgtccgggaagactctttggtttaactgtaccatatagtcctagtaagcagtattagcaatggcctcctccatgatctcatcggcaaccattgccaccgtgaactgctcctccccggcacaggccaacatggtggcccccttcaccggcctcaagtctgcctctgctttcccagtcactaggaaggccaacaacgacatcacttctcttgcaagcaatggtgggagagtgcaatgcatgcaggtgtggcctcctcttgggaagaagaagttcgagacactctcatacctccccgatcttacacccgtacagttggctaaggaagtagattaccttcttcgctctaaatggattccttgcttggaattcgaattagaggagggattcgtgcaccgtaagtactcgagcttacccacgtactacgatggacgctact

SEQ ID NO: 36182 - DNA, 445 bp, Gossypium hirsutum
  Clone ID: LIB3165-001-Q1-K1-B7
aaaggagtcagatggaggtggaacgagtccaagccattgtttcttcatctctagctaaagacaatatcccactagagtttgttcgacccgaagatgaacaacctgcaattacaacatttcatggtctcatccctgacatccctgttatcgatttcaaccaccctgatcaggatcatatcatccatttgattgccaacgctagcagggattgggggatattccaggttgtgaaccacgggataccctttcatctaattcaaaaactgcaacaagttggaaaggagttctttgatctccctcaggaagagaaagaagtgtatgctaagccacccggtgcactcacccttgaaggctatggaagcaagatcgggaaagatgttaatggaaagaagaactgggctgatcacctttttcataagatatggcctgcttcatgcattaacca

SEQ ID NO: 36183 - DNA, 450 bp, Gossypium hirsutum
  Clone ID: LIB3165-001-Q1-K1-B9
cccacgcgtccgcccacgcgtccggaaatataccagaaaatcaaaaagaagaagaaaagagatccccatgatgtctcttacaatcccaactaatctctcaaaatcaattttgaagccaaagctggagacccaagtgatccccaaggcttcatccagatcattgattgtatgctcctccagcaatccttcctcctccgacaaatcggcttcatcactccaggccttctcagcggctctcgctctttcttccatccttctttcggctccactccctgctgttgcggacattgcggggctcactccttgcaaagagtccaagcaattcgccaagcgcgagaagcagcagatcaagaagctggaatcctcgttgaagctttacgcccccgatagcgcaccggctctcgccatcaaagccaccatcgagaaaaccaagagacggttcgacaacta

SEQ ID NO: 36184 - DNA, 409 bp, Gossypium hirsutum
  Clone ID: LIB3165-001-Q1-K1-C1
tactattacacttccggaaaaaaatcatggccaccgtcacgacgcaagcctctgccgctgttttccggccatgtgcatcgaaaacacggttccttactggttcttccggtaagttaaaccgagacgtttcatttaaaccagtggcttctacatcgactagctcattcaaagttgaagcaaagaaaggggagtggttacctggtcttccttcaccagcttacctcaatggcagtcttccaggtgataatggctttgatcctcttggattggctgaggaccctgagaacttaagatggtatgtacaagctgagcttgtgaatggacgttgggctatgttgggtgttgcagggatgcttctgcccgaagttttcactaagattgggataatcaatgctcctcaatggtacga

SEQ ID NO: 36185 - DNA, 453 bp, Gossypium hirsutum
  Clone ID: LIB3165-001-Q1-K1-C10
gaagaattttgttggattatccgttgttgatggttttatagcatgtggctcagaaacaaatgaggtttatgcatactataggtcactgcctatgccaataacttctcataaatttgggtccattgatcccatttctgggaaagacacagatgatgacaacgggctgtttgtatcaagtgtttgctggagagggaaatcagacatggttgttgctgcaaattctagtggatgtattaaagtattgcagatggtttaaggagaaggttaattgcttagagtcatcaattactggcgtcatttggttgccaagttttattctcgaggcttattcttaagcattgaagccatcttgggttcaggcaaatatgtcatacatggatgacttggtctgctcggtggctcattataatagggctggctttgattcatagaaaaatatatacagagtagagt

SEQ ID NO: 36186 - DNA, 419 bp, Gossypium hirsutum
  Clone ID: LIB3165-001-Q1-K1-C11
cccacgcgtccggaagaagatgacgagttcatcagcaaccttaagcttctcttcattttcttcaacctcagccctatctttatctaaagtcagattcaaatttccctccttttcacgaacctcctctctctcatctcgcgccaagccattcaccgcttcttcttccaccaccacccacaacatctcaggagaaattcgccattgcagtttgagtaggaggagagggctggcttttactgcaacgctaccggttcttcttcctctgcatgaatttgtagactctgttgccgctaaggcagttgagtcaggttcaggtcaaagcgagtatatgcgtataaaggaagagataattaaagtagtaacaaagggaaaggctgctggtgttcttcgtttggtatttcatgatgctggaacctatg

SEQ ID NO: 36187 - DNA, 359 bp, Gossypium hirsutum
  Clone ID: LIB3165-001-Q1-K1-C2
cccacgcgtccgtccacccttggcatcttcgctgccgatgtcaagcctgttggcactgatggcatctctgttgatggcaaggttatcaaggttgtttctgaccgcaaccctgccaacctcccatggggggacctaggaatagatctagtcatcgaaggaaccggtgtgtttgtcgatagagaaggtgcaagtaagcacattctagcatgagccaagaaagtgctgattactgccccatgtaagggtgacatccccacctatgttgttggagtgaatgctgacacctacaacccagatgagcctatcatcagcaatgcttcttgcaccaccaattgccttgctcctttcgtcaaggttct

SEQ ID NO: 36188 - DNA, 296 bp, Gossypium hirsutum
  Clone ID: LIB3165-001-Q1-K1-C3
cccacgcgtccgttcaaagttaactacttgtgtgcagacaaaaatggcttttgctgggtttttcttgttgggtttactttcaatggtctcagctgttcatggatatggtggtggatggactaatgctcatgctactttctatggtgggagtgatgcttcaagcacaatgggtggtgcttgtggttatgggaacctgtatagccagggatatgggacaaacaccgcagctttgagcacagctctgttcaacaatgggcttagctgtgggtcttgctatgagattaagtgtgtgaatg

SEQ ID NO: 36189 - DNA, 464 bp, Gossypium hirsutum
  Clone ID: LIB3165-001-Q1-K1-C4
cccacgcgtccgagccactcaaaagttaaaaaaccttctgttttgttagcgtagcaaatagcaatacaaccatggctttggctcccaccacttatccctcctatctctgctctaacacttgctcacccttacacagagccactcaacctctcctttcttcaaccaggcatgtaggagttagattcaacagcaagtgttcagcgtctttctgcagtggcaaggagcagctaaagccatggattttggtagcgaaagcatcggaaggtgagtcccaaaccacagagcaggaagagcagcagtacgaggagtatgaggtagagattgagcagccttatgggctcaaattcagaaaaggcagagatggtgggacttacattgatgctattcagcctggtggagctgctgacaaggctggtgttttcaccgttggggacaaagtacttgccaccagtgcagtgtttgga

SEQ ID NO: 36190 - DNA, 460 bp, Gossypium hirsutum
  unsure (1)..(460): unsure at all n locations; Clone ID: LIB3165-001-Q1-K1-C6
cccacgcgtncgaaacagtctgagggaagatctacctccagcacatattctcaagcccctgcaactaacggttcaactcctccggcaccagtaaatcccaaaatggaccttcttagtggtgatgactacaatatgccgaaggcagatgattcacttgcccttgttcctgtgggagaaccacaacaaactactcctgcgtcatcacagcaaatggccctcgtactctttgatatgtttcctaacagcaacaacacttctaattctgtaaacacccaatcttcaggtttgtccggacaactatatcctttggctcctcaaattcagcagcagaacattttggctcctcaaattcagcagcagaatggaaatgcaccaaacatcaggttacctcgatatgagcaatcatttgctcaaggcactggtcctgcctggaacaatcagcttgttcagcagcagcagc

SEQ ID NO: 36191 - DNA, 428 bp, Gossypium hirsutum
  Clone ID: LIB3165-001-Q1-K1-C7
ataagccctccctccttttccaacctctccttcttctttgaaatttagctgaaatggctactgcaacaatgagcttcaatttggtgggagcatttaggggtctttctctagcatcaagctcgacgtcgtcctttatgaaaggagaagtgggttccattcacaaaacggcagtcgtttcgttcccgaggaagtctccgttccctttgacgatcgaatcggcgcacaaaaaaggagccggtagtactaaaaacggtcgcgattcaaagggtcaacgactcggcgtcaaaatctacggcgaccaggtcgccaagcccggcgctattatcgttaggcaacatggaaccaagtttcatccagggaaaaatgtggggcttggcaaggatcacacaatcttttcattgattgatggacttgtgaaattcgagaag

SEQ ID NO: 36192 - DNA, 372 bp, Gossypium hirsutum
  Clone ID: LIB3165-001-Q1-K1-C8
cccacgcgtccgcacccccaacgtaaaacagcgtcactctgagagatttttagagagaaaaaaaaaagtggcaagagaaatggcaaaattcccagtgatcaacttggagaaactgaatggtgagagagcagtaaccatggatctaatcaaagatgcctgcgagaattggggcttctttgaggtattgaaccatgggattccctatgattttatggacagagtggaaagcttgacgaaagagcattacaagaaatgcatggagcaaaggtttaaggaactggtggcaagcaaggcccttgagggtctccaggctgaggttactgatatggactgggaaagtactttctatttgcgccatctccctgaatcaaa

SEQ ID NO: 36193 - DNA, 450 bp, Gossypium hirsutum
  Clone ID: LIB3165-001-Q1-K1-C9
cccacgcgtccgtgcttttattgcagtcgttttgcgcttgttcttccctacacgtttcccagattggctggaacttcctggagcattgatacttctaatagtggtggcaccgagcttattttcaagcacaataaggaacgactggattggtgtggtgatatgcctaggcatagcttgttatctacttcaggagcacatcagagcatcgggtgggtttcgaaattcattcaccaaagccaatggaatatccaacacaattggcataattattctgttggtttaccctgcttgggctttggtcactgacatcctctagattcagctgagctcagcttctggattgtgtgtgttttagtttcgtcaagttcatgatttgttttttctgcaccattaatttgttgagacttaccaaaattcattgttattgttgttccataacacttgtttact

SEQ ID NO: 36194 - DNA, 412 bp, Gossypium hirsutum
  Clone ID: LIB3165-001-Q1-K1-D10
cccacgcgtccggtttcattgaaggcaggactctcagactactctttcgaaccagctccaccatcacccccaaaaaacaaagcaaattgtagaagatggcaacacaagcacttgtatcatcgtctcttacctactcagtggagactgcaaggcagattcttggagctaaacgacaaattgggtcttcaaggaaaggatcctttgttgttaaggcagcttcgactccacccgttaagcaaggagctgatagacctttatggtttgcatctaaacaaagcctttcatacttggatggcagccttccaggtgattatggatttgaccccttgggactctcagaccctgaaggtccaggagggttcatcgagcctaaatggctagcctacggtgagatcatcaacgggcgttatgc

SEQ ID NO: 36195 - DNA, 281 bp, Gossypium hirsutum
  Clone ID: LIB3165-001-Q1-K1-D11
cggacgcgtgggcggacgcgtgggctcaatgttcgggttcttcgttcaggccatcgtgaccggaaagggaccattggagaacttggctgaccaccttgctgacccagtcaacaacaatgcttgggcctatgccaccaactttgtccccggaaagtgaacttagagagtgagaagggatttgtcttgtttatgtttttatttgttggtgtgaatttaaatttgttgcacaatcaatgaaagtataatgtgaattttgtgtgctcaatttttttgactgttcc

SEQ ID NO: 36196 - DNA, 439 bp, Gossypium hirsutum
  Clone ID: LIB3165-001-Q1-K1-D12
cccacgcgtccgcccacgcgtccgcccacgcgtccgcacagatcacactcgatggatttatgattcagtttaacaagaattcattcggtctggcagctgctggacctcttcaggttcccccattggcacctggagcatcagcaagaacattgctgcccatggtattgttccagaatacgtctactggtcctccaaacactcttctgcaggttgctgttaaaaatagtcagcaaccagtctggtacttcaatgacaaaatcttgttgcacgtgttctttaccgaggatgggagaatggagcgaactagttttcttgagacatggaggtcactacccgattcaaatgaggtcttgaaagaattcccaggcatcatggtgactagtgctgaagcaacccttgatcgactagctgcatcaaacatgttctttatagcgaagcg

SEQ ID NO: 36197 - DNA, 336 bp, Gossypium hirsutum
  Clone ID: LIB3165-001-Q1-K1-D2
tccgttttttttatatattccaaaaaacataaaaccatcttttattatttctgcctgtgagaaatataatgccacaaagctatgcaggtagtacatattgtaagaaaacaacacgcatgcttccatgatggaaacatgattttattttatgcaacacgcattgacacaccaaacgacatatagatatagtaagaagcgacatgcatgcttccatgaaggaaacacgaatttattttatgcccacacacacacaatctttcactactgtaaatctcaacatatgacccagtggaaatttgcatatatggctctggctcactccagcgcctctttttt

SEQ ID NO: 36198 - DNA, 432 bp, Gossypium hirsutum
  Clone ID: LIB3165-001-Q1-K1-D3
cactactagtacccactactagcaatggcttcctcaatgatctcatcggctaccattgccactgcctctccggcacaggctaacatggtcgctcctttcaccggcctcaagtctgcctctgctttcccagtcatcaggaaggccaacaacgacattacttctctcgcaagcaatggcggcagagtgcaatgcatgcaggtgtggcctcctactggaaagaagaagttcgagactctctcatacctccccgatcttacacccgtgcagttggctaaggaagtagattaccttcttcgctcaaaatgggttccttgcttggaattcgaattagaggagggattcgtgcaccgtaaatactcgagcctacccacgtactacgatggacgctactggaccatgtggaagctgcctatgttcgggtgcacccgactc

SEQ ID NO: 36199 - DNA, 427 bp, Gossypium hirsutum
  Clone ID: LIB3165-001-Q1-K1-D4
ttagcttacactcctattccccactactagcaatggcttcctcaatgatctaatcggctaccattgccactgcctctccggcacaggctaacatggtcgctcctttcaccggcctcaagtctgcctctgctttcccagtcaccaggaaggccaacaacgacattacttctctcgcaagcaatggcggcagagtgcaatgcatgcaggtgtggcctcctactggaaagaagaagttcgagactctctcatacctccccgatcttacacccgtgcagttggctaaggaagtggattaccttcttcgctcaaaatgggttccttgcttggaattcgaattagaggagggattcgtgcaccgtaaatactcgagcctacccacgtactacgatggacgctactggaccatgtggaagctgcctatgttcgg

SEQ ID NO: 36200 - DNA, 292 bp, Gossypium hirsutum
  Clone ID: LIB3165-001-Q1-K1-D5
atttcatcgtgatggggatgatggcaagtgtttcttcaatggaattttggtgcatccttaacctcagagccactcttattactcttcttcttattctcttttttcatctttccaagaaactttactctaaattctttcctcctccttccggtcttcatcttccttctccttcttcatacacttcccttcctgaatctcaatcaagaatcccaaagattgtatctgattcagacttgaagtttttgattgataatctggatgagaagctcgatgaggacgagaaatgggagac

SEQ ID NO: 36201 - DNA, 423 bp, Gossypium hirsutum
  Clone ID: LIB3165-001-Q1-K1-D6
cccacgcgtccgcccacgcgtccgaggttggaccgttagatgcaactagaaacttattggatgctgcagattaaagcggtgaggagtgttataaagtgtgaagtttcatctcttgggttctccttcaatttatatataaacacctatagagtgaagacatttgtgactcttaaaagaaattaaccatggcaacgagtgatgccgaagtgaaagttttgggcacatgggcgagtccattcgtgatgagggtaaggattgccatgaacatcaagtctgtggcctatgaatttcatcaagagaggttatgggaaggcaaaagcgagcttctcctcaaatcaaacccagttcacagaaaggtccctgtcctcattcatggtgatgacaccatctgtgagtctctcattattgtccaatacatcgatg

SEQ ID NO: 36202 - DNA, 332 bp, Gossypium hirsutum
  Clone ID: LIB3165-001-Q1-K1-D7
ggaaaagttttcagaataggacatcttgttatacctaaacgagttgcaactgctgggttgtttagctggtgtggagatgatattgaaagatgttggatacccagttaagcttggaagtggagttgctgctgcatctgcttatctgcaaaataacatcccaatgatcccttcaaggatttgatgaagaatattgcaattaattagtccatgtaaacttttttttaaatttatttatttgctccatcataaatttgtaaaaatatactttgatatgtttctctattatactctctctatctaagtcttttattttaaaaaaaaaaaattataat

SEQ ID NO: 36203 - DNA, 428 bp, Gossypium hirsutum
  Clone ID: LIB3165-001-Q1-K1-D8
ggagaagagcgttaaggttttaaaaaacgcagcgaaaactaggaaagtcccagctgaggaagtgctttcagctttttctgttattgaaaaagctaaaattgatccatcggcattccttgaaacgcttggtggattggattcacctgaaaaaattgaaaggcggccgttatttccctcttacggcggttcagaggttcgatgctgctggaaggaggattgagaatggtatatttcttggaccaattggtttcttaacctttgaaggaaaattttcatggaagaacagaatattatcctttattttcgaacgaatccgggttaaaattggacttttcaaccctctggagatcggtcttggccagaaagatgatagagaaccaaacaccaaagatcctttctttatctggttttacattgacgaagaaatc

SEQ ID NO: 36204 - DNA, 432 bp, Gossypium hirsutum
  Clone ID: LIB3165-001-Q1-K1-D9
cggacgcgtggctaaacctctcaaatccttttcttttcctgttttctcttccactgccaattgttcaaccatgtcatcagctgtgattgcaggtgcctcttcttcttgttctgccgccttcaccagcaggaagaactactccaacaaaactacctccaccccttctcccaaggcattcaatacttcacagaaaaccgcactccaaggcttgtctcttcaagaggccaaagggggtatctcagatttcttcatagctgagaaaaagagcagtgtctgttccagtcatgtaggaagaggacttgagatcactgcaagaactgccggtgcttcaaaaactatagaggttgaggttgacaagcctttaggtttgacattaggtcagaagcaaggaggtggtgtagttatcactgcttgtgatgggggtgggaatgc

SEQ ID NO: 36205 - DNA, 458 bp, Gossypium hirsutum
  Clone ID: LIB3165-001-Q1-K1-E1
gatagaaagagcttcttcactttgacaacaatactcactttctcttacagagattgagagaaaatcacaaacacacatttatatagcacagtgatcatcatggctcttcacttgtcttgggttttcgtttttggtattctaggcaacgctgtttcattcatggtttccttggctccactgccaacattttaccaaatattcaagaagaaaacatcggaaggtttccagtcgattccctacgtggtttcgctcttcagtgcgatgctttggatttactatgcactgcttaagaaagatgccattttcctcattaccatcaacactttctgcgttttcattcaaactttttacattgttacttacttttactacggcccaaagaaagaaaagatcgtcacggtgaagcttatgcttctcttcaacgttttcgggttcggagttatctttctcgcaactta

SEQ ID NO: 36206 - DNA, 454 bp, Gossypium hirsutum
  unsure (1)..(454): unsure at all n locations; Clone ID: LIB3165-001-Q1-K1-E10
ctcaaattcagttaacaatttcacagttgttttcttcagtctctctctcagccatggctgcagccatctccaccgtcgctgccgctgccgccgccaaccgagctctgggagtgtcagtcccaacctcagctttcatggggaagaaagtgagctcaagattcaacagcaccaggcaggttccttcgggaagttttaaggtgatggcggcggagaaagagatagacgaagagacacagaccgaaaaggaccgatggaaagggttggcttacgatatttcggacgaccaacaggacattactcgagggaaagggatggtggattccttgttccaagctcccatgaatgatggaactcactatgctgtcatgagttcctatgaatacctcagccaaggtcttaaaacgtacaanttggacaacaacatggatgggttctacattgctcctgcattcat

SEQ ID NO: 36207 - DNA, 426 bp, Gossypium hirsutum
  Clone ID: LIB3165-001-Q1-K1-E11
cccacgcgtccggttttcgatttttgtattaagagtcgccctttggtgtttttctaattcaatcagtgaggtgaagaaaaatgtcttgctgtggtggaaactgcggttgcggctccggttgcaagtgcggcggcggcggcggctgcggctgcggcggttgcaagatgtaccctgagatgaactttgctgagcaaaccacaactgagacacttgttcttggcgtggcaccccggaaagtgaactttgatggagctgaaatggaaactggggctgaaaatggctgcaaatgtggagataactgcacttgcaacccttgcaattgtaaatgaggggaaaaaaaaaaccgaagcatattatggaagctgatctaaataatatatgatgtatttgggtttttattattagaataaagcagccatggttcat

SEQ ID NO: 36208 - DNA, 446 bp, Gossypium hirsutum
  Clone ID: LIB3165-001-Q1-K1-E12
cccacgcgtccgatttctttcttcaactatcttttctcttcaaagatttcaactcttttctcagaatgggaagtaccgatgggaccagctatggtgcttacacctatgatgccctggagagggagccttactggccatccgagaaacttcgaatttccatcaccggtgctggtggcttcattgcttcgcacatcgctcgacgtctaaagagtgaaggacattacatcattgcttctgattggaagaagaatgagcacatgacagaagatatgttctgtcacgaattccatcttgtcgatcttcgagtgatggaaaattgcttgaaggttaccaatggagtggatcatgttttcaacctcgccgctgatatgggtggcatgggcttcatccagtccaaccactcggtcattatgtacaacaacacaatgataagtttcaacatgctc

SEQ ID NO: 36209 - DNA, 146 bp, Gossypium hirsutum
  Clone ID: LIB3165-001-Q1-K1-E2
cccttccggaagtcaacgggctagataacccttaaggcccaaggaagctgattggcgggttccctcgcgggtgcaccgccgaccgaccttgatcttctgagaagggttcgagtgagagcatgcctgtcgggacccgaaagatggtg

SEQ ID NO: 36210 - DNA, 445 bp, Gossypium hirsutum
  Clone ID: LIB3165-001-Q1-K1-E5
ctttgtgtttcaattcaagatggctactttgtctaggtttgttgtcaaagattgcaattttcataaacatcatgccgtgtgcagaacatcatcgtctttggttccttccagaacgctacggagagctcatctggatgttagagctggcatttctttgcctgagaatggaaaaggttttgcaattcaacgtaagccaagtggtccccttgtttctcttgcagctttcctcgataactcctgcttcaaggggtccccaagttatctgcaatgctgctgccaatgtatccggagatattcctacaccaagtgggatgagcaagtatgagagaataattgaaactttgacaactcttttccctgtgtgggttattttgggaactattatcggcatatacaagccagctgcggtaacatggtttgagacagatcttttcactggtggact

SEQ ID NO: 36211 - DNA, 458 bp, Gossypium hirsutum
  Clone ID: LIB3165-001-Q1-K1-E6
cccacgcgtccgctctatcaaacccacgccataactgaaacaaccttgaaccttccttttctccatatacataacccaaaaccttttccctgtaaaattttcttcatggggtttcctgctagttacgccgaagttaccttacccaaacccttgcttttcgcactttcattactttgtttcatcggaaatctaatttccgcccttttaaaccgcctcggactctccgatttcatcgaatcggacatggtttggcccgaaaaccggacccgaacattcgagactaccaccgtacccgctcttctctttccggttataaagttcgaggagctcgtcgtcgacccaccggagaactgtgccgtttgcttgaacgagttcgaaagaggggaagagatcaggtgcttgaaaaactgtagacacgttttccacagggcatgtttggacccgtggatggatcatga

SEQ ID NO: 36212 - DNA, 414 bp, Gossypium hirsutum
  Clone ID: LIB3165-001-Q1-K1-E7
caatcctcaaaatctctgcaaactgagatttatatacatatctgaactttaattttctgtaaaatcgaaaccagatggagatgatccagtacaaccggttcaccgcacacctcttgctcctctcgttgattctagttgttcccttggcagtcgccaccgacgttcaatattgtgataagcaaggtgagtatgatgtaaaggttcaaggtgttgaaatttcgcctaacccgatcgccaggggtcagcctgctaccttcagtatcgcagcaacaacaggtgcagctatcgatggggggaaactggtgatcgaggttgcgtattttggatggcacattcacagtgagactcatgacctttgtgatgagacatcttgccctgtgtcaactggtgattttgtggtttctcactcacaag

SEQ ID NO: 36213 - DNA, 446 bp, Gossypium hirsutum
  unsure (1)..(446): unsure at all n locations; Clone ID: LIB3165-001-Q1-K1-E8
ctatagcatacactactagtacccactactagcaatggcttcctcaatgatctcatcggctaccattgccactgcctctccggcacaggctaacatggtcgctcctttcaccggcctcaagtctgcctctgctttcccagtcaccaggaaggccaacaacgacattacttctctcgcaagcaatggcggcagagtgcaatgcatgcaggtgtggcctcctactggaaagaagaagttcgagactctctcatacctccccgatcttacacccgtgcagttggctaaggaagtggattaccttcttcgctcaaaatgggttccttgcttggaattcgaattagaggaaggattcgtgcaccgtaaatactcgagcctacccacgtactacgatggacgctactggaccatgtggaagctgnctatgttcgggtgcaccgactccgctc

SEQ ID NO: 36214 - DNA, 428 bp, Gossypium hirsutum
  Clone ID: LIB3165-001-Q1-K1-E9
gaaaattctcgggctgcaactgtacaggcaaaatcccatcttgtgaaagctgcaaagactcagagatcaaattcttccctgacctgtttgctactggtgatatttgcaattgtgattctgatcgtgatcatagtactggcagcctgatcaacaagctcatccaatgtgtttgaagaaccatttaggtagtgttcggaaagtcacctagttcggtgtaattgtttgtaattacacaatgatgacatgtttgggtaaccattgtaattgataagtctcaccaaattgggtgaccttaaagatccttaagatcttctcgggaagaggagggtgaactttttggtaatgcatttgatcatgttgttttgtgaggatgatgtctgactggagtttcactaaaattcttagtatatagcatgtggttatcggtc

SEQ ID NO: 36215 - DNA, 372 bp, Gossypium hirsutum
  Clone ID: LIB3165-001-Q1-K1-F1
cccacgcgtccgagagaatgttaagagagtccaattggctgacaaatacttgagtgaagctgccctcggtgaagctaatgaagattccatcaatagaggaactttctatggcaaagcagcacaacaagttggggttccagttcccgaagggtgcactgatccaaatgctgataactttgatccaacggctagaagtgatgatggaacttgcacttacaaattctagacctcgtattatagtagtattgggttgaaaaagaaaaccctttttctattttatgtaatgatgtgagattgttccaaaactatcgtttgccttttgttgttccaattatatgattttgctttctcaattcttaatattttctcttc

SEQ ID NO: 36216 - DNA, 440 bp, Gossypium hirsutum
  Clone ID: LIB3165-001-Q1-K1-F10
cctagccacccgttccttttctcttttatcctttttcaattttcttcttttctccttcattgtgtcgcccaccaaactcatttttccttggcgtccttcccttctccactggtgctaatttttgtcatttttcttcctcccttttgattttatttcattatttttttagccttgaattagtctcttgaaccactcaaaaattggatcgcactgttgccacaaagatctccattgtcgcccctttaacttgctagagcattgatttaaacatcccagaacagcagtgaagccatttttcgtccgcgctctcgcttcgcaccatatcattgtacgtttaagtttggtgaaggaagcgcagatttcacaagtagtactgcggttttgtgaaattaaggtgaagttggcaaggcaattaattcttcagaaacctagaatcattg

SEQ ID NO: 36217 - DNA, 421 bp, Gossypium hirsutum
  unsure (1)..(421): unsure at all n locations; Clone ID: LIB3165-001-Q1-K1-F2
taaaggtgacctatttcaggtcaagcaactgctcaacgaaggtgtggttgtaaatgtggctgcatggggccccaaatcccaaggtgtcaccccactccatcttgctgctgagggtggccaccttgaagttatggatgaactgcttgaacgtggtgctaatattgatgcaagaactaaaggtgcttgtgggtggacgccacttcacacagcagctaaagaacgaaagagggaagcagtgaagttcctgatagagaatggggcatttttgccagatgacatcaatgattgtagatttaatccaccgctccattactgccctggcccttgatgggcatatgaggagatgaagcgtcttcaaagagatggctcttcttcagcaggggagacatcttatagctctgaaaatngatattcaatcata

SEQ ID NO: 36218 - DNA, 217 bp, Gossypium hirsutum
  Clone ID: LIB3165-001-Q1-K1-F4
cacgtggtgttcattgcgcgccctgcggtccttgaaaattcataggacctaatttcttctcgtccctttcgtactcataatcctatcaagtgtccaaagttaacagcctttggtcaatggaacaatgtacgctttggatttcctccaaatgcttccgtaacctgcgtataaagattgtctctcacggctggtcacgtacgttccattccctaacccg

SEQ ID NO: 36219 - DNA, 406 bp, Gossypium hirsutum
  Clone ID: LIB3165-001-Q1-K1-F5
cccacgcgtccgaaaaaaaaccccaaacagacaatagcctaggacaggaggatctctcagggtttaggtgatggcttcaaagcggatcttgaaggagctcaaggatctccagaaagatcctcctacctcttgcagcgcaggccctgttgctgaagacatgtttcattggcaagcaactattatgggtcctcctgacagtccttatgctggtggagtgtttctagtcaccattcatttccctccggactatccatttaaaccaccaaaggttgcattcaggacaaaggtctttcacccaaatattaacagcaacggtagcatttgccttgatattttgaaggagcagtggagccctgccctcaccatatccaaggtattgctatctatctgctcactattgacggat

SEQ ID NO: 36220 - DNA, 232 bp, Gossypium hirsutum
  Clone ID: LIB3165-001-Q1-K1-F7
gtcgtgtcttatcactctccgtaattaccgttccgtccaaaaagcttcactgggaaaatggcttggcgtggtgcaggatccctctctcgctccgtcatgtctgccgccagagctccatcgctccgcacccctgcgcctatgcctcgcgtccgtctccctacttcctcagcttcccgccttcagtcacgccgtctctccttcgccccttccaggaatttgggagaattgggat

SEQ ID NO: 36221 - DNA, 450 bp, Gossypium hirsutum
  unsure (1)..(450): unsure at all n locations; Clone ID: LIB3165-001-Q1-K1-F8
gtggtgtagcatccacccggcgccgcttcagtggcatccctacctcgtctctccacgtagttccgtccctggtcatcaaccgccaactaagctatgaactcccggtctcagtaccagtatcagcacttttattttatttaattcttaaccaataatttacctacccgccgcagcctaccttccgtcgacaaccatttaagctgtaggttttaatcaccttcctcactatggattcaaccttcttctcatttctctaacaaccaaaaaagtaggaaaaaaatggctactcataatcttgctgttatcctcaaaaacccgtcaaacgacgctgaattcctcctccttaagcaaactccaccgcctaaattcagcgaagaccagtacgattcttatgtggattctgatctctgggaccttncttncacgcttctcaaccttcaacacgatcac

SEQ ID NO: 36222 - DNA, 444 bp, Gossypium hirsutum
  Clone ID: LIB3165-001-Q1-K1-F9
gtgacccttcttgttgatcaggttaagacattcaaacctcaattggttgctgttagaaacgagtctttggtaaatgaactaaaagaggctttggctgatatggagcaaaagcctgaggttattcctggggaatcaggtgttatagaggttgctcgccatccagatgctgtcagtgtagttacagggatagtaggctgtgcgggattgaagcctacagttgctgcaatagaagcaggcaaagatattgctttggccaataaagagaccctgatcgctggtggcccctttgtccttcctcttgctcacaaacataaagtaaaaattcttcctgctgattctgaacattctgccatatttcagtgtattcagggattaccagagggtgcacttcggcgtattattttgactgcatctggtggggctttcagggattggcctgttgat

SEQ ID NO: 36223 - DNA, 426 bp, Gossypium hirsutum
  Clone ID: LIB3165-001-Q1-K1-G10
cccacgcgtccgctcaaagatttcttagtgattcaatccgtcgatcaaattagggggaaaaaatgggagggggagagcatgggcatgggcatgggcatggagttcaagatttcagggagaaggtgtggagcatgtcggggggtccgtactgccggcccaagcactggcgccgcaacactgccattgccatgttcggcgttttcctcatttgcatccccattgccatgaaatcaaccgagctcgagcaacgacctcatcagcctgtccgtccgattccttcacagctttggtgcaagaacttcggaaacaaagattattgaagtctgcctggggctgttggagtaccgatggcatatcagagcagcctatgatctgtatttgagaccctttcaccaatttagctttgttcgtgatcaataagttgtg

SEQ ID NO: 36224 - DNA, 201 bp, Gossypium hirsutum
  Clone ID: LIB3165-001-Q1-K1-G12
gaaaacgaattttttctaagaagagctttttttttttccttcgaaagcatggaagaattctactctgaaagacggcagccattggaatggaaaggctttgatttgtagctttcaactcggctctcttatatattagccctagcaattgtttgctctttagggcacaacctcttccccttcctcttgaccttggccatgccc

SEQ ID NO: 36225 - DNA, 313 bp, Gossypium hirsutum
  unsure (1)..(313): unsure at all n locations; Clone ID: LIB3165-001-Q1-K1-G4
gaagtttttcatgaccgggttcaacgttcaagggttccctaccatcttagtatttggtgctgacanagacagcccagttccttacgagggtgctagaaccgcctctgctattgaatcatttgctctagagcaactagaaactaatgtcggaccggctgaagtgacagagctgactggcccagatgtgatggcggagaaatgtagttcagctgccatatgcttcgttgctttcttgcctgacattctanactcgaaggctgaaggaaggaacaagtacttggacatgttattgtcagttgcagagaaatttaaa

SEQ ID NO: 36226 - DNA, 428 bp, Gossypium hirsutum
  Clone ID: LIB3165-001-Q1-K1-G5
gatcccttggcggcaataatgtccacggctttggtctccggcttctgcctcacttccaactccacctgtccttctaactcactccggcaacccacattgcggcggccgtctatcgtcgccaacctcaactcttccacttctcctcctactctcattcgaaatcaacccgttttcgcagcacctactcctttgctcactccttccaattggaaagaaaacatgggagaccagtcatacgaggaagccattgaagctctcaagaaactgctcaatgagaaaggagaattgaagagtgcagcgacggcaaaggtagagcaagtgacagctgagttgaagactgctgcttcttccgatgagtctgttgaccgcttgaaacaaggcttcatttacttcaagactgaaaaatacgaaaagaatcctgctctgta

SEQ ID NO: 36227 - DNA, 394 bp, Gossypium hirsutum
  Clone ID: LIB3165-001-Q1-K1-G7
gaagaagccccccttcaacagattctctgaaattacgagtgctggagggaagacggtgtggggagaccctgcagatgttggcaaggttgttgcaggggcaacctttgatgtggtgttggataacaatggcaaggacttggacactgtcaggccggtggtagattgggcaaagagctctggagtgaagcaattcttgttcatcagtagtgcaggaatctataagccaaccgacgagcctcctcatgttgaaggggatgttgttaaagctgatgctggccatgttggagtcgagaaatatgttgcagaagttttcagtagttgggctgtattccggccacaatacatgattggatccggtaacaacaaagactgcgaggagtggttctttgatcga

SEQ ID NO: 36228 - DNA, 422 bp, Gossypium hirsutum
  Clone ID: LIB3165-001-Q1-K1-G8
cccacgcgtccgctcaacattcccatttccaatctccagctcccaaggtaaatatgccgatcagaaacatagcggttggccggcccgaagaggctactcaccccgatgctctcaaggctgctttggctgagttcatctcaaccttgatcttcgttttcgctggatcgggctcaggaatggcctttaacaagttgactgacaacggagcaaccaccccggctggtctcgtagccgccgctctagctcatggcttcggtcttttcgtcgctgtctccgttggcgccaacatctcatgtggccacgtcaaccctgccgtcaccttcggtgcttttgttggcgggaacatcactctcttgcgcggcattctttactggatcgcccaactcctaggctcaaccgtcgcttgcctgttgcttaagttc

SEQ ID NO: 36229 - DNA, 446 bp, Gossypium hirsutum
  Clone ID: LIB3165-001-Q1-K1-G9
aggaccccttgcttcactgtcaaagctgttcaatccgacaagtcaacatttcaagtaatccaacccatcaacggcgaccccttcattggaagcctggagactccaatcacctcaagccccttaattgcatggtacctttccaacctcccagcctataggacggcagtgaacccacttctgaggggaatcgaagtgggtctggctcacggcttcctcctggttggtccattcgtaaaggccggccctctaaggaacactgcggtggcgggtcaagctgggtccttagccgctgccggtttggttgtgatcctcagcatttgcttgacgattatggtgttgcgtcgttcaaagaaggtgagccatcgatagcaccgagcctaaccctgactgggaggaagaaagagccagaccagttgcaaacggcggatggatgggctaagttcact

SEQ ID NO: 36230 - DNA, 415 bp, Gossypium hirsutum
  Clone ID: LIB3165-001-Q1-K1-H1
caaaaatgaccattgaaaagctattggaatatggaaacatgcttgttgctgagcaagagaatgttaagagagtccaattggctgacaaatacttgagtgaagctgccctcggtgaagctaatgaagattccatcaatagaggaactttctatggcaaagcagcacaacaagttggggttccagttcccgaagggtgcactgatccaaatgctgataactttgatccaacggctagaagtgatgatggaacttgcacttacaaattctagacctcgtattatagtagtattgggttgaaaaagaaaaccctttttctattttatgtaatgatgtgagattgttccaaaactatcgtttgccttttgttgttccaattatatgattttgctttctcaattcttaatattttctcttc

SEQ ID NO: 36231 - DNA, 441 bp, Gossypium hirsutum
  unsure (1)..(441): unsure at all n locations; Clone ID: LIB3165-001-Q1-K1-H10
cccacgcgtccgacactctcaaattcagtttacaatttcacagttgttttcttcagtctctctctcagccatggctgcagccatctccaccgtcgctgccgctgccgccgccaaccgagctctgggagtgtcagtcccaacctcagctttcatggggaagaaagtgagctcaagattcaacagcaccaggcaggttccttcgggaagttttaaggtgatggcggcggagaaagagatagacgaagagacacagaccgaaaaggaccgatggaaagggttggcttacgatatttcggacgaccaacaggacattactcgagggaaagggatggtggatntcctgttccaagctcccatgaatgatggaactcactatgctgtcatgagttcctatgaatacctcagccaaggtcttaaaacgtacaatttgacaacaacatg

SEQ ID NO: 36232 - DNA, 345 bp, Gossypium hirsutum
  Clone ID: LIB3165-001-Q1-K1-H11
attccccaaaatttgtttcagtaatggctgcctcagttatggcttcttcagttaccctcaagccttcattcaatgttgagaaacctggtgtaagaggggttccttcccttgctaggtccccttcttctttcaaggttgaagccagtggtggcaagaagatcaagaccgacaagccttacggaatcaatggtggtatgagcttgagggatggtgttgatgcctctggaaagaaaggtaagggaaagggtgtttaccaatatgttgacaaatatggtgctaacgtcgatgggtacagtcctatctacaacaccaacgactggtctcccagtggtgatgtttatgttg

SEQ ID NO: 36233 - DNA, 411 bp, Gossypium hirsutum
  Clone ID: LIB3165-001-Q1-K1-H2
ctgaagcaatggcagtttgctcagcatacaccacccagtccctcaattcaacttgttcaatctccacaccagcgaaaacccatttaggttttcaccaaaaggaagtagttttctataggagaagcagcaagagaggtggcagcggcagcggcagcagcagcggcccatgcgtgataacatgctcggccggtgattcacaaactgttgtgattggtttggccgcagactcaggatgtgggaagagtaccttcatgaggaggctaacaagtgtgtttggtggtgcagccgagccaccgaagggaggcaatcctgattcaaacacactcattagcgatatgaccactgtgatatgcttagatgattaccattcactcgacagaactggaaggaaagagaaaggggtgacagcac

SEQ ID NO: 36234 - DNA, 363 bp, Gossypium hirsutum
  Clone ID: LIB3165-001-Q1-K1-H4
caaatatctcatacaaggaattaaattgaatcaatggctcaaaccatgttgctcatgtctagccatgcagtgagcttgaagagagatcaccctttactccatttccaagctcaagggctcaagcctaaacctgtctctcatctcttcttcaatccattgtctaacggtgtccatacttcatccaaagctttcaccactttagctatctttaaatcaaagaccaaagcagctcccaagagggttgagccaaagtcaaagccaaaggttgaagatgggatctttggcacctctggagggattggttttaccaagcaaaatgagctctttgtgggacgtgttgccatgcttggttttgctgcatca

SEQ ID NO: 36235 - DNA, 402 bp, Gossypium hirsutum
  Clone ID: LIB3165-001-Q1-K1-H5
cccacgcgtccgcaaaaagctcccccgccccgactcccctggcatcaacagcacaattctaaacccaaaaacataaaaaaaatggcagcaagtgtagcaacaatggcgatgctcaatgcaaaatgcctaagcatcagctcaactaagatgagcagcccaacaaagccaaccccaaagcccttctcccttctctccatgcagaacctccccaaaggcctcaccatctcaaaaccagccaacaactcaaacctaccttcttcactcgctggcagcgccattgctggagctatcttctcaaccttaagttcatgtgaccccgccttagctgcacaacagattgctgaaatagctgaaggagacaaccgtgggctagctctattgcttcccataatcccagcgatc

SEQ ID NO: 36236 - DNA, 448 bp, Gossypium hirsutum
  Clone ID: LIB3165-001-Q1-K1-H8
cccacgcgtccgctaatgggctgctagacaaggaagggctgaaagacgcttttctacatctagatgctgccatgccgtaccggcaagccgaagacgccctccgtgtcgtcggcaaaacctataacattaacgtcgaggaggaaaccgagcttaacgcccttatcgactatgcttacaataagggttacgggtcttcaatttgattagctaatttataagctaaatttctttttctttttcacttttaatcatctaatatgtttttttatatatatttaagtttcgtcccaaaagacgttattatagaataaaggtttcgtggcttatgatggtgatgtagtttttgcatgtactttgcaaagactataatatatatatgtttgtgtagcaatgaacatgatgatgttctttatcaattataaagatctgtgttgaatgttattattat

SEQ ID NO: 36237 - DNA, 408 bp, Gossypium hirsutum
  Clone ID: LIB3165-002-Q1-K1-A1
cccacgcgtccgcaaagcccacactctcaaattcagataacaatttcacagttgttttcttcactctctctctcagccatggctgcagccatctccaccgtcgccgccgctgccgccgccaaccgagctctgggagtgtcagtcccaacctcagctttcatggggaagaaagtgagctcgagattcaacaacaccaggcaggttccttcgggaagttttaaggtgatggcggccgaaaaagagatagacgaagagacacagaccgaaaaggaccgatggaaagggttggcttacgatatttcggacgaccaacaagacattactcgagggaaagggatggtggattccttgttccaagctcccatgaatgatggaactcactatgctgtcatgagttcctatgaatac

SEQ ID NO: 36238 - DNA, 404 bp, Gossypium hirsutum
  Clone ID: LIB3165-002-Q1-K1-A10
ggcaactttcctctggtcaggagagccttttaagtaccatcgtttttgctgggatgcttctcggagccaatacatggggccttttatcagataactacgggaggaggaaaggttttcttactatatctatggtaacttttggagctggattactgagcacattctctccaaactatttaacgcttgttgttcttcgaggtttggttggttttggccttggtggctcatctgtattcttatcctggtttctagagtttattccagcttctaatagaggcatgtggatggtagtgttttctactttctggacatttggatcaatttttgaggctgctcttgcatggattgtcatgcccaggttaaactggaggtgggtacttgcattttcggctgtgccatctttt

SEQ ID NO: 36239 - DNA, 404 bp, Gossypium hirsutum
  Clone ID: LIB3165-002-Q1-K1-A12
atttcccctacgctctcactaaaacaactctctcttctttgttttccaatagttcgtaacaatgtcggtctcacttcaagctgcagctaccctgatgcaaccaatcaaggttgctgcaccatcaaggaccaatgtgctgctcaggtcctcccagagcgtttctaaggccttcggtttggagcctgttggtgctaggctcacctgctctttgcaaactgacctcaaggacttggctcagacgtgtgttgatgctaccaagctcgctggtttcgctcttgctacatctgctcttgttgtctcgggagcaagcgctgaaggagttccaaagcggctaacctacgatgaaatccaaagcaagacatacatggaagtcaaaggaacaggaactgctaaccagtgcccaa

SEQ ID NO: 36240 - DNA, 404 bp, Gossypium hirsutum
  Clone ID: LIB3165-002-Q1-K1-A3
ctttctttttattgtggtctccagagcttctctgttacatcgtttattttctctcaagaactgaagaaaaaatccgaatagattaaaacttaagaaagatcaaaagatgtttggaagagcacctaagaagagtaataacaccaggtactatgagattctgggtgtttcgaataacgcttcccaggatgatttgaagaaagcttataaaaaagccgccattaaaaaccatccagacaaaggcggtgatcctgaaaaatttaaagagttggcgcaagcttatgaggtattgagcgatcctgagaaacgtgagatatatgatcagtatggtgaggatgcactcaaggaaggaatgggtggtggtgccggtgctcatgacccgtttgacatcttctcctccttctttg

SEQ ID NO: 36241 - DNA, 410 bp, Gossypium hirsutum
  Clone ID: LIB3165-002-Q1-K1-A4
cgtggagagccttttttttgtgtagcgattctcagttagtcttttctttaagcttacagcttctctccagagttttataatgggtaaggagaaggttcacatcaaccttgttgtcattggccatgtcgactctggcaagtcgaccactactggtcatttgatctacaagctaggtggtattgacaagcgtgtgattgagaggttcgagaaggaggctgctgaaatgaacaaaaggtcattcaagtatgcttgggtgcttgacaagcttaaggctgagcgtgaacgtggtatcaccattgatattgccctgtggaagtttgagaccaccaaatactattgcaccgttattgatgcacctggacaccgtgactttatcaagaacatgattaccggtacctcacaggctgact

SEQ ID NO: 36242 - DNA, 414 bp, Gossypium hirsutum
  Clone ID: LIB3165-002-Q1-K1-A5
atttatttgcaagaaacgaaggttgtgatttagttagaataagaaactatggccaaagacggacccaactgggatggattgctgaagtggagcattgctaactctgatggaactcgacctactcgtaatttaagtgaggaagataaaagatggtttatggaagcaatgcaatcgcagaccgttgatgtgattaagcgaatgaaagagataactatggttatgcaaactccagagcaggttttggaagctcaaggagttacagctgctgatatcgaagatatgttggatgagttgcaagagcacgttgagtctattgacatggcaaatgatctacactcaattggtggtttagtccctctccttggttatctgaagaattcacatgctaatattcgagccaaagctgcagaagtc

SEQ ID NO: 36243 - DNA, 352 bp, Gossypium hirsutum
  Clone ID: LIB3165-002-Q1-K1-A7
cccacgcgtccgaaagacatcaatgttttggtggtgggttctaccggttatattgggaaatttgtggtgaaagagttgatcaatagagggtttaatgttatagtcattgctagggaaagaagtgggattagaggcaaaaacagcaaggaagatactttgagtgatttaaatggagctaatgtatgtttctctgatgtcaccaatttagacatttttgagaaatctgcgaaaaatttatggtttaccattgacgttgctgactcttgtcttgctagccgtactggtggtgtttatgattcatggaaaattgattatgaagctgcaaagaacagccttgttgctggtaagaact

SEQ ID NO: 36244 - DNA, 415 bp, Gossypium hirsutum
  Clone ID: LIB3165-002-Q1-K1-A8
cccacgcgtccgctcttctcagtccctctgcagcaatttctcttcgactcaagttgaatcgttcaagtgccgtatctgcaaatacaccctccaaaatttgttgtacttttcctggaaatggaagatgtcaaaggttaagtttcaagaccaaagctgcgggttcagttgaaggaaatgtactggacaaagaatcggctagtatcagtgacaagatagattatggagttgttggtattcaccatgttggaattctatgtgaaaaccttgaaagatcgcttgaattttatcagaatattttaggtcttgaaataaatgaggctaggccacatgataagcttccatacagaggtgcttggttgtgggtgggttctgagatgatacatttgatggaacttccaaatccagaccccttaat

SEQ ID NO: 36245 - DNA, 396 bp, Gossypium hirsutum
  Clone ID: LIB3165-002-Q1-K1-A9
gtcaaagggtgttactccaaaattcagctaggctccttttggacccaggctgtctgaattacttggcgttcatgttgacgaggctgatgactgcattggtccacaagtagaaaagttagttgctgcacttcctgaacgtggtgttcttcttcttgaaaatgttagattctacaaggaagaggaaaagaatgaacctgtatttgcagagaagcttgcttcgttagctgatctctttgtcaatgatgcatttgggactgcacatcgagcacatgcatcaacagaaggtgttacaaaattcttgaaaccatcagctgctggtttgcttttacagaaggaactagactaccttgttggtgctgtttcaagccccaaaaggacttttgctgccattgtggg

SEQ ID NO: 36246 - DNA, 382 bp, Gossypium hirsutum
  Clone ID: LIB3165-002-Q1-K1-B10
caagaacttggctctgcatttcttctcgcttttccttgtaaaacaaaacaaagcattcggggaaggctaaacagtcggaaaaggatacatcaggatccaagattgagaaaaaagaggcaccctctttcaatttcatactccaatataatcccccaccccccttccccacccaccctttttttctctgatacttcaccatctccattttcctttttgtctacttctgcatcctcataattgcgctcaatcaactatgagaacagatatgagaaaaaactccaagtcttcgtggcctaaagtaatcgctcgaaaatggctgaatataccgagtggagctgacgagtttcagtccgattacgccgtaaacggcgaaactggtgac

SEQ ID NO: 36247 - DNA, 404 bp, Gossypium hirsutum
  Clone ID: LIB3165-002-Q1-K1-B11
gaaaaatcatacgatcaaagatcgtctttctcgtctggatttctccgattatcatacataaaactcttcgattaagtgatcactgggttcgattttgttagacaagatcggccgattaggatttcaggggattagagaagatggagtctcacgatgagacagggtgccaagccccagaaggccccattctttgtatcaacaactgtggcttcttcggcagtgcagctaccatgaatatgtgctccaagtgtcacaaagcgatgatcctgaagcaggaacaggcgcaacttgcagcatcatcaatcggaagcatcgtgaatggcagctcaactgggaacggtaaggaaccagccgtggctactgctttggatgtacaatctggaaacgccgacaccaaaatggtc

SEQ ID NO: 36248 - DNA, 415 bp, Gossypium hirsutum
  Clone ID: LIB3165-002-Q1-K1-B12
ctttggtttacttttcaagggtttctctcttcaaaaaaaccctcgagaaatctatgcgcttaacgcttacttttttattcattcgaggggttcttttccttctcttcttcttgttgttttagagatgggtttggtgtctgttttttgggagattttaaagaaacccacaattggagatgtggtgagggagttgctgatttttatagctcctttatgggttgctgtaattgttggggttttagttggttgggcatggcagccgaagtgggcaaatataggcagggagatgttcatggattgttctggttctaagaattcggctcctgcagaatcttctgagtcttcttccagcggttttggttcccttccgagcttgaatttgatcaagtttcagttgtcgagtgctatctcttgg

SEQ ID NO: 36249 - DNA, 415 bp, Gossypium hirsutum
  Clone ID: LIB3165-002-Q1-K1-B4
ctaccttaacacaagttacaaactcaaaaaccccaagttctcactttcaaaaaacttcccacattcaccatgtctgacaggtgcggcaactgtgactgcgctgaccgcagccaatgcacgaagggaaacagcaacaccatgatcattgagactgagaagagctacatcaacactgctgtgatggatgctccagctgagaacgatggcaagtgcaagtgcggtactggctgcagctgcacagactgcacctgtggccactaagccaacatacaatggtcatgcttcaggtcatggcatatatagggatctaaataatgaatttaaggttgaataatttgtctgttgtagtttgtgtggtgacttatatctgtcagttaacccttgtatcctttactatgatgtaatggctatgctt

SEQ ID NO: 36250 - DNA, 411 bp, Gossypium hirsutum
  Clone ID: LIB3165-002-Q1-K1-B5
ctcaaaagagtctgtcatttcccttacttcctcaaaccagaagccatggccagcatgataatggcttcctcaaagcctgtaatctccattgctgcttcatcatccttcttttccaaacccaaactcaaacaaatcccacaactttccctcccaaaactccccaccccaaagttcttgaaaacccaacaaatcccctcactctcctccaccactctcaaatctatctccctcttcacagtcaccactttatcctttgccccaccttctcttgctgcagaaatagaaaaggccgctcttttcgatttcaacttaaccctccccatcatgatggtccagttcttgttcctcatgtttgctcttgacaaggtctactttaccccactcgggaaattcatggatgagagagatgct

SEQ ID NO: 36251 - DNA, 396 bp, Gossypium hirsutum
  Clone ID: LIB3165-002-Q1-K1-B6
ggcaaaaaagccatgtcaaagctggtggtgttgcagccaacaaagcagcctcccatctccctcctctcttcctctctttcccacttcaatggcaccaagctctgccaaatccagtacaaaagaaaggtatatcagccaaaaggtgcattgcatgttgcagcatccagcaccaagaagattctcataatgggtggcactaggttcattggtgtgtttttatcaagactccttgtaaaagagggtcatcaggttactttgtttactagaggtaaagcaccagttactcaacaattgcctggtgaatcagacagtgactacgctgagtttaaatccaagattttgcatttgaaaggagatagaatggacttcgattttgtgaaatccagtctttctgca

SEQ ID NO: 36252 - DNA, 405 bp, Gossypium hirsutum
  Clone ID: LIB3165-002-Q1-K1-B7
ctcttgggctcttgttacttaacctagggctgctctttattttccttttctctctgttcttttgtccctttgctttacttctttttgcttccatgtcgtttagaggattcagtcggccaaatgctacatcaggcatgggcgttgctgatcagaccaaggatactttcttggagctgaaaaggaagaaagtttatcggtatgtgatatataggatcgatgagaagaaaagggaggttgtggttgagaaaactggtgcccctgctgagacctatgatgacttcgctgcatctctgcctgaaactgattgccgatatgccgtctacgactttgattttgttacttctgagaattgtcaaaagagcaagattttcttcattgcatggtgcccttcatcctctcgaatcc

SEQ ID NO: 36253 - DNA, 401 bp, Gossypium hirsutum
  Clone ID: LIB3165-002-Q1-K1-B8
cggacgcgtgggtgagaactgagcctctgcttcatgtctttcttgtttcatttccaggccaaggccatgtaaaccctcttcttagattcggcaagcgcctcgcttccaagggtttgcttgtcacactatctacacccaaaggcttcggcaaacagatggctaaagccaacaacatcactgacgaccagcttatccctgtgggcgatggctttctccgatttgaatcgttccaggatggttgggacgacgacgacccgagacgcgcacacctcgaccaatacatgcaccaactggagctcgcaagcaaaccagcgatttcagcgatgataaagagatacgccgagcaaaaccgccccgtttcttgcttcatcaacaaccctttcattccttgggcatctgat

SEQ ID NO: 36254 - DNA, 372 bp, Gossypium hirsutum
  Clone ID: LIB3165-002-Q1-K1-B9
gcggatgcgggattaacatgttggtttcacccgaggcacgagtcgttcgttgttccgagtgccacacccttaccaatcttgtcccaatgaatgctcgaccgggccgaaccaggtataatgggccgccgagaatgcatgaaaatccatacgggaacggcccaagcccgcaacatccacaatatccacaaccgcgaccatccttatctccagttccgatttacgggagaaaacgagcacttctttgtggtgtgaattaccatggaaagagttataaactcaaaggaagtatcaatgatgtcaagagtatgaagtaccttcttgtggagacattaggatttcccaatgattccattctaatgctcacagaaaatg

SEQ ID NO: 36255 - DNA, 402 bp, Gossypium hirsutum
  Clone ID: LIB3165-002-Q1-K1-C1
aaaatcagttgcttcacaatggcctctacaaccatggctctttcttccccatcattcgccggtaaggcagtgaagttctccccttccacccctgaaatccggggaactggccgtgtttccatgaggaaaaccaccaagcctgttccttctggtagcccatggtacggtcctgaccgagttttgtacttgggtccactttccggtgagccaccatcttacttgaccggtgagttccctggtgactatggttgggacactgctggactctcagctgatcccgagacctttgctaggaaccgtgagctcgaagtcattcactgcagatgggccatgttgggagctcttgggtgtgttttccctgagctgttggctaggaacggtgtcaagttcggtgaagctgta

SEQ ID NO: 36256 - DNA, 404 bp, Gossypium hirsutum
  Clone ID: LIB3165-002-Q1-K1-C10
cccacgcgtccgcccacgcgtccgcccacgcgtccggaacatagtccctggtatcaaggttgacaagggtcttgttccactggctggttcaaacaacgagtcatggtgccaaggtcttgatggcctcgctccacgttcagctgcatactaccaacaaggagctcgttttgcaaaatggcgtactgtggtaagcattcccaatggaccaaccgaacttgctgtgaaggaagcagcctggggacttgctcgctatgccgccatctctcaggacaatggattggttccaattgttgagccagagatcttgcttgatggtgatcacggaattgacaggactttcgaagtagccaaaaaggtatgggctgaggttttcttctatcttgcccagaacaatgtgatgtttc

SEQ ID NO: 36257 - DNA, 399 bp, Gossypium hirsutum
  Clone ID: LIB3165-002-Q1-K1-C11
gtttcaatggcaaccctcaaagttccagttcacgttccttctccttctgaggatgctgagcaacttcggaaagcttttgaaggctggggtacgaacgagcaattgattatcgacatattggctcacaggaatgcagcacagcgcaattcaattcggaaagtttatggtgaagcttatggggaagatcttctcaagtgtttggagaaggaacttacaagtgatttcgagcgggctgtgctgctttttacgttggaccctgcagagcgagatgctcatctggctaatgaagctacaaagaagttcacatcaagcaattggattctcatggagatagcttgcagtaggtcttcgcatgaactactcaatgtgaaaaaggcgtatcatgctcgttataagaaa

SEQ ID NO: 36258 - DNA, 406 bp, Gossypium hirsutum
  Clone ID: LIB3165-002-Q1-K1-C12
cccacgcgtccggcttccgctactctcctcaagtcttcacctattatcgacaagtccgagtggattaagggccaaaacctccgccacccttcggtttgttttgtacggtcacaccctacatcggccgcctttgccgtccgtgctagttcatatgccgatgagcttgttaagaccgcgaaaactgttgcatctccaggtcgtggtattttggccatggatgaatcaaatgctacatgtgggaaacggcttgcctcgattggtctcgagaataccgaggcaaaccggcaagcttaccgtacccttctcgtgtctgcccctggcctcggtgactacatctcgggagctatccttttcgaggagactctctaccaatctaccatcgatgggaaaaagatggtcgatgttc

SEQ ID NO: 36259 - DNA, 360 bp, Gossypium hirsutum
  Clone ID: LIB3165-002-Q1-K1-C2
gtggagttcttttttgatcgtggggagctgcttggaggtcttatgaaaggtgataaattgactagtggaactgaccaagcggctttgagctgcccattcttgaggaacacagggtagcctagcgttgatgggtatgcatgaattgcagcgtttagctttgatgggaatgcatgaatttagtgtttgagaaataaaactgatggatcattacataatatagaatagtgatcttgcatttacttctgctgattcacttatgcctgccatctatatgtatctgtagaaattgagatgtacaagcacaagagcataacatggcctggttgtatttttcaggacgaatatagttttggtttctac

SEQ ID NO: 36260 - DNA, 396 bp, Gossypium hirsutum
  Clone ID: LIB3165-002-Q1-K1-C3
gccacgcgtccgacctacgctatcactaaaacaactctgtcttctttgttttgcaataatgcctaacaatgtcggtctaacttcaagctgcacataccctgatgcaaccaatcaatggtgctgcaccatcaaggaccaatgtgctgctcatgttctcccaaagcgtatctaaagccttctgtttggagcctgttaggtgctaagctcacctgctctttgcaaactgacctcaaggacttggctcagacgtgtgtcgatgctaccaagctagctggtttagctcttgctacatgtgctcttgatgtctccacagcaagcactggatgagttccaaaacggcttacctacgatgaaattcaaagcaagacatacatggaagtttaatgaacatgaact

SEQ ID NO: 36261 - DNA, 392 bp, Gossypium hirsutum
  Clone ID: LIB3165-002-Q1-K1-C6
gggttttaaattttgccttctttcagagcttccattgacgagcagctaaatcaacaatgggtcactctaacgtatggaactctcacccgaaaacctacggccctggatctcgcgcctgccgtgtgtgcggcaacccccatgccattattaggaagtatgggctcatgtgttgcagacagtgcttccgtagcaatgccaaggaaatcggattcatcaagtaccgctgaagaatttatatggtctgaattaggaaggactttgtttaagcacgaatcattggtgtggagttttctaatttatcggtactagaagacaacgttttggtttttggttaatttagtatgaacttgaactaaaaatactttctcctttctcaatcaagtaatcatatt

SEQ ID NO: 36262 - DNA, 358 bp, Gossypium hirsutum
  Clone ID: LIB3165-002-Q1-K1-C7
aaaacacccagagtctcagatcaccctgttctttaaatcaagatgcagtcaaccaacggttctgatctgagctcaaagcaccaaaaacagcagcccccaccgccgccgcagccacagcagcctcaatggatgccgaaccaatggatgggagctatgcaatacccggcggctgctatggcaatgatgcaacaacaacagatgatgatgatgtatcctcctcatcattacatggcttataataaccctcattttcattatcaacaacagtatcaacaacaacagttgcataaacaacaacaaggatctaattcagatgaggttaaaacgatctgggttggtgaccttcttcattggatgg

SEQ ID NO: 36263 - DNA, 368 bp, Gossypium hirsutum
  Clone ID: LIB3165-002-Q1-K1-C8
cccacgcgtccgattttgttttctctccctccaattaagatgcagatcttcgttaagaccctgaccggcaagaccatcaccctcgaagtcgagagttccgacacgatcgacaacgttaaggcgaaaatccaagacaaggaagggatcccaccagaccaacaacgtctgatcttcgccggaaaacagctcgaagatggccggaccttggccgattacaacatccagaaggagtccaccctccatctcgtcctccgtctacgtggtggcatgcagatcttcgtcaaaaccctgaccggcaagaccataactttggaagtcgaaagctctgacaccattgacaacgtcaaggcaaagatccaagacaagga

SEQ ID NO: 36264 - DNA, 415 bp, Gossypium hirsutum
  Clone ID: LIB3165-002-Q1-K1-D1
gttagctttagcatacactactagtacccactactagcaatggcttcctcaatgatctcatcggctaccattgccactgcctctccggcacaggctaacatggtcacccctttcaccggcctcaagtctgcctctgctttcccagtcaccaggaaggccaacaacgacattacttctctcgcaagcaatggcggcagagtgcaatgcatgcaggtgtggcctcctactggaaagaagaagttcgagactctctcatacctccccgatcttacacccgtgcagttggctaaggaagtagattaccttcttcgctcaaaatgggttccttgcttggagttcgaattggaggagggattcgtgcaccgtaagtactcgagcttacccacgtactacgatggacgctactggaccatgt

SEQ ID NO: 36265 - DNA, 397 bp, Gossypium hirsutum
  Clone ID: LIB3165-002-Q1-K1-D10
ctattacaagtggctgttgaagtctttgttagttgccgaggcatatctcggtcgactcaactccactcagtccgatccatggcgtctcttcaccccacgatatctcctcaaagcctcctttctttaacaaaacctcgaaaacccatttcgaggcacctctcagcttcctcattaaccacctcaaaactgcccgagggccttgcgttctcgggaaccaaacagaaaaacaaaagggaaaactcggtggtggtggtgaagtcattagccgaggagcttgacgtgataccagttcaaagtgaggatgttacagatatacaagaaggagttgcggtgagtcaggcgccgagagaatcgtcaggaggagagttagtgactcaagtaggtgggtttagcaatg

SEQ ID NO: 36266 - DNA, 408 bp, Gossypium hirsutum
  Clone ID: LIB3165-002-Q1-K1-D11
cccacgcgtccgcccacgcgtccgcccacgcgttcggccacccaacaatatgggaggaatgacaccgaatcaaggatggtccggtaacatgcctggaaatgctccaaacttccaaactggccccaactatggaaacgctcctggaaatgcgcagaacttccaacctggtcctggtcctaactatggaaacacaccttaccaaggtgctacacccaatgctcaatatcaccagaataactatcctccaaatgttggtggaggaaacatgcctggtgggaactaccaatcttaaatctttgttctaatatgaattcagagaccattgtagcttttaggcattgttgtagataaagataatatgcctagacttatggttattggctactaaagaattgctattgaatatgt

SEQ ID NO: 36267 - DNA, 403 bp, Gossypium hirsutum
  Clone ID: LIB3165-002-Q1-K1-D12
gcagcatccgccaagaaagtcccacccacgtcggagcctactcatcatagacttataattttctcttcttcttttggtaaaaaatctaaaagaaagaaagggatatggaagggaactctggcggcggcggcggagcagacagaggaggaggcggcggcggagaaagaggaggaaacgatgtggagctggtttgcaaaacacttcaggtagaacacaagctgttctacttcgatctcaaggagaacccacgcgggcgttatcttaaaatctcggaaaagacatcggctaccaggtcaaccatcatcgtcccttcttccggcatctcctggttcctcgatcttttcaattactacgtcaactccgacgaccacgacctcttcagcaaggaattgcagcttgacac

SEQ ID NO: 36268 - DNA, 408 bp, Gossypium hirsutum
  Clone ID: LIB3165-002-Q1-K1-D2
cccacgcgtccgaagaaataaaaacagtttcatttccattctaagtttgtgtttttgatttgccttttgtgggtttttttttataaaaaagttcagcaaaaatgtttattgagaattttaaggtggagagccccaatgtgaagtacacagagaatgaaattcagtctgtttacaactatgaaactacagagcttgttcatgagaacaaaaatggaacctatcaatgggttgttaaacccaaaactgtcaaatatgaattcaagactgatatccatgtccctaaattgggggtgatgcttgtgggatggggaggaaacaatggttcaaccctcaccggtggtgttatagctaacaaagaaggtatctcttgggctactaaggacaaggtacaacaagctaattactttg

SEQ ID NO: 36269 - DNA, 413 bp, Gossypium hirsutum
  Clone ID: LIB3165-002-Q1-K1-D3
ctcttctctgcccttcgtagaataatactataaaaacctcattaaccctttatactcaaaagtctcaaacttttttttctctctctgtcgctgactgatcatcaaagttgaccatgaagaagctctaccgcagaggcacggttcatccatcacctctgagcacaaccgatcatctgtctttccttccggccaccatcttgaccctcgtggctgctctttccccggaagacagggaagtcttggcctatctcatctcttgtgctaacaacgatttcagcaacttctcaacccaccggaaaaacacccagaaacacccgactaaaagaagcatcagcttcagcagcggcagcgatcatgaccatccacctctttttacctgtgattgtttcaggtgctatatgagctactgggtc

SEQ ID NO: 36270 - DNA, 408 bp, Gossypium hirsutum
  unsure (1)..(408): unsure at all n locations; Clone ID: LIB3165-002-Q1-K1-D4
cccacgcgtccgcccacgcgtncgaaagagcttcagctttagctgccttatcatctgcatttaatccatcatcagctagcaaagcctctactccaaagccttccagcactagtcagggatcacaaagagcagcagctgtcgctgctctttcctcggttcttactgctgaaaagaagaaacaatcacctgatgcatcccctataaaatccactagcagcactcctgcagtaaccagcccgcctcctgaagcaaagagtgaagtggacccttctgaactagcagattctcaagaggttcctgaagccaaggagacaggtgtagtatctgaaaccagtggggaggattcagaaccaaagcaagagagagagcangatgagaatgggaatggaagcactcaaagtactttca

SEQ ID NO: 36271 - DNA, 389 bp, Gossypium hirsutum
  unsure (1)..(389): unsure at all n locations; Clone ID: LIB3165-002-Q1-K1-D5
gtgggcttgttctaacgtctcatttacttgtcttacttaaaggaaagatattttcaagggatcgggtactttcacgagatgaggtactccatatcaatcttcaaatttgacttcgccaatgcaagggcaggaaagggagtacaaactagacgatcttgatatcaaagaccacgaaattgacatatatcttgatctacatacaatcaccaatacatcaccgtacacagagctggacaccatctcacttgccaaagctagaggtctctttcatcatctatgtcttctgcacatgtgtgtggtaccaaagagtcatgtgaggcctgcaatctnatgaattctgacccagcaccactttcttgccgagcatatattgggacttgacccttaca

SEQ ID NO: 36272 - DNA, 405 bp, Gossypium hirsutum
  Clone ID: LIB3165-002-Q1-K1-D6
ttagctatagcatacactactagtacccactactagcaatggcttcctcaatgatctcatcggctaccattgccactgcctctccggcacaggctaacatggtcgctcctttcaccggtctcaagtctgcctctgctttcccagtcaccaggaaggccaacaacgacattacttctctcgcaagcaatggcggtagagtgcaatgcatgcaggtgtggcctcctactgggaagaagaagtttgagactctctcatacctccccgatcttacacccgtgcagttggctaaggaagtagattaccttcttcgctcaaaatgggttccttgcttggaattcgaattggaggagggattcgtgcaccgtaagtactcgagcttacccacgtactacgatggacgctact

SEQ ID NO: 36273 - DNA, 343 bp, Gossypium hirsutum
  Clone ID: LIB3165-002-Q1-K1-D7
aaaagctaaaacaacaacagcagcagcagcagctgctgagctgagttgagcttagctactcctttcttttcccctttttttcctctctttctctttgtctccaaacagtcaaatgtcagctgcctatttccctcatcttcctcttcctcttcctccattttgtttcctcttctaaccgtcatctctcacctcttttaacaagggaaaacagaaaccctaactctaacgcagagcatcaagcggcgccggcagctcagccatgaagaagaacattctcattttggcgacatccttgcttttgctctttaatttcttgctctctttcgccatcgaagatgacatc

SEQ ID NO: 36274 - DNA, 408 bp, Gossypium hirsutum
  Clone ID: LIB3165-002-Q1-K1-D8
cttgcttgggtcgaatagtacacgacagcgacgccgagtcgaagctggacgacgacgtttccaccatattcaactctctcaacttacaaggcagcatcgaaaacggcgacgtttccggcatagccagtaaagatttcggcgggctttattcggttaagcccttgtatctaattagaccatcgggagccgaggatatatctcgggtcgttaaggccgccgccgggactccccacctgacggttgcggctaggggtaacggccactcaatcaacggtcaggcgatggccgacggtggttacgtgatagacatgcgttccactggggaaaaccatttcaagctcttgaccgtcaatggctccccttgcatcgacgtctccggcggggcattatgggaagacgtcttgagac

SEQ ID NO: 36275 - DNA, 413 bp, Gossypium hirsutum
  unsure (1)..(413): unsure at all n locations; Clone ID: LIB3165-002-Q1-K1-E1
cccacgcgtccgcccacgcgtccgcccacgcgtncggcctactaccagcagggtgctcgtttcgccaaatggcgtactgttgtgagcattccaaatggtccatctgccttggcagtgaaagaagcagcttggggacttgctcgctatgccgccatttctcaagacagtggactggtcccgattgtggagccggaaatcttgcttgatggtgaccatggaattgataggactttcgaagtagcgcagaaggtttgggctgaggttttcttctaccttgctgagaacaatgtcatgtttgagggcatccttctcaagcccagcatggtcactcctggtgctgaatgcaaagacaaggccaccccacagcaagttgctgattacaccctcaagctcctccacaggagaatcccccc

SEQ ID NO: 36276 - DNA, 408 bp, Gossypium hirsutum
  Clone ID: LIB3165-002-Q1-K1-E10
ctcggctttgttgcaaaaaatcaatctgtcatggcaaccatctcggctaccaccacccctgcagctcttgttcacaagacattgcccaggattgcatccccagtccccattgggtcgccaacaatgggaaagagggggaaggtgatgatgatgtgtagcatggagaagaagagtgagaatgggtcaaacatggggatgagtgcatcattgctggcagcagcctgtgcagcaaccatgtcaagcccagccattgctctggtggacgagagaatgtccactgaaggaacaggacttccctttggtttgagcaacaacctcctcgggtggatcctgtttggtgtgttcggcctgatctgggctctttacttcatctatacttcctccctggaagaggatgaggagtctggg

SEQ ID NO: 36277 - DNA, 407 bp, Gossypium hirsutum
  Clone ID: LIB3165-002-Q1-K1-E11
cccacgcgtccgctccaacctaagcgcttaagagcgaaaagttcttatcctcatcccccctttcttccctcctttcttaggtggttgacaagccaagaccaagttctctactttaaacgcctaaaaaatccatcacccatttctactttgaaatggcagcgtccttttcttccactacccttttcaggcccaatcttaatcctcccaagtctttcctctctcattcagattgtgcccagaagggattcggtcgcgtgaagtgtcatttcatcaatgttagtgcgctctcgtggagctcggctgcgaactacgccagtattcgtcacgtcgccgttaaatcatccggcaaacacgtcgttgttaaacatttgctacgtaagagagttggactcgtgaagtgcgcaact

SEQ ID NO: 36278 - DNA, 392 bp, Gossypium hirsutum
  Clone ID: LIB3165-002-Q1-K1-E2
ggaggtggaagtggaagtggaagtggtagcttaaacattttattttacttcagatctcagctgaagcccttttcctttcccttaaacatcattttttttatttttttatttatttctcatcctattacatggcttccatccgtcggactctctcaccggcatttcacggccgttccacccagaacggcgctgctgtgttctcctcttctccctctaataagcttttacataaacatttcccctcttctacttcctcaacgctcctcaatttagtttaccgccgagggtggcgccggtcttttcgccgctgtctcttcttttttctaataggggtgctttttggaattactccggttggacaaatggatgccgatattcgacccaaggatttc

SEQ ID NO: 36279 - DNA, 412 bp, Gossypium hirsutum
  Clone ID: LIB3165-002-Q1-K1-E3
aacgaataacatctggaccgccatggaagcgaaccatgctaaacaaagccacaacggcaattcaaccttcgatgatcattcaatcctccactctaatctctcagttgataccgcccttccttttccccttatggtccctcgcgtcatcgccttgtgcaaggatctgtttcggaaatgggctaagttgaacgattcttgcttctccgtcgacactgtatcaagcggcatcacgaatcttctgctgaaggtttctgtcaaggaagaaaatggagaatatgtgtctgtaacagttagactgtatggacccaacactgaatatgtcatcaatcgggaacgtgagttacaggcgatcaaatacctctcggctgcaggatttggtgccaagttgcttggtgtatttggaaatgggatg

SEQ ID NO: 36280 - DNA, 375 bp, Gossypium hirsutum
  unsure (1)..(375): unsure at all n locations; Clone ID: LIB3165-002-Q1-K1-E4
aagggcttcactccacaaagctctttgctttatccccttccaaagatggaccgcttctctcttctcttcctcctcctttcctccgtcgntgcttcggccgtcgtctccgacgttaatagcgatgacgatcctctcatccgtcaagttgtttccgatggtggtgtcgaggaggactccgatgaccatctccttaatgcggagcaccacttcacgctgttcaaatccaagtatgggaaaacctacgcatcccaggaggagcacgattaccgactgggagtcttcaaggctaacctgcgtcgggccaagcgtcatcaggtcctggaccccagtggcgtcccatgcgtcacaaagttttccgatttaactctatcggag

SEQ ID NO: 36281 - DNA, 409 bp, Gossypium hirsutum
  Clone ID: LIB3165-002-Q1-K1-E5
cggatccttgcatcttccgaagaaatgaatgcgtctctgagaggaagacacgcaaactgcaagagcactgccgccgattatgcagccgtcaacgccggcgatgtcaaactacgcgcctccatgactgacgccaggattgtcaacggtcccagcttgaacggtttaacttttgccattaaaaaacccggtttctaccgttacgtcccccaaaagttaatgaacacatttaggtttgcgaagaatccattgaagctaagttacggtcgcaagagagaggacaaacggacggtggtcgacggggctctggtgttcaattccggtagccaggtgtcggcttcttacatgattggtacgaggaactgtaagctcaagtatagttacttgcatggtggtgttacgacattggagc

SEQ ID NO: 36282 - DNA, 410 bp, Gossypium hirsutum
  Clone ID: LIB3165-002-Q1-K1-E7
aagcaaagcaaaaggcaaaaaagccatgtcaaagctggtggtgttgcagccaacaaagcagcctcccatctccctcctctcttcctctctttcccacttcaatggcaccaagctctgccaaatccagtacaaaagaaaggtatatcagccaaaaggtgcattgcatgttgcagcatccagcaccaagaagattctcataatgggtggcactaggttcattggtgtgtttttatcaagactccttgtaaaagagggtcatcaggttactttgtttactagaggtaaagcaccagttactcaacaattgcctggtgaatcagacagtgactacgctgagtttaaatccaagattttgcatttgaaaggagatagaatggacttcgattttgtgaaatccagtctttctgcag

SEQ ID NO: 36283 - DNA, 411 bp, Gossypium hirsutum
  Clone ID: LIB3165-002-Q1-K1-E8
cccacgcgtccgcaaagcccacactctcaaattcagataacaatttcacagttgttttcttcactctctctctcagccatggctgcagccatctccaccgtcgccgccgctgccgccgccaaccgagctctgggagtgtcagtcccaacctcagctttcatggggaagaaagtgagctcgagattcaacaacaccaggcaggttccttcgggaagttttaaggtgatggcggccgaaaaagagatagacgaagagacacagaccgaaaaggaccgatggaaagggttggcttacgatatttcggacgaccaacaagacattactcgagggaaagggatggtggattccttgttccaagctcccatgaatgatggaactcactatgctgtcatgagttcctatgaatacatc

SEQ ID NO: 36284 - DNA, 404 bp, Gossypium hirsutum
  Clone ID: LIB3165-002-Q1-K1-F1
ttgaaagactgcaatatcaagatagcttttggccggttctcaccaaattccaaaggctaccgtgatttggacctctttattcagcaaaaggatggcaaaaagtttgtggatcctgagaagcaaaatgggctatgctctcgtttgaaggtggaaatgcttcacccattgcgtttcatcatcgcaaaccgggggcctgatacagaacttctggttgctaatccagttgagttatctggaaaggggagaccaagagttttctatgatgttacactagctttaaaggctcttggaatttgcatattttcggctgaaattggaagatattcgagttcagatcgagaatgggaagtctacagattccttttggatgagaactgcggattccaattattgagtacgttagc

SEQ ID NO: 36285 - DNA, 405 bp, Gossypium hirsutum
  Clone ID: LIB3165-002-Q1-K1-F10
cccacgcgtccggccggagaaccagccaagttgatcaggcaaaggtaccgtgaggccgccgacattatcaagaaagggaaaatgtgttcctctttatcaacgatctcgacgctggagccggtcgtatgggaggaaccacacaatacacagtgaacaaccaaatggtgaacgccacactcatgaacatcgctgataaccccaccaacgttcagctccccggtatgtacaacaaggaagagaaccctcgtgttccgatcattgtcaccggtaacgatttctcgacgctgtacgcgccgctcatccgtgacggtcgtatggagaagttttactgggcacccaccagggaagataggatcggtgtttgcacaggtattttcaggaccgacaatgttcccgttgatgaca

SEQ ID NO: 36286 - DNA, 407 bp, Gossypium hirsutum
  unsure (1)..(407): unsure at all n locations; Clone ID: LIB3165-002-Q1-K1-F11
cccacgcgtccgcccacgcgtccgcccacgcgtccgcaaaattggaggtatggggcaaatgaagaagtttgggtttgtgttgttggtgttaagtgcgtcagtagtagagcaaatagaggggaaagggtatgagaagccgctcaactgtggccaccttgaatgtgctccatacacacttattcatagccagcctgaattcgagattagaagttattcaaaggctacgtgggtggctactacccccatctcctctccctcctacacatttgctgtttcaattggcttcaaaattctctttgcttacatccggggcaacaatgatgcagcagtgaaaatgaatatgacagcaccagttttggttaatatacattcaaggacaggacatctncagaattcaacctatgtag

SEQ ID NO: 36287 - DNA, 409 bp, Gossypium hirsutum
  unsure (1)..(409): unsure at all n locations; Clone ID: LIB3165-002-Q1-K1-F12
ccttaatttccatcaacctctttgtaaaaaagaaactcctttcccattcttttgctagaaaagctgttcaacttccttttatttctattttctttagtttaaaatttttaatatttccaatttttttacaaaaaaaaattatttaaaggtttaatgctgagaaataaaggcaaattgaaatggtttctctacagattctgaaccctgtcttctcttccatttcgatttcccaatcaagttgtcctggaaaatctgatttcaggaagaaaattctcaactttaatagctgtagaagcttcaggtccttgcataggcaaagatctagaatctattgtgctactcaagaaggtgacaacaaaagcaatggggaagagcctnctgagtcgctgtttatgaaggagttgaaaag

SEQ ID NO: 36288 - DNA, 383 bp, Gossypium hirsutum
  Clone ID: LIB3165-002-Q1-K1-F2
gcaagagcaacttgtttttccaaagggaaattcaataccaagtgtcaaggctgtgacattccataaaacgagtaccttcagtgttgatgttcaatattctgatgtgagtgatttgcaggccccggcaaagatcagtacatacatgattggtcctttcccaacattaagaaaaaaaccaaaattgaaggtcaaagttcgtttgaatttgcatggaattgtgtctgttgagtcagctacactcttggaagaggaagaagttgaagttccagtttcaaaagagccggcaaaagaagatgctaagatggagacagatgaaaagcctaatgatacttctgcccctggtgccaacgagacagatgttaatatgcaagatgccaagggta

SEQ ID NO: 36289 - DNA, 405 bp, Gossypium hirsutum
  Clone ID: LIB3165-002-Q1-K1-F3
gcccggccttttttcaaaatctcgtcgattaattcgtacgttcgcctcgattgaacattccggcgccgccaattttgattttcttgagtttcttcgacacacttcagatccgtttaatcgccatcagggctagtttgcttcaatttgttgtaacttgagggttgttgaaaagaaaaacaaaggtgttatctgggtgccccagatgagaagaactcatgttattgacagtagaaggaggagggttcttcagttcttcagtgtctgggtatagcaagggcttggcccttcttctcttgggtcagaaacacgaggacaagcccatgagagtttcgccgtggaatcattaccagttggtggaccaagaatctgaacctgacctgaatcaactggcttccatcaagaacc

SEQ ID NO: 36290 - DNA, 394 bp, Gossypium hirsutum
  Clone ID: LIB3165-002-Q1-K1-F4
cccacgcgtccgccttatcccagtcactgagtctcaacaccaagtcatcatcactcatggctatcgaggcttggtttatggatgaaagcaaagaagaccaaaggcttcctcatcgacgcaaccccaacgaacctgtttcgttggagcacttggcagagctgggagtgttgtattggcatttgaaccccgaggattatgagaacgatgaagagttgaagaagattagagaagccagaggttataattacatggatttgcttgatttatgccctgagaaagttgccaactatgaggagaaactgaggaacttttacaccgagcacatccatgccgacgaagagatacgctactgcttggaaggcagcgggtattttgatgttagggacaaggatga

SEQ ID NO: 36291 - DNA, 367 bp, Gossypium hirsutum
  Clone ID: LIB3165-002-Q1-K1-F5
ccgaccagacccgaaaaaatggtccagacaaaccagtctggttccggcaatgatttcaagctcgtcggattctcgaatttcgtccggtcaaatccaaaatccgatcggttcaccgtcaaacgtttccaccacatcgagttttggtgtaccgacgccactaacgtcgctcgccgtttttcatggggtctcggtatgcaatttgtagctaaatcggatttatccaccggaaatttgacccatgcttcttatctcctccgttcccgtgacctgaacttccttttcactgccccctattccccttctattgccgttgctcaaaacctctcccctcaatccaccgcttcgatcccttcttttgatcattcac

SEQ ID NO: 36292 - DNA, 368 bp, Gossypium hirsutum
  Clone ID: LIB3165-002-Q1-K1-F6
aacaaaatcaactgcttcacaatggcctctacaaccatggctctttcttccccatcattcgccggtaaggcagtgaagttctccccttccacccctgaaatccagggaactggccgtgtttccatgaggaaaaccaccaagcctgttccttctggtagcccatggtacggtcctgaccgagttttgtacttgggtccactttccggtgagccaccatcttacttgaccggtgagttccctggtgactatggttgggacactgctggactctcagctgatcccgagacctttgctaggaaccgtgagctcgaagtcattcacttgagaatggccatgttgggagctcttgggtgtgttttccctgagct

SEQ ID NO: 36293 - DNA, 406 bp, Gossypium hirsutum
  Clone ID: LIB3165-002-Q1-K1-F7
gtgacggccaaagctttcccttcctctttctctgaaattgtttcaaaaaatttccccttttcgattcaatcatgagtaacgaatatgattatctgttcaagcttctgcttatcggcgattcctccgtcggaaaatcctgcttgcttctcagatttgctgatgattcttatgtggatagctacatcagtaccatcggtgttgatttcaaaatcagaacagtggagttggacggcaagacaatcaagctgcaaatttgggatactgctggacaggagcgttttcggactattactagcagctactaccgaggagctcatgggataatagtcgtctatgatgttaccgagatggagagcttcaacaatgtcaagcagtggttgaacgagattgacagatatgctaatga

SEQ ID NO: 36294 - DNA, 408 bp, Gossypium hirsutum
  Clone ID: LIB3165-002-Q1-K1-F9
ggaacctttcttatgaaccctaaactctttaccatttgaccccccaatttctcaaaccctctaaaaaggattatcttttttttttccatggctgcattcagatgcaaaccttcggccgaaacagcctctttaacggtctctcagttcaggcattttctatctaattacatgcactatggtcgcatggctagttcctctcactgtaccaccatccgcaacaaatgggatgaccactttgtcaacactccttatcatttcacttctttcaagcccgtctcgcttcgtggcgaactcgtcgaaaagggttctcggtttttggatattaggaggaactcccacgatttaagcaaggatgtcgatagagaattgagagagaaactgggttgtaatagttttagggtattgagt

SEQ ID NO: 36295 - DNA, 389 bp, Gossypium hirsutum
  Clone ID: LIB3165-002-Q1-K1-G1
ggattcgtgcaccgtaagtactcgagcttacccacgtactacgatggacgctactggaccatgtggaagctgcccatgttcgggtgcaccgactcggctcaagtgttggaggagcttgaggaatgcaagaaggcataccccaatgcattcattagaatcattggcttcgacaacgtgcgtcaagtgcagtgcattagtttcattgcctacaagcctccaggcttctaagctttttattaactttgtctctccatttgtttgaatttgtactcagaaaaaatcatgttctttacttttgcttttccttttctttgagttattggcctttgtttctcgatttccgggttttaatcctgagaactaatgaataaaaagttggttttcttccc

SEQ ID NO: 36296 - DNA, 406 bp, Gossypium hirsutum
  Clone ID: LIB3165-002-Q1-K1-G10
cccacgcgtccgtcacacacaactcctccacttccccatcacaaaaaatatattcttcacttcacatctttttggcaatcaattttgtaagcaagtatggctaaggacgttgaggttggtggtgagttccaagccaaggactaccatgatcctccaccagctccattggtggacggggaggagttgacaaagtggtcattttatagggctgtaatagccgagtttattgccacgctcttatttttatacatcactgtgttgacagtgatcggatacaagagtcaggttgaccctgataagggcagtgacgaatgtggtggtgttggcattcttggcattgcttgggcttttggtgggatgatctttatccttgtttactgcactgctggtatctctggaggacaca

SEQ ID NO: 36297 - DNA, 332 bp, Gossypium hirsutum
  Clone ID: LIB3165-002-Q1-K1-G12
gaactatggccgagcggtgcgaagccttaggaaactcatggtggaagccctctgcgatactggcaagcaaattgtaacattttcttgaccatagggacgattgactactcgaaccgtctattggctgcttcaaaacagaaataacttgagactcgcagagccccatggggcgctgtatttgatgaagccaatgattaaaggcatccggggcgcagagctctcgacctattctcaaactctaaataagtcagaccgcgggcttggatgacattatccttccacaagatgaaaaacggcctgtgctccttcgtttgccaattaaactgtttggt

SEQ ID NO: 36298 - DNA, 398 bp, Gossypium hirsutum
  Clone ID: LIB3165-002-Q1-K1-G2
cccacgcgtccgcttcccttcttaaaccacacagataagactatactcaatcatttactacactctctgtctcaatggccaccaagacccatacggatccagagaaaccaaatgccgagggcaccgccgagaacgaagacacgagtccggtggaggaggttgccttggtggtgccggaaaccgacgaccctactctccctgtcctgacctttcgtgcctggttcctcggtttggtatcatgtgtgctcttaatctttctcaacactttcttcacttaccgtacgcagccgctcaccatctccgcaatcctcatgcaaatctcggtcttgcccattggcaagttcatggccaggactctaccaaccacccagtacagccttctcgggtggcacttcagc

SEQ ID NO: 36299 - DNA, 343 bp, Gossypium hirsutum
  Clone ID: LIB3165-002-Q1-K1-G4
gtgtaggataagtgggagctctcgggcgaaattgaaataccactacttttaacgttattttacttattccgtgaatcggaggcggggcacggcccctctttttggacccaaggccggcttcggccggccgatccgggcggaagacattgtcaggtggggagtttggctggggcggcacatctgttaaaagataacgcacgtgtcctaagatgagctcaacgagaacagaaatctcgtgtggaacacaacgggaaagctcgcttgattctgatttacaggacggatacgaaccgggaaagcgtggcctatccgacctttagaccgttcgaatttgaagctagag

SEQ ID NO: 36300 - DNA, 413 bp, Gossypium hirsutum
  Clone ID: LIB3165-002-Q1-K1-G6
gaactctgttcaatggccgtgcaggcgatggaaccgtcagtgttcttgtggcaacttttttgttcgtaattcccaacaagaagcgaaagggagagaaattgatggactggaacgaatgcaagaagctgccatggaacattattttgttactaggggctggtttcgccatagccgacggagtccagtcaagcggactcgctgatcaattatccaaaactctagattttctcgaagaggctccgtatttagctattgcccccgcggtgtgtttaatctgtgccataattaccgagtttataacatcaaatgatgctactgctacccttgtgcttccacttttgattcaaatggcaaaaaccatgcatgttcacccattactccttatggtccctggagcagtgggatcacaattt

SEQ ID NO: 36301 - DNA, 409 bp, Gossypium hirsutum
  Clone ID: LIB3165-002-Q1-K1-G7
cccacgcgtccgcccacgcgtccgatctgtccatctttcagtaagagaaaggaaatggagtttagttcagaggctaaccagcgcattgccaggctcgcagcccatctccaacctcaggttctcttctatatggaggaaagttctattttgaggcgagctgactgtagagcgaaaggagggtcaccagggttcaaagttgctatcttaggagcagctggaggcattggccagcctcttgcaatgttaatgaagatgaatcctctcgtctcggttcttcatctttacgatgttgtgaactctcctggtgtcacagctgacctcagtcacatggatactggtgctgtggttcgtggtttcctagggcagccgcagcttgagagtgcgttgaccggcatggaccttgtgatca

SEQ ID NO: 36302 - DNA, 408 bp, Gossypium hirsutum
  Clone ID: LIB3165-002-Q1-K1-G8
gcacaggcaccatcgggaagcgtctctcgagcatcaacgtcgagaacatcgagtccaatcgccaagccctccgcgagctccttttcacctctcccaacgcattatcctgcctctccggtgtcattcttttcgaggaaacactttaccagaaaacctctgacgggaaacccttcgttgaaatcctcgaagagaacaatgtcattccaggtatcaaggtcgataagggcaccgttgagatagccggcaccaatggcgagaccactactcaagggttcgactccttgggtgcgcgttgtcagcaatactataaagctggtgcgcgtttcgccaaatggcgtgcagtgctcaagatcggtcccaacgagccatccgagttggctatccagcagaacgcgcaggggttggctc

SEQ ID NO: 36303 - DNA, 402 bp, Gossypium hirsutum
  Clone ID: LIB3165-002-Q1-K1-G9
cttctccaatggcgactcagctgaagagcagctttaggtcgtctgttacaagaggactggtagtccccaggggcatttcgggatccccgtttaaagtatcttccggaaagaccaggaccccttgcttcactgtcaaagctgttcaatccgacaagtcaacatttcaagtaatccaacccatcaacggcgaccccttcattggaagcctggagactccaatcacctcaagccccttaattgcatggtacctttccaacctcccagcctataggacggcagtgaacccacttctgaggggaatcgaagtgggtctggctcacggcttcctcctggttggtccattcgtaaaggccggccctctaaggaacactgcggtggcgggtcaagctgggtccttagccg

SEQ ID NO: 36304 - DNA, 405 bp, Gossypium hirsutum
  Clone ID: LIB3165-002-Q1-K1-H10
cccacgcgtccggaaaaatggcttctgcttccgctactctcctcaagtcttcacctattatcgacaagtccgagtggattaagggtcaaaacctccgccacccttcggtttgttttgtacagtgcaaccctacatcggccgcctttaccgtccgtgctagttcatatgccgatgagcttgttaagaccgcgaaaactgttgcatctccaggtcgtggtattttggccatggatgaatcaaatgctacatgtgggaaacggcttgcctcgattggtctcgagaataccgaggcaaaccggcaagcttaccgtacccttctcgtgtctgcccctggcctcggtgactacatctcgggagctatccttttcgaggagactctctaccaatctaccatcgatgggaaaa

SEQ ID NO: 36305 - DNA, 391 bp, Gossypium hirsutum
  Clone ID: LIB3165-002-Q1-K1-H11
cccacgcgtccggctctctcttcctgtcttcgtctacttcgcctctttctctatggatccctacaagcaccgtccatcaagtgctttcaattcaccattctggactaccaattctggcgctccagtttggaataacaattcatcacttactgttggacccagaggtccgattctccttgaggactatcatctggtggaaaagcttgccaactttgacagggagcggattccagaacgtgttgtccatgctaggggagcaagcgcaaagggtttcttcgaggttacccatgacatttctcacgttacatgtgctgattttctgcgagcacctggagttcaaacccctgttatcttgagattttcaactgtcatccatgagcgtggaagccct

SEQ ID NO: 36306 - DNA, 407 bp, Gossypium hirsutum
  Clone ID: LIB3165-002-Q1-K1-H12
tccacgcgtccgcccacgcgtccggaaaaactcggcaaacgccataattaaagattttgttgttttgctctcgatctctccgcccaaatcttgtagacgccaagcagataaattttgtgattactcttttctttctcagatcccttcgaaagcgattcttcttcttctttttattctttttaaattgaattgaagttgctgattcgaaatgagtacggccgaccttctcagcatcgagcctttagagctcaagtttccttttgaactgaggaagcagatctcgtgtgctcttcaattgtcgaataaaactgataattatgtagctttcaaggtgaaaacgacaaatccaaagaagtactgcgttcgtcccaatacggggggtcgtttgcctcgatccacatgcgatg

SEQ ID NO: 36307 - DNA, 300 bp, Gossypium hirsutum
  Clone ID: LIB3165-002-Q1-K1-H2
attaaaatgagatgatgggtgttaaattgttgggtctttgatgattttgggatgggattttccttgcataaaagaactagaggggagcaaaaacaaggttgattgcccccactcttgttagggttcctttttctttttttgctttctttaattattaattactgtatttggtgagaggagaggatggatgggagacatttttgtaatatatcgtgtttgatcaatgacactctcatccttcctccttcgcatgtaattgtaatttgaaggaaatggaggttttaatttttcttttgcctt

SEQ ID NO: 36308 - DNA, 391 bp, Gossypium hirsutum
  Clone ID: LIB3165-002-Q1-K1-H3
ggaaagaatatgttagcagtttttgagaaatcgattgccaagagccccgatgctcttaaagtttctggtgattctgaagcagcttcagccctcaacaagggcttcttggctacccattttgccactctccatcctggttcagtcactgtcaatcttggttcttctggtttcatggcttactctcttgataaacaaaacccacttctccccaggctctttgcagttgtggatgacattttctgcttgtttcaaggccacattgagaatgttgctgttcttaagcaacaatatgggttgaacaaaactgcaaatgagggtatcattgttattgaagcttacaggacgcttcgagacagaggtccataccctcctgaccaggttgtaagagata

SEQ ID NO: 36309 - DNA, 374 bp, Gossypium hirsutum
  Clone ID: LIB3165-002-Q1-K1-H4
gttctttggagaagtggtcgtagttttggaggttttgattcggcaaacagggttggtgcggaggcaaggaaaggagactttaacatcttcaggaccaagtcgactctcagtaagcagaattccctattgcctacaagaaaagagaaagaaatggagactcaaagagccgaaggtgccactggccttaacgagcctgttaacaaaagtgttcctgttggaagatacttcgatgctcttagaggacctgaattagaccaagtcaaggactctgaggacattctccttccaaaagatgagatatggccttttctccttcgtttcccaattaattgctttggtatttgtcttggacttagcagccaagctgttctatg

SEQ ID NO: 36310 - DNA, 324 bp, Gossypium hirsutum
  Clone ID: LIB3165-002-Q1-K1-H5
gagaaagcaaaatcatataattggaacaacaaaaggcaaacgatagttttggaacaatctcacatcattacataaaatagaaaaagggttttctttttcaacccaatactactataatacaagggtaaaattggtaagtgcaagttccatcatcacttctagccgttggatcaaagttatcagcatttggatcagtgcatccttcgggaactggaaccccaacttgttgtgctgctttgccatagaaagttcctctgttgatagaatcttcattagcttcaccaagggcagcttcactcaagtatttgtcagccaattggactc

SEQ ID NO: 36311 - DNA, 403 bp, Gossypium hirsutum
  Clone ID: LIB3165-002-Q1-K1-H6
gcgtctgtctgttttactccacaaccactatcactaccattatggcttcggctactgtttctgtagccaaacccaaccttcagattcaggcaaaaggaaagggtgttggttttgcagatttctcaggcctacacaactcctctactagccttccctttgccaggaaaacctctgatgacttccattcactcgttgcttttcagacatctgctctaggaagcaataatggcgggtacaggaaagggatggcagaggcaaagctaaaggtggctataaatgggtttggtaggattggcaggaatttcttaagatgctggcatggccgtaaggactccccacttgatgtcattgccatcaatgacactggtggtgttaagcaggcttctcaccttctcaaatatga

SEQ ID NO: 36312 - DNA, 402 bp, Gossypium hirsutum
  Clone ID: LIB3165-002-Q1-K1-H7
cccacgcgtccgcccacgcgtccgcggacgcgtggggtttaaaggcattcttacaccctacttctcttctgtctttctctttttcagctaaatcccacttgttgaatagtagaacatggaagggaagatgagctggacggtggcggatgcggtggactacaagggtttccctgctgacaggtcgaaaaccggaggttgggttccggctgcactcattctagggattgagatctgtgagaggctttcaacaatgggaattgcagttaaccttgtgacatacttggttggtgtaatgcatttgccaagttcaacttcagccaatgttgtgacagatttcatggggacatctttcctcttgtgtttgcttggaggcttccttgctgattcattccttggcagata

SEQ ID NO: 36313 - DNA, 409 bp, Gossypium hirsutum
  Clone ID: LIB3165-002-Q1-K1-H8
aaaccaagtcaacctaaagccttaggcaccatggcaacctctgctatccaacaatctgctttcgttggccagaccgctttgaagcagtccaatgagctcttacgcaaagtcggagctttcgatggtggtcgtgttaccatgcgcagaactgtgaaaagtgcccctaccagcatctggtacggccctgaccgcccaaagtacttgggtccattctcagaccaaatcccatcatacctgacaggtgaattccctggtgactatgggtgggacactgctgggttatcagctgacccagagacatttgctaagaaccgtgagcttgaagtgatccactgcagatgggcaatgcttggtgcccttggttgtgtcttccctgaaattctttcaaagaatggagttaagttcggag

SEQ ID NO: 36314 - DNA, 344 bp, Gossypium hirsutum
  Clone ID: LIB3165-002-Q1-K1-H9
ggggaaaattaatgggttccataagccttgggggggtaaatggtcctggctgcccctaatttaaccttttggtgggggttaaaaatgaaaaagtagttaggtttttggccgccggttattccctttcttttggcttggctctttcccttcccaaggcttcttctaccaatccacaggcaaggagaaaatgactaatcccaaagataataaggttgaagaggtaaaggaaagtgaagaaatatctaagcctttgcagcggttgccgagtccgaaagaatagacagctctctgaaagagtgtgcatagaagtgctgtgacagtggacaaggtaccgacaggattgt

SEQ ID NO: 36315 - DNA, 358 bp, Gossypium hirsutum
  Clone ID: LIB3165-003-P1-K1-A1
tttaaaagaaccggttcctcaatttctctaatcctaactttcttccccatcaaacacaccttcgattttcccaaggttgtagaagatggcagaaggtgaggatattcagccacttgtttgtgacaatggaactggaatggttaaggctggatttgctggggatgatgctccccgagccgtattccctagcatcgttggtcggccacgtcacaccggtgtgatggttggcatgggccagaaagatgcatatgttggtgatgaagctcaatcaaagagaggtattctgactttgaaataccctattgagcatggtgttgcgagcaactgagatgatatggaaaagatttggcatcatacc

SEQ ID NO: 36316 - DNA, 276 bp, Gossypium hirsutum
  unsure (1)..(276): unsure at all n locations; Clone ID: LIB3165-003-P1-K1-A12
atatttagctatagcatacactactagtacccactactagcaatggcttcctgaatgatctcatcggctaccattgccactgcctctccggcacaggctaacatggtcgctcctttcaccggtctcaagtctgcctctgctttcccagtcaccaggaaggccaacaacgacattacttctctcgcaagcaatggcggtagagtgcaatgcatgcaggtgtggcctcctactgagaagaagaagtttgagactctctcatacctncccgatcttaca

SEQ ID NO: 36317 - DNA, 333 bp, Gossypium hirsutum
  Clone ID: LIB3165-003-P1-K1-A3
ccgtccggccggtcggaccacgcgtccgaacacagcaaaaaagaaaaatggctaattcagcggaggaagagaaccaacaagaagcttttggttgggctgctactgataattctggaatcctctcccctttcaatttttccagaagggaaaatggtgatgatgatgtcactttaaaaattctttactgtggagtgtgccattcagacctacatactttgagaaatgaatggggtttcaccttttaccctgttgttcctgggcatgaaatttcaggtgttgtgaccaaagtggggaagaatgtgacaaaattcaatattggcgaccgggttgggg

SEQ ID NO: 36318 - DNA, 375 bp, Gossypium hirsutum
  Clone ID: LIB3165-003-P1-K1-A4
ctgagagtctctctcagatcagaactagagtgtttacattctggtaagaggttgagttggccatggctggagcttcctccaattcactatcaatctcaccctcatccaccctcgtggatgccaaagctcctcgtcaaccaactgctgcatccccacaatgtgtcactcttcctactcttcctcccccacccgttcagtcccagagtcgtccctggaagaccactgcctactgtcgcaagattgctcgaaatgtgatggctatggccactggtgagactttggccacgcgtgaagctccaaccgaagttaccccaactgagctgacagagtttatcaacaaaatacaagaaacatgggataaagttgaggacaagt

SEQ ID NO: 36319 - DNA, 348 bp, Gossypium hirsutum
  Clone ID: LIB3165-003-P1-K1-A5
gaaaaatatgatggtcggagaaactcaccgtcttaatccgacggtccatgttccaggatggcctaacctcgacgatgatcaaacggccgagatttactctccactcaactacaatgcagccgatagtcacttcaacaacaacggcggcaacccggttcatttccatgaagcgttagcagcgttacaacgttacttgccgtcgaacgaaccggactttgtctacccagattccgatcttccggttctcgaaaacgcggattctccggtcgacgcttactcgtgcgatcatttcaggatgttcgagttcaaatccggaagtgtccacgtggccgagcccatgactggacc

SEQ ID NO: 36320 - DNA, 388 bp, Gossypium hirsutum
  unsure (1)..(388): unsure at all n locations; Clone ID: LIB3165-003-P1-K1-A6
cccacgcgtttcggagaaagcactgttttacgcaaaaccataggcctctgctttctcgtagtcatagacttcaccatgttttatgacataagtctgagtagggttaagaggtcacatcccttcgccaatccttccatcttctgcggtgatggtgccatccctgttgcatccctctggactaactgtgcgtgcaagctcatatgccgatgagcttgtcaagactgctaaagctattgcttctcctggccgtggaattttggccatggatgagtccaacgctacctgtgggaaacgtttggcctcaatcgggctagaaaacacagaggctaaccgncttgcctacaggacgttgcttgtttagctcctggccttggcaggtcatttttgt

SEQ ID NO: 36321 - DNA, 212 bp, Gossypium hirsutum
  Clone ID: LIB3165-003-P1-K1-A7
gttccatgtgaacggcacttgctcatgggttagtcgatcctaagagacgggggaagcccgtccgacagcgcgtccagcgcgagcttcgaaagggaatcgggttaaaattcctgaaccgggacgcggcggctgacggcaacgttagggagtccggagacgtcggcgggggcctcgggaagagttatcttttctgtttaacggcctgcccaccc

SEQ ID NO: 36322 - DNA, 390 bp, Gossypium hirsutum
  Clone ID: LIB3165-003-P1-K1-A9
agaagactcttttagcatttcaccgcaaagatggagataacaaatgtgagcgagtatcaagaaattgcgaagcaaaagttgccaaagatggtgtatgactactacgcatctggtgctgaggaccaatggacattgcatgagaatagatttgctttcaccaagatactgtttcgtcctcgtattctcattgatgtaaacaagatagacatgaccacaactgtgttgggtttcaagatatcaatgcctatcatgattgccccaactgccatgcaaaaaatggctcatcctgaaggggagtatgcaacagctagggctgcatctgctgctggaactatcatgacattatcctcatgggcaacttctagtgttgaggaggttgcttcgacagga

SEQ ID NO: 36323 - DNA, 398 bp, Gossypium hirsutum
  Clone ID: LIB3165-003-P1-K1-B1
agacaatagactaggacaggaggtttctctcagggtttaggtgatggcttcgaagcggatcttgaaggagctcaaggatctccagaaagatcctcctacctcttgcagcgcaagccctgttgctgaagacatgtttcattggcaagcaactattatgggtcctcctgacagtccatatgctggtggagtgtttctagtcaccattcatttccctccggactatccatttaaaccaccaaaggttgcattcaggacaaaggtctttcacccaaatattaacagcaacggtagcatttgccttgatattttgaaggagcagtggagccctgccctcaccatatccaaggtattgctatctatctgctcactcttgacggatccgaatcctgatgacccat

SEQ ID NO: 36324 - DNA, 297 bp, Gossypium hirsutum
  Clone ID: LIB3165-003-P1-K1-B11
cccacgcgtccggttttctggcaatgttagaacccactggactttcaggtttgaacccaaattttcagtcgtaagggaatgcaagaccctgttacacgcaaatgccctttctctcttcatcgcatctcagtcaccccatagccataactctctgtttctctgagctctctcacgtcatgggcgatctggtattgcagaaaatagcaatttctgggccaacgctggcctcaatgatccaacgcctatcatcttcccctgccgacttagacggcctcctttttcggccacgtcactttg

SEQ ID NO: 36325 - DNA, 285 bp, Gossypium hirsutum
  Clone ID: LIB3165-003-P1-K1-B12
cggacgcgtgggctcttttgtataactgtagcatatagtactagtaagcagtgatagcaatggcctcctccatgatctcatcggcaaccattgccaccgtgaactgctcctccccggcacaggccaacatggtggcccccttcaccggcctcaagtctgcctctgctttcccagtcactaggaaggccaacaacgacatcacttctcttgcaagcaatggtgggagagtgcaatgcatgcaggtgtggcctcctctagagaagaagaagttcgagacactctcat

SEQ ID NO: 36326 - DNA, 388 bp, Gossypium hirsutum
  Clone ID: LIB3165-003-P1-K1-B3
cccacgcgtccggtgctagatactatgtagggaatgagtacatcgacatggcagagacattgtgtcagaagcgtgctttggaagcattcaagttagatcctgaaaaatggggagtaaatgtgcagcccctttctggttctccttccaattttcaagtttacactgcactcttaaagcctcatgacagaattatggcacttgatcttccccatggtggccatctctctcatggttatcagacggacaccaaaaagatatctgctgtgtccatattttttgagacaatgccatatcggttgaatgaaaacactggctatatcgactatgatcagttggagaagagtgcaactcttttcaggccaaaattaatagttgctggtgccagtgc

SEQ ID NO: 36327 - DNA, 374 bp, Gossypium hirsutum
  Clone ID: LIB3165-003-P1-K1-B4
gttttaatagtttattattagttcatctttgtccgttggatcattcagtttgctggggagggttctttgatttgatttgatttagttactggggtattgatttgatatttttggggttttggattcaactttaaagttgaaagctttttttttttctgggaaacgtaagaagttgatctttcagtgtttgggtttaatcattgagtttctctttgggtaatgtgaaaaattttggtcaaagcacagagctggtagatgacctaaaagattatatatatatatataaagctgattgactggtagattaacaaaagcttcaccaaaggggaagaaaagaatttttttttttgggtccttagaaatttgaatttttt

SEQ ID NO: 36328 - DNA, 375 bp, Gossypium hirsutum
  Clone ID: LIB3165-003-P1-K1-B6
gtttcctttctcgattttctatttagccaaacaagatgcagatcttcgttaagactgtaaccggcaagacgatcactctcgaggtcgagagctccgatacgatcgacaacgtgaaggccaaaatccaagataaggaaggcatccctccagaccagcagcgtctgatcttcgccggaaaacagctcgaagacggccggaccttggccgattacaacatccaaaaggagtcaactctccacctcgtcctccgtctgcgcggtgggatgcaaatcttcgtgaaaaccttgactggcaagacaatcactctcgaagtcgagagctccgacacgatcgacaacgttaaagcgaagatccaagacaaggaagcattccccc

SEQ ID NO: 36329 - DNA, 390 bp, Gossypium hirsutum
  Clone ID: LIB3165-003-P1-K1-B7
gatttgcagagcacagaaagttccaagactgggccaaaccaggttcgatggggaaacaatatttcttggggttcgagaagtaccttggagggtctggtgagccggcataccctggaggaccactgtttaacccacttggttttgggaaagatgagaagtcattgaaggatttgaagctgaaagaagtgaagaatgggagattggcaatgttggcaatcttgggttacttcatacaagggctcgtgacaggtgtaggaccataccagaacctgttggatcacttggctgaccctttcaataacaatgtcttgactaacctcaagttccattagatgaaagtgcctatatttgttccatggaactaccctccccccccctccggctaaaagc

SEQ ID NO: 36330 - DNA, 136 bp, Gossypium hirsutum
  Clone ID: LIB3165-003-P1-K1-B8
cggactcgtggtcggacgcttgttcggacgcgtgggctgaaattgtatgtaggcttcagactgtgattggtttcagtaccctttatgttgtaaaacctggaccaattatcttattatatttctaaatctttctatc

SEQ ID NO: 36331 - DNA, 349 bp, Gossypium hirsutum
  Clone ID: LIB3165-003-P1-K1-C1
tcttgcaccaaccacgcatctcacaatccaatggcatgatcattcatcattattcgccgtcgcttgcgccatggtttcaaacatgatagcctaccctgcagagtggtgtgcaagagctcaaaagcacggaagatgattggaaagccttggtgtcccgtaggttaggctctcactgtactcattggtgctgccgctgttggctctaaggtttctcctgctgatgctgcctatggtgaagctgcaaatgtatttggaaagccaaaaacagacacagacttcatgccatacagtggggatggattcaagctctcgataccatcgaaatggaacccaagcaaagaggtggagt

SEQ ID NO: 36332 - DNA, 376 bp, Gossypium hirsutum
  Clone ID: LIB3165-003-P1-K1-C10
cccacgcgtccgcgatactcaacggtgttttgtgattaaaaaaactaccaagagtgtggcaaaacaagatggcttccctgcatgaaccatggctagtggagaacgggttgaaggggtctagcaaggagattcgccatggcaggactgcacacaacatgtcgtcttcgtcgttgcggaaaaaatcggacctgacgcttgtttccaaggttcggtatgcaatgcttaggcagttcctcgccaatcttcaagaggtcatattagggaccaagctcttcgttctcttcccagctattccattggccattggtgctgagtgttatggatttggaagaccctgggtgtttgcattaagtttacttggacttacaccattggc

SEQ ID NO: 36333 - DNA, 269 bp, Gossypium hirsutum
  unsure (1)..(269): unsure at all n locations; Clone ID: LIB3165-003-P1-K1-C12
cccacgcgtccgaaaccccttccatcgtttatcatggcttcctcaactgtctgccctgcagctccttggcagctatgctccagcaagagtggcatgttctgcccatcacgagcgtttcttgtgaaaccagcgaggacccatatggtcaaaaacgaaaagggaatgaggatcacatgccaggccactagcatccctgctgatagagtgccagacatgggcaagaggcagctcatgaatctgcttctgttgggggctatntcactcccctc

SEQ ID NO: 36334 - DNA, 371 bp, Gossypium hirsutum
  Clone ID: LIB3165-003-P1-K1-C3
aaacagtgaggggagtagggagtgtcgagttatcggacgacggttttttttcaacacgaaaaaaaaaatggataacttttacgcaccagggaagaaccatctcttcgttccgggtccggttaacataccggaacccgttattcgagccatgaaccggaacaacgaggattaccgttccccggctattccggcgatgacaaaaacccttctcgaagatgtcaagaagatattcaagactacgaccgggactccttttatgatcccaacaacaggaaccggtgcatgggagagtgcacttactaatacgttatcccccggtgaccgaatcgtatcgttcctcattggacaattcagtcttctttggatcgatc

SEQ ID NO: 36335 - DNA, 325 bp, Gossypium hirsutum
  unsure (1)..(325): unsure at all n locations; Clone ID: LIB3165-003-P1-K1-C4
ctcccaatactttcataacattttacgaacttcactctccagtctccaatggcgggtgccgtctccaccatcggtgctgtcaaccgagcaccgttgagtttgaatggatcaaggtgccggagcttctgctccaagctcagctttcatggggaacagcttgaagaaagtgagcgctaggttcaacaacaacggcaaggctccagtgggaagtttcatgattgtggctgccaaagaaatcgacgaagacacacagaccgaccaggaccgatggaagggtcttgcttatgatatctncgatgaccaacatgacattaccagagggaaa

SEQ ID NO: 36336 - DNA, 323 bp, Gossypium hirsutum
  unsure (1)..(323): unsure at all n locations; Clone ID: LIB3165-003-P1-K1-C5
cccacccgtccgctcatgttaaatcctctctcaattcttcttcttcttcttctgctgcgctgctaaatcatagtcattatccgcatattatgttagcccttcaaagctccgtcaacaatggcgaaaacgacccataccacgaccaacatcacgatcacgacgatcaagacggtgaacgtatcagagacatccatgctttaaccccaccacacccttccgnncgtaacgcccgtcgtcgttgggaaaccggaagcagccgtgcatcgtcatcgagcgaagtagctncgagtgaaaacttcaccaccatgagccgagaattcaat

SEQ ID NO: 36337 - DNA, 301 bp, Gossypium hirsutum
  Clone ID: LIB3165-003-P1-K1-C6
cccacgcgtccgcaaaaagaaaattggcttctgcttccgctactctcctcaagtctgcacctattaccaatctaccatcgatgggaaaaagatggtcgatgttcttgttgagcaaaagattgtccctggtatcaaagttgacaagggtttggttccactccctggttccaacaacgagtcatggtgccaaggtcttgacggtctttcatcccgcacagctgcctactaccagcagggtgctcgtttcgccaaatggcgtaccgttgtgagcattccaaatgttccatctgccttggcagtt

SEQ ID NO: 36338 - DNA, 402 bp, Gossypium hirsutum
  Clone ID: LIB3165-003-P1-K1-C7
cccacgcgtccgagagatgctgccataaaggagaaacttgccagtgtgaaggacacgtctgaggaagtgaagcaacttgaagaacaagcagcggctattatgagagctgcaagggctgagattgcagccgctttgaacaagatgaagaaggagactcagttggaagttgaggagaaactggctgaagggaggaagaaagttgaggttgaattgcaggaggctttggctaatttggagaatcaaaaagaagagactatcaagtcacttgattcccagattgctgctctcagtcaggatattgtcaagaaggtgcttcctctctaaaatcccacttcatatttggtttaattttgagtcaataatgtttatatagttttgaaaccatctgtgtatttaatatga

SEQ ID NO: 36339 - DNA, 276 bp, Gossypium hirsutum
  unsure (1)..(276): unsure at all n locations; Clone ID: LIB3165-003-P1-K1-C9
agcatggtaatctanngtttgttttaaaaaagaaaatagcaatcataggaggcttttatactgaggaagattcaccanctatntccgtcttgcataattccttcatggggtcactgcttcctcctgcttgcatgcctgtccactttctttctaccaatttttccaaatcaacaaccctttgtctgttaccccattcttttttataccatgccaccatcttgtccatgtcatcttccatttccattgtcaatgtatatcctattcttcattatacat

SEQ ID NO: 36340 - DNA, 383 bp, Gossypium hirsutum
  Clone ID: LIB3165-003-P1-K1-D1
ccaccgccaatcctaaaaccccttatctgaagccgccgctcctcttcttcccgaaggctcttaccaccggtcgaaccaccgctttagccaccaccaccttactcctaacctcccctccctcctccattgcctctgatgcatacaacgtctactacggaaccgccgccagtgccgccaactacggaggctacggtggaaactccgacaagaaagcctccgctgagtacgtctacgatgtccccgacggatggaaagagcgtttagtttccaaagttgaaaagggcaccaacgggacggacagcgaattctacaaccccaagaaaagacaagagaaagagtccttaacattcttggctgggttcaggcaattagccccaaaagac

SEQ ID NO: 36341 - DNA, 304 bp, Gossypium hirsutum
  Clone ID: LIB3165-003-P1-K1-D10
cggaagggccgggggacccacgcgtccgaggctttgtaacaaaaagattttttaaagccacacttcccacaccccatggagagtctttcccttgtgcaaccccactttctttcaaactctccttcgcattccctgaaaccagaaggaaatcactaagcatcagctctactccgaagggaacaccatctccttctttggcttacgtgccactgagggtgagtgccagttctcaagccgctgctgcacctactgtcaatttgacggcaattcccaccgaaatgaatgcttgggtgtacggagaata

SEQ ID NO: 36342 - DNA, 278 bp, Gossypium hirsutum
  Clone ID: LIB3165-003-P1-K1-D11
cttccctgattctctcttcaaacccttgaagaccaaaaaacatagtgggttcagtcctttcagttttaatccaaaattcaatgtcctcaatcctgaaaatgccactctcaatcccagttccatctcaagccctttccttctcaaaatctcttgtttccccaattccccttttcctttacactaaactttcaaccctctccctccacaactcagccccaccacccaacaccataatccgcatggggggtggccccagaacttacccaggtggagtctcg

SEQ ID NO: 36343 - DNA, 389 bp, Gossypium hirsutum
  unsure (1)..(389): unsure at all n locations; Clone ID: LIB3165-003-P1-K1-D3
tcttctttcaccggccgccatagtcactgncgcgggcgccacttctatcacggaggtttccctccatccgtgctgcaaatttcctgtacgtaacttcctcttcaaatccatttctggaaacaacagaccgtcctccaggctccacgtgtcctccccaactgaccaacccgccgcatccaccactcccgcccaacccttcttcaaaagccccaaagaagaaaccatcttcttcgacggcggagcccactacggggacctcttagccaatctgcttctgggtttcactcttctatggctgccgttgactctagccgccgtttcgagggggtttttcctcaggtacaggttcaccaacctgcgggtgacggttatttcgggactgacgggtc

SEQ ID NO: 36344 - DNA, 244 bp, Gossypium hirsutum
  Clone ID: LIB3165-003-P1-K1-D4
atttcctagtcttccacgatgacttccctccacttcttcctcctcctcctcgtgcgcctcctttcgtcagctgctttaatctccgccgccgccgccaccaccgcatatccttccatcccgggcaccgattccacaactgattggtggcctatccggaggagacgagaatccagttcccatccgtcgcgaagtctacggtaacggcaagatattcgacatcagccataggtacaccgtcgacatg

SEQ ID NO: 36345 - DNA, 289 bp, Gossypium hirsutum
  Clone ID: LIB3165-003-P1-K1-D5
gggaaaagcaggaaagcagaacttgatcgagatggtaggattttcttcccaagcagaatcttgggttgccaccagaaactcaatctacgaatcccagaaagaggcagatagcttcgaattggatctaaaacgtctagatctgataaagatagatcaagaagacgagaataataatattaacagccaagataagattagcaccaccaagaagaacaagaagaaaaatcaggtgttgctggaggggtacgtggaggcggttgatgaggaggatgaactgaagaggacaaag

SEQ ID NO: 36346 - DNA, 382 bp, Gossypium hirsutum
  Clone ID: LIB3165-003-P1-K1-D6
cccacgcgtccgaagcggtagaccaggtccagcgtatgccagaagtacctttggggattcggcgttgcgatgctaactgctaaccgagagacactactcatcagctccatgagtcattgctgttcactactctctcgtcgttctcacacgtcaatgctcctccctccacctgaccctgtttccttcatccctgcttccttcaatcaccttaatggatcctaatctttcaaagttccccattttgtcctacatcttctcccaacaagatccttacaattacccatcactccctccccaaatccgccaggatctactcacccgtttcccccatttacccgatccatcaatccttgcttcactttcccgatccatccccaccttc

SEQ ID NO: 36347 - DNA, 135 bp, Gossypium hirsutum
  Clone ID: LIB3165-003-P1-K1-D9
tcccttccttaacttaccccatccaatccttttctctcactatcctctgcactgtaacttttccttttaatatcctcatacaatatttctttcactttctttcttttcttaattaaaaattaacaatccttcttc

SEQ ID NO: 36348 - DNA, 360 bp, Gossypium hirsutum
  Clone ID: LIB3165-003-P1-K1-E1
ctgagagataagaaaaagcactgttaatagcaaaaccatggcctctgcttctgtcctcaagacttcaccagttttagacaagtctgagtgggttaagggtcacacccttcgccaaccttccacttctgtggtgaggtgccaccctgttgcaccctccggactaactgtgcgtgcaagctcatatgccgatgagcttgtcaagactgctaaagctattgcttctcctggccgtggaattttggccatggatgagtccaacgctacctgtgggaaacgtttggcctcaatcgggctagaaaacacggaggctaaccgccaagcctacaggacgttgcttgttcagctcctggccttggtcag

SEQ ID NO: 36349 - DNA, 388 bp, Gossypium hirsutum
  unsure (1)..(388): unsure at all n locations; Clone ID: LIB3165-003-P1-K1-E10
gcacgcttgacagcctgtcccactaagccacaacgcatggatctctctttaagtttcanatctccatcggcttttcttctacccaaatccaaaccatcaaccctctccatccccctcatttctctcaaaccatcgcctcatcgcctcacggtggcagcggctgcagggaagatgaagatgattgagggcgtcagtgatgaattgaactccattgcttcacagaatcttgactacgctgctgctcgtagaagagttcgatctgctttcatccctgtccaccagcagcttgatcatttattgttcaagatggctcctactggtgtaagaacagaggagtggatcgaaagaaactcaaagggattggagattttctttaagcgatggatgc

SEQ ID NO: 36350 - DNA, 384 bp, Gossypium hirsutum
  Clone ID: LIB3165-003-P1-K1-E12
attcccatggcaaccctattttcttctccatctccctccattctctctggcgggaccgccaatcctaaagccccttatctgaaaccgccgctcctcttcttccccaagcctctaaccaccgctctaaccaccgctttagccaccaccaccttactcctaacctcccctccctcctccattgcctctgattcatacaacgtctactacggaaccgccgccagtgccgccaactacggaggctacggtggaaactccgacaagaaagcctccgccgagtacgtctatgatgtccccgacagatggaaagagcgtttagtttccaaagttgaaaagggcaccaacgggacggacagcgaattctacaaccccaagaaaagacaagag

SEQ ID NO: 36351 - DNA, 264 bp, Gossypium hirsutum
  Clone ID: LIB3165-003-P1-K1-E2
ctttgaaggccgaataggggaaaggtttccatgtgaacggcacttgcacatgggttagtcgatcctaagagacgggggaagcccgtccgtcagcgcgtccagcgcgagcttcgaaagggaatcgggttaaaattcctgaaccgggacgcggcggctgacggcaacgttagggagtccggagacgtcggcgggggcctcgggaagagttatcttttctggttaacggcctgcccaccctggtaacggcttatccggaggtagggt

SEQ ID NO: 36352 - DNA, 331 bp, Gossypium hirsutum
  unsure (1)..(331): unsure at all n locations; Clone ID: LIB3165-003-P1-K1-E3
ctttaccatggcttcacacaaagtaacactgataactccgtcggtaaccaagcaaggcgactgctcggacggcgactatatcctggaccgtgccgaggaagtaggaatggatctcccgtactcgtgcagggctggggcttgctcttcgtgtgcgggactgatcaaacaaggcaccgtcgaccaatcggacaatagcttccttgatgatgaattgattgatgcaggcttcgtcctaacttgtgttgccatccctaagagtgatgctatcattgagacacacaaagaggaggacctagtatcttaaaaggtgtcataaggatttgtatntttc

SEQ ID NO: 36353 - DNA, 404 bp, Gossypium hirsutum
  Clone ID: LIB3165-003-P1-K1-E4
ggaatgaccgggcggacggacgcgtccgctcttttgtataactgtaccatattgttctagtaagcagcaatagcaatggggtaggccatgatctcatcggcgaccattgccaccctgaactgctccttcaaggctcaggccaacatggtgtcccctttcaccatcctcaaatctgcctctgctttcccagtcactaggaaggccaacaacgacatcacttctcttgcaagcaatggtgggagagtgcaatgcatgcaggtgtggcctcctcttgggaagaagaagttcgagacactctcatacctccccgatcttacacccgtacagttggctaaggaagtagattaccttcttcgctctaaatggattccttgcttggaattcgaattaaaggaaggattcgt

SEQ ID NO: 36354 - DNA, 303 bp, Gossypium hirsutum
  unsure (1)..(303): unsure at all n locations; Clone ID: LIB3165-003-P1-K1-E5
ttcttctccatatttgcatcaaattcttctcactagctcccctctcaatgcagtagagtcanaccggaagtgactccattctcaccactaatctccacctcatgccacacctcaacatagtatccccatatacttccttaacctctctctgctttcccaacctactcccaagactacatctacaccactactatctcatgcaattagaaacagattccaaaccaaacatttctatccatctatttggacgcattagctcgaacactctcatatcctccattgcaacaacgactcacccctcta

SEQ ID NO: 36355 - DNA, 348 bp, Gossypium hirsutum
  Clone ID: LIB3165-003-P1-K1-E6
cttcattataaaaaaagaaaagatttgtcatggctgctgttactgctgcagtgttgttccttctaccaagtggacctctctccctgctagaacctctcttgtctttcctgataggatcaccttcaagaaggtgcccgtttactacagagatgtttgcagtggggggagagtggtttctgtcagggcccatgttacaactgaagctcctgccaaagttgtaaaggaatccaagaaaaacgatgaaggtgctgaggttcacaagttcatgcctatcatccgcgacattggtagatgcctccttaacactaagatcactggcgatgatgcttctggagagacttggcacat

SEQ ID NO: 36356 - DNA, 393 bp, Gossypium hirsutum
  Clone ID: LIB3165-003-P1-K1-E7
gaaaagcagaggaaacaagaaatggaaaaaacagcagctctgaatgcttctgttacttcatattctttgtcttttaacaagattttaactcctaaaaattccatggcagcagttagttttttggcttctttttcaccaagaattcactccttatcttcaccttttccttcactttccatcaaaccaaagcgacccacaaacacttttcaagtgagatcagtggctgctccaacagaagatgttgcagggtttgatgacatggtttccgggaagcaacgtaagtattacatgctaggcggcaagggaggtgtaggaaagacatgttgcgctgcttcattagccgtaaaattcgcaaataatggacatcacactcttgttgtctcaaccgatcca

SEQ ID NO: 36357 - DNA, 391 bp, Gossypium hirsutum
  Clone ID: LIB3165-003-P1-K1-E8
cggacgcgtccgcccacgcgtcctctataaaccacttgtacctaccgtggcggatcggctctgtcaatcaaaccagcaaatacaacatcctttcccttctcttttaatctttcttgtcttctctttcacctcgctttgttgtccatcagttgaggattcttgtcaacaaataacgcatggcagaggaagaacccaagaaggttgaaaccgtaaccccctcggagcaaccacctcccgaagcccccaaagacgttgcggaggaaaaatcggtaatcccacctgctacctctgaagaaaaacctgctgagtccgccgcactccaaaaggcggtggaaccgactgaggaaaagagcacggagagtactgtggaccgagatgctgtgcttgctag

SEQ ID NO: 36358 - DNA, 399 bp, Gossypium hirsutum
  unsure (1)..(399): unsure at all n locations; Clone ID: LIB3165-003-P1-K1-E9
gttgtttcctcaactttcagtgtttatttattattatttttattttttgggagtagtgtgttgcaatggccgaggagccgacaccaaagcgccaaagagaagaaacccagagctcaaacgaagaacatgttgaagaaacaaaacgccataagtcttacaatcacatactctctttgcttgaagtcgaagaggatgagcccagccaagacttgtcccccctaatcaccactttacagcaacagctctcctcggactccgttttggatgcccctttccctctttgtgaaccagcaacaccatcgccctcgaacccagacaaggaaaccgccaccaccgtcctcagcttagaagactgcacatcagcaacnttgtccttgaaagaagatgatgatgatgatg

SEQ ID NO: 36359 - DNA, 391 bp, Gossypium hirsutum
  Clone ID: LIB3165-003-P1-K1-F1
caaaagggtcttttcttcaacaccattgttgagctgagagaaaaacagagaaaaattagagaattctctctatatatacatatacatatagagagagacagttcaaacttcaaagatctagtagattggtaataaaaaaaagaatgttgggacaaaagcaaagtgaagaagcaatagtgtcgaattataacgaaagtgaacatcatgttgagaatagagatgaagagaaagaagaagaaaaccagtcattgtttaatgttaagaatctactttggcatggtggttctgcctgggatgcttggttcagctgtgcttctaatcaagtagcacaagtgttgttgactctaccatattcattttctcaattgggcatgctatctgggattctgct

SEQ ID NO: 36360 - DNA, 248 bp, Gossypium hirsutum
  Clone ID: LIB3165-003-P1-K1-F10
attatctatctcattgtttgtaggtggtcttcttttattcacaaaagagtgttgtatgaatgtaatgcaacaattgaatgctattatttttttcttctcttctttgggttatatgtattctgtgtatggttgtattttttttccatcaaatatatgggttaaatatgtaaaaaaaataaaaataaactaaaataaaataaaactaattctaaaaacatttaaatattaccttttaattttactcctat

SEQ ID NO: 36361 - DNA, 414 bp, Gossypium hirsutum
  unsure (1)..(414): unsure at all n locations; Clone ID: LIB3165-003-P1-K1-F11
cggaanggccggggggacccacgcgtccgctttttcattggaagcttcttttttaaagagagatcagtgatatttgggggagggtgaaaagatggactatgtgtacggaccaggaaagaaccatctctttgttccagggccggttaacatcccggaaccagttcttcgagccatgaacaggaacaatgaggattaccgttcccctgccattcctgccatgacaaaaactcttcttcaagatgtcaagaaaattttcaagactactactggaactccctttttgattccaactacaggaactggtgcatgggagagtgcactcactaataccctgtcccctggagatcgaactgtatcttttctaattggacaattcaatctgctgtggattgatcaacaacaacgcctcaactt

SEQ ID NO: 36362 - DNA, 375 bp, Gossypium hirsutum
  Clone ID: LIB3165-003-P1-K1-F2
aacaatccaaaagctcacttccgttattcaccgtctcccacctgtatcctgccacatgctcacccgatcctgcgacaccttgtcctcctccaagaaggttgtcgacaggatcgtcaagctcttcgccatcgacccagaaggccaaaagcgggaggttgtgggcctagccggccacagcttacttcgggccttgactaacagcgggctgattgatccggcgtctcaccggctcgaggagattgatgcttgctccgccgaatgcgaggtcaacatcgcccaggaatggctcgagaagcttccaccccgtacctacgatgaggaatatgtgttggtaggaattcgaggggtcgtatcttgaacaagctttccaggctt

SEQ ID NO: 36363 - DNA, 372 bp, Gossypium hirsutum
  Clone ID: LIB3165-003-P1-K1-F3
ctatatctaaagggttctttagattttcttaccagttccttctattaagaaaatgggctcccacattgttggatatccccgtatgggaccaaagagagagcttaagtttgctttggaatccttctgggataagaagagcagtgccgaggatttgcaaaaggttgctgctgatctcaggtcatccatctggaaacagatgtctgatgctgggatcaagtacatccccagcaatgctttctcttactatgaccaggtgctcgatgccacatccatgctcggagctgttccacctagatacggctggagtggtggtgagatcggatttgacacttacttctccatggccagaggaaatgcctctgtccctgcaat

SEQ ID NO: 36364 - DNA, 389 bp, Gossypium hirsutum
  Clone ID: LIB3165-003-P1-K1-F4
gccaacaccaggcttccatctaatatcctctcactctttccccactcaatgctgttagaagagactggaagtgactgaatcctctggacttcgatccagctcatgcgtcacctttgccaagaatgttagagatacttcctttttcgacgtgctggctgcccaacttactcccaagagtgaaggtgtaccatcagcatctgttaggggagaaacagttgccaaactgaaggttgcaatcaatggatttggacgcattggcaggaacttcctcagatgctggcatggcaagaaggactcacccctcgaggttgttgttgtaaatgacagaggtggtgtcaagaatgcttcacacttgctgaaatatgacttcatgctgggaactttcaaag

SEQ ID NO: 36365 - DNA, 385 bp, Gossypium hirsutum
  Clone ID: LIB3165-003-P1-K1-F5
ctgaaacaagagaatctgcagctcattctgttcgcactcgtacatcatcacctgctgacccttcaggtgactctggttcctcaccgatgctcagtgggcagcctatatacgacaaaccggcttccctgagcaaatctgctgattctgagttgctgcctccagcaccctgggacactgctgcaggaaaccttccaccaccgccttcgaagtttaatcagagacagcagttctttgaacaacaacatggttatcctggtggttcttctaactccagtaacggatcaggttcctcctatgatggcttggttggacaaactcaaaatctttcccttaactcaacgaccccaaccaaacaagaaaaaccagaagatgctctcttcaaaga

SEQ ID NO: 36366 - DNA, 408 bp, Gossypium hirsutum
  Clone ID: LIB3165-003-P1-K1-F6
gggaatccccgggcggaccgacgcgtccgctgcctgtccctccttgaagacattattcagagagcttggcagccacactcaggctgctgaaatccgcgttgtgaccccaaaagcctcaccttctacaatctaaactccccctcctttctaaccccacaaagcaatttatctgcaatgagtcttttaaccctccaaaactcttcgctgagactgttcatcacctaaaatcagcttctcttccccttacaacactcgcatttcccttcttatttgacgccgaggatgctcttgctgttggtggagagtttgggattttggagggtagaagttttgcacttgtacaccccattgtcatgggtggtctcttcttttacactttgtgggctgggtatttgggttggcaatgga

SEQ ID NO: 36367 - DNA, 268 bp, Gossypium hirsutum
  Clone ID: LIB3165-003-P1-K1-F7
cccacgcgtccggtggacgtgatcgtgaccacgatcgtagccggggctatgatggcagtcgtggatctaatggtggggagtgttttaagtgtgggaaacctggacactttgctagggagtgtcctagtgatggggctagggggggcaagtatggtggtaggggggatcgttatggtggtggtagtgatggtggacgttatggtcctgaccgatttggagaccggtttggtgggcgcaatatatatgcaggtattcgatgggtgtctgt

SEQ ID NO: 36368 - DNA, 338 bp, Gossypium hirsutum
  Clone ID: LIB3165-003-P1-K1-F8
cgatgatggtctcgctgagaccctttaatggggtctttccgtatccatcaaagcattcattggttcatagaaacaggcagacagctctaaggggtaccatttacatgagtgctcaaacacaagcagttccttccagaacccagaggataatggagagcatttcagttagtggtgaggttggtggtgctggtggtgcatactcctataatgccttgaagaggttggacggaatttggtcaagcatttgctctactcagactgttcagcaagcacctcagcaggtagtttcaagctttcctggtgtgtctagccattctgttcttgctgaaaaacaatta

SEQ ID NO: 36369 - DNA, 354 bp, Gossypium hirsutum
  Clone ID: LIB3165-003-P1-K1-F9
attggcactcttatttgcgtatccctttgtttaatcctataaacatgagaattttgtatttttttttcttattttatggcttgggacttactcctcgctttttcgaattctatcaagatttcacccctacaattaattattcgttgggacaataatccatgggaaggattaatttgaggatgaggaattatcacaccgactcgctttcttccttccccttcttagttcaagagaaccccttatttctcatttattgtttaaaggagtattgcaacgaatgaggtattttgccattgacatgaaacctgccccctaattctaataagaattattattattgggaattttcaattg

SEQ ID NO: 36370 - DNA, 318 bp, Gossypium hirsutum
  Clone ID: LIB3165-003-P1-K1-G1
atccaccaaaaacagcgatagtgtcgttgacgaaaccttttatttccgctactcctgcgccgtcgccccaccctcatcctcctcctctaatcccaatcaagccacctccaaatccaccggcggtggcggcgggtccggcggtctagccccatcgaaatcaaccctttacgtctccaacctcgactactccctcacaaactccgacctccacactctcttctccaccttcggcaaaatcgcccgcgtaacagtactcaaagaccgagccacaaggaattcaaagggggtcgccttcgtccagtttgtttcccgcgatga

SEQ ID NO: 36371 - DNA, 384 bp, Gossypium hirsutum
  Clone ID: LIB3165-003-P1-K1-G10
cccacgcgtccgcccacgcgtccgtcaagccttgcacaatggccaccatgacctctgccgctgtcgctatcccatctttcaccggccttaaagccggtgcaaccgcagctaaagttagctccacagccaaggttgcagcctctccagtcccaagggtcagcatcaaggcctccctcaaagacgtcggtgttgctgttgcggcaactgctgcaagcgcaatccttgccaacaatgccatggccattgaagtcttgctcggcagtgacgatgggggtctggctttcattcccaaagaattcagcgtaagcccaggggagaagattgtgtcaagaacaatgccggattcccacacaatgttgtgttcgatgaggacgaaatcccaag

SEQ ID NO: 36372 - DNA, 375 bp, Gossypium hirsutum
  Clone ID: LIB3165-003-P1-K1-G11
ggctactgtttctgtagccatacccaaccttcagattcaggcaaaaggaaagggtgttggttttgcagatttctcaggcctacacaactcctctactagccttccctttgccaggaaaacctctgatgacttccattcactcgttgcttttcagacatctgctctaggaagcaataatggcgggtacaggaaagggatggcagaggcaaagctaaaggtggctataaatgggtttggtaggattggcaggaatttcttaagatgctggcatggccgtaaggactccccacttgatgtcattgccatcaatgacactggtggtggtaagcaggcttctcaccttctcaaatatgattccacccttggcatcttcgc

SEQ ID NO: 36373 - DNA, 385 bp, Gossypium hirsutum
  Clone ID: LIB3165-003-P1-K1-G6
gaaaaagcaaaaccatggcctctgcttctctcctcaagacttcaccagttttagacgagtctgagtgggttaagggtcacacccttcgccaaccttccacttctgtggtgaggtgccaccctgttgcaccctccggactaactgtgcgtgcaagctcatatgccgatgagcttgtcaagactgctaaagctattgcttctcctggccgtggaattttggccatggatgagtccaacgctacctgtgggaaacgtttggcctcaatcgggctagaaaacacggaggctaaccgccaagcctacaggacgttgcttgtttcagctcctggccttggtcagtacatctcaagtgccatcctctttgaggaaaccctctatcaaaccac

SEQ ID NO: 36374 - DNA, 297 bp, Gossypium hirsutum
  unsure (1)..(297): unsure at all n locations; Clone ID: LIB3165-003-P1-K1-H10
gagtcctctcctaccccaactatgaccggcaaagaagcccaacaacccgaagagctacctgtagtcttcggtcatcgtcnaccctcattcatccttccttttggggaccatttacgttctcaattccatgtcctggacccttatgagtcgcctgagccgtacgactcctttctggcccgtcatgctccctccataagagctctcatgactatgggccccaccctagtttccgccgagtttctcgaccgtctgcctgttttggagctgatagtggctacaagtgctggccttgatcat

SEQ ID NO: 36375 - DNA, 377 bp, Gossypium hirsutum
  Clone ID: LIB3165-003-P1-K1-H11
cggacgcgtgggttgatttccatctcccaaatttcaatttctttttcttgtgagtttccatgttagggaagacaggtcgacccatgatcggaaacttatctgaattactagttccaacacacaaatccgggttattggatccttcaaggagccccaaaagtccactagacttattcaagaccccatcatcatcatcaagaagagggtcgatgaagagatgctatgatgtttttggtgatggagtaaggcttggaatcattgctttaatggagaaatccactgttgatcatcgtccttcttgtaagctacaacacaccatttgtagattcaaaggaagatttcaagaaaattcagaagaggattacacttttgttaca

SEQ ID NO: 36376 - DNA, 410 bp, Gossypium hirsutum
  unsure (1)..(410): unsure at all n locations; Clone ID: LIB3165-003-P1-K1-H12
gcgtccgtccacgcgtcgcgtacagtaacaaatattcacagttgttttncttcagntctctctctcggcaggtggcttgcagccatctgcgaccgtctctgccgctgcccgccgccaacccgagctctgaggagtgtcatgtcccaatcctcagnctttcatggtggaatgaaagtgaagctcaaagattcatacagcaccatggcaggtttccttcgggaaagttttaagagtgatgagcggcgtgagaaagagatagacgaagagacacagaccgaaaaggaccgatggaaagggttggcttacgatatttcggacgaccaacaggacattactcgagggaaagggatggtggattccctgttccaagctcccatgaatgatggtactcactttgctgtcatgagttc

SEQ ID NO: 36377 - DNA, 251 bp, Gossypium hirsutum
  Clone ID: LIB3165-003-P1-K1-H4
cccatcgcgtccgcccacgcgtcctttttatctccctgtatcgagccctctagtttgtgggagcgcccagattttaattcagggctaaccttatagctcattttggaaccatcgccatacttcagatagatgagccaaagatgttctcaaatcttctgggtagcattgagtattggacaataatattcgatgagagaaacctgagaggagggcttcttgctgcttgaagcttgaggcaagcaaggcgctgt

SEQ ID NO: 36378 - DNA, 294 bp, Gossypium hirsutum
  Clone ID: LIB3165-003-P1-K1-H5
attccagggcgagggcaccaccacgtgccgtcgtggcagcattgtttcatccgtttatgggaccaccaccaggcctgggtggacagtgacattggttctacgctcataaggttcgggaccactactggtgatgtctccctcaccttagggctacgccatgctggaaacatgcccgagaatacttcttctttctcagctagagacgttggggggctgttaaattgaaaatacatattccacagtaatagctaaaacaattttcatttccaaaaaagataaagaaacatctatatc

SEQ ID NO: 36379 - DNA, 369 bp, Gossypium hirsutum
  Clone ID: LIB3165-003-P1-K1-H7
ggagtctcaaatcatcagccatttatggcgtctttcatcttatccttatgcggtatacccttccgcggcctgcctccgccgttcacctctctcttcccgccataatcttatacccgcctcaacatgccgcccgctctatcaccaaaacacaacctcgttatgcaaaccatctttaatatcaaagacccgaaatttaaaggtccattcacagcttagatgcccaatcatttctcctgaagaccgttggggcacttgggcttctctcttcgccatcggtgcttttggtctatggtccgagaaaacaaagattggaagcatggtgagtgcggcattggtgagcacattgtgggggctggcagcaagcaatct

SEQ ID NO: 36380 - DNA, 391 bp, Gossypium hirsutum
  Clone ID: LIB3165-004-P1-K1-A1
cccacgcgtccgcaaattcactcctgtctttccccccgtgtctgtctctatatatctccataaacattccaacattccaaacgccttgtttttgtgaacatcataattataattatatgcagaaaaacaagaaaaacgtaaagaaaccatcatccttaatccgactactgtttctgtatcttcacaaccctagctaggcccaatttaatcaatatgtcagcagctgttgccgccgccgccgccgccgccgccagcgtctcatctaaaaccacttcttcttctcatcatccaagtaaccaggcgccgaaccatggctggataccctttttccaagcaccggcacaacgtgcaccgctcccagctttgagccgctacgaatctcagaagcgac

SEQ ID NO: 36381 - DNA, 343 bp, Gossypium hirsutum
  Clone ID: LIB3165-004-P1-K1-A10
attcccatggcaaccctaacctcttctccatctccctccattctctgttcctgggccgcctatcctaaaaccccttatctgaagccgccgctcctcttcttccccaagcctcttaccaccgctctaaccaccgctttagccaccaccacctttctctccctccctctccttctccgtctctttttatatatatgtatgaggcaatgccatttttatatataagcaaagccattttactctttttatatatatattttgtttgttgctctaaaaccaaaaaaagagcaaagataacaaagaaaaaaaaagacaaaaaaaaggttggcctcaagtggagcaaaat

SEQ ID NO: 36382 - DNA, 379 bp, Gossypium hirsutum
  Clone ID: LIB3165-004-P1-K1-A11
ggcagccatgaactccatcgttttgtcatgcaactatgctatctcaggcagtgggctaaatgccaagatcccctcagtgccttcagttgcttccccagttttgcctggtggttacaagttgccagtgatcagagctcaacaacagggtaaagtttcaggttccaaagaatcaagtggcaatgaaggaagaagagctgctatgctgtatttggcagctacccttttcaccacagcggctgcttcttctgcaaatgctggggtcattgatgattaccttgaaaagagcaaagctaacaaggagttgaatgacaagaagaggttggccacaagtggagcaaactttgcaagagcatacactgttcaatttggcacctgcaag

SEQ ID NO: 36383 - DNA, 377 bp, Gossypium hirsutum
  Clone ID: LIB3165-004-P1-K1-A12
ttcctctctccggtccctcacttcactttacgatggattggcaagggcaaaagttagcggagcagataatgcagataatgctgttggtttttgcagtgactgcattcgttgccggttatgtattgggatcgtttcagatgatggttctcgtatatgccggtagtgtgacactcactggattgattacaattccaaattggcctttcttcaaccgccatccactcaattggttggatcccagcgaagctgagaagcatcccaagccacaagtgactgtgatttcgaaaaagaaaggctccaagaagtaaggtcattcgatttgatcttagcatcgttagagttttctaggggactgaattgatgttttcatcttttat

SEQ ID NO: 36384 - DNA, 330 bp, Gossypium hirsutum
  Clone ID: LIB3165-004-P1-K1-A2
acggatgactcatgacatttgccttactttgtcgcaaagtttttctacggcactgattatttgttgtttcttgtttggcacgcagtacaagttggtttgttagagcttattgtagacacatgctggttgtatgcgaaatgcattaggcattcgagttaatggaaactctatatttttgtaagtaggacaaaagcaaacattccatttataaatggattgtaatgtaaaaactcgaatttattttcttttgttctagttattcgcaattttataatttaaaaaaaaaaaatacaagtaccaggctccaaaccatggctgtatacccttttt

SEQ ID NO: 36385 - DNA, 327 bp, Gossypium hirsutum
  Clone ID: LIB3165-004-P1-K1-A5
cggacgcgtgggcggacgcgtgggttgtcattgtctgaatgaaatgccagggcgtggaatcaagttggtcggaccatgggggttagccaagccccaatgcggtgtattctaaatttgtatggtgtaattatgtgctttggagtattgtaaatttgcatggtgtacctaatctttgttttctttttcttggactagatagcagcgaaggaaataatgagcatatgtattccccttccccatgtaattatcttgtggaatctgtaaaggtgcactttctattccattcctaatataaatttcactggtcttaaatggctgggttgggtt

SEQ ID NO: 36386 - DNA, 280 bp, Gossypium hirsutum
  Clone ID: LIB3165-004-P1-K1-A6
gaaggatgctcaggaagtgctgctcatccgatcaaaggccaactttcttgctcaggtcgggaagtacacccccagaggcgagtcatagcttgccaagcaaggaatgtttgtcaagggttatgtctattagcatgtttgtatcttcaacagctctatgaatttcctgcactgaaaatttaattgaaagagcagaacactgatctttcattataaactccttggttttcccctttttttccctcttaataattatgttaaagcataagaattagaccaatcc

SEQ ID NO: 36387 - DNA, 362 bp, Gossypium hirsutum
  Clone ID: LIB3165-004-P1-K1-A7
cccacgcgtccgcccacgcgtccgtccacgcgtacgcttatattgcctgaggaggttctaccccgtggaaacgctctttaatggaactttagctttagccggtcgtgaccaacaaaccaccggattcgcttggtgggccgggaatgcccggcttatcaatttatccggtaaactattgggggctcatgtagcccatgccggattaatcgtattctgggccggagcaatgaacctatttgaagtggctcattttgtcccagaaaaacccatgtacgaacaaggattaattttacttccccacctagctactctaggctggggggtaggtcctggcggagaaattatagacaccttttcatact

SEQ ID NO: 36388 - DNA, 376 bp, Gossypium hirsutum
  Clone ID: LIB3165-004-P1-K1-A8
tagcaattgtcctcaaatatctcatacaaggaattaaattgaatgaatggctcaaaccatgttgctcatgtctagccatgcagtgagcttgaagagagatcaccctttactccatttccaagctcaaggactcaagcctaaacctgcctctcatctcttcttcaatccattgtctaatggtgtccatacttcacccaaagctttcaccactttagctgtctttaaatcaaagaccaaagcagctcccaagagggttgagccaaagccaaaggttgaagatgggatctttggcacctctggagggattggttttaccaagcaaaatgagctctttgtgggacgtgttgccatgcttggttttgctgcatcattgcta

SEQ ID NO: 36389 - DNA, 371 bp, Gossypium hirsutum
  Clone ID: LIB3165-004-P1-K1-A9
gagaaattgcagacaggaaaatggaatgtatacagatctgctcgctctccgttgaagctagtatcgcgatttcccaatcatcctgatattggtacattgcacgacaattttttactcgccgttgatttctttggagataacaattatctcggtacaagaattcgagtcgatggaacggttggagagtataagtggatgacataccgagaagctgctacagctcgaacagccattggttgcggcctaatacatcatggaatactaaagggctcttgtattggattatatttcatcaatagaccagaatggatcattgttgatcatgcttgctctgcgtattcccttatatcagttcctttatatgacactct

SEQ ID NO: 36390 - DNA, 392 bp, Gossypium hirsutum
  Clone ID: LIB3165-004-P1-K1-B1
cccacgcgtccggctctcaggcattaccatggcaacctctgctatccaacaatgtgctttcgctggccaaacagctttgaagcagtccaatgagctcgtctgcaagatcggtgccgtcggtggtggtcgcgtttccatgcgtagaaccgtcaaaagtgctccaaccagcatctggtatggccctgaccgcccaaagtacttgggtccattctctgaccaaatcccatcatacctgaccggtgaattccctggggactacgggtgggatactgctggattatcagctgacccagagacatttgccaagaaccgtgagcttgaggtgatccactgtaggtgggctatgcttggtgcccttggctgtgttttccctgaaattctttcaaagaatg

SEQ ID NO: 36391 - DNA, 273 bp, Gossypium hirsutum
  Clone ID: LIB3165-004-P1-K1-B2
cccacgcgtccggcaacaggcaatttccctcttaacaattgggctactcacttgagtgacccgcttcatactaccattattgacactttcacctcttaaaaaaagccatattcctttgcttttatgtagattttgctcaatgtactattatgttaacattgttaagaaaaacttgcgtatgttaataggtatctgatcggtttagatgtggttggtatgataatttatttttattatttacatattataaaatgttaacaatattttatattg

SEQ ID NO: 36392 - DNA, 380 bp, Gossypium hirsutum
  Clone ID: LIB3165-004-P1-K1-B3
cccacgcgtccgtaattctttgtaggaaagcatcaagaatggaggcattgaggatggaagtagtttgggtgatgttgattgtgttggttgccgtatttaaggtccaaaatgtggcggcagctgaagctccggcccctagtcccacctccgatgccacaatcttcgtgccgtcggtgcttgcttcccttgttgctcttgcatttgagcttgttttttaaaatgctggtgttttatgagacctataatattttttaaaattcttttctattttctacttatgactacagttcagtgtattcatatttttgttattgttgtagtttcaatatgtaattgttgtgattttgttcctagtgacctaataaattatttgttttctt

SEQ ID NO: 36393 - DNA, 174 bp, Gossypium hirsutum
  Clone ID: LIB3165-004-P1-K1-B4
tcggtacactactattacactgccggttaaaaatcatgtccaccgtcacgactcaagcctctgccgctgttttccggccatgtgcatcgaaaacacggtttcttactggatcttccggtaagttaaaccgagacgttttatttaaaccagtgtctgctacatcaactagctcat

SEQ ID NO: 36394 - DNA, 382 bp, Gossypium hirsutum
  Clone ID: LIB3165-004-P1-K1-B5
ggagtttagttcagaggctaaccatcgcattgccaggctcgcagcccatctccggcctcagatggaggaaagttctattttgaggcgagctgactgtagagcgaaaggagggtcaccagggttcaaagttgctatcttaggagcagctggaggcattggccagcctcttgcaatgttaatgaagatgaatcctctcgtctcggttcttcatctttacgatgttgtgaactctcctggtgtcacagctgacctcagtcacatggatactggtgctgtggttcgtggtttcctagggcagccgcagcttgagagtgcgttgaccggcatggaccttgtgatcatacctgctggtgttccaaggaagcctggaatgacaagggat

SEQ ID NO: 36395 - DNA, 356 bp, Gossypium hirsutum
  Clone ID: LIB3165-004-P1-K1-B6
aaacttaatcatggctcggttgacgttcgtgacctccatcatccttctgctatgctccgttgccgctggatcaactttcgacgactccaaccccatccagatggtatccgatggcctcaccggcttcgaatcctccgttcttcgtgtcatcggtcacactcgccatgctctctccttcgcccgttttgcatacaagcatgggaagaggtatgaaaacgtggaggagatgaagctacggtttcagattttcgaagacaacttggatttaatcagatccactaacaagaagggacctggcctatactcttgctgtcaatcagtttactgattggagctgggaaagagtccagaaacac

SEQ ID NO: 36396 - DNA, 377 bp, Gossypium hirsutum
  Clone ID: LIB3165-004-P1-K1-B8
aaaaaacaaaaacaaaaaaaacttctattttatctcttttaatgaaaaaaatgggtgaaaatcttatgcatgctttacaatataacagctacggcggaggcgctgctggtttgaagcatgttgaagttccgatccccactccaaataaaggtgaaattttgcttaaactggaggcaactagtctaaacccagttgactggaaaatacagaaagggatgctgcgcccatttttacctagaaaattcccctacatacctgctactgatgtagcgggagaagtcgtaaaagttggaccgggagtcacaaattacaaagctggggataaagttgtgtctatgctccatcattttactggaggtggactagctgaatatgct

SEQ ID NO: 36397 - DNA, 378 bp, Gossypium hirsutum
  Clone ID: LIB3165-004-P1-K1-B9
cggacgcgtgggcgtactcctggttcgtagctcaacagagagttgaggccctagcacgtaccagtgataatggacaggaacggtcggagagctccgcagcgtggattggccacatcaacaggacactaagccgtttttaaggcgttgagggagctgatacgactatgttgacagtggcagatccaggttctgactgtcttcatctaatcttaccagaactggattcgtcccaaggtggaggttagtttttacgtcagataatcagacagagcgctcaagtatagaagccattcagtctctacagttatgcatgataatatcttgtgttggggattcaacaaagctttccacattggtgcaagacgtgttcaacgaacc

SEQ ID NO: 36398 - DNA, 389 bp, Gossypium hirsutum
  Clone ID: LIB3165-004-P1-K1-C1
gtcccacattcaggaaaactggatgtattctggacttcttttcgcaccatcccggaggcttgcgcatgttcaccttcttttcgcaccatcggtgttccacaggattataggcacatggatggctctggtgttcatacctacacactaatcaacaaggctgggaagtcacactatgtgaaattccattggaaacccacttgtggtgtaaaatctttgttggaggatgaagccataagagtaggtggtgcgaatcacagtcatgccacacaagatctttatgactcgattgcagccggaaactaccctgaatggaaactgttcattcaaataatggatcctcttcatgaggataggtttgattttgacccacttgatgtaaccaagacatg

SEQ ID NO: 36399 - DNA, 378 bp, Gossypium hirsutum
  Clone ID: LIB3165-004-P1-K1-C10
cccacgcgtccgaagttaacgaaatataaagaagaagaaatacaatgggtttctttttgaagtcgggttttagtttttggggtgaaaaaaaatgttgggagtatttagcagtgcgatagtgtctccgccggacgagctggtggcggccggttgccgaactccatcacctaagataacggcggacgctctggtgaaacggttccttgagacgaactcctccggcgtgtccatgcacatcggagaccatgtccaattcgcttattctcaccataaagagtctcctttacagcccagatcatttgctgtgaaagacgaaatcttctgcttgtttgagggagcccttgataacttggggagtttaaagcagcaatatggtct

SEQ ID NO: 36400 - DNA, 376 bp, Gossypium hirsutum
  Clone ID: LIB3165-004-P1-K1-C11
gctttcatcaactgtttttgccttacctcctcttcttcctccacgagcacctcgtgtttttccggtcgtcgacgacctacattgcggccttcggtcgtcgctagccttaactcttctccttctcctccgactcttatccaagaccgcccggttttcgctgcccctgttcctttgctcaccccgagagaagagatgggaaacaagtcctacgacgaagccattgaagctctcaagaaacttctcagtgagaaaggagaactgaaagctgaagcagctgcaagggtagatcaaataacagcagagttaaacacaacatcagctgacggcaaaccatctgactcttctgttgagagactgaaagaaggcttcgtttact

SEQ ID NO: 36401 - DNA, 375 bp, Gossypium hirsutum
  Clone ID: LIB3165-004-P1-K1-C12
gcctggccaaaaggttctagatgtttgctgtggcattggtggaggtgacatttgtatggctgaggaatttgatgttcatgttgtgggcatcgacctctccgtaaacatgatatcctttgctcttgaacgagctactggactgaaatgctcagtggaatttgaagttgctgattgccccaagaaggtttatccggacaacagttttgatgttatctacagccgtgacactattctacacattcatgacaaacctgcactgtttagatctttctacaaatggttgaagccaggaggcaaactcctcataagtgattactgtaaaagttccaagactccatccacggagtttgctgcgtatatcaagcagagaggcta

SEQ ID NO: 36402 - DNA, 251 bp, Gossypium hirsutum
  unsure (1)..(251): unsure at all n locations; Clone ID: LIB3165-004-P1-K1-C2
ggtttacagtgattgagtcaattacatcaacctatcttcttggtcatagcacggtgcatggtgatagactctgttaaggacattttcngcaaacagaaaccaatcagttatccactcctagttacacaatttaccgtcaaaagaatctttgtgtcgactctttcacctaggttgtaagccgatacgatagtttaactaagggtcgaggctctagctattgatctgcccctagacgtgcctgcgcgttgaga

SEQ ID NO: 36403 - DNA, 386 bp, Gossypium hirsutum
  unsure (1)..(386): unsure at all n locations; Clone ID: LIB3165-004-P1-K1-C3
ttgtcctcaaatatctcatacaagtttattaaatttaattaatggctcaaaccagtgttgctcgtgtctagccatgcagtgagcttgaanagagatcaccctttactccatttccaagctcaaggactcaagcctaaacctgcctctcatctcttcttcaatccattgtctaatggtgtccatacttcacccaaagctttcaccactttagctgtctttaaatcaaagaccaaagcagctcccaagagggttgagccaaagccaaaggttgaagatgggatctttggcacctctggagggattggttttaccaagcaaaatgagctctttgtgggacgtgttgccatgcttggttttgctgcatcattgctaggcgaaacaataac

SEQ ID NO: 36404 - DNA, 383 bp, Gossypium hirsutum
  Clone ID: LIB3165-004-P1-K1-C4
cccacgcgtccgctactttcccttttccttacttaccactgaaaacaatgaaggggtccaagcatgaggctttcacactctctttcaccctgcttctcatgctgctgggtttggcatccagtgatgtgaaccaagacaaagcggaatgcactgatcagctagtcgggcttgctccatgtcttccatacgttggtggacaggccaaagcccccaccctggattgttgcggtgggctgaaacaagtgttggttaagagcaagaaatgcctgtgtgtgttgattaaagatagagatgaccccagtcttggcctcaacatcaatgctagtcttgctgcaaccctccctcacacttgtcatgacactgttaacattacggaatgcatc

SEQ ID NO: 36405 - DNA, 373 bp, Gossypium hirsutum
  Clone ID: LIB3165-004-P1-K1-C5
ctttctcttgctctctttagagtatatttcttttgcaatcctttgtagagctcggggatccattgtcaccatgtcttgctcaaatctgacaatgtgggtgtcctcaaaaccctctctttctgacacttcttcactctctttccgttctttcatcagcccttttcagctcccatctcagagctcaacccccggtaacccttccaggtcctcatctgtaaccccagttcactgtggtcttcgtgagcttagagaccgtattgattcagtaaagaacacgcagaagatcactgaagccatgaaacttgtggctgctgctaaagttaggagagcacaagaagctgttgtcaatggcagacctttctctgagtccctg

SEQ ID NO: 36406 - DNA, 292 bp, Gossypium hirsutum
  Clone ID: LIB3165-004-P1-K1-C6
ctgagtccaggacttaccacttttttttcgctctacagcaaattttttccctagaacgtcgcagttctcatggacaggctcgtccttcacatctacccaaactacattgcccaatctaacattacactaacccgtttttaaggcgtacaggtatgtcaattgtctgtactgacagttgcaatgccagctcctaactaccatctctaaattaacctcatcaggattcgtcccaaggtatcagtaaatagttacgccagagaaccagacatagccctcacgcaaaaaaaacaaa

SEQ ID NO: 36407 - DNA, 378 bp, Gossypium hirsutum
  Clone ID: LIB3165-004-P1-K1-C7
cttactccctcaaactttaagccatttccagcatgataatggcttgctcaaaggctgtaatctccattgctgcttcatcatccttcttttacaaacccaaactcaaacaaatcccacaactttccctcccaaaactccccactccaaagttcttgaaaacccaacaaatcccctcactctcgtccaccactctcaaatctatctacctcttcacagtcaccactttatccttttccccaccttctgttgcttcaaaaatagaaaaagcctgtcttttcgatttcaacttaaccctccccatcatgatggtccagctcttgttcctcatgtttgctcttgacaaggtctactttaccccactcgggaaattcatggatg

SEQ ID NO: 36408 - DNA, 376 bp, Gossypium hirsutum
  Clone ID: LIB3165-004-P1-K1-C8
cccacgcgtccgcccactcgtccgtccacgcgtccggtttctctcgatctagcggtctcgcgtgcgccctgtggctctcttcaaccctcgcatatctcttcaagatctgatctgatctgacaaaaaaatgttcgggagagcaccaaagaaaagcgataatactaaatactatgagatattgggagtgcccaaaaccgcttcccaagatgatttgaagaaggcttatagaaaagctgcaattaagaatcatcctgataaaggcggtgatcctgaaaagtttaaagagttggctcaagcttatgaggtgctgagtgacccagagaagcgtgagatatatgatcagtatggcgaggacgcccttaaagaaagaatgggt

SEQ ID NO: 36409 - DNA, 375 bp, Gossypium hirsutum
  Clone ID: LIB3165-004-P1-K1-C9
gcggaggaaaagaaacttaccaggattcccctagtaacggcgagcgaaccggggaaagcccagcttgagaatcggtcgccatcggcgtccgaattgtagtctggagaagcgtcctcagcgacggaccgggcccaagtcccctggaaaggggcgccggagagggtgagagccccgtcgtgcccggaccctgtcgcaccaagaggcgctgtctacgagtcgggttgtttgggaatgcagccctaatcgggcggtaaattccgtccaaggctaaatacgggcgagagaccgatagcgaacaagtaccgcgagggaaagatgaaaaggactttgaaaagagagtcaaagagtgcttgaaattgtcgggagggaagcgga

SEQ ID NO: 36410 - DNA, 384 bp, Gossypium hirsutum
  Clone ID: LIB3165-004-P1-K1-D1
gaagtatggtgctggaatcggcccttgtgtgtatgacatccactctcccagaagaccatcaagcgaagagattgctgaccgaattaacaagatgcttgctgtgcttgagaccaacatcttgtgggttaacccagactgtggtctcaagactcgcaagtatgccgaggtgaagccagccctgaacaacatggttgcagcggccaagctgctccgcacccaacttgcgagtgccaagtgagaggcatatctgaggtcggacatcatcctttatatcgaagatggtccagaggaaatttgtcttaaatcatttgaataactgtgtgttggaagtatttgttaggcgtatcatatgcccctcttttaggccaattgttttcctttttc

SEQ ID NO: 36411 - DNA, 368 bp, Gossypium hirsutum
  Clone ID: LIB3165-004-P1-K1-D10
cccacgcgtccgaatttagagaggttaaattagataaagaaaaatggttctctggtaaaaatttccgtttgtttcctgagcaaatctcgggaaggaataccctttttttccccctgttgttaactcgttgtgattgtgaagctttctttaagagaatcctagttaactcgacgcgtttacccggaaagaggtgaagatgtcaactcctgcaaggaagagactgatgagggattttaagaggttgcagcaagatcctcctgcatgaattagtggcgcacctcaagataacaacattatgctttggaatgctgatatatttggacctgatgacaccccatgggatggaggtacgtttaagctgacttttt

SEQ ID NO: 36412 - DNA, 369 bp, Gossypium hirsutum
  Clone ID: LIB3165-004-P1-K1-D12
cggacacgtgggcttacacatggttcggagctgagcagagagtggatgccgaggcacgtatcggtgataatggacggaaaccggcggtgggctcggcagcggggattggcgacatcagcgggacacgaagccggtgtaaaggcgttgagggagctggtcgaactatgttgccagtgggggatccaggttctgactgtcttcgccttctcttacgagaactggattcgtcccaaggtggaggttgattttttgatgagtttgtttgagagagcgttgaagtctgaagtggagtcactttctagaggaggcattcgaatatctgtaataggggattcaacaaagctttccacatcgctgcaaaagttgatc

SEQ ID NO: 36413 - DNA, 401 bp, Gossypium hirsutum
  Clone ID: LIB3165-004-P1-K1-D2
aaattccgggggggcccaagcctgccgaaaacccaaaaaagaaaccatggcttcctttttcttctccttcatctttttgttgtgcttctggctctaaatctgctcctccacctcatcagtcccctttttttcactccaattcaagaatgtgaaagggagggacaagaagatggtggtactaccccaaacgtatgcagggacaaagcggtgaccccaaagcactttgcaacgcccctccatgcttaaaccactgcaaaatccaacgccaggaaacgtcacgagtctgctggaaatggtggtgatggtgaagattgctctgtttcttgcaacaagtgcaggcctcactccagggagaagatcttcgtggttcctttagacaacaacaatggagtttacaagca

SEQ ID NO: 36414 - DNA, 376 bp, Gossypium hirsutum
  Clone ID: LIB3165-004-P1-K1-D4
aaccaaaaagaaaaatggcttctgtttccgctactctcctcaagtcttcacctattatcgacgagtccgagtggattaagggtcaaaacctccgccacccttcggtttgttttgtacagtgcaaccctacatcggccgcctttaccgtccgtgctagttcatatgccgatgagcttgttaagaccgcgaaaactgttgcatctccaggtcgtggtattttggccatggatgaatcaaatgctacatgtgggaaacggcttgcctcgattggtctcgagaataccgaggcaaaccggcaagcttaccgtacccttctcgtgtctgcccctggcctcggtgactacatctcgggagctatccttttcgaggagactct

SEQ ID NO: 36415 - DNA, 387 bp, Gossypium hirsutum
  Clone ID: LIB3165-004-P1-K1-D5
cccacgcgtccggtttggcctcaatcgggctagaaaacacggaggctaaccggcgaagcctacgaggacgttgcttgtttcagctcctggccttggtcagtacatctcaggtgccatcctctttgaggaaaccctctatcaaaccacaattgatggcaagaagatggttgatgttcttgttgagcagaacatagtccctggtatcaaggttgacaagggtcttgttccactggctggttcaaacaacgagtcatggtgccaaggtcttgatggcctcgctccacgttcagctgcatactaccaacaaggagctcgttttgcaaaatggcgtactgtggtaagcattcccaatggaccaaccgaacttgctgtgaaggaagcagcctg

SEQ ID NO: 36416 - DNA, 382 bp, Gossypium hirsutum
  Clone ID: LIB3165-004-P1-K1-D6
tttcaattgaagtgtggaacccaaatgggaaatacagagttattagcaccaaggctatgcctggaactcgatggatcaacctcttaatcgagcaagattgccgtgtcgaaatatgtactgagaagaaaacaattttgtccgttgaggatatcatttctttgattggcaataagtgcgatggggtgattggacagttgactgaagactggggggagactttatttgcagctttaagcagagcaggaggcaaagcatttagtaacatggctgttggttacaacaatgttgatgttaatgctgccaacaagtatggtgttgctgttggtaacactcctggtgtactcacagaaacaacggcagagctagcggcttctctttcttt

SEQ ID NO: 36417 - DNA, 378 bp, Gossypium hirsutum
  Clone ID: LIB3165-004-P1-K1-D7
cccacgcgtccgcgaaaatatgaaatgattgataaacaagtttcaggggaatcgacaattaacagaagagagatacaaacaacagggaacaataagcacccaatcatgaaaccaaagtgatcccaccccgcatagaacccttgttaatggatcacatgaaactcatcgaaaagaccagaaatcttaaaattctgaagtgggcagctgctcatgtgtgtcgggggcgatgaagaagacttcatagacgatggctgcaatggcagagccgacaaagggaccgagccagtagacccagtggttgtcccatgtccagctgacaacggctggtccaaaggagactgcagggttcatggaagctccatcaaaggcaccaccagc

SEQ ID NO: 36418 - DNA, 379 bp, Gossypium hirsutum
  Clone ID: LIB3165-004-P1-K1-D9
cccacgcgtccgcccacgcgtccggccacaaaaagctcccccgcggcgactccgctggcatcaacagcacaattctaaacccaaaaacataaaaaaatggcagcaagtgtagcaacaatggcgatgctcaatgcaaaatgcctaagcatcagctcaactaagatgagcagcccaacaaagccaaccccaaagcccttctcccttctctccatgcagaacctccccaaaggcctcaccatctcaaaaccagccaacaactcaaacctaccttcttcactcgctggcagcgccattgctggagctatcttctcaaccttaagttcatgtgaccccgccttagctgcacaacagattgctgaaatagctgaaggagacaacc

SEQ ID NO: 36419 - DNA, 381 bp, Gossypium hirsutum
  Clone ID: LIB3165-004-P1-K1-E1
cccacgcgtccggggttgcaatggtacaagcaatggcatcgatgactggtttacgtggctctgcacaagctgcgttggaaggtagtctccaactcagcggccaaactcggttgaacgttgctagcaccaacaggttggctgtggctagacccggttttaccgttagagctcaacaggtccctgccgagcctgaaactggacgcagagctgtgctgggtcttgttgctgctggtttggctactggctcctttgttcaagctgtgcttgctgatgcacgaagcatcaaggttggcccgccttcacacgccttcggtggattgcccggaactttgaattccgatgagccaagagaccttgatctgccctacaaagatcggtttt

SEQ ID NO: 36420 - DNA, 379 bp, Gossypium hirsutum
  Clone ID: LIB3165-004-P1-K1-E10
cccacgcgtccgcattatcaactgtttcacaatggcctctacagcgatggctcgttcttccccatcattcgccggtaaggcagtgaagttctccccttccacccctgaaatccagggaactggccgtgtttccatgaggaaaaccaccaagcctgttccttctggtagcccatggtacggtcctgaccgagttttgtacttgggtccactttccggtgagccaccatcttacttgaccggtgagttccctggtgactatggttgggacactgctggactctcagctgatcccgagacctttgctaggaaccgtgagctcgaagtcattcactgcagatgggccatgttgggagctcttgggtgtgttttccctgagctg

SEQ ID NO: 36421 - DNA, 380 bp, Gossypium hirsutum
  Clone ID: LIB3165-004-P1-K1-E11
gtgaaaagaaattttttagaaaaaaaaatccatcaccgatctaaggtccccaagttctgttcaaatggccggcgaaattttgatctgaaaatctaaaaatgtcgtccacattcagcggcgatgaaactgctcctttttttggcttcctcggtgccgctgctgccctcgttttctcctgtatgggagctgcgtatgggacggctaagagcggtgttggtgtggcgtcgatgggagtgatgaggccggagctggtgatgaaatcgatcgttcccgttgttatggctggcgttttgggtatttatggtttgattattgcggttattatcagtactgggattaacccaaaggctaaatcttattaccttttcgatggctatgct

SEQ ID NO: 36422 - DNA, 298 bp, Gossypium hirsutum
  unsure (1)..(298): unsure at all n locations; Clone ID: LIB3165-004-P1-K1-E2
cccacgcgtccgcccacgcgtccgatcgggttaaaattcctgaaccgggacgcggcggctgacggcaacgttagggagtccggagacttcngctgaggcctcgggaagagttatcttttctgtttaacggcctgcccaccctggaaacggctcatccggaggtagggtccaacggtcggaagagcaccgcacgtcgcgtggtgtccggtgcgcccccggcggccctttgaaattcggaggaccgagtgccgttcgcgcccggtcgtacttataaccgcatcaagtcttcaaggtgaac

SEQ ID NO: 36423 - DNA, 378 bp, Gossypium hirsutum
  Clone ID: LIB3165-004-P1-K1-E3
ataaatggtattttaaattttaaatgataatatcttcatctttttcctataaagattgggtggaaaaattatgataggtaactcatcctcaaacatcccccgcccctaaaaaactctcactcatataatttaaattcgaagaatctgctacatcaaagggaaatcacaaatcccatttctcttccttacatcttttctttccttttcaacaattgcatcttttgcttttgatcccaaattctgggtttcctcttctgtccatcaatcaattcatactagttactcgaaatcgttaattttaagttgaagaaaaatgggcggtggtagggaaggtgaatcaagtgacaaagggctgttttctcatcttgctggctatgc

SEQ ID NO: 36424 - DNA, 184 bp, Gossypium hirsutum
  Clone ID: LIB3165-004-P1-K1-E4
tggagcccttagcgagttctatcgggtaaagccaatgctttctgggatcgggggggcaactcccttgacctatgctaaaactttaaataggtaggacggtgtcgttcacattcaggggcgatgaaactgctcctttttttggcttactcggtgccgttgcttgccttgttttcttctgtatggg

SEQ ID NO: 36425 - DNA, 333 bp, Gossypium hirsutum
  Clone ID: LIB3165-004-P1-K1-E5
gacctattcaacaccatcatcttaactgctgagattacacacatctctatacggtatgtacgagtattgaccatagctccttcaatcctctactacactttgatatgccattctaaaaagcaacagacgtataggctacccttgcttaccttgctgcatatatctctccctctctatatattgaacccaccatttgttttgcttcagattctcgattctgatgtccatctttgcagatattttgccgctgctacgccttgatcgcatggggtcgaagagtatgcttttaccagcgtccttttcgcaagcaataaccgatgccatgagcaacac

SEQ ID NO: 36426 - DNA, 386 bp, Gossypium hirsutum
  Clone ID: LIB3165-004-P1-K1-E6
gtttgtgaggaaagtaatgaattttttttttcaaagttcaagttgattctaagagtttctagttagtgcattaaaatatgaagttgaagatatgtcatgccagccagtattgctggtgaagttcttcagttggttctatatgatttggggagggctagccccatgtcaaagcataagcaaaagcaacagatacgtgaaatgataaaatcaagaggttgaataacggttatattatatgacaggtccaattctccttgaagactatcatttggtggagaagctagctaatttcgatagagaacgcatacctgaacgtgttgttcatgctagaggagccagtgcgaaagggttcttctaggtcactcatgatatattctaactcacat

SEQ ID NO: 36427 - DNA, 377 bp, Gossypium hirsutum
  Clone ID: LIB3165-004-P1-K1-E7
gctacccatctccctattctcaatggcaatggcaacccaagcctgggtcttcgggccatcaaccctctgcaccccaaaatccggcgaccgcatcgccgccgtgttacggaaacaaccaccgttcctaaccgtccctagcttcaagtccccaaaaagcatcatcgccccacgcaccatcaaagcccaagcaaccgaagagaaagccgagacaaccgccacaaaggaagcaccagtcggtttcaccccaccagagctggacccaaacaccccatcaccgatcttcggcggcagcaccggcgggcttttacgcaaagcacaattggaagagttttacgtcatcacatgggagtcacccaaggaacaaatcttcgagatgc

SEQ ID NO: 36428 - DNA, 373 bp, Gossypium hirsutum
  Clone ID: LIB3165-004-P1-K1-E8
gccactctgggtatttattatttcatctaaagaaacacttttggggattaaagttggtagtttattattattacttttttgtcgtagttaaaacggtatatatatagggggtatttattttgattttttgaatggcccggttgattcttccttgcaaaagttcgtgtttggcaaggaccagtcttttgggttaaaaggagtgtctgttcagtgaagagtatatctgggtataggtgtttctcggctctagaggccacgcatagaagaaattacaggtttccacattcttcgccttatagggcaagagaaaccagcagaaggctgatttgttcagttgcaacggaacctttacctaagcgagttgaagaatccg

SEQ ID NO: 36429 - DNA, 384 bp, Gossypium hirsutum
  Clone ID: LIB3165-004-P1-K1-F1
aaacaataaaccatacaaccccccttccctttcttatctatggcctgcgccactgacgctatgtctctttctctctcttccaaccccaactccaaattgtcctctgacttcatccccaagcttaataagcccgtcaatgtttctcttcgcgcttccacttccgctgagttgaatcccggacgactttttctctccagacccattggactcagtcgcaggaattgcgccaatgcaactccggtgatggatcagtcagttggtgaaaggagctcttcggtccccactattgttgaggtggatttgggtaatcggagttatccgatctacatcggctccgggttgcttgatcagcatgagctttttcaaaagcatgttcatgggaag

SEQ ID NO: 36430 - DNA, 371 bp, Gossypium hirsutum
  Clone ID: LIB3165-004-P1-K1-F10
cccacgcgtccgatttttcaaagatctaactgcctttgtgcttgggggtttaagtttggcgggatttagttgatatcaagaaagcttctgttttgtaaaaaaaaaaggtaaatagagaaggattatggatctaagtttggttgaatttgattattaatttcgatctgaagatatggatagcattttttggttccgttccgttaactaagacctttattaaattcacttatggaatttgctcgctagcacttaggccccttgactttttttgcagacaaactgaatttcaggtgttttgattcatatctaatttgattcttttcacaggaatatatttaaatcattctttacacattcattgaaatgtaagt

SEQ ID NO: 36431 - DNA, 383 bp, Gossypium hirsutum
  Clone ID: LIB3165-004-P1-K1-F11
cttagccaaggccttttcacatactacttggacaacaacatggatggattctgcgattgccccagctttcatggacaagcttgttgttcacatcaccaagaacttcatgacccttcctaacattaaggttcctcttatcttgggtgtttggggaggcaaaggtcaaggaaaatctttccaatgtgagcttgtctttgccaagatgggaatcaaccccattatgatgagtgccggagaattggaaagtgggaacgccggagaaccagccaagttgatcaggcaaaggtaccgtgaggccgccgacattatcaagaaagggaaaatgtgttgcctcttcatcaacgatctcgacgctggagccggtcgtatgggaggaaccacac

SEQ ID NO: 36432 - DNA, 382 bp, Gossypium hirsutum
  Clone ID: LIB3165-004-P1-K1-F12
caggatcgaagagataagattatattgaaaaactaaacataatagagcccctgggacttgcttcattgatttgccctctcaaagcccaagaaaaatggcttctgcttccgctactctcctcaagtcttcacctattatcgacaagtccgagtggattaagggccaaaacctccgccacccttcggtttgttttgtacggtcacaccctacatcggccgcctttgccgtccgtgctagttcatatgccgatgagcttgttaagaccgcgaaaactgttgcatctccaggtcgtggtattttggccatggatgaatcaaatgctacatgtgggaaacggcttgcctcgattggtctcgagaataccgaggcaaaccggcaagct

SEQ ID NO: 36433 - DNA, 384 bp, Gossypium hirsutum
  Clone ID: LIB3165-004-P1-K1-F3
cccacgcgtccgctcacgcgtcctttaaaaaaattaggtaaagagagaaccaaagagcaagtggaggaacagtgcaaaagttttctcaagaaaaagtggagatatataaaggttgataccttaactcaagaaaaaaaaatggcgttttacgtcgacgaagaagaggtctggaaatgtccgagtcatccttctaagcgtcgccgtactggtatctgcccggtttgtctccgagacaaacttgcttctctttgccccgactgcgcccacgcgcgtccttgctcatgtatcacaacctcttcttcttcttcctcctcttcctccttctcccgcttctcaactgcggcggctggtggcaacacaggtgtcggttctgttggtcgagtt

SEQ ID NO: 36434 - DNA, 390 bp, Gossypium hirsutum
  Clone ID: LIB3165-004-P1-K1-F4
gaagccatggccagcatgataatttcttcctcaaagcctgtaatctccattggtgcttcatgatccttcttttccaaacccaaactcaaacaaatcccacaactttccctcccaaaactccccactccaaagttcttgaaaacccaacaaatcccctcactctcgtccaccactctcaaatctatctccctcttcacagtcaccactttatcctttgccccaccttctgttgctgcagaaatagaaaaggccgctcttttcgatttcaacttaaccctccccatcatgatggtccagttcttgttcctcatgtttgctcttgacaaggtctactttaccccactcgggaaattcatggatgagagagatgctgccataaaggagaaactt

SEQ ID NO: 36435 - DNA, 384 bp, Gossypium hirsutum
  unsure (1)..(384): unsure at all n locations; Clone ID: LIB3165-004-P1-K1-F5
gtctccaccagctgctgccgctctttgattagcactctgctccctccccaatagccatcccgctcctctctgtatttccattaatttgtttttttttttttttttttggctttncttttcacatcaaacacctacaataacactgcaaccaatcttttcagcttaaccccccccaacaaaaaaaaagaaaaaggaaaaagaaaaaaactaagtgagaacattttcagtgagcctagtcgaaattgtatacggttttggggttttgtttggtgccgcatgtcaaattcagaggctgctgctaaaaacggagcaacaatggatacccagagacaacaagcgccggggaacggtgcccttgccgtcaagaaaccttccttcaaagac

SEQ ID NO: 36436 - DNA, 394 bp, Gossypium hirsutum
  Clone ID: LIB3165-004-P1-K1-F6
gcgcagtttccgaatcttttacagctcgtaaactcgttgaattgactcatggcttgcgccgttgggtccgttgctaagaagaaaaccgctggctccaagaagcctaaatcagctccttcacaccctccatttcttgagatgatttcagatgcaatcgtttcgttgaaagagaggacaggatcgagccaatatgcgattgcgaaattcattgaagagaagcataagcaattaccggcgaatttccgcaaagtcttacttgttcagacgaggaagtttgttgcttccggaaagctcgtaaaagtgaaagcctcttttaagctgccttcggcttatgccgcagctaagaaaccagccgccgtagctaagaaacctgccgccgcgaagcctaaatctg

SEQ ID NO: 36437 - DNA, 377 bp, Gossypium hirsutum
  Clone ID: LIB3165-004-P1-K1-F7
cccacgcgtccggcagatcttcgttaaaaccctaacggggaaaaccataacccgtgaggtcgagtcttctgacaccatcgacaatgtcaaagccaagatccaagacaaggaaggcatccctcccgatcaacaacgccttatcttcgccgggaagcagcttgaagacggccgcaccttagccgactacaatatccagaaggaatccactcttcacctcgtcctccgcctccgaggtggtgccaagaagaggaagaagaagacctacaccaagcccaagaagatcaagcacaagaagaagaaggtcaagctcgccgtgctccagttttacaaggtggacgagtcgggtaaggttcagaggctgagaaaagagtgtccca

SEQ ID NO: 36438 - DNA, 378 bp, Gossypium hirsutum
  Clone ID: LIB3165-004-P1-K1-F8
gtcgtatcagaagtttttctcttcttctctgaaattcccttgctatggttctgtggaagaaatttttttgagatggcccgtacgaagcaaactgctcgtaaatccaccggcggcaaggctccaaggaagcagcttgccactaaggctgctcgcaagtcggcaccgacaaccggaggcgtgaaaaagcctcaccgatatcgccctggaactgtagctctgcgtgaaatccggaagtaccagaaaagtactgaactcctcatcaggaaactgcctttccaaaggctcgttcgtgaaattgcccaagactttaagaccgatctgcgtttccagagccatgctgttttggcgttgcaagaggcggcagaggcataccttgtt

SEQ ID NO: 36439 - DNA, 267 bp, Gossypium hirsutum
  Clone ID: LIB3165-004-P1-K1-G10
ggagtttagttcagtgtctaaccttcgcattgccaggctcgcaggccatcttcgacctcagatggaggaaagttctattttgaggcgagctgactgtagagcgaaaggagggtcaccagggttcaaagttgctatcttaggagcagctggaggcattggccagccttttgcaatgttaatgaagatgaattctctcgtctcgggtcttcatctttacgatgttgtgaactctcctggtgtcacagctgacctcagtcacattgatac

SEQ ID NO: 36440 - DNA, 244 bp, Gossypium hirsutum
  Clone ID: LIB3165-004-P1-K1-G11
cttaatcgaagcctttacacattcttcttgcactacaccttgtggggaccctacaacttgccagattgaatggacaatttaaagcctaacataaacaacaactgcatgaccttctctaacattaaagttacctatattttgcatgtctgaggggataaagggccaaaaaaatcttcacaatgtgagctgttttgtgccatgatacgatacataccccatctgattcgttcctgctaattcatat

SEQ ID NO: 36441 - DNA, 162 bp, Gossypium hirsutum
  Clone ID: LIB3165-004-P1-K1-G12
ctgaatcgaagacttaagacattcgtgtagaactacaccatgtatggaccctgcgacgtgctagattgaatggacatgttagaggccaacataaccgagaactgcatgagctactctaacaaaaaagttacctattattgacatgttcgagggggttaaggg

SEQ ID NO: 36442 - DNA, 373 bp, Gossypium hirsutum
  Clone ID: LIB3165-004-P1-K1-G4
gcgtcttgatttccctgtaatccatcatattcagtttccaaatgggactcacaggggtgacttagggattaatgctggcaccaatgctggagcccttctggtggatggactcggagatggtatattgttggaagcaccagaccaagattttgatttcctcagaaacacttctttcaacttactccagggctgtagaatgaggaataccaagacggagtatgtttcatgcccatcttgcggcagaacattgtttgaccttcaagaaataagtgcacaaatacgagaaaagacgtcacacttgcctggtgtttcgattgcaattatgggttgcatcgttaatggtccgggggaaatggctgatgcagatttcgga

SEQ ID NO: 36443 - DNA, 295 bp, Gossypium hirsutum
  Clone ID: LIB3165-004-P1-K1-G5
cccacgcgtccgggaaagtaagtatccgaagcgaaaggatttgagagaaagaagggaaagacgtctgatagaaaaatggataaagcaatcaacagacaacaagttttgcttaatcatttacaaccctcttctgagtctcatcaatcacctgctgctattctatttccttccaactgcgcggcgggggatagcgctgcttatcaccggacggctgcttttggggatgatgttgtgattgtcgcggcatttctcacttgaatttgcagagcaaaacgtgtaggcttcaaaaattcac

SEQ ID NO: 36444 - DNA, 391 bp, Gossypium hirsutum
  Clone ID: LIB3165-004-P1-K1-G6
cccacgcgtccgggtctcacttcaagctgcagctaccctgatgcaaccaatcaaggttgctgcaccatcaaggaccaatgtgctgctcaggtcctcccagagcgtttctaaggccttcggtttggagcctgttggtgctaggctcacctgctctttgcaaactgacctcaaggacttggctcagacgtgtgttgatgctaccaagctcgctggtttcgctcttgctacatctgctcttgttgtctcgggagcaagcgctgaaggagttccaaagcggctaacctacgatgaaatccaaagcaagacatacatggaagtcaaaggaacaggaactgctaaccagtgcccaaccatcgatggtggtgtcgactcttttgccttcaagcctggc

SEQ ID NO: 36445 - DNA, 372 bp, Gossypium hirsutum
  unsure (1)..(372): unsure at all n locations; Clone ID: LIB3165-004-P1-K1-G7
ggaacccaaggccagaagactcttttagcatttcaccgcaaagagggagataagaaatgtgagcgagtatcaagaaattgcgaagcaaaagttgccaaagatggtgtatgactactacgcatctggtgctgaggaccaatggacattgcatgagaataagattgctntcaccaagatactgtttcgtcctcgtattctcattgatgtaaacaagatagacatgaccacaactgtgttgggtttcaagatatcaatgcctatcatgattgccccaactgccatgcaaaaaatggctcatcctgaaggggagtatgcaacagctagggctgcatctgctgctggaactatcatgacattatcctcatgggcaac

SEQ ID NO: 36446 - DNA, 379 bp, Gossypium hirsutum
  Clone ID: LIB3165-004-P1-K1-G8
cgaacttcccaaaaccaaaccccaactctctgcttatggatcctctcctatgctcggcgagcggggggcactttcatgaacagcggcagtcactgccgattcttctaagcttagatacccacacgcgtgccctttcccaactcactcctcaaccaccacctgtgcctttttctcctcaattccctctaaactaacccctacccacctctcctcttgcttcctccctcctttcctcactaccgtcgccaccacttccgtattccctcgccgtcgcggttctttcaccgtcaaagctgcccgtggcaaattcgaacgcaaaaagccccacgtcaacatcggcaccatcggccatgtcgaccacggcaaaaccaccttaact

SEQ ID NO: 36447 - DNA, 369 bp, Gossypium hirsutum
  Clone ID: LIB3165-004-P1-K1-G9
gaaaaattctcttcctttttttttattccttcctttttcctttcatccaatcgagcaaattcagagcttacaaaagaaaaatggccggaatcggacctttaactcaagactgggagcccgtcgttattcggaaaaagcccccaaacgctgccaccaagaaggatgagaaagtcgttaacgccgcccgtcgagccggtgccgagatcgaatccgtcaagaaatcgaatgctgggacgaacaaggcagcatcgagtagcactactttgaatacaaggaaacttgatgaggaaactgaaaatcttgctcatgaacgagtgccaactgaactgaagaaagccatcatgcatgctcgaatggagaagaaactca

SEQ ID NO: 36448 - DNA, 332 bp, Gossypium hirsutum
  unsure (1)..(332): unsure at all n locations; Clone ID: LIB3165-004-P1-K1-H1
gcgcccacgcgtncgtccacgcgtncggttcaaattgcttatgaagcaagaaaacagtgtccagatggagagaatttggattaccaatgaaattatccataacccaactgttaataagcgattagaggagatggaagttaaaaatattcctatcgaggaagggaagaaacggtttgatgtagtggataagaaggatgtcgtggttttgcctgcttttggagctgcagttgatgagatgttggttttgaatgacaaaaatgtgcaaattgttgatacaacttgtccttgggtaactaaggtatggaacgtaatatagaagcacaagaaagggg

SEQ ID NO: 36449 - DNA, 311 bp, Gossypium hirsutum
  Clone ID: LIB3165-004-P1-K1-H11
tctttttggggggcaagataaacaagcgtttctgtttgaagcatttaatttgaattgggttgattatgggtgaacaagaaacaaagaccaaagtccctgacccagtggctaacgggacttctcttccggaaaaatccagtgaagttgtagcagagaaaaaagaggaagaagataatggggtaaaggaaatggaagaagataagaaaaatgatgagaaagttgagactgagaagatggatgaagaccaaccggtcaaggatgacacagaaagcaaagagacggaaaaagaagaaaaggaggaacctaaaact

SEQ ID NO: 36450 - DNA, 168 bp, Gossypium hirsutum
  Clone ID: LIB3165-004-P1-K1-H12
caggatcgaagacttacgactttcgtgtagaactacacatagtatagcccctacgactggctagattgaatggacatgttaaagcccaagaaaaacgacaactgcatgggctactctaacaaagaacttacccattatcaagacgtccgagtggattaagggccaaaa

SEQ ID NO: 36451 - DNA, 342 bp, Gossypium hirsutum
  unsure (1)..(342): unsure at all n locations; Clone ID: LIB3165-004-P1-K1-H2
gttagtcgatcctaagagaccgggtaagcccgttcaacagcgcaagtaatgcgtgcaaataaagggtatagccataaaattgacacacaagtgatccccaaggcttcatccagatcattgattgcatgctcctccagcaatccttcctactgcgacaaatttgctttataactccaggccttcttagcggctgttgctctttctttcatgcttatttcggctccactccctgctggtgcggacattgcggggctcactccttgcaaagagtccaagcaattcgccaagcgcgagaagcagcanatcaagaagctggaatcctcgttgaagctttacgccccc

SEQ ID NO: 36452 - DNA, 343 bp, Gossypium hirsutum
  Clone ID: LIB3165-004-P1-K1-H4
ggaagacccaggcggacgcacacgcgttccgcttaaagggagattaagttcatataactgggatggcttttgtgacgtctggggaattgctggccactttggtgccaattgctttttattggatatactcaggtatgtatgtgatgtttgagtcaaggtttgagaagtacaagttgcactccaagaaagaagagggggagaagaatttgggtttcaaaaagggaggctttaaaggctctctttggccttaaagttttgctattggatattaactttttaacgtttccggtaacaagagaaaaaagtgggaggcattttcaaagaaatcacttacctttctttt

SEQ ID NO: 36453 - DNA, 373 bp, Gossypium hirsutum
  Clone ID: LIB3165-004-P1-K1-H5
acgcccacgcgtccgtcagggtcatatgtttggttatgccactgatgaaaccccggaattcatgcctcttagccatgtccttgcaactaagctcggtgcacgtcttactgatgttaggaagaatggcacctgcccctggctaaggcctgatggtaaaacccaggtcactgtggagtactacaatgaccgggggggcaatggttcaagttcggggccccactgccctaatctccacccaacatgatgggactgtaacaaacgatgaaatcgcttgctgacctcaaggagcatgtcatcaagcctgtcatccctgagaagtaccttgatgagaagacaatctttcaccttaacccatctggccgttttgtaatcg

SEQ ID NO: 36454 - DNA, 190 bp, Gossypium hirsutum
  Clone ID: LIB3165-004-P1-K1-H6
aaaacactctctgctctctggcgagcttttgaatgattataaacagtccgtaactcgctatttggagggcaagataaacaagcgttgctgtttgaagcatttaatttgaattggtttgattatgggtgaacacgagacacagacccaagtccctctcccagattctatcacgactcttctttcgcaaaaa

SEQ ID NO: 36455 - DNA, 378 bp, Gossypium hirsutum
  unsure (1)..(378): unsure at all n locations; Clone ID: LIB3165-004-P1-K1-H9
cccacgcgtncgcaactgcttcacattggcctctacaaccatggctctttcttccgcatcattcgccggtaaggcagtgaagttctccccttccacccctgaaatccagggaactggccgtgtttccatgaggaaaaccaccaagcctgttccttctggtagcccatggtacggtcctgaccgagttttgtacttgggtccactttccggtgagccaccatcttacttgaccggtgagttccctggtgactatggttgggacactgctggactctcagctgatcccgagacctttgctaggaaccgtgagctcgaagtcattcactgcagatgggccatgttgggagctcttgggtgtgttttccctgagctgttggc

SEQ ID NO: 36456 - DNA, 386 bp, Gossypium hirsutum
  Clone ID: LIB3165-005-P1-K1-A10
cccacgcgtccgtgggttctttggtttagttttcaagggtttctctcttcaaaaaaaccctcgagaaatctatgcgcttaacgcttacttttttattcattcgaggggttcttttccttctcttcttcttgttgttttagagatgggtttggtgtctgttttttgggagattttaaagaaacccacaattggagatgtggtgagggagttgctgatttttatagctcctttatgggttgctgtaattgttggggttttagttggttgggcatggaagccgaagtgggcaaatataggcagggagatgttcatggattgttctggttctaagaattcggcttctggagaaatcttttgggtttttttccgggggtttgggttccctt

SEQ ID NO: 36457 - DNA, 364 bp, Gossypium hirsutum
  Clone ID: LIB3165-005-P1-K1-A12
gtcgacggcttccatcaacggttggtgccttacctcctcttcttcctccaccaccacctcctctttttccgctcgtcgacgacctacattgcggccttcggtcgtcgctagccttaactcttctccttctcctccgactcttatccaagaccgcccggttttcgctgcccctgttcctttgctcaccccgagagaagagatgggaaacaagtcctacgacgaagccattgaagctctcaagaaacttctcagtgagaaaggagaactgaaagctgaagcagctgcaagggtagatcaaataacagcagagttaaacacaacatcagctgacggcaaaccatctgactcttctgttgagagactg

SEQ ID NO: 36458 - DNA, 324 bp, Gossypium hirsutum
  Clone ID: LIB3165-005-P1-K1-A2
ggaccgggacggacaggccgggccgacgcgtccgcccacgcgtccgcccacgcgtccggttcatcacatcatctacatttccctccactggttctctcttctatattttcccaagattattttctctttcctttttttcctccctattttttttctcgggaaaaaaagactttttttccggtatacccagatcttgtttagttccaagctttaggttgtcatcgttttctcgaggttttaaactatgggtatctcttgaatttgtgaagcaaagggagaaatattggttaaaaactagtagcagtgtattgaatcaagttttac

SEQ ID NO: 36459 - DNA, 372 bp, Gossypium hirsutum
  Clone ID: LIB3165-005-P1-K1-A4
tccgcccacccttccggggaaataccatcgttttgcatttgcaaagcctttcactgactcaaaaataacaagccttgaggaggacgatggaaatatactcaaactctactcgttttgctcttgcttgcaatacatcatcaaaaatcattgaacctattcagagtagatgtgcccttgttcgattttcaaggttatctgatcaggagattcttggccgtctcatggtggtagtagatgcagagcaggtaccgtatgttccggaaggtcttgaagccatcattttcacagctgatggtgatatgagacaggcgttgaaccaacttgcaggctacatacagtggattccgttttgtcaatcaagaaaatgttttc

SEQ ID NO: 36460 - DNA, 397 bp, Gossypium hirsutum
  Clone ID: LIB3165-005-P1-K1-A5
ccgtgagccccaacccggctcctgtgttttactttttcgatcccatgaatatcggtcttcctggtcttagttatctgccgcctgccaacgcggtggcgcctcctcctcctcctactgccggttcgccgtatttggaggatccgagtaagaagatccggaagccttacactattaccaagtccagagaaagctggactgatcaggagcgcgataagtttctcgaagctcttcaattatttgatcgtgattggaagaagattgaagcatttgttgggtccaagacagtaatccagatccgtagccatgcacaaaagtatttcctaaaggctcaaaaaaatggggcaactgaacatgtacctccccctcggccaaaaaggaaagcagctcatccgtaccc

SEQ ID NO: 36461 - DNA, 376 bp, Gossypium hirsutum
  Clone ID: LIB3165-005-P1-K1-A6
cccacgcgtccggcagaatcctccactttctcatcctaatctccctcccggctgcttgattcgctgtagccgatgacgacaatctatccgcgtaccaagctcttcaacagtacgacttcccagtaggcatccttcccaatggcgtggttgggtatgaattgaacagggaaacgggcgagttttcagcttatttgagtggaacctgcaagtttgacattgactcataccaactcagttacgaatccaccataaaaggagtgatctccccaggcaggataacaaatttgaagggagtgagcgttaagatttctcttcttctggcttaacatcgttgaagtgatacataatggggaccagatggagttctccgttggga

SEQ ID NO: 36462 - DNA, 333 bp, Gossypium hirsutum
  Clone ID: LIB3165-005-P1-K1-A8
caccattgttccaagtttgttgtaaaccaagctagaaccagcagccaacatggcctcattagcagcctccaccgctgccgcctcccttggcgtctctgaaatgctcggtaaccctctgaatttcagtggtggagctaggtcatcggctccaacaccatccaactcatccattttcaagaccgttgctcttttctccaagaagaaggccgctcctccaaagcccaaggctgctgctgtcgccccggccgatgaagagctggctaagtggtacggtccggacagaaagattttcttgcctgaaagtctgttagacagatcggagatcccagagta

SEQ ID NO: 36463 - DNA, 385 bp, Gossypium hirsutum
  Clone ID: LIB3165-005-P1-K1-A9
gttttaccatctgctgtatcagctagggtgagtattgaggctggatcaacatttgggtgggcgaagattgttggatccaaggggaaggctattggaattgaccggttcggggcaagtgcaccagcaggcaaaatatacaaggagtttggcttgactcccgaggctgttgttgcagcagcaaaagaactttgctaagcttgcttagaagtgtcgggagaaatttgtggttctgggttggaggttacactgaagagagaccattccatttgtgacagtctcgtttgtttttaataagaatcagaatccacttatattttatgttgcctgtgattcatcaaaaagcaaaacatagagagaaagggagggtagaagttgtgtatgatca

SEQ ID NO: 36464 - DNA, 265 bp, Gossypium hirsutum
  Clone ID: LIB3165-005-P1-K1-B1
taaatacccaagtttctataaatttaaatttataaattaataagcaccaatctatgggtcaactagggtcgtctcggtcagcagaaaccgagacactgagcaatgtcctaagcctggtggaggccttcagagcatttgattcagacaacgatggcgcaatcaatgctgcagagctagggggaatcctgagttcgctggggtacaacgctagcgagcaagacgtgagggccatgatgcgagaaggggacaccaacaaggatgtatt

SEQ ID NO: 36465 - DNA, 327 bp, Gossypium hirsutum
  Clone ID: LIB3165-005-P1-K1-B10
gtggaatgcctacattctgcattcctgtccaagatgggtgtgggatttgattaccgtcttcacatggccattgctgataaatggattgagattcttaaaaagagagacgaagactggaaaatgggtgaaattgttcactcgctaaccaacaggaggtggatggaaaagtgtgttgcttatgctgaaagccatgaccaagctctagttggcgacaaaacaatagcattctggttgatggataaaggtatgtatgagtttatggctctagatagaccaagtactgcacttatagatcgtggcattgcattacacacaatgattaggctc

SEQ ID NO: 36466 - DNA, 333 bp, Gossypium hirsutum
  Clone ID: LIB3165-005-P1-K1-B11
caaaatcagttgcttcacaatggcctctacaaccatggctctttcttccccatcattcgccggtaaggcagtgaagttctccccttccacccctgaaatccggggaactggccgtgtttccatgaggaaaaccaccaagcctgttccttctggtgactatggttgggacactgctggactctcagctgatcccgagacctttgctaggaaccgtgagctcgaagtcattcactgcagatgggccatgttgggagctcttgggtgtgttttccctgagctgttggctaggaacggtgtcaagttcggtgaagccgtatggttcaaggccgggtc

SEQ ID NO: 36467 - DNA, 392 bp, Gossypium hirsutum
  Clone ID: LIB3165-005-P1-K1-B12
cccacgcgtccggatatatttagctatagcatacactactagtacccactactagcaatggcttcctcaatgatctcatcggctaccattgccactgcctctccggcacaggctaacatggtcgctcctttcaccggcctcaagtctgcctctgctttcccagtcaccaggaaggccaacaacgacattacttctctcgcaagcaatggcggcagagtgcaatgcatgcaggtgtggcctcctactggaaagaagaagttcgagactctctcatacctccccgatcttacacccgtgcaggtggctaaagaagtggattaccttcttcgctcaaaatgggttccttgcttggaattcgaattagaggagggattcgtgcaccgtaaatactc

SEQ ID NO: 36468 - DNA, 259 bp, Gossypium hirsutum
  unsure (1)..(259): unsure at all n locations; Clone ID: LIB3165-005-P1-K1-B2
taaaaacaaaaatatctataaatttttaataattaaattaataagcaccaatctgtgggggaactagggtcgtctcggtcaccanaaaccgtcacactgagcaatgttctaagcctggtggaggccttcagagcatttgattcagacaacgatggcgcaatcaatgctgcagagctagggggaatccttagttcgctggggtacaacgctagcgagcaagacgtgagggccatgatgcgagaaggggacaccaacaagg

SEQ ID NO: 36469 - DNA, 389 bp, Gossypium hirsutum
  Clone ID: LIB3165-005-P1-K1-B3
caaaattccacttaaaaaatggcctccacagcttccctctccaccgccgtagccaccacctctttcctccgcggccacccggccccgaaaaccctaagctcccttcctttcaaccaatctcttttcgggctaaaaccccaacgaaatggccgtctcaccatggctgcatacaaagtgacactgttaacacccgaaggaccccaagaattcgtgtgccccgacgacgtttacatcgttgaccaagctgaggaagaaggcattgatcttccgttctcgtgtagggctgggtcttgttcttcgtgtgccggaatgattaagcaaggctccgtcgatcaatccgacggtaatttccttgatgatgaccagattgctgcaggttttggcctcac

SEQ ID NO: 36470 - DNA, 398 bp, Gossypium hirsutum
  Clone ID: LIB3165-005-P1-K1-B4
atttagctatagcatacactactagtacccactactagcaatggcttcctcaatgatctcatcggctaccattgccactgcctctccggcacaggctaacatggtcgctcctttcaccggtctcaagtctgcctctgctttcccagtcaccaggaaggccaacaacgacattacttctctcgcaagcaatggcggtagagtgcaatgcatgcaggtgtggcctcctactgggaagaagaagtttgagactctctcatacctccccgatcttacacccgtgcagttggctaaggaagtagattaccttcttcgctcaaaatgggttccttgcttggaattcgaattggaggagggattcgtgcaccgtaagtactcgagcttacccacgtactacgatg

SEQ ID NO: 36471 - DNA, 399 bp, Gossypium hirsutum
  Clone ID: LIB3165-005-P1-K1-B5
gtagcatatagtaatagtaagcagtaatagcaatggcctcctccatgatctcatcggcaaccattgccaccgtgaaccgctcctccccggcacaggccaacatggtggcccccttcaccggcctcaaatctgcctctgctttcccagtcaccaggaaggccaacaacgacatcacttctcttgcaagcaacggtgggagagtgcaatgcatgcaggtgtggccgcctcttgggaagaagaagttcgagactctctcatacctgcccgatcttactcccgtacagttggctaaggaagtagattaccttcttcgctctaaatggattccttgcttggaattcgaattagaggagggattcgtgcaccgtaagtactcgagcttacccacgtactacgatg

SEQ ID NO: 36472 - DNA, 314 bp, Gossypium hirsutum
  Clone ID: LIB3165-005-P1-K1-B6
cgagttttgtacttgggtccactttccggtgagccaccatcttacttgaccggtgagttccctggtgactatggttgggacactgctggactctcagctgatcccgagacctttgctaggaaccgtgagctcgaagtcattcactgcagatgggccatgttgggagctcttgggtgtgttttccctgagctgttggctaggaacggtgtcaagttcggtgaagctgtatggttcaaggccgggtctcaaatcttcagtgagggtggacttgactacttgggtaacccaagcttgatccatgctcaaagcatttt

SEQ ID NO: 36473 - DNA, 352 bp, Gossypium hirsutum
  unsure (1)..(352): unsure at all n locations; Clone ID: LIB3165-005-P1-K1-B7
caaccacctaatactaatgtctatggcaacctcaatctcatgtctgaaaatcccaaacccttcttctgcttcacctccatgttcctcatcaacctcatcttcgaccagttgtagattgtctgtaccacccaagccttatattgtgacgataagaagttctcaaactgagggtcctttgagaagacctgtggcaccttctccaccacctcctttgaaacccgtcccaccttcttctccctccgcttctcctccgccacaaccgacacctncttctttttcttcccctccgtctccgccgccttcagcggcagctgttggggaccagaatgtgatcactttggagtttcagaga

SEQ ID NO: 36474 - DNA, 350 bp, Gossypium hirsutum
  Clone ID: LIB3165-005-P1-K1-B9
ctcgctcccatcaattttgttcaatttccttttctttgaaaccccatttctataaattctccttctctgaatcatccaacatcaccatgtaaatgccactcctccctttctttctttacacactttcaactttcacgtttcccttttttttccagatctttattgttgaagaaaacttctgcaaacaatgacttcggctaatggcaatgcttcacaagtgaccaacaatggcgatgtaaggaaacccttcaaaatctttattggttacgatccgcgtgaagatcaagcgtataaagtctgccgccattctatcttgaaacgcacttctatacctgttgagatcacaccca

SEQ ID NO: 36475 - DNA, 371 bp, Gossypium hirsutum
  Clone ID: LIB3165-005-P1-K1-C10
cccacgcgtccgcagattcttcactcattcatcttttttctttggtttttgagcatcaccacacaaatccatagatacctcccctccacccccctctcaacccacaattttacacaggagaaatttatcacaatcatgaagcgagaccacaatcatctccaacccaacccagacccctcttctctccgcggcgctccttcaaccggaaaggccaaggtttgggacgaagaatccgcccaacaagactgtgggatggatgagcttttggcggttttgggttacaaggtcaaaacttcagacatggctgaagtggctcaaaagcttgagcagttggaggaggttatgtgtaatgttcaagatgatgggatttc

SEQ ID NO: 36476 - DNA, 394 bp, Gossypium hirsutum
  Clone ID: LIB3165-005-P1-K1-C12
gttcaatctccacaccagcgaaaacccatttaggttttcaccaaaaggaagtagttttctataggagaagcagcaagagaggtggcagcggcagcggcagcagcagcggcccatgcgtgataacatgctcggccggtgattcacaaactgttgtgattggtttggccgcagactcaggatgtgggaagagtaccttcatgaggaggctaacaagtgtgtttggtggtgcagccgatccacctaagggaggcaatcctgattcaaacacactcattagcgatatgaccactgtgatatgcttagatgattaccattcactcgacagaactggaaggaaagagaagggggtgacagcacttgacccaagagctaacgactattacctcatgtatga

SEQ ID NO: 36477 - DNA, 393 bp, Gossypium hirsutum
  Clone ID: LIB3165-005-P1-K1-C2
catttctcaaaaatgagctccattgctttcaagcccttccacggcctccgccggagctgcgccgtccccacccctacttccactaccaccaccctttacaaacctgctgtcaaattccatgtctcagccgccaaaacttctccaaaactaagcaaccgcaacctcagggtagccatcatagggggtggtccggcaggaggctcagccgccgaaactctcgcgaaggctggcatagaaacgttcctaatcgaacgaaaactggacaactgcaaaccttgcggcggagccatcccgctttgcatggtgggtgaatttgacttgccgttggatatcatcgaccggcgagtcaccaaaatgaagatgatttcgccctccaacattgccgtcgacatc

SEQ ID NO: 36478 - DNA, 389 bp, Gossypium hirsutum
  Clone ID: LIB3165-005-P1-K1-C3
cccacgcgtccgcttttgtataactgtagcatatagtactagtaagcagtaatagcaatggcctcctccatgatctcatcggcaaccattgccaccgtgaactgctcctccccggcacaggccaacatggtggcccccttcaccggcctcaagtctgcctctgctttcccagtcactaggaaggccaacaacgacatcacttctcttgcaagcaatggtgggagagtgcaatgcatgcaggtgtggcctcctcttgggaagaagaagttcgagacactctcatacctccccgatcttacacccgtacagttggctaaggaagtagattaccttcttcgctctaaatggattccttgcttggaattcgaattagaggagggattcgtgca

SEQ ID NO: 36479 - DNA, 383 bp, Gossypium hirsutum
  Clone ID: LIB3165-005-P1-K1-C4
aaatcaactgcttcacaatggcctctacaaccatggctctttcttccccatcattcgccggtaaggcagtgaagttctccccttccacccctgaaatccagggaactggccgtgtttccatgaggaaaaccaccaagcctgttccttctggtagcccatggtacggtcctgaccgagttttgtacttgggtccactttccggtgagccaccatcttacttgaccggtgagttccctggtgactatggttgggacactgctggactctcagctgatcccgagacctttgctaggaaccgtgagctcgaagtcattcactgcagatgggccatgttgggagctcttgggtgtgttttccctgagcttgtggctaggaacggtgtc

SEQ ID NO: 36480 - DNA, 279 bp, Gossypium hirsutum
  Clone ID: LIB3165-005-P1-K1-C6
gagacactgagtttgctaaagatgctgcctttggctataaatcttcaaaccttcgagagtgggtggaggagaaaacagcaggacgaattccagctagcattgttgcatccatttctatccaacttttaagaaaaggtggaccagatgctgtttgtgagcttctttgcagtttggagaagggatcgacatgcattgtaaatgcagttagtgaacgagacatggctgtatttgctgctggaatgatccaggcggaactgaaggggaagtctttcttatgcc

SEQ ID NO: 36481 - DNA, 376 bp, Gossypium hirsutum
  Clone ID: LIB3165-005-P1-K1-C7
ctttgttttccaatagttcgtaacaatgtcggtctcacttcaagctgcagctaccctgatgcaaccaatcaaggttgctgcaccatcaaggaccaatgtgctgctcaggtcctcccagagcgtttctaaggccttcggtttggagcctgttggtgctaggctcacctgctctttgcaaactgacctcaaggacttggctcagacgtgtgttgatgctaccaagctcgctggtttcgctcttgctacatctgctcttgttgtctcgggagcaagcgctgaaggagttccaaagcggctaacctacgatgaaatccaaagcaagacatacatggaagtcaaaggaacaggaactgctaaccagtgcccaaccatcgat

SEQ ID NO: 36482 - DNA, 349 bp, Gossypium hirsutum
  Clone ID: LIB3165-005-P1-K1-C8
aacaaaatcagttgcttcacaatggcctctacaaccatggctctttcttgcccatcattcgccggtaaggcagtgaagttctccccttccacccctgaaatccggggaactggccgtgtttccatgaggaaaaccaccaagcctgttccttctggtagcccatggtacggtcctgaccgagttttgtacttgggtccactttccggtgagccaccatcttacttgaccggtgagttccctggtgactatggttgggacactgctggactctcagctgatcccgagacctttgctaggaaccgtgagctcgaagtcattcactgcagatgggccatgttgggagctcttg

SEQ ID NO: 36483 - DNA, 392 bp, Gossypium hirsutum
  Clone ID: LIB3165-005-P1-K1-C9
cttcacaatggcctctacaaccatggctctttcttccccatcattcgccggtaaggcagtgaagtgctcgccttccacccctgaaatccggggaactggccgtgtttccatgaggaaaaccaccaagcctgttccttctggtagcccatggtacggtcctgaccgagttttgtacttgggtccactttccggtgagccaccatcttacttgaccggtgagttccctggtgactatggttgggacactgctggactctcagctgatcccgagacctttgctaggaaccgtgagctcgaagtcattcactgcagatgggccatgttgggagctcttgggtgtgttttccctgagctgttggctaggaacggtgtcaagttcggtgaagctgtat

SEQ ID NO: 36484 - DNA, 355 bp, Gossypium hirsutum
  unsure (1)..(355): unsure at all n locations; Clone ID: LIB3165-005-P1-K1-D1
cccacgcgtccggttccatgtgaacggcacttgcacatgggttagtcgatcctaagagacgggggaagcccgtccgacagcgcgtccagcgcgagcttcgaaagggaatcgggttaaaattcctgaaccgggacgcggcggctgacggcaacgttagggagtccggagacgtcggcggnggcctcgggaagagttatcttttctgtttaacggcctgcccaccctggaaacggctcagccggaggtagggtccagcggccggaagagcaccgcacgtcgcgtggtgtccggtgcgcccccggcggcccttgaaaatctcgaggaccgagtgccgtccgcgcccggtcgtactcat

SEQ ID NO: 36485 - DNA, 356 bp, Gossypium hirsutum
  Clone ID: LIB3165-005-P1-K1-D10
acaaaatcaactgcttcacaatggtctctacaaccatggctctttcttgcccagcattcgccggtaaggcagtgaagttctccccttccacccctgaaatccagggaactggccgtgtttccatgaggaaaaccaccaagcctgttccttctggtagcccatggtacggtcctgaccgagttttgtacttgggtccactttccggtgagccaccatcttacttgaccggtgagttccctggtgactatggttgggacactgctggactctcagctgatcccgagacctttgctaggaaccgtgagctcgaagtcattcactgcagatgggccatgttgggagctcttgggtgtgtt

SEQ ID NO: 36486 - DNA, 384 bp, Gossypium hirsutum
  Clone ID: LIB3165-005-P1-K1-D11
ctcaaattcagataacaatttcacagttgttttcttcactctctctctcagccgtggctgcagccatctccaccgtcgccgccgctgccgccgccaaccgagctctgggagtgtcagtcccaacctcagctttcatggggaagaaagtgagctcgagattcaacaacaccaggcaggttccttcgggaagttttaaggtgatggcggccgaaaaagagatagacgaagagacacagaccgaaaaggaccgatggaaagggttggcttacgatatttcggacgaccaacaagacattactcgagggaaagggatggtggattccttgttccaagctcccatgaatgatggaactcactatgctgtcatgagttcctatgaataca

SEQ ID NO: 36487 - DNA, 347 bp, Gossypium hirsutum
  Clone ID: LIB3165-005-P1-K1-D12
cccacgcgtacgaactggtaaccctttgtatccaactcggctttgttgcaaaagatcattctgtcatggcaaccatctcggctaccaccacccctgcagctcttgttcacaagacattgcccaggattgcatccccagtccccattgggttgccaacaatgggaaagaaggggaaggtgatgatgatgtgtagcatggagaagacgagcgagaatgggtcacacatggtgatgagtgcatcattgctggcagcagcctgcgcagccaccatgtcaagcccagccatggctctggtggacgagagaatgtccactgaacgaacaagacttgcctttggattgagcaac

SEQ ID NO: 36488 - DNA, 395 bp, Gossypium hirsutum
  Clone ID: LIB3165-005-P1-K1-D2
aatcccttctctgagaaaaaaacacctatattttaataaaaaaccataaaaagtaaacaaataaatttgaagagcaggaaaagaaaggtaggctgaagattcccattcagaggctttctccaggccaaaacagagctcaggatcagcagccatgggaatcattacgatagccattggagacgccttgttaaccttgatgtgggtattttccatgccgctcttaaagattttcaccttcaaaatcgtcgggtttctcggcgcccaaacgttgcctttggcgactctcatggtctcgacgctcctagtcagtattttagtcatgattttcagctatatcggcaacgttttcggcggcgcaagcttcaatcccgccgcttccatgactttccacgttg

SEQ ID NO: 36489 - DNA, 394 bp, Gossypium hirsutum
  Clone ID: LIB3165-005-P1-K1-D3
cccacgcgtccgattcaagcttaaagtctctctctttccttccttcaaatacaatttcacatggctggtcttcagtataattttttccccacagatttcttctaccctcgtccgccacagcctgctcctgtcctcgactctactcctccctccacggtgccgatccaaaagagagaggttgttgttgatggtaataatgacggtaagcagcggcagcctggaactccggttgttcaccgccgcaacaacaagactagcgtttcgatgaggaggaggcaaggcgaaaaggtcggtagtactagtattgacgttcaaaatccaggcgatcagcgagttaagttgccgcgaaactcgttttcttccttgattttggttcctgaacaagacgattccg

SEQ ID NO: 36490 - DNA, 362 bp, Gossypium hirsutum
  Clone ID: LIB3165-005-P1-K1-D4
cccaacctaagttttcatggggaagaaagtgagctcgagattcaacaacaccaggcaggttccttcgggaagttttaaggtgatggcggccgaaaaagagatagacgaagagacacagaccgaaaaggaccgatggaaagggttggcttacgatatttcggacgaccaacaagacattactcgagggaaagggatggtggattccttgttccaagctcccatgaatgatggaactcactatgctgtcatgagttcctatgaatacatcagccaaggtcttaaaacgtacaatttggacaacaacatggatggtttctacatcgctcctgcattcatggacaagcttgttgttcacatcagca

SEQ ID NO: 36491 - DNA, 355 bp, Gossypium hirsutum
  Clone ID: LIB3165-005-P1-K1-D6
ggaataaccgagtccgtacgatcctttctcttctctgcgtcaaaaaccacatacatattcaacgagggcggaaccaggttttccaccctcttcctcctgctatataaagccattttcacgaaagccaagctcgctcgtccagttttcatttttgtagtcaaaacagtgcctttctcctataaatatggggctttcttatttttctttcccttccaggcacccttctccatgtctcgttgaatggattcccttctcgcccctttctacacgtcgtctttcccttctctgaacaacaatagcaacagtaggattaagcataactcgctgccatccaggttgggtttctttaatttga

SEQ ID NO: 36492 - DNA, 379 bp, Gossypium hirsutum
  Clone ID: LIB3165-005-P1-K1-D7
gtacaagaagacgtaccgatacgatgccgttttcgcccttggtttcgttactgtctatgatcagttgatggaagggtacccgagtgatgaggatcgagatgccatcttccaagcttatattaacgccttaaaagaggaccctcaacagtatagagctgatgcgcagaaattagaagaatgggcgcgagctcagacttctagttcgctagtcgagttttcatctagagatggagaggttgaagcgatacttaaagacattgcagaaagagctggtagtaaagggagtttcagttatagccgtttctttgctattgggttgtttcgtcttcttgagcttgccaatgcaactgaacctacggtgttggaaaagctctgtgca

SEQ ID NO: 36493 - DNA, 375 bp, Gossypium hirsutum
  Clone ID: LIB3165-005-P1-K1-D8
gtcttttttttttgccatgggttcaaactcattgaagaaccctcttctgttcagtgatgaagttgagcctggttatgtcaaaaactcatcttttctgaaatcatcagtgaaatggggtttaaagattgtaatgtgggtgattttcattgcatgggttggtgttatttttctatatcctggagaaattggtagtcagttggttgagaaaattattaatgccaccaacggatctgttttcggcacttcaggaagtttgttcctggtattcagtgctccaattcttctcattgcaatccttgcggtagctcatctgatcatctctggtgaacatgtttttgagaagagtaagtcctcaaagaaaccagggttttcgtt

SEQ ID NO: 36494 - DNA, 392 bp, Gossypium hirsutum
  Clone ID: LIB3165-005-P1-K1-D9
caagatctggttttgatctgatcatatcgtataaaaatatcaaaacatgtttgggagagcaccgaagaaaagcgataattccaaatactatgagattttgggagtatcgaaaaacgcttcccaagatgatctaaagaaagcttatagaaaagccgctattaagaatcatcccgataaaggcggcgatcctgaaaagtttaaagagttggctcaagcttatgaggtgctgagtgacccggagaagcgtgagatttatgatcagtatggtgaggacgcccttaaagaagggatgggcagcggtggcggtggccatgaccctttcgatatcttccagtctttctttggtggcaatccttttggtgctggtggaagcagccggggcagaagacaaa

SEQ ID NO: 36495 - DNA, 129 bp, Gossypium hirsutum
  Clone ID: LIB3165-005-P1-K1-E1
cccacgcgtccgggcaaaatggatccgtatcctcgggaaaaggattggctctgagggctgggcaggggggtcccagtcccgaacccgtcggctgcccggcgcactgctcgaaggctgctccccgcgggc

SEQ ID NO: 36496 - DNA, 356 bp, Gossypium hirsutum
  Clone ID: LIB3165-005-P1-K1-E10
cccacgcgtccgcccacgcgtccgtccacgcgtccgatatttagctatagcatgcactactagtacccactactagcaatggcttcctcaatgatctcatcggctaccattgccactgcctctccggcacaggctaacatggtcgctcctttcaccggcctcaagtctgcctctgctttcccagtcaccaggaaggccaacaacgacattacttctctcgcaagcaatggcggcagagtgcaatgcatgcaggtgtggcctcctactggaaagaagaagttcgagactctctcatacctccccgatcttacacccgtgcagttggcttaggaagtggattaccctcttcgctcaaa

SEQ ID NO: 36497 - DNA, 386 bp, Gossypium hirsutum
  Clone ID: LIB3165-005-P1-K1-E11
cccacactctcaaattcagttaacaatttcacagttgttttcttcagtctctctctcagccatggctgcagccatctccaccgtcgctgccgctgccgccgccaaccgagctctgggagtgtcagtcccaacctcagctttcatggggaagaaagtgagctcaagattcaacagcaccaggcaggttccttcgggaagttttaaggtgatggcggcggagaaagagatagacgaagagacacagaccgaaaaggaccgatggaaagggttggcttacgatatttcggacgaccaacaagacattactcgagggaaagggatggtggattccttgttccaagctcccatgaatgatggaactcactatgctgtcatgagttcctatg

SEQ ID NO: 36498 - DNA, 294 bp, Gossypium hirsutum
  Clone ID: LIB3165-005-P1-K1-E12
tcttgatgtccggcttagtgatttgaagcttgttttaggaccagaactgaggatagtgtatcctttgattctaaactttgctgatggtggggaactcgagttgaatggccaagctcatcccaaatggattaaacccaagggcattttaacatttgagaattgtgatgtgaatcttgctgcaactcaagtgaggcttaagccggaacatctaaacctagcaaaatttgaacctgagtatggattcaatccaatgctggacttatctttgggtggatcagaatgggaatttcagat

SEQ ID NO: 36499 - DNA, 358 bp, Gossypium hirsutum
  Clone ID: LIB3165-005-P1-K1-E2
cccacgcgttcgcccacgcgtccgcccattcgtccgcggttttgaaaagaaaaaaagaaaaacttttgcaaaattgaatttaacattggtcgaggcaaaattaagggggctgaaggagttcattgatcagtgcaaagctaatcctttcattctaagcgagccttcactctccttgttccgtggctatctccaaaggctgggagcaaatcttccatcttcagctagcggccatgaagtcggagactacaaatcgaagagttatgtgatggaggagagtgaccaggtagtggcggacgatggatagaaagttaatttacaggacgtggaagaagagattattgaatctgatatcgatctc

SEQ ID NO: 36500 - DNA, 389 bp, Gossypium hirsutum
  Clone ID: LIB3165-005-P1-K1-E3
caaaaactgggatggcttttgtaacgtcggaggaattgctggccactttggtgccaattgctgtttattggatatactcaggtatgtatgtgatgtttgagtcaaggtttgagaagtacaagttgcactccaagaaagaagaggaggagaagaatttggtttccagaaaggaagtcttcaaagccgttctttgccatcaagtcatgtcaattgctattaacctcttcacgtatgcggtaacaagagaaaaagatggtgaggcatctccaaagaaatcactaaccttgcttcttctagccaagcaattggtgatagcaatggtggtgatagatacatggtcgttttttgtgcattggtacttgcatcagaacaagtttttatacaaacac

SEQ ID NO: 36501 - DNA, 396 bp, Gossypium hirsutum
  Clone ID: LIB3165-005-P1-K1-E4
cccacgcgtccggtgttgaagctttaaatcccttgtgttccttcactccattgccaggttgccaccactaatggcgacatccatagcagctcgcatctccaggaaggccgcggcctctgctttctccgctcaccgtcacgtaatctcatcccgttgtttcgccacggagtcggcgaaaacgatctcgccgtcgtcggatcgagtcaagtgggactacaggggccaaaggaagataatccctctcggacagtgggtccctaaggtcgccgtcgacgcttatgtggcacctaatgtcgtcttggccggtcaagtaaccgtctacgacggagcgtcggtgtggaacggctgcgtcctacgtggcgatctcaacaagatcactcgtgggattctgctcta

SEQ ID NO: 36502 - DNA, 399 bp, Gossypium hirsutum
  Clone ID: LIB3165-005-P1-K1-E6
cccacgcgtacgaagaaacacaggttttgtatgatggttcaaacattgactcgcctgtatagtactcgaaatgtaggatcttttcgcctgtgtgataatgcaatgagacatcaccaccaccagcaacaaaacgcaaccgcggcaggcggtaataacgagcacgtggatgatgtccatgatcatctgcaaccaagtgaagataaatcaatggggcagcaaaatataggagagcctgcggttgaaactccccaggagaggccacaaacagatatggagcagatgaaggaaagattttctaagttgcttctgggagaagatatgtcacggggaggcaaaggtgttccttcggctttggctttgtcaaatgcagtgacaaacctagcagcatctgattttggg

SEQ ID NO: 36503 - DNA, 392 bp, Gossypium hirsutum
  Clone ID: LIB3165-005-P1-K1-E8
cccacgcgtccggccaacatggcctcattagcagcctccaccgctgccgcctgccttggcgtctctgaaatgctcggtaaccctctgattttcagtggtggagctaggtcatcggctccaacaccatccaactcatccattttcaagaccgttgctcttttctccaagaagaaggccgctcctccaaagcccaaggctgctgctgtcgccccggccgatgaagagctggctaagtggtacggtccggacagaaggattttcttgcctgaaggtctgttagacagatcggagatcccagagtacttgaacggagaagttcccggagactatggatacgatccgtttggtctgagcaagaagccagaagactttgcaaaatatcaagcatatga

SEQ ID NO: 36504 - DNA, 379 bp, Gossypium hirsutum
  Clone ID: LIB3165-005-P1-K1-E9
cattctttttcgttcttttttcccctaaatgttattttctcaaaaatggcgctcctccaatcctccgtctatcctccgtcaacacttcgttcttcgccgtcactgtcatgcacagcggcacacccgatcgcttcctcccatagagttccttccacttcgaattccttcgtcgcgttagaatcgtcatcgttaaagaccgttaactctatttcgagcgctaagaacaacagaaggaaaggcgttgtcggaaaggtgaggtcgagcctggagacagcgggagcaactgtggggcacgtgacggaggttacaaaggacaccttctggcccatcgttaacgccgcgggggataaaaccggcgtcctcgatatgtacactcaat

SEQ ID NO: 36505 - DNA, 288 bp, Gossypium hirsutum
  Clone ID: LIB3165-005-P1-K1-F1
cccatcattcgccgggaaggcagtgaagttctccccttccacccctgaaatccggggaactggccgtgtttccatgaggaaaaccaccaagcctgttccttctggtagcccatggtacggtcctgaccgagttttgtacttgggtccactttccggtgagccaccatcttacttgaccggtgagttccctggtgactatggttgggacactgctggactctcagctgatcccgagacctttgctaggaaccgtgagctcgaagtcattcactgcagatgggccatgtt

SEQ ID NO: 36506 - DNA, 391 bp, Gossypium hirsutum
  Clone ID: LIB3165-005-P1-K1-F10
cccacgcgtccggtcgactctggttagtcgaccactactggtcatttgatctacaagctaggtggtattgacaagcgtgtgattgagaggttcgagaaggaggctgctgaaatgaacaaaaggtcattcaagtatgcttgggtgcttgacaagcttaaggctgagcgtgaacgtggtatcaccattgatattgccctgtggaagtttgagaccaccaaatactattgcaccgttattgatgcacctggacaccgtgactttatcaagaacatgattaccggtacctcacaagctgactgtgctgatctcattattgactcaaccactggtggttttgaagctggtatctctaaagatggtcagactcgtgagcatgctttgcttgctttta

SEQ ID NO: 36507 - DNA, 261 bp, Gossypium hirsutum
  unsure (1)..(261): unsure at all n locations; Clone ID: LIB3165-005-P1-K1-F11
agtcattttcgatcagtataaaaatgtatccaaaactaatcgatcaacgccgctgggatgtccaactttttctccaaggcggaggtgacaagcagcggccgtcctgtcctcccccgcaacgaagtcgaatgccaccttctctccgccgtcgacctcgaacctgaagaccaccgtcacttctccctcttaaaatcggggctcctcatcctcaccacccaccgnctcatctggctaccttcttcttccgcctncacccctact

SEQ ID NO: 36508 - DNA, 395 bp, Gossypium hirsutum
  Clone ID: LIB3165-005-P1-K1-F12
atagttagctatagcatacactactagtacccactactagcaatggcttcctcaatgatctcatcggctaccattgccactgcctctccggcacaggctaacatggtcgctcctttcaccggcctcaagtctgcctctgctttcccagtcatcaggaaggccaacaacgacattacttctctcgcaagcaatggcggcagagtgcaatgcatgcaggtgtggcctcctactggaaagaagaagttcgagactctctcatacctccccgatcttacacccgtgcagttggctaaggaagtagattaccttcttcgctcaaaatgggttccttgcttggaattcgaattagaggagggattcgtgcaccgtaaatactcgagcctacccacgtacta

SEQ ID NO: 36509 - DNA, 385 bp, Gossypium hirsutum
  Clone ID: LIB3165-005-P1-K1-F2
caaaatcagttgcttcacaatggcctctacaaccatggctctttcttccccatcattcgccggtaaggcagtgaagttctccccttccacccctgaaatccggggaactggccgtgtttccatgaggaaaaccaccaagcctgttccttctggtagcccatggtacggtcctgaccgagttttgtacttgggtccactttccggtgagccaccatcttacttgaccggtgagttccctggtgactatggttgggacactgctggactctcaaatcttcagtgagggtggacttgactacttgggtaacccaagcttgatccatgctcaaagcattttggccatctgggcttgccaagttatcttgatgggagccgtcgagggtac

SEQ ID NO: 36510 - DNA, 383 bp, Gossypium hirsutum
  Clone ID: LIB3165-005-P1-K1-F3
aagcgtttgtctcagatttttgaagatggcccgtaccaagcagacagcccgtaagtcgactggtgggaaggctccaaggaagcaacttgctaccaaggctgcccgtaaatctgccccaaccaccggtggtgtgaagaagcctcatcgctaccgtcctggaactttgctcttcgtgaaattcgaaagtaccaaaagagtactgagcttcttatcaggaaattgcctttccagaggcttgttcgtgaaattgcccaggacttcaagactgatttgcgtttccagagccatgctgttctagctctccaggaagctgcagaggcataccttgtgggtctttttgaagacaccaacctttgtgcgatccacgccaagcgtgtcacaat

SEQ ID NO: 36511 - DNA, 395 bp, Gossypium hirsutum
  Clone ID: LIB3165-005-P1-K1-F4
cccacgcgtccgggggcattagcaatagctacaaaactgccacaactacgcccaccaccatgccatgcgtcggcatcccatacatgcaaaccagccaatggatttcagatggggattttatacgtggccttatatctaattgcactaggcactggtggcctaaaatctagtgtctcaggatttggaactgatcagtttgatgacaaagatgaaaaggagaaagcccaaatgacctattttttcaacaggttcttcttcttcattagtaccggaaccctgacggcggttacggtgctcgtctacttacaagatgaagtcggtcgaagctggagttatggaatctgctctgtttccatgtttgtagccatcttgatattcttatcaaggactaaaag

SEQ ID NO: 36512 - DNA, 401 bp, Gossypium hirsutum
  Clone ID: LIB3165-005-P1-K1-F5
cccacgcgtccggatggagtcgatattgttcaatgggttcgaaaaatgacagactcaaacaaagaaagtgtcctcaaagtccttgatcccagactcccatcagttcctctccaggaagtgatgcacgtattctacgtcgccatgctttgcgtcgaagaacaagctgtagagcgaccaacgatgagggaagtggttcaaatcctaaccgaactcccaaaaccaccaaactcaaaacagggagacaccacaatcaatgagtccccaacatcaccatcaccagacacaactctagactcacctacaacaacaatcacaaaggacccaaaagaccagcaacaacagcccccagcacctaaatcaacaccacctgatcttcttagcatttaaggttgtcaatgttt

SEQ ID NO: 36513 - DNA, 397 bp, Gossypium hirsutum
  Clone ID: LIB3165-005-P1-K1-F6
cccacgcgtccgcaggattgaagagataagattatagtgaaaaactaaacataataaagccccttcgacttgcttcattgatttgccctctcaaagcccaagaaaaatggcttctgcttccgctactctcctcaagtcttcacctattatcgacaagtccgagtggattaagggccaaaacctccgccacccttcggtttgttttgtacggtcacaccctacatcggccgcctttgccgtccgtgctagttcatatgccgatgagcttgttaagaccgcgaaaactgttgcatctccaggtcgtggtattttggccatggatgaatcaaatgctacatgtgggaaacggcttgcctcgattggtctcgagaataccgaggcaaaccggcaagcttac

SEQ ID NO: 36514 - DNA, 385 bp, Gossypium hirsutum
  unsure (1)..(385): unsure at all n locations; Clone ID: LIB3165-005-P1-K1-F8
gaaaaacttaatcatgcctcggttgacgttggtgtcctccatcatccttctgctatgctccgtcgccgccggatcaactttcgaggactccaaccccatccagatggtatccgatggcctcagcggcttcgaatcctccgttcttcgtgtcatcggtcacactcgtcatgctctctccttcgcccgttttgcatacaagcatgggaagaggtatgaaaacgtggaggagatgaagctacggtttcagattttcaaaggcaacttggatttaatcagatccactaacaagaagggactgccttacactctngctgtcaatcagtttgctgattggagctgggaagagttccaganacacagattggggctgctcaaactgctctgt

SEQ ID NO: 36515 - DNA, 333 bp, Gossypium hirsutum
  Clone ID: LIB3165-005-P1-K1-F9
cccacgcccgcccacgcgtccgccaatattcttttttctcgtcttccacagttgcattttagacaattagacagacacaaaggaaacagagaacgaaactatggcttccatgtctttctctgcaactattccgtctcctcttcttgatttttcccaaaccaaaaagaacccagttttttcttcatcatggccttccatgtctttctcaattccttccatcaaatcctcgcttgggtcttcaaaatcagcctttttccaaaatgggttctccttgccatcgcttactgcttctgggtttgtctttaactctagatcttcaggcatttatgcaag

SEQ ID NO: 36516 - DNA, 389 bp, Gossypium hirsutum
  Clone ID: LIB3165-005-P1-K1-G1
cccacgcgtccgcccacgcgtccgtaaccttagccctcacttgctgccgatgtttctgttactcgacggtgtgacggccgctagtgttctttttcctctcttctccttctctcttctttcttcgtttctccttttctctcctctcttcttttttcttttctcctttctcttgttttttctttttctttatttcttttcaaaattttcgaagatctaaaggtgtcggggcccgtttcggtcactgtcgctggggttcccgttagccctcggtggccgtagccggattctccttttccgctggcgtctcccttcaaaaggtgagttgtatttttacttttatttttattttggttgtcttggttgttcgggtttttggtgatggtagaaga

SEQ ID NO: 36517 - DNA, 365 bp, Gossypium hirsutum
  Clone ID: LIB3165-005-P1-K1-G10
cttttgtataactgtagcatatagtactagtaagcagtaatagcaatggcctggtccatgatctcatcggcaaccattgccaccgtgaactgctcctccccggcacaggccaacatggtggcccccttcaccggcctcaagtctgcctctgctttcccagtcactaggaaggccaacaacgacatcacttctcttgcaagcaatggtgggagagtgcaatgcatgcaggtgtggcctcctcttgggaagaagaagttcgagacactctcatacctccccgatcttacacccgtacagttggctaaagaagtagattaccttcttcgctctaaatggattccttgcttggaattcgaattagagga

SEQ ID NO: 36518 - DNA, 202 bp, Gossypium hirsutum
  Clone ID: LIB3165-005-P1-K1-G12
cccacgcgtactctacagattattaatggttctggctgtctgtttgactgattggaaaggtttactacaaactgtgggccccattgctgctcttaactcttgtctagaactcaacacttaccacaggttgcaaatgatgcaaaccaagaccttcaacatgtcctagaagtttttgcgctaaggacacacaccagctctgtgt

SEQ ID NO: 36519 - DNA, 394 bp, Gossypium hirsutum
  Clone ID: LIB3165-005-P1-K1-G2
aaaatctgtgcctgcccttttctctgcacacctcgggatatcagtttcaactccactcatcccacgggttgagtaccgagtccatatatcgttaagttcaaggaaggaacttgggcatcatgggtcttaaggcattagactatgagacaatgaatgaaaacgtgaagaaagttcaatatgcagttagaggtgagttgtatcttcgagcttctgagcttcagaaggaagggaagaagattattttcacaaatgttggcaatcctcaagctcttggacagaagccactgactttccctcgtcaggtggttgctttgtgccaagctccatttctgctagatgatcctaatgtaggacttatatttcctgctgatgccattgcaagagcaaaacatta

SEQ ID NO: 36520 - DNA, 399 bp, Gossypium hirsutum
  unsure (1)..(399): unsure at all n locations; Clone ID: LIB3165-005-P1-K1-G3
gtgatacccatcatatatatgtgtgtatgtatggattagtatctactgtcagtgtaggtgttttaacttcacaagcagagttgaaaaacatgttatattatatttgaaaaaataaaataagaataagaatagagataatgacagtttttttattccatttgtagagctaaaaaaaaaacctttactagcagtggatatgataaattatcttttttcaagattttggttttaactgcgggtaaaaaaacaaatgtaggcaatactaaagctcttggacagaaagccaactgactttaccttgtcaggtggttgctttgagccaagctccatttctgctagatgatcctaatgtaagacttatatttncttgtgatgccgttgcacgagcaaaagattatc

SEQ ID NO: 36521 - DNA, 388 bp, Gossypium hirsutum
  Clone ID: LIB3165-005-P1-K1-G4
caccatcactgcctactcctcagccatggtaaccaccacagctgccaccgtgtcacattttttcggtacccgtatccaaacctctaacccaagctccggtagaatccaagctaggttcggctttggaaccaagaaagcaccacccgcaccaaaaaaggccgcccctaaacggccatccgatcgccttgtttggttccccggcgcaaacccaccggaatggcttgacggtacaatgatcggagaccgtgggttcgatcctttcgggtttgctaaaccggctgaatacttacagtacgatttggactcgttggaccaaaacttagccaagaatgtggctggtgaaattataggggtgattagcgagacggcggagcttgaaccgacgccg

SEQ ID NO: 36522 - DNA, 396 bp, Gossypium hirsutum
  Clone ID: LIB3165-005-P1-K1-G6
tgatgcttcactgctgctggactccacaagaaggagcttgtctgagaaggagacagacaggagctttggcctaaggaatttcaggtacattgagaccatcaaagaagctgtagaaagggaatgtcctggagttgtttcttgtgctgatatccttgttctgtctgctagagaaggcatcgtttcgttgggaggcccttacattcctctcaaaactggaagaagagacggtagaaggagcagagcagatgttgtggaggagtatcttccggaccacaatgagaccatctctggcgttctcgacaggtttgccgccatgggtattgacacccctggagtcgttgccctcctaggagctcacagtgtcggcagaactcactgtgtgaagctggtgcatcg

SEQ ID NO: 36523 - DNA, 284 bp, Gossypium hirsutum
  Clone ID: LIB3165-005-P1-K1-G7
ctgaaaacgcaaaaccatggcctctgcttctctcctcaagacttcaccagttttagacaagtctgagtgggttaagggtcacacccttcgccaaccttccacttctgcggtgaggtgccaccctgttgcaccctctggactaactgtgcgtgcaagctcatatgccgatgagcttgtcaagactgctaaagctattgcttctcctggccgtggaattttggccatggatgagtccaacgctacctgtgggaaacgtttggcctcaatcgggctagaaaacacag

SEQ ID NO: 36524 - DNA, 284 bp, Gossypium hirsutum
  Clone ID: LIB3165-005-P1-K1-G9
atatttagctatagcatacactactagtacccactactagcaatggcttcctcaatgatctcatcggctaccattgccactgcctctccggcacaggctaacatggtcgctcctttcaccggcctcaagtctgcctctgctttcccagtcaccaggaaggccaacaacgacattacttctctcgcaagcaatggcggcagagtgcaatgcatgcaggtgtggcctcctactggaaagaagaagttcgagactctctcatacctccccgatcttacacccgtgca

SEQ ID NO: 36525 - DNA, 395 bp, Gossypium hirsutum
  Clone ID: LIB3165-005-P1-K1-H1
cccacgcgtccgcccacgcgtccgtgatggcagaatgtattaccaatatgaattggagccaccccatgtattgattaccgcaactgcagccggtaatcgcctttacctattcagcgtaaccggaagtggtcttcaatggaagaggcattaccaggatttaaagaggatatccgagtcttttcgtgtaatctagttttggatctccctggattatgacatgagtagattagtagtgatggatatttttactctgtaatttaaagttgcaacaaaaacaaagagtgtatttgcagcacagttataaaatgtgcaactttcttcaaagtaagatttttgctgaaaagctatacagcttgctagaagccacttatctgaacttgggataagtgtcagat

SEQ ID NO: 36526 - DNA, 371 bp, Gossypium hirsutum
  unsure (1)..(371): unsure at all n locations; Clone ID: LIB3165-005-P1-K1-H10
taaaaattgaaatcataaacaaaaacacttgcagttttctgaatggggacgatagttcaaactaccgttgtcactgtttttctttgtcttctttttcctattgtcttttccacatccaatgacggattgttcagaattggactgaagaagagaaagtttgatcgcaacaatctgttagctgcccaacttgattccaaggaaggagaagcgttgagaggttcttttagaaagtatcttcatggcaacttacaggagtcaaaggatattgatatagtggcactaaagaactacatggatgctcagtactntggtgaaattggtattggcacgcctccacagaacttcactgtaatttttgacactgggagttc

SEQ ID NO: 36527 - DNA, 398 bp, Gossypium hirsutum
  unsure (1)..(398): unsure at all n locations; Clone ID: LIB3165-005-P1-K1-H11
cgtcacgcgtccgctagttctagatcgcgagtgccgcccttttttttttttttttgttatgatgtgagattgttccaaaactatcgtttgccttttgttgttccaattatatgattttgctttctcaattcttaatattttctctttatatgattttgctctttttttcctcaattnaaaaaaaaaaaaaaaataaaataaaattaatataaattttttaattttttgtttgtatattattaaaaaaatatatatatttatatatttattttttattttttatttatttattatattttgatttttgggggcggcctttttaatgtttctcaagtttttctccttcttttattttcaattaattttttttttttggtgccccctaatttttttttctc

SEQ ID NO: 36528 - DNA, 394 bp, Gossypium hirsutum
  Clone ID: LIB3165-005-P1-K1-H2
cccacgcgtccgcccacgcgtccgtccacactttaaaattcagttaacaatttgacagttgttttcttcagtctgtctctcagccatggctgcagccatctccaccgtcgctgccgctgccgccgccaaccgagctctgggagtgtcagtcccaacctcagctttcatggggaagaaagtgagctcaagattcaacagcaccaggcaggttccttcgggaagttttaaggtgatggcggcggagaaagagatagacgaagagacacagaccgaaaaggaccgatggaaagggttggcttacgatatttcggacgaccaacaggacattactcgagggaaagggatggtggattccttgttccaagctcccatgaatgatgggactcactatgct

SEQ ID NO: 36529 - DNA, 373 bp, Gossypium hirsutum
  Clone ID: LIB3165-005-P1-K1-H4
cccacgcgttcgaaaggagtcaaggtatgccatcgaatgagaggaaggagagctggttctaatctgtaccttgatgtacatattgtggttgatcccttttctagtgttagtactgcacatggcattggcgaaaatgttcgtcaccaaattcataaatcccaccctgaagtaaccgaagttttcatacacattgatcctgcctatgtagagttctcccctgatttaatggaccaaaatgaaggtttgaagacaatcactgaacagaatagtaacatgtctgtcggtgaagagaatgttcaagcaattgtttctcatcttctctcatcaaagttttcaaagaaatttaaggtcgagcgcatcacccaacacacct

SEQ ID NO: 36530 - DNA, 363 bp, Gossypium hirsutum
  Clone ID: LIB3165-005-P1-K1-H5
gcctcactcgccgtctcgcctcttgcttattggttcaagatctggttttgatctgatcagatcgtataaaaatatcaaaacatgtttgggagagcaccgaagaaaagcgataattccaaatactatgagattttgggagtatcgaaaaacgcttcccaagatgatctaaagaaagcttatagaaaagccgctattaagaatcatcccgataaaggcggcgatcctgaaaagtttaaagagttggctcaagcttatgaggtgctgagtgacccggagaagcgtgagatttatgatcagtatggtgaggacgcccttaaagaaagggatgggcagcggtggcggtggccatgaccctttcgatat

SEQ ID NO: 36531 - DNA, 280 bp, Gossypium hirsutum
  Clone ID: LIB3165-005-P1-K1-H6
gaacgtacaagcagagctgtgacactggggatgggcaatgttgggggctgcgggtgttttcatgccagggttattaaccaaggtggggattctaaacactccatcggggtactcagctggaacagcggactacttcactgacaccacatctttcttcatggtagagctaattaacatcggttgtgatgaagggagacgatctgctgacattatcaagccagggcgtgttaatacagaccccatcttgcctaacaacaaggtgaccgggactgatgttgga

SEQ ID NO: 36532 - DNA, 390 bp, Gossypium hirsutum
  unsure (1)..(390): unsure at all n locations; Clone ID: LIB3165-005-P1-K1-H7
caagcttctattcagttttgtaagagctatggctaaggacattgaggttggtggtgagttccaggccaaggactaccatgatcctccacccgctccattggtagacgctcaggagttagccaagtggtctttttacagggctgtcatagctgagttcattgccactctcctctttctctacatcactgtcttgactgtgatcggttacaagacccagaccgacctngctaagggcggtgaagattgtggaggcgttggcattctcggcattgcttgggcttttggtggcatgatttttatccttgtttactgcactgccggtatctctgggggacacatcaacccagcagtgacctttggacttttcttggctaggaaggtgtcgttagt

SEQ ID NO: 36533 - DNA, 152 bp, Gossypium hirsutum
  Clone ID: LIB3165-006-P1-K1-A1
ggctaccaacccacgtaattagcttcctttaaactgttcctaattggttgatggagaattttatggatatatacgctatcttcaagcttccgcctcactttagcttcttcagtctcagctagaccctccgcgggcgggtgtatctccgcaac

SEQ ID NO: 36534 - DNA, 381 bp, Gossypium hirsutum
  Clone ID: LIB3165-006-P1-K1-A10
agccattccaccattcaattaccctgtcaaccttgccgtttcaaaaatagcaccggctttaattgcaggaaactcccttgtactcaagccacctacacagggtgctgtttcagctcttcatatggtgcactgctttcacttggctggctttcccaaagggctcattagctgtgtgacagggaaaggctctgagattggtgatttccttactatgcatcctggagttaattgtataagcttcactggtggagacactggtattgctatctcaaagaaggcaagaatggtccctcttcaaatggaattgggaggaaaagatgcttgtatcgtactcgaggacgccgacttagatttggttgctgcaaacataataaaaggagg

SEQ ID NO: 36535 - DNA, 380 bp, Gossypium hirsutum
  Clone ID: LIB3165-006-P1-K1-A11
cccacgcgtccgctgagtttaagcatatcaataagcggaggaaaagaaacttaccaggctacttcggcaatgtaatctttacgactgcactaattgctgaagctggtgatctcgaaaccgaatcgtttactgacaccataaagaggattcatgaacgattaaatcagataaatgatgaatatttaagatcagctattgattacattgaaaaagtgcctgatttaaacaccttggttagaggaccgcatacttttcgatgcccaaaccttgttgttgttccatggaactggttgcctatatatgaggcagatttcggatggggtcgtcccatatatatggggccagggaatgtcgtccaagaaggtaaaatttacatgcta

SEQ ID NO: 36536 - DNA, 373 bp, Gossypium hirsutum
  Clone ID: LIB3165-006-P1-K1-A12
cccacgcgtccgtgcagatcttcgtcaaaaccctgaccggcaagaccataactgtggaagtcgaaagctctgacaccattgacaacgtcaaggcaaagatccaagacaaggaaggcatcccaccagaccagcaaaggctcatatttgccgggaaacaactcgaggacggtcgcaccttggccgattacaacatccagaaggagtccaccctccatttggtattgaggcttcgtggtgggatgcagattttcgtcaagacgttgactgggaaaaccataactttggaggtggagagttccgatacgatcgacaatgttaacgcgaagattcatgacaaagaaggaattccaccagatcagcaaaggttgatttt

SEQ ID NO: 36537 - DNA, 302 bp, Gossypium hirsutum
  Clone ID: LIB3165-006-P1-K1-A2
ctatactacacattaaagatgtgcctgcccttttctctgcacacctagagatatcaggttcaactccactcatcccacgggttgagtaccgagtccatatatcgttaagttcaaggaaggaacttgggcatcatgggtcttaaggcattagactatgagacaatgaatgaaaacgtgaagaaagttcaatatgcagttagaggtgagttgtatcttcgagcttctgagcttcagaaggaagggaagaagattattttcacaaatgttggcaatcctcaagctcttggacagaagccactgac

SEQ ID NO: 36538 - DNA, 398 bp, Gossypium hirsutum
  Clone ID: LIB3165-006-P1-K1-A3
cttttccaacaaacctaatctgaaattcacttcttttgatcaaaactatttggtccaaaacttaaagtatccaaaaacctcaggaatcccattgttttccttttccattttttgtttgtttctaagggaaatgagggatgttttcatggttggcaaggatagctctggcttgttggagaccagtgagtcgatatgcccgtatgaacaaggattacaacaatagcaatagtgaggaacttgaagaagattcttcttctttacatgactcgcttctttggtgtagagaccttgaaaaacactcttgtggtgatttttcatttgctgttgttcaagccaatgagatcattgaagatcatagtcaagttgagactggcaaagatgcaatttttagtggtgtc

SEQ ID NO: 36539 - DNA, 211 bp, Gossypium hirsutum
  Clone ID: LIB3165-006-P1-K1-A4
tcgatcagaagccgggcacagtcccttttttttgacccaaagccggctttagcccggcgatcccggccgaagacattgtcaggttgggaggttggctggggccgcacatttttttaaaaattacccaagtgtccctagatgagctcaaccaggaccagaatcttctgggggaccaaaaggttaaaagctcgttggttcttattttccattc

SEQ ID NO: 36540 - DNA, 383 bp, Gossypium hirsutum
  Clone ID: LIB3165-006-P1-K1-A5
tgaagaaagaaacaaccaccgaaattgtcggcagcgcttcctccaccagcttcatctgtcaaactaacggcgacaacctcattcccaacctcacgcgcactcttcctcgctttacgcaaaccccaaatttccattataccacgtgccactcctgactccgacgctgactcatcaacggaacccgactcctcgccctcctcggagacctcagccgactccgacccattcgaatcccgtctctcccaggtccgcctccgttaccgaatcggagccggcaagaaagcggagcgccgaaaatcaaagaaatccggatccgtatcaacttcgtcttcctcctccatctacctccctccggtgcctttaaaagaggcgatttcaaatgg

SEQ ID NO: 36541 - DNA, 382 bp, Gossypium hirsutum
  unsure (1)..(382): unsure at all n locations; Clone ID: LIB3165-006-P1-K1-A6
aaccccaaccatcgtttatcaaggtttcttaaactctctcccctgcagctccttggcagctatgctccagcaagagtggcatgttctgcccatcacgagcgtttcttgtgaaaccagcgaggacccatatggtcaaaaacgaaaagggaatgaggatcacatgccaggccactagcatccctgctgatagagtgccagacatgggcaagaggcagctcatgaatctgcttctgttgggggctatttcactcccctcaggtttcatgttggttccttatgcagccttctttgtgccatctgggggacggngtaccggtggtggcaccgttgccaaggacgcaatcgggaatgatgtaattgctgaagaatggctcaagactca

SEQ ID NO: 36542 - DNA, 315 bp, Gossypium hirsutum
  Clone ID: LIB3165-006-P1-K1-A8
cgaccgattcgtccacgcgaccggaaaaagtctctgtcacttgcaacacaataaactacacataaaatctgtgcctgcccttttctctgcacacctcgggatatcagtttcaactccactcataccgcaaatggaggaccgagtccatatatcgttaagttcaaggaacgtgctggagccccatgggtctttaggccttagactacaaggcattgaacgaaaacgtgtagagagttccatgtgcaagtagaggtgagttgtatcttcgagcttctgagcttcagaaggcagggaagaagattatgttcacaaatg

SEQ ID NO: 36543 - DNA, 218 bp, Gossypium hirsutum
  Clone ID: LIB3165-006-P1-K1-B10
ggtcaaagccctaagtatatgattcttttcatatcttaccactctaagaagggaacatcatttaattctgcaagatctactctctacgtcgaagaacttttccgaactaaacacttatactcgtgagtctctttaacccaagctacaccgatattttaaagtctaatatcttaggttacgacacttcttacttcaaaactgctttccacaagagttcc

SEQ ID NO: 36544 - DNA, 382 bp, Gossypium hirsutum
  Clone ID: LIB3165-006-P1-K1-B11
ctcaattcccccacctcattgttgtgtcaaaatggccactgtttgtgcttcttctgccgttgcagccgttgccatctcatcccccagttcccagaggagtggatcagtagtgaggacaacaaaggcttctttccttacagggaagaaacttcgatcagtcaaaaagtacacaaaaccagcagcagtccgaaccgttccggtgtgtgcagtggctgaccccgaccgacctctttggttcccaggcagtactcctcctccatggctcgatggcagcctccctggagacttcggttttgatcctctaggccttggatcagaccctgagaccttgagatggaacgtacaggcagagctcgtccattgcagatgggcaatgttagga

SEQ ID NO: 36545 - DNA, 381 bp, Gossypium hirsutum
  Clone ID: LIB3165-006-P1-K1-B12
cccacgcgtccgcccacgcgtccgatcactcccaatactttcataacatttcacgaacttcactctccagtctccaatggcggctgccgtctccaccatcggtgctgtcaaccgagcaccgttgagtttgaatggatcaggtgccggagcttctgctccaagctcagctttcatggggaacagcttgaagaaagtgagcgctaggttcaacaacaacggcaaggctccagtgggaagtttcatgattgtggctgccaaagaaatcgacgaagacacacagaccgaccaggaccgatggaagggtcttgcttatgatatctccgatgaccaacaagacattaccagagggaaaggtatggtcgactcattgttccaagctcc

SEQ ID NO: 36546 - DNA, 380 bp, Gossypium hirsutum
  Clone ID: LIB3165-006-P1-K1-B2
cccacgcgtccggccacccttccctgatttcatttcttctgtactcacagtaatcacctctccaaaaccctagctctttcactcactgccgccaatttcaaccaattatttgcttataagcgtcgaaaacgatgtcggacgacgagcgagaggagaaggagttggatctcacctcccctgaagttgttactaaatacaagagtgctgctgagatcgctaacaaagcgctgcagttagtggtgaaagaatgcgcaccaaaaactcagattgttgacacttgcgagaagggtgatgcatttatcagagagcaaacaggcgatatgtgtaagaatgctcagaggaagattgagaggggtgttgccttccccacttgtctttct

SEQ ID NO: 36547 - DNA, 366 bp, Gossypium hirsutum
  Clone ID: LIB3165-006-P1-K1-B3
cccacgcgtccggagaagaaaacattgtcaggtcctcagtgctgttcgaatccaccaacattggattctgcaagtggggctggtcacgttgagaatcttgctggtctcaacacttatgtttctgggtctcttcaatctaagcttgctgtttttcttatctctgatattttcggatatgaggctccaaactttagaaagctcgcggacaaggttgcagccgctgggttctatgtggtggctcctgacttcttttatggagaaccctatgaccctaataaccctgatagacctctatctgtttggataaaggatcatggaccggataaaggttacgaggatgcaaagctcgtaattgacgctttgaaa

SEQ ID NO: 36548 - DNA, 378 bp, Gossypium hirsutum
  Clone ID: LIB3165-006-P1-K1-B4
ccggatttcccgggctcaactttcccatttccaatctccagctcccaaggtaattttgccgttcagaaacatagcggttggccggcccgaagaggctactcaccccgatgctctcaaggctgctttggctgagttcatctcaaccctgatcttcgttttcgctggatcgggctcaagaatggcctttaacaagttgactgacaacggagcaaccaccccggctggtctcgtagccgccgctctagctcatggcttcggtcttttcgtcgctgtctccgttggcgccaacatcttatgtggccacgtcaaccctgccgtcaccttcggtgcttatgttggcgggaacatcactctcttgcgcggcattctttactggat

SEQ ID NO: 36549 - DNA, 326 bp, Gossypium hirsutum
  Clone ID: LIB3165-006-P1-K1-B6
cttacctcccgatccaaccacaagagcttggtcctggctgctgccgtcaaaacaatgggtgaccgcagccgagacttcctaggcggtgaaatccgcaacaccatcagattctagtctattgatgcggtcgtgaaagcggatttcaaggcatgctgggtagcccacaggctgtgctcccatgggtcacattgtgttcaagggattcatgacgtataacccctagaacccttactggttcaaccgtgaccgcgtcattctgggcgctggtcatagttgtatgctgcagactgctctgctctacctggctaggtacgacagtgtcctgg

SEQ ID NO: 36550 - DNA, 288 bp, Gossypium hirsutum
  Clone ID: LIB3165-006-P1-K1-B7
ccgaatctccgattttcccaagcatcgcgcatacgatcaggtcttttttctctgcactaagactcagagctactctcgtcctagttattttccatggcgattgagaaaattcttaaagatgatgctagtgaagagaagggggagcgtgccagaatggcatcatttggtggggccattggcatttcctgcctgggttaagacaacccttgggccaaagggaatggataaattttacagtcaactggcaggggaaatgaagtcactgttacaaatgatggagcttccatc

SEQ ID NO: 36551 - DNA, 257 bp, Gossypium hirsutum
  Clone ID: LIB3165-006-P1-K1-B8
ttttaaacaagtggtgcttaactttgcagtaatccactgagaaacccttatcttctttgtatgttactatgttggcttcttataataattttctaagcctcttcctccaaacccgttacttttgatcaaagcactgggaatcctggaaactaaataatctcactctcattaaggagtttgaatgtaaatgatcaataaacggccttggttcttccgtgcaggtgtggggaaacccagggttccaggctctaacaccc

SEQ ID NO: 36552 - DNA, 380 bp, Gossypium hirsutum
  Clone ID: LIB3165-006-P1-K1-C1
cttaaaaacagcaaagaagatgtcatcatcaacggcggccaatcaagtgagggcatctcacatactcatcaatcaccaaggctctcgtcgtaaggcttcttggaaggatccagaaggtcgcgtcatctccaccaccacccgagacgccgctgtctcacagcttaaacttctcggcgacgacatcgtttccaacaaggctaagttcgacgaggttgcctctcgctactcggattgcagctccgctaaacgtggcggtgatctcggctgcaaggagtgtgcctcaactcagttcttattgttaattatctgagacctttagttggtttataccagcattacgggacataatgcaaactaaaaaccttatacaaactttttgg

SEQ ID NO: 36553 - DNA, 380 bp, Gossypium hirsutum
  Clone ID: LIB3165-006-P1-K1-C10
aagaaatcaaaagacaaaatagcctataacaatggcactcagaatgtgggcttgttccactgccaatgcactcaaaatctcttgttcctccaaacctaatgtttcccttgctttctcactctctagatgcttttccactgttttggatgggctgaagtatgctaattcacatgaatgggtgaagcatgaaggtcctgtggctaccattggcatcactgaccatgctcaggaccatcttggagaagtagtgtttgtggagttgccggaaccaggtggttcagtgagccaaggaaaagggtttggagcagtggaaagtgttaaagcaacaagtgatatcaattccccaatctccggcgaagtcgtggaggttaactccaagc

SEQ ID NO: 36554 - DNA, 336 bp, Gossypium hirsutum
  unsure (1)..(336): unsure at all n locations; Clone ID: LIB3165-006-P1-K1-C11
cccacgcgtccgattcaaggctcataatttgacccaaaatggcctctgtttgagcttcttcggctattgcagctgttgccatctcatcccccagttcccagaagactggatcagtagtggggacaacaaaagcttctttccttacagggaagaaacttagatctgtgagaaagtacacataaccagctgccggaccaacattttcagtgtgcgccgncgncgaccccgacagaccccttaggttccagcagcactcctctccatagctgatggcagctccctgtgacttgagttcatcctctcgtcttggtctgacccgagacatgagatgaacgt

SEQ ID NO: 36555 - DNA, 366 bp, Gossypium hirsutum
  Clone ID: LIB3165-006-P1-K1-C2
cccacgcgtccgtctggtttcactgtcagagctcatcagacaccggccgagcctgagactggacgcagagccatgttgggtcttgttgctgctggtttggccactggctcctttgttcaagctgtgcttgccgatgccagaagcatcaaggttggcccacctccccctccctctggtggactgcctggaactctgaactctgatgagccaagagaccttgttctgccatacaaagacaggttcttcctccaaccagttactccagctcaggcagcacagagagcaaaggaatcagccaaggacattctgggtgtcaagaacttgattgacaaaaaagcctggccttatgtcatgaatgatctccgt

SEQ ID NO: 36556 - DNA, 381 bp, Gossypium hirsutum
  Clone ID: LIB3165-006-P1-K1-C3
taaaaagaacactcggtaggcattcttacatacagaaacacacgtaccccagccagaacaagaaaacaagtagtgtattaattaacagaagctgcatattgtagagaaacacaatagttacttgccatcaatggaagctgcaaggaaatttctctctcttcctccatctttttctacgagaacccaacttaagaattctgtctcttcatcaccatcttcttcagtttcaatgtttcacgagcaagcggctgctgctgctgcaacatctattccgattaattcggtagctaggcattttcctacatcagttctctcacaagagcagcgcgatgactgcagacctctgcctatcttgcaatactttaaggaagataaagcata

SEQ ID NO: 36557 - DNA, 235 bp, Gossypium hirsutum
  Clone ID: LIB3165-006-P1-K1-C5
gttgatggtgggtttacatcttccattctctcatagcgtgtcttcagatgaggatagatgaaaatatgaaccaaaatgaggctcattagctttggttcaactattaccagattgtatttcccttctattttctcctgtcactggtatgtaatttgtaacaaaaaacttctaatataattttaattatatctatatataaaatatcatatgctttaatacaaatatccaagatttt

SEQ ID NO: 36558 - DNA, 372 bp, Gossypium hirsutum
  Clone ID: LIB3165-006-P1-K1-C6
ccaataaaccaccattgtttgctcctttaaatctcccccccactatctcggtgcgctaacttcagctattgcagctgttgcattcctttagggcatattcgatactcgctgatctatatatacaactacatatgctattgaactcacagggatacagacttagatctgtgctagacgtcacataaccagctgagggaccaacatttccagtgtgcgccgccgacgaccccaacagaccccttaggttcccaggcagcactcctgctgcatggctggatggcagtcttcctggtgactatggtttcgatcctctcggtcttgggtctgcccctgagacattgagatggaacgtacaagcagagctggttcact

SEQ ID NO: 36559 - DNA, 368 bp, Gossypium hirsutum
  Clone ID: LIB3165-006-P1-K1-C9
cccacgcgtccgaagagacttgatggggaagtccctaatgaagcgtgtgatgcagacctggcttcctgcaagcaatgctctcctggaaatgatgatctttcaccttccctcacctagcaaggctcagaagtatcgtgttgagaacttgtacgagggtcctcttgatgatatctatgccaatgctatcagaaactgtgatcctgagggtcctcttatgctctatgtttcaaagatgattcctgcttctgataagggcagattctttgcttttggtcgtgtcttttctggcaaagtctcaactggattgaaggttaggatcatgggtccgaactatgtccctggtgagaagaaagacttgtttgttaaga

SEQ ID NO: 36560 - DNA, 382 bp, Gossypium hirsutum
  Clone ID: LIB3165-006-P1-K1-D10
aaaaatacctgtggctctcactctccttaaacatgtatagaaatcaaataaggggttcactaacatcatcattatcaacaacacccaaaaaagctgtacgctgaccaccacctcaacaatgaatgacacaatggacaagcttgtgatccttctaaccaagatagatgtcattgacaagcttgttaagaccttccaattcgtgtttaagcttgttaactggcaagtagaaaccacacacccagacctagcaaacaggttcaatcaatgggaggtctcctccggtcttagcagaaaagcctttagaacaggcaagttcctcactggtttcaatgggtagagaaagaaccctggtgccaccccaacattcaagttcctagctgta

SEQ ID NO: 36561 - DNA, 338 bp, Gossypium hirsutum
  Clone ID: LIB3165-006-P1-K1-D11
ggcagataagattagccaaggagtctgcagcttaattaatttcaatgttgatgcctttgtttactccccgataatgttgaaaataattagaggcggtgttggcgttgccaacaacaacaggactgttcattttttgggatatttttcctattcaagttttaatgatgttattcaagagtgagaaagaggaatagaacttgggcccctttttacttgtttaataagggaaataaaaaccggatatgtacatttttggttggagaactacggatgctaaacttttctctgttttcagtttaaaaaaaaagaaagtaaataacagttttaaatgggttaag

SEQ ID NO: 36562 - DNA, 375 bp, Gossypium hirsutum
  Clone ID: LIB3165-006-P1-K1-D12
aaaatctcaaacccagatttgttctctctctctctctctctctatttccaatcaattaattcctccattggaggagcttagggtttgttggtgttctggtctttgctttgtctgaaaaataaacagaattataaacgaacaccaacgccatgggaagatttgaagagagaggattcgattcagtggtttgccctaagcctatccgaacctttagatggtccaccaactgttatcagactgagatggctgattcaaaaactggtgcagagcttcttgatataatcctccccgagggagggtatggggccgagaatcccaccaaccaaatggcttcatcaccaccgtatttctgtggatcaccgccgagcagggcgt

SEQ ID NO: 36563 - DNA, 383 bp, Gossypium hirsutum
  Clone ID: LIB3165-006-P1-K1-D2
cccacgcgtccggcagctgttgccatctcatcccccagttcccagaagactggatcagtagtggggacaacaaaggcttctttcctttcagggaagaaacttagatctgtgagaaagtacacaaaaccagctgccggaccaacatttccagtgtgcgccgccgccgaccccgacagacccctttggttcccaggcagcactcctcctccatggctggatggcagtctccctggtgactttggtttcgatcctctcggtcttggttctgaccctgagacattgagatggaacgtacaagcagagctggtgcactgcagatgggcaatgttgggagctgctggtattttcatcccagagttcttaaccaagattgggattttaaa

SEQ ID NO: 36564 - DNA, 376 bp, Gossypium hirsutum
  Clone ID: LIB3165-006-P1-K1-D3
agccttcggttttcccagaaattaaaaaggaggatgttaggggatcccatgatgtctcttacaatggcaactaatctctcaaaatcaattttgaagccaaagctggagacccaagtgatccccaagggttcatccaaatcattgattggatgctcctccagcaatcctttctccttcgacaaataggcttcatcacttcaaggccttctcagcggctctcgctctttcttccattcttctttcggcttcactccctgctggtgcggacattgcggggctcactccttgcaaagagtccaagcaattcgccaagcgcgagaagcagcagatcaagaagctggaatcctcgttgaagctttacgcccccgatagcgca

SEQ ID NO: 36565 - DNA, 375 bp, Gossypium hirsutum
  Clone ID: LIB3165-006-P1-K1-D4
attcaccatgtctgacaggtgcggctactgtgactgcgctgaccgcagccaatgcacgaagggaaacagcaacaccatgatcattgagactgagaagagctacatcaacactgctgtgatggatgctccagctgagaacgatggcaagtgcaagtgcggtactggctgcagctgcacagactgcacctgtggccactaagccaacatacaatggtcatgcttcaagtcatggcatatatagggatctaaataatgaatttaagggtgaataatttgtctgttgtagttagagaggtgacttatatctggcagctaacctttagatcctttactatgatgtaatggctatgcttatggccttatctggctaatgaa

SEQ ID NO: 36566 - DNA, 384 bp, Gossypium hirsutum
  Clone ID: LIB3165-006-P1-K1-D6
cccacgcgtccgttttgttccacctttttctttctttttctccaaagccatcatgaatctcattaataggctcagccccaagcgtctctttcgatctaataaaaaagatagatccatcgtctccaagttcgacccctcctcctatagttccggttccgccgtttcctcctcttgctcctccgaatccgtctcttccaccctcaaagaacatcagtacccttccacggctaccgctggcttcgtaacgcccaccagtgttttgccccaaacatcaggtgactggtccgattttcccgctaatttttatctagaactttgccaggcgtttaaaatgttagacaaagataacgacggggttatatcgagaagcgagctcgaggcttt

SEQ ID NO: 36567 - DNA, 354 bp, Gossypium hirsutum
  Clone ID: LIB3165-006-P1-K1-D7
cccacgcgtccggccggtgcaaccgcagctaaagttagcgccacagccaaggttgcagcctctccagtcccaaggggcagcatcaaggcctccctcaaagacgttggtgttgctgttggggcaactgctgcaagcgtaatccttgccagcaatgccatggccattgaagtcttgctcggcagtgacgatgggggtctggctttcattcccaaagaattcagcgtaagcccaggggagaagattgtgttcaagaacaatgccggattcccacacaatgttgtgttcgatgaggacgaaatcccaagcggcgtcgacgtatccaaaatctccatgcctgaagaagagctactcaat

SEQ ID NO: 36568 - DNA, 320 bp, Gossypium hirsutum
  Clone ID: LIB3165-006-P1-K1-D8
cccacgcgtccgattaaaataggagactccgcccatttttcttcattttcctgcaaccataatcattatatttatatttcttcctctctcttctttatttcttcaagtttaaggcctcaaaatggaggcagccactgtggttggatcttctatgtctctacatcgaacttcatgcctccgctgccagatccgcccttttagctgccaatggcccgctctttccacgtttcgctgctaaccctcgctcctccttctcgatcaagctttattcttcaagttcatattcaaaatcacggaataggagaatgggtttggggggt

SEQ ID NO: 36569 - DNA, 382 bp, Gossypium hirsutum
  unsure (1)..(382): unsure at all n locations; Clone ID: LIB3165-006-P1-K1-E1
gtggattgaagtgaagaaagaaacaacctccgaaaatgtcggcagcgcttcctgcacgagcttcatctctcaaactaacggcgacaacctctttcccatccccacgggcactcttcctcgctttacgcaaaccccaaatttccattatcccgcgtgccactcctgactccgacgctgactcatcaaccgaacccgactccgcccccttctcggacacctcagccgaatccgacccattcgaatcccgtctctcccaagtccgcctccgttaccgaatcggagccggcaagaaagcggagcgccgaaaatcaaagaaatccggatccgtgtccacttcgttgtcttcctnctncatctacctccctccggtgcctttaaaaga

SEQ ID NO: 36570 - DNA, 379 bp, Gossypium hirsutum
  Clone ID: LIB3165-006-P1-K1-E10
cccacgcgtccggatgtcttggttcatggagagcctgagagaaacgatatggtggagtactttggtgagcagttgtctggttttgcattcactgttaatggatgggtgcaatcttacggatctcgatgtgtcaagccaccaatcatctacggtgatgttagccgccccaagccaatgactgttttctggtcatctaccgcacaaagcatgactgcacgcccaatgaagggaatgcttactgggcctgttaccatccttaactggtcctttgtcagaaatgatcagccccggtttgagacttgctaccagattgccttggccatcaaggacgaagtggaggatcttgagaaggccggtatcaatgttatccaaattgacg

SEQ ID NO: 36571 - DNA, 381 bp, Gossypium hirsutum
  Clone ID: LIB3165-006-P1-K1-E11
gtagccgccgcctgcgtctctctcttcatctctctgaaccaaaaagtctttagcttttcgcttcgagagagaccatgttggtttaccaggatctcatctccggtgacgagcttctttctgactcattcccctacaaggaaatcgagaatgggatgctgtgggaagttgagggaaagtgggttgtgcaaggagctgtcgatgttgacattggtgccaatccttcagccgaaggtgctgatgaggatgaaggtgttgatgaccaagctgtgaaggttgttgacattgttgacactttcaggcttcaagagcaaccccctttcgacaagaagcagtttgtcgtgttcatcaagaagttcatcaagaacttgacaccaaaactgg

SEQ ID NO: 36572 - DNA, 363 bp, Gossypium hirsutum
  Clone ID: LIB3165-006-P1-K1-E2
cttcctcctcctttcctccgtcgttgcttcggccgtcgtctccgacgttaatagcgacggcgatcctctcatccgtcaagttgtttccgatggtggtgtcgaggaggactccgatgaccatctccttaacgcggagcaccacttcacgctgttcaaatccaagtatgggaaaacctacgcatcccaggaggagcacgattaccgactgggagtcttcaaggctaacctgcgtcgggccaagcgtcatcagctcctggaccccagtgccgtccatggcgtcacaaagttttccgatttaactccatcggagttccgccgccagtatctaggcttgaaaccgctcaagctcccagccgatgctca

SEQ ID NO: 36573 - DNA, 415 bp, Gossypium hirsutum
  Clone ID: LIB3165-006-P1-K1-E3
cggtcggaatttccggtcggccccacccgtccgaccaccatggttggattctacattgccccagctttcatggccaagctggttgtgaacatcaccaagaactacatgacccttcctaacattaaagttcctcttatcttgagtatttggggaggcaaaggtcaaggaaaatctttccaatgtgagcttgtctttgccaagatgggaatcaaccccattatgatgagtgccggagaattggaaagtgggaacgccggagaaccagccaagttgatcaggcaaaggtaccgtgaggccgccgacattatcaagaaagggaaaatgtgttgcctctttatcaacgatctcgacgctggagccggtcgtatgggaggaaccacacaatacacagtgtacaaccaaatggtgaacgcca

SEQ ID NO: 36574 - DNA, 311 bp, Gossypium hirsutum
  unsure (1)..(311): unsure at all n locations; Clone ID: LIB3165-006-P1-K1-E4
ccaaggttaaccttacccaaaaggaaaatgggttttggtttccgttcctttcctaaagctttaaccttttttcgccaagtccaaggggtttaagggccaaaacctccgccacccttcggtttgttttgtacggtcacaccctacttcggccgcctttaccgtccgtgctagttcatatgccgatgagcttgttaagaccgcgaaaactgttgcatctncaggtcgtggtattttggccatggatgaatcaaatgctacatgtgggaagcggcttgcctcgattggtctcgagaataccgaggcaaaccggc

SEQ ID NO: 36575 - DNA, 408 bp, Gossypium hirsutum
  Clone ID: LIB3165-006-P1-K1-E6
ccggtaattcctggccggaccgacgcgtccgaataaattagagtgttatctttctccccctaatctctatctccatggcggataaaacgagagcctcaccttaccactctcatttcttccaactcccttcttcttcttcaatttgatctatctgtttctttcttctttgcttcttttcaagctctattattataacagctacctctgcttcttcttcttcttcttttcaattgccattagtttgattgtagctatggcttctgctgctaactgtgtagtgtattttagcagcaacactaactaccttactgtctcagaactaaaaaaccattctttgcctgctacctttgtcagcagaccacccaacaattacactcttgggaaaagaagtcattacagtgtcagatt

SEQ ID NO: 36576 - DNA, 375 bp, Gossypium hirsutum
  Clone ID: LIB3165-006-P1-K1-E8
cggacgcgtgggcggacgcgtgggttttcattttcaaaccccactccccccatggctggtctcaagcttatttgtggcctagtattgttgtgcatgttggttttggaacccatggccacaactgctctcacatgtggacaagtggcaagccaaacgggtagttgtataaggtatttgcagcgtggagggaaccctccagctgcttgctgcaacggagttaggaacctaaacaggcaagctagaaccacccgtgaccgtcaaactgcatgcagatgcttgcaaactgccgctaggaccatctccggtatcaatactaaattggctgccggtcttccggccaaatgcggtgtcaaaattccttacaagatcagcccc

SEQ ID NO: 36577 - DNA, 376 bp, Gossypium hirsutum
  Clone ID: LIB3165-006-P1-K1-E9
gaaagagcttcttcactttgacaacaatactcactttctcttacagagattgagagaaaatcacaaacacacatttatatagcacagtgatcatcatggctcttcacttgtcttgggttttcgtttttggtattctaggcaacgctgtttcattcatggtttccttggctccactgccaacattttaccaaatattcaagaagaaaacatcggaaggtttccagtcgattccctacgtggtttcgctcttcagtgcgatgctttggatttactatgcactgcttaagaaagatgccattttcctcattaccatcaacactttctgcgttttcattcaaactttttacattgttacttacttttactacggcccaaa

SEQ ID NO: 36578 - DNA, 380 bp, Gossypium hirsutum
  Clone ID: LIB3165-006-P1-K1-F1
ttcaattttcactagctacttgacttcattgcttaattattatttgcagaaagatggattcaattaaatcgcatgcagtatgtcttccaagcccagcacaaggtcatattaaccccatgatgcaactggccaagctcttgcactctagaggcttccatataacctttgtcaactccgagttcaatcatagacgatttatacggtctagaggggaagaagctgttaagggtctgcctcatttccggttcgaagccatacccgacgggctgccaccttccgattctgatgcgactcagtctgttccggcactatgcaattccacacggaaaaattgtttggctccattcttggagctactatctaagcttaattcctcaccc

SEQ ID NO: 36579 - DNA, 376 bp, Gossypium hirsutum
  Clone ID: LIB3165-006-P1-K1-F10
cccacgcgtacgatgacttccaccctgctgcttggttccacctgtttctgtcggtttctccaaagccatcatgaatctcattaataggctcagccccaagcgtctctttcgatctaacaaaaaagatagatccatcgactacaaggtcgacccctcctcctattgttccggttacggcggttactgctcttgctgctgcgaatccgtctcttccaccctcaagagaacatcaatacccttccacggctaccgctggcttcataacgcccaccagtgtttcgccccaaacattatgtgactggtccgattttcccgcttatttgtatctagaactttgccaggcgtttaaaatgttagacaaagataacgacggggt

SEQ ID NO: 36580 - DNA, 379 bp, Gossypium hirsutum
  Clone ID: LIB3165-006-P1-K1-F12
cccacgcgtccggagactcttttgtatacctgtagcatatagtaatagtaagcagtaatagcaatggcctcctccatgatctcatcggcaaccattgccaccgtgaaccgctcctccccggcacaggccaacatggtggcccccttcaccggcctcaaatctgcctctgctttcccagtcaccaggaaggccaacaacgacatcacttctcttgcaagcaacggtgggagagtgcaatgcatgcaggtgtggccgcctcttgggaagaagaagttcgagactctctcatacctgcccgatcttactcccgtacagttggctaaagaagtagattaccttcttcgctctaaatggattccttgcttggaattcgaattag

SEQ ID NO: 36581 - DNA, 373 bp, Gossypium hirsutum
  Clone ID: LIB3165-006-P1-K1-F2
gtttcccatgaaagtagccaaggaagggttgatgaccatccttcttttagaccccatttgccacctgaattctacaagaaacctactgtgaaagtctattgcaaagctgatcctaattttcatctcaccatcagagacggtaaagttattcttgctccatctgatccctctaatgaattccagcactggtacaaagatgagaagttcagcacaagtgtgaaagatgaagtgggtttcccaagcttttctctggttaataaagccactggtcaagccattaaacattccattggagcttcttatcctgtccaactggtaccttacaaaccagatcatcttgatgagtcagttgatttcaggtgctctgatgtgt

SEQ ID NO: 36582 - DNA, 378 bp, Gossypium hirsutum
  Clone ID: LIB3165-006-P1-K1-F3
agcacttctatttgatgattaattagggttttagagctttcacaattgtttaggaatgtgagagtttatgttggagaagaagaggggctcaagaattagagctttcatgagtgatatatacttggggatttcttttgtcattaatttgggtttgcttattgctctttgattttgagcaagtacttgctgatttcttgctgcattgaagaattagaggtttcaagcctggatttggagaattcaggcttttccctcattggcaagttcttccattgttcttgtcataggaacgacgaacgagcaaagcgattaatcttacttctggattgtacttgatttacatattattggggtttgatcggttaaccaaaatagggt

SEQ ID NO: 36583 - DNA, 386 bp, Gossypium hirsutum
  Clone ID: LIB3165-006-P1-K1-F4
tttagctatagcatacactactagtacccactactagcaatggcttcctcaatgatctcatcggctaccattgccactgcctctccggcacaggctaacatggtcgctcctttcaccggtctcaagtctgcctctgctttcccagtcaccaggaaggccaacaacgacattacttctctcgcaagcaatggcggtagagtgcaatgcatgcaggtgtggcctcctactgggaagaagaagtttgagactctctcatacctccccgatcttacacccgtgcagttggctaaagaagtagattaccttcttcgctcaaaatgggttccttgcttggaattcgaattggaggagggattcgtgcaccgtaagtactcgagcttacccac

SEQ ID NO: 36584 - DNA, 386 bp, Gossypium hirsutum
  Clone ID: LIB3165-006-P1-K1-F5
cgggaagctgcaaatgtatttggatagccaaaaacaaacacagagttcatcccatacaatggggaagggttcaagctgtcaataccatcaaaatggaacccaagcaaagaggttgagtacccaggtcaagtcctgagatacgaggacaacttcgactccaccaccaatgttgctgtcctggtcactcctactgataagaagtccattactgacttcggttcccctgaaaatttcctctctaaggtggactatctgcttggaaaacaagcatactctggcttaactgatgctgagggtgggtttgactcaaatgcagtggcaactgcaaacatattggagacttcaactcctgtgatcggagggaaacagtactacttcttgtcggt

SEQ ID NO: 36585 - DNA, 372 bp, Gossypium hirsutum
  Clone ID: LIB3165-006-P1-K1-F8
cccacgcgtccgatgggttcaagcggcggctgctttatccaacatgggaatgttgctcgccgagatgagtagtgactcgttccagctcgagggaatggcatctagggggatgcttcctgaactatttgctaaaaggtcccgttacggaacccctttggtcgggattttattctcggcatccggtgtcatactcttgtcttggttgagcttccaagagattatagcagcggagaacttcttgtattgtttcgggatgatcatggagttcatagcgttcgtgaagctaagagtagatcgtcctgcagaatcgagaccgtacaagatcccggtcgggacagctggggcgattttaatgtgtatcccaccaacatt

SEQ ID NO: 36586 - DNA, 381 bp, Gossypium hirsutum
  Clone ID: LIB3165-006-P1-K1-F9
cccacgcgtccgcccacgcgtccgccacactctcaaattcagataacaatttcacagttgttttcttcactctctctctcagccatctccaccgtcgccgccgctgccgccgccaaccgagctctgggagtgtcagtcccaacctcagctttcatggggaagaaagtgagctcgagattcaacaacaccaggcaggttccttcgggaagttttaaggtgatggcggccgaaaaagagatagacgaagagacacagaccgaaaaggaccgatggaaagggttggcttacgatatttcggacgaccaacaagacattactcgagggaaagggatggtggattccttgttccaagctcccatgaatgatggaactcactatgct

SEQ ID NO: 36587 - DNA, 383 bp, Gossypium hirsutum
  Clone ID: LIB3165-006-P1-K1-G1
ctcaagagtacatgccgtccgcaattctttgttgagctgccaagtccattgtggcgatgttttagctcaaaatatgacaaggtgcatatcctcataaaccacatatggaagacaccatttaactctgacaccgaggggggatctgccctgttcaggccccatataaaagctcaacccccgttaacgcttacaggtcctcatatatagccccagtttagtgtggtcttcgtgagcttagagaccggcttgattcactcaaaaactcgcagaagatcactgaagccatgaatcttgtggctgctgctcaagcatgtagagcatcatgcagcagctgtctatggcagacctttctgtgagtccatagatagtagcccttacatcat

SEQ ID NO: 36588 - DNA, 381 bp, Gossypium hirsutum
  Clone ID: LIB3165-006-P1-K1-G11
cccacgcgtccgctgaaaactaattgaaatcgtcggctgtctctcatttgcgtggctctcgggcttccgccaccgtcgacacccaaaatggaggctcaccggctatcttctactaaacctgttcaatctctcaagccaacgaaaaagattcctttagaggaagataccggtaaagcctccgacgcactgccgcttcccttgtacctaacgaacgccctgttcttcaccctcttcttctcggaggtttattttcttctttcccgttggcgtgagaagatccgtacctccacacctctccatgtcgtcaccttttccgagatcatcgccattctctcatttttcgcgtcctttatttaccttttgggtttctttggaattgac

SEQ ID NO: 36589 - DNA, 373 bp, Gossypium hirsutum
  Clone ID: LIB3165-006-P1-K1-G12
ctttctcttgctctctttagagtaaatttctcttgcaatcctttgtagagatccgggatccattgtcaccatgtcttgctcaaatctgacaatgtgggtgtcctcaaaaccctctctttctgacacttcttcactctctttccgttctttcatcagcccttttcagctcccgtctcagagctcaacccccggtaacccttccaggtcctcatctgtaaccccagttcactgtggtcttcgtgagcttagagaccgtattgattcagtaaagaacacgcagaagatcactgaagctatgaaacttgtggctgctgctaaagttaggagagcacaagaagctgttgtcaatggcagacctttctctgagtccctg

SEQ ID NO: 36590 - DNA, 95 bp, Gossypium hirsutum
  Clone ID: LIB3165-006-P1-K1-G3
tcggtcccccacacattcaaaaacccattccttttctcccttttctttttctcaaacaaggggggttctcaaggatcgggtattgcgattccttt

SEQ ID NO: 36591 - DNA, 383 bp, Gossypium hirsutum
  Clone ID: LIB3165-006-P1-K1-G4
cccacgcgtccgtccccttccaacgttggaccgcttttttcttctcttcctccgcctgtcctccgtcgttgcttcggccgtcgtctccgacgttaatagcgacggcgatcctctcatccgtcaagttgtttccgatggtggtgtcgaggaggactccgatgaccatctccttaacgcggagcaccacttcacgctgttcaaatccaagtatgggaaaacctacgcatcccaggaggagcacgattaccgactgggagtcttcaaggctaacctgcgtcgggccaagcgtcatcagctcctggaccccagtgccgtccatggcgtcacaaagttttccgatttaactccatcggagttccgccgccagtatctaggcttgaaac

SEQ ID NO: 36592 - DNA, 369 bp, Gossypium hirsutum
  Clone ID: LIB3165-006-P1-K1-G5
ggagtacttgcattatgatttggtttctttggaccagaacctggctaagaattcgggtggtgagataattggaactaggaccgaggttgccgacgtgaaggcgacgccgtttcagccttacagcgaggtttttggtctacagaggtttagggagtgtgagttgatccatggacggtgggccatgttggctacgcttggtgcacttaccgttgaatggctcactggtgttacatggcaagatgctggcaaggtggagttagttgagggttcatcgtatctcggccaaccccttcccttctcgatgacaacattgatttggatagaagtattggtgatcggattcatcgagttccaaaggaacgccgagct

SEQ ID NO: 36593 - DNA, 372 bp, Gossypium hirsutum
  Clone ID: LIB3165-006-P1-K1-G6
cccacgcgtccgaggagctgatagtcctttatggttggcatctaaacaaagcctttcatacttggatggcagccttccaggtgattatggatttgaccccttgggactctcagaccctgaaggtccaggagggttcatcgagcctaaatggctagcctacggtgagatcatcaacgggcgttatgctatgttgggtgcagtaggtgcgattgcccctgaaatacttgggaaggccggtcttatcccagcagaaacagccctcccttggtttagaaccggtgtgatcccaccagcaggaacatacagctattgggcagacccttacactttgtttgtgttcgagatggcactcatgggatttgcagagcacag

SEQ ID NO: 36594 - DNA, 381 bp, Gossypium hirsutum
  Clone ID: LIB3165-006-P1-K1-G7
cccacgcgtccgcccacgcgttcgtccacgcgtccgcccacgcgtccgcccaagctcagctttcatggggaagaaagtgagctcaagattcaacagcaccaggcaggttccttcgggaagttttaaggtgatggcggcggagaaagagatagacgaagagacacagaccgaaaaggaccgatggaaagggttggcttacgatatttcggacgaccaacaggacattactcgagggaaagggatggtggattccttgttccaagctcccatgaatgatggaactcactatgctgtcatgagttcctatgaatacctcagccaaggtcttaaaacgtacaatttggacaacaacatggatggtttctacattgcttctgcatt

SEQ ID NO: 36595 - DNA, 380 bp, Gossypium hirsutum
  Clone ID: LIB3165-006-P1-K1-G8
accacacaaaaatcaaccatggcagcagcagccagagtgatagccatcgccggcgactccaccgccgccgcgtcttcctgcttgcttatcaaaacaccgttcgctttacaacgctgcagcaacggacttagattcaacaacgtcagacgatcatcgaaaagattgttttcttgcaatgccatttataaccctcaggttcaaatcaaacaagaaggccaacccgaaactctcgactatagagtcttcttcgaggatacttcgggcaaaaagatttctccttggcacgatgttccattgcacttgggagatggtgtttttagcttcattgttgagatacccaaagaatcaagtgctaaaatggaggttgctactgatgaact

SEQ ID NO: 36596 - DNA, 385 bp, Gossypium hirsutum
  Clone ID: LIB3165-006-P1-K1-H1
gccccatcagcgattttttggactgactatgtagcaacccgttggtatcgtgctcctgaactctgtggatcctttttctccaaatacactcctgcaattgatatatggagcataggatgcatatttgctgagatacttacaggaaaaccactatttcctggaaaaaatgtggtgcaccaattggatctcatgaccgatacacttggcacaccccctcctgaatccatatcaaggattagaaatgaaaaggcaaggaggtaccttagtagcatgcgtaaaaagcaaccaattcctttctcacagaagttccctaatgtggatcacctggctcttcgcctacttgagcgcttacttgcatttgatccaaaagatcgtcccacagctg

SEQ ID NO: 36597 - DNA, 267 bp, Gossypium hirsutum
  Clone ID: LIB3165-006-P1-K1-H10
attcctctttctctcccccccccactaaaaaaaaaaactccaaatctaaagagagactttcctctcctccgatcctttattcgtcttggtttatgagctcgaaaggaaaacccactcttgggtggtccgcggtttaagacccgcaaacggaatattgctgcgcctctggaccctgcagcatttgctgatgcagttgtccagatctatttggataatgctggtgatctggaacttgttgccaagaacctagaatcttctgatcttaac

SEQ ID NO: 36598 - DNA, 391 bp, Gossypium hirsutum
  Clone ID: LIB3165-006-P1-K1-H11
cacgcgtccgatcactcccaatactttcataacatttcacgaacttcactctccagtctacaatggcggctgccgtctccaccatcggtgctgtcaaccgagcaccgttgagtttgaatggatcaggtgccggagcttctgctccaagctcagctttcatggggaacagcttgaagaaagtgagcgctaggttcaacaacaacggcaaggctccagtgggaagtttcatgattgtggctgccaaagaaatcgacgaagacacacagaccgaccaggaccgatggaagggtcttgcttatgatatctccgatgaccaacaagacattaccagagggaaaggtatggtcgactcattgttccaagctcccatgaacgatggtactcactatgc

SEQ ID NO: 36599 - DNA, 375 bp, Gossypium hirsutum
  Clone ID: LIB3165-006-P1-K1-H12
tccggaatggccgggccgacccgccccacgcgtccgcagaagtggatggtagagaataaagaaacacccaccgaaaatgtcggcagcgctggctccaccagcttcatctctcaaactaacggcgacaacctcattcccaacctcacgcgcactcttcctcgctttacgcaaaccccaaatttccattataccacgtgccactcctgactccgacgctgactcatcaacggaacccgactcctcgccctcctcggagacctcagccgactccgacccattcgaatcccgtctctcccaggtccgcctccgttaccgaatcggagccggcaagaaagcggagcgccgaaaatcaaagaaatccggatccgtatcaac

SEQ ID NO: 36600 - DNA, 226 bp, Gossypium hirsutum
  Clone ID: LIB3165-006-P1-K1-H2
cccacccgtccggagagaaaaccattcttctctcccgaattggctcgctagaagatcagagagttcgatgccatgagtttgtggaaagatcttgccaagaggcttcacggtagagttaggccaatcaaatgtgcacatattacagaatcaactcatttcaatcagctagtacgagatggagccatggctgtcgtcacagatactggcttgtacaacctgtgtgttg

SEQ ID NO: 36601 - DNA, 387 bp, Gossypium hirsutum
  Clone ID: LIB3165-006-P1-K1-H3
agccttccgccaacccttccggtttatttctcttaccttggtgccctccgtccttcattaaaggccggaagtccaacctaacaattccagggctcatttgtgtttaaccctggcttacgatggcattttctgcatatcttggaggatggattgcagacacacttgtgagcaaaggcttatctgtgacaactgttcgcaaggtcatgcaatccattgggtttcttggccctgctttcttcctaactcagctgagccatgtcaattctcctgctatggcagttttgtgtatggcatgcagtcagggaactgatgcattttcacagtctggcctttattcaaaccatcaagatattgcccctcgatattcaggtgtattacttggtttgt

SEQ ID NO: 36602 - DNA, 56 bp, Gossypium hirsutum
  Clone ID: LIB3165-006-P1-K1-H4
agattttccgttctattggattctttttgggaaaaaaaatgggaggagaggagggg

SEQ ID NO: 36603 - DNA, 411 bp, Gossypium hirsutum
  Clone ID: LIB3165-006-P1-K1-H5
ccggtacggcctggccgggccgacccatgcgtccgatcactcggagactctttagtatacctgtagcatatagcaatagtaagcagtaatagcaatggcctcctccatgatctcatcggcaaccattgccaccgtgaaccgctcctccccggcacaggccaacatggtggcccccttcaccggcctcaaatctgcctctgctttcccagtcaccaggaaggccaacaacgacatcacttctcttgcaagcaacggtgggagagtgcaatgcatgcaggtgtggccgcctcttgggaagaagaagttcgagactctctcatacctgcccgatcttactcccgtacagttggctaaggaagtagattaccttcttcgctctaaatggattccttgcttggaattcgaattaga

SEQ ID NO: 36604 - DNA, 391 bp, Gossypium hirsutum
  Clone ID: LIB3165-006-P1-K1-H6
gtcccgtcggtctcactgtaagctgcagcttccctgatgcaaccaatcaaggttgctgcaccatcaaggaccaatgtgctgctcaagtcctcccagagcgtttctaaggccttcggtttggagcctgttggtgctaggctcacctgctctttgcaaactgacctcaaggacttggctcagacgtgtgttgatgctaccaagctcgctggtttcgctctttctacatctgctcttgttgtctcgggagcaagcgctgaaggagttccaaagcggctaacctacgatgaaatccaaagcaagacatacatggaagtcaaaggaacaggaactgctaaccagtgcccaaccatcgatggtggtgtcgactcttttgccttcaagcctggcaaat

SEQ ID NO: 36605 - DNA, 380 bp, Gossypium hirsutum
  Clone ID: LIB3165-006-P1-K1-H7
cccacgcgtccgatttcttgaattctcctctcaaccccctaaccaaatcatccatttcataaatattaatccaccaaaagaattatccattcagttcaaagacaccatgacatctacacctactcaagaaaacactcaagtagaaggatcccacgaacccacagtagaagcacccccatcggaagaagatattaagaaatggggcacgcacgtcatgggatccccagcagctcctagtgcccatccagacaaccagaaggcggctttatggaatgctagtgatcaccaacaaatctatgagctgccctatgtcgtttattcccctgcagaaagaccaagccataatccttttgaacctgtgattaacatgttcaatacct

SEQ ID NO: 36606 - DNA, 375 bp, Gossypium hirsutum
  Clone ID: LIB3165-006-P1-K1-H8
cttaacaaacatcaactccagagatcgccaaacatgctaggaactgagcatgatttgaacttcaaagagaccgagctgtgtctcggcctgcctggtggaagtggtggaggaggaggagctgccgccgccggtggtggtggtggtggtaaaaatgaagcggaaagttccccaaagaccaccgggaaaagaggctactccgagactgctgatttgaagcttaatcttcagtctaaagaaggctgcatggatctgcatcaggacctagaaaatggtgcaaaagaaaagaatcatctcactgcaaaaccaccagccaaggcacaagttttgggttggccaccaggtcgatcttataggaagaacattatggcttaccag

SEQ ID NO: 36607 - DNA, 381 bp, Gossypium hirsutum
  Clone ID: LIB3165-006-P1-K1-H9
ctcaccattgatccaagttagttgttaaccaagctagaaccagcagccaacatggcctcattagcagcctccaccgctgccgcctcccttggcgtctctgaaatgctcggtaaccctctgaatttcagtggtggagctaggtcatcggctccaacaccatccaactcatccattttcaagaccgttgctcttttctccaagaagaaggccgctcctccaaagcccaaggctgctgctgtcgccccggccgatgaagagctggctaagtggtacggtccggacagaaagattttcttgcctgaaggtctgttagacagatcggagatcccagagtacttgaacggagaagttcccggagactatggatacgatccgtttggt

SEQ ID NO: 36608 - DNA, 493 bp, Gossypium hirsutum
  Clone ID: LIB3165-006-P1-K2-A10
agccattccaccattcaattaccctgtcaaccttgccgtttcaaaaatagcaccggctttaattgcaggaaactcccttgtactcaagccacctacacagggtgctgtttcagctcttcatatggtgcactgctttcacttggctggctttcccaaagggctcattagctgtgtgacagggaaaggctctgagattggtgatttccttactatgcatcctggagttaattgtataagcttcactggtggagacactggtattgctatctcaaagaaggcaggaatggtccctcttcaaatggaattgggaggaaaagatgcttgtatcgtactcgaggacgccgacttagatttggttgctgcaaacataataaaaggaggattttcttatagtggccaaagatgcactgctgttaaagttgtgttggtgatggaatctgttgctgatgtttctgtggacaaagtgaaggcaaaaaatcgcaagttaacggtt

SEQ ID NO: 36609 - DNA, 509 bp, Gossypium hirsutum
  unsure (1)..(509): unsure at all n locations; Clone ID: LIB3165-006-P1-K2-A11
gcgcccacgcgttcgctgagtttaagcatatcaatatgcggaggaaaagaaacttaccaggctacttcggcaatgtaatctttacgactgcactaattgctgaagctggtgatctcgaaaccgaatcgtttactgacaccataaagaggattcatgaacgattaaatcagataaatgatgaatatttaagatcagctattgattacattgaaaaagagcctgatttaaacaccttggttagaggaccgcatacttttcgatgcccaaaccttgttgttgttccatggaactggttgcctatatatgaggcagatttcggatggggtcgtcccatatatatggggccagggaatgtcgtccaagaaggtaaaatttacatgctaccaagtccagctaacgatgggagtttgacactggcagctcgtttagagatccctcacatgaaagtttttgaaaaacttatttatgagatttaatagttattttnnnaaacaaaaaaaaaataaaat

SEQ ID NO: 36610 - DNA, 426 bp, Gossypium hirsutum
  Clone ID: LIB3165-006-P1-K2-A12
cccacgcgtccgtgcagatcttcgtcaaaaccctgaccggcaagaccataactttggaagtcgaaagctctgacaccattgacaacgtcaaggcaaagatccaagacaaggaaggcatcccaccagaccagcaaaggctcatatttgccgggaaacaactcgaggacggtcgcaccttggccgattacaacatccagaaggagtccaccctccatttggtattgaggcttcgtggtgggatgcaaattttcgtcaagacgttgactgggaaaaccataactttggaggtggagagttccgatacgatcgacaatgttaacgcgaagattcaagacaaagaaggaattccaccagatcagcaaagggtgattttcgcttggaaacaattggaagatggaaggactttggctgattacaatattcaga

SEQ ID NO: 36611 - DNA, 240 bp, Gossypium hirsutum
  unsure (1)..(240): unsure at all n locations; Clone ID: LIB3165-006-P1-K2-A2
cccacgcgtncggaaaaagtctctgacacttgcaacacaataaactacacataaaatctgtgcctgcccttttctctgcacacctcgggatatcagtttcaactccactcatcccacgggttgagtaccgagtccatatatcgttaagttcaaggaaggaacttgggcatcatgggtcttaaggcattagactatgagacaatgaatgaaaacgtgaagaaagttcaatatgcagttaga

SEQ ID NO: 36612 - DNA, 140 bp, Gossypium hirsutum
  Clone ID: LIB3165-006-P1-K2-A3
gaataccgggcgaccacgcgtccgccacgcgtccggatggcagattattaccatgtttccgagcgttcagatgccctgagggcttttccaaccatcgctgatcgggatggaagctgcaggcatacacgagacaactgata

SEQ ID NO: 36613 - DNA, 657 bp, Gossypium hirsutum
  unsure (1)..(657): unsure at all n locations; Clone ID: LIB3165-006-P1-K2-A5
tgaagaaagaaacaaccaccgaaaatgtcggcagcgcttcctccaccagcttcatctctcaaactaacggcgacaacctcattcccaacctcacgcgcactcttcctcgctttacgcaaaccccaaatttccattataccacgtgccactcctgactccgacgctgactcatcaacggaacccgactcctcgccctcctcggagacctcagccgactccgacccattcgaatcccgtctctcccaggtccgcctccgttaccgaatcggagccggcaagaaagcggagcgccgaaaatcaaagaaatccggatccgtatcaacttcgtcttcctcctccatctacctccctccggtgcctttaaaagaggcgatttcaaatgggttgaaagtggatttcgggtttagcccatatagcgagagaataaacggaaggatcgcgattctcgggttgacggctntggttttagtggaattggctacgggtaagagcgtgataagttatcatacgccagcaattatctntattcagatttattttgtagctgcagttggngctttggtcgtttagtaccaggaaggaaaaagtagtggtttggccccttctcaatcttctttaacctaaaaattgaaaaaaaaaagaatttttttggggttt

SEQ ID NO: 36614 - DNA, 571 bp, Gossypium hirsutum
  unsure (1)..(571): unsure at all n locations; Clone ID: LIB3165-006-P1-K2-A6
cgccacgcgtcaacccaacatcgttatcatggcttcctcaactctctccntgcagctccttgcagctatgctccagcaagagtggcatgttctgcccatcacgagcgtttcttgtgaaaccagcgaggacccatatggtcaaaaacgaaaagggaatgaggatcacatgccaggccactagcatccctgctgatagagtgccagacatgggcaagaggcagctcatgaatctgcttctgttgggggctatttcactcccctcaggtttcatgttggttccttatgcagccttctttgtgccatctgggggacggggtaccggtggtggcaccgttgccaaggacgcaatcgggaatgatgtaattgctgaagaatggctcaagactcatggccctggggaccgaaccctgactcaaggattgaagggagacccaacctacctagtggtagagaaagacagaacccttgcaacatatggtataaatgctgtgtgcacacaccttgggtgtgttgttccgtggaatcaagccgagaacaaagtcatatgcccctgccatggatcccaatacaa

SEQ ID NO: 36615 - DNA, 139 bp, Gossypium hirsutum
  Clone ID: LIB3165-006-P1-K2-A7
cgcgttcggaacgccttcttcttcgcgttgcctctgcagtccactaaagatttgcgaaccagatcttaatgaattcaagaagcactgttgcattcacagttttctgcaattgggaaacaaggacgactttttttttgga

SEQ ID NO: 36616 - DNA, 319 bp, Gossypium hirsutum
  Clone ID: LIB3165-006-P1-K2-A8
cttttccaacaaacctaatctgaaattcacttcttttgatcaaaactatttggtccaaaacttaaagtatccaaaaacctcaggaatcccattgttttccttttccattttttgtttgtttctaagggaaatgagggatgttttcatggttggcaaggatagctctggcttgttggagaccagtgagtcgatattcccgtatgaacaaggattacaacaatagcaatagtgagggaacttgaagaagattcttcttctttacgtgactcgcttctttggtggagagacctttgaaaacacttctggggtgatttttcat

SEQ ID NO: 36617 - DNA, 376 bp, Gossypium hirsutum
  unsure (1)..(376): unsure at all n locations; Clone ID: LIB3165-006-P1-K2-A9
cccacgcgtncgnccacgcgtncgttcccttacagccaatctcctcaataccccatttttctggttcctttttcaagccattttacaagcacttcccaattgggagaaggggaaaatggcacagcttttaacaccctcaactcaatggcaaatgacactaccaaagacctcaacctatggaagtcccattgcaacaaaaatgtggagttctctggtactgaaacagaacaagaaaggagctgctaaaagctctggcaagattaaagtggctgccttgtctgaaaacagcactgtcaacaggctagagaacttactaaacatggacgtgactccatacaccgacaagatcattgctgaatacatttggataggaggc

SEQ ID NO: 36618 - DNA, 269 bp, Gossypium hirsutum
  Clone ID: LIB3165-006-P1-K2-B1
gcatcgcgcatacgatcaggtcttttttctctgcactaagactcagagctactctcgtcctagttattttccatggcgattgagaaaattcttaaagatgatgctcgtgaagagaagggggagcgtgccagaatggcatcatttgttggggcaattgcaattactgacttggttaagacaacccttgggccaaagggaatgggataaattttaccggcaactggcacgggaaatgaagtcactgttacacatgatggagctaccatctt

SEQ ID NO: 36619 - DNA, 129 bp, Gossypium hirsutum
  unsure (1)..(129): unsure at all n locations; Clone ID: LIB3165-006-P1-K2-B10
gtcaagccctagtatatgattcttttatatttgccancaagaagggacgtagccgtgttatgaatcaccaagggtgtggctgcaaggctactgggaaggatgcagaaagacgcgttatatgcaccacca

SEQ ID NO: 36620 - DNA, 628 bp, Gossypium hirsutum
  unsure (1)..(628): unsure at all n locations; Clone ID: LIB3165-006-P1-K2-B11
ctcaattcccccacctcattgtaggcaaaatggccactgtttgtgcttcttctgccgttgcagccgttgccatctcatcccccagttcccagaggagtggatcagtagtgaggacaacaaaggcttctttccttacagggaagaaacttcgatcagtcaaaaagtacacaaaaccagcagcagtccgaaccgttccggtgtgtgcagtggctgaccccgaccgacctctttggttcccaggcagtactcctcctccatggctcgatggcagcctccctggagacttcggttttgatcctctaggccttggatcagaccctgagaccttgagatggaacgtacaggcagagctcgtccattgcagatgggcaatgttaggagccgctgggattttcatcccagagttcctaaccaaaattggcattttaaacactccatcatggtactctgctggaaccgaggaatacttcactgacaccaccaccctcttcatcgttgagcttattttcatcgggtgggcagaagggagaagatgggctgacattctcaagcctgggtgcgtaaacactgaccccatcttncctaacaacaagctcacgggcaccgatgttgggtaccctggtgggct

SEQ ID NO: 36621 - DNA, 553 bp, Gossypium hirsutum
  unsure (1)..(553): unsure at all n locations; Clone ID: LIB3165-006-P1-K2-B12
cccacgcgtccgcccacgcgtccgatcactcccaatactttcataacatttcacgaacttcactctccagtctccaatggcggctgccgtctccaccatcggtgctgtcaaccgagcaccgttgagtttgaatggatcaggtgccggagcttctgctccaagctcagctttcatggggaacagcttgaagaaagtgagcgctaggttcaacaacaacggcaaggctccagtgggaagtttcatgattgtggctgccaaagaaatcgacgaagacacacagaccgaccaggaccgatggaagggtctggcttatgatatctncgatgaccaacaagacattaccagagggaaaggtatggtcgactcattgttccaagctcccatgaacgatggtactcactatgctgtcatgagctcctatgagtacattagccaagggccttcgcacatacgacttggacaacaacatggatggattctacattgccccagctttcatggaccaagcttgttgttcacatcaccaagaactacatgaccctttcctaacatt

SEQ ID NO: 36622 - DNA, 361 bp, Gossypium hirsutum
  Clone ID: LIB3165-006-P1-K2-B2
caagactccaaaggatgtcaagatcactggtgtctgttatgctcagcttgattcataaacaagtcttgtatgaatttgtttattctcggctgaggttttgtaatttttaaacaagtgttgctaaactttgcagtaatccactgagaaacccttatcttctttgtatgttactatgttggcttcttataataattttctaagcttctactacaaacccgttacttttgatcaaagcactgggaatcctggaaactaaataatctcactctcattaaggagtttgaatgtaaatgatcaataaacggccttggttcttccgtgcaagtggaggtaaaaccatggcttcaagtactttaacatc

SEQ ID NO: 36623 - DNA, 614 bp, Gossypium hirsutum
  Clone ID: LIB3165-006-P1-K2-B4
tcccgggctaacattcccatttccaatctccagctcccaaggtaaatatgccgatcagaaacatagcggttggccggcccgaagaggctactcaccccgatgctctcaaggctgctttggctgagttcatctcaaccttgatcttcgttttcgctggatcgggctcaggaatggcctttaacaagtggactgacaacggagcaaccaccccggctggtctcgtagccgccgctctagctcatggcttcggtcttttcgtcgctgtctccgttggcgccaacatctcaggtggccacgtcaaccctgccgtcaccttcggtgcttttgttggcgggaacatcactctcttgcgcggcattctttactggatcgcccaactcctaggctcaaccgtcgcttgcctgttgcttaagttcgctaccggcgacctggctgtacccgcttttgggttgtcatcaggtgtgggcgtgtctaacgcattggttctcgaaatcgtgatgaccttcggattggtgtacacagtgtacgccacagccgttgatcccaaaaagggaagctggtgaacaatcgcaccattggcaattggtttcatcgtgggggccaacattttggca

SEQ ID NO: 36624 - DNA, 549 bp, Gossypium hirsutum
  Clone ID: LIB3165-006-P1-K2-B7
cccacgcgtccggccacccttccctgatttcatttcttctgtactcacagtaatcacctctccaaaaccctagctctttcactcactgccgccaatttcaaccaattatttgcttataagcgtcgaaaacgatgtcggacgacgagcgagaggagaaggagttggatctcacctcccctgaagttgttactaaatacaagagtgctgctgagatcgttaacaaggctttgcagttagttgtaaaagaatgcaaaccaaaaactaagattgttgacatttgcgagaagggtgatgcatttatcagagagcaaacaggcaatatgtataagaatgctaagaggaagattgagaggggtgttgccttccccacttgtctttctgttaacaacactgtttgtcatttctctccacttgctagtgacacctccgagctgcaagaaggtgatatggtgaagattgacatgggttgccacattgatgggtttattgctgtagttgcgcacacccatgttgtccaggaaggactagttaatgacaggaaggctgatg

SEQ ID NO: 36625 - DNA, 507 bp, Gossypium hirsutum
  Clone ID: LIB3165-006-P1-K2-B8
cccacgcgtccggagaagaaaacaatgtcaggtcctcagtgctgttcgaatccaccaacattggattctgcaagtggggctggtcacgttgagaatcttgctggtctcaacacttatgtttctgggtctcttcaatctaagcttgctgtttttcttatctctgatattttcggatatgaggctccaaactttagaaagctcgcggacaaggttgcagccgctgggttctatgtggtggctcctgacttcttttatggagaaccctatgaccctaataaccctgatagacctctatctgtttggataaaggatcatggaccggataaaggttacgaggatgcaaagctcgtaattgacgctttgaaaagtaaaggggtttcatccattggagctgctgggttctgttggggtgctaaagttgtggctggactggctaaggatccccttattcaaacaagctgaatgttacatccttcatttgtgactggggaccatttcaaaagtgtg

SEQ ID NO: 36626 - DNA, 558 bp, Gossypium hirsutum
  Clone ID: LIB3165-006-P1-K2-B9
ttaaaaacagcaaagaagatgtcatcatcaacggcggccaatcaagtgagggcatctcacatactcatcaatcaccaaggctctcgtcgtaaggcttcttggaaggatccagaaggtcgcgtcatctccaccaccacccgagacgccgctgtctcacagcttaaacttctcggcgacgacatcgtttccaacaaggctaagttcgacgaggttgcctctcgctactcggattgcagctccgctaaacgtggcggtgatctcggctgcaaggagtgtgcctcaactcagttcttattgttaattatctgtgacctttagttggtttataccagcattacgggacataatgcaaactaaaaaccttatacaaacttttttgtggaggtccttttggtcgaggccagatgcaaaagccatttgaggatgcaacatataatcttaacattggcgagataagtgacattgtggataccgatagcggtgttcacatcataatgcgaactgggtaatcattattgatggagcctggatatcgtgagcaattagttcagtcttctc

SEQ ID NO: 36627 - DNA, 609 bp, Gossypium hirsutum
  Clone ID: LIB3165-006-P1-K2-C10
aagaaatcaaaagacaaaatagccaataacaatggcactcagaatgtgggcttcttccactgccaatgcactcaaaatctcttgttcctccaaacctaatgtttcccttgctttctcactctctagatgcttttccactgttttggatgggctgaagtatgctaattcacatgaatgggtgaagcatgaaggtcctgtggctaccattggcatcactgaccatgctcaggaccatcttggagaagtagtgtttgtggagttgccggaaccaggtggttcagtgagccaaggaaaagggtttggagcagtggaaagtgttaaagcaacaagtgatatcaattccccaatctccggcgaagtcgtggaggttaactccaagctgtccgaaactccgggcctgatcaactcaagcccatatgcagatggatggatgatcaaagtgaagccaagcagtccatcagagttagaatcattgatgggtccaaaggaatacaccaaattctgtgaggaagaagatgcttcccactaagaaaccattgtacccttattttcaaactttgtgttcaagaaataaggtttattgcaattttaattttatggctatttatc

SEQ ID NO: 36628 - DNA, 557 bp, Gossypium hirsutum
  unsure (1)..(557): unsure at all n locations; Clone ID: LIB3165-006-P1-K2-C11
cccacgcgtccgattcaaggcacaaaatttgacccaaaatggcctctgtttgtgcttcttcggctattgcagctgttgccatctcatcccccagttcccagaagactggatcagtagtggggacaacaaaggcttctttccttacagggaagaaacttagatctgtgagaaagtacacaaaaccagctgccggaccaacatttccagtgtgcgccgccgccgaccccgacagacccctttggttcccaggcagcactcctcctccatggctggatggcagtctccctggtgactttggtttcgatcctctcggtcttgggtctgaccctgagacattgagatggaacgtacaagcagagctggttcactgcagatgggcaatgttgggagctgctggtattttcatcccagagttcttaaccaagattgggattttaaacactccatcgtggtactcagctggaacagaggaatacttcactgacaccacaactctcttcatcgntgagcttatttttatcggctgggctgaagggagaagatgggctgacattctc

SEQ ID NO: 36629 - DNA, 401 bp, Gossypium hirsutum
  Clone ID: LIB3165-006-P1-K2-C3
caaaaagaacactcggaaggcattcgaacatacagaaacacacgtaccccagccagaacaagaaaacaagtagtgtattaattaacagaagctgcatattgtagagaaacacaatagttacttgccatcaatggaagctgcaaggaaatttctctctcttcctccatctttttctacgagaacccaacttaagaattctgtctcttcatcaccatcttcttcagtttcaatgtttcacgagcaagcggctgctgctgctgcaacatctattccgattaattcggtagctaggcatttttctacattagttctctcacaagagcagcgcgatgacttgaaacctttggctatcttgcaatactttaaggaagataaagcatattcagggcccacagacaaac

SEQ ID NO: 36630 - DNA, 235 bp, Gossypium hirsutum
  Clone ID: LIB3165-006-P1-K2-C5
gttgatggtgggtttacatcttccaatcactcattgcgtgtcttcagatgaggattgatgaaaatatgaaccaaaatgaggctcattagctttggttcaactattaccagattgtatttcccttctattttctcctgtcactggtatgtaatttgtaacaaaaaacttctaatataattttaattatatctatatataaaatatcatatgctttaatacaaatatccaagatttt

SEQ ID NO: 36631 - DNA, 515 bp, Gossypium hirsutum
  unsure (1)..(515): unsure at all n locations; Clone ID: LIB3165-006-P1-K2-C6
cacaatgaaacaccattgttttctcctctaaatcttctccccactatctctcttcttttactttatttctctctttttctcatttcttttgtgtataattgttactcgctgaattatatatacaaatatatatataattgaaaacatttcattcgttaatttatatagctagccatgagatcgtttttaaagtttgtttcacgttgcgttaaaaaccctgaagtgtccacgacagaagagatggtggtgacggctcctgngagggaggaaacaaggtcttttatggctcctaaaatggtggcactgaagaagaagaagaagagggtaaaggtggngacgccattctctacgactcctgagtggaaaccttcgttgtatgtaatctcggaggataacgttttggcggagaagagagagaaaacaacgccggaagcttcaacaacgccggctgatagagcggtgaagaggaagagtggagcagggtcacgctccaaagttcacgttcgaagctacag

SEQ ID NO: 36632 - DNA, 535 bp, Gossypium hirsutum
  Clone ID: LIB3165-006-P1-K2-C7
cccacgcgtccgtctggtttcactgtcagagctcatcagacaccggccgagcctgagactggacgcagagccatgttgggtcttgttgctgctggtttggccactggctcctttgttcaagctgtgcttgccgatgccagaagcatcaaggttggcccacctccccctccctctggtggactgcctggaactctgaactctgatgagccaagagaccttgttctgccatacaaagacaggttcttcctccaaccagttactccagctcaggcagcacagagagcaaaggaatcagccaaggacattctgggtgtcaagaacttgattgacaaaaaagcctgggcttatgtcatgaatgatctccgtctcaaggccgagtatctccgctatgacctcaacaccgtcattgctgccaagtccaaagatgagaagaaaactctaaaggacctcaccaagaagctcttcagtaccatcgatgatcttgaccatgcagccaagatcaaaagcacccctgaagcagagaaatcttacgctc

SEQ ID NO: 36633 - DNA, 285 bp, Gossypium hirsutum
  Clone ID: LIB3165-006-P1-K2-C8
cggacgcgtgggttagctatagcatacactactagtacccactactagcaatggcttcctcaatgatctcatcggctaccattgccactgcctctccggcacaggctaacatggtcgctcctttcaccggtctcaagtctgcctctgctttcccagtcaccaggaaggccaacaacgacattacttctctcgcaagcaatggcggtagagtgcaatgcatgcaggtgtggcctcctactgggaagaagaagtttgagactctctcatccctccccgatcttacac

SEQ ID NO: 36634 - DNA, 468 bp, Gossypium hirsutum
  Clone ID: LIB3165-006-P1-K2-D10
aaaaatacctgtggctctcactctccttaaacatgtcaagaaatcaaataaggtgttcactaggatcatcattatcaacaacacccaaaaaagctgtaccctcaccaccaccttaacaatgaatgacacagtggacaggcttgtgatctttctagccaagagagatggcattgacaagcttgtgaagaccttacaatacgtgtttaagcttgttaactggcaagtagaaaccacacacccagacctagcaaacaggttcaaacaatgggaggtctcctccggtcttagcagaaaagcctttagaacaggcaggttcctcactggtttcaatgggttgagaaggaaccctggtgccaccccaacattcaagttcctagctgtacttgctaatgcaggagagatggtgtatttctttttcgaccactttctatggctatcgaggattggaacattggatgccaagttggc

SEQ ID NO: 36635 - DNA, 296 bp, Gossypium hirsutum
  Clone ID: LIB3165-006-P1-K2-D11
ggcagataagattgccaaggagtctgcagcttaattaatttcaatgttgatgcctttgtttactccccgataatgttgaaaataattagaggcggtgttggcgttgccaacaacaacaggactgttcattttttgggatatttttcctattcaagttttaatgatgttattcaagagtgagaaagaggaatagaacttgggcccctttttacttgtttaataagggaaataaaaaccggatatgtacatttttggttggagaactacggatgctaaacttttctctgttttcagtt

SEQ ID NO: 36636 - DNA, 613 bp, Gossypium hirsutum
  unsure (1)..(613): unsure at all n locations; Clone ID: LIB3165-006-P1-K2-D12
aaaatctcaaacccagatttgttctctctctctctctctctctatttccaatcaattaattcctccattggaggagcttagggtttgttggtgttctggtctttgctttgtctgaaaaataaacagaattataaacgaacaccaacgccatgggaagatttgaagagagaggattcgattcagtggtttgccctaagcctatccgaacctttagatggtccaccaactgttatcagactgagatggctgattcaaaaactggtgcagagcttcttgatataatcctccccgagggagggtatggggccgagaatcccaccaaccaaatggcttcatcaccaccgtatttctgtggatcaccgccgagcagggcgtcgaatccggtaatccaagatgcccgattcaacgacgagcagccggtgctacctccactaacatccccagcaacctcctcaaggggaggatgcgtgagggtgaaattcgggcagatgccagctgctgtacgaatcgagggatttgattgcctcaccagagatggccgncatcgcagcatcttcgccgtggcttaaaaaaaaccaagatatggagaccaaaatgtgagaggagagaggga

SEQ ID NO: 36637 - DNA, 498 bp, Gossypium hirsutum
  unsure (1)..(498): unsure at all n locations; Clone ID: LIB3165-006-P1-K2-D2
cccacgcgtncggcagctgttgccatctcatcccccagttcccagaagactggatcagtagtggggacaacaaaggcttctttcctttcagggaagaaacttagatctgtgagaaagtacacaaaaccagctgccggaccaacatttccagtgtgcgccgccgccgaccccgacagacccctttggttcccaggcagcactcctcctccatggctggatggcagtctccctggtgactttggtttcgatcctctcggtcttggttctgaccctgagacattgagatggaacgtacaagcagagctggtgcactgcagatgggcaatgttgggagctgctggtattttcatcccagagttcttaaccaagattgggattttaaacactccatcgtggtactcagctggaacagaggaatacttcactgacaccacaactctcttcatcgntgagcttatttttatcggctgggctgaaaggagaagatgggctgacatt

SEQ ID NO: 36638 - DNA, 330 bp, Gossypium hirsutum
  Clone ID: LIB3165-006-P1-K2-D3
tataccagaaaataaaaagaagaagaaaagagatccccatgatgtctcttacaatcccaactaatctctcaaaatcaattttgaagccaaagctggagacccaagtgatccccaaggcttcatccagatcattgattgtatgctcctccagcaatccttcctcctccgacaaatcggcttcatcactccaggccttctcagcggctctcgctctttcttccatccttctttcggctccactccctgctgttgcggacattgcggggctcactccttgcaaagagtccaagcaattcgccaagcgcgagaagcagcagatcaagaagctgg

SEQ ID NO: 36639 - DNA, 357 bp, Gossypium hirsutum
  unsure (1)..(357): unsure at all n locations; Clone ID: LIB3165-006-P1-K2-D4
tcggtcgccacgcgcacacatgtgacagcgaactgactgcctgaccgacagcgaagggaacagacaccatgaattgactgaaagctacataacactgtggatggatgtcagtgaacatgcaggcaaggcgactgctgcagtgacagactgcacctgggccactaagccaacatacaatggtcatgcttcaggtcatggcatatatagggatctaaataatgaatttaaggttgaataatttggctggtggaggttgtgtggtgacttatatctggcagntaacctttggatcctttactatgatgtaatggctatgcttatgtggcttatctgggtaatgaaagattcctacctatt

SEQ ID NO: 36640 - DNA, 576 bp, Gossypium hirsutum
  unsure (1)..(576): unsure at all n locations; Clone ID: LIB3165-006-P1-K2-D6
cccacgcgtccgctttgttccacctctttctttctttttctccaaagccatcatgaatctcattaataggctcagccccaagcgtctctttcgatctaataaaaaagatagatccatcgtctccaagttcgacccctcctcctatagttccggttccgccgtttcctcctcttcctcctccgaatccgtctcttccaccctcaaagaacatcagtacccttccacggctaccgctggcttcgtaacgcccaccagtgttttgccccaaacatcaggtgactggtccgattttcccgctaatttttatctagaactttgccaggcgtttaaaatgttagacaaagataacgacggggttatatcgagaagcgagctcgaggctttgcttggcaaggtcgcaaggcagccgcccagccgggacgaggtttccttgatgttgagcgaagtggacggtgacggcgacggctacatcaacctggaaacgttgatgaaccaggtggttggaccggcttgcgacgaacccgcctgcgaaccggaactganggagacttttgatatatttgacacagatcatga

SEQ ID NO: 36641 - DNA, 560 bp, Gossypium hirsutum
  Clone ID: LIB3165-006-P1-K2-D7
cccacgcgtccggccggtgcaaccgcagctaatgttagcgccacagccaaggttgcagcctctccagtcccaaggggcagcatcaaggcctccctcaaagacgttggtgttgctgttggggcaactgctgcaagcgtaatccttgccagcaatgccatggccattgaagtcttgctcggcagtgacgatgggggtctggctttcattcccaaagaattcagcgtaagcccaggggagaagattgtgttcaagaacaatgccggattcccacacaatgttgtgttcgatgaggacgaaatcccaagcggcgtcgacgtatccaaaatctccatgcctgaagaagagctactcaatgccaaagacgagacttacgctgttaccttgactgagaaaggaacctacagtttctactgttctcctcaccagggtgcaggtatggttggaaaagtcacagttaactgagttatacatttatcttttcaacccctttgtgctttgtatgtatcatctcacacatctcttctactttttgagcactagagttttgagtattggggatg

SEQ ID NO: 36642 - DNA, 325 bp, Gossypium hirsutum
  Clone ID: LIB3165-006-P1-K2-D8
cccacgcgtccgattaaaataggagactccgcccatttttcttcattttcctccaaccataatcattatatttatatttcttcctctctcttctttatttcttcaagtttaaggcctcaaaatggaggcagccactgtggttggatcttctatgtctctacatcgaacttcatgctccgctgccagatccgcccttttagctgccaatggcccgctctttccacgtttcgctgctaaccctcgctcctccttctcgatcaagctttattcttcagtttcatattcaaaatcacggaataggagaatgggtttggggggttggaga

SEQ ID NO: 36643 - DNA, 582 bp, Gossypium hirsutum
  Clone ID: LIB3165-006-P1-K2-E1
cacgcgtccggtggattgaagtgaagaaagaaacaaccaccgaaaatgtcggcagcgcttcctccaccagcttcatctctcaaactaacggcgacaacctctttcccatccccacgggcactcttcctcgctttacgcaaaccccaaatttccattatcccgcgtgccactcctgactccgacgctgactcatcaaccgaacccgactccgccccctcctcggacacctcagccgaatccgacccattcgaatcccgtctctcccaagtccgcctccgttaccgaatcggagccggcaagaaagcggagcgccgaaaatcaaagaaatccggatccgtgtccacttcgttgtcttcctcctccatctacctccctccggtgcctttaaaagaggcgatttcaaatgggttgaaagtggatttcgggtttagcccatatggcgagagaataaacggacggatcgcgattctcgggttgacggctttggttttagtggaattggctacgggtaagagcgcgataagttatcatacgccagcaattatctttattcaaatttattttgtagctgcagttggggct

SEQ ID NO: 36644 - DNA, 576 bp, Gossypium hirsutum
  Clone ID: LIB3165-006-P1-K2-E10
cccacgcgtccggatgtcttggttcatggagagcctgagagaaacgatatggttgagtactttggtgagcagttgtctggttttgcattcactgttaatggatgggtgcaatcttacggatctcgatgtgtcaagccaccaatcatctacggtgatgttagccgccccaagccaatgactgttttctggtcatctaccgcacaaagcatgactgcacgcccaatgaagggaatgcttactgggcctgttaccatccttaactggtcctttgtcagaaatgatcagccccggtttgagacttgctaccagattgccttggccatcaaggacgaagtggaggatcttgagaaggccggtatcaatgttatccaaattgacgaggctgctttgagagaggggttgcctcttagaaagtcggagcacgccttctacttgaaatgggctgtccactccttcagaatcaccaactgtggtgtacaggacactacccagatccacactcatatgtgctactccaacttcaatgacatcatccactcaattattgacatggatgctgatgtgataaccatcgag

SEQ ID NO: 36645 - DNA, 515 bp, Gossypium hirsutum
  unsure (1)..(515): unsure at all n locations; Clone ID: LIB3165-006-P1-K2-E11
gtagccgccgcctgcgtctctctcttcatctctctgaaccaaaaagtctttagcttttcgcttcgagagagaccatgttggtttaccaggatctcatctccggtgacgagcttctttctgactcattcccctacaaggaaatcgagaatgggatgctgtgggaagttgagggaaagtgggttgtgcaaggagctgtcgatgttgacattggtgccaatccttcagccgaaggtgctgatgaggatgaaggtgttgatgaccaagctgtgaaggttgttgacattgttgacactttcaggcttcaggagcaaccccctttcgacaagaagcagtttgtcgtgttcatcaagaagttcatcaagaacttgacaccaaaactggatgcggaaaagcaagagtccttcaagaaaaacattgagggagcaaccaagtttttgctttcaaaattgaaggaccttcaatttttcgtaggagagagcatgcatgatgatggatgctnggtgtttgcttactac

SEQ ID NO: 36646 - DNA, 594 bp, Gossypium hirsutum
  Clone ID: LIB3165-006-P1-K2-E2
acgcgtccgcttcctcctcctttcctccgtcgttgcttcggccgtcgtctccgacgttaatagcgacggcgatcctctcatccgtcaagttgtttccgatggtggtgtcgaggaggactccgatgaccatctccttaacgcggagcaccacttcacgctgttcaaatccaagtatgggaaaacctacgcatcccaggaggagcacgattaccgactgggagtcttcaaggctaacctgcgtcgggccaagcgtcatcagctcctggaccccagtgccgtccatggcgtcacaaagttttccgatttaactccatcggagttccgccgccagtatctaggcttgaaaccgctcaagctcccagccgatgctcaaaaggctcctatccttccgactgacaacttaccggatgactttgactggcgtgaccacggcgccgtcactggcgttaaagaccagggttcctgtggatcgtgttggtcgttcagtgcgacgggggctttggagggagcccattatttggcgacaggagagcttgtaagcttgagtgagcagcaacttgttgattgtgatcacgagggtgatccacaacaata

SEQ ID NO: 36647 - DNA, 309 bp, Gossypium hirsutum
  Clone ID: LIB3165-006-P1-K2-E3
aacaacatggatggattctacattgccccagctttcatggacaagcttgttgttcacatcaccaagaactacatgacccttcctaacattaaggttcctcttatcttgggtatttggggaggcaaaggtcaaggaaaatctttccaatgtgagcttgtctttgccaagatgggaatcaaccccattatgatgagtgccggagaattggaaagtgggaacgccggagaaccagccaagttgatcaggcaaaggtaccgtgaggccgccgacattatcaagaaagggaaaatgtgttgcctctttatcaac

SEQ ID NO: 36648 - DNA, 580 bp, Gossypium hirsutum
  Clone ID: LIB3165-006-P1-K2-E4
tagattatggtgaaaaactaaacataataaagtccctcataacattcttcgacttgcttcattgattagcccaaagataaacataaccaaaaagaaaaatggcttctgcttccgctactctcctcaagtcttcacctattatcgacaagtccgagtggattaagggccaaaacctccgccacccttcggtttgttttgtacggtcacaccctacatcggccgcctttaccgtccgtgctagttcatatgccgatgagcttgttaagaccgcgaaaactgttgcatctccaggtcgtggtattttggccatggatgaatcaaatgctacatgtgggaagcggcttgcctcgattggtctcgagaataccgaggcaaaccggcaagcttaccgtacccttctcgtgtctgcccctggcctcggtaactacatctcgggagctatccttttcgaggagactctctaccaatctaccatcgatgggaaaaagatggtcgatgttcttgttgagcaaaatattgtcccttgtatcaaagttgacaagggtttggttccactccctggttccaacaacgagtcatg

SEQ ID NO: 36649 - DNA, 549 bp, Gossypium hirsutum
  Clone ID: LIB3165-006-P1-K2-E6
aataaattagtgtgttatctttctccccctaatctctatctccatggcggataaaacgagagcctcaccttaccactctcatttcttccaactcccttcttcttcttcaatttgatctatctgtttctttcttctttgcttcttttcaagctctattattataacagctacctctgcttcttcttcttcttcttttcaattgccattagtttgattgtagctatggcttctgctgctaactgtgtagtgtattttagcagcaacactaactaccttactgtctcagaactaaaaaaccattctttgcctgctacctttgtcagcagaccacccaacaattacactcttgggaaaagaagtcattacagtgtcagattgttatcttcaacgacgggaatcaatccacgggcagcagcaccatcagccactgctgtagagaatgatggaagtttccccgacactgatatggttccaacccccaaagttataattgatcaagactcggatccagatgccactgttgttgaaattacctttggcgatcgactc

SEQ ID NO: 36650 - DNA, 306 bp, Gossypium hirsutum
  Clone ID: LIB3165-006-P1-K2-E9
gaaagagcttcttcactttgacaacaatactcactttctcttacagagattgagagaaaatcacaaacacacatttatatagcacagtgatcatcatggctcttcacttgtcttgggttttcgtttttggtattctaagcaacgctggttcattcatgggttccttggcttcactggccacattttaccaaatattcaaaaagaaaacatcggaagggtttcaggccattccctacctgggttcggtttttaaggccatgctttggatttactattcaccggttaagaaagaagccatttttctta

SEQ ID NO: 36651 - DNA, 572 bp, Gossypium hirsutum
  Clone ID: LIB3165-006-P1-K2-F1
ttcaattttcactagctacttgacttcattgcttaattattatttgcagaaagatggattcaattaaatcgcatgcagtatgtcttccaagcccagcacaaggtcatattaaccccatgatgcaactggccaagctcttgcactctagaggcttccatataacctttgtcaactccgagttcaatcatagacgatttatacggtctagaggggaagaagctgttaagggtctgcctcatttccggttcgaagccatacccgacgggctgccaccttccgattctgatgcgactcagtctgttccggcactatgcaattccacacggaaaaattgtttggctccattcttggagctactatctaagcttaattcctcaccccacctgccgcctgttacatgcatagtttgtgatggaaccatgaactttggtaccaaggcagctcaactcattggggtgccttatgttcaactctggacttttttaaccgttagctttctgggatttctgcactacaaagaactagctcaaagaggcattgttccattcaaagatgaacgcttttgtagcgat

SEQ ID NO: 36652 - DNA, 652 bp, Gossypium hirsutum
  unsure (1)..(652): unsure at all n locations; Clone ID: LIB3165-006-P1-K2-F10
cccacgcgtacgatgccttacacccgcctgcttggttccacctgtttctttctttttctccaaagccatcatgaatctcattaataggctcagccccaagcgtctctttcgatctaataaaaaagatagatccatcgactacaaggtcgacccctcctcctatagttccggttacggcggttactgctcttgctgctgcgaatccgactcttccaccctcaaagaacatcagtacccttccacggctaccgctggcttcgtaacgcccaccagtgttttgccccaaacatcaagtgactggtccgattttcccgctaatttttatctagaactttgccaggcgtttaaaatgttagacaaagataacgacggtgttatatcgagaagcgagctcgaggctttgcttggcaaggtcgcaaggcagccgcccagccgggacgaggtttccttgatgttgagcgaagtggacggtgacagcgacggctacatcaacctggaaacgttgatgaaccaggtggttggaccggcttgcgacgaacccgcctgcgaaccggaactgacgggagactttgatatatntgacacagatcatgacgggaagatcacggccgaggagttgatggcgttttttaaggacataatatgggatgag

SEQ ID NO: 36653 - DNA, 594 bp, Gossypium hirsutum
  Clone ID: LIB3165-006-P1-K2-F12
cccacgcgtccggagactcttttgtatacctgtagcatatagtaatagtaagcagtaatagcaatggcctcctccatgatctcatcggcaaccattgccaccgtgaaccgctcctccccggcacaggccaacatggtggcccccttcaccggcctcaaatctgcctctgctttcccagtcaccaggaaggccaacaacgacatcacttctcttgcaagcaacggtgggagagtgcaatgcatgcaggtgtggccgcctcttgggaagaagaagttcgagactctctcatacctgcccgatcttactcccgtacagttggctaaggaagtagattaccttcttcgctctaaatggattccttgcttggaattcgaattagaggagggattcgtgcaccgtaagtactcgagcttacccacgtactacgatggacgctactggaccatgtggaaactgcccatgttcgggtgcaccgactcggctcaggtgttgaaggagcttgaggaatgcaagaaggaataccccaatgcattcattagaatcattgggttcgacaacgttcgtcaagtgcagtgcattagtttcattgcctac

SEQ ID NO: 36654 - DNA, 461 bp, Gossypium hirsutum
  unsure (1)..(461): unsure at all n locations; Clone ID: LIB3165-006-P1-K2-F2
ccacgcgtncggtttcccatgaaagtagccaaggaagggttgatgaccatccttcttttagaccccatttgccacctgaattctacaagaaacctactgtgaaagtctattgcaaagctgatcctaattttcatctcaccatcagagacggtaaagttattcttgctccatctgatccctctaatgaattccagcactggtacaaagatgagaagttcagcacaagtgtgaaagatgaagtgggtttcccaagcttttctctggttaataaagccactggtcaagccattaaacattccattggagcttcttatcctgtccaactggtaccttacaaaccagatcatcttgatgagtcagttgatttcaggtgctctgatgtgtcctccaccgttgatgcatcactcaccatggtcatgggagacgacattggtaaggtgattgcttggtacgacaatgag

SEQ ID NO: 36655 - DNA, 515 bp, Gossypium hirsutum
  Clone ID: LIB3165-006-P1-K2-F3
agcacttttatttgatgattaattagggttttagagctttcacaattgtttaggaatttgagagtttatgttggagaagaagaggggctcaagaattagagctttcatgagtgatatatacttggggatttcttttgtcattaatttgggtttgcttattgctctttgattttgagcaagtacttgctgatttcttgctgcattgaagaattagaggtttcaagcctggatttggagaattcaggcttttccctcattggcaagttcttccattgttcttgtcataggaacgacgaacgagcaaagcgattaatcttacttctggattgtacttgatttacatattattggggtttgatcggttaaccaaaatagggtgactggatgctgaacgccagagatttgcttgcttggctacttaacttgatgctggggatatatggtctccctaaatattctggaattccttctattgctattgttggttgaggactattagtttttttgcaacttgt

SEQ ID NO: 36656 - DNA, 604 bp, Gossypium hirsutum
  Clone ID: LIB3165-006-P1-K2-F4
tttagctatagcatacactactagtacccactactagcaatggcttcctcaatgatctcatcggctaccattgccactgcctctccggcacaggctaacatggtcgctcctttcaccggtctcaagtctgcctctgctttcccagtcaccaggaaggccaacaacgacattacttctctcgcaagcaatggcggtagagtgcaatgcatgcaggtgtggcctcctactgggaagaagaagtttgagactctctcatacctccccgatcttacacccgtgcagttggctaaggaagtagattaccttcttcgctcaaaatgggttccttgcttggaattcgaattggaggagggattcgtgcaccgtaagtactcgagcttacccacgtactacgatggacgctactggaccatgtggaagctgcccatgttcgggtgcaccgactcggctcaggtgttggaggagcttgaggaatgcaagaaggcataccccaatgcattcattagaatcattggcttcgacaacgtgcgtcaagtgcagtgcattagtttcattgcctacaagcctccaggcttctaagctttttattaactttggctctcca

SEQ ID NO: 36657 - DNA, 568 bp, Gossypium hirsutum
  Clone ID: LIB3165-006-P1-K2-F5
cgggaagctgcaaatgtatttggaaagccaaaaacaaacacagagttcatcccatacaatggggaagggttcaagctgtcaataccatcaaaatggaacccaagcaaagaggttgagtacccaggtcaagtcctgagatacgaggacaacttcgactccaccaccaatgttgctgtcctggtcactcctactgataagaagtccattactgacttcggttcccctgaaaatttcctctctaaggtggactatctgcttggaaaacaagcatactctggcttaactgatgctgagggtgggtttgactcaaatgcagtggcaactgcaaacatattggagacttcaactcctgtgatcggagggaaacagtactacttcttgtcggtgttgacgagaactgctgatggagatgaaggtggcaagcaccaactaattacagccaccgtaaacaatggtaaactttacatttgcaaagcacaagctggggacaagcggtggtttaaaggagctagaaagtttgtggagagtgctgcaaattccttcaagtgtgcttagttaaaaagtctta

SEQ ID NO: 36658 - DNA, 527 bp, Gossypium hirsutum
  Clone ID: LIB3165-006-P1-K2-F8
cccacgcgtccgatgggttcaagcggcggctgctttatccaacatgggaatgttcctcgccgagatgagtagtgactcgttccagctcgagggaatggcatctagggggatgcttcctgaactatttgctaaaaggtcccgttacggaacccctttggtcgggattttattctcggcatccggtgtcatactcttgtcttggttgagcttccaagagattatagcagcggagaacttcttgtattgtttcgggatgatcatggagttcatagcgttcgtgaagctaagagtagatcgtcctgcagaatcgagaccgtacaagatcccggtcgggacagctggggcgattttaatgtgtatcccaccaacattgttgatcctcgtggttttagccattgcatcttttaaagtcatggtggttagcacggtggcagtgatgataggacttgctcttgagccatgtttaaggtattcggagagaaaaagatggctcaaattcaccatgaaccctgatctttatgatcttc

SEQ ID NO: 36659 - DNA, 523 bp, Gossypium hirsutum
  Clone ID: LIB3165-006-P1-K2-F9
cccacgcgtccgcccacgcgtccgccacactctcaaattcagataacaatttcacagttgttttcttcactctctctctcagccatctccaccgtcgccgccgctgccgccgccaaccgagctctgggagtgtcagtcccaacctcagctttcatggggaagaaagtgagctcgagattcaacaacaccaggcaggttccttcgggaagttttaaggtgatggcggccgaaaaagagatagacgaagagacacagaccgaaaaggaccgatggaaagggttggcttacgatatttcggacgaccaacaagacattactcgagggaaagggatggtggattccttgttccaagctcccatgaatgatggaactcactatgctgtcatgagttcctatgaatacatcagccaaggtcttaaaacgtacaatttggacaacaacatggatggtttctacatcgctcctgcattcatggacaagcttggtgttcacatcagcaagaacttcatgtccctccctaaca

SEQ ID NO: 36660 - DNA, 304 bp, Gossypium hirsutum
  unsure (1)..(304): unsure at all n locations; Clone ID: LIB3165-006-P1-K2-G1
ctcaagagtacaggccgnccgcaatcctttgtagagctgacaagtccattgtgaccatgttttagtcaaatatgacagggtgcgtgtccttaaaaccacatattgatgacactatttaactatgtcacagaggggtgatcagccctgttcaggtccacatataaaagctcaacctccgttaaccctaacaggccatatgagagccccagttcaatgaggtcttcgtgagcttagagaccggcttgattcactaaagatcacgcagacgatcactgcagccatgcatcttgttgctgatgctcaa

SEQ ID NO: 36661 - DNA, 242 bp, Gossypium hirsutum
  unsure (1)..(242): unsure at all n locations; Clone ID: LIB3165-006-P1-K2-G10
ccacactgcggctggcggggcgaaccagaggaaactctgtggaggctcgcacgatactgactgcaaattggtcgttgactcgggataggggcgaagattatcaaccgttagtagctggttcctcgaagtttctctcacgatagtggagccttagcggttgtatcgggtaagacatgattagaggatgggggcgcacagcctaacctattataaactgtaaataggtaggacgggcggntctt

SEQ ID NO: 36662 - DNA, 500 bp, Gossypium hirsutum
  unsure (1)..(500): unsure at all n locations; Clone ID: LIB3165-006-P1-K2-G11
cccacgcgtncgctgaaaactaattgaaatcgtcggctgtctctcatttccgttcctctcgggcttccgccaccgtcgacacccaaaatggaggctcaccggctatcttctactaaacctgttcaatctctcaagccaacgaaaaagattcctttagaggaagataccggtaaagcctccgacgcactgccgcttcccttgtacctaacgaacgccctgttcttcaccctcttcttctcggtggtttattttcttctttcccgttggcgtgagaagatccgtacctccacacctctccatgtcgtcaccttttccgagatcatcgccattctctcatttttcgcgtcctttatttaccttttgggtttctttggaattgacttcgttcaatctttggttttccaaccatcgcctgacgtttggattgccgaggaagtggatgatgaagttctgcttgcaaaggaagaaagcccgaagggtcccttgcgggcaagctctcg

SEQ ID NO: 36663 - DNA, 533 bp, Gossypium hirsutum
  Clone ID: LIB3165-006-P1-K2-G12
ctttctcttgctctctttagagtaaatttctcttgcaatcctttgtagagatccgggatccattgtcaccatgtcttgctcaaatctgacaatgtgggtgtcctcaaaaccctctctttctgacacttcttcactctctttccgttctttcatcagcccttttcagctcccgtctcagagctcaacccccggtaacccttccaggtcctcatctgtaaccccagttcactgtggtcttcgtgagcttagagaccgtattgattcagtaaagaacacgcagaagatcactgaagctatgaaacttgtggctgctgctaaagttaggagagcacaagaagctgttgtcaatggcagacctttctctgagtccctggttgaagttctttacaacatcaatgaacagctccagactgaagacatagatgctcctctcacaaacgtcaggcctgtcaaaaaaagtgctttggttggtggtactggtgatcgtggtctctgtggaggtttcaacaatgctatcctcaaaaagctgaagc

SEQ ID NO: 36664 - DNA, 556 bp, Gossypium hirsutum
  Clone ID: LIB3165-006-P1-K2-G3
ctcccccacacattcaaaatcctattccttttctcctttttctttttctcagacaagatgggttctcagggatcggttatggcgatgcttttgctgatgatgttcactttatcatcagcttccgacatgtccattatatcctacgatgaaacacatcccgacaagtcaacgtctagttggagaacagacgacgaagttatggccatgtacgaggagtggcttgtaaagcatggaaaaacatacaacggtttgggtgagaaagagaggaggttccagatttttaaggataaccttaggttcatcgatgaacataacgccgatgagagtcagagttttaatgttggtttgaaccgctttgctgatcttaccaacgaggagtaccgagccatctacctgggaatcaagaaacccaaccggaaagtttccaaggccagtgaccgatactccgcgcttctcggcgaaaaagtgccccgatccgttgattggagggaaaaaggggctgtcgcttgagcaaagatcaaggaagttgcgggaggtgctgggcttttctcgacta

SEQ ID NO: 36665 - DNA, 570 bp, Gossypium hirsutum
  unsure (1)..(570): unsure at all n locations; Clone ID: LIB3165-006-P1-K2-G4
cccacgcgtccgtccccttccaacgatggaccgcttctctcttctcttcctcctcctttcctccgtcgttgcttcggccgtcgtctccgacgttaatagcgacggcgatcctctcatccgtcaagttgtttccgatggtggtgtcgaggaggactccgatgaccatctccttaacgcggagcaccacttcacgctgttcaaatccaagtatgggaaaacctacgcatcccaggaggagcacgattaccgactgggagtcttcaaggctaacctgcgtcgggccaagcgtcatcagctcctggaccccagtgccgtccatggcgtcacaaagttttccgatttaactccatcggagttccgccgccagtatctaggcttgaaaccgctcaagctcccagccgatgctcaaaaggctcctatccttccgactgacaacttaccggatgactttgactggcgtgaccacggcgccgtcactggcgttaaagaccagggtcctgtggatcgtgttggtcgttcagtgcgacgggggctttggagggagcccattatntggcgacaggagagctt

SEQ ID NO: 36666 - DNA, 587 bp, Gossypium hirsutum
  Clone ID: LIB3165-006-P1-K2-G5
ggagtacttgcaatatgatttggattctttggaccagaacctggctaagaattcggctggtgagataattggaactaggaccgaggttgccgacgtgaaggcgacgccgtttcagccttacagcgaggtttttggtctacagaggtttagggagtgtgagttgatccatggacggtgggccatgttggctacgcttggtgcacttaccgttgaatggctcactggtgttacatggcaagatgctggcaaggtggagttagttgagggttcatcgtatctcggccaaccccttcccttctcgatgacaacattgatttggatagaagtattggtgatcggattcatcgagttccaaaggaacgccgagcttgacccggagaagaggctgtaccccggaggaaagtactttgatcctctcggcctagccgccgacccggagaagaaagcaaccctacaattggctgagatcaagcatgctcgccttgccatggttgctttcttggggtttgctgtccaagctgctgcaacaggcaaaggccctctcaacaattgggctactcacttgggtgacccccttcatactacca

SEQ ID NO: 36667 - DNA, 468 bp, Gossypium hirsutum
  Clone ID: LIB3165-006-P1-K2-G6
tcgaccacgcgtcgccacgcgtcgagagctgtagacctttatggttgcattaaacaaagccttcatactggatggcagccttcagggattatggatttgacccctgggactctagaccctgaagtcaggagggtatcgagcctaaatggctagcctacgggagatcataacgcgttatgctatgttgggtgcagaggtgcgattgccctgaaacttggaaggccggcttatccagcagaaacagcctccttggttaaaccgggtgatcccaccacggacatacagtttggcagaccctacactttgttggttcgagatggcactcagggattgagagcacaaagttccagactggccaaaccggttcgaggggaacaatatttttgggttcgagaagaccttggaggctgggagccggctacctggagacactgttaacccattggttttggaaagatagaagcattg

SEQ ID NO: 36668 - DNA, 539 bp, Gossypium hirsutum
  unsure (1)..(539): unsure at all n locations; Clone ID: LIB3165-006-P1-K2-G7
cccacgcgtccgcccacgcgtccgcccacgcgttcgcccacgcgtncgcccaacctcagctttcatggggaagaaagtgagctcaagattcaacagcaccaggcaggttccttcgggaagttttaaggtgatggcggcggagaaagagatagacgaagagacacagaccgaaaaggaccgatggaaagggttggcttacgatatttcggacgaccaacaggacattactcgagggaaagggatggtggattccttgttccaagctcccatgaatgatggaactcactatgctgtcatgagttcctatgaatacctcagccaaggtcttaaaacgtacaatttggacaacaacatggatggtttctacattgctcctgcattcatggacaagcttgttgttcacatcaccaagaacttcatgtccctccctaacattaaagttcctctaatcttgggtatttggggaggcaaaggtcaaggaaaatctttccaatgtgagcttgtgtttgccaagatgggtatcaaccccatcatgatga

SEQ ID NO: 36669 - DNA, 538 bp, Gossypium hirsutum
  unsure (1)..(538): unsure at all n locations; Clone ID: LIB3165-006-P1-K2-G8
accacacaaaaatcaaccatggcagcagcagccagagtgatagccatcgccggcaactccaccgccgccgcgtcttcctgcttgcttatcaaaacaccgttcgctttacaacgctgcagcaacggacttagattcaacaacgtcagacgatcatcgaaaagattgttttcttgcaatgccatttataaccctcaggttcaaatcaaacaagaaggccaacccgaaactctcgactatagagtcttcttcgaggatacttcgggcaaaaagatttctccttggcacgatgttccattgcacttgggagatggtgtttttagcttcattgttgagatacccaaagaatcaagtgctaaaatggaggttgctactgatgaactttacactcccattaaacaggatacaaaaaagggcaagcttcgatattacccctataatataaattggaattatggattgcttncacaaacatgggaagacccatctttggcaaactctgaagttgaaagagcatttggtgataacgaccctggtgatg

SEQ ID NO: 36670 - DNA, 532 bp, Gossypium hirsutum
  Clone ID: LIB3165-006-P1-K2-H1
gccccatcagcgattttttggactgactatgtagcaacccgttggtatcgtgctcctgaactctgtggatcctttttctccaaatacactcctgcaattgatatatggagcataggatgcatatttgctgagatacttacaggaaaaccactatttcctggaaaaaatgtggtgcaccaattggatctcatgaccgatacacttggcacaccccctcctgaatccatatcaaggattagaaatgaaaaggcaaggaggtaccttagtagcatgcgtaaaaagcaaccaattcctttctcacagaagttccctaatgtggatcacctggctcttcgcctacttgagcgcttacttgcatttgatccaaaagatcgtcccacagctgaagaagcattagctgacccatatttttatggtttggcaaatgtggatcgtgaaccatctacacaacctatttcaaaactagaatttgagtttgagagaagggaattgacaaaagatgatgttagagagctgatttatcgagagatat

SEQ ID NO: 36671 - DNA, 564 bp, Gossypium hirsutum
  Clone ID: LIB3165-006-P1-K2-H10
attcctctttctctcccccccccacaaaaaaaaaaaactccaaatctaaagagagactttcctctcctccgatcctttattcgtcttggtttatgagctcgaaggagaaacccactctcggtggtacgcggattaagacccgcaaacggaatattgctgcgcctctggaccctgcagcatttgctgatgcagttgtccagatctatttggataatgctggtgatctggaacttgttgccaagaaccttgaatcttctgatcttaacttctcaagatacggtgacactttctttgaggttgttttcaccgggggccgcacacaaccaggcacaatcaaacctgatgagggggagcgccacccttactctgtaatagagtgtgaggctaaacgtgaagccattttgccatctgtgatctacatacagaaaatcttgcgtcgaaggccttttctgataaagaatcttgaaaatgttatgcaaagattgttgcagtccttggagcttgttgaggacaatgaaaggaagaagcttgcaattttcacagcacttgctttttcccagaagc

SEQ ID NO: 36672 - DNA, 639 bp, Gossypium hirsutum
  unsure (1)..(639): unsure at all n locations; Clone ID: LIB3165-006-P1-K2-H11
atcactcccaatactttcataacatttcacgaacttcactctccagtctccaatggcggctgccgtctccaccatcggtgctgtcaaccgagcaccgttgagtttgaatggatcaggtgccggagcttctgctccaagctcagctttcatggggaacagcttgaagaaagtgagcgctaggttcaacaacaacggcaaggctccagtgggaagtttcatgattgtggctgccaaagaaatcgacgaagacacacagaccgaccaggaccgatggaagggtcttgcttatgatatctccgatgaccaacaagacattaccagagggaaaggtatggtcgactcattgttccaagctcccatgaacgatggtactcactatgctgtcatgagctcctatgagtacattagccaaggccttcgcacatacgacttggacaacaacatggatggattctacattgccccagctttcatggacaagacttgtgttcacatcaccaagaactacatgaccctttctacataagggtcctctatcttgggatttgngaggcaaggtcaagaaaattttcatggagctgcttgcaagtggatcacccatatatgagtgcgagatggagtggacgcgagacagcagtg

SEQ ID NO: 36673 - DNA, 500 bp, Gossypium hirsutum
  Clone ID: LIB3165-006-P1-K2-H12
gcggagaagacgttaggctggaactaagaaacaaccaccgaaaatgtcggcagcgcttactacaccagcttgatctgtcaaactaacggcgacaacctcattcccaacctcacgcgcactcttgctcgctttacgcaaaccccaaatttccattataccacgtgccactcctgactccgacgctgactcatcaacggaacccgactcctcgccctcctcggagacctcagccgactccgacccattcgaatcccgtctcttccaggtgcgcctccgttaccgaatcggagccggcaagaaagcggagcgccgaaaatcaaagaaatccggatccgtatcaacttcgtcgtctttctgctccatctacctccctccggtgcctttaaaagaggcgatttcaaatgggttgaaagtgggtttcgggtttagcccatatagcgagagaataaacggaggatcgcgaatctcgggttgacggccttggttttagtgggattggc

SEQ ID NO: 36674 - DNA, 383 bp, Gossypium hirsutum
  unsure (1)..(383): unsure at all n locations; Clone ID: LIB3165-006-P1-K2-H2
ntcacgcgtacggagagaaaaacataaaacacttccgtaatggcacgcatgaagatcagagagtgcgattgcatgagattgttgaaagaacattgcaagaggctntcactgtagagattagccaatcacatgtgcacaatttacggcatcaactgatttcaatcaactagtacagatagagccatggctttcgtcacagatactggctgttaaacctgatatgttgttcggtatgcgtgggcagagtgcgttgggtggcttaaatatagattgtgctcaagttattacgatacgcgaaagagcgcctaggcacatagggggaattgagtggatacaagggacctgttacaactccgattgtgggaccttacatacctgacaat

SEQ ID NO: 36675 - DNA, 589 bp, Gossypium hirsutum
  unsure (1)..(589): unsure at all n locations; Clone ID: LIB3165-006-P1-K2-H3
gcgtncgnccacgcgtncgcgtttattctcttaacatggatgcctacgtactatcatcaagtcctgaagttcaacctcacagattcagggctcatttgtgttttaccctggcttacgatggcattttctgcaaatcttggaggatggattgcagacacacttgtgagcaaaggcttatctgtgacaactgttcgcaaggtcatgcaatccattgggtttcttggccctgctttcttcctaactcagctgagccatgtcaattctcctgctatggcagttttgtgtatggcatgcagtcagggaactgatgcattttcacagtctggcctttattcaaaccatcaagatattgcccctcgatattcaggtgtattacttggtttgtccaacactgctggagtactagctggggtctttggaacagctgctactggttacattctgcaacatggttcttgggacaatgtcttcgaggtttcggttgggctatacttggttggaaccgtggtctggaacctcttttcaactggtgagaaaatactggactgactcagatatttagatgtttagcatgagttagctcaagccc

SEQ ID NO: 36676 - DNA, 493 bp, Gossypium hirsutum
  Clone ID: LIB3165-006-P1-K2-H4
cccacgcgtccgctcgcattgaattctgttgggaaaaaaaaatggaagaagagaaggcggcagcttactacgatgagcttaccaggaaaggtgagggagcggccagattcaagcgaggcctcggtttctcctcttgcgatgatcaacacgatgcggttcctcaaagaggcacaacctttgtctctccatgttcatccttcctcagcagtttcgtcagggcctcgagtcctaccaccgcttccaagcttgagaaagaatctcaacttcaaccgatccaacataagctaaagaagaagccggaaagagaagctagggtttcggcgagaaccaacgtggagagagacggagataagcattcaaggaggcgaagcagaagcacgagtagggagagatactgtgaaaaggatagagagagaaggaagcggagaaggagtaggtcgcctcgtagagatcggaggagtgggagtagagatcgccggaggaggagtaggtc

SEQ ID NO: 36677 - DNA, 582 bp, Gossypium hirsutum
  unsure (1)..(582): unsure at all n locations; Clone ID: LIB3165-006-P1-K2-H5
cccacgcgtccggagactcttttgtatacctgtagcatatagtaatagtaagcagtaatagcaatggcctcctccatgatctcatcggcaaccattgccaccgtgaaccgctcctccccggcacaggccaacatggtggcccccttcaccggcctcaaatctgcctctgctttcccagtcaccaggaaggccaacaacgacatcacttctcttgcaagcaacggtgggagagtgcaatgcatgcaggtgtggccgcctcttgggaagaagaagttcgagactctctcatacctgcccgatcttactcccgtacagttggctaaggaagtagattaccttcttcgctctaaatggattccttgcttggaattcgaattagaggagggattcgtgcaccgtaagtactcgagcttacccacgtactacgatggacgctactggaccatgtggaaactgcccatgttcgggtgcaccgactcggctcaggtgttgaaagagctngaggaatgcaagaaggaataccccaatgcattcattagaatcattgggttcgacaacgttcgtcaagtgcagtgcattagt

SEQ ID NO: 36678 - DNA, 434 bp, Gossypium hirsutum
  unsure (1)..(434): unsure at all n locations; Clone ID: LIB3165-006-P1-K2-H6
gtcggtctcacttcaagctgcagctaccctgatgcaaccaatcaaggttgctgcaccatcaaggaccaatgtgctgctcaggtcctcccagagcgtttctaaggccttcggtttggagcctgttggtgctaggctcacctgctctttgcaaactgacctcaaggacttggctcagacgtgtgttgatgctaccaagctcgctggtttcgctctttctacatctgctcttgttgtctcgggagcaagcgctgaaggagttccaaagcggctaacctacgatgaaatccaaagcaagacatacatggaagtcaaaggaacaggaactgctaaccagtgcccaaccatcgatggtggtgtcgactcttttgccttcaagcctggcaaatactacgccaagaagttctgcttggagcccacttncttcactgtcaagg

SEQ ID NO: 36679 - DNA, 601 bp, Gossypium hirsutum
  unsure (1)..(601): unsure at all n locations; Clone ID: LIB3165-006-P1-K2-H7
gacccacgcgtncgcccacgcgtncgatttcttgaattctcctctctaccccctaaccaaatcatccatttcataaatattaatccaccaaaagaattatccattcagttcaaagacaccatgacatctacacctactcaagaaaacactcaagtagaaggatcccacgaacccacagtagaagcacccccatcggaagaagatattaagaaatggggcacgcacgtcatgggatccccagcagctcctagtgcccatccagacaaccagaaggcggctttatggaatgctagtgatcaccaacaaatctatgagctgccctatgtcgtttattcccctgcagaaagaccaagccataatccttttgaacctgtgattaacatgttcaatacctggagtaggaagaccgagtctatagcacgcaacatctggcacaaccttaaaactggaccgtctgtatcggaagcagcatggggttaatttaacctgacagccaaagctataacagagggaggatttgagtctctgttcaagcagatttttgcaactgatacggatgaaagggttaaggaagacattcgcctggtatttgtccacaaca

SEQ ID NO: 36680 - DNA, 485 bp, Gossypium hirsutum
  unsure (1)..(485): unsure at all n locations; Clone ID: LIB3165-006-P1-K2-H8
cttaacaaacatcaactccagagatcgccaaacatgctaggaactgagcatgatttgaacttcaaagagaccgagctgtgtctcggcctgcctggtggaagtggtggaggaggaggagctgccgccgccggtggtggtggtggtggtaaaaatgaagtggaaagttccccaaagaccaccgggaaaagaggctactccgagactgttgatttgaagcttaatcttcagtctaaagaaggttgcatggatctgaatcagaacctagaaaatggttcaaaagaaaagaatcatttcactgcaaaaccaccagccaaggcacaagtattgggtnggccaccagttcgatcttataggaagatcattatggctatccagaagaacaacagtgacgaaattagtgtcagagctagcattggcagtgtgggtgcagcgtttgttaaaagtttgcatggttggtgccccatattttgcgtaatgaatatttt

SEQ ID NO: 36681 - DNA, 543 bp, Gossypium hirsutum
  Clone ID: LIB3165-006-P1-K2-H9
ctcaccattgttccaagtttgttgtaaaccaagctagaaccagcagccaacatggcctcattagcagcctccaccgctgccgcctcccttggcgtctctgaaatgctcggtaaccctctgaatttcagtggtggagctaggtcatcggctccaacaccatccaactcatccattttcaagaccgttgctcttttctccaagaagaaggccgctcctccaaagcccaaggctgctgctgtcgccccggccgatgaagagctggctaagtggtacggtccggacagaaggattttcttgcctgaaggtctgttagacagatcggagatcccagagtacttgaacggagaagttcccggagactatggatacgatccgtttggtctgagcaagaagccagaagactttgcaaaatatcaagcatatgagttgatacacgcaaggtgggcaatgcttggtgctgcagggttcatcatccctgaagcctttaacaaatttggtgccaactgtggccccgaagcccgttggttcaagaccggagctctt

SEQ ID NO: 36682 - DNA, 380 bp, Gossypium hirsutum
  Clone ID: LIB3165-006-P1-K3-A1
gtctaccaacctatgtaattcgcttcctttaaactgttcttaattggatgatgtagaattttatggatatatcgctatcttcaagcttccgccttactttcgtttcttcagtctcagctagaccctccgcgggcgtgtgtatcactgcaacaaaactctgcagcgtgctcgttgcaaatctggtgtacctcgtcataaaccgacgctattctgtgctcagcgcctgcgtctaacttacgcctgcgttgaacgagccctggggacctaacccggtacccccaccctattggtcggccagcatccgatcatcgttactgcctgcccaatgagcttcgccgtttcttccccgacttacggatgaaggctactgctcgacatcc

SEQ ID NO: 36683 - DNA, 665 bp, Gossypium hirsutum
  unsure (1)..(665): unsure at all n locations; Clone ID: LIB3165-006-P1-K3-A10
atcactcccaatactttcataacatttcacgaacttcactctccagtctccaatggcggctgccgtctccaccatcggtgctgtcaaccgagcaccgttgagtttgaatggatcaggtgccggagcttctgctccaagctcagctttcatggggaacagcttgaagaaagtgagcgctaggttcaacaacaacggcaaggctccagtgggaagtttcatgattgtggctgccaaagaaatcgacgaagacacacagaccgaccaggaccgatggaagggtcttgcttatgatatctccgatgaccaacaagacattaccagagggaaaggtatggtcgactcattgttccaagctcccatgaacgatggtactcactatgctgtcatgagctcctatgagtacattagccaaggccttcgcacatacgacttggacaacaacatggatggattctacattgccccagctttcatggacaagcttgttgttcacatcaccaagaactacatgacccttcctaacattaaggttcctcttatcttgggtatttggggaggcaaaggtcaaggaaaatctttccaatgtgagcttgtctttgccaagatgggaatcaaccccattatgatgagtgccggagaattgggaagtgngaacgccggagaac

SEQ ID NO: 36684 - DNA, 380 bp, Gossypium hirsutum
  Clone ID: LIB3165-006-P1-K3-A11
tcggccacgcgttcggccacgcgtccgctcccttacagccaatctcctcaataccccatttttctggttcctttttcaagccattttacaggcacttcccagttgggagaaggggaaaatggcacagcttttagcaccctcaactcaatggcaaatgacactaccaaagacctcaacctatggaagtcccattgcaacaaaaatgtggagttctctggtactgaaacagaacaagaaaggagctgctaaaagctctggcaagtttaaagtggttgccttgtctgaaaacagcactgtcaacaggctagagaacttactaaacatggacgtcactccatacaccgacaggatcatggctgaatccattgggataggaggca

SEQ ID NO: 36685 - DNA, 627 bp, Gossypium hirsutum
  Clone ID: LIB3165-006-P1-K3-A12
agccattccaccattcaattaccctgtcaaccttgccgtttcaaaaatagcaccggctttaattgcaggaaactcccttgtactcaagccacctacacagggtgctgtttcagctcttcatatggtgcactgctttcacttggctggctttcccaaagggctcattagctgtgtgacagggaaaggctctgagattggtgatttccttactatgcatcctggagttaattgtataagcttcactggtggagacactggtattgctatctcaaagaaggcaggaatggtccctcttcaaatggaattgggaggaaaagatgcttgtatcgtactcgaggacgccgacttagatttggttgctgcaaacataataaaaggaggattttcttatagtggccaaagatgcactgctgttaaagttgtgttggtgatggaatctgttgctgatgttctggtggacaaagtgaaggcaaaaatcgcaaagttaacggttggaccaccggaggatgactgtgatatcactccggttgtgtcggaatcatctgcaaatttcattgaagggctggtcaaggatgccaaagagaaaggagctatattttgtcaggagtacaagagagaaggcaatct

SEQ ID NO: 36686 - DNA, 545 bp, Gossypium hirsutum
  Clone ID: LIB3165-006-P1-K3-A2
cccacgcgtccggaaaaagtctctgacacttgcaacacaataaactacacataaaatctgtgcctgcccttttctctgcacacctcgggatatcagtttcaactccactcatcccacgggttgagtaccgagtccatatatcgttaagttcaaggaaggaacttgggcatcatgggtcttaaggcattagactatgagacaatgaatgaaaacgtgaagaaagttcaatatgcagttagaggtgagttgtatcttcgagcttctgagcttcagaaggaagggaagaagattattttcacaaatgttggcaatcctcaagctcttggacagaagccactgactttccctcgtcaggtggttgctttgtgccaagctccatttctgctagatgatcctaatgtaggacttatatttcctgctgatgccattgcaagagcaaaacattatctttcgttgacttctggtggtctaggtgcatatagtgattccagaggtattccaggcgttaggaaggaggttgctgaattcattgagaggcgtgatgg

SEQ ID NO: 36687 - DNA, 558 bp, Gossypium hirsutum
  Clone ID: LIB3165-006-P1-K3-A3
cccacgcgtccgcgatggtcagattattaccatcggggccgagcgttttagatgccctgaagtgcttttccaaccatcgatgatcggtatggaagctgcaggcatccaccagacaccttataactcgataatgaaatgtgacgtcgatattaggaaagacttgtacggtaacattgtactcagtggtggtacaactatgttccccggtatcgctgatagaatgaccaaggagatctcggctttagctcctagcagcatgaagattaaggttgctgctccacctgagaggaagtatagtgcctggattggcggatcgatcttggcttcccttagcacattccaacaaatgtggatcgccaaggcagagtacgatgaatcgggtccatcaattgtacacagggaaatgcttgtaaatgtttatagacatgagctttgatctatcaacatatgtgtattctcttgtcggatagaacgagcaaacattagagaaagagaattggaatttgtgtggaccaattctttcaattctttttaatgagaagttggtgcctttaccat

SEQ ID NO: 36688 - DNA, 670 bp, Gossypium hirsutum
  Clone ID: LIB3165-006-P1-K3-A5
tgaagaaagaaacaaccaccgaaaatgtcggcagcgcttcctccaccagcttcatctctcaaactaacggcgacaacctcattcccaacctcacgcgcactcttcctcgctttacgcaaaccccaaatttccattataccacgtgccactcctgactccgacgctgactcatcaacggaacccgactcctcgccctcctcggagacctcagccgactccgacccattcgaatcccgtctctcccaggtccgcctccgttaccgaatcggagccggcaagaaagcggagcgccgaaaatcaaagaaatccggatccgtatcaacttcgtcttcctcctccatctacctccctccggtgcctttaaaagaggcgatttcaaatgggttgaaagtggatttcggggttagcccatatagcgagagaataaacggaaggatcgcgattctcgggttgacggctttggttttagtggaattggctacgggtaagagcgtgataagttatcatacgccagcaattatctttattcagatttattttgtagctgcagttggggctttgttcgttaagtacgagaaagaaaaagttagtgtttggccaccttctcaatcttctttacctcaaaattgaaaaaaaaaagaatttttttggggtttttagttaatatgaa

SEQ ID NO: 36689 - DNA, 551 bp, Gossypium hirsutum
  Clone ID: LIB3165-006-P1-K3-A6
aaccccaaccatcgtttatcatggcttcctcaactctctcccctgcagctccttggcagctatgctccagcaagagtggcatgttctgcccatcacgagcgtttcttgtgaaaccagcgaggacccatatggtcaaaaacgaaaagggaatgaggatcacatgccaggccactagcatccctgctgatagagtgccagacatgggcaagaggcagctcatgaatctgcttctgttgggggctatttcactcccctcaggtttcatgttggttccttatgcagccttctttgtgccatctgggggacggggtaccggtggtggcaccgttgccaaggacgcaatcgggaatgatgtaattgctgaagaatggctcaagactcatggccctggggaccgaaccctgactcaaggattgaagggagacccaacctacctagtggtagagaaagacagaacccttgcaacatatggtataaatgctgtgtgcacacaccttgggtgtgttgttccgtggaatcaagccgagaacaagttcatatgcccctgccat

SEQ ID NO: 36690 - DNA, 315 bp, Gossypium hirsutum
  unsure (1)..(315): unsure at all n locations; Clone ID: LIB3165-006-P1-K3-A7
gcgcccactcgtncggaacgccttctatatcgcgttgcctctgcagtccactaaggaggtgcgaaccagatcttaatgaattcaagaagctctgatgcatccacagattcctgccaatcgtgaaacaagaacgactatctgttctggattttggctagcttgcttccaagtttcctaggaacccttgttgcatacgttaactttcagttgtttaaggtcaatggacggagcctctcttcatcttatgctcatattgtaatctttacaactgtagcctctacacgctctttaaagtaatcttcgctattttttaaa

SEQ ID NO: 36691 - DNA, 657 bp, Gossypium hirsutum
  Clone ID: LIB3165-006-P1-K3-A8
cttttccaacaaacctaatctgaaattcacttcttttgatcaaaactatttggtccaaaacttaaagtatccaaaaacctcaggaatcccattgttttccttttccattttttgtttgtttctaagggaaatgagggatgttttcatggttggcaaggatagctctggcttgttggagaccagtgagtcgatatgcccgtatgaacaaggattacaacaatagcaatagtgaggaacttgaagaagattcttcttctttacgtgactcgcttctttggtgtagagaccttgaaaaacactcttgtggtgatttttcatttgctgttgttcaagccaatgagatcattgaagatcatagtcaagttgagactggcaaagatgcaatttttgttggtgtctacgatggacatggtggccctgatgcttctcgctttatctctgatcatctctttcaaaatttgattacagggcttgctcgagcaaatggaaccatttcggaagatattcttagaaatgctttctccgcaaccgaagatgggtttcttgcgcttgtgcgtaggtcttgtggaataaaaccattaattgctgcaatcggatctttgtgtctggttggagttataatggaggggggcgttatatgtcgctaatttgggtgat

SEQ ID NO: 36692 - DNA, 671 bp, Gossypium hirsutum
  Clone ID: LIB3165-006-P1-K3-B1
ccgaatctccgattttcccaagcatcgcgcatacgatcaggtcttttttctctgcactaagactcagagctactctcgtcctagttattttccatggcgattgagaaaattcttaaagatgatgctagtgaagagaagggggagcgtgccagaatggcatcatttgttggggcaattgcaattactgacttggttaagacaacccttgggccaaagggaatggataaaattttacagtcaactggcaggggaaatgaagtcactgttacaaatgatggagctaccatcttaaagtccctgcacattgacaacccagcggcaaaagttttgattgacatctccaaagttcaagatgatgaagttggagacgggacaacctctgttgtggttttggctggggaggctttaagggaggcagaaaagctagtggcagccaagattcaccctatgacaataatatcaggttatagaatggcagccgaatgtgctcgtaatgctttgttgcagagggttgtggataacaaagagaatgcagagaaattcaagtcagacttgatgaaaattgcaatgaccactttgagctccaaaattctctctcaggataaggagcattttgcacaactagcttgggatgctgttatgaggttaaaggggagcacaaaattagaggc

SEQ ID NO: 36693 - DNA, 622 bp, Gossypium hirsutum
  Clone ID: LIB3165-006-P1-K3-B10
cccacgcgtccgtgcagatcttcgtcaaaaccctgaccggcaagaccataactttggaagtcgaaagctctgacaccattgacaacgtcaaggcaaagatccaagacaaggaaggcatcccaccagaccagcaaaggctcatatttgccgggaaacaactcgaggacggtcgcaccttggccgattacaacatccagaaggagtccaccctccatttggtattgaggcttcgtggtgggatgcagattttcgtcaagacgttgactgggaaaaccataactttggaggtggagagttccgatacgatcgacaatgttaacgcgaagattcaggacaaagaaggaattccaccagatcagcaaaggttgattttcgctgggaaacaattggaagatggaaggactttggctgattacaatattcagaaggaatccactctccaccttgtcttgcgtcttcggggtggtttctaagctctcctatgaaaatgaggtttctggattttatgtgaatgattgtgatgtctggccctgttaaggcctcataaataaacctaaactattttatctgtgttttatcctatgtaatgatattatatgaataaaaaatacatgtttacctt

SEQ ID NO: 36694 - DNA, 650 bp, Gossypium hirsutum
  Clone ID: LIB3165-006-P1-K3-B11
cttaaaaacagcaaagaagatgtcatcatcaacggcggccaatcaagtgagggcatctcacatactcatcaatcaccaaggctctcgtcgtaaggcttcttggaaggatccagaaggtcgcgtcatctccaccaccacccgagacgccgctgtctcacagcttaaacttctcggcgacgacatcgtttccaacaaggctaagttcgacgaggttgcctctcgctactcggattgcagctccgctaaacgtggcggtgatctcggctgcaaggagtgtgcctcaactcagttcttattgttaattatctgtgacctttagttggtttataccagcattacgggacataatgcaaactaaaaaccttatacaaactttttggtggaggtccttttggtcgaggccagatgcaaaagccatttgaggatgcaacatataatcttaacattggcgagataagtgacattgtggataccgatagcggtgttcacatcataatgcgaactggttaatcattattgatggagcctggatatcgtgagcaattagttcagtcttctcggaaaattctatcgaagaacattctgaaatcacttctgataatgcctatggctaatttcaatggcttaatttttgaacccctttggttttg

SEQ ID NO: 36695 - DNA, 237 bp, Gossypium hirsutum
  unsure (1)..(237): unsure at all n locations; Clone ID: LIB3165-006-P1-K3-B12
gtcaaagccctagtatatgattcttttcatatttncttctgagaaacgaaccttctttgactatatgtggagctgaacctatgttccttgctttccactttagatgctttccactgtttggatggctgagttgctaattacagatggtgaagcatgaagcctgggtaccatgcatactgaccatctagaccattggaaagtagtgtttgggagtgctgaaccaggtggttaggtgcc

SEQ ID NO: 36696 - DNA, 361 bp, Gossypium hirsutum
  Clone ID: LIB3165-006-P1-K3-B2
caagactccaaaggatgtcaagatcactggtgtctggtatgctcagcttgattcataaacaagtcttgtatgaatttgtttattctcggctgaggttttgtaatttttaaacaagtgttgctaaactttgcagtaatccactgagaaacccttatcttctttgtatgttactatgttggcttcttataataattttctaagcttctactacaaacccgttacttttgatcaaagcactgggaatcctggaaactaaataatctcactctcattaaggagtttgaatgtaaatgatcaataaacggccttggttcttccgtgcaagtggtggtaaaaccatggcttcaagtacttcaacatc

SEQ ID NO: 36697 - DNA, 579 bp, Gossypium hirsutum
  Clone ID: LIB3165-006-P1-K3-B4
tccgctcaacattcccatttccaatctccagctcccaaggtaaatatgccgatcagaaacatagcggttggccggcccgaagaggctactcaccccgatgctctcaaggctgctttggctgagttcatctcaaccttgatcttcgttttcgctggatcgggctcaggaatggcctttaacaagttgactgacaacggagcaaccaccccggctggtctcgtagccgccgctctagctcatggcttcggtcttttcgtcgctgtctccgttggcgccaacatctcaggtggccacgtcaaccctgccgtcaccttcggtgcttttgttggcgggaacatcactctcttgcgcggcattctttactggatcgcccaactcctaggctcaaccgtcgcttgcctgttgcttaagttcgctaccggcgacctggctgtacccgcttttgggttgtcatcaggtgtgggcgtgtctaacgcattggttttcgaaatcgtgatgaccttcggattggtgtacacagtgtacgccacagccgttgatcccaaaaagggaagcttgggaacaatcgcaccattggca

SEQ ID NO: 36698 - DNA, 551 bp, Gossypium hirsutum
  Clone ID: LIB3165-006-P1-K3-B6
cttacattccgatccaaccacaagcgccaggtccgtgctgctgtcgttgaaacaattgtgaccgcctccgagacttccttggtcgtgaaatccgtcaacaccatcatattgttgtctattgatgcggacgtgaaggcgaattcaggtgatgctgggttgcccatgggctgtgctcccatgggtcacattgtgtacgaggaattgatgaggtataaccccaagaacccttactggttcaaccgtgaccgcttcattctgtccgctgttcatggttgtatgctgcagtatgctctgctttacctggctgggtacgacagagtcctggaagaagatttgaagagttgacgtcagtgagtaagcagaacccgtggacatgcagagatctttgaaacaccatgagttgacgtcacagctggcactatgggtcagggtatcgcaaatgctgcaggaatggctattgctgagaaacacttggctgctagattcaacaagccagacaatgagattgttgatcactacacatatgttatcttaggagatggttgtgaaat

SEQ ID NO: 36699 - DNA, 548 bp, Gossypium hirsutum
  Clone ID: LIB3165-006-P1-K3-B7
cccacgcgtccggccacccttccctgatttcatttcttctgtactcacagtaatcacctctccaaaaccctagctctttcactcactgccgccaatttcaaccaattatttgcttataagcgtcgaaaacgatgtcggacgacgagcgagaggagaaggagttggatctcacctcccctgaagttgttactaaatacaagagtgctgctgagatcgttaacaaggctttgcagttagttgtaaaagaatgcaaaccaaaaactaagattgttgacatttgcgagaagggtgatgcatttatcagagagcaaacaggcaatatgtataagaatgctaagaggaagattgagaggggtgttgccttccccacttgtctttctgttaacaacactgtttgtcatttctctccacttgctagtgacacctccgagctgcaagaaggtgatatggtgaagattgacatgggttgccacattgatgggtttattgctgtagttgcgcacacccatgttgtccaggaaggactagtcaatgacaggaaggctgat

SEQ ID NO: 36700 - DNA, 599 bp, Gossypium hirsutum
  unsure (1)..(599): unsure at all n locations; Clone ID: LIB3165-006-P1-K3-B8
cccacgcgtccggagaagaaaacaatgtcaggtcctcagtgctgttcgaatccaccaacattggattctgcaagtggggctggtcacgttgagaatcttgctggtctcaacacttatgtttctgggtctcttcaatctaagcttgctgtttttcttatctctgatattttcggatatgaggctccaaactttagaaagctcgcggacaaggttgcagccgctgggttctatgtggtggctcctgacttcttttatggagaaccctatgaccctaataaccctgatagacctctatctgtttggataaaggatcatggaccggataaaggttacgaggatgcaaagctcgtaattgacgctttgaaaagtaaaggggtttcatccattggagctgctgggttctgttggngtgctaaagttgtggctggactggctaaggatccccttatccaagcagctgtaatgttacatccttcatttgtgactgtggacgatatcaaaagtgtgaaggtgcccattgcgatattgggagctgagcatgaccatatatcntccccagagcttttaaaacagtttgatgagatcttaaaagcgagtga

SEQ ID NO: 36701 - DNA, 407 bp, Gossypium hirsutum
  Clone ID: LIB3165-006-P1-K3-B9
cccacgcgtccgctgagtttaagcatatcaataagcggaggaaaagaaacttaccaggctacttcggcaatgtaatctttacgactgcactaattgctgaagctggtgatctcgaaaccgaatcgtttactgacaccataaagaggattcatgaacgattaaatcagataaatgatgaatatttaagatcagctattgattacattgaaaaagtgcctgatttaaacaccttggttagaggaccgcatacttttcgatgcccaaaccttgttgttgttccatggaactggttgcctatatatgaggcagatttcggatggggtcgtcccatatatatggggccagggaatgtcgtccaagaaggtaaaatttacatgctaccaagtccagctaacgatgggagtttg

SEQ ID NO: 36702 - DNA, 653 bp, Gossypium hirsutum
  Clone ID: LIB3165-006-P1-K3-C10
cccacgcgtccgcccacgcgtccgatcactcccaatactttcataacatttcacgaacttcactctccagtctccaatggcggctgccgtctccaccatcggtgctgtcaaccgagcaccgttgagtttgaatggatcaggtgccggagcttctgctccaagctcagctttcatggggaacagcttgaagaaagtgagcgctaggttcaacaacaacggcaaggctccagtgggaagtttcatgattgtggctgccaaagaaatcgacgaagacacacagaccgaccaggaccgatggaagggtcttgcttatgatatctccgatgaccaacaagacattaccagagggaaaggtatggtcgactcattgttccaagctcccatgaacgatggtactcactatgctgtcatgagctcctatgagtacattagccaaggccttcgcacatacgacttggacaacaacatggatggattctacattgccccagctttcatggacaagcttgttgttcacatcaccaagaactacatgacccttcctaacattaaggttcctcttatcttgggtatttggggaggcaaaggtcaaggaaaatctttccaatgtgagggctgtcttgccaagatgggaatcaaccccattatgatga

SEQ ID NO: 36703 - DNA, 664 bp, Gossypium hirsutum
  Clone ID: LIB3165-006-P1-K3-C11
cccacgcgtccgaaggacttgatggggaagtccctaatgaagcgtgtgatgcagacctggcttcctgcaagcaatgctctcctggaaatgatgatctttcaccttccctcacctagcaaggctcagaagtatcgtgttgagaacttgtacgagggtcctcttgatgatatctatgccaatgctatcagaaactgtgatcctgagggtcctcttatgctctatgtttcaaagatgattcctgcttctgataagggcagattctttgcttttggtcgtgtcttttctggcaaagtctcaactggattgaaggttaggatcatgggtccgaactatgtccctggtgagaagaaagacttgtatgttaagagtgtgcaaagaactgtcatttggatgggaaagaagcaagagactgttgaagatgtaccttgtggtaacacagttgccatggttggtttggatcagtttatcaccaagaatgctactttgacaaacgagaaggaagttgatgcccacccaattcgtgcaatgaagttttccgtctcccctgttgtccgtgttgctgttcagtgcaaggttgcatctgatcttcctaaacttggtgaaaggcttaagcgtttggccaagtctgatcctatggttctctgtaccattgaagagtcccgag

SEQ ID NO: 36704 - DNA, 356 bp, Gossypium hirsutum
  Clone ID: LIB3165-006-P1-K3-C12
aagaaatcaaaagacaaaatagccaataacaatggcactcagaatgtgggcttcttccactgccaatgcactcaaaatctcttgttcctccaaacctaatgtttcccttgctttctcactctctagatgcttttccactgttttggatgggctggagtatgctaattcacatgaatgggtgaagcatgaaaggtccggggctaccattggcattacttaccatgctcaagaccatcttggagaagtagtgtttgtggagttgccggaaccaggtggttcagtgagccaaggaaaagggtttggagcagtggaaagtgttaaagcaacaagtgatatcaattccccaatcttcggcg

SEQ ID NO: 36705 - DNA, 643 bp, Gossypium hirsutum
  unsure (1)..(643): unsure at all n locations; Clone ID: LIB3165-006-P1-K3-C3
caaaaagaacactcggaaggcattcgaacatacagaaacacacgtaccccagccagaacaagaaaacaagtagtgtattaattaacagaagctgcatattgtagagaaacacaatagttacttgccatcaatggaagctgcaaggaaatttctctctcttcctccatctttttctacgagaacccaacttaagaattctgtctcttcatcaccatcttcttcagtttcaatgtttcacgagcaagcggctgctgctgctgcaacatctattccgattaattcggtagctaggcattttcctacatcagttctctcacaagagcagcgcgatgactgcagacctctgcctatcttgcaatactttaaggaagataaagcatatccagggccaacagacaaacagcangttgagaatgggacaacacttcatgaagagaaggcctncaacaactttgaacagcagatgctccaagggcctgatttaaggcaattattgtcagtcttggaattaggggaaaatccatcatcttccttgtatatgcagtctgntgcagctgatactgaggagattatgaatgttgaaccaagtactatattggcccttgctaagaatgctttgtcagcttctaaacaagctttagca

SEQ ID NO: 36706 - DNA, 235 bp, Gossypium hirsutum; identical to SEQ ID NO: 36630
  Clone ID: LIB3165-006-P1-K3-C5

SEQ ID NO: 36707 - DNA, 635 bp, Gossypium hirsutum
  Clone ID: LIB3165-006-P1-K3-C6
caacaatgaaacaccattgttttctcctctaaatcttctccccactatctctcttcttttactttatttctctctttttctcatttcttttgtgtataattgttactcgctgaattatatatacaaatatatatataattgaaaacatttcattcgttaatttatatagctagccatgagatcgtttttaaagtttgtttcacgttgcgttaaaaaccctgaagtgtccacgacagaagagatggtggtgacggctcctgggagggaggaaacaaggtcttttatggctcctaaaatggtggcactgaagaagaagaagaagagggtaaaggtggggacgccattctctacgactcctgagtggaaaccttcgttgtatgtaatctcggaggataacgttttggcggagaagagagagaaaacaacgccggaagcttcaacaacgccggctgatagagcggtgaagaggaagagtggagcagggtcacgctccaaagttcacgttcgaagctacagcgacgacatcgggcgaaatcaagaaccagtggtcatcccaacattttctccgactccttttatgttttgataaccttttatttccatgtatcaaatttgtgttaaattagtaatatata

SEQ ID NO: 36708 - DNA, 535 bp, Gossypium hirsutum
  Clone ID: LIB3165-006-P1-K3-C7
cccacgcgtccgtctggtttcactgtcagagctcatcagacaccggccgagcctgagactggacgcagagccatgttgggtcttgttgctgctggtttggccactggctcctttgttcaagctgtgcttgccgatgccagaagcatcaaggttggcccacctccccctccctctggtggactgcctggaactctgaactctgatgagccaagagaccttgttgtgccatacaaagacaggttctttctccaaccagttactccagctcaggcagcacagagagcaaaggaatcagccaaggacattctgggtgtcaagaacttgattgacaaaaaagcctggccttatgtcatgaatgatctccgtctcaaggccgagtatctccggtatgaccttaacaccgtcatggctgccaagtccaaagatgagaagaaaactctaaaggacctcaccaagaagctcttcagtaccatcgatgatcttgaccatgcagccaagatcaaaagcacccctgaagcagagaaatcttacgctc

SEQ ID NO: 36709 - DNA, 666 bp, Gossypium hirsutum
  unsure (1)..(666): unsure at all n locations; Clone ID: LIB3165-006-P1-K3-C8
cggacgcgtgggttagctatagcatacactactagtacccactactagcaatggcttcctcaatgatctcatcggctaccattgccactgcctctccggcacaggctaacatggtcgctcctttcaccggtctcaagtctgcctctgctttcccagtcaccaggaaggccaacaacgacattacttctctcgcaagcaatggcggtagagtgcaatgcatgcaggtgtggcctcctactgggaagaagaagtttgagactctctcatacctccccgatcttacacccgtgcagttggctaaggaagtagattaccttcttcgctcaaaatgggttccttgcttggaattcgaattggaggagggattcgtgcaccgtaagtactcgagcttacccacgtactacgatggacgctactggaccatgtggaagctgcccatgttcgggtgcaccgactcggctcaggtgttggaggagcttgaggaatgcaagaaggcataccccaatgcattcattagaatcattggcttcgacaacgtgcgtcaagtgcagtgcattagtttcattgcctacaagcctncaggcttctaagctttttattaactttgtctctccaattgtttgaatttgtactcagaaaaaatcatgttctttacttttgcttttc

SEQ ID NO: 36710 - DNA, 663 bp, Gossypium hirsutum
  Clone ID: LIB3165-006-P1-K3-C9
ctcaattcccccacctcattgtaggcaaaatggccactgtttgtgcttcttctgccgttgcagccgttgccatctcatcccccagttcccagaggagtggatcagtagtgaggacaacaaaggcttctttccttacagggaagaaacttcgatcagtcaaaaagtacacaaaaccagcagcagtccgaaccgttccggtgtgtgcagtggctgaccccgaccgacctctttggttcccaggcagtactcctcctccatggctcgatggcagcctccctggagacttcggttttgatcctctaggccttggatcagaccctgagaccttgagatggaacgtacaggcagagctcgtccattgcagatgggcaatgttaggagccgctgggattttcatcccagagttcctaaccaaaattggcattttaaacactccatcatggtactctgctggaaccgaggaatacttcactgacaccaccaccctcttcatcgttgagcttattttcatcgggtgggcagaagggagaagatgggctgacattctcaagcctgggtgcgtaaacactgaccccatcttccctaacaacaagctcacggtcacccgatgtgggtaccctggtgggctgtggttcgaccctctaggttgggaactggtcccct

SEQ ID NO: 36711 - DNA, 95 bp, Gossypium hirsutum
  Clone ID: LIB3165-006-P1-K3-D1
atttcattgaaaaggtacggtgacgtatcaagagcagtgcagaaggaccaacgacgatgaaggttacgaaagagaagggggggcaggaggtgcta

SEQ ID NO: 36712 - DNA, 659 bp, Gossypium hirsutum
  Clone ID: LIB3165-006-P1-K3-D12
aaaaattcctgtggctctcactctccttaaacatgtcaagaaatcaaataaggtgttcactaggttcatcattatcaacaacacccaaaaaagctttaccctcaccaccaccttaacaatgaatgacacagtggacaggcttgtgatctttctagccaagagagatggcattgacaagcttgtgaagaccttccaatacgtgtctaagcttgttaactggcaagtagaaaccacacacccagacctagcaaacaggttcaaacaatgggaggtctcctccggtcttagcagaaaagcctttagaacaggcaggttcctcactggtttcaatgggttgagaaggaaccctggtgccaccccaacattcaagttcctagctgtacttgctaatgcaggagagatggtgtatttctttttcgaccactttctatggctatcgaggattggaacattggatgccaagttggctaagaggatgagcttcgtatctgcatttggtgagtcattcggttatattttcttcattgtttcagatttgatcgtcatgaaacaaggcgttgaggccgaaaggaagctcatggctttacaagaagaagaagaaaattcaaaagatgcaaaagagaagatatgaaagataagaggggatagggtgatgaggc

SEQ ID NO: 36713 - DNA, 576 bp, Gossypium hirsutum
  Clone ID: LIB3165-006-P1-K3-D2
cccacgcgtccggcagctgttgccatctcatcccccagttcccagaagactggatcagtagtggggacaacaaaggcttctttcctttcagggaagaaacttagatctgtgagaaagtacacaaaaccagctgccggaccaacatttccagtgtgcgccgccgccgaccccgacagacccctttggttcccaggcagcactcctcctccatggctggatggcagtctccctggtgactttggtttcgatcctctcggtcttggttctgaccctgagacattgagatggaacgtacaagcagagctggtgcactgcagatgggcaatgttgggagctgctggtattttcatcccagagttcttaaccaagattgggattttaaacactccatcgtggtactcagctggaacagaggaatacttcactgacaccacaactctcttcatcgttgagcttatttttatcggctgggctgaagggagaagatgggctgacattctcaagccagggtgtgtaaacaccgaccccatcttccctaacaacaagctcaccgggactgatgttggatacccaggt

SEQ ID NO: 36714 - DNA, 533 bp, Gossypium hirsutum
  Clone ID: LIB3165-006-P1-K3-D3
atataccagaaaatcaaaaagaagatgaaaagagatccccatgatgtctcttacaatcccaactaatctctcaaaatcaattttgaagccaaagctggagacccaagtgatccccaaggcttcatacagatcattgattgtatgctcctccagcaatccttcctcctccgacaaatcggcttcatcactccaggccttctcagcggctctcgctctttcttccatccttctttcggatccactccctgctgttgcggacattgcggagctcactccttgcaaagagtccaagcaattcgccaagctgcgagaagcatcagatcaagaagctggaatcctcgttgaagctttacgcccccgatagcgcaccggctctcgccattaaagccaccattcgtgaaaaccaatagaccggtcgacaactacggcaagtacggattgctctgcggctccgatgggttgccttatttgatagtgagcggtgatcagaggcactggcgtgagttcatcacgcccggtctgttgttcttgta

SEQ ID NO: 36715 - DNA, 388 bp, Gossypium hirsutum
  Clone ID: LIB3165-006-P1-K3-D4
attcaccatgtctgacaggtgcggcaactgtgactgcgctgaccgcagccaatgcacgaagggaaacagcaacaccatgatcattgagactgagaagagctacatcaacactgctgtgatggatgctccagctgagaacgatggcaagtgcaagtgcggtactggctgcagctgcacagactgcacctgtggccactaagccaacatacaatggtcatgcttcaggtcatggcatatatagggatctaaataatgaatttaaggttgaataatttgtctgttgtagtttgtgtggtgacttatatctgtcagttaacctttgtatcctttactatgatgtaatggctatgcttatggccttatctggttaatgaagtatccttactat

SEQ ID NO: 36716 - DNA, 635 bp, Gossypium hirsutum
  Clone ID: LIB3165-006-P1-K3-D6
cccacgcgtccgctttgttccacctctttctttctttttctccaaagccatcatgaatctcattaataggctcagccccaagcgtctctttcgatctaataaaaaagatagatccatcgtctccaagttcgacccctcctcctatagttccggttccgccgtttcctcctcttcctcctccgaatccgtctcttccaccctcaaagaacatcagtacccttccacggctaccgctggcttcgtaacgcccaccagtgttttgccccaaacatcaggtgactggtccgattttcccgctaatttttatctagaactttgccaggcgtttaaaatgttagacaaagataacgacggggttatatcgagaagcgagctcgaggctttgcttggcaaggtcgcaaggcagccgcccagccgggacgaggtttccttgatgttgagcgaagtggacggtgacggcgacggctacatcaacctggaaacgttgatgaaccaggtggttggaccggcttgcgacgaacccgcctgcgaaccggaactgagggagacttttgatatatttgacacagatcatgacgggaagatcacggcggaggagttgatggcgttttttaaggacaaaataggggatgagc

SEQ ID NO: 36717 - DNA, 612 bp, Gossypium hirsutum
  unsure (1)..(612): unsure at all n locations; Clone ID: LIB3165-006-P1-K3-D7
cccacgcgtccggccggtgcaaccgtagctaaagttagcgccacagccaaggttgcagcctctccagtcccaaggggcagcatcaaggcctccctcaaagacgttggtgttgctgttggggcaactgctgcaagcgtaatccttgccagcaatgccatggccattgaagtcttgctcggcagtgacgatgggggtctggctttcattcccaaagaattcagcgtaagcccaggggagaagattgtgttcaagaacaatgccggattcccacacaatgttgtgttcgatgaggacgaaatcccaagcggcgtcgacgtatccaaaatctccatgcctgaagaagagctactcaatgccaaagacgagacttacgctgttaccttgactgagaaaggaacctacagtttctactgttctcctcaccagggtgcaggtatggttggaaaagtcacagttaactgagttatacatttatcttttcaacccctttgtgctttgtatgtatcatctcacacatctcttctactttttgagcactagagttttgagtattggggatggatgaggtgatcttgaaaaatcaactatgatgcttttgtatcttnctatctt

SEQ ID NO: 36718 - DNA, 552 bp, Gossypium hirsutum
  unsure (1)..(552): unsure at all n locations; Clone ID: LIB3165-006-P1-K3-D8
cccacgcgtccgattaaaataggagactccgcccatttttcttcattttcctccaaccataatcattatatttatatttcttcctctctcttctttatttcttcaagtttaaggcctcaaaatggaggcagccactgtggttggatcttctatgtctctacatcgaacttcatgctccgctgccagatccgcccttttagctgccaatggcccgctctttccacgtttcgctgctaaccctcgctcctccttctcgatcaagctttattcttcagtttcatattcaaaatcacggaataggagaatgggtttggggggtaggagaggcatggtggtaaaggcgtcttcatctcctgactcagctgaacccaatgctcaaattgcgtcacttcggatggaatctccaattggtcagnttttgtctcaaatcttgataagtcatcctcatcttgttcctgctgcagttgagcagcagcttgaacaacttcaaactgaccgtgatactgatgaaaagaaggaagagccgtctgcttcaggcacggatttagtatt

SEQ ID NO: 36719 - DNA, 615 bp, Gossypium hirsutum
  Clone ID: LIB3165-006-P1-K3-D9
cccacgcgtccgattcaaggcacaaaatttgacccaaaatggcctctgtttgtgcttcttcggctattgcagctgttgccatctcatcccccagttcccagaagactggatcagtagtggggacaacaaaggcttctttccttacagggaagaaacttagatctgtgagaaagtacacaaaaccagctgccggaccaacatttccagtgtgcgccgccgccgaccccgacagacccctttggttcccaggcagcactcctcctccatggctggatggcagtctccctggtgactttggtttcgatcctctcggtcttgggtctgaccctgagacattgagatggaacgtacaagcagagctggttcactgcagatgggcaatgttgggagctgctggtattttcatcccagagttcttaaccaagattgggattttaaacactccatcgtggtactcagctggaacagaggaatacttcactgacaccacaactctcttcatcgttgagcttatttttatcggctgggctgaagggagaagatgggctgacattctcaagccagggtgtgtaaacacagaccccatcttccctaacaacaagctcaccgggactg

SEQ ID NO: 36720 - DNA, 631 bp, Gossypium hirsutum
  unsure (1)..(631): unsure at all n locations; Clone ID: LIB3165-006-P1-K3-E1
gtggattgaagtgaagaaagaaacaaccaccgaaaatgtcggcagcgcttcctccaccagcttcatctctcaaactaacggcgacaacctctttcccatccccacgggcactcttcctcgctttacgcaaaccccaaatttccattatcccgcgtgccactcctgactccgacgctgactcatcaaccgaacccgactccgccccctcctcggacacctcagccgaatccgacccattcgaatcccgtctctcccaagtccgcctccgttaccgaatcggagccggcaagaaagcggagcgccgaaaatcaaagaaatccggatccgtgtccacttcgttgtcttcctcctccatctacctccctccggtgcctttaaaagaggcgatttcaaatgggttgaaagtggatttcgggtttagcccatatggcgagagaataaacggacggatcgcgattctcgggttgacggctntggttttagtggaattggctacgggtaagagcgcgataagttatcatacgccagcaattatctntattcagatttattttgtagctgcagttggggctttgttcgttaagtacgagaaagaaaaagttagtgtttggctaccttctcaatcttcttc

SEQ ID NO: 36721 - DNA, 623 bp, Gossypium hirsutum
  Clone ID: LIB3165-006-P1-K3-E10
aaaatctcaaacccagatttgttctctctctctctctctctctatttccaatcaattaattcctccattggaggagcttagggtttgttggtgttctggtctttgctttgtctgaaaaataaacagaattataaacgaacaccaacgccatgggaagatttgaagagagaggattcgattcagtggtttgccctaagcctatccgaacctttagatggtccaccaactgttatcagactgagatggctgattcaaaaactggtgcagagcttcttgatataatcctccccgagggagggtatggggccgagaatcccaccaaccaaatggcttcatcaccaccgtatttctgtggatcaccgccgagcagggcgtcgaatccggtaatccaagatgcccgattcaacgacgagcagccggtgctacctccactaacatccccagcaacctcctcaaggggaggatgcgtgagggtgaaattcgggcagatgccagctgctgtacgaatcgagggatttgattgcctcaccagagatggccgccatcgcagcatctccgccgtggcttaaaataaaccaagatatgagaacaaaaatgtgagaggagagagggagatgataaat

SEQ ID NO: 36722 - DNA, 620 bp, Gossypium hirsutum
  Clone ID: LIB3165-006-P1-K3-E11
gaaagagcttcttcactttgacaacaatactcactttctcttacagagattgagagaaaatcacaaacacacatttatatagcacagtgatcatcatggctcttcacttgtcttgggttttcgtttttggtattctaggcaacgctgtttcattcatggtttccttggctccactgccaacattttaccaaatattcaagaagaaaacatcggaaggtttccagtcgattccctacgtggtttcgctcttcagtgcgatgctttggatttactatgcactgcttaagaaagatgccattttcctcattaccatcaacactttctgcgttttcattcaaactttttacattgttacttacttttactacggcccaaagaaagaaaagatcgtcacggtgaagcttatgcttctcttcaaacgttttcggttcggagttatctttctcgcaacttacttcctaaaaaaacccttcccttcgtctcctgattttgggttacatttgcatggcattcgctttggctgtgttcgtcgcacctctcgccattgtgagaaaagtcataaaaacgaagagcgttgagtacatgccatttactttatcagtgttcctcactttaggagc

SEQ ID NO: 36723 - DNA, 598 bp, Gossypium hirsutum
  Clone ID: LIB3165-006-P1-K3-E12
cccacgcgtccggatgtcttggttcatggagagcctgagagaaacgatatggttgagtactttggtgagcagttgtctggttttgcattcactgttaatggatgggtgcaatcttacggatctcgatgtgtcaagccaccaatcatctacggtgatgttagccgccccaagccaatgactgttttctggtcatctaccgcacaaagcatgactgcacgcccaatgaagggaatgcttactgggcctgttaccatccttaactggtcctttgtcagaaatgatcagccccggtttgagacttgctaccagattgccttggccatcaaggacgaagtggaggatcttgagaaggccggtatcaatgttatccaaattgacgaggctgctttgagagaggggttgcctcttagaaagtcggagcacgccttctacttgaaatgggctgtccactccttcagaatcaccaactgtggtgtacaggacactacccagatccacactcatatgtgctactccaacttcaatgacatcatccactcaattatcgacatggatgctgatgtgataaccatcgagaactcacgttcagatgaaaagc

SEQ ID NO: 36724 - DNA, 678 bp, Gossypium hirsutum
  unsure (1)..(678): unsure at all n locations; Clone ID: LIB3165-006-P1-K3-E2
cttcctcctcctttcctccgtcgttgcttcggccgtcgtctccgacgttaatagcgacggcgatcctctcatccgtcaagttgtttccgatggtggtgtcgaggaggactccgatgaccatctccttaacgcggagcaccacttcacgctgttcaaatccaagtatgggaaaacctacgcatcccaggaggagcacgattaccgactgggagtcttcaaggctaacctgcgtcgggccaagcgtcatcagctcctggaccccagtgccgtccatggcgtcacaaagttttccgatttaactccatcggagttccgccgccagtatctaggcttgaaaccgctcaagctcccagccgatgctcaaaaggctcctatccttccgactgacaacttaccggatgactntgactggcgtgaccacggcgccgtcactggcgttaaagaccagggttcctgtggatcgtgttggtcgttcagtgcgacggnggctttggagggagcccattatttggcgacaggagagcttgtaagcttgagtgagcagcaacttgttgattgtgatcacgagtgtgatccacaacaatatggtgcgtgtgactcanggtgtaattgtggtctaatgacctctgctttcgagtacaccctgaaagttggtggacttgagagaggagaggatta

SEQ ID NO: 36725 - DNA, 576 bp, Gossypium hirsutum
  Clone ID: LIB3165-006-P1-K3-E3
aacaacatggatggattctacattgccccagctttcatggacaagcttgttgttcacatcaccaagaactacatgacccttcctaacattaaggttcctcttatcttgggtatttggggaggcaaaggtcaaggaaaatctttccaatgtgagcttgtctttgccaagatgggaatcaaccccattatgatgagtgccggagaattggaaagtgggaacgccggagaaccagccaagttgatcaggcaaaggtaccgtgaggccgccgacattatcaagaaagggaaaatgtgttgcctctttatcaacgatctcgacgctggagccggtcgtatgggaggaaccacacaatacacagtgaacaaccaaatggtgaacgccacactcatgaacatcgctgataaccccaccaacgttcagctccccggtatgtacaacaaggaagagaaccctcgtgttccgatcattgtcaccggtaacgatttctcgacgctgtacgcgccgctcatccgtgacggtcgtatggagaagttttactgggcacccaccaaggaagataggatcggtgtttgcaca

SEQ ID NO: 36726 - DNA, 646 bp, Gossypium hirsutum
  Clone ID: LIB3165-006-P1-K3-E4
taagattatggtgaaaaactaaacataataaagtccctcataacattcttcgacttgcttcattgattagcccaaagataaacataaccaaaaagaaaaatggcttctgcttccgctactctcctcaagtcttcacctattatcgacaagtccgagtggattaagggccaaaacctccgccacccttcggtttgttttgtacggtcacaccctacatcggccgcctttaccgtccgtgctagttcatatgccgatgagcttgttaagaccgcgaaaactgttgcatctccaggtcgtggtattttggccatggatgaatcaaatgctacatgtgggaagcggcttgcctcgattggtctcgagaataccgaggcaaaccggcaagcttaccgtacccttctcgtgtctgcccctggcctcggtaactacatctcgggagctatccttttcgaggagactctctaccaatctaccatcgatgggaaaaagatggtcgatgttcttgttgagcaaaatattgtccctggtatcaaagttgacaagggtttggttccactccctggttccaacaacgagtcatggtgccaaggtcttgacggtctttcattccgcacagctgcctactaccagcagggtgcttcgttcg

SEQ ID NO: 36727 - DNA, 636 bp, Gossypium hirsutum
  Clone ID: LIB3165-006-P1-K3-E6
aataaattagtgtgttatctttctccccctaatctctatctccatggcggataaaacgagagcctcaccttaccactctcatttcttccaactcccttcttcttcttcaatttgatctatctgtttctttcttctttgcttcttttcaagctctattattataacagctacctctgcttcttcttcttcttcttttcaattgccattagtttgattgtagctatggcttctgctgctaactgtgtagtgtattttagcagcaacactaactaccttactgtctcagaactaaaaaaccattctttgcctgctacctttgtcagcagaccacccaacaattacactcttgggaaaagaagtcattacagtgtcagattgttatcttcaacgacgggaatcaatccacgggcagcagcaccatcagccactgctgtagagaatgatggaagtttccccgacactgatatggttccaacccccaaagttataattgatcaagactcggatccagatgccactgttgttgaaattacctttggcgatcgactcggagcgcttcttgatactatgaatgcacttaaaagtctcgggttgaatgttaccaaggcaaatgtctatttggattcatctgggaag

SEQ ID NO: 36728 - DNA, 634 bp, Gossypium hirsutum
  Clone ID: LIB3165-006-P1-K3-E8
cggacgcgtgggcggacgcgtgggttttcattttcaaaccccactccccccatggctggtctcaagcttatttgtggcctagtattgttgtgcatgttggttttggaacccatggccacaactgctctcacatgtggacaagtggcaagccaaacgggtagttgtataaggtatttgcagcgtggagggaaccctccagctgcttgctgcaacggagttaggaacctaaacaggcaagctagaaccacccgtgaccgtcaaactgcatgcagatgcttgcaaactgccgctaggaccatctccggtatcaatactaaattggctgccggtcttccggccaaatgcggtgtcaaaattccttacaagatcagcccctccaccaactgcaatagagtgagatgatcatggatgaagtaagcagcttgcaggaaatgttatatatatatatatataagcgtgaaataaagattttgggatggatgcttattccaaaatccaaattagtgtcttgattaattatttgtttatctttgagatgttggctctaattatgttgtctatgtatggaatgttcagtgttttatgagttaaaaagcctatgttttattatattacatgatatctggattgtttc

SEQ ID NO: 36729 - DNA, 296 bp, Gossypium hirsutum; identical to SEQ ID NO: 36635
  Clone ID: LIB3165-006-P1-K3-E9

SEQ ID NO: 36730 - DNA, 673 bp, Gossypium hirsutum
  unsure (1)..(673): unsure at all n locations; Clone ID: LIB3165-006-P1-K3-F1
ttcaattttcactagctacttgacttcattgcttaattattatttgcagaaagatggattcaattaaatcgcatgcagtatgtcttccaagcccagcacaaggtcatattaaccccatgatgcaactggccaagctcttgcactctagaggcttccatataacctttgtcaactccgagttcaatcatagacgatttatacggtctagaggggaagaagctgttaagggtctgcctcatttccggttcgaagccatacccgacgggctgccaccttccgattctgatgcgactcagtctgttccggcactatgcaattccacacggaaaaattgtttggctccattcttggagctactatctaagcttaattcctcaccccacctgccgcctgttacatgcatagtttgtgatggaaccatgaactttggtaccaaggcagctcaactcattggggtgccttatgttcaactctggacttcttcaaccgttagctttctgggatttctgcactacaaagaactagctcaaagaggcattgttccattcaaagatgaacgctntgttagcgatgggacacttgagatgcccattgattggatccctggtatgcctaacatgcgtntnaaggacataccaagcttcataagaaccaccgaccctgatgacttcat

SEQ ID NO: 36731 - DNA, 646 bp, Gossypium hirsutum
  Clone ID: LIB3165-006-P1-K3-F11
cccacgcgtccgcccacgcgtccgccacactctcaaattcagataacaatttcacagttgttttcttcactctctctctcagccatctccaccgtcgccgccgctgccgccgccaaccgagctctgggagtgtcagtcccaacctcagctttcatggggaagaaagtgagctcgagattcaacaacaccaggcaggttccttcgggaagttttaaggtgatggcggccgaaaaagagatagacgaagagacacagaccgaaaaggaccgatggaaagggttggcttacgatatttcggacgaccaacaagacattactcgagggaaagggatggtggattccttgttccaagctcccatgaatgatggaactcactatgctgtcatgagttcctatgaatacatcagccaaggtcttaaaacgtacaatttggacaacaacatggatggtttctacatcgctcctgcattcatggacaagcttgttgttcacatcagcaagaacttcatgtccctccctaacattaaggttcctctaatcctgggtatttggggaggcaaaggtcaaggaaaatcttttcaatgtgagcttgtgtttgcccagatgggtatcaaccccatcatgatgagtgccggagaactggaaa

SEQ ID NO: 36732 - DNA, 571 bp, Gossypium hirsutum
  Clone ID: LIB3165-006-P1-K3-F12
gccacgcgtacgattccttccacccggctgcttggttccacctgtttctttctttttctccaaagccatcatgaatctcattaataggctcagccccaagcgtctctttggatctaataaaaaagatagatccatcgactacaagttcgacccctcctcctatagttccggttacggcggttactgctcttgctgctgcgaatccgactcttccaccctcaaagaacatcagtacccttccacggctaccgctggcttagtaacgcccaccagtgttttgccccaaacatcaggtgactggtccgattttcccgctaatttgtatctagaactgtgccaggcgtttaaaatgttagacaaagataacgacggcgttatatcgagaagcgagctcgaggctttgcttggcaaggtcgcaaggcagccgcccagccgggacgaggtttccttgatgttgagcgaagtggacggtgacggcgacggctacatcaacctggaaacgttgatgaaccaggtggttggaccggcttgcgacgaacccgcctgcgaaccggaactgagggagactttt

SEQ ID NO: 36733 - DNA, 642 bp, Gossypium hirsutum
  Clone ID: LIB3165-006-P1-K3-F2
gtttcccatgaaagtagccaaggaagggttgatgaccatccttcttttagaccccatttgccacctgaattctacaagaaacctactgtgaaagtctattgcaaagctgatcctaattttcatctcaccatcagagacggtaaagttattcttgctccatctgatccctctaatgaattccagcactggtacaaagatgagaagttcagcacaagtgtgaaagatgaagtgggtttcccaagcttttctctggttaataaagccactggtcaagccattaaacattccattggagcttcttatcctgtccaactggtaccttacaaaccagatcatcttgatgagtcagttgatttcaggtgctctgatgtgtcctccaccgttgatgcatcactcaccatggtcatgggagacgacatggttaaggtgattgcttggtacgacaatgagtggggttactctcaaagagttgtagacttggctgacattgttgccaacaactggaagtgattcgaaatacttgtctgcagtgtgatatggttaatttttgctcacctcatttcttttcggctttcatcaaagatgtataattttaacgtggactgtatgcaataaaaatcgtgcttgcactttgatggcctt

SEQ ID NO: 36734 - DNA, 549 bp, Gossypium hirsutum
  Clone ID: LIB3165-006-P1-K3-F3
agcacttctatttgatgattaattagggttttagagctttcacaattgtttaggaatttgagagtttatgttggagaagaagaggggctcaagaattagagctttcatgagtgatatatacttggggatttcttttgtcattaatttgggtttgcttattgctctttgattttgagcaagtacttgctgatttcttgctgcattgaagaattagaggtttcaagcctggatttggagaattcaggcttttccctcattggcaagttcttccattgttcttgtcataggaacgacgaacgagcaaagcgattaatcttacttctggattgtacttgatttacatattattggggtttgatcggttaaccaaaatagggtgactggatgctgaacgccagagatttgcttggctggctacttaacttgatgctgtggatatatggtctccctaaatattctggaattccttctatcgctatggtcgttggaggactattagtttctttgcagctgatgcttagcatcagaaattatggttcttaagtgcat

SEQ ID NO: 36735 - DNA, 665 bp, Gossypium hirsutum
  Clone ID: LIB3165-006-P1-K3-F4
tttagctatagcatacactactagtacccactactagcaatggcttcctcaatgatctcatcggctaccattgccactgcctctccggcacaggctaacatggtcgctcctttcaccggtctcaagtctgcctctgctttcccagtcaccaggaaggccaacaacgacattacttctctcgcaagcaatggcggtagagtgcaatgcatgcaggtgtggcctcctactgggaagaagaagtttgagactctctcatacctccccgatcttacacccgtgcagttggctaaggaagtagattaccttcttcgctcaaaatgggttccttgcttggaattcgaattggaggagggattcgtgcaccgtaagtactcgagcttacccacgtactacgatggacgctactggaccatgtggaagctgcccatgttcgggtgcaccgactcggctcaggtgttggaggagcttgaggaatgcaagaaggcataccccaatgcattcattagaatcattggcttcgacaacgtgcgtcaagtgcagtgcattagtttcattgcctacaagcctccaggcttctaagctttttattaactttgtctctccatttgtttgaatttgtactcagaaaaaatcatgttccttacttttgcttttcctttctttga

SEQ ID NO: 36736 - DNA, 627 bp, Gossypium hirsutum
  Clone ID: LIB3165-006-P1-K3-F5
cgggaagctgcaaatgtatttggaaagccaaaaacaaacacagagttcatcccatacaatggggaagggttcaagctgtcaataccatcaaaatggaacccaagcaaagaggttgagtacccaggtcaagtcctgagatacgaggacaacttcgactccaccaccaatgttgctgtcctggtcactcctactgataagaagtccattactgacttcggttcccctgaaaatttcctctctaaggtggactatctgcttggaaaacaagcatactctggcttaactgatgctgagggtgggtttgactcaaatgcagtggcaactgcaaacatattggagacttcaactcctgtgatcggagggaaacagtactacttcttgtcggtgttgacgagaactgctgatggagatgaaggtggcaagcaccaactaattacagccaccgtaaacaatggtaaactttacatttgcaaagcacaagctggggacaagcggtggtttaaaggagctagaaagtttgtggagagtgctgcaaattccttcagtgttgcttagttaaaagtcttacttgttaactagagaataatttcatgtaaatcttgttagaaaatatctgatgttggacct

SEQ ID NO: 36737 - DNA, 627 bp, Gossypium hirsutum
  Clone ID: LIB3165-006-P1-K3-F8
cccacgcgtccgatgggttcaagcggcggctgctttatccaacatgggaatgttcctcgccgagatgagtagtgactcgttccagctcgagggaatggcatctagggggatgcttcctgaactatttgctaaaaggtcccgttacggaacccctttggtcgggattttattctcggcatccggtgtcatactcttgtcttggttgagcttccaagagattatagcagcggagaacttcttgtattgtttcgggatgatcatggagttcatagcgttcgtgaagctaagagtagatcgtcctgcagaatcgagaccgtacaagatcccggtcgggacagctggggcgattttaatgtgtatcccaccaacattgttgatcctcgtggttttagccattgcatcttttaaagtcatggtggttagcacggtggcagtgatgataggacttgctcttgagccatgtttaaggtattcggagagaaaaagatggctcaaattcaccatgaaccctgatctttatgatcttcgttctccttaccagtaatgtaataaaaaacacatgttattatgttttttttatgtttcatcaagctgttttagttaaatataatagagattattacatat

SEQ ID NO: 36738 - DNA, 647 bp, Gossypium hirsutum
  Clone ID: LIB3165-006-P1-K3-F9
gtagccgccgcctgcgtctctctcttcatctctctgaaccaaaaagtctttagcttttcgcttcgagagagaccatgttggtttaccaggatctcatctccggtgacgagcttctttctgactcattcccctacaaggaaatcgagaatgggatgctgtgggaagttgagggaaagtgggttgtgcaaggagctgtcgatgttgacattggtgccaatccttcagccgaaggtgctgatgaggatgaaggtgttgatgaccaagctgtgaaggttgttgacattgttgacactttcaggcttcaggagcaaccccctttcgacaagaagcagtttgtcgtgttcatcaagaagttcatcaagaacttgacaccaaaactggatgcggaaaagcaagagtccttcaagaaaaacattgagggagcaaccaagtttttgctttcaaaattgaaggaccttcaatttttcgtaggagagagcatgcatgatgatggatgcttggtgtttgcttactacaaggatggtgctgttgacccaacatttttgtactttgcatatgcattgaaggaggtcaagtgctgaggtttgaagcaaagaaaaaaaaagtggttgctgaaagaattaagtccttttattattgcttttggc

SEQ ID NO: 36739 - DNA, 541 bp, Gossypium hirsutum
  Clone ID: LIB3165-006-P1-K3-G1
ctcacgcgtacaggccgtccgcaattctttgtagagatgacaagtacatagtgaccatgttatgatacaaatatgacagggtgcagtgtccattaaaacacacatatggatgacactatttaactaagtcacagaggtgggatcacccctgtttagccccaatataaaagctcaacctccgttaacgcttacaggtccatatgagaagccccagttcagatgggtcttcgtgagcttagagaccggcttgattcagtaaagatcacgcagacgatcactgaagtcatgaatcttgtggctgatgatcaagcatggagagcacatgaagctgctgtcaaaggcagacctttctgtgagtccaatggatgaagctctttacatcatgaatgaacagttccagactgcagacatagatgcgtctcttacaaacgataggcttgctaaaaaagttgatacggttgccgttactgcagatcgagggctatggggaggtcctaacaaggctatcacaaggtaagctggggcttgaacggcagcattg

SEQ ID NO: 36740 - DNA, 553 bp, Gossypium hirsutum
  unsure (1)..(553): unsure at all n locations; Clone ID: LIB3165-006-P1-K3-G10
cccacgcgtccggagactcttttgtatacctgtagcatatagtaatagtaagcagtaatagcaatggcctcctccatgatctcatcggcaaccattgccaccgtgaaccgctcctccccggcacaggccaacatggtggcccccttcaccggcctcaaatctgcctctgctttcccagtcaccaggaaggccaacaacgacatcacttctcttgcaagcaacggtgggagagtgcaatgcatgcaggtgtggccgcctcttgggaagaagaagttcgagactctctcatacctgcccgatcttactcccgtacagttggctaaggaagtagattaccttcttcgctctaaatggattccttgcttggaattcgaattagaggagggattcgtgcaccgtaagtactcgagcttacccacgtactacgatggacgctactggaccatgtggaaactgcccatgttcggggtgcaccgactcgctcaagtgtngaaggagctngaggaatgcaaganggnaataccccatgcattcattagaatcattgggttcg

SEQ ID NO: 36741 - DNA, 502 bp, Gossypium hirsutum
  Clone ID: LIB3165-006-P1-K3-G3
ctcccccacacattcaaaatcctattccttttctcctttttctttttctcagacaagatgggttctcagggatcggttatggcgatgcttttgctgatgatgttcactttatcatcagcttccgacatgtccattatatcctacgatgaaacacatcccgacaagtcaacgtctagttggagaacagacgacgaagttatggccatgtacgaggagtggcttgtaaagcatggaaaaacatacaacggtttgggtgagaaagagaggaggttccagatttttaaggataaccttaggttcatcgatgaacataacgccgatgagagtcagagttttaatgttggtttgaaccgctttgctgatcttaccaacgaggagtaccgagccatctacctgggaatcaagaaaaccccacccggaaagtttccaaggccagtgaccgatactccgcgcttttcggcgaaaagttgcccgattccggtgattggagggaaaaaggggc

SEQ ID NO: 36742 - DNA, 618 bp, Gossypium hirsutum
  unsure (1)..(618): unsure at all n locations; Clone ID: LIB3165-006-P1-K3-G4
cccacgcgtccgtccccttccaacgatggaccgcttctctcttctcttcctcctcctttcctccgtcgttgcttcggccgtcgtctccgacgttaatagcgacggcgatcctctcatccgtcaagttgtttccgatggtggtgtcgaggaggactccgatgaccatctccttaacgcggagcaccacttcacgctgttcaaatccaagtatgggaaaacctacgcatcccaggaggagcacgattaccgactgggagtcttcaaggctaacctgcgtcgggccaagcgtcatcagctcctggaccccagtgccgtccatggcgtcacaaagttttccgatttaactccatcggagttccgccgccagtatctaggcttgaaaccgctcaagctcccagccgatgctcaaaaggctcctatccttccgactgacaacttaccggatgactttgactggcgtgaccacggcgccgtcactggcgttaaagaccagggtcctgtggatcgtgttggtcngtcagtgcgacgggggctttggagggagcccattatttggcgacaggagagctngtaagcttgagtgagcagcaacttgttgattgtgatcacgagtgtgat

SEQ ID NO: 36743 - DNA, 623 bp, Gossypium hirsutum
  unsure (1)..(623): unsure at all n locations; Clone ID: LIB3165-006-P1-K3-G5
ggagtacttgcaatatgatttggattctttggaccagaacctggctaagaattcggctggtgagataattggaactaggaccgaggttgccgacgtgaaggcgacgccgtttcagccttacagcgaggtttttggtctacagaggtttagggagtgtgagttgatccatggacggtgggccatgttggctacgcttggtgcacttaccgttgaatggctcactggtgttacatggcaagatgctggcaaggtggagttagttgagggttcatcgtatctcggccaaccccttcccttctcgatgacaacattgatttggatagaagtattggtgatcggattcatcgagttccaaaggaacgccgagcttgacccggagaagaggctgtaccccggaggaaagtactttgatcctctcggnctagccgccgacccggagaagaaagcaaccctacaattggctgagatcaagcatgctcgccttgccatggttgctttcttggggtttgctgtccaagctgctgcaacaggcaaaggccctctcaacaattgggctactcacttgagtgacccccttcatactaacattattgacactttcacctcttaaaaaaagccatatt

SEQ ID NO: 36744 - DNA, 674 bp, Gossypium hirsutum
  Clone ID: LIB3165-006-P1-K3-G6
cccacgcgtccgaggagctgatagacctttatggtttgcatctaaacaaagcctttcatacttggatggcagccttccaggtgattatggatttgaccccttgggactctcagaccctgaaggtccaggagggttcatcgagcctaaatggctagcctacggtgagatcatcaacgggcgttatgctatgttgggtgcagtaggtgcgattgcccctgaaatacttgggaaggccggtcttatcccagcagaaacagccctcccttggtttagaaccggtgtgatcccaccagcaggaacatacagctattgggcagacccttacactttgtttgtgttcgagatggcactcatgggatttgcagagcacagaaggttccaagactgggccaaaccaggttcgatggggaaacaatatttcttggggttcgagaagtaccttggagggtctggtgagccggcataccctggaggaccactgtttaacccacttggttttgggaaagatgagaagtcattgaaggatttgaagctgaaagaagtgaagaatgggagattggcaatgttggcaatcttgggttacttcatacaagggctcgtgacaggtgtaggaccataccagaacctgttggatcacttggctgaccctttcaacaacaatgtcttgactaacc

SEQ ID NO: 36745 - DNA, 566 bp, Gossypium hirsutum
  Clone ID: LIB3165-006-P1-K3-G7
cccacgcgtccgcccacgcgtccgcccacgcgtccgcccacgcgtccgcccaacctcagctttcatggggaagaaagtgagctcaagattcaacagcaccaggcaggttccttcgggaagttttaaggtgatggcggcggagaaagagatagacgaagagacacagaccgaaaaggaccgatggaaagggttggcttacgatatttcggacgaccaacaggacattactcgagggaaagggatggtggattccttgttccaagctcccatgaatgatggaactcactatgctgtcatgagttcctatgaatacctcagccaaggtcttaaaacgtacaatttggacaacaacatggatggtttctacattgctcctgcattcatggacaagcttgttgttcacatcaccaagaacttcatgtccctccctaacattaaggttcctctaatcttgggtatttggggaggcaaaggtcaaggaaaatctttccaatgtgagcttgtgtttgccaagatgggtatcaaccccatcatgatgagtgccggagaactggaaagtggaaacg

SEQ ID NO: 36746 - DNA, 670 bp, Gossypium hirsutum
  Clone ID: LIB3165-006-P1-K3-G8
accacacaaaaatcaaccatggcagcagcagccagagtgatagccatcgccggcaactccaccgccgccgcgtcttcctgcttgcttatcaaaacaccgttcgctttacaacgctgcagcaacggacttagattcaacaacgtcagacgatcatcgaaaagattgttttcttgcaatgccatttataaccctcaggttcaaatcaaacaagaaggccaacccgaaactctcgactatagagtcttcttcgaggatacttcgggcaaaaagatttctccttggcacgatgttccattgcacttgggagatggtgtttttagcttcattgttgagatacccaaagaatcaagtgctaaaatggaggttgctactgatgaactttacactcccattaaacaggatacaaaaaagggcaagcttcgatattacccctataatataaattggaattatggattgcttccacaaacatgggaagacccatctttggcaaactctgaagttgaaggagcatttggtgataacgaccctgttgatgtcgttgagatcggtgaatcccggaggaaaatcggtgacattttgaaggttaagcccctggctgctttagctatgaatgatgaaggggaacttgactggaaaatggtgccatttcattagatgatccaagggc

SEQ ID NO: 36747 - DNA, 553 bp, Gossypium hirsutum
  unsure (1)..(553): unsure at all n locations; Clone ID: LIB3165-006-P1-K3-H1
gccccatcagcgattttttggactgactatgtagcaacccgttggtatcgtgctcctgaactctgtggatcctttttctccaaatacactcctgcaattgatatatggagcataggatgcatatttgctgagatacttacaggaaaaccactatttcctggaaaaaatgtggtgcaccaattggatctcatgaccgatacacttggcacaccccctcctgaatccatatcaaggattaaaaatgaaaaggcaaggaggtaccttagtagcatgcgtaaaaagcaaccaattcctttctcacagaagttccctaatgtggatcacctggctcttcgcctacttgagcgcttacttgcatttgatccaaaagatcgtcccacagctgaagaagcattagctgacccatattnttatggtttggcaaatgtggatcgtgaaccatctacacaacctatttcaaaactagaatttgagtttgagagaaggaaattgacaaaagatgatgttagagagctgatttatcgagagatattggagtatcatccccagatgc

SEQ ID NO: 36748 - DNA, 554 bp, Gossypium hirsutum
  Clone ID: LIB3165-006-P1-K3-H10
ctttctcttgctctctttagagtatttttctcttgcaatcctttgtagagatccgggatccattgtcaccatgtcttgctcaaatctgacaatgtgggtgtcctcaaaaccctctctttctgacacttcttcactctctttccgttctttcatcagcccttttcagctcccgtctcagagctcaacccccggtaacccttccaggtcctcatctgtaaccccagttcactgtggtcttcgtgagcttagagaccgtattgattcagtaaagaacacgcagaagatcactgaagctatgaaacttgtggctgctgctaaagttaggagagcacaagaagctgttgtcaatggcagacctttctctgagtccctggttgaagttctttacaacatcaatgaacagctccagactgaagacatagatgctcctctcacaaacgtcaggcctgtcaaaaaagttgctttggttgttgttactggtgatcgtggtttctgtggaggtttcaacaatgctatcctcaagaaagctgaagcttagaattgcagaattgaag

SEQ ID NO: 36749 - DNA, 691 bp, Gossypium hirsutum
  unsure (1)..(691): unsure at all n locations; Clone ID: LIB3165-006-P1-K3-H11
ctcaccattgttccaagtttgttgtataccaagctagaaccagcagccaacatggcctcattagcagcctccaccgctgccgcctcccttggcgtctctgaaatgctcggtaaccctctgaatttcagtggtggagctaggtcatcggctccaacaccatccaactcatccattttcaagaccgttgctcttttctccaagaagaaggccgctcctccaaagcccaaggctgctgctgtcgccccggccgatgaagagctggctaagtggtacggtccggacagaaggattttcttgcctgaaggtctgttagacagatcggagatcccagagtacttgaacggagaagttcccggagactatggatacgatccgtttggtctgagcaagaagccagaagactttgcataatatcaagcatatgagttgatacacgcaaggtgggcaatgcttggtgctgcagggttcatcatccctgaagcctttaacaaatttggtgccaactgtggccccgaagccgtttggttcaagaccggagctcttctcttggacggtaacaccttgaactacttcgggaagaacatccncatcaacccttggggtggctgtcgttgccgaagtcggtcttgttggtggtgctgaatattacaggatcatcaatgggctggatctggaggacaagccttaccct

SEQ ID NO: 36750 - DNA, 606 bp, Gossypium hirsutum
  Clone ID: LIB3165-006-P1-K3-H12
cagaagtggattgaagtgaagaaagtaacaaccaccgaaaatgtcggcagcgcttgctccaccagcttcatctctcaaactaacggcgacaacctcattcccaacctcacgcgcactcttcctcgctttacgcaaaccccaaatttccattataccacgtgccactcctgactccgacgctgactcatcaacggaacccgactcctcgccctcctcggagacctcagccgactccgacccattcgaatcccgtctctcccaggtccgcctccgttaccgaatcggagccggcaagaaagcggagcgccgaaaatcaaagaaatccggatccgtatcaacttcgtcgtcttcctcctccatctacctccctccggtgcctttaaaagaggcgatttcaaatgggttgaaagtggatttcgggtttagcccatatagcgagagaataaacggaaggatcgcgattctcgggttgacggctttggttttagtggaattggctacgggtaagagcgtgataaggtatcatacgccagcaattatctttattcagatttattttggagctgcaggtggggctttgttcgttaagttcgagaaaagaaaaag

SEQ ID NO: 36751 - DNA, 366 bp, Gossypium hirsutum
  Clone ID: LIB3165-006-P1-K3-H2
ctcacgcgtacggagagaaaaacaaaaaacacttccgaaatggcacgcaagaagatcagagagtactattccaagagattgtggaaagaacatgttaagaggctttacgttagagatatgccaatcaaatgtgcacaaattactgaatcaactgatatcaatcagctagtacagaaggagccatggcttacgacacagaaactggctggtaaacctggtatgttgttcggtatgcgtgggcagagtgcgttgggtgtcttaaatataggatgtgctcaagttataggtttcgcgaaagagcgcctaggcacataggtggaaatgaggggatacaaggaacctgttacaacactcattggttgacct

SEQ ID NO: 36752 - DNA, 623 bp, Gossypium hirsutum
  Clone ID: LIB3165-006-P1-K3-H3
cccacgcgtccgcgtttattctcttaacatggatgcctacgtactatcatcaagtcctgaagttcaacctcacagattcagggctcatttgtgttttaccctggcttacgatggcattttctgcaaatcttggaggatggattgcagacacacttgtgagcaaaggcttatctgtgacaactgttcgcaaggtcatgcaatccattgggtttcttggccctgctttcttcctaactcagctgagccatgtcaattctcctgctatggcagttttgtgtatggcatgcagtcagggaactgatgcattttcacagtctggcctttattcaaaccatcaagatattgcccctcgatattcaggtgtattacttggtttgtccaacacttgctgagtactagctggggtttttggaaccagtgctacttgttacattctgcaacatggttcttgggacaatgtcttcgaggtttcggttgtgctatacttggttggaaccgtggtctggaacctcttttcaactggtgagaaaatactggacttgcctcagatatttagatgtttagcatggagtagctcaagccttcatggtctcgagctaattgaaagagtcaatttattgaat

SEQ ID NO: 36753 - DNA, 613 bp, Gossypium hirsutum
  unsure (1)..(613): unsure at all n locations; Clone ID: LIB3165-006-P1-K3-H4
cccacgcgtccgctcgcattgaattctgttgggaaaaaaaaatggaagaagagaaggcggcagcttactacgatgagcttaccaggaaaggtgagggagcggccagattcaagcgaggcctcggtttctcctcttgcgatgatcaacacgatgcggttcctcaaagaggcacaacctttgtctctccatgttcatccttcctcagcagtttcgtcagggcctcgagtcctaccaccgcttccaagcttgagaaagaatctcaacttcaaccgatccaacataagctaaagaagaagccggaaagagaagctagggtttcggcgagaaccaacgtggagagagacggagataagcattcaaggaggcgaagcagaagcacgagtagggagagatactgngaaaaaggatagagagagaaggaagcggagaaggagtaggtcgcctcgtagagatcggaggagtgggagtagagatcgccggaggaggagtaggtcgcctcgtaaagaagggaaattggagcggaagaagaggagcaggaatttgtcgccgcgggagtcatggaggtcaaagaggcattggacgagagaggggaaatccatgaaggagaaaaatg

SEQ ID NO: 36754 - DNA, 622 bp, Gossypium hirsutum
  Clone ID: LIB3165-006-P1-K3-H5
cccacgcgtccggagactcttttgtatacctgtagcatatagtaatagtaagcagtaatagcaatggcctcctccatgatctcatcggcaaccattgccaccgtgaaccgctcctccccggcacaggccaacatggtggcccccttcaccggcctcaaatctgcctctgctttcccagtcaccaggaaggccaacaacgacatcacttctcttgcaagcaacggtgggagagtgcaatgcatgcaggtgtggccgcctcttgggaagaagaagttcgagactctctcatacctgcccgatcttactcccgtacagttggctaaggaagtagattaccttcttcgctctaaatggattccttgcttggaattcgaattagaggagggattcgtgcaccgtaagtactcgagcttacccacgtactacgatggacgctactggaccatgtggaaactgcccatgttcgggtgcaccgactcggctcaggtgttgaaggagcttgaggaatgcaagaaggaataccccaatgcattcattagaatcattgggttcgacaacgttcgtcaagtgcagtgcattagtttcatggcctacaagccttgaagctactaaagttgttact

SEQ ID NO: 36755 - DNA, 533 bp, Gossypium hirsutum
  Clone ID: LIB3165-006-P1-K3-H6
gtcggtctcacttcaagctgcagctaccctgatgcaaccaatcaaggttgctgcaccatcaaggaccaatgtgctgctcaggtcctcccagagcgtttctaaggccttcggtttggagcctgttggtgctaggctcacctgctctttgcaaactgacctcaaggacttggctcagacgtgtgttgatgctaccaagctcgctggtttcgctctttctacatctgctcttgttgtctcgggagcaagcgctgaaggagttccaaagcggctaacctacgatgaaatccaaagcaagacatacatggaagtcaaaggaacaggaactgctaaccagtgcccaaccatcgatggtggtgtcgactcttttgccttcaagcctggcaaatactacgccaagaagttctgcttggagcccactttcttcactgtcaaggctgagggtgttaacaagaatgcccctactgagttccaaaacaccaagctcatgacccgtttaacctacactcttgacgaaatcgagggccctttcgagg

SEQ ID NO: 36756 - DNA, 628 bp, Gossypium hirsutum
  Clone ID: LIB3165-006-P1-K3-H7
cccacgcgtccgatttcttgaattctcctctcaaccccctaaccaaatcatccatttcataaatattaatccaccaaaagaattatccattcagttcaaagacaccatgacatctacacctactcaagaaaacactcaagtagaaggatcccacgaacccacagtagaagcacccccatcggaagaagatattaagaaatggggcacgcacgtcatgggatccccagcagctcctagtgcccatccagacaaccagaaggcggctttatggaatgctagtgatcaccaacaaatctatgagctgccctatgtcgtttattcccctgcagaaagaccaagccataatccttttgaacctgtgattaacatgttcaatacctggagtaggaagaccgagtctatagcacgcaacatctggcacaaccttaaaactggaccgtctgtatcggaagcagcatggggtaaattaaacctgacagccaaagctataacagagggaggatttgagtctctgttcaagcagatttttgcaactgatacggatgaaaggttaaagaagacattcgcctgttatctctccacaacaacaggccctgttgcgggtacgctctatttatcaacggctcgg

SEQ ID NO: 36757 - DNA, 607 bp, Gossypium hirsutum
  Clone ID: LIB3165-006-P1-K3-H8
cttaacaaacatcaactccagagatcgccaaacatgctaggaactgagcatgatttgaacttcaaagagaccgagctgtgtctcggcctgcctggtggaagtggtggaggaggaggagctgccgccgccggtggtggtggtggtggtaaaaatgaagtggaaagttccccaaagaccaccgggaaaagaggctactccgagactgttgatttgaagcttaatcttcagtctaaagaaggttgcatggatctgaatcagaacctagaaaatggttcaaaagaaaagaatcatctcactgcaaaaccaccagccaaggcacaagtattgggttggccaccagttcgatcttataggaagaacattatggctaaccagaagaacaacagtgacgaaattagtgacagagctagcagtggcagtgggggtgcagcgtttgtgaaggtttgcatggatggtgcaccatatttgcgtaaagtagatttgaagatgtacaacagctaccaaaagttatccgatgccttggctaagatgttcagttccttcaccatggggagttatggatgtgaaggaatgatagacttcatgaatgagagcaagttgatggatc

SEQ ID NO: 36758 - DNA, 524 bp, Gossypium hirsutum
  unsure (1)..(524): unsure at all n locations; Clone ID: LIB3165-006-P1-K3-H9
cccacgcgtccgctgaaaactaattgaaatcgtcggctgtctctcatttccgttcctctcgggcttccgccaccgtcgacacccaaaatggaggctcaccggctatcttctactaaacctgttcaatctctcaagccaacgaaaaagattcctttagaggaagataccggtaaagcctccgacgcactgccgcttcccttgtacctaacgaacgccctgttcttcaccctcttcttctcggtggtttattttcttctttcccgttggcgtgagaagatccgtacctncacacctctccatgtcgtcaccttttccgagatcatcgccattctctcatttttcgcgtcctttatttaccttttgggtttctttggaattgacttcgttcaatctttggttttcaaccatcgcctgacgtttggattgccgagaaagtggatgatgaagttctgcttgcaaaggaagaagcccgtaaggtcccttgcgggcaagctttcgattgttcgctttcgcctttgcctcct

SEQ ID NO: 36759 - DNA, 332 bp, Gossypium hirsutum
  Clone ID: LIB3165-006-P1-K4-A1
gtctaccaacctatgtaattcgcttcactttaaactgttcttaattggaggatgtagaatattatggatatatagctatcttcaagcttctgccttacttttgtttcttcagtctcagctagattattcacgggcgggtgtatcactgcaacaaaactctgcagcgagctcgttgaaaattgaatctacaccgtcaaaaacacgagcattctgtgactcagcgcctgcgtttaacttacgaatgcggtgaacgagcacatgggacctaaccctgtaccaatacactattgggcagccagcattcgatcatcgtttatgcctacctaatgagc

SEQ ID NO: 36760 - DNA, 627 bp, Gossypium hirsutum
  Clone ID: LIB3165-006-P1-K4-A10
agccattccaccattcaattaccctgtcaaccttgccgtttcaaaaatagcaccggctttaattgcaggaaactcccttgtactcaagccacctacacagggtgctgtttcagctcttcatatggtgcactgctttcacttggctggctttcccaaagggctcattagctgtgtgacagggaaaggctctgagattggtgatttccttactatgcatcctggagttaattgtataagcttcactggtggagacactggtattgctatctcaaagaaggcaggaatggtccctcttcaaatggaattgggaggaaaagatgcttgtatcgtactcgaggacgccgacttagatttggttgctgcaaacataataaaaggaggattttcttatagtggccaaagatgcactgctgttaaagttgtgttggtgatggaatctgttgctgatgttctggtggacaaagtgaaggcaaaaatcgcaaagttaacggttggaccaccggaggatgactgtgatatcactccggttgtgtcggaatcatctgcaaatttcattgaagggctggtcaaggatgccaaaagagaaggagctatattttgtcaggagtacaagagagattgcaatct

SEQ ID NO: 36761 - DNA, 483 bp, Gossypium hirsutum
  Clone ID: LIB3165-006-P1-K4-A11
cccacgcgtccgctgagtttaagcatatcaataagcggaggaaaagaaacttaccaggctacttcggcaatgtaatctttacgactgcactaattgctgaagctggtgatctcgaaaccgaatcgtttactgacaccataaagaggattcatgaacgattaaatcagataaatgatgaatatttaagatcagctattgattacattgaaaaagtgcctgatttaaacaccttggttagaggaccgcatacttttcgatgcccaaaccttgttgttgttccatggaactggttgcctatatatgaggcagatttcggatggggtcgtcccatatatatggggccagggaatgtcgtccaagaaggtaaaatttacatgctaccaagtccagctaacgatgggagtttgacactggcagctcgtttagagatccctcacatgaaagtttttgaaaaacttatttatgagatttaatagttatttt

SEQ ID NO: 36762 - DNA, 622 bp, Gossypium hirsutum
  unsure (1)..(622): unsure at all n locations; Clone ID: LIB3165-006-P1-K4-A12
cccacgcgtccgtgcagatcttcgtcaaaaccctgaccggcaagaccataactttggaagtcgaaagctctgacaccattgacaacgtcaaggcaaagatccaagacaaggaaggcatcccaccagaccagcaaaggctcatatttgccgggaaacaactcgaggacggtcgcaccttggccgattacaacatccagaaggagtccaccctccatttggtattgaggcttcgtggtgggatgcagattttcgtcaagacgttgactgggaaaaccataactttggaggtggagagttccgatacgatcgacaatgttaacgcgaagattcaggacaaagaaggaattccaccagatcagcaaaggttgattttcgctgggaaacaattggaagatggaaggactttggctgattacaatattcagaaggaatccactctccaccttgtcttgcgtcttcggngtggtttctaagctctcctatgaaaatgaggtttctggattttatgtgaatgattgtgatgtctggccctgttaaggcctcataaataaacctaaactantttatctgngttttatcctatgtaatgatattatatgaataaaaattacatgtttacctt

SEQ ID NO: 36763 - DNA, 555 bp, Gossypium hirsutum
  Clone ID: LIB3165-006-P1-K4-A2
cccacgcgtccggaaaaagtctctgacacttgcaacacaataaactacacataaaatctgtgcctgcccttttctctgcacacctcgggatatcagtttcaactccactcatcccacgggttgagtaccgagtccatatatcgttaagttcaaggaaggaacttgggcatcatgggtcttaaggcattagactatgagacaatgaatgaaaacgtgaagaaagttcaatatgcagttagaggtgagttgtatcttcgagcttctgagcttcagaaggaagggaagaagattattttcacaaatgttggcaatcctcaagctcttggacagaagccactgactttccctcgtcaggtggttgctttgtgccaagctccatttctgctagatgatcctaatgtaggacttatatttcctgctgatgccattgcaagagcaaaacattatctttcgttgacttctggtggtctaggtgcatatagtgattccagaggtattccaggcgttaggaaagaggttgctgaattcattgagaggcgtgatgggtatcctagt

SEQ ID NO: 36764 - DNA, 538 bp, Gossypium hirsutum
  Clone ID: LIB3165-006-P1-K4-A3
cccacgcgtccgcgatggtcagattattaccatcggggccgagcgtttcagatgccctgaagtgcttttccaaccatcgatgatcggtatggaagctgcaggcatccacgagacagcttataactcgataatgaaatgtgacgtcgatattaggaaagacttgtacggtaacattgtactcactggtggtacaactatgttccccggtatcgctgatagaatgaccaaggagatctcggctttagctcctagcagcatgaagattaaggttgctgctccacctgagaggaagtatagtgcctggattggcggatcgatctgggcttcccttagcacattccaacaaatgtggatcgccaaggcagagtacgatgaatcggctccatcaattgtacacaggaaatgcttgtaaatgtttttcgacatgagctttgatctatcaacatatgtgtattctcttggcggatagaacgagcaaacattagagaacgagaattggaatttgtgtggaccaattctttcaattctttttaatgag

SEQ ID NO: 36765 - DNA, 674 bp, Gossypium hirsutum
  Clone ID: LIB3165-006-P1-K4-A5
tgaagaaagaaacaaccaccgaaaatgtcggcagcgcttcctccaccagcttcatctctcaaactaacggcgacaacctcattcccaacctcacgcgcactcttcctcgctttacgcaaaccccaaatttccattataccacgtgccactcctgactccgacgctgactcatcaacggaacccgactcctcgccctcctcggagacctcagccgactccgacccattcgaatcccgtctctcccaggtccgcctccgttaccgaatcggagccggcaagaaagcggagcgccgaaaatcaaagaaatccggatccgtatcaacttcgtcttcctcctccatctacctccctccggtgcctttaaaagaggcgatttcaaatgggttgaaagtggatttcgggtttagcccatatagcgagagaataaacggaaggatcgcgattctcgggttgacggctttggttttagtggaattggctacgggtaagagcgtgataagttatcatacgccagcaattatctttattcagatttattttgtagctgcagttggggctttgttcgttaagtacgagaaagaaaaaagtagtgtttggccaccttctcaatcttcttcacctcaaaattgaaaaaaaaaaaaatttttttggggtttttaagtaatatgaaagta

SEQ ID NO: 36766 - DNA, 563 bp, Gossypium hirsutum
  Clone ID: LIB3165-006-P1-K4-A6
aaccccaaccatcgtttatcatggcttcctcaactctctcccctgcagctccttggcagctatgctccagcaagagtggcatgttctgcccatcacgagcgtttcttgtgaaaccagcgaggacccatatggtcaaaaacgaaaagggaatgaggatcacatgccaggccactagcatccctgctgatagagtgccagacatgggcaagaggcagctcatgaatctgcttctgttgggggctatttcactcccctcaggtttcatgttggttccttatgcagccttctttgtgccatctgggggacggggtaccggtggtggcaccgttgccaaggacgcaatcgggaatgatgtaattgctgaagaatggctcaagactcatggccctggggaccgaaccctgactcaaggattgaagggagacccaacctacctagtggtagagaaagacagaacccttgcaacatatggtataaatgctgtgtgcacacaccttgggtgtgttgttcccgggaatcaagccgagaacaagttcatatgcccctgccatggatcccaatac

SEQ ID NO: 36767 - DNA, 448 bp, Gossypium hirsutum
  Clone ID: LIB3165-006-P1-K4-A7
gcgtccacgcgtacggaacgactctttctttgcgttgtctctgcagtccactaaagaggtgcgaaccagatcttaatgaattcaagaagcactgttgcatccacagagtcctgccaatcgggaaacaagaacgactttctcttctggattgtggctagcttgcttccaagtttcctcggaacccttgttgcatacgttaactttcagatgtttaaggacattgaacagtgcccttgaggggagatgtatcttcgagcttctttacaactatagcctcaaaggctttttaaagtaatctgcgtcatttcttaaaagcagcatggtttcctcacacttatctagtttaaatgggtcccgcttgtacaaaggcttccagaattcagtgctttttgtcacccgacaacctgatacaccgacctttgatcatcttgagatagatatatttttt

SEQ ID NO: 36768 - DNA, 661 bp, Gossypium hirsutum
  Clone ID: LIB3165-006-P1-K4-A8
cttttccacaaacctaatctgaaattcacttcttttgatcaaaactatttggtccaaaacttaaagtatccaaaaacctcaggaatcccattgttttccttttccattttttgtttgtttctaagggaaatgagggatgttttcatggttggcaaggatagctctggcttgttggagaccagtgagtcgatatgcccgtatgaacaaggattacaacaatagcaatagtgaggaacttgaagaagattcttcttctttacgtgactcgcttctttggtgtagagaccttgaaaaacactcttgtggtgatttttcatttgctgttgttcaagccaatgagatcattgaagatcatagtcaagttgagactggcaaagatgcaatttttgttggtgtctacgatggacatggtggccctgatgcttctcgctttatctctgatcatctctttcaaaatttgattacagggcttgctcgagcaaatggaaccatttcggaagatattcttagaaatgctttctccgcaaccgaagatgggtttcttgcgcttgtgcgtaggtcttgtggaataaaaccattaattgctgcaatcggatcttgttgtctggttggagttatatggaaggggacgttatatgtcgctaatttgggtgattctcga

SEQ ID NO: 36769 - DNA, 723 bp, Gossypium hirsutum
  Clone ID: LIB3165-006-P1-K4-A9
cccacgcgtccgcccacgcgtccgctcccttacagccaatctcctcaataccccatttttctggttcctttttcaagccattttacaggcacttcccagttgggagaaggggaaaatggcacagcttttagcaccctcaactcaatggcaaatgacactaccaaagacctcaacctatggaagtcccattgcaacaaaaatgtggagttctctggtactgaaacagaacaagaaaggagctgctaaaagctctggcaagtttaaagtggttgccttgtctgaaaacagcactgtcaacaggctagagaacttactaaacatggacgtcactccatacaccgacaagatcattgctgaatacatttggataggaggcagtggactcgatatgcgtagcaagtccaggacaatatcaaagccagttaaacatccctctgagcttcccaagtggaactatgatggatcaagtactggacaagcacccggtgaagatagtgaagttatcttataccctcaagcaatctttaaggaccctttccgaggaggtaacaatatcttggtaatttgtgattcatacacaccagctggtgagcctattcccacaaacaagcgccaccgtgccgctgagattttcaagaacaagaaggtggtcgatgaagtaccatggtttggtattgagcaagagtacactttactttaacaaaatgtgaaatggccttggga

SEQ ID NO: 36770 - DNA, 562 bp, Gossypium hirsutum
  Clone ID: LIB3165-006-P1-K4-B1
ccgaatctccgattttcccaagcatcgcgcatacgatcaggtcttttttctctgcactaagactcagagctactctcgtcctagttattttccatggcgattgagaaaattcttaaagatgatgctagtgaagagaagggggagcgtgccagaatggcatcatttgttggggcaattgcaattactgacttggttaagacaacccttgggccaaagggaatggataaaattttacagtcaactggcaggggaaatgaagtcactgttacaaatgatggagctaccatcttaaagtccctgcacattgacaacccagcggcaaaagttttgattgacatctccaaagttcaagatgatgaagttggagacgggacaacctctgttgtggttttggctggggagcttttaagggaggcagaaaagctagtggcagccaagattcaccctatgacaataatatcaggttatagaatggcagccgaatgtgctcgtaatgctttgttgcagagggttgtggataacaaagagaatgcagagaaattcaagtcagacttgatgaaaa

SEQ ID NO: 36771 - DNA, 639 bp, Gossypium hirsutum
  Clone ID: LIB3165-006-P1-K4-B10
ggtcaaagccctaagtatatgattcttttcatattttgccaaccaagagagggcagctcacgtactcatcaatcaccaaggctgtcgctgcaaggctactgggaaggatccagaatgtcgcgtcatctgcaccaccacccgagacgccggtgtctcacagcttaaacttctcggcgacgacatcgcttgcaacaaggctaagttcgacgaggttgcctctcgctactcggattgcagctccgctaaacgtggcggtgatctcggctgcaaggagtgtgcctcaactcagatcttattgttaattatctgtgacctttagttggtttataccagcattacgggacataatgcaaactaaaaaccttatacaaactttttggtggaggtccttttggtcgaggccagatgcaaaagccatttgaggatgcaacatataatcttaacattggcgagataagtgacattggggataccgatagcggtgttcacaatataatgcgaactggttaatcattattgatggagcctggatatcgggagcaattagttcagtcttctcggaaaattctatcgaagaacattctgaaatcacttctggtaatgcctatggcttatgtcatggcataattttgaaccctt

SEQ ID NO: 36772 - DNA, 627 bp, Gossypium hirsutum
  Clone ID: LIB3165-006-P1-K4-B11
ctcaattcccccacctcattgtaggcaaaatggccactgtttgtgcttcttctgccgttgcagccgttgccatctcatcccccagttcccagaggagtggatcagtagtgaggacaacaaaggcttctttccttacagggaagaaacttcgatcagtcaaaaagtacacaaaaccagcagcagtccgaaccgttccggtgtgtgcagtggctgaccccgaccgacctctttggttcccaggcagtactcctcctccatggctcgatggcagcctccctggagacttcggttttgatcctctaggccttggatcagaccctgagaccttgagatggaacgtacaggcagagctcgtccattgcagatgggcaatgttaggagccgctgggattttcatcccagagttcctaaccaaaattggcattttaaacactccatcatggtactctgctggaaccgaggaatacttcactgacaccaccaccctcttcatcgttgagcttattttcatcgggtgggcaagaaggagaagatgggctgacattctcaagcctgggtgcgtaaacactgaccccatcttccctaacaacaagctcacgggcaccgatgttgggtaccctggtgggc

SEQ ID NO: 36773 - DNA, 602 bp, Gossypium hirsutum
  unsure (1)..(602): unsure at all n locations; Clone ID: LIB3165-006-P1-K4-B12
cccacgcgtccgcccacgcgtccgatcactcccaatactttcataacatttcacgaacttcactctccagtctccaatggcggctgccgtctccaccatcggtgctgtcaaccgagcaccgttgagtttgaatggatcaggtgccggagcttctgctccaagctcagctttcatggggaacagcttgaagaaagtgagcgctaggttcaacaacaacggcaaggctccagtgggaagtttcatgattgtggctgccaaagaaatcgacgaagacacacagaccgaccaggaccgatggaagggtcttgcttatgatatctccgatgaccaacaagacattaccagagggaaaggtatggtcgactcattgttccaagctcccatgaacgatggtactcactatgctgtcatgagctcctatgagtacattagccaaggccttcgcacatacgacttggacaacaacatggatggattctacattgccccagctttcatggacaagcttgttgttcacatcaccaagaactacatgacccttcctaacattaangggttctctatcttgggtatttggggaggcaaaggtcaaggaaaatctt

SEQ ID NO: 36774 - DNA, 361 bp, Gossypium hirsutum; identical to SEQ ID NO: 36696
  Clone ID: LIB3165-006-P1-K4-B2

SEQ ID NO: 36775 - DNA, 636 bp, Gossypium hirsutum
  unsure (1)..(636): unsure at all n locations; Clone ID: LIB3165-006-P1-K4-B4
ctcaacattcccatttccaatctccagctcccaaggtaaatatgccgatcagaaacatagcggttggccggcccgaagaggctactcaccccgatgctctcaaggctgctttggctgagttcatctcaaccttgatcttcgttttcgctggatcgggctcaggaatggcctttaacaagtggactgacaacggagcaaccaccccggctggtctcgtagccgccgctctagctcatggcttcggtcttttcgacgctgtctccgttggcgccaacatctcaggtggccacgtcaaccctgccgtcaccttcggtgcttttgttggcgggaacatcactctcttgcgcggcattctttactggatcgcccaactcctaggctcaaccgtcgcttgcctgttgcttaagttcgctaccggcgacctggctgtacccgcttttgggttgtcatcaggtgtgggcgtgtctaacgcattggttttcgaaatcgtgatgaccttcggattggtgtacacagtgtacgccacaagacgtgatcccaaaaagggaagcttgggaacaatcgcaccattggncaatggtttcatcgtggnggccaacattttggcagggggtgccttcgatggaacctcaatga

SEQ ID NO: 36776 - DNA, 531 bp, Gossypium hirsutum
  Clone ID: LIB3165-006-P1-K4-B6
cttacctcccgatccaaccacaaccgccaggtccgtgctgctgtcgttgaaacaatggtgaccgccgccgagacttccttggtcgtgaaatccgccaacaccatcagattcttgtctatcgatgcggacgtgaaggcgaattcaggtgatgctgggttgcccatgggctgagctcccatgggtcacattgtgtacgatgaagtgatgacgtataaccgcaagaacccttactgcttcaaccgtgaccgcgtcattctgtccgctggacatggttgtatgctgcaaaatgctctgctctacctggatgggtacgacagagtcctggaagaagatttgaagagatgacgacagtgagtaagcagaacccgtggacatgccgagatctttgaaacaccaagagctgacgtcacaactgggcctatgggtcagggtatcgcaaatgctgcatggatggctatcgctgagaaacacatggctgctagattcaacaagccagacaatgagattgttgatcactacacatatgttatc

SEQ ID NO: 36777 - DNA, 590 bp, Gossypium hirsutum
  Clone ID: LIB3165-006-P1-K4-B7
cccacgcgtccggccacccttccctgatttcatttcttctgtactcacagtaatcacctctccaaaaccctagctctttcactcactgccgccaatttcaaccaattatttgcttataagcgtcgaaaacgatgtcggacgacgagcgagaggagaaggagttggatctcacctcccctgaagttgttactaaatacaagagtgctgctgagatcgttaacaaggctttgcagttagttgtaaaagaatgcaaaccaaaaactaagattgttgacatttgcgagaagggtgatgcatttatcagagagcaaacaggcaatatgtataagaatgctaagaggaagattgagaggggtgttgccttccccacttgtctttctgttaacaacactgtttgtcatttctctccacttgctagtgacacctccgagctgcaagaaggtgatatggtgaagattgacatgggttgccacattgatgggtttattgctgtagttgcgcacacccatgttgtccaggaaggactagtcaatgacaggaaggctgatgttatggctgctgcaaataccgccgcagaagttgcattgagg

SEQ ID NO: 36778 - DNA, 671 bp, Gossypium hirsutum
  unsure (1)..(671): unsure at all n locations; Clone ID: LIB3165-006-P1-K4-B8
cccacgcgtccggagaagaaaacaatgtcaggtcctcagtgctgttcgaatccaccaacattggattctgcaagtggggctggtcacgttgagaatcttgctggtctcaacacttatgtttctgggtctcttcaatctaagcttgctgtttttcttatctctgatattttcggatatgaggctccaaactttagaaagctcgcggacaaggttgcagccgctgggttctatgtggtggctcctgacttcttttatggagaaccctatgaccctaataaccctgatagacctctatctgtttggataaaggatcatggaccggataaaggttacgaggatgcaaagctcgtaattgacgctttgaaaagtaaaggggtttcatccattggagctgctgggttctgttggggtgctaaagttgtggctggactggctaaagatccccttatccaagcagctgtaatgttacatccttcatttgtgactgtggacgatatcaaaagtgtgaaggtgcccattgcgatattgggagctgagcatgaccatatatctcccccagagcttttaaaacaggttgatgagatcttaaaagcgagtgaggttgatagctatgtgaagatatttnctaaagttgcccatggatggtcggtgagatatgatgtcaatgatct

SEQ ID NO: 36779 - DNA, 730 bp, Gossypium hirsutum
  Clone ID: LIB3165-006-P1-K4-B9
cttaaaaacagcaaagaagatgtcatcatcaacggcggccaatcaagtgagggcatctcacatactcatcaatcaccaaggctctcgtcgtaaggcttcttggaaggatccagaaggtcgcgtcatctccaccaccacccgagacgccgctgtctcacagcttaaacttctcggcgacgacatcgtttccaacaaggctaagttcgacgaggttgcctctcgctactcggattgcagctccgctaaacgtggcggtgatctcggctgcaaggagtgtgcctcaactcagttcttattgttaattatctgtgacctttagttggtttataccagcattacgggacataatgcaaactaaaaaccttatacaaactttttggtggaggtccttttggtcgaggccagatgcaaaagccatttgaggatgcaacatataatcttaacattggcgagataagtgacattgtggataccgatagcggtgttcacatcataatgcgaactggttaatcattattgatggagcctggatatcgtgagcaattagttcagtcttctcggaaaattctatcgaaaacattctgaaatcacttctgataatgcctatggctaatttcatggcataatttttggacccctttggttttggtgtgaaattgacttgccagttataataaacaaatattgggtgaactaaatttctctggcttcttctcttctctttatctcc

SEQ ID NO: 36780 - DNA, 608 bp, Gossypium hirsutum
  Clone ID: LIB3165-006-P1-K4-C10
aagaaatcaaaagacaaaatagccaataacaatggcactcagaatgtgggcttcttccactgccaatgcactcaaaatctcttgttcctccaaacctaatgtttcccttgctttctcactctctagatgcttttccactgttttggatgggctgaagtatgctaattcacatgaatgggtgaagcatgaaggtcctgtggctaccattggcatcactgaccatgctcaggaccatcttggagaagtagtgtttgtggagttgccggaaccaggtggttcagtgagccaaggaaaagggtttggagcagtggaaagtgttaaagcaacaagtgatatcaattccccaatctccggcgaagtcgtggaggttaactccaagctgtccgaaactccgggcctgatcaactcaagcccatatgcagatggatggatgatcaaagtgaagccaagcagtccatcagagttagaatcattgatgggtccaaaggaatacaccaaattctgtgaggaagaagatgcttcccactaagaaaccattgtacccttattttcaaactttgtgttcaagaaataaggtttattgcaattttaatgttatgtctatttat

SEQ ID NO: 36781 - DNA, 599 bp, Gossypium hirsutum
  unsure (1)..(599): unsure at all n locations; Clone ID: LIB3165-006-P1-K4-C11
cccacgcgtccgattcaaggcacaaaatttgacccaaaatggcctctgtttgtgcttcttcggctattgcagctgttgccatctcatcccccagttcccagaagactggatcagtagtggggacaacaaaggcttctttccttacagggaagaaacttagatctgtgagaaagtacacaaaaccagctgccggaccaacatttccagtgtgcgccgccgccgaccccgacagacccctttggttcccaggcagcactcctcctccatggctggatggcagtctccctggtgactttggtttcgatcctctcggtcttgggtctgaccctgagacattgagatggaacgtacaagcagagctggttcactgcagatgggcaatgttgggagctgctggtattttcatcccagagttcttaaccaagattgggattttaaacactccatcgtggtactcagctggaacagaagaatacttcactgacaccacaactctcttcatcgntgagcttatttttatcggctgggctgaagggagaagatgggctgacattctcaagccagggtgtgtaaacacagaccccatcttgcctaacaac

SEQ ID NO: 36782 - DNA, 432 bp, Gossypium hirsutum
  Clone ID: LIB3165-006-P1-K4-C3
caaaaagaacactcggaaggcattcgaacatacagaaacacacgtaccccagccagaacaagaaaacaagtagtgtattaattaacagaagctgcatattgtagagaaacacaatagttacttgccatcaatggaagctgcaaggaaatttctctctcttcctccatctttttctacgagaacccaacttaagaattctgtctcttcatcaccatcttcttcagtttcaatgtttcacgagcaagcggctgctgctgctgcaacatctattccgattaattcggtagctaggcattttcctacatcagttctctcacaagagcagcgcgatgactgcagacctctgcctatcttgcaatactttaagggagataaagcatattcagggccaacagacaaacagcaggttgagaatgggacaacacttcatga

SEQ ID NO: 36783 - DNA, 235 bp, Gossypium hirsutum; identical to SEQ ID NO: 36630
  Clone ID: LIB3165-006-P1-K4-C5

SEQ ID NO: 36784 - DNA, 564 bp, Gossypium hirsutum
  Clone ID: LIB3165-006-P1-K4-C6
caacaatgaaacaccattgttttctcctctaaatcttctccccactatctctcttcttttactttatttctctctttttctcatttcttttgtgtataattgttactcgctgaattatatatacaaatatatatataattgaaaacatttcattcgttaatttatatagctagccatgagatcgtttttaaagtttgtttcacgttgcgttaaaaaccctgaagtgtccacgacagaagagatggtggtgacggctcctgggagggaggaaacaaggtcttttatggctcctaaaatggtggcactgaagaagaagaagaagagggtaaaggtggggacgccattctctacgactcctgagtggaaaccttcgttgtatgtaatctcggaggataacgttttggcggagaagagagagaaaacaacgccggaagcttcaacaacgccggctgatagagcggtgaagaggaagagtggagcagggtcacgctccaaagttcacgttcgaagctacagcgacgacatcgggcgaaatcaagaaccagggtcatcccaacattttct

SEQ ID NO: 36785 - DNA, 679 bp, Gossypium hirsutum
  Clone ID: LIB3165-006-P1-K4-C7
cccacgcgtccgtctggtttcactgtcagagctcatcagacaccggccgagcctgagactggacgcagagccatgttgggtcttgttgctgctggtttggccactggctcctttgttcaagctgtgcttgccgatgccagaagcatcaaggttggcccacctccccctccctctggtggactgcctggaactctgaactctgatgagccaagagaccttgttctgccatacaaagacaggttcttcctccaaccagttactccagctcaggcagcacagagagcaaaggaatcagccaaggacattctgggtgtcaagaacttgattgacaaaaaagcctggccttatgtcatgaatgatctccgtctcaaggccgagtatctccgctatgacctcaacaccgtcattgctgccaagtccaaagatgagaagaaaactctaaaggacctcaccaagaagctcttcagtaccatcgatgatcttgaccatgcagccaagatcaaaagcacccctgaagcagagaaatcttacgctcagaccatatctagtctgaatgatgttcttgccaaactgtgctaaaagaatgcttaattgtattttgatgtaagatagctttggtcatcgtttgtagacacactttcatttttatgctatctgaaagaacctttaccacttaacg

SEQ ID NO: 36786 - DNA, 523 bp, Gossypium hirsutum
  unsure (1)..(523): unsure at all n locations; Clone ID: LIB3165-006-P1-K4-C8
cggacgcgtgggttagctatagcatacactactagtacccactactagcaatggcttnctcaatgatctcatcggctaccattgccactgcctctccggcacaggctaacatggtcgctcctttcaccggtctcaagtctgcctctgctttcccagtcaccaggaaggccaacaacgacattacttctctcgcaagcaatggcggtagagtgcaatgcatgcaggtgtggcctcctactgggaagaagaagtttgagactctctcatacctccccgatcttacacccgtgcagttggctaaggaagtagattaccttcttcgctcaaaatgggttccttgcttggaattcgaattggaggagggattcgtgcaccgtaggtactcgagcttacccacgtactacgatggacgctactggaccatgtggaagctgcccatgttcgggtgcacccgactcgctcangtgttggaggagcttgaggaatgcaagaagcataccccaatgcattcattagaaatcat

SEQ ID NO: 36787 - DNA, 547 bp, Gossypium hirsutum
  unsure (1)..(547): unsure at all n locations; Clone ID: LIB3165-006-P1-K4-C9
cccacgcgtccgaaggacttgatggggaagtccctaatgaagcgtgtgatgcagacctggcttcctgcaagcaatgctctcctggaaatgatgatctttcaccttccctcacctagcaaggctcagaagtatcgtgttgagaacttgtacgagggtcctcttgatgatatctatgccaatgctatcagaaactgtgatcctgagggtcctcttatgctctatgtttcaaagatgattcctgcttctgataagggcagattctttgcttttggtcgtgtcttttctggcaaagtctcaactggattgaaggttaggatcatgggtccgaactatgtccctggtgagaagaaagacttgtatgttaagagtgtgcaaagaactgtcatttggatgggaaagaagcaggagactgttgaagatgtaccttgtggtaacacagttgccatggttggtttggatcagtttatcaccaagaatgctactntgacaaacgagaaggaagttgatgcccacccaattcgtgcaatgaaagtttccgtctcccctg

SEQ ID NO: 36788 - DNA, 653 bp, Gossypium hirsutum
  Clone ID: LIB3165-006-P1-K4-D10
aaaaatacctgtggctctcactctccttaaacatgtcaagaaatcaaataaggtgttcactaggatcatcattatcaacaacacccaaaaaagctgtaccgtgaccaccaccttaacaatgaatgacacagtggacaagcttgtgatctttctagccaagagagatggcattgacaagcttgtgaagaccttacaatacgtgtttaagcttgttaactggcaagtagaaaccacacacccagacctagcaaacaggttcaaacaatgggaggtctcctccggtcttagcagaaaagcctttagaacaggcaggttcctcactggtttcaatgggttgagaaggaaccctggtgccaccccaacattcaagttcctagctgtacttgctaatgcaggagagatggtgtatttctttttcgaccactttctatggctatcgaggattggaacattggatgccaagttggctaagaggatgagcttcgtatctgcatttggtgagtcattcggttatattttcttcattgattgagatttgatcgtcatgaaacaaggcgttgaggccgaaaggaagctcatggctttacaagaagaagaagaaaattcaaacgatgcaaaagagaagataagaaagataagaggggatagggtga

SEQ ID NO: 36789 - DNA, 296 bp, Gossypium hirsutum; identical to SEQ ID NO: 36635
  Clone ID: LIB3165-006-P1-K4-D11

SEQ ID NO: 36790 - DNA, 651 bp, Gossypium hirsutum
  unsure (1)..(651): unsure at all n locations; Clone ID: LIB3165-006-P1-K4-D12
aaaatctcaaacccagatttgttctctctctctctctctctctatttccaatcaattaattcctccattggaggagcttagggtttgttggtgttctggtctttgctttgtctgaaaaataaacagaattataaacgaacaccaacgccatgggaagatttgaagagagaggattcgattcagtggtttgccctaagcctatccgaacctttagatggtccaccaactgttatcagactgagatggctgattcaaaaactggtgcagagcttcttgatataatcctccccgagggagggtatggggccgagaatcccaccaaccaaatggcttcatcaccaccgtatttctgtggatcaccgccgagcagggcgtcgaatccggtaatccaagatgcccgattcaacgacgagcagccggtgctacctccactaacatccccagcaacctcctcaaggggaggatgcgtgagggtgaaattcgggcagatgccagctgctgtacgaatcgagggatttgattgcctcaccagagatggccgncatcgcagcatcttcgncgtggcttaaaaaaaaccaagatatgagaacaaaaatgtgagaggagagagggagatgataaaaataaataacaacttggaatagtgtgggt

SEQ ID NO: 36791 - DNA, 497 bp, Gossypium hirsutum
  unsure (1)..(497): unsure at all n locations; Clone ID: LIB3165-006-P1-K4-D2
cccacgcgtccggcagctgttgccatctcatcccccagttcccagaagactggatcagtagtggggacaacaaaggcttctttcctttcagggaagaaacttagatctgtgagaaagtacacaaaaccagctgccggaccaacatttccagtgtgcgccgccgccgaccccgacagacccctttggttcccaggcagcactcctcctccatggctggatggcagtctccctggtgactttggtttcgatcctctcggtcttggttctgaccctgagacattgagatggaacgtacaagcagagctggtgcactgcagatgggcaatgttgggagctgctggtattttcatcccagagttcttaaccaagattgggattttaaacactccatcgtggtactcagctggaacagaggaatacttcactgacaccacaactctcttcatcgntgagcttatttttatcggctgggctgaaaggagaagatgggctgacat

SEQ ID NO: 36792 - DNA, 560 bp, Gossypium hirsutum
  Clone ID: LIB3165-006-P1-K4-D3
atataccagaaaatcaaaaagaagaagaaaagagatccccatgatgtctcttacaatcccaactaatctctcaaaatcaattttgaagccaaagctggagacccaagtgatccccaaggcttcatccagatcattgattgtatgctcctccagcaatccttcctcctccgacaaatcggcttcatcactccaggccttctcagcggctctcgctctttcttccatccttctttcggctccactccctgctgttgcggacattgcggggctcactccttgcaaagagtccaagcaattcgccaagcgcgagaagcagcagatcaagaagctggaatcctcgttgaagctttacgcccccgatagcgcaccggctctcgccatcaaagccaccatcgagaaaaccaagagacggttcgacaactacggcaagtacggcttgctctgcggctccgatgggttgcctcatttgatagtgagcggcgatcagaggcactggggtgagttcatcacgcccggcctgttgttcttgtacatcgctggatggatcgggtgggtcggaa

SEQ ID NO: 36793 - DNA, 388 bp, Gossypium hirsutum; identical to SEQ ID NO: 36715
  Clone ID: LIB3165-006-P1-K4-D4

SEQ ID NO: 36794 - DNA, 634 bp, Gossypium hirsutum
  unsure (1)..(634): unsure at all n locations; Clone ID: LIB3165-006-P1-K4-D6
cccacgcgtccgctttgttccacctctttctttctttttctccaaagccatcatgaatctcattaataggctcagccccaagcgtctctttcgatctaataaaaaagatagatccatcgtctccaagttcgacccctcctcctatagttccggttccgccgtttcctcctcttcctcctccgaatccgtctcttccaccctcaaagaacatcagtacccttccacggctaccgctggcttcgtaacgcccaccagtgttttgccccaaacatcaggtgactggtccgattttcccgctaatttttatctagaactttgccaggcgtttaaaatgttagacaaagataacgacggggttatatcgagaagcgagctcgaggctttgcttggcaaggtcgcaaggcagccgcccagccgggacgaggtttccttgatgttgagcgaagtggacggtgacggcgacggctacatcaacctggaaacgttgatgaaccaggtggttggaccggcttgcgacgaacccgcctgcgaaccggaactgaaggagacttttgatatatntgacacagatcatgacgggaagatcacggcggaggagttgatggcgttttttaagacaaaatangggatgagc

SEQ ID NO: 36795 - DNA, 666 bp, Gossypium hirsutum
  Clone ID: LIB3165-006-P1-K4-D7
cccacgcgtccggccggtgcaaccgcagctaaagttagcgccacagccaaggttgcagcctctccagtcccaaggggcagcatcaaggcctccctcaaagacgttggtgttgctgttggggcaactgctgcaagcgtaatccttgccagcaatgccatggccattgaagtcttgctcggcagtgacgatgggggtctggctttcattcccaaagaattcagcgtaagcccaggggagaagattgtgttcaagaacaatgccggattcccacacaatgttgtgttcgatgaggacgaaatcccaagcggcgtcgacgtatccaaaatctccatgcctgaagaagagctactcaatgccaaagacgagacttacgctgttaccttgactgagaaaggaacctacagtttctactgttctcctcaccagggtgcaggtatggttggaaaagtcacagttaactgagttatacatttatcttttcaacccctttgtgctttgtatgtatcatctcacacatctcttctactttttgagcactagagttttgagtattggggatggatgaggtgatcttgaaaaatcaactatgatgcttttggatcttcctatcttgtactttaaatttggctcatatttgcttggaacccggttttaattttacccttc

SEQ ID NO: 36796 - DNA, 643 bp, Gossypium hirsutum
  Clone ID: LIB3165-006-P1-K4-D8
cccacgcgtccgattaaaataggagactccgcccatttttcttcattttcctccaaccataatcattatatttatatttcttcctctctcttctttatttcttcaagtttaaggcctcaaaatggaggcagccactgtggttggatcttctatgtctctacatcgaacttcatgctccgctgccagatccgcccttttagctgccaatggcccgctctttccacgtttcgctgctaaccctcgctcctccttctcgatcaagctttattcttcagtttcatattcaaaatcacggaataggagaatgggtttggggggtaggagaggcatggtggtaaaggcgtcttcatctcctgactcagctgaacccaatgctcaaattgcgtcacttcggatggaatctccaattggtcagtttttgtctcaaatcttgataagtcatcctcatcttgttcctgctgcagttgagcagcagcttgaacaacttcaaactgaccgtgatactgatgaaaagaaagaagagccgtctgcttcaggcacggatttagtatttgataggagaattgctgagggtaaagctaatgagcggaaaagggcattagaagagattctctatgcattggtcgtacaaaagtttatggat

SEQ ID NO: 36797 - DNA, 563 bp, Gossypium hirsutum
  Clone ID: LIB3165-006-P1-K4-E1
gtggattgaagtgaagaaagaaacaaccaccgaaaatgtcggcagcgcttcctccaccagcttcatctctcaaactaacggcgacaacctctttcccatccccacgggcactcttcctcgctttacgcaaaccccaaatttccattatcccgcgtgccactcctgactccgacgctgactcatcaaccgaacccgactccgccccctcctcggacacctcagccgaatccgacccattcgaatcccgtctctcccaagtccgcctccgttaccgaatcggagccggcaagaaagcggagcgccgaaaatcaaagaaatccggatccgtgtccacttcgttgtcttcctcctccatctacctccctccggtgcctttaaaagaggcgatttcaaatgggttgaaagtggatttcgggtttagcccatatggcgagagaataaacggacggatcgcgattctcgggttgacggctttggttttagtggaattggctacgggtaagagcgcgataagttatcatacgccagcaattatctttattcagatttattttgtagctgca

SEQ ID NO: 36798 - DNA, 661 bp, Gossypium hirsutum
  Clone ID: LIB3165-006-P1-K4-E10
cccacgcgtccggatgtcttggttcatggagagcctgagagaaacgatatggttgagtactttggtgagcagttgtctggttttgcattcactgttaatggatgggtgcaatcttacggatctcgatgtgtcaagccaccaatcatctacggtgatgttagccgccccaagccaatgactgttttctggtcatctaccgcacaaagcatgactgcacgcccaatgaagggaatgcttactgggcctgttaccatccttaactggtcctttgtcagaaatgatcagccccggtttgagacttgctaccagattgccttggccatcaaggacgaagtggaggatcttgagaaggccggtatcaatgttatccaaattgacgaggctgctttgagagaggggttgcctcttagaaagtcggagcacgccttctacttgaaatgggctgtccactccttcagaatcaccaactgtggtgtacaggacactacccagatccacactcatatgtgctactccaacttcaatgacatcatccactcaattatcgacatggatgctgatgtgataaccatcgagaactcacgttcagatgaaaagctcctttctgtattccgtgaaagagtgaagtatggtgctggaatcggccctggtgtctatgaca

SEQ ID NO: 36799 - DNA, 559 bp, Gossypium hirsutum
  unsure (1)..(559): unsure at all n locations; Clone ID: LIB3165-006-P1-K4-E11
gtagccgccgcctgcgtctctctcttcatctctctgaaccaaaaagtctttagcttttcgcttcgagagagaccatgttggtttaccaggatctcatctccggtgacgagcttctttctgactcattcccctacaaggaaatcgagaatgggatgctgtgggaagttgagggaaagtgggttgtgcaaggagctgtcgatgttgacattggtgccaatccttcagccgaaggtgctgatgaggatgaaggtgttgatgaccaagctgtgaaggttgttgacattgttgacactttcaggcttcaggagcaaccccctttcgacaagaagcagtttgtcgtgttcatcaagaagttcatcaagaacttgacaccaaaactggatgcggaaaagcaagagtccttcaagaaaaacattgagggagcaaccaagtttttgctttcaaaattgaaagaccttcaatttttcgtaggagagagcatgcatgatgatggatgcttggtgtttgcttactacaaagatggtgctgntgacccaacatttttgtactttgcatatgc

SEQ ID NO: 36800 - DNA, 586 bp, Gossypium hirsutum
  Clone ID: LIB3165-006-P1-K4-E2
cttcctcctcctttcctccgtcgttgcttcggccgtcgtctccgacgttaatagcgacggcgatcctctcatccgtcaagttgtttccgatggtggtgtcgaggaggactccgatgaccatctccttaacgcggagcaccacttcacgctgttcaaatccaagtatgggaaaacctacgcatcccaggaggagcacgattaccgactgggagtcttcaaggctaacctgcgtcgggccaagcgtcatcagctcctggaccccagtgccgtccatggcgtcacaaagttttccgatttaactccatcggagttccgccgccagtatctaggcttgaaaccgctcaagctcccagccgatgctcaaaaggctcctatccttccgactgacaacttaccggatgactttgactggcgtgaccacggcgccgtcactggcgttaaagaccagggttcctgtggatcgtgttggtcgttcagtgcgacgggggctttggagggagcccattatttggcgacaggagagcttgtaagcttgagtgagcagcaacttgttgattgtgatcacgagtgtgatccacaacaatat

SEQ ID NO: 36801 - DNA, 489 bp, Gossypium hirsutum
  Clone ID: LIB3165-006-P1-K4-E3
aacaacatggatggattctacattgccccagctttcatggacaagcttgttgttcacatcaccaagaactacatgacccttcctaacattaaggttcctcttatcttgggtatttggggaggcaaaggtcaaggaaaatctttccaatgtgagcttgtctttgccaagatgggaatcaaccccattatgatgagtgccggagaattggaaagtgggaacgccggagaaccagccaagttgatcaggcaaaggtaccgtgaggccgccgacattatcaagaaagggaaaatgtgttgcctctttatcaacgatctcgacgctggagccggtcgtatgggaggaaccacacaatacacagtgaacaaccaaatggtgaacgccacactcatgaacatcgctgataaccccaccaacgttcagctccccggtatgtacaacaaggaagagaaccctcgtgttccgatcattgtcaccggtaacgatttctcg

SEQ ID NO: 36802 - DNA, 539 bp, Gossypium hirsutum
  Clone ID: LIB3165-006-P1-K4-E4
taagattatggtgaaaaactaaacataataaagtccctcataacattcttcgacttgcttcattgattagcccaaagataaacataaccaaaaagaaaaatggcttctgcttccgctactctcctcaagtcttcacctattatcgacaagtccgagtggattaagggccaaaacctccgccacccttcggtttgttttgtacggtcacaccctacatcggccgcctttaccgtccgtgctagttcatatgccgatgagcttgttaagaccgcgaaaactgttgcatctccaggtcgtggtattttggccatggatgaatcaaatgctacatgtgggaagcggcttgcctcgattggtctcgagaataccgaggcaaaccggcaagcttaccgtacccttctcgtgtctgcccctggcctcggtaactacatctcgggagctatccttttcgaggagactctctaccaatctaccatcgatgggaaaaagatggtcgatgttcttgttgagcaaaatattgtccctggtatcaaaagtga

SEQ ID NO: 36803 - DNA, 629 bp, Gossypium hirsutum
  Clone ID: LIB3165-006-P1-K4-E6
aataaattagtgtgttatctttctccccctaatctctatctccatggcggataaaacgagagcctcaccttaccactctcatttcttccaactcccttcttcttcttcaatttgatctatctgtttctttcttctttgcttcttttcaagctctattattataacagctacctctgcttcttcttcttcttcttttcaattgccattagtttgattgtagctatggcttctgctgctaactgtgtagtgtattttagcagcaacactaactaccttactgtctcagaactaaaaaaccattctttgcctgctacctttgtcagcagaccacccaacaattacactcttgggaaaagaagtcattacagtgtcagattgttatcttcaacgacgggaatcaatccacgggcagcagcaccatcagccactgctgtagagaatgatggaagtttccccgacactgatatggttccaacccccaaagttataattgatcaagactcggatccagatgccactgttgttgaaattacctttggcgatcgactcggagcgcttcttgatactatgaatgcacttaaaagtctcgggttgaatgttaccaaggcaaatgtctatttggattcatc

SEQ ID NO: 36804 - DNA, 624 bp, Gossypium hirsutum
  Clone ID: LIB3165-006-P1-K4-E8
cggacgcgtgggcggacgcgtgggttttcattttcaaaccccactccccccatggctggtctcaagcttatttgtggcctagtattgttgtgcatgttggttttggaacccatggccacaactgctctcacatgtggacaagtggcaagccaaacgggtagttgtataaggtatttgcagcgtggagggaaccctccagctgcttgctgcaacggagttaggaacctaaacaggcaagctagaaccacccgtgaccgtcaaactgcatgcagatgcttgcaaactgccgctaggaccatctccggtatcaatactaaattggctgccggtcttccggccaaatgcggtgtcaaaattccttacaagatcagcccctccaccaactgcaatagagtgagatgatcatggatgaagtaagcagcttgcaggaaatgttatatatatatatatataagcgtgaaataaagattttgggatggatgcttattccaaaatccaaattagtgtcttgattaattatttgtttatctttgagatgttggctctaattatgttgtctatgtatggaatgttcaatgttttatgaggtaaaaagcctatgttttattataatacatgatatct

SEQ ID NO: 36805 - DNA, 515 bp, Gossypium hirsutum
  unsure (1)..(515): unsure at all n locations; Clone ID: LIB3165-006-P1-K4-E9
gaaagagcttcttcactttgacaacaatactcactttctcttacagagattgagagaaaatcacaaacacacatttatatagcacagtgatcatcatggctcttcacttgtcttgggttttcgtttttggtattctaggcaacgctgtttcattcatggtttccttggctccactgccaacattttaccaaatattcaagaagaaaacatcggaaggtttccagtcgattccctacgtggtttcgctcttcagtgcgatgctttggatttactatgcactgcttaagaaagatgccattttcctcattaccatcaacactttctgcgttttcattcaaactttttacattgttacttacttttactacggcccaaagaaagaaaagatcgtcacggtgaagcttatgcttctcttcaacgttttcgggttcggagttatctttctcgcaacttacttcctaaaaaaacccttcccttcgtctnctgattttgggttacatttgcatggcattcgc

SEQ ID NO: 36806 - DNA, 602 bp, Gossypium hirsutum
  unsure (1)..(602): unsure at all n locations; Clone ID: LIB3165-006-P1-K4-F1
ttcaattttcactagctacttgacttcattgcttaattattatttgcagaaagatggattcaattaaatcgcatgcagtatgtcttccaagcccagcacaaggtcatattaaccccatgatgcaactggccaagctcttgcactctagaggcttccatataacctttgtcaactccgagttcaatcatagacgatttatacggtctagaggggaagaagctgttaagggtctgcctcatttccggttcgaagccatacccgacgggctgccaccttccgattctgatgcgactcagtctgttccggcactatgcaattccacacggaaaaattgtttggctccattcttggagctactatctaagcttaattcctcaccccacctgccgcctgttacatgcatagtttgtgatggaaccatgaactttggtaccaaggcagctcaactcattggggtgccttatgttcaactctggacttcttcaaccgttagctttctgggatttctgcactacaaagaactagctcaaagaggcattgttccattcaaagatgaacgcttntgtagcgatgggacacttgagatgcccattgattggatc

SEQ ID NO: 36807 - DNA, 666 bp, Gossypium hirsutum
  unsure (1)..(666): unsure at all n locations; Clone ID: LIB3165-006-P1-K4-F10
cccacgcgtacgattccttccacccgcctgcttggttccacctgtttctttctttttctccaaagccatcatgaatctcattaataggcatcagccccaagcgtctctttcgatctaataaaaaagatagatccatcgactacaagttcgacccctcctcctatagttccggttacgccggttactgctcttgctgctgcgaatccgactcttccaccctcaaagaacatcagtacccttccacggctaccgctggcttcgtaacgcccaccagtgttttgccccaaacatcaagtgactggtccgattttcccgctaatttttatctagaactttgccaggcgtttaaaatgttagacaaagataacgacggtgttatatcgagaagcgagctcgaggctttgcttggcaaggtcgcaaggcagccgcccagccgggacgaggtttccttgatgttgagcgaagtggacggtgacggcgacggctacatcaacctggaaacgttgatgaaccaggtggttggaccggcttgcgacgaacccgcctgcgaaccggaactgagggagactgttgatatatttgacacagatcatgacgggaagatcacggcngaggaggtgatggcgttttttaaggacaaaataggggatgagcggtgcacgttag

SEQ ID NO: 36808 - DNA, 632 bp, Gossypium hirsutum
  unsure (1)..(632): unsure at all n locations; Clone ID: LIB3165-006-P1-K4-F12
cccacgcgtccggagactcttttgtatacctgtagcatatagtaatagtaagcagtaatagcaatggcctcctccatgatctcatcggcaaccattgccaccgtgaaccgctcctccccggcacaggccaacatggtggcccccttcaccggcctcaaatctgcctctgctttcccagtcaccaggaaggccaacaacgacatcacttctcttgcaagcaacggtgggagagtgcaatgcatgcaggtgtggccgcctcttgggaagaagaagttcgagactctctcatacctgcccgatcttactcccgtacagttggctaaggaagtagattaccttcttcgctctaaatggattccttgcttggaattcgaattagaggagggattcgtgcaccgtaagtactcgagcttacccacgtactacgatggacgctactggaccatgtggaaactgcccatgttcgggtgccaccgactcgctcangtgttgaaggagcttgaggaatgcanganggnataccccaatgcattcattagaatcattgggttcgacaaccgtcgtcaagtgcagtgcattagtttcattgcctacaagcctgaagctactaagttgttactttcctctaggaa

SEQ ID NO: 36809 - DNA, 642 bp, Gossypium hirsutum
  Clone ID: LIB3165-006-P1-K4-F2
gtttcccatgaaagtagccaaggaagggttgatgaccatccttcttttagaccccatttgccacctgaattctacaagaaacctactgtgaaagtctattgcaaagctgatcctaattttcatctcaccatcagagacggtaaagttattcttgctccatctgatccctctaatgaattccagcactggtacaaagatgagaagttcagcacaagtgtgaaagatgaagtgggtttcccaagcttttctctggttaataaagccactggtcaagccattaaacattccattggagcttcttatcctgtccaactggtaccttacaaaccagatcatcttgatgagtcagttgatttcaggtgctctgatgtgtcctccaccgttgatgcatcactcaccatggtcatgggagacgacatggttaaagtgattgcttggtacgacaatgagtggggttactctcaaagagttgtagacttggctgacattgttgccaacaactggaagtgattcgaaatacttgtctgcagtgtgatatggttaatttttgctcacctcatttcttttcggctttcatcaaaaatgtataattttaacgtggactgtatgcaataaaaatcgtgcttgcactttgatggcctt

SEQ ID NO: 36810 - DNA, 533 bp, Gossypium hirsutum
  Clone ID: LIB3165-006-P1-K4-F3
agcacttctatttgatgattaattagggttttagagctttcacaattgtttaggaatttgagagtttatgttggagaagaagaggggctcaagaattagagctttcatgagtgatatatacttggggatttcttttgtcattaatttgggtttgcttattgctctttgattttgagcaagtacttgctgatttcttgctgcattgaagaattagaggtttcaagcctggatttggagaattcaggcttttccctcattggcaagttcttccattgttcttgtcataggaacgacgaacgagcaaagcgattaatcttacttctggattgtacttgatttacatattattggggtttgatcggttaaccaaaatagggtgactggatgctgaacgccagagatttgcttgcttggctacttaacttgatgctgtggatatatggtctccctaaatattctggaattccttctattgctatgggtgtttgaggactattaatttctttgcagctggtgcttaacatcggaaatta

SEQ ID NO: 36811 - DNA, 601 bp, Gossypium hirsutum
  unsure (1)..(601): unsure at all n locations; Clone ID: LIB3165-006-P1-K4-F4
tttagctatagcatacactactagtacccactactagcaatggcttcctcaatgatctcatcggctaccattgccactgcctctccggcacaggctaacatggtcgctcctttcaccggtctcaagtctgcctctgctttcccagtcaccaggaaggccaacaacgacattacttctctcgcaagcaatggcggtagagtgcaatgcatgcaggtgtggcctcctactgggaagaagaagtttgagactctctcatacctccccgatcttacacccgtgcagttggctaaggaagtagattaccttcttcgctcaaaatgggttccttgcttggaattcgaattggaggagggattcgtgcaccgtaagtactcgagcttacccacgtactacgatggacgctactggaccatgtggaagctgcccatgttcgggtgcaccgactcggctcaagtgttggaggagcttgaggaatgcaagaaggcataccccaatgcattcattagaatcattggcttcgacaacgtgcgtcaagtgcagtgcattagtttcattgcctacaagcctncaggcttctaagctttttattaactttgtctct

SEQ ID NO: 36812 - DNA, 651 bp, Gossypium hirsutum
  unsure (1)..(651): unsure at all n locations; Clone ID: LIB3165-006-P1-K4-F5
cgggaagctgcaaatgtatttggaaagccaaaaacaaacacagagttcatcccatacaatggggaagggttcaagctgtcaataccatcaaaatggaacccaagcaaagaggttgagtacccaggtcaagtcctgagatacgaggacaacttcgactccaccaccaatgttgctgtcctggtcactcctactgataagaagtccattactgacttcggttcccctgaaaatttcctctctaaggtggactatctgcttggaaaacaagcatactctggcttaactgatgctgagggtgggtttgactcaaatgcagtggcaactgcaaacatattggagacttcaactcctgtgatcggagggaaacagtactacttcttgtcggtgttgacgagaactgctgatggagatgaaggtggcaagcaccaactaattacagccaccgtaaacaatggtaaactttacatttgcaaagcacaagctggggacaagcggtggtttaaaggagctagaaagtttgtggagagtgctgcaaattccttcaagtgtgcttagttaaaagtcttacttgntaactagagaataatttcatgtaaaatttgttagaaaatatctgatgttggacctaaaaaaaaaaaaaaaaagggcggc

SEQ ID NO: 36813 - DNA, 554 bp, Gossypium hirsutum
  Clone ID: LIB3165-006-P1-K4-F8
cccacgcgtccgatgggttcaagcggcggctgctttatccaacatgggaatgttcctcgccgagatgagtagtgactcgttccagctcgagggaatggcatctagggggatgcttcctgaactatttgctaaaaggtcccgttacggaacccctttggtcgggattttattctcggcatccggtgtcatactcttgtcttggttgagcttccaagagattatagcagcggagaacttcttgtattgtttcgggatgatcatggagttcatagcgttcgtgaagctaagagtagatcgtcctgcagaatcgagaccgtacaagatcccggtcgggacagctggggcgattttaatgtgtatcccaccaacattgttgatcctcgtggttttagccattgcatcttttaaagtcatggtggttagcacggtggcagtgatgataggacttgctcttgagccatgtttaaggtattcggagagaaaaagatggctcaaattcaccatggaccctgatctttatgaacttcgttctcctaccaggaatgtaataaaaa

SEQ ID NO: 36814 - DNA, 589 bp, Gossypium hirsutum
  Clone ID: LIB3165-006-P1-K4-F9
cccacgcgtccgcccacgcgtccgccacactctcaaattcagataacaatttcacagttgttttcttcactctctctctcagccatctccaccgtcgccgccgctgccgccgccaaccgagctctgggagtgtcagtcccaacctcagctttcatggggaagaaagtgagctcgagattcaacaacaccaggcaggttccttcgggaagttttaaggtgatggcggccgaaaaagagatagacgaagagacacagaccgaaaaggaccgatggaaagggttggcttacgatatttcggacgaccaacaagacattactcgagggaaagggatggtggattccttgttccaagctcccatgaatgatggaactcactatgctgtcatgagttcctatgaatacatcagccaaggtcttaaaacgtacaatttggacaacaacatggatggtttctacatcgctcctgcattcatggacaagcttgttgttcacatcagcaagaacttcatgtccctccctaacattaaaggtcctctaatcctgggtatttggggaggcaaaggtcaaggaaaatctttccaatgtgagc

SEQ ID NO: 36815 - DNA, 450 bp, Gossypium hirsutum
  Clone ID: LIB3165-006-P1-K4-G1
ctcacgcgtacaggccgtccgcaatcctttgtagagctgacaagtccattgtgacgatgtcattgctcaaataatgacaggtgtgcggtgtccattaaaacacatatatggatgacactatttaactatgtcacagaggtgggatcagctttgttcgggtccaatataaaagctcaacttcccgttaacgcttaacaggtccatatgtgagactcctagttcagtggggtcttcgtgagcttagagaccggcttgattcagtaaagatcacgcagacgatcactgaagccatgaatcttgtggctgatgatcaagcatggagagctcatgaagctgctgtcaatggcggacctttctgtgagtcgcatggatgaagctctttacatcatgaatgaacagtttcagactgcagaataaatgctacttttacaaacgataggcttgctaaaa

SEQ ID NO: 36816 - DNA, 655 bp, Gossypium hirsutum
  Clone ID: LIB3165-006-P1-K4-G11
cccacgcgtccgctgaaaactaattgaaatcgtcggctgtctctcatttccgttcctctcgggcttccgccaccgtcgacacccaaaatggaggctcaccggctatcttctactaaacctgttcaatctctcaagccaacgaaaaagattcctttagaggaagataccggtaaagcctccgacgcactgccgcttcccttgtacctaacgaacgccctgttcttcaccctcttcttctcggtggtttattttcttctttcccgttggcgtgagaagatccgtacctccacacctctccatgtcgtcaccttttccgagatcatcgccattctctcatttttcgcgtcctttatttaccttttgggtttctttggaattgacttcgttcaatctttggttttccaaccatcgcctgacgtttggattgccgaggaagtggatgatgaagttctgcttgcaaaggaagaagcccgtaaggtcccttgcgggcaagctctcgattgttcgcttccgcctctgcctcctgcggcaccaatcgtgaccgttcagaaggtgttcgatgaaaagcctgtgacggtactaacggaggaagatgaagaaataattaaatctgtagtggctggtacaaccccttcgtattccctggaatcgaaat

SEQ ID NO: 36817 - DNA, 530 bp, Gossypium hirsutum
  Clone ID: LIB3165-006-P1-K4-G12
ctttctcttgctctctttagagtaaatttctcttgcaatcctttgtagagatccgggatccattgtcaccatgtcttgctcaaatctgacaatgtgggtgtcctcaaaaccctctctttctgacacttcttcactctctttccgttctttcatcagcccttttcagctcccgtctcagagctcaacccccggtaacccttccaggtcctcatctgtaaccccagttcactgtggtcttcgtgagcttagagaccgtattgattcagtaaagaacacgcagaagatcactgaagctatgaaacttgtggctgctgctaaagttaggagagcacaagaagctgttgtcaatggcagacctttctctgagtccctggttgaagttctttacaacatcaatgaacagctccagactgaagacatagatgctcctctcacaaacgtcaggcctgtcaaaaaagttgctttggttgttgttactggtgatcgtggtctctgtggaggtttcaacaatgctatcctcaagaaagctg

SEQ ID NO: 36818 - DNA, 500 bp, Gossypium hirsutum
  Clone ID: LIB3165-006-P1-K4-G3
ctcccccacacattcaaaatcctattccttttctcctttttctttttctcagacaagatgggttctcagggatcggttatggcgatgcttttgctgatgatgttcactttatcatcagcttccgacatgtccattatatcctacgatgaaacacatcccgacaagtcaacgtctagttggagaacagacgacgaagttatggccatgtacgaggagtggcttgtaaagcatggaaaaacatacaacggtttgggtgagaaagagaggaggttccagatttttaaggataaccttaggttcatcgatgaacataacgccgatgagagtcagagttttaatgttggtttgaaccgctttgctgatcttaccaacgaggagtaccgagccatctacctgggaatcaagaaacccaaccggaaagtttccaaggccagtgaccgatactccgcgcttctcggcgaaaagttgcccgattccgttgattggagggaaaaaggggc

SEQ ID NO: 36819 - DNA, 629 bp, Gossypium hirsutum
  Clone ID: LIB3165-006-P1-K4-G4
cccacgcgtccgtccccttccaacgatggaccgcttctctcttctcttcctcctcctttcctccgtcgttgcttcggccgtcgtctccgacgttaatagcgacggcgatcctctcatccgtcaagttgtttccgatggtggtgtcgaggaggactccgatgaccatctccttaacgcggagcaccacttcacgctgttcaaatccaagtatgggaaaacctacgcatcccaggaggagcacgattaccgactgggagtcttcaaggctaacctgcgtcgggccaagcgtcatcagctcctggaccccagtgccgtccatggcgtcacaaagttttccgatttaactccatcggagttccgccgccagtatctaggcttgaaaccgctcaagctcccagccgatgctcaaaaggctcctatccttccgactgacaacttaccggatgactttgactggcgtgaccacggcgccgtcactggcgttaaagaccaaggtcctgtggatcgtgttggtcgttcagtgcgacgggggctttggagggagcccattatttggcgacaggagagcttgtaagcttgagtgagcagcaactttgtgattgtgatcacgagtgtgatccacaacaata

SEQ ID NO: 36820 - DNA, 479 bp, Gossypium hirsutum
  Clone ID: LIB3165-006-P1-K4-G5
ggagtacttgcaatatgatttggattctttggaccagaacctggctaagaattcggctggtgagataattggaactaggaccgaggttgccgacgtgaaggcgacgccgtttcagccttacagcgaggtttttggtctacagaggtttagggagtgtgagttgatccatggacggtgggccatgttggctacgcttggtgcacttaccgttgaatggctcactggtgttacatggcaagatgctggcaaggtggagttagttgagggttcatcgtatctcggccaaccccttcccttctcgatgacaacattgatttggatagaagtattggtgatcggattcatcgagttccaaaggaacgccgagcttgacccggagaagaggctgtaccccggaggaaagtactttgatcctctcggcctagccgccgacccggagaagaaagcaaccctacaattggctgagatcaagcatgctc

SEQ ID NO: 36821 - DNA, 511 bp, Gossypium hirsutum
  Clone ID: LIB3165-006-P1-K4-G6
cccacgcgtccgaggagctgatagacctttatggtttgcatctaaacaaagcctttcatacttggatggcagccttccaggtgattatggatttgaccccttgggactctcagaccctgaaggtccaggagggttcatcgagcctaaatggctagcctacggtgagatcatcaacgggcgttatgctatgttgggtgcagtaggtgcgattgcccctgaaatacttgggaaggccggtcttatcccagcagaaacagccctcccttggtttagaaccggtgtgatcccaccagcaggaacatacagctattgggcagacccttacactttgtttgtgttcgagatggcactcatgggatttgcagagcacagaaggttccaagactgggccaaaccaggttcgatggggaaacaatatttcttggggttcgagaagtaccttggagggtctggtgagccggcataccctggaagaccactgtttaacccacttggttttgggaaagatgag

SEQ ID NO: 36822 - DNA, 566 bp, Gossypium hirsutum
  Clone ID: LIB3165-006-P1-K4-G7
cccacgcgtccgcccacgcgtccgcccacgcgtccgcccacgcgtccgcccaacctcagctttcatggggaagaaagtgagctcaagattcaacagcaccaggcaggttccttcgggaagttttaaggtgatggcggcggagaaagagatagacgaagagacacagaccgaaaaggaccgatggaaagggttggcttacgatatttcggacgaccaacaggacattactcgagggaaagggatggtggattccttgttccaagctcccatgaatgatggaactcactatgctggcatgagttcctatgaatacctcaaccaaggtcttaaaacgtacaatttggacaacaacatggatggtttctacattgctcctgcattcatggacaagcttgttgttcacatcaccaagaacttcatgtccctccctaacattaaagttcctctaatcttgggtatttggggaggcaaaggtcaaggaaaatctttccaatgtgagcttgtgtttgccaagatgggtatcaaccccatcatgatgagtgccggagaactggaaagtggaaacg

SEQ ID NO: 36823 - DNA, 616 bp, Gossypium hirsutum
  Clone ID: LIB3165-006-P1-K4-G8
accacacaaaaatcaaccatggcagcagcagccagagtgatagccatcgccggcaactccaccgccgccgcgtcttcctgcttgcttatcaaaacaccgttcgctttacaacgctgcagcaacggacttagattcaacaacgtcagacgatcatcgaaaagattgttttcttgcaatgccatttataaccctcaggttcaaatcaaacaagaaggccaacccgaaactctcgactatagagtcttcttcgaggatacttcgggcaaaaagatttctccttggcacgatgttccattgcacttgggagatggtgtttttagcttcattgttgagatacccaaagaatcaagtgctaaaatggaggttgctactgatgaactttacactcccattaaacaggatacaaaaaagggcaagcttcgatattacccctataatataaattggaattatggattgcttccacaaacatgggaagacccatctttggcaaactctgaagttgaaggagcatttggtgataacgaccctgttgatgtcgttgagatcggtgaatcccggaggaaaatcggtgacatttttgaggttaagcccctggctgctttagctatgattg

SEQ ID NO: 36824 - DNA, 539 bp, Gossypium hirsutum
  Clone ID: LIB3165-006-P1-K4-H1
gccccatcagcgattttttggactgactatgtagcaacccgttggtatcgtgctcctgaactctgtggatcctttttctccaaatacactcctgcaattgatatatggagcataggatgcatatttgctgagatacttacaggaaaaccactatttcctggaaaaaatgtggtgcaccaattggatctcatgaccgatacacttggcacaccccctcctgaatccatatcaaggattagaaatgaaaaggcaaggaggtaccttagtagcatgcgtaaaaagcaaccaattcctttctcacagaagttccctaatgtggatcacctggctcttcgcctacttgagcgcttacttgcatttgatccaaaagatcgtcccacagctgaagaagcattagctgacccatatttttatggtttggcaaatgtggatcgtgaaccatctacacaacctatttcaaaactagaatttgagtttgagagaaggaaattgacaaaagatgatgttagagagctgatttatcgagagatattggagta

SEQ ID NO: 36825 - DNA, 703 bp, Gossypium hirsutum
  Clone ID: LIB3165-006-P1-K4-H10
attcctctttctctcccccccccacaaaaaaaaaaaactccaaatctaaagagagactttcctctcctccgatcctttattcgtcttggtttatgagctcgaaggagaaacccactctcggtggtacgcggattaagacccgcaaacggaatattgctgcgcctctggaccctgcagcatttgctgatgcagttgtccagatctatttggataatgctggtgatctggaacttgttgccaagaaccttgaatcttctgatcttaacttctcaagatacggtgacactttctttgaggttgttttcaccgggggccgcacacaaccaggcacaatcaaacctgatgagggggagcgccacccttactctgtaatagagtgtgaggctaaacgtgaagccattttgccatctgtgatctacatacagaaaatcttgcgtcgaaggccttttctgataaagaatcttgaaaatgttatgcaaagattgttgcagtccttggagctgtttgaggacaatgaaaggaagaagcttgcaattttcacagcacttgctttttcccagaagctatcagggctgccacctgagactgtgttccagccactgcttaaggacaatcttgtggtcaaagggctagttctttcattcataacagactttttcaaggagtatctggtggataatagccttgacgatttaatttcaat

SEQ ID NO: 36826 - DNA, 631 bp, Gossypium hirsutum
  Clone ID: LIB3165-006-P1-K4-H11
atcactcccaatactttcataacatttcacgaacttcactctccagtctccaatggcggctgccgtctccaccatcggtgctgtcaaccgagcaccgttgagtttgaatggatcaggtgccggagcttctgctccaagctcagctttcatggggaacagcttgaagaaagtgagcgctaggttcaacaacaacggcaaggctccagtgggaagtttcatgattgtggctgccaaagaaatcgacgaagacacacagaccgaccaggaccgatggaagggtcttgcttatgatatctccgatgaccaacaagacattaccagagggaaaggtatggtcgactcattgttccaagctcccatgaacgatggtactcactatgctgtcatgagctcctatgagtacattagccaaggccttcgcacatacgacttggacaacaacatggatggattctacattgccccagctttcatggacaagcttgttgttcacatcaccaagaactacatgacccttcctaacattaaggttcctattatcttgggtatttggggaggcaaaggtcaaggaaaatctttccaatgtgagcttgtctttgccaagatgggaatcaaccccattatgatgagt

SEQ ID NO: 36827 - DNA, 403 bp, Gossypium hirsutum
  Clone ID: LIB3165-006-P1-K4-H2
ctcacgcgtacgtagagaaaaacataaaacacttccgaaatggctcgcatgaagatcagagagtactattgcaagagattggggaaagaacatgtcaagaggctttcacgttagagattatgccaatgacatctgcacaatttacggcatcaactgatttcaatcagctagtacagatggagccatggctttcgacacagatactggctggtaaacctggtatgttgttcggtatgcgtggacagagtggtttgggtgggtgaaatatagattgtgctcaagttatagcgttagcgaaagagcgtcttggcacataggtggaaatgagtggatgcaagggacctgttacaactctcattggttgacctttcatacgtcacaatgaaaagcatttacttaacga

SEQ ID NO: 36828 - DNA, 611 bp, Gossypium hirsutum
  Clone ID: LIB3165-006-P1-K4-H3
cccacgcgtccgcgtttattctcttaacatggatgcctacgtactatcatcaagtcctgaagttcaacctcacagattcagggctcatttgtgttttaccctggcttacgatggcattttctgcaaatcttggaggatggattgcagacacacttgtgagcaaaggcttatctgtgacaactgttcgcaaggtcatgcaatccattgggtttcttggccctgctttcttcctaactcagctgagccatgtcaattctcctgctatggcagttttgtgtatggcatgcagtcagggaactgatgcattttcacagtctggcctttattcaaaccatcaagatattgcccctcgatattcaggtgtattacttggtttgtccaacactgctggagtactagctggggtctttggaacagctgctactggttacattctgcaacatggttcttgggacaatgtcttcgaggtttcggttgggctatacttggttggaaccgtggtctggaacctcttttcaactggtgagaaaatactggactgactcagatatttaaatgtttagcatgagttagctcaagccttcatgtgctcgagctaattgaaagagtca

SEQ ID NO: 36829 - DNA, 427 bp, Gossypium hirsutum
  Clone ID: LIB3165-006-P1-K4-H4
cccacgcgtccgctcgcattgaattctgttgggaaaaaaaaatggaagaagagaaggcggcagcttactacgatgagcttaccaggaaaggtgagggagcggccagattcaagcgaggcctcggtttctcctcttgcgatgatcaacacgatgcggttcctcaaagaggcacaacctttgtctctccatgttcatccttcctcagcagtttcgtcagggcctcgagtcctaccaccgcttccaagcttgagaaagaatctcaacttcaaccgatccaacataagctaaagaagaagccggaaagagaagctagggtttcggcgagaaccaacgtggagagagacggagataagcattcaaggaggcgaagcagaagcacgagtagggagagatactgggaaaaggatagagagagaaggaagcggca

SEQ ID NO: 36830 - DNA, 562 bp, Gossypium hirsutum
  unsure (1)..(562): unsure at all n locations; Clone ID: LIB3165-006-P1-K4-H5
cccacgcgtccggagactcttttgtatacctgtagcatatagtaatagtaagcagtaatagcaatggcctcctccatgatctcatcggcaaccattgccaccgtgaaccgctcctccccggcacaggccaacatggtggcccccttcaccggcctcaaatctgcctctgctttcccagtcaccaggaaggccaacaacgacatcacttctcttgcaagcaacggtgggagagtgcaatgcatgcaggtgtggccgcctcttgggaagaagaagttcgagactctctcatacctgcccgatcttactcccgtacagttggctaaggaagtagattaccttcttcgctctaaatggattccttgcttggaattcgaattagaggagggattcgtgcaccgtaagtactcgagcttacccacgtactacgatggacgctactggaccatgtggaaactgcccatgttcgggtgcaccgactcggctcaagtgttgaaggagcttgaggaatgcangaaggaataccccaatgcattcattagaatcattgggttcgacaacgttc

SEQ ID NO: 36831 - DNA, 578 bp, Gossypium hirsutum
  Clone ID: LIB3165-006-P1-K4-H6
gtcggtctcacttcaagctgcagctaccctgatgcaaccaatcaaggttgctgcaccatcaaggaccaatgtgctgctcaggtcctcccagagcgtttctaaggccttcggtttggagcctgttggtgctaggctcacctgctctttgcaaactgacctcaaggacttggctcagacgtgtgttgatgctaccaagctcgctggtttcgctctttctacatctgctcttgttgtctcgggagcaagcgctgaaggagttccaaagcggctaacctacgatgaaatccaaagcaagacatacatggaagtcaaaggaacaggaactgctaaccagtgcccaaccatcgatggtggtgtcgactcttttgccttcaagcctggcaaatactacgccaagaagttctgcttggagcccacttccttcactgtcaaggctgagggtgttaacaagaatgcccctcctgagttccaaaacaccaagctcatgacccgtttaacctacacccttgacgaaatcgagggccctttcgaggtatccaccgatggcaccggcaaatcgaggagaaagatgggattga

SEQ ID NO: 36832 - DNA, 547 bp, Gossypium hirsutum
  Clone ID: LIB3165-006-P1-K4-H7
cccacgcgtccgatttcttgaattctcctctcaaccccctaaccaaatcatccatttcataaatattaatccaccaaaagaattatccattcagttcaaagacaccatgacatctacacctactcaagaaaacactcaagtagaaggatcccacgaacccacagtagaagcacccccatcggaagaagatattaagaaatggggcacgcacgtcatgggatccccagcagctcctagtgcccatccagacaaccagaaggcggctttatggaatgctagtgatcaccaacaaatctatgagctgccctatgtcgtttattcccctgcagaaagaccaagccataatccttttgaacctgtgattaacatgttcaatacctggagtaggaagaccgagtctatagcacgcaacatctggcacaaccttaaaactggaccgtctgtatcggaagcagcatggggtaaattaaacctgacagccaaagctataacagaaggaggatttgagtctctgttcaagcagatttttgcaactgatacggatgaa

SEQ ID NO: 36833 - DNA, 608 bp, Gossypium hirsutum
  Clone ID: LIB3165-006-P1-K4-H8
cttaacaaacatcaactccagagatcgccaaacatgctaggaactgagcatgatttgaacttcaaagagaccgagctgtgtctcggcctgcctggtggaagtggtggaggaggaggagctgccgccgccggtggtggtggtggtggtaaaaatgaagtggaaagttccccaaagaccaccgggaaaagaggctactccgagactgttgatttgaagcttaatcttcagtctaaagaaggttgcatggatctgaatcagaacctagaaaatggttcaaaagaaaagaatcatctcactgcaaaaccaccagccaaggcacaagtattgggttggccaccagttcgatcttataggaagaacattatggctaaccagaagaacaacagtgacgaaattagtgacagagctagcaatggcagtgggggtgcagcgtttgtgaaggtttgcatggatggtgcaccatatttgcgtaaagtagatttgaagatgtacaacagctaccaaaagttatccgatgccttggctaaaatgttcagttccttcaccatggggagttatggatgtgaaggaatgatagactttatgaatgagagcaagttgatggatct

SEQ ID NO: 36834 - DNA, 583 bp, Gossypium hirsutum
  Clone ID: LIB3165-006-P1-K4-H9
ctcaccattgttccaagtttgttgtaaaccaagctagaaccagcagccaacatggcctcattagcagcctccaccgctgccgcctcccttggcgtctctgaaatgctcggtaaccctctgaatttcagtggtggagctaggtcatcggctccaacaccatccaactcatccattttcaagaccgttgctcttttctccaagaagaaggccgctcctccaaagcccaaggctgctgctgtcgccccggccgatgaagagctggctaagtggtacggtccggacagaaggattttcttgcctgaaggtctgttagacagatcggagatcccagagtacttgaacggagaagttcccggagactatggatacgatccgtttggtctgagcaagaagccagaagactttgcaaaatatcaagcatatgagttgatacacgcaaggtgggcaatgcttggtgctgcagggttcatcatccctgaagcctttaacaaatttggtgccaactgtggccccgaagccgtttggttcaagaccggagctcttctcttggacggtaacaccttgaactacttcgggaagaaca

SEQ ID NO: 36835 - DNA, 382 bp, Gossypium hirsutum
  Clone ID: LIB3165-007-P1-K1-A1
gttgtctccttgtcattagtttctgttactacttcactctccctctgtcttcaagaaatggatcgtagaagtgcatttgcagttgttttgatttgttttgtggtgaccgctgtcggtggtcaatctccggcagcctcacctactaaagctccgccggccgcgactactcctgctactgctactgctcccgctactgcccctgttagcaaacctaaatcaccggctccaactgctgcccctaccactttcccaccaacttcttcaccaccggttgcggctccggagaagtctgcggcggttccagccccatctaaatctgctccgtcttctcctccggctgctgcgccggtgagttctccaccggctccagtacctgtgagct

SEQ ID NO: 36836 - DNA, 234 bp, Gossypium hirsutum
  Clone ID: LIB3165-007-P1-K1-A10
gcgggccaagccgtccgttaattaaacattcccatttccaatttttagctcccaaggtaaatatgccgatcagagacatatcagttggccggcccgaagaggcgactcaccccgatgctctcaaggcagctttggctgagttcatctcaaccttgatcttcgttttcgctggatcgggctcaggaatggctcttaacaagttgaccgacaacggagcaacaaccccggccggtc

SEQ ID NO: 36837 - DNA, 355 bp, Gossypium hirsutum
  Clone ID: LIB3165-007-P1-K1-A12
cccacgcgtccgcccacgcgtccgtccacgcgtccgttcagataacaatttcacaggggttttcttcactctctctctcagccatggctgcagccatctccaccgtcgccgccgctgccgccgccaaccgagctctgggagtgtcagtcccaacctcagctttcatggggaagaaagtgagctcgagattcaacaacaccaggcaggttccttcgggaagttttaaggtgatggcggccgaaaaagagatagacgaagagacacagaccgaaaaggaccgatggaaagggttggcttacgatatttcggacgaccaacaagacattactcgagggaaagggatggtggattcctt

SEQ ID NO: 36838 - DNA, 419 bp, Gossypium hirsutum
  Clone ID: LIB3165-007-P1-K1-A2
ggccggcccgcgccacccgtactataccagaaaatcaaaaagttgaataaaagagatccccatgatgtctctgacagggccaactaatctctcaaaatcaattttgaagccaaagctggagacccaagtgatccccaaggcttcatccagatcattgattgtatgctcctccagcaatccttcctcctccgacaaatcggcttcatcactccaggccttctcagcggctctcgctctttcttccatccttctttcggctccactccctgcttgtgcggacattgcggggctcactccctgcaaagagtccaagcaattcgtcaagcgcgagaagcagcagatcaagaagctggaatcctcgttgaagctttacgcccccgatagcgcaccggctctcgccatcaaagccaccatcgaga

SEQ ID NO: 36839 - DNA, 94 bp, Gossypium hirsutum
  Clone ID: LIB3165-007-P1-K1-A4
cgctaaagctctttgattaaacgattctctgtcaaaagaagggaaatcgattggttcttttgttgtaatcggcgaaaaagatgcattcgagtca

SEQ ID NO: 36840 - DNA, 350 bp, Gossypium hirsutum
  Clone ID: LIB3165-007-P1-K1-A5
cccacgcgtccgaaagatttaagagtcgtagtggtgcaaaatggatttaatagaggtttgggattttctggattatagtttcatcgatgaaaatacatctccagatatacttttgcccaattacagtagcggtagggaaattgttgttcatgaagaaaaggaattcgtcgatagagattgctcgcgcaagaggggacgcagtggatcatgcagcaggccagggactaaagcttgccgtgagaaattaagacgggagaaattgaatgaaaggtttctggatctaagctctactttggaacctgggagacctgccaggactgacaaatccgcaatactggatgatgcaatca

SEQ ID NO: 36841 - DNA, 382 bp, Gossypium hirsutum
  Clone ID: LIB3165-007-P1-K1-A6
cttgtctttgccaagatgggaatcaaccccattatgatgagtgccggagaatgggaaagtgggaacgccggagaaccagccaagttgatcaggcaaaggtaccgtgaggccgccgacattatcaagaaagggaaaatgtgttgcctctttatcaacgatctcgacgctggagccggtcgtatgggaggaaccacacaatacacagtgaacaaccaaatggtgaacgccacactcatgaacatcgctgataaccccaccaacgttcagctccccggtatgtacaacaaggaagagaaccctcgtgttccgatcattgtcaccggtaacgatttctcgacgctgtacgcgccgctcatccgtgacggtcgtatggagaagtttt

SEQ ID NO: 36842 - DNA, 393 bp, Gossypium hirsutum
  Clone ID: LIB3165-007-P1-K1-A8
cccacgcgtacggttaggtatagcattcactactcgtacccactactagcaagggcttcctaaatgagctcatcggctaccattgccactgccattactgcacaggctaacatgggcgctactttcaccggcctcaagtgtgcctctgctttgccagtcatcaagaaggccaacaacgacattacttctgtcgcaagcaatggcggcagagtgcaatgcatgcacgtgtggccttccactggaaagaagaagttagagactctgtcatgcctacccgaacttacacccgagcagttggctaaggaagtagattaccttcttcgatcaaaatggagtccttgcttggaattcggattagaggcgggattcatgcaccgtaaatactggagccta

SEQ ID NO: 36843 - DNA, 391 bp, Gossypium hirsutum
  Clone ID: LIB3165-007-P1-K1-B1
cggacgcgtgggtgagactcttttgtatacctgtagcatatagtaatagtaagcggggatagcaatggcctcctccatgatctcatcggcaaccattgccaccgtgaaccgctcctccccggcacaggccaacatggtggcccccttcaccggcctcaaatctgcctctgctttcccagtcaccaggaaggccaacaacgacatcacttctcttgcaagcaacggtgggagagtgcaatgcatgcaggtgtggccgcctcttgggaagaagaagttcgagactctctcatacctgcccgatcttactcccgtacagttggctaaggaagtagattaccttcttcgctctaaatggattccttgcttggaattcgaattagaggagggattc

SEQ ID NO: 36844 - DNA, 370 bp, Gossypium hirsutum
  Clone ID: LIB3165-007-P1-K1-B11
caaaaagaaaaatggcttctgctttttctactctcctcaagtcttcacctattatcgggaagtccgagtggattaagggtcaaaacctccgccacccttcggtttgttttgtacagtgcaaccctacatcggccgcctttaccgtccgtgctagttcatatgccgatgagcttgttaagaccgcgaaaactgttgcatctccaggtcgtggtattttggccatggatgaatcaaatgctacatgtgggaaacggcttgcctcgattggtctcgagaataccgaggcaaaccggcaagcttaccgtacccttctcgtgtctgcccctggcctcggtgactacatctcgggagctatccttttcgaggagac

SEQ ID NO: 36845 - DNA, 392 bp, Gossypium hirsutum
  Clone ID: LIB3165-007-P1-K1-B12
gtccggaactgcttccccttggttccacttttttgttactgttgaagggtcatgatgagtgggctagccttgccaggagtccagcactttcccaggaaagccaatgccacccacagctgaatgctggtttgatgatgcatgcatccttgacatggactactttgtgaagaccatctcaggcataaaggccaagggtgttcgtcccgacttagtaggctcaatcatagcacattatgcatcgaaatggctacctgatctatccggcaatgacaccgaaaagggtcctatgagcctccaagagtcatcgccggagagtgtcacggtttcacggatgaaaaagaggttctttgttgaaaccttggtgggaatcttgccacctgagagagatttca

SEQ ID NO: 36846 - DNA, 396 bp, Gossypium hirsutum
  Clone ID: LIB3165-007-P1-K1-B2
ccacgcgtccggcagaagccaatatgtttttcttagaatctccaattggtgttggatgttcatactcaaatgtttctactgattacagaaatataggagatgagttcaccgcaaacgatgcttacactttcctgcataagtggttcgtgatgtttccgtcgtatagaacacgatccttttacatagctggagaaagctatgcgggcaaatatgtgccagagctggctgatctcatttatgacaacaacaaggatccttcactttatattgagcttaagggtattttgttaggtgatccagaaacaaatgatgctgaagactggagaggcatggtggattatgcttggagtcatgctatagtgtctgatgaaacttacaaaatcatcattgggagct

SEQ ID NO: 36847 - DNA, 181 bp, Gossypium hirsutum
  Clone ID: LIB3165-007-P1-K1-B3
aaatccaagtttgttttcgaagaatctacaatacctgagggttgttcatattgagaggttggggctgaaaacagaaatatattatatgagttcaccgcaaactttgcttacactttcctacataagtggttcgtgatgttttcgtcgtatagaacacgatccttttacatagctggagaaa

SEQ ID NO: 36848 - DNA, 304 bp, Gossypium hirsutum
  Clone ID: LIB3165-007-P1-K1-B4
cccacgcgtccggaaggaatactctatatgcattcattagaatcattgggtgcggcgaacgttcgtcaagtgcagtgcattagtttcattgcctacaagcctgaaggctactaagttgtttacttccctcctaggaattccatttgtttcaaagttgtacttaaattaagcccctcaaacccccccccctttttctttttcttttttagttgagttatttggcttggggtctctctttgttttgtttttggatttccaatggaacggctgagaactaatgaataaaaaggtagtttcttgccat

SEQ ID NO: 36849 - DNA, 356 bp, Gossypium hirsutum
  Clone ID: LIB3165-007-P1-K1-B5
gtgagactcttttgtataactgtatcatatagtactagtaagcagtaatagcggtggcctcctccatgatctcatcggcaaccattgccaccgtgaactgctcctccccggcacaggccaacatggtggcccccttcaccggcctcaagtctgcctctgctttcccagtcactaggaaggccaacaacgacatcacttctcttgcaagcaatggtgggagagtgcaatgcatgcaggtgtggcctcctcttgggaagaagaagttcgagacactctcatacctccccgatcttacacccgtacagttggctaaggaagtagattaccttcttcgctctaaatggattccttgcttg

SEQ ID NO: 36850 - DNA, 387 bp, Gossypium hirsutum
  Clone ID: LIB3165-007-P1-K1-B6
ctcaaattcagataacaatttcacagttgttttcttcactctctctctcagccggggctgcagccatctccaccgtcgccgccgctgccgccgccaaccgagctctgggagtgtcagtcccaacctcagctttcatggggaagaaagtgagctcgagattcaacaacaccaggcaggttccttcgggaagttttaaggtgatggcggccgaaaaagagatagacgaagagacacagaccgaaaaggaccgatggaaagggttggcttacgatatttcggacgaccaacaagacattactcgagggaaagggatggtggattccttgttccaagctcccatgaatgatggaactcactatgctgtcatgagttcctatgaatacatca

SEQ ID NO: 36851 - DNA, 335 bp, Gossypium hirsutum
  Clone ID: LIB3165-007-P1-K1-B7
caagttgctgccgttggtgattgttgtcaaaagggagtcaaaaaaaattgcttgggtgatggcgggacgtcgacccggtgatgttgaaactgtttatgcttcaacgaagaaggctgagcatgaattgaattggaaggcaaaatacggcatcgaggagatgtgcagggatcaatggaactgggccagcaagaacccgtatggatacgcattttcgaacttgaattaactcggtgccaatacttttgtcaggtcacacaatacctatgaggatagattttcttaactttatacagatttaattgggtttgatttatcattttagatgatttattaag

SEQ ID NO: 36852 - DNA, 383 bp, Gossypium hirsutum
  Clone ID: LIB3165-007-P1-K1-B9
caaactcccatcatccgagatcatcttgaacatagagaatggcggatgcgaccagggctctgtatgccccatcactcaacacaaaggccgaaaagctctttcctttcagacataaaaggcaaggcaacggccgtggttccatgaggaaaaccgctaccaaggctgctgcctatggaagtacatggaacggtcctgaccgggtctcgtacttgggtgcactatctggggcgccttcattttacttgaccggagaatatcgtggcgactacagatggtacactgcatggactctcggcggacccatagacatctgccaggaaccgtgagctcgaagtcatctcactggaggtgggctatgttgtgtgctctagggtgtgttttcc

SEQ ID NO: 36853 - DNA, 398 bp, Gossypium hirsutum
  Clone ID: LIB3165-007-P1-K1-C1
cccacgcgtccgatcagaactagagagtttacatcctggtaagaggttgagttgcgcagggcttcagcttcctccaattcactatcaatctcaccctcatccaccctcgtggatgccaaagctcctcgtcaaccaactgctgcatccccacaatgtgtcactcttcctactcttcctcccccacccgttcagtcccagagtcgtccctggaagaccactgcctactgtcgcaagattgctcgaaatgtgatggctatggccactggtgagactttggccacgcgtgaagctccaaccgaagttaccccaactgagctgacagagtttatcaacaaaatacaagaaacctgggataaagttgaggacaagtacgcagtgagttcacttgctgtagcagg

SEQ ID NO: 36854 - DNA, 385 bp, Gossypium hirsutum
  Clone ID: LIB3165-007-P1-K1-C11
ataagattatagtgaaaaactaaacataataaagtccctcataacattctgcgacttgcttcattgattagcccaagataacataaccaaaaagaaaaatggcttctgcttccgctactctcctcaagtcttcacctattatcgacaagtccgagtggattaagggtcaaaacctccgccacccttcggtttgttttgtacagtgcaaccctacatcggccgcctttaccgtccgtgctagttcatatgccgatgagcttgttaagaccgcgaaaactgttgcatctccaggtcgtggtattttggccatggatgaatcaaatgctacatgtgggaaacggcttgcctcgattggtctcgagaataccgaggcaaaccggcaagc

SEQ ID NO: 36855 - DNA, 385 bp, Gossypium hirsutum
  Clone ID: LIB3165-007-P1-K1-C12
cccacgcgttcgcccacgcgttcttccacgcgtccgcggacgcgtggggcagggggtgctattgcggctgaaatacttgggaaggccggtcttatcccagcagaaacagccctcccttggtttagaactggtgtgatcccaccagcagggacatacaactattgggcagacccttacactttgtttgtgttcgagatggcactcatgggatttgcagagcacagaaggttccaagactgggccaaaccaggttcgatggggaaacaatatttcttggggttcgagaagtaccttggagggtctggtgagccggcataccctggaggaccactgtttaacccacttggttttgggaaagatgagaagtcattgaaggatttgaagc

SEQ ID NO: 36856 - DNA, 367 bp, Gossypium hirsutum
  Clone ID: LIB3165-007-P1-K1-C2
ggaaatcccggggcggaccgcaggcgtccgccacacgcgtccgtccgtaagggagttttttcgggtaaggccaatgattcaagggatgggggactcaacgccttggacttattctcaaactttaaataggtaggacggctgtggctgtttttttttttcaattttaggtttagttagttgccgtggatgggacagtcagtttcgtcggcgaaactcacgactcgtcgggattgttatcatagtcaacggtcttacttcagatcaacggttctgatctctccgatgaaaaccgaggaagctgaagtgattgatgaattatccgatttcatatcggatctaccggacgagtgtttagctagagtttttc

SEQ ID NO: 36857 - DNA, 373 bp, Gossypium hirsutum
  Clone ID: LIB3165-007-P1-K1-C6
gaaaaaccggggcggacgcaggcgtccgcccacccttccggagatcgtatcctaattacggatcaaaagagagatacggctgcagtcttgctagaggtcatagagtatgtccaatttttacaggagaaggttcaaaaatatgagggttcttaccagggatggagttcagagcccacgaaattaatgccatggagaaacagtcattggtgtggtcagagttttgttgatcaaccgcacgctattaaaaatgatcctgggctgctgtcaacattttctgggaagttagatgagaataacatcaatatcaccccctcaatgatcgcaagtgcattggatccatcagaagctgatccaatcagagataatgagcaag

SEQ ID NO: 36858 - DNA, 393 bp, Gossypium hirsutum
  Clone ID: LIB3165-007-P1-K1-C7
ctccattttcactgctcacaacttcccacctttgccccctctctgtgttgcttacacataaacaatagcatagttctgtttcttctctttgcttctgctttaccctataaagattcactcacttataacactccccttctctatatcctctctgtttcttttctcgcttgatggatttcaagtattctttttccagctttaatctttcactttatgagttaagtttctgaattttaatttgcatatagattttcttgttattctgtatgattttagatctgttatggatgtctaaggctttcaagatttgatacttctttgctcatttaacaagtcacttccctgcatttttttacatctttgagttgctccatttcaaagtgggagagaagc

SEQ ID NO: 36859 - DNA, 378 bp, Gossypium hirsutum
  Clone ID: LIB3165-007-P1-K1-C8
cccacgcgtccgaaagatttaagagtcgtagtggtgcaaaatggatttaatagaagtttgggattttctggattatagtttcatcgatgaaaatacatctccagatatacttttgcccaattacagtagcggtagggaaattgttgttcatgaagaaaaggaattcgtcgatagagattgctcgcgcaagaggggacgcagtggatcatgcagcaggccagggactaaagcttgccgtgagaaattaagacgggagaaattgaatgaaaggtttctggatctaagctctactttggaacctgggagacctgccaggactgacaaatccgcaatactggatgatgcaatcagagttctgacccaactaagaactgacgc

SEQ ID NO: 36860 - DNA, 410 bp, Gossypium hirsutum
  unsure (1)..(410): unsure at all n locations; Clone ID: LIB3165-007-P1-K1-C9
gggcgttctcttttttaccatggatccttacaagtttcgtccttctagttcctttgattccccgttctggactaccaattctggtgctccagtttggaacaataactcatcacttactgtgggagcaagaggtccaattctccttgaagactatcatttggtggagaagctagctaatttcgacagagaacgcatacctgaacgtgttgttcatgctagaggagccagtgcgaaagggttctttgaggtcactcatgatatatctcagctcacatgtgctgatttccttcgtgcccctggagtgcagaccccgctcattgttagattctccacggttattcatgaacgtggtagtcctgaaactttgagagacccccgaggtttcgctgtgaaatnttacactcgagagg

SEQ ID NO: 36861 - DNA, 200 bp, Gossypium hirsutum
  Clone ID: LIB3165-007-P1-K1-D10
gactgggaaccgctccctctgaggcctttcccgggcgacgaacagtcgactcaaaactggttccgacaaagggaatcccactgtttaattaaaacaaaacattgcgaaagtcccttccgatgctcactcaatgtgatttctgtccaatgctcttaatgtcaaagtgaataaatttaaccaaacccgggttaaccggggga

SEQ ID NO: 36862 - DNA, 384 bp, Gossypium hirsutum
  Clone ID: LIB3165-007-P1-K1-D11
ctcggactctagggtctgcccatctcatgtgctggacatgcaacctggtgaagcttttgtggtccgtaatgttgctaacatggtgccaccatatgaccagattaaatatgctggcattggatctgctattgaatatgcagttttgcatctcaaggtacaagaaattgtggtgattggacacagtgcctgtggaggaatcaaggggcttatgtctttcccattagatggaaacaactcaactgatttcatagaggattgggttaagattggaatccctgctaaggccaaggtgctagctgaacatggtggtgagcctttgggagtccaatgtacacactgcgagaaggaagcagtgaatgtatcccttggaaacctgctgagtta

SEQ ID NO: 36863 - DNA, 348 bp, Gossypium hirsutum
  Clone ID: LIB3165-007-P1-K1-D12
cccacgcgtccgcttacctcctcttcttcctccaccaccacctcctctttttgcgctcgtcgacgacctacattgcggccttcggtcgtcgctagccttaactcttctccttctcctccgactcttatccaagaccgcccggttttcgctgcccctgttcctttgctcaccccgagagaagagatgggaaacaagtcctacgacgaagccattgaagctctcaagaaacttctcagtgagaaaggagaactgaaagctgaagcagctgcaagggtagatcaaataacagcagagttaaacacaacatcagctgacggcaaaccatctgactcttctgttgagagactg

SEQ ID NO: 36864 - DNA, 402 bp, Gossypium hirsutum
  unsure (1)..(402): unsure at all n locations; Clone ID: LIB3165-007-P1-K1-D2
ggcggccccacccgtccggaaaaccaaaaatggccatggcattgtttcttcgccgactctccttttccatggccgggcctttccgggctttcttcaatgccccttccctctattacatgtcgtctttgccaaatgaagctgtgtacgagaaggagaaacctggcgtcacttggccaaagcaactgaatgctccacttgaaaccgttgatcccggaaattgctgacatcatcgagcttgaaaaagcgcgccaatggaagggacttgaactcattccatcggagaacttcacttcggtgtcagtgatgcaagcagttgggtctatcatgaccaacangtacagtgaagggtatccccgtgctagatactatggagggaatgagtacatcgacatggcagagaca

SEQ ID NO: 36865 - DNA, 249 bp, Gossypium hirsutum
  Clone ID: LIB3165-007-P1-K1-D3
ccggggcggcccaacccttccgttataccatacactcctagtcccctcttctagcaagggcttcctaaaggatctgatgggctaccattgccactgcctatccggcacaggctaacatggtcgctcctttcaccggcctcaagtctgcctctgctttcccagccaccaggaaggccaacaacgacattacttttttcgcaagcaatggcggcagagtgcaatgcatgcaggtgtggccttctactggaa

SEQ ID NO: 36866 - DNA, 381 bp, Gossypium hirsutum
  unsure (1)..(381): unsure at all n locations; Clone ID: LIB3165-007-P1-K1-D4
atttcttaacaagttcctttttttaagaaaatggcctccaacatggtggggtatccccgattgggaccaaggagagagcttaagtttgctttggaatccttttgggataagaagagcagtgccgaggatttgcaaaaggttgctgctgatctcaggtcatccatctggaaacagatgtctgatgctgggatcaagtacatccncagcaatactttctcttactatgaccaggtgctcgatgccacatcgatgctcggagctgttccacctagatacggctggaatggtggtgagatcggatttgacacttacttctccatggccagaggaaatgcctctgtccctgcaatggaaatgaccgagtggtttgacaccaactac

SEQ ID NO: 36867 - DNA, 387 bp, Gossypium hirsutum
  Clone ID: LIB3165-007-P1-K1-D5
cccacgcgtccgcgatgaagtcattaggtataaccccaagaacccttactggttcaaccgtgaccgtttcattctgtccgctggtcatggttgtatgttgcagtatgctctgcttcacctcgctggttacgacagtgtcctggaagaagatttgaagagtttccgtcagtggggaagcagaacccctggacatcccgagaactttgaaacaccaggagttgaagtcacaactgggcctcttggtcagggtattgcaaatgctgttggattggctcttgctgagaaacacttggctgctagattcaacaagccagacaatgagattggtgatcactacacatatgttattttgggagatggttgtcaaatggagggtatttcaaatga

SEQ ID NO: 36868 - DNA, 390 bp, Gossypium hirsutum
  Clone ID: LIB3165-007-P1-K1-D6
cccacgcgtccgaacatcgtcgttttttacactcttctctggtaagttcatcgaaggatcaaatcaagatccctgccaaaatgaacgacgctgatgtatccaagcagatccagcagatggtgagattcatccgccaggaagcggaggaaaaggctaacgagatctctgtttccgctgaagaggagttcaacatcgaaaagcttcaattggtggaagcggagaagaagaagattaggcaggagtacgagaagaaggagaagcaagttgaaatccgaaagaaaattgagtattcgatgcagcttaatgcatctaggatcaaggtccttcaggctcaagatgatgtggttaatgctatgaaagaatcagcatccaaggaccttctcaatgtga

SEQ ID NO: 36869 - DNA, 114 bp, Gossypium hirsutum
  Clone ID: LIB3165-007-P1-K1-D8
cccaccgtccgctaaccgttactcacggggatggcaacactagggagtccaaaacgtgggtgttttcctcggggagagttagtctatctaactaacctctgcccaccctggaaa

SEQ ID NO: 36870 - DNA, 386 bp, Gossypium hirsutum
  Clone ID: LIB3165-007-P1-K1-D9
ctttgctctatccccttccaacgatggaccgcttctctcttctcttcctgctgctttcctccgtcgttgcttcggccgtcgtctccgacgttaatagcgacggcgatcctctcatccgtcaagttgtttccgatggtggtgtcgaggaggactccgatgaccatctccttaacgcggagcaccacttcacgctgttcaaatccaagtatgggaaaacctacgcatcccaggaggagcacgattaccgactgggagtcttcaaggctaacctgcgtcgggccaagcgtcatcagctcctggaccccagtgccgtccatggcgtcacaaagttttccgatttaactccatcggagttccgccgccagtatctaggcttgaaaccgctc

SEQ ID NO: 36871 - DNA, 417 bp, Gossypium hirsutum
  Clone ID: LIB3165-007-P1-K1-E1
gggcggaccaacgcgtccgccaacgcgtccgcccacgcgtccgactttctccaccatcacccccaaaaaacagaggaaattgtagaagaatggcaacacaagcacttgtatcatcgtctcttacctactcagtggagactgcaaggcagattcttggagctaaacgacaaattgggccttcaaggaaaggatcctttgttgttaaggcagcttcgactccacccgttaagcaaggagctgatagacctttatggtttgcatctaaacaaagcctttcatacttggatggcagccttccaggtgattatggatttgaccccttgggactctcagaccctgaaggtccaggagggttcatcgagcctaaatggctagcctacggtgagatcatcaacgggcgttatgctatgttgggtg

SEQ ID NO: 36872 - DNA, 389 bp, Gossypium hirsutum
  Clone ID: LIB3165-007-P1-K1-E10
cccacgcgtccggagatcgtatactaaacacggatcaaaagagagatacggctggattcttgctagaggtcatagagtatgtccaatttttacaggagaaggttcaaaaatatgagggttcttaccagggatggagttcagagcccacgaaattaatgccatggagaaacagtcattggtgtggtcagagttttgttgatcaaccgcaagctattaaaaatgatcctgggctggggtcaacattttctgggaagttagatgagaataacatcaatatcaccccctcaatgatcgcaagtgcattggatccatcagaagctgatccaatcagagataatgagcaagctgagttggctgtgcccattcaaggtgggcattcacttcagaga

SEQ ID NO: 36873 - DNA, 386 bp, Gossypium hirsutum
  Clone ID: LIB3165-007-P1-K1-E11
cccacgcgtccgtaacaatttcacagttgttttcttcactctctctctcagccgtggctgcagccatctccaccgtcgccgccgctgccgccgccaaccgagctctgggagtgtcagtcccaacctcagctttcatggggaagaaagtgagctcgagattcaacaacaccaggcaggttccttcgggaagttttaaggtgatggcggccgaaaaagagatagacgaagagacacagaccgaaaaggaccgatggaaagggttggcttacgatatttcggacgaccaacaagacattactcgagggaaagggatggtggattccttgttccaagctcccatgaatgatggaactcactatgctgtcatgagttcctatgaatacatc

SEQ ID NO: 36874 - DNA, 373 bp, Gossypium hirsutum
  Clone ID: LIB3165-007-P1-K1-E12
ctttatctcagaaaacaaagaaaagaaaagggttttcctccattttctatgtatttttttcatttcgaatttagggaaaaaatggccactttcatcgaatttccaatctaatttcccattaatattttttattttaaattctcgtttctaattttttttttcagtcatttcaaccatggcttccaattcgaagaagcccgctactgctgatgagaaatcggctttgaaaacggagagcaaaagttcaaagcctgaaacatccaccactgagaagaaaacttcaacacctgagccttcaactgggggttcacagccagcacaagcaggggccttccctcccaacgctatgcctggtcctgggtttgccccaccc

SEQ ID NO: 36875 - DNA, 397 bp, Gossypium hirsutum
  Clone ID: LIB3165-007-P1-K1-E2
gaaaaacagagaaagagtactttcttttttcttcttcttttggttctgtttcacggccatggcgaaaacgcaaacaccccatatagcgattcttcctagtcctgggatgggtcatcttattccactcgttgagttcgctaagcgatttgtacagcaacacaatttcactgtcacttttgttatccccaccgctgattctccttcgaaagctcaaatatcaaccctggattcccttcccagctctatagattatgttttccttcctcctgttgacttgagtgacctccctcaagacgcaaagattgaaaccgtgatttctttaacgggggctcgctctctgtcgttccttcgggatgctttgaagtcgctggctgcaaagacaaaactcgtcggtttg

SEQ ID NO: 36876 - DNA, 363 bp, Gossypium hirsutum
  Clone ID: LIB3165-007-P1-K1-E3
cccacgcgtccggttttaaacctttccttgcttgtataagcatacctaaatgtagcaatgacaacaacaacctgagctacactctctccacccacattggctgctgccagtgttggcaatcccaggaggagaactaaagttaatgtaagttacattataggattgaattcctttggtgggctaaaagctcataacaatgtgatctcactaggccaaccagtgtgcattgaacgatcatttgcaaaggttgtgagctcactcagagctccatccaaggggaaaggtagtggcggcggtgccctctcttcaacctgcaatgcaattggtgagatatttaggattgcggcaatcatgaatggactt

SEQ ID NO: 36877 - DNA, 370 bp, Gossypium hirsutum
  Clone ID: LIB3165-007-P1-K1-E6
tttagctcagcagtggtacaccattaagtcctggcagcagtttttgggaacggattatcaacggcgtgtgttgtaaatttgggtgctcaagtatcatcagttatttgcattgaggatggagtggctctacctaatacagagaagactttaccatttggtggagaggatatatcaagatgtcttctttggacccagaggcaccatcagacatggccacaaattcgtactgatattttgacaaagcctatagatctattgatgctgaacaggttaaaagagtcctactgtgaaatcaaggagggtgaacttgatgctattgctgtagttcattcttatgaggatgccatgcctgcaggatctcataagacga

SEQ ID NO: 36878 - DNA, 335 bp, Gossypium hirsutum
  Clone ID: LIB3165-007-P1-K1-E7
gaattttcagtcgtcttctctttttgtcctctcgatcccaaagcaagctctgggttccgaatctctcccagaagatgcagatctttgtgaaaacccttactggtaaaaccatcacccttgaggtggaaagctcctatactattgataatgtcaaggccaaaatccaagacaaagaaggcattcctccagaccaacagaggcttatttttgccggaaaacaactcgaggatggccgaactcttgccgactacaacatccaaaaggagtccaccctccacctagtccttcgactaaggggtggcatgcagatatttgtgaaaacccttacgggcaag

SEQ ID NO: 36879 - DNA, 198 bp, Gossypium hirsutum
  Clone ID: LIB3165-007-P1-K1-E9
aggacgcgtgggctgttaaacgatttcttgctagaccacgcctgcctatatggggacattatatctgctgcctgaatgttattttctacaaccacattggctgcgtgccagttttggcaatcccaggaggagaacttaagttattgtaagatagattataagattgacttcctttggtgggctgcaggctcataacat

SEQ ID NO: 36880 - DNA, 389 bp, Gossypium hirsutum
  Clone ID: LIB3165-007-P1-K1-F11
gtccttaggccacgaagttcatggtgttgaaggatttgggttggatttatttgattctcttggagattgggtaatctgcatatcggcatagtctggtttatttgttgacatctaaaagatgtcaagtaagaaagaagaaaaatctcaagcagctgccgacagaatcaaggctgctgcattgactgctgcaaaaggcctcagtcgagctcaggctgaaagggcagctgctgccgcagctcgaaatgttaatgcttatgggcaaaaggaagaaggacctagcagatggcaggagaagagggaagccaagaagcagatgtatttgatgagcacagagaaggcggtgaggttaggggaaaggaaagacaaggcatcaatgtctacaatgggtg

SEQ ID NO: 36881 - DNA, 270 bp, Gossypium hirsutum
  unsure (1)..(270): unsure at all n locations; Clone ID: LIB3165-007-P1-K1-F2
tatgtnntttctggctgnntaggtaagaagagaacctaggtagtttacaattcatattttgtccatattnttgtagtggttcttcaattgtacatgtgaaaaaaggggggcttggatggtcaagcattctagtttagagaataaaacaggtaaaaattaaaacggcatcgntatatctcatatcttgatgcatttgttttggtgttgtaatctttaatgtttttttctttattgtaaaatatattaggtgtatgatttgaaagtttgctt

SEQ ID NO: 36882 - DNA, 370 bp, Gossypium hirsutum
  Clone ID: LIB3165-007-P1-K1-F3
cccacgcgtccgtcaccaccaccatagtccaacattttcataacaatggctgcgatcacaaacgccgctgctacatcctccttcatggggacactcttccccgacgtctacacaagttcagggagattcgtcgccaggtttggctttggcggcaaaaaagcagctcccaagaaagtctcgaaacgaaccccagaccgccctctatggtacccaggagcagtggcgcctgattggctcgatggaagtttggtgggtgattacgggttcgacccgttcgggttagggaaaccggcggagtacttgcaatatgatttggattctttggaccagaacctggctaagaattcggctggggagataattggaacta

SEQ ID NO: 36883 - DNA, 412 bp, Gossypium hirsutum
  Clone ID: LIB3165-007-P1-K1-F4
aaattccggggcggaccacgcgtccgcggacgcgtccgcccacgcgtccgtactagtggtctcaggcttcctcatccaggtggggaagcctgaggagattaccaaggaagaatatgctgctttttacaagagccttacaaatgactgggaagagcatttggccgtcaagcacttctcagttgaggggcaacttgagttcaaggctgtcctctttgtccccaagagggctccttttgatctctttgatacaaggaagaagcccaacaacattaagctctatgtgagacgtgtctttatcatggacaactgcgaggagttgattcctgaattcctcagctttgttaagggtattgtcgactcagaggacctttctttgaacatcttaagagaaatgttgcagcaaaacaagatc

SEQ ID NO: 36884 - DNA, 391 bp, Gossypium hirsutum
  Clone ID: LIB3165-007-P1-K1-F5
cccacgcgtccggagacattgagatggaacgtacaagcagagctggtgcactgcagatgggcaatgttgggagctgctggtattttcatcccagagttcttaaccaagattgggattttaaacactccatcgtggtactcagctggaacagaggaatacttcactgacaccacaactctcttcatcgttgagcttatttttatcggctgggctgaagggagaagatgggctgacattctcaagccagggtgtgtaaacaccgaccccatcttccctaacaacaagctcaccgggactgatgttggatacccaggtggcctgtggtttgaccctcttgggtggggaagtggttcgcctgagaagatcaaggagctgaggaccaaagagatca

SEQ ID NO: 36885 - DNA, 388 bp, Gossypium hirsutum
  Clone ID: LIB3165-007-P1-K1-F6
tgaaaagcagaaagataaaataactgctgttgtcttttgtactagcacatcggctggtactgagatctataagagattacttccactttaccttcctcgagataagcatgaggaggcggtggccatatctaagcttcctgctgatgttggggatgaaaatggtgagactatcaatcatgagcgtaaaatcagaataaagccattgcccaaaaaggtcatcccaaagccttcccaatctccagctgaagtccctgctagtgatgtaggtttggtacaaagaaactcaagttacttagatacatatttggatcctgctttcatgtccctgatgaaagatccagaccagagacgccaggaacaatgggaaaaaactgctcaagcccaaggt

SEQ ID NO: 36886 - DNA, 395 bp, Gossypium hirsutum
  Clone ID: LIB3165-007-P1-K1-F7
cccacgcgtccgcccacgcgtccgtctggatacattcagcaagccttgcacaatggccaccatcacctctgccgctgtcgctatcccatctttcaccggccttaaagccggtgcaaccgcagctaaagttagcgccacagccaaggttgcagcctctccagtcccaagggtcagcatcaaggcctccctcaaagacgtcggtgttgctgttgcggcaactgctgcaagcgcaatccttgccaacaatgccatggccattgaagtcttgctcggcagtgacgatgggggtctggctttcattcccaaagaattcagcgtaagcccaggggagaagattgtgttcaagaacaatgccggattcccacacaatgttgtgttcgatgaggacgaaatcc

SEQ ID NO: 36887 - DNA, 358 bp, Gossypium hirsutum
  Clone ID: LIB3165-007-P1-K1-F8
acccactcgtgttttaagatcgtttttgccgcccttttttttttttttttgggggggggatcacaggggggtttgtgtcacacaaaaatagggtgcccaattccacttaaaacacaaagggaaaacacactttcatttaagacacaaaggggggatttcctttgttgtggcaaaaaatgaattcttggttccttaagcattcaatttcccattataaaagctcctatcttgatagcatcgtcattagcttttccaagggcaggcttactcaaatatttggcagccaattgaaccctcttcacattctcttgctcagcaacaagcatgtatccatattccaacagcttctcaatggtca

SEQ ID NO: 36888 - DNA, 391 bp, Gossypium hirsutum
  Clone ID: LIB3165-007-P1-K1-G10
cccacgcgtccgcttttgtttagattaaattctgtttgagtttcctttggtgggtgatcagacttagagagagagcagagtaatttgggtcaagtgtttctgggttttcacaaccatggcttcttcaatgcttagtggagcagccccaacaggggtaggatttgcgaggtccaattttcattttaggagcttgccccagaagagtttattttcttatacaaagaatcagaagactagaatggtggtaacaaccagatgcagtatatcatcctcaaggccggcttctcagcctaggttcatacaacacaagaaagaagcgttttggttttacaggtttttatcaatagtgtatgatcatatcataaaccctggtcattggactgaggatatg

SEQ ID NO: 36889 - DNA, 209 bp, Gossypium hirsutum
  Clone ID: LIB3165-007-P1-K1-G11
gaaaccctaaatcaacagataatggcgacgtcggacagtgattggaggtggaaaaacattgtttttggtgaacttcggagaactgctgcttattacaaaggcccacatttcatctactctcaatcttggttgcaacagaaacagcccttaagggggaagccgtctggctctgtccaccagactaagcaacagcataccttgttaaattt

SEQ ID NO: 36890 - DNA, 392 bp, Gossypium hirsutum
  Clone ID: LIB3165-007-P1-K1-G2
ccttaacacaagttacaaacttaataaccccaagttctcactttcaaaaaggtggccacattcaccaggtctgagaggtgcggcaactgtgactgcgctgaccgcagccaatgcacgaagggaaacagcaacaccatgatcattgagactgagaagagctacatcaacactgctgtgatggatgctccagctgagaacgatggcaagtgcaagtgcggtactggctgcagctgcacagactgcacctgtggccactaagccaacatacaatggtcatgcttcaggtcatggcatatatagggatctaaataatgaatttaaggttgaataatttgtctggtgtagtttgtgtggtgacttatatctgtcagttaacctttgtatcctttact

SEQ ID NO: 36891 - DNA, 358 bp, Gossypium hirsutum
  Clone ID: LIB3165-007-P1-K1-G3
catgacccaccaccggcaccgttgtatgacatggaagaactcaccaaatggtgggtttatagggcggcgatcgctgagttcattgccacccttcttttcttgtatgtcacggtgttgactgtgatcgggtataaagtccaaaccgacccggtaaagaatactattgacccggattgtggtggtgttggtatacttggtattgcttgggcttttggtggcatgatctttatccttgtttactgcactgctggtatctctggaggacacatcaacccggcggtgacgtttggactgttcgtggggcggaaggtgtcactgagccgagccctgttgtacatggtggctcaatgcttgggtg

SEQ ID NO: 36892 - DNA, 386 bp, Gossypium hirsutum
  Clone ID: LIB3165-007-P1-K1-G4
cggaaaaaccgggccggacgaacccttcctcggacccttggccggacccttggttgttacccgtgggcggacacatggccgaacgcgggggctgacgcgtgggtgagttttgaatctagggatttgcgggtggagaagactagagctcatctctctgcttcaaagctcctgtccaggtagaattctcttcttcctttgcgttgtgttctttgttgttcagtcagccatggcttcaaagcggattttgaaggaactcaaggatttgcagaaagatccacccacttcttgcagtgcttgtccagtacctgaagacatgtttcattggcaagcaacaatcatgggacccttagatagcccttatgcttgaggtgtgtttctagttacca

SEQ ID NO: 36893 - DNA, 410 bp, Gossypium hirsutum
  Clone ID: LIB3165-007-P1-K1-G6
aaattcccgggctggctgttaatttttttttctctcaaagtaagcaagcaattattttagggagcacaactcccccccccgaagtttcgctgttcagtgacaatggcgattgtgaagatggtgatggctgtggttatcatggcagcgtccctcggagggaaattgggtgcagcacaagtgcaccatgtggtcggaggtgaccgtgggtgggacgtttcctctgacgtggcatcttggtcctccggtaggagcttcagggttggagacaaaatttggtttgcctacgccgcagcacaggagagcattgctgaggtgaatagcccggaagaatatgagtcgtgcgatgtgagcaaccccataagaatgtacacggacggcatagatggcatcccactggatggggaagggat

SEQ ID NO: 36894 - DNA, 389 bp, Gossypium hirsutum
  Clone ID: LIB3165-007-P1-K1-G7
aacgactcgagaaaagcaatccataacttctggttattattcatctgcatttgggtcccttccaaactctacactgaagtctgaaagaacattctttattaaaatccaaaacccatttcataaaatccgataacattgctcaccatcttgattctgacaagttgatccatctgagatgtcattttttcacttgagattgtctgctcgacatccacattcaagcaatgttccagacacccttttgtggcctatttcctctgtggtggattatatgcatcgccaaccaaacgtgttgctctcaaattaccatcaattttttgtgaagaaagtattttccctctattcctgtagatgttcattgagccttcagcctgttagagctttgcaaa

SEQ ID NO: 36895 - DNA, 337 bp, Gossypium hirsutum
  Clone ID: LIB3165-007-P1-K1-G8
ccgaagggtccagggtttccccaaacttttttcaaatcctggtctaaccaattttgggtgaaagcctagtaaaagggcgtccacatttagcggtgatgaaactgctcctttcttcggcttcctcggagccgctgctgccctcgttttctcctgtatgggtgctgcgtacgggacggcgaagagcggtgtcggggtggcgtcgatgggagtgatgaggccggagttggtgatgaaatcgatcgtgcccggtgttatggccggagttttaggtatttatgggttgatcattgcggttattatcaacactgggattaacccaaaggccaaaacgtactac

SEQ ID NO: 36896 - DNA, 387 bp, Gossypium hirsutum
  Clone ID: LIB3165-007-P1-K1-H1
cttgagattatcaatttgaagccttcttcgaatttcctcattcaagatgcaaggtttcgtcaagaccctcaccggaaagaccatcacattggaggtggagagttctgatactattgacaatgtaaaggccaagattcaggacaaggaaggcatccccccagaccagcaaaggttgatcttcgctggtaagcaacttgaggatggccgcacgttggctgattacaacatccagaaggagtccacactccacttagtgcttcgcctccgtggaggaatgcaaatttttgttaagactttgactgggaagaccattacattggaggtagagagttcagataccattgataatgttaaggcaaaaattcaagacaaggggggaattccccc

SEQ ID NO: 36897 - DNA, 225 bp, Gossypium hirsutum
  Clone ID: LIB3165-007-P1-K1-H10
agaaaagtttctttccactctatatggcgtctcccttcccatcataccaactggctgctttgtatcattatctcactccatctcctgcccttttctccaaccagcttcttcctgaaaaccatgttaattggactcaaaccccagaggctcacgtctactctgctgatcttcctggggtgatggaaggcggaaataaaagtggaagccgaggactcaagatatctt

SEQ ID NO: 36898 - DNA, 392 bp, Gossypium hirsutum
  Clone ID: LIB3165-007-P1-K1-H12
acgcgtccggagctcccttcatacgttactagattatcttctctctcttctcttaccatggggccttacaagtttcgtgcttcaagttcctttgattccccgttctggaccaccaattctggtgctccagtttggaacaataactcatcacttactgtgggagcaagaggtccaattctccttgaagactatcatttggtggagaagctagctaatttcgatagagaacgcatacctgaacgtgttgttcatgctagaggagccagtgcgaaagggttcttcgaggtcactcatgatatatctcagctcacatgtgctgatttccttcgtgcccctggagtccagacccctctcattgttagattctccacggttattcatgaacgcggtag

SEQ ID NO: 36899 - DNA, 322 bp, Gossypium hirsutum
  Clone ID: LIB3165-007-P1-K1-H2
gatggtactcactatgctgtcatgagctcctatgaataccttagccaagggcggcgcacatacgacttggacaacaacatggatggattctacattgccccagctttcatggacaagcttgttgttcacatcaccaagaacttcatgacccttcctaacattaaggttcctcttatcttgggtgtttggggaggcaaaggtcaaggaaaatctttccaatgtgagcttgtctttgccaagatgggaatcaaccccattatgatgagtgccggagaattggaaagtggggacgccggagaaccagccaagttgatcaggcaaa

SEQ ID NO: 36900 - DNA, 359 bp, Gossypium hirsutum
  Clone ID: LIB3165-007-P1-K1-H3
gtccaaacttgaggtcaggtcgttcaagcatggcagtcaatgaaactgggaaggatggaatcataggggtagggatgatgggaagagaacatcttattaatcttcaccatcttagaacccaaggagtggtggttgtttgcatagctgatcctcacgtaccctctcagcaacttgccttggaactggctaaatcctttgattggccacttaaggtcttctcggggcaccaggaactactggacagtggcttatgtgatgtagttgttgcgtcaagccctaatatgactcattatcagattctgatggatattttgaaccatcctaaacctcatcatgtgctagttgagaaaccattgtgt

SEQ ID NO: 36901 - DNA, 218 bp, Gossypium hirsutum
  Clone ID: LIB3165-007-P1-K1-H4
cgtccggtgaacggcacttgcacatgggttagtttatcctaagagacgggggaagcccgtgcggcagttcgtccagcgcgagcttcgaaagggaatcgggttaaaattcctgaaccgggacgcgggggctgacggtaacgttagggagtccggagacgttggcgggggccttgggaagaggtatcttttctgtgtaacggattgcccattgtggaaac

SEQ ID NO: 36902 - DNA, 349 bp, Gossypium hirsutum
  Clone ID: LIB3165-007-P1-K1-H6
tccgagcaagccatggttgatacatatctacgacagcgagcacagtacgtacgccctggaggggatcctcgatcactggtttgctcctttcgcttccaatcctcctttcaagctcgtcatcgttcatgccaagcctactgcttcttctgctgttggtctcgccggacctggagctgctgatgtattgccctatgtggatgcggatttgaggaagatcgctcccagggttgttgagaaagccaaggaactctgccttagcaaatcggtacatgatgccgtagttgaagtggtggaaggttatgcaaggaatgttctctgtgacgctgtagaaaaacaccatgccttcgtt

SEQ ID NO: 36903 - DNA, 364 bp, Gossypium hirsutum
  Clone ID: LIB3165-007-P1-K1-H7
caggaactgcggggatattttctgtgacaagtgtacccatgctagaattgctcgagacgtgctgatgagaatgctccacaagttagggtttgcgaccgatgcatggctgaagtcactcagaggctgaataatgctaaggaaatatcaagtaaacctactgtattgcagagccacgaggatcttgctaagaagcttcaggaagagatggggagaagtcgcagagcatcatcagactccatgtctgatgcctctggtaggcggatgaaggaagttgcctgtcctacatgcacagttcatttgcaggttcaagttccaagctcaggttctgagaccattgaatgtggggtgtgccagcattcttttc

SEQ ID NO: 36904 - DNA, 276 bp, Gossypium hirsutum
  Clone ID: LIB3165-007-P1-K1-H8
cccacgcgtccgcccacgcgtccgtccacgcgtccgaacggatatttatgcttggtgaccatgatatggatggagcccttagtgatgcagagttgaatgagtttcaggttaaatgttttaatgctccattacaacctgctgagattgtgggtgtaaagagggtggttcacgagaggatatgaggaggagtctgcaaccttggattaactgttgaagggttgctttatcttaatgcacttttgatagaaaaagggcgtgttgagacaacttgggctg

SEQ ID NO: 36905 - DNA, 293 bp, Gossypium hirsutum
  Clone ID: LIB3165-007-P1-K1-H9
cataaggtttcatgactgggccaaaccaggttcgatggggaggcaatatttcttggggtgcgagaagtacctcggagggtctggtgagccagcataccctggaggaccactgtttaacccacttggttttgggaaagatgagaagtcattgaaggatttgaagctgaaagaagtgaagaatgggagattggcaatgttggcaatcttgggttacttcatacaagggctcgtgacaggtgtaggaccataccaaaacctgttggatcacttggctgaccctttcaacaacaatg

SEQ ID NO: 36906 - DNA, 307 bp, Gossypium hirsutum
  Clone ID: LIB3165-008-P1-K1-A11
cccacgcgtccgaccatcctcatcttttttcacttgaccacctgaaaagagaagctagaaatagagaggagaaatgatgcaatctcgctttacctctgttgttcgtgccatatcatccgccgcaaaggcaagacccttctcatccaccatcgattcacctacccccaccaaacccgatttccctcccacccttgctggcctccgggcccgccttgccgccgaatctcccaccctctccgattttttcggtctccaaaccaataacctctattcggtcgaagtcggcaccaagaaaaaaccgctccct

SEQ ID NO: 36907 - DNA, 390 bp, Gossypium hirsutum
  Clone ID: LIB3165-008-P1-K1-A12
cccacgcgtccgatagcatacactactagtacccactactagcaatggcttcctgaatgatctcatcggctaccattgccactgcctctccggcacaggctaacatggtcgctcctttcaccggtctcaagtctgcctctgctttcccagtcaccaggaaggccaacaacgacattacttctctcgcaagcaatggcggtagagtgcaatgcatgcaggtgtggcctcctactgggaagaagaagtttgagactctctcatacctccccgatcttacacccgtgcagttggctaaggaagtagattaccttcttcgctcaaaatgggttccttgcttggaattcgaattggaggagggattcgtgcaccgtaagtactcgagcttaccca

SEQ ID NO: 36908 - DNA, 52 bp, Gossypium hirsutum
  Clone ID: LIB3165-008-P1-K1-A2
ggtaccgaaccgcagtttccgcctagacgtacgcttacgcttacggtaaggg

SEQ ID NO: 36909 - DNA, 399 bp, Gossypium hirsutum
  Clone ID: LIB3165-008-P1-K1-A3
acgcccacgcgtacgcccacgcgtccgctctcaaattcagttaacaatttcacagttgttttcttcagtctctctctcagccatggctgcagccatctccaccgtcgctgccgctgccgccgccaaccgagctctgggagtgtcagtcccaacctcagctttcatggggaagaaagtgagctcaagattcaacagcaccaggcaggttccttcgggaagttttaaggtgatggcggcggagaaagagatagacgaagagacacagaccgaaaaggaccgatggaaagggttggcttacgatatttcggacgaccaacaggacattactcgagggaaagggatggtggattccttgttccaagctcccatgaatgatggaactcactatgctgtcatgag

SEQ ID NO: 36910 - DNA, 390 bp, Gossypium hirsutum
  Clone ID: LIB3165-008-P1-K1-A4
attttctgtcattttcatttgggattttctcagttagatattctttttctttaaattttcatcgatggcacagcagcaggctcaggtgaagttcacgggcggtgaagccacagttgatggtgaagacgccaaaggcagttgatgcagttaatttctacaagtccgcttttggcgccgtcgaagcaggccgatctgcttgctgccccccgccaacggccgaacagaacctccctaacatcctctgcgctcagcttgagctcgccggctgttccttcgtcgtatataacgacgactccgctccacagaaaatcgaagggatcggaaatcaactctgcctggaaactgatgacgtggaagccgccatttccaaggccgttagcgccggagcgg

SEQ ID NO: 36911 - DNA, 122 bp, Gossypium hirsutum
  Clone ID: LIB3165-008-P1-K1-A5
ccaacccgtccgtttggttttgaggcttgtcaccgggggtccaagtcccgaaccggtgggtggccggcccactgctgaggctgttcccgcggcaagggcggtcggcccggtgccggccgggg

SEQ ID NO: 36912 - DNA, 372 bp, Gossypium hirsutum
  Clone ID: LIB3165-008-P1-K1-A7
acgcccacgcgtccggaactaattccttaaaatttggttcaataattggttgcttaagtattggttttttaggtacccttaaaccttattttaaatgttgaaaaccctggtgagagggggttctcttcttgctaggagcccttcttctttcaaggatgaagccagtggtggcaagaagatcaagaccgacaagccttactgaatcaatggtggtatgagcttgagggatggtgttgatgcctctcgaaggaagggtaagggaaagggtgtttaccaatatgttgacaaatatggtgctaacgtcgatgggtacagtcctatctacaacaccaacgactggtctcccagtggtgatgtttatgttggcggtac

SEQ ID NO: 36913 - DNA, 394 bp, Gossypium hirsutum
  Clone ID: LIB3165-008-P1-K1-A8
cccacgcgtacggttttccccattttccagtgtttgattggaggaaaatattttccttttggaaaatcaactccaaaacacgggaaaatgccttacaattttgggaaattgtcttaccgattcaatctccgtaagacattttcctaaagctctcatgcattcttctcccttcatccagtaagcttccttcatccattcttctcccttcattccttcaaatttccgttcttgaaagcttcattttggttcagaactggaaaccgctgctgttggttgtggaaagaatgttggcttctgaaggaataaaagggatagaattgggcagagatgaatttgaaaaacgagtttgggagtggaaagagaagtttcgaccccgcattcttattgatgttaa

SEQ ID NO: 36914 - DNA, 350 bp, Gossypium hirsutum
  Clone ID: LIB3165-008-P1-K1-A9
gtccaatcactcccaatactttcataacatttcacgaacttcactctccagtctccaatggcggctgccgtctccaccatcggtgctgtcaaccgagcaccgttgagtttgaatggatcaggtgccggagcttctgctccaagctcagctttcatggggaacagcttgaagaaagtgagcgctaggttcaacaacaacggcaaggctccagtgggaagtttcatgattgtggctgccaaagaaatcgacgaagacacacagaccgaccaggaccgatggaagggtcttgcttatgatatctccgatgaccaacaagacattaccagagggaaaggtatggtcgactcatt

SEQ ID NO: 36915 - DNA, 388 bp, Gossypium hirsutum
  Clone ID: LIB3165-008-P1-K1-B10
ccaattttacaaatacaatccttccatgcaaggaaaagaccctgttagggtgatcagggaggcactcgcacaagcgttagtgttttattacccgtttgccggtaggctaagggaaggagctcagcgcaagctgatagtggattgcagcggtgaaggtgtaatgtttatcgaagcggatgcggatgttacgctggagcaattcggtgatgcacttcaaccaccatttctatgcttggaggagctcctttatgatgttccgggttctactggggtgttgaattgccccgtaatacttattcaggtaacacggcttagatgcggtggttttatcttcgcccttcgcctgaaccacaccatgagtgatgctgctggcctagctcaattcatg

SEQ ID NO: 36916 - DNA, 390 bp, Gossypium hirsutum
  Clone ID: LIB3165-008-P1-K1-B12
gagactcttttgtataactgtagcatatagtactagtaagcagtaatagcaatggcctcctccatgatctcatcggcaaccattgccaccgtgaactgctcctccccggcacaggccaacatggtggcccccttcaccggcctcaagtctgcctctgctttcccagtcactaggaaggccaacaacgacatcacttctcttgcaagcaatggtgggagagtgcaatgcatgcaggtgtggcctcctcttgggaagaagaagttcgagacactctcatacctccccgatcttacacccgtacagttggctaaggaagtagattaccttcttcgctctaaatggattccttgcttggaattcgaattagaggagggattcgtgcaccgtaag

SEQ ID NO: 36917 - DNA, 383 bp, Gossypium hirsutum
  Clone ID: LIB3165-008-P1-K1-B2
ggagtaccaaaccgccgttcaaatggctattaggaagctaagaggtctcatcggtgagaagaactgtgctccactcatgctccgtctagcgtaagcttctcttttttctatcgtctgatttgaaatttggtattgagatccgtgaagctgataggccttacggtgatgggtggggacaggtggcactcagctggaacttttgatgtcaagaccaagaccggaggtccattcggaaccatgaagcaacctgctgagctcgctcatgctgctaacaacggtctcgatattgcagtcaggcttctcgagccgatcaaggagcagttccctatcctttcatacgctgacttctatcagcttgctggtgttgttgtgttgagatcacc

SEQ ID NO: 36918 - DNA, 394 bp, Gossypium hirsutum
  Clone ID: LIB3165-008-P1-K1-B3
gatcatccaaaatttaaacgaaagggtgatgacttatttgtagaacatacgttgacacttactgaggcagtttgcggcttccagtttatactgacccacctagatggtaggcaacttctcattaagacccatcctggtgaagtggttaagcctgatcaatgcaaggccataaatgatgaagggatgcctatgtatcaaaggccattcatgaggggtaaactatacattcactttaccgttgattttcctgactccttggcccccgagcagtgcaaggcactcgaggctgtgctaccttcgagggcctcagtccagctgacagacatggagctggatgagtgtgaggaaacaactctatatgatgtcaacattgaggaagagatgcgtaggaagc

SEQ ID NO: 36919 - DNA, 378 bp, Gossypium hirsutum
  unsure (1)..(378): unsure at all n locations; Clone ID: LIB3165-008-P1-K1-B4
cccttccgtcttctacaataacccccaaaaaccaaagcaaatggtggaagatggcaccacaggcacttgtttcatcgtctctaacctactcagtggagactgcaaggcaaattcttggagctaaacgacaaattgggccttcaaggaagggatcctttgttgttaaggcagcttcgactccacccgttaagcaaggagctgatatacctttatggtttgcatctaaacanagcctttcatacttggatggcagccttccaggtgattatggatttgaccccttgggactctcagaccctgaaggtccaggagggttcatcgagcctaaatggctagcctacggtgagatcatcaacgggcgttatgctatgttgggtg

SEQ ID NO: 36920 - DNA, 392 bp, Gossypium hirsutum
  Clone ID: LIB3165-008-P1-K1-B6
cccacgcgtccgcccacgcgtccgtctactcttccggaaaaatggcttctgcttccgctgctctcctcaagtcttcacctattatcgacaagtccgagtggattaagggccaaaacctccgccacccttcggtttgttttgtacggtcacaccctacatcggccgcctttgccgtccgtgctagttcatatgccgatgagcttgttaagaccgcgaaaactgttgcatctccaggtcgtggtattttggccatggatgaatcaaatgctacatgtgggaaacggcttgcctcgattggtctcgagaataccgaggcaaaccggcaagcttaccgtacccttctcgtgtctgcccctggcctcggtgactacatctcgggagctatccttttc

SEQ ID NO: 36921 - DNA, 383 bp, Gossypium hirsutum
  Clone ID: LIB3165-008-P1-K1-B7
cccacgcgtccgctcttctctgcttttacaagcaaatttcttcgaggctgtattttcagatatcggaactggcaaacagcaattccacggacaaatggattataaagcggctggtttatatacgttggatgaagcccttgaaactgtggggtttgggaaattccagggctttgttcttggatacgctggtcttggttggtttgctgaagccatggagattatgattctttcctttataggacaagctgttaaatctgagtggcaactttcctctggtcaggagagccttttaagtaccatcgtctttgctgggatgcttctcggagccaaaacatggggccttttatcagataactacgggaggaggaaagggttttttacta

SEQ ID NO: 36922 - DNA, 389 bp, Gossypium hirsutum
  Clone ID: LIB3165-008-P1-K1-B9
ctcttcttctgcttctagtttagctaatctcaaaagactccccttttagctagcggctcctctcttgagtactataatgggtaaaggagaaggttcacatcaacattgtggtcatcggccatgtcgactctgggaagtctacaaccactggtcatttgatctacaagcttggtggtattgacaagcgtgtgattgagaggtttgagaaggaggctgctgagatgaacaaaaggtcatttaagtatgcatgggtgcttgacaagcttaaggccgaacgtgaacgtggtattaccatcgatattgccctctggaagtttgagactaccaaatactactgcacagtcattgatgcccctggacaccgtgacttcatcaagaacatgattact

SEQ ID NO: 36923 - DNA, 230 bp, Gossypium hirsutum
  Clone ID: LIB3165-008-P1-K1-C1
gtgagactcttttgaatacctgtatcatttagtaatagtaagcagtaatagcagtggcctcctccatgatctcatcggcaaccattgccaccgtgaaccgctcctccccgcacaggcctcatggtgcccccttaccggctcaaattgctctgtttccagcacaggaagcacacacatacttttgagcacggggagcatcatcaggtgcgcttggagagagtgagctttat

SEQ ID NO: 36924 - DNA, 389 bp, Gossypium hirsutum
  Clone ID: LIB3165-008-P1-K1-C10
atctgcatattactcgaggtgaatatgatgaagattcccgttatccagagaacaaaacactgacaattggtcaattcaagcttgggatatgccatgggcatcaggtcattccatggggggatttggattcactagcaatggtacaaaggcaattggacgtggatatccttgtaactggtcacactcatcagttcaaagcatacaagcatgagggtggtgtcgtcataaatccaggctcggccactggtgcatatagtagtttcacctacgatgttaacccgagctttgtgctcatggacatcgatggcttgcgtgttgtggtatatgtgtatgaactcatcgatggtgaagttaaggtcgacaaaattgattttaagaagacagccact

SEQ ID NO: 36925 - DNA, 389 bp, Gossypium hirsutum
  Clone ID: LIB3165-008-P1-K1-C11
cccacgcgtccgcccacgcgtccgttctatgctgccttgtggaaaaaaaaaaaagaaaaaaaaaaaaaaaaaaaaaaaaaaaaaaaaaaaaaaaaaaaaaaaaaaaaaaaaaaaaaaaaaaaaaaaaaaaaaaaaaaaaaaaaaaaaaaaaaaaaaaaaaaaaaaaaaaaaaaaaaaagggggggccgtttaaaagaaccaaagttaaataaccggggaatgcaacgtaaaaattttttaaaggggccaccaaaataaaattaatgggccgggttttaaaaactttggaacgggaaaaaccctggcttaaccaaattaaatccctttgaaaaaaatccccttttcccaagttgggaaaaaacaaaaaaggccccaacaaatcgcttttc

SEQ ID NO: 36926 - DNA, 388 bp, Gossypium hirsutum
  Clone ID: LIB3165-008-P1-K1-C12
aaaaaaaattcttctctctgcttgcaactcctgataattatcttcaaactctggaatatagaaatggaaggagtgggctccaccaggctgggccgagcttccgctaggtacggaggttcaacggcggtgttcaatggaccagtgaggaagtggaagaagaagtgggttcacgtatcgccttcatccaccgctaaactctctcagtccaacgggaacggttccgccgcctccagcatcctactttgtaggtggaccccactctcctttgctgattccgggtcctccgccgtcgatggcgaggacgaggagcaacccccaaagcgcaagtaccgttatacccctgttgctgtgttagaggaagagcgtagaagggcagctgctgcaaaac

SEQ ID NO: 36927 - DNA, 398 bp, Gossypium hirsutum
  unsure (1)..(398): unsure at all n locations; Clone ID: LIB3165-008-P1-K1-C2
cccacgcgtccgaatctccttcctagttcttcctctttctggcctaacaagaaatggtgacagtgaacacacctgagtttgatagaacaagcgaactgaaagcttttgatgacacaaaagctggagttaaaggccttgccgatggtggaatcacgaaggtccctcgaatatttcatcaaccgcctgaaaaactccacanattcccagtttcaaacgattcccagttcagtattccggtcatagaccttgaaggagtgaacaatgatccgattactcgaaaggaagtggtggataaagttggaaatgcatcaaggaaatggggttttttccaagtgatcaatcatgggattccagttagtgtcatggaggagatgaaggatggtgttaggaggtttcat

SEQ ID NO: 36928 - DNA, 394 bp, Gossypium hirsutum
  Clone ID: LIB3165-008-P1-K1-C3
cccacgcgtccgaaatacccaagtttttataaatttaaatatataaattaataagcacgaatctatggctcaactagggtcgtctctgtcagcagaaaccgagacactgagcaatgtcctaagcctggtggaggccttcagagcatttgattcagacaacgatggcgcaatcaatgctgcagagctagggggaatcctgagttcgctggggtacaacgctagcgagcaagacgtgagggccatgatgcgagaaggggacaccaacaaggacggattgctgagcatggaagagttcctagagatgaacaccaaggacatggagcttggggagcttgccaatttcctcaggaccgctttccaagcttttgaagtcgaaggggatgatgctttgaca

SEQ ID NO: 36929 - DNA, 395 bp, Gossypium hirsutum
  Clone ID: LIB3165-008-P1-K1-C5
cccacccgtccgcccacccttccgttattgtccacggcttcggtctccggcttgggcctgtcttccaataccacctctccttctaactcactccggcaacccacattgcggcggccctctatcatcgccaacctcaactcttccacttctcctcctacactcatccgaaatcaaccagttttcgcagcacctactcctttgctcactccttccaattggaaagaaaccatgggagacgagtcatacgaggaagccattgaagctctcaagaaactgctcaatgagaaaggagaattgaagagtgcagcgacggcaaaggtagagcaagtgacagctgagttgaagactgctgcttcctccgatgagtctgttgaccgcttgaaacaaggcttcat

SEQ ID NO: 36930 - DNA, 397 bp, Gossypium hirsutum
  Clone ID: LIB3165-008-P1-K1-C8
ccaaacatgtcgttactcagcagccataccatccttccccgacctttactccaccttcctccccgaaaccctaacttcccaatcttcaccttcaaacccatcttccttcccctttctcctcccattaaaccctcaaactccgtctccaaaccccccaaatttatccctttagcttccatttctgcacccccggcaacaccctgcaaatctcccgaaatcccagctctgtccccactcaacggttcaactcgaaccctcaaaacccttttctccttggccctctccgccaccatcgtcttcaccaaaatgatccaaaattatgctctcaaaacaatctcccagaaccccaacgcactttccaccgtgggccctctcttcttcgcttccttaaaggacc

SEQ ID NO: 36931 - DNA, 391 bp, Gossypium hirsutum
  Clone ID: LIB3165-008-P1-K1-D1
cccaggcgtccgaaaaatcagttgtttattaagggcctctacaaccatggctttttgtgcccaataattcgccggtagggcagaaaagttctccccttccacccctgaaatccggggaactggccgtgtttccatgaggaaaaccaccaagcctggtccttctggtagcccatggtacggtcctgaccgagttttgtccttgggtccactatccggtgagccaccatcttacttgaccggtgagttccctggtgactatggttgggacactgctggactctcagctgatcccgagacctttgctaggaaccgtgagctcgaagtcattcactgcagatgggccatgttgggagctcttgggtgtgttttccctgagctgttggctaggaac

SEQ ID NO: 36932 - DNA, 392 bp, Gossypium hirsutum
  Clone ID: LIB3165-008-P1-K1-D10
caattgtcctcaaatatctcatacatggaattaaattgaattaatggctcaaacgatgttgctcatgtctagccatgcagtgagcttgaagagagatcaccctttactccatttccaagctcaaggactcaagcctaaacctgcctctcatctcttcttcaatccattgtctaatggtgtccatacttcacccaaagctttcaccactttagctgtctttaaatcaaagaccaaagcagctcccaagagggttgagccaaagccaaaggttgaagatgggatctttggcacctctggagggattggttttaccaagcaaaatgagctctttgtgggacgtgttgccatgcttggttttgctgcatcattgctaggcgaagcaataacaggga

SEQ ID NO: 36933 - DNA, 390 bp, Gossypium hirsutum
  Clone ID: LIB3165-008-P1-K1-D11
cattatttggcgacaggagagcttgtaagcttgagtgagcagcaacttgttgattgtgatcacgagtgtgatccacaacaatatggtgcgtgtgactcagggtgtaatggtggtctaatgacctctgctttcgagtacaccctgaaggttggtggacttgagagagagaaggattacccttacactgggaatgaccgtggtccctgcaaatttgacaagaccaaaatcgctgcctctgtttctaacttcagtgtcatttctgttgatgaggatcaaatcgctgctaatttggtgaagcatggtccccttgctgtgggtatcaatgcagttttcatgcagacatatatgggaggggtttcatgtccttatatttgctttagaactttggat

SEQ ID NO: 36934 - DNA, 393 bp, Gossypium hirsutum
  Clone ID: LIB3165-008-P1-K1-D12
gtagcatatagtactagtaagcagtaatagcaatggcctcctccatgatctcatcggcaaccattgccaccgtgaactgctcctccccggcacaggccaacatggtggcccccttcaccggcctcaagtctgcctctgctttcccagtcactaggaaggccaacaacgacatcacttctcttgcaagcaatggtgggagagtgcaatgcatgcaggtgtggcctcctcttgggaagaagaagttcgagacactctcatacctccccgatcttacacccgtacagttggctaaggaagtagattaccttcttcgctctaaatggattccttgcttggaattcgaattagaggagggattcgtgcaccgtaagtactcgagcttacccacgtact

SEQ ID NO: 36935 - DNA, 395 bp, Gossypium hirsutum
  Clone ID: LIB3165-008-P1-K1-D3
cccacgcgtccgccaacgttcagtttcccggtatgtacaacaaggaagagaaccctcgtgttccgatcattgtcaccggtaacgatttctcgacgctgtacgcgccgctcatccgtgacggtcgtatggagaagttttactgggcacccaccagggaagataggatcggtgtttgcacaggtattttcaggaccgacaatgttcccgttgatgacattgttaagcttgttgacaccttcccgggccaatccattgactttttcggtgctctgagggccagagtttacgatgacgaagtgaggaaatggatcggagaggtaggagtcaatagtgtcgggaaaaagctcgtgaactcgagggaagggccaccatctttcgagcaacctacgatgacc

SEQ ID NO: 36936 - DNA, 394 bp, Gossypium hirsutum
  Clone ID: LIB3165-008-P1-K1-D4
cccacgcgtccgttcaaattcagataccattttcacagtggttttcttaactctgtttctcagccatggctgcagccatctccaccgtcgccgccgttgccgccgccaaccgagctctgggagtgtcagtcccaacctcagctttcatggggaagaaagtgagctcgagattcaacaacaccaggcaggttccttcgggaagttttaaggtgatggcggccgaaaaagagatagacgaagagacacagaccgaaaaggaccgatggaaagggttggcttacgatatttcggacgaccaacaagacattactcgagggaaagggatggtggattccttgttccaagctcccatgaatgatggaactcactatgctgtcatgagttcctatgaata

SEQ ID NO: 36937 - DNA, 393 bp, Gossypium hirsutum
  unsure (1)..(393): unsure at all n locations; Clone ID: LIB3165-008-P1-K1-D5
gcattacaagagctttttgaagcttttttttaatttataaaccaatgtttttcggtggccacaggggaaaacccttcctgacccatggaactacaggggctgccccgccgaccggtccaagtccggtggttggaccagtgcagccatgattctaggggttgaggcatgtgagaggctaacaacgttaggtatcgctgttaatatggtgacatatttaaccggcaccatgcatttgggaaatgcttnctcagccaccaccgtcaccaacttccttggcacatctttcatgctttgtcttctcggtggttttatcgccgacacttttcttggcaggtatctcacaattggaatcttcgccaccgttcaggcaactggcgtcaccattttgacaat

SEQ ID NO: 36938 - DNA, 393 bp, Gossypium hirsutum
  Clone ID: LIB3165-008-P1-K1-D6
gaggttctgtttgattatgaaaccaaaattaatcaggctgcctttcctggacttcaagggggtccgaacaaccacacaattactggtctagcagttgccctgaaacaggcaacaactccggagtacaaggcctaccaagagcaagttctcagtaattgctcgaagtttgcacagactctggctgcaaaaggatacgaacttgtttctggtggaacagagaatcatctagttttggttaatctgaagaacaagggcattgatggctccagggttgaaaaggtattggaagcagttcatattgctgcaaacaaaaacactgtacctggagatgtgtctgctatggttcctggtggcatcaggatgggaactccggctcttacgtctaggggattt

SEQ ID NO: 36939 - DNA, 381 bp, Gossypium hirsutum
  Clone ID: LIB3165-008-P1-K1-D7
atagttcgtaacaatgtcggtctcacttcaagctgcagctaccctgatgcaaccaatcaaggttgctgcaccatcaaggaccaatgtgctgctcaggtcctcccagagcgtttctaaggccttcggtttggagcctgttggtgctaggctcacctgctctttgcaaactgacctcaaggacttggctcagacgtgtgttgatgctaccaagctcgctggtttcgctcttgctacatctgctcttgttgtctcgggagcaagcgctgaaggagttccaaagcggctaacctacgatgaaatccaaagcaagacatacatggaagtcaaaggaacaggaactgctaaccagtgcccaaccatcgatggtggtgtcgactcttt

SEQ ID NO: 36940 - DNA, 391 bp, Gossypium hirsutum
  Clone ID: LIB3165-008-P1-K1-D8
cccacgcgtccgcccacgcgtccgttgacgcgtgggtgcgaaccaagatgatcggggaaaagcagatgatgccgccaaggaactcgaaacggttgctggacctgtggacttattgaccgatcttgataagctgcaagggagatggaaactgatatacagcagtgcattctcgtctcgtacactcggcgggagccgtcctggacttcccactggaaggttgctccctgtaactctcggccaggtttttcagagaattgatgtcataagcaaagattttgataatatagcagaaattgaattgggagctccatggccattacctgcacttgaagtactgctaccttagctcacaaatttgaaatcataggatcttcaaagatcaaaataacat

SEQ ID NO: 36941 - DNA, 394 bp, Gossypium hirsutum
  Clone ID: LIB3165-008-P1-K1-D9
ccggcttctgcctcacttccaacttcacctctccttctaactcactccgggaagccacattgcggcggccgtctatcgtcgccaacctcaactcttccacttctcctcctactctcattcgaaatcaacccgttttcgcagcacctactcctttgctcactccttccaattggaaagaaaacatgggagaccagtcatacgaggaagccattgaagctctcaagaaactgctcaatgagaaaggagaattgaagagtgcagcgacggcaaaggtagagcaagtgacagctgagttgaagactgctgcttcttccgatgagtctgttgaccgcttgaaacaaggcttcatttacttcaagactgaaaaatacgaaaagaatcctgctctgtatgg

SEQ ID NO: 36942 - DNA, 393 bp, Gossypium hirsutum
  Clone ID: LIB3165-008-P1-K1-E10
ttatatcccaacttcgaaaaaccctattcaacaagggagtgtaattttcatccgacatacatcactcttctcccacccacccaaccactttcctttctatcccaccattttctctttcttttgctttctaaaacatggccaaaacactacttaacaaacctctcattaccttcttcttctttttcttcttcagcttctttattcaaaccaagcaagataacccatgtccgtatccatgtttcccaccaccaacaggcaccggcggcggaggcggcggcggcacagtgacacaaacacctccagctagttactcaccaccctcccaaacaggagcataccctccacctacagggaacttaccatattactatccaccaccaccttatggtggag

SEQ ID NO: 36943 - DNA, 396 bp, Gossypium hirsutum
  Clone ID: LIB3165-008-P1-K1-E12
ctctaccactgaaagcaaagaaaaaatggcaacggagatggcccttgtaaagcctatctccaaattcagtacaagcagtccaatttttagcaactcccgatatgggaagttcacgaccgtcagaatgtcatctacttcccaatcaacagcaaaggccgccgcgaagggtggcaagaaagctgccaaaaccgccatcaaagagacccttttgacaccaaggttttacaccaccgactttgatgaaatggaggcgcttttcaacactgagattaacaagaaccttaaccagtccgagtttgaggcactgctgcaagagttcaagactgattacaatcagactcactttgtaaggaacaaggagtttaaagaagctgctgataagattgatggtccttt

SEQ ID NO: 36944 - DNA, 78 bp, Gossypium hirsutum
  Clone ID: LIB3165-008-P1-K1-E3
cccacgcgtccgattagaggcatcgggggcgcaacgccctcgacctattctcaagctttaaataggtaggacggcgcg

SEQ ID NO: 36945 - DNA, 384 bp, Gossypium hirsutum
  unsure (1)..(384): unsure at all n locations; Clone ID: LIB3165-008-P1-K1-E4
cccacgcgtccgatacgacttggacaacaccatggatggattctacattgccccagctttcatggacaagcttgttgttcacatcaccaagaactacatngacccttctaacattaaggttcctcttatcttgggtatttggggaggcaaaggtcaaggaaaatctttccaatgtgagcttgtctttgccaagatgggaatcaaccccattatgatgagtgccggagaattggaaagtgggaacgccggagaaccagccaagttgatcaggcaaaggtaccgtgaggccgccgacattatcaagaaagggaaaatgtgttgcctctttatcaacgatctcgacgctggagccggtcgtatgggaggaaccacacaatacacagt

SEQ ID NO: 36946 - DNA, 397 bp, Gossypium hirsutum
  unsure (1)..(397): unsure at all n locations; Clone ID: LIB3165-008-P1-K1-E5
cggccccgtggcctttgccttaacatctttcaactaagcctttcctttttctttgtctgttcgcctccaaatggcttctgccaccacttccaccactctttccctnctcaaaaccaccgnctnncaccaccttttcttcggctnccgctcttctgcatccctcatccgccttccttccacgcgccgccacctcaagtcctctcctctcatccacagcctaggcttctcctccgctgcttctggggactctctgctttccctccatgtctcctccaaagttcgatctttcaagggaaaagggtcaagaggggttgtttcaatggccaagaagagtgttggggacttgactgccgctgatttgaaagggaagaaagtgtttgtgagggctgacttgaat

SEQ ID NO: 36947 - DNA, 388 bp, Gossypium hirsutum
  Clone ID: LIB3165-008-P1-K1-E6
tttcaccttcttcactcccatttttttatttttggaaaccccataaaccaaacgtttatccattaatattaagacccaattctcacatcattttcctttgaggaatttaaccgaaaagtttggatttcttttttgtaggatccaacccatttcaggttgttttcaatggcatcatcggacttgaaagaatcagctgccaataaccctgggcttcatactacccctgatgaagctaccaaagactacatcatgcagcaaactatgtatcgaattaaggatccaaaagtcagtcttgatttttactctcgtgtattgggcatgtcgctgcttaagagagtggatgttccagaattgaagtttaccttgtactttatgggctatgaggatg

SEQ ID NO: 36948 - DNA, 388 bp, Gossypium hirsutum
  Clone ID: LIB3165-008-P1-K1-E8
cccacgcgtccgcccacgcgtccggcacgagtggtctttggtgaacaaacagaagcccatctggatgaggaagcctgaggagattaccaaggaagaatatgctgctttttacaagagccttacaaatgactgggaagagcatttggccgtcaagcacttctcagttgaggggcaacttgagttcaaggctgtcctctttgtccccaagagggctccttttgatctctttgatacaaggaagaagcccaacaacattaagctctatgtgagacgtgtctttatcatggacaactgcgaggagttgattcctgaattcctcagctttgttaagggtattgtcgactcagaggaccttcctttgaacatctcaagagaaatgttgcagcaa

SEQ ID NO: 36949 - DNA, 394 bp, Gossypium hirsutum
  unsure (1)..(394): unsure at all n locations; Clone ID: LIB3165-008-P1-K1-F1
ttcaaataaaaccagaacttccaatgtttttaaacaggattagtgtttcgggttcaaggaaccaaacaggccaagtccttggttgatttggccgttcagatccctacaactttggatccattcgccgaggctggggaatttgatggcactggtaccaaagagtatgttcatatacggattcaacaaaggaacgggaagaaaagcttgacgacggttcaaggnctgaggcatgacctgagctacgagaaaatgctcaagagtctcaagaaggacttttgttgcaacggcaacgttgttaaagacaaatagctcggcaagatcattcaactccaaggcgatcaacgcaagaacgtgtcgcaggtcctcgttaatgccggcatcgtcaagaaagacc

SEQ ID NO: 36950 - DNA, 395 bp, Gossypium hirsutum
  Clone ID: LIB3165-008-P1-K1-F10
ttagctatagcatacactactagtacccactactagcaatggcttcctgaatggtctcatcggctaccattgccactgcctctccggcacaggctaacatggtcgctcctttcaccggcctcaagtctgcctctgctttcccagtcaccaggaaggccaacaacgacattacttctctcgcaagcaatggcggcagagtgcaatgcatgcaggtgtggcctcctactggaaagaagaagttcgagactctctcatacctccccgatcttacacccgtgcagttggctaaggaagtggattaccttcttcgctcaaaatgggttccttgcttggaattcgaattagaggagggattcgtgcaccgtaaatactcgagcctacccacgtactacgat

SEQ ID NO: 36951 - DNA, 394 bp, Gossypium hirsutum
  Clone ID: LIB3165-008-P1-K1-F11
caaattctaaagcaatgggcaccatttccgacgaccctccggcgacacttatcgaagacctcaaaatcaccacccaaaacgtttctcttatatttccctcccggaaaaccgagagaaaaaaatccatgttcttgtcgaacatagacaaagtgctgaatttcccggtggaaaccgtccattttttccggtcccacgaggattttccgccccatgttgcggctgagaagctgaaaaccgcattatcggagctgctagtgccgtatgatttcttagccggaaggttgaggtcgaacccggaaacaggtcggctggaaatcgactgtaactcggccggaatcggttttgcggtggcttcaagtgattatgcgttggatgatgttggagacttgattta

SEQ ID NO: 36952 - DNA, 301 bp, Gossypium hirsutum
  Clone ID: LIB3165-008-P1-K1-F12
cccacgcgtccgtaaccttacaatgtggtctccaaggataacccatcggagactggtgattgccaatgatgataagggagctcaagaggagagtgtccagatgcgcggtgagaggaaaacagtgggcaacaatgcccggagggagatgatgtatgcagctgcagctgctgctatgtcctcggctgcggcggacgcaactgtgttgcatgcacaagtcatcgcacaagcctagatggcatattctcctgtgactgttgctacgataactgctaggatgtgtctgacctgaagacatggcaat

SEQ ID NO: 36953 - DNA, 429 bp, Gossypium hirsutum
  unsure (1)..(429): unsure at all n locations; Clone ID: LIB3165-008-P1-K1-F2
ggttcggaaatnccggggcggaccaacccgtccggtttgttccggtttaaccggttttatggttcaactccattgaggaaggtatccaccacggcaatgctagcaactttggactccaaggatgtgtcttcacaaaggatgtcaataaagcaatattgatcagtgatgcaatggagacgggtacggttcagataaattctgcaccagctcgtggaccagatcatttcccatttcagggtttgaaagacagtggaataggatcacagggggttaccaacagcattaacatgatgacaaagatcaagagcacagttatcaacttaccaaccccgtcttacaccatgggttaggcatttcataaatatcagaataacaaccagggttatcttagttaagatagtatttgtgttttagagcttatttccatat

SEQ ID NO: 36954 - DNA, 313 bp, Gossypium hirsutum
  Clone ID: LIB3165-008-P1-K1-F4
cccacccgtccgatttcattctttttcgttcttttttcccctaaattttatttggtcagaaatgtcgctcctccaatcctccgtctatcctccgtcaacacttcgttcttcgccgtcactgtcatgcacagcggcacacccgatcgcttcctcccatagagttccttccacttcgaattccttcgtcgcgttagaatcgtcatcgttaaagaccgttaactctatttcgagcgctaagaacaacagaaggaaaggcgttgtcggaaaggtgaggtcgagcctggagacagcgggagcaactgtggggcaggtg

SEQ ID NO: 36955 - DNA, 394 bp, Gossypium hirsutum
  Clone ID: LIB3165-008-P1-K1-F5
ggctgcttttggggatgatgttgttattgttgcggcatgtcgcactgcaattggcaaggcaaagcgtggaggcttcaaagatacacttgcagatgatttgcttgcccctgttttaaaggctgtgattgatagaacaaagctgaacccaagtgaagtgggggatatagttgttggtacagtgttggcacctggttcacaaagagcatcggagtgtaggatggcagcattctatgctggtttccctgatacggtgcctattagaactgtcaacaggcaatgttcatcgggcctgcaagcagttgccgatgttgctgcttgcataaaagcaggattttatgatattggcattggtgctggacttgagagcatgacaactaatggtagtgctcctgat

SEQ ID NO: 36956 - DNA, 395 bp, Gossypium hirsutum
  Clone ID: LIB3165-008-P1-K1-F6
taaatctatctctctaaggtatcttttttttgctaatttctgcaaaattaagggtattttttgttggctaattgttcggtggattcgggagattaaaaagttgaaatctttttaatgtaaaattctgggtttttattttttatatttgagaaggtttgggaaatcaaatgggagtgaaggtagagcactgatgtcactgttttggattgtaattcgtcgattagctgaaattgaagaaagaatggcaacctcaaagaaagtgattacaagggaagagtgggaaaagagattgaatgatgttaaaatcaggaaagaagacatgaataaattggtgatgaattttcttgtcacggagggttatgtcgaagctgctgaaaaattccagatggaatctg

SEQ ID NO: 36957 - DNA, 393 bp, Gossypium hirsutum
  Clone ID: LIB3165-008-P1-K1-F7
atctctcctttgtttccccttttctctctcttttttcaaccctaaccctacctgaccaaccaggattcaacatgaagggaggaaaatctaagtcagatactaagagtgccaagctatccgtgaaatccaaagctggaaagaaatcggggaaggctgccaaggatccaaacaagccaaagaggcctgctagtgccttcttcgttttcatggaggagttccgtgagcaatacaagaaggatcaccctaaaaacaaatccgttgccgctgtcggcaaagctggtggagataaatggaagagcttgtctgaagctgaaaaagcaccttatgtagccaaggcagaaaagtgaaaggtcgagtatgaaaagaacatgaaggcctacaataagagacagg

SEQ ID NO: 36958 - DNA, 372 bp, Gossypium hirsutum
  Clone ID: LIB3165-008-P1-K1-F8
gagacgcgttggtcagctactggatcatacaaagcaccaatttcccataagccggggtcacccaatcttaacgctaaagccctgataacaatcatttttgaacctcggtaccaccagtgggcgctctgtcccgctctttctttgctctgctatcctttccagcatccacagcttcgctctaggcaaggctaaagtgcttaaagccaccagcatgcatgcattggcgggcaattctgacccagagtgtgaagctgaggccgactccggccagctgatcagtcagggcgagctcgacgctttcatggtgaagaaaagagggattgtattgtatgacccgggggacttcacataagcttgccacacagagactac

SEQ ID NO: 36959 - DNA, 395 bp, Gossypium hirsutum
  Clone ID: LIB3165-008-P1-K1-G10
cccacgcgtccggggtggcatgttatctgggtcaagaatggaaacactggctatgatgaaattcgcgctgcaatcaaggaagcaaaggctgtcaaagacaagcccactctgatcaaggtgacaaccaccattggttatgggtctcctaacaaggcaaactcatatagtgtacatgggagtgcactgggtgccaaggaagttgatgctactaggaaaaaccttggatggccatatgagcctttccatgtaccggaagatgttaaagcctctaattgtagagatgcaattgtggtgtcattcaaggtttggaataatccgatttttgtctgtttgattaacagagaaatattggagataagttgtgaagggaaataatggacaaattggttgtaatt

SEQ ID NO: 36960 - DNA, 386 bp, Gossypium hirsutum
  Clone ID: LIB3165-008-P1-K1-G11
ctggtttacgtggctcttcacaagctgtgttggaaggtagtctccaactcagcggccaaacccggttgaacgttgctagcaccaacagggtggctgtggctagacctggttttaccgttagagctcaacaggtccctgccgagcctgaaactggacgcagagctgtgctgggtcttgttgctgctggtttggctactggctcctttgttcaagctgtgcttgctgatgcacgaagcatcaaggttggcccgcctccaccaccctccggtggattgcccggaactttgaattccgatgagccaagagaccttgatctggcgtacaaagatcggtttttcctccaaccattgactccggcacaagcggctcagagggcaaaggaatca

SEQ ID NO: 36961 - DNA, 394 bp, Gossypium hirsutum
  Clone ID: LIB3165-008-P1-K1-G2
ttccgggaaaaataaaccataggaggcaaatggttaggctggtgggaggaaaacccagaggggtagaaaatgggttcggttccccaaaaactgaccttggattttaaaccaacttttgtacccaaaacgatcagactttttttcaagggggtttaactaatcgcaaacgttctgttaaggtttaaaactcgatgcttttgtaaaaagattggaagagaaatgagaaagatcgatcctttaaacgtgaacttcctctttgcatgctccttctcaacgatgccattgtagctttaaaagaggagtcagtgcaatgtatgtcaagaaatgttgaaccagttttagaagagttcattccattgaagaacaagaaggagaataatcaaagtgaagaaga

SEQ ID NO: 36962 - DNA, 401 bp, Gossypium hirsutum
  unsure (1)..(401): unsure at all n locations; Clone ID: LIB3165-008-P1-K1-G3
gtccgttgtcatttcccttacttcctaaaaccataagccatggccggcatgataatggctgccgcaaagcctgtaatctccattgctgtttaataatccttcttttccaaacccaaactcaaacaaatccccaacttttccctccaaaaactccccacccaaaagttcttgaaaacccaacaaatcccctcactttcctccaccactctcaaatctatctccctcttcacagtcaccactttatcctntgccccaccttctcttgctgcagaaatagaaaaggccgctcttttcgatttcaacttaaccctccccatcatgatggtccagttcttgttcctcatgtttgctcttgacaaggtctactttaccccactcgggaaattcatggatgagagaga

SEQ ID NO: 36963 - DNA, 397 bp, Gossypium hirsutum
  Clone ID: LIB3165-008-P1-K1-G4
caaaaccgaaactcgggaatttcaactcattttccactttgactagcggttcacttcactgagtcaactaaaagttatggcgttacctactcatcagttacagagattccttgcaatcgagttcaatttcatctccaatcccaaaatcgcttacaggaaccaactaaccgcaacaacggcagtaagatctagtccaagaagcccctgccgttgctccgcgattgcaataaacgctccttcttcgctaacggatgtttccgggatccgttgggggtcgacgagtgtgcagggcaggcgcgaagagatggaggatgatttagttatacgatcggacggtcttgatggattctcgttcgctgccgtctttgatggccacggcggcgtagcttccgtcaag

SEQ ID NO: 36964 - DNA, 401 bp, Gossypium hirsutum
  Clone ID: LIB3165-008-P1-K1-G5
gaaagaaaaaagggaaaaattcttttttttttcatcaatcgtgaaaagcttctaaaagcgttttcgatcagaacccaatcgaggaatatggggaagaaaaggaagtcaatagcgacgagccttgatgaggtggatcggactatgtatgcttcgttttgcagcgctgctaactctttgtctcaactttatactcaggctatgaaccagcagaaactctcctttcaagccggaaaaggccatagccttgaaaaactttatcagtggatttggagacaacaagagggaggatcaagggtaacaacaatggatatcctcaattaccttcagaatgagatagactactgtggtgaggagccatcaatgtcacctagagcaccaagccaacagcaccaatcccagcc

SEQ ID NO: 36965 - DNA, 346 bp, Gossypium hirsutum
  Clone ID: LIB3165-008-P1-K1-G6
gttgtctggatatttgagctcttttcttataaatttttattcctttcttatggataaaagagaaatggatgaaaccaagccatgaagttgtgagagcagccacgtttacccccaccaggctcagtcactaccttttctctactttcttgatctgcatggttccacttccaatgttaacgccttttttctatgaattccataccctacttgatttatggaaaccattctccgtgtaaaacaatctcttccttaccctacaacagttttcccttgcggcaacgtagtgtgcctccgtaccgggaagccttcatccgtacgaagatggcggcgctccgtgcttcacggt

SEQ ID NO: 36966 - DNA, 389 bp, Gossypium hirsutum
  Clone ID: LIB3165-008-P1-K1-G7
cccacgcgtccgcccacgcgtccggagaaccctcgtgttccgatcatcgtcaccggtaacgatttctcgacgctgtacgcgcctctcatccgtgacggtcgtatggagaagttttactgggcacccaccagggaagataggatcggtgtttgcacaggtattttcaggaccgacaatgttcccgttgatgaccttgttaagcttgttgacaccttcccgggccaatccattgactttttcggtgctctgagggccagagtttacgatgacgaagtgaggaaatggatcggagaggtcggagtcaatggtgtcgggaaaaagctcgtgaactcgagggaagggccaccatctttcgagcaaccgaagatgaccattgagaagcttgtgga

SEQ ID NO: 36967 - DNA, 383 bp, Gossypium hirsutum
  Clone ID: LIB3165-008-P1-K1-G8
gattcttctagttccgaccaaaaaatagaattgctcatctttccttcagagaatgggtgttttgagtgaaaaaaaaaaatgttgggagtattcagcggagcgatagtgtccccgccggacgagctggtggctgccggttgcaggacgccgtcgcctaagataacggcggacgctcttgtgaaacggttcatcgaggcaaacccctccaccgtgtctatgcagatcggagatcatgtccaattcgcttattctcaccgtaacgagtctgctttacttcccaggtcattcgcggtgaaagatgaaatattctgcatgtttgagggggcacttgataacttaaggagtttaaagcagcaatatggacttggtaagtcagcaacaga

SEQ ID NO: 36968 - DNA, 406 bp, Gossypium hirsutum
  Clone ID: LIB3165-008-P1-K1-G9
aaatcattcaagtttcttaattttcattcgatatcgaagatgtcaggaagaggaaagggaggcaagggacttggcaagggaggagcgaagcgccaccgtaaggtcctccgtgacaacatccagggcatcacaaagccggcaattcgacgcttggcccgtaggggaggagtaaagcgtatcagtggcttaatctacgaggaaacccgtggagttctcaagatcttcttggagaacgtcattcgcgatgctgtcacctacactgaacatgccaggaggaagacggtgaccgccatggatgtggtttatgctctgaagaggcagggtaggactttgtatggatttggcggttagtcgatttagggtttaggtttgtaattaggggaatcctttagggcttaatcgaaac

SEQ ID NO: 36969 - DNA, 399 bp, Gossypium hirsutum
  unsure (1)..(399): unsure at all n locations; Clone ID: LIB3165-008-P1-K1-H11
atcaaagccattctttcgtttcctctttttcttcatcgccatagctttcctcttcgcctggactcacctccattacgcgccatcccctggcgtcaccaccctcctcgactgtgccagcaactctccctggtgcacctcctccaagaaccggcttcagtccaaacaacccacactcacaaaaaccccacgtgcctncacctnccagcgtcgccaccacgagtcagctgtccctcgccacccactcgaccccctcaccgtccaagagttcaacaaggtccgcaaaatcctttcttcccacgcgctcttcaagtcctccaataactacgcgctccattccgtcgtcctagaagaacccaacaaagaacttgtccttaaatggaaaaaaggccaaccactctt

SEQ ID NO: 36970 - DNA, 395 bp, Gossypium hirsutum
  Clone ID: LIB3165-008-P1-K1-H2
gaaacgttaaaacagactcgttaccttttgagttttcccctgtggttttctttcaattacttcaagctggcgatcgataatcaagaacccactgtccgtgaaatcaagcccaagaacagaaaaatcatgggagctggtgggccctgatgaaaaagacaacaggtggcctccatggctgaaacctttgttaagagagcatttctttgttcaatgcaagcttcatgctgattctcacaagagcgaatgcaatatgtactgcttagattgcatgaacggcgctctctgttctttctgcttagcttatcacaaggatcatcgttacattcagattaggaggtcttcataccatgatgtgataagggtatctgagatacagaaatacctggacatatctg

SEQ ID NO: 36971 - DNA, 391 bp, Gossypium hirsutum
  Clone ID: LIB3165-008-P1-K1-H4
ctcaaaaacactcacgaaacccaaaggccttcttttacgaatccctcacctacggtacacgatggtcatagttacagaaaacatcatttgctgaaacttactttccgactctgaaagaggggtacagattggctcgatcaagggcctgatgtgatctcagaatttctcaaattggttaatttgggttagagaatcgtcgtgcaacggataatctattttacaagcgttaaccagtgaagcccgtgaatgcggatccatagaggaacgattgcatgctttgtaatagctgaaccacctctggtacgggagtgtcagaaaaagtcgatgtggacgattttgacctattgggcaaagaacctaacagggcttcttcactcgaaattatggataa

SEQ ID NO: 36972 - DNA, 252 bp, Gossypium hirsutum
  Clone ID: LIB3165-008-P1-K1-H5
cacctgtgcctatttctcctcaattccctctaaactaacctctacccacctctcctattgcttcctccctcctttactcactaccgggcgcaccactttcgtattccctcgccgtcgcggttctttcaccgtcaaaactgcccgtggcaaattcgaacgcaaaaagccccacgttaacatcggcaccatcggccatgtcgaccacggcaaaaccaccttaactgccgctctaactatggccttagcctccat

SEQ ID NO: 36973 - DNA, 396 bp, Gossypium hirsutum
  Clone ID: LIB3165-008-P1-K1-H6
tcgtatgtgagaaacaatggtagaccaaatgccatgtgcagctttgtctaatgtatggaacaaagtgaaaccattcttggcaatcatcttcctgcaatttggatatgcagggatgtatatcatctccttggtttctttaaagcatggaatgagtaatttcatcctttgtacctatcgccatgttgttgccaccattatcattgctccctttgcctttgttctcgaaaggaaaatccggccaaagatgacccttcctatcttcctcaagattgtggttcttggtttgctcgaaccagtacttgaccagaacttatactatttgggaatgatgaagacaactgcaacatattcatcggctttcgtcaacatgcttcctgctgttactttcatattggc

SEQ ID NO: 36974 - DNA, 383 bp, Gossypium hirsutum
  Clone ID: LIB3165-008-P1-K1-H7
tttctctttcctttttttcctccctattttttttctcgggaaaaaaagactttttttccggtatacccagatcttgtttagttccaagctttaggttgtcatcgttttctcgaggttttaaactatgggtatctcttgaatttgtgaagcaaagggagaaatattggttaaaaactagtagcagtgtattgaatcaagttttacaaaaaaagaagttaaaaagaaagatgaaaatccagtgtgatgtttgtgagagagctccagcaacagtgatatgttgtgcagatgaggctgcactttgtgctaaatgtgatatcgaagttcatgcagctaacaagcttgctagcaaacaccaaaggcttctccttcaatgcctttctaac

SEQ ID NO: 36975 - DNA, 391 bp, Gossypium hirsutum
  Clone ID: LIB3165-008-P1-K1-H8
cttttccaaaccctaaatcccctttgaaactgccaattctccttcccctagcaggagtcaacagatttagactggagagaacacctttcagcctttcaatctcctcttaacttcgatattaactaagcaagaggagatccacggcgtgctttcaagataaactccctcttttcccttttttattcatgccttagagtaaaaaacaacaaataaacaaaatatcaagccgaaaaaaaaggaacgcctccgagatttcagttggaaaatcacctttaagaatcgattgttttctattgcttttgtttttgtatgtgtatttctgtgtttatgtggcgtttgagtgtgtaatatgcgtgtatatattgcattcgtcaccaaaatacactgattt

SEQ ID NO: 36976 - DNA, 394 bp, Gossypium hirsutum
  Clone ID: LIB3165-008-P1-K1-H9
aacccccctcctcctccacctccatcacaaacactctttcctctctctcctctgcgaccaccttctctcatgcttcttccaccacatccacaactacttcccaagctatctcctttgacaccctccaacaccacctttccaatcaaaacttccgccaggccgacgaagaaacccgccatctgctcatccttctagccggcgaagcagctcagaagcgcggctacgtcttcttctccgaagtccaattcatctcccaaaatgacctcaaagccattgacgaactttggaaaaaacacagcaacaacaaattcgggtacagcgtccaaaaaaagacagtggcaaaaagtaaaaaaggacttcaccaagttgttcctcaaactgggatggatgaaaa

SEQ ID NO: 36977 - DNA, 387 bp, Gossypium hirsutum
  Clone ID: LIB3165-009-P1-K1-A1
cacaaacgcagtaccaattttctctcgacaatccaaagccctttcaatggcgtgcagtacgaccgcattcggttccggcgtatcaacaacagctttggggttgagcagcctcaagcgaagccccactgttggtgtcgctaccattatttttccaaagcctcgccgctcgtcggctatggtagtcagagctgagggtcaaaccataaacccagagataaggaaaacggaggagaaggtggtcgactcagttgtagtcactgaactctctaagccccttacagcttattgcagatgttggaggtcaggtactttccctctttgcgatggaggacatgtgaaacacatcaaggctacaggggacaatgttggtcctttgctcttgaagaa

SEQ ID NO: 36978 - DNA, 386 bp, Gossypium hirsutum
  Clone ID: LIB3165-009-P1-K1-A10
agcaaatagaggaaaaatgaccaatgtttaggcagaaaaagctctctcaatgggtaaaggagttctggattactctgaatttaaagacgtagacatggtcatagaggcagttgttgaaaatgttgctttaaagcaaaaaatattcagtgagatagagaaggcttgccctcctcactgcattttggcaacaaacacatccactattgacctcaatttaataggagaaaaaatgaactcgcaagatcgtcttataggagctcactttttcagtcctgcccatctgatgcctcttttggagattgtacgaacacagaaaacttccccacaaataattcttgatcttatgacggttggcaaagtaataaagaaagttcctgttgtggttg

SEQ ID NO: 36979 - DNA, 383 bp, Gossypium hirsutum
  Clone ID: LIB3165-009-P1-K1-A11
ttcctccccacccttaaaccatgtttgcttttgttggcaagtatgcagaggaggtgggcaagaacgccaactacatcgccacgccaggcaaaggtattttggcggcggacgagagcacaggcaccatcgggaagcgtctctcgagcatcaacgtcgagaacatcgagtccaatcgccaagccctccgcgagctccttttcacctctcccaacgcattatcctgcctctccggtgtcattcttttcgaggaaacactttaccagaaaacatctgacgggaaacccttcgttgaaatcctcgaagagaacaatgtcattccaggtatcaaggtcgataagggcaccgttgagatagccggcaccaatggcgagaccaccactcaa

SEQ ID NO: 36980 - DNA, 365 bp, Gossypium hirsutum
  unsure (1)..(365): unsure at all n locations; Clone ID: LIB3165-009-P1-K1-A12
cccacgcttnncgtcacacccttctttttttttttacgttaattgccctttcggggtagtggatactaaaaaaaggaagcaactaagaagggaaatggagggcaaagaagaggatgttagattgggagccaacaagttcacagagaggcaaccaattgggaccgcggctcacagtcaagatgacgggaaagactacactgaaccaccaccggctccatttttcgagcctggcgagttaacctcatggtctttttatagggctgggattgccgagcttgcggcgactttccttttcttgtatatcactattttgactgttatgggagtagttaaggaaaaaactaagtgcccaactgttgggattc

SEQ ID NO: 36981 - DNA, 379 bp, Gossypium hirsutum
  Clone ID: LIB3165-009-P1-K1-A3
cccactcgtccgaccacgctttcttccacgcgtccgcccacgcgtccgagaaggtggccactttgatctagtcgtcaagatttacttcaaaggggtgcacccgaaattccctaacggtggcctcatgtcacaatatttggactctctccccctcagttcgtcactagacgtgaagggtcctttgggtcacatcgaatacaccggtcagggcaactttttggttcacggcaaacccaactttgccaagaaactagcaatgttagccggtgggacggcgatcacccccatttatcaactcatccaagccattttaaaagaccccaaggacgagaccgagatgtatgtcgtgtacgcaaaccgaaccgaggacgacattttg

SEQ ID NO: 36982 - DNA, 190 bp, Gossypium hirsutum
  Clone ID: LIB3165-009-P1-K1-A5
aggatagagagtgtgaggttgttctgtaggacccaccctttgtccccacacctggctatccttagctgaccacacaaacgccaaaaagttttgtttcagagatggggagagagaggaatttaaaaaaaaaaaaacacaaacctaaaaaaatataatcttttttaaaactaaaaaaaccatattttttttt

SEQ ID NO: 36983 - DNA, 195 bp, Gossypium hirsutum
  Clone ID: LIB3165-009-P1-K1-A6
cccacgctttcgatgactttctttttttactgcgccattttctctatggggaggttcaaatacctttgttcaagtgctctctacgaaccattcttgactaccaagacctgcgctccacctggatataacaacaaatctctgactgttgttcctaaagtaccaattctgcttgaggactctaatccggcttaaaag

SEQ ID NO: 36984 - DNA, 386 bp, Gossypium hirsutum
  Clone ID: LIB3165-009-P1-K1-A7
cacaaacgcagtaccaattttctctcgacaatccaaagccctttcaatggcgtgcagtgcgaccgcattcggttccggcgtatcaacaacagctttggggttgagcagcctcaagcgaagccccactgttggtgtcgctaccattatttttccaaagcctcgccgctcgtcggctatggtagtcagagctgagggtcaaaccataaacccagagataaggaaaacggaggagaaggtggtcgactcagttgtagtcactgaactctctaagccccttacagcttattgcagatgttggaggtcaggtactttccctctttgcgatggaggacatgtgaaacacaacaaggctacaggggacaatgttggtcctttgctcttgaaga

SEQ ID NO: 36985 - DNA, 172 bp, Gossypium hirsutum
  Clone ID: LIB3165-009-P1-K1-A9
agtaccgtaccggccgtcccgacccaacccacccgtgcattcaaaccttaaaactcaatcaaataggtggaagctttggtaaagagagtagatatggtggtgggattggcaaaggaagaagacttgatagaggttcccccagtaacccctgacaagagcctgacatcaccat

SEQ ID NO: 36986 - DNA, 384 bp, Gossypium hirsutum
  Clone ID: LIB3165-009-P1-K1-B10
ctcctttgcttttcatacccaaagttattagcaaaatcaaggccatggttccggcaggaaacaacccttttgaattctcaaaagaagcctcatatctttatagtttcttgctcttcctctccaacttcccagtccccagaggccaatgtccagactgctgagtcttgtgtcaacctgggtctgtccctcttctccaaaggacgcgttaaagatgctttagtccagtttgaaacggcacttagtttagacccaaaccctgtggaagcccaagctgctctctataacaaagcctgctgtcatgcctaccaaggggaagcaaagaaagctgctgagtgtctccgtactgctttgagagactacaaccttaagttcggtacaattctc

SEQ ID NO: 36987 - DNA, 384 bp, Gossypium hirsutum
  Clone ID: LIB3165-009-P1-K1-B11
cagacgcgtggagctgataacccttccttcgttcagctccccggtatgtacaggaaggaagagaaccctcgtgttccgatcatcgtcaccggtaacgatttctcgacgctgtacgcgcctctcatccgtgacggtcgtatggagaagttctactgggcacccaccagggaagataggatcggtgtttgcacaggtattttcaggaccgacaatgttcccgttgatgaccttgttaagcttgttgacaccttcccgggccaatccattgactttttcggtgctctgagggccagagtttacgatgacgaagtgaggaaatggatcggagaggtcggagtcaatggtgtcgggaaaaagctcgtgaactcgagggaagggccacca

SEQ ID NO: 36988 - DNA, 384 bp, Gossypium hirsutum
  Clone ID: LIB3165-009-P1-K1-B12
cccactcgtccgcaacaaaatcatttgcttcacaatggcctctacaaccatgggtctgttcttccccatcattcgccggtaaggcagtgaagttctccccttccacccctgaaatccggggaactggccgtgtttccatgaggaaaaccaccaagcctgttccttctggtagcccatggtacggtcctgaccgagttttgtacttgggtccactttccggtgagccaccatcttacttgaccggtgagttccctggtgactatggttgggacactgctggactctcagctgatcccgagacctttgctaggaaccgtgagctcgaagtcattcactgcagatgggccatgttgggagctcttgggtgtgttttccctgagctgt

SEQ ID NO: 36989 - DNA, 352 bp, Gossypium hirsutum
  Clone ID: LIB3165-009-P1-K1-B3
aacacacttactatacacttccttatatccaacacaaaaagctcttaagatagttaaattagacctggattactccactatttaaagacactacacgttgtcttaaatacacatgttgcaatccatcctttcaatcaaaaaatactcaattacataaagatagcttaccctcctaaatggattttggcaacaaacacatacactattgacctcaatttaataagacaaaaaatgaactctcaagatcttacttataagaactcactttttcattcctgcccatttgatacctcttttggagattataccaacacagtaaacttccctacatataattcttgatcttataact

SEQ ID NO: 36990 - DNA, 378 bp, Gossypium hirsutum
  Clone ID: LIB3165-009-P1-K1-B4
cggacgcgtgggcaaaccctactgtgttgttaagtttctggaggagcgtgacgtctccgacgtggacggagacgctgatgtcagccgggaggaagcggaggcggcgtcgtggctgcttccgaaccctaaccataaggctgtggacagcccggacgtgaactcggggcagtacgtgttctcggagatggacccgtttctggatctagattacgggcatggggatccaaaaatggatgcccaggagcagaacagctccggcaccgatggggtggtccctgtccaaagcaagaatgttcaagctccgtcggctaacgatcactgtttcgacttggacttcaccggatccaaatccttctcttatggctacaaccccaactt

SEQ ID NO: 36991 - DNA, 349 bp, Gossypium hirsutum
  Clone ID: LIB3165-009-P1-K1-B5
atcaaactgagtataaatgtctttttataaagcacaaatagctctatggatggtgtaaatagtcctggattactctcaatttaaagacctatacttggctattaatgctggtgctgcaaatcttcctttcaatcaataaatatctattgcgacaaagaatgctttccttcttgactacattcttgcaacaaacacattcactattgacctcaatttaataagagaaaaaatgaactctcatgatcatcttataagagctcactttttcagtcctgcccatctgatacctgttttagagatagttcctacacattataacttccccacatataatacttgatcttatgac

SEQ ID NO: 36992 - DNA, 377 bp, Gossypium hirsutum
  Clone ID: LIB3165-009-P1-K1-B6
ctcaagctctctcttcctgtctttttctacttcgcctctttctctatggatgcggtacaagcaccgtccatcaagtgctttcaattcaccattctggactaccaattctggcgctccagtttggaataacaattcatctctcactgttggacccagaggtccaattcttcttgaggactatcatctggcggaaaagcttgccaactttgacagggagcggattccagaacgtgttgtccatgctaggggagcaagcgcaaagggtttcttcgaggttacccatgacatttctcaccttacatgtgctgattttctgcgagcacctggagttcaaacccctgttatcgtgcgattttcaaccatcatccatgagcgtg

SEQ ID NO: 36993 - DNA, 133 bp, Gossypium hirsutum
  Clone ID: LIB3165-009-P1-K1-B7
tccacccataccatacactactacttccttctactagcaatggcattcgaagtaatgagatcaattaccattgtcactggctgtctgacacaagctatcattggggttcatgtcaccgaccgaaagtgtgact

SEQ ID NO: 36994 - DNA, 380 bp, Gossypium hirsutum
  Clone ID: LIB3165-009-P1-K1-B9
atccgccagagaattggtccattgcttatgaaaatgcagaaaagatatgggaggggtgatgaaagaggcgagttaacagagaaagagattattagagctgagaggaactcaggtgtaattagtgacagagtgagggaaatccaaatgcaaaactatatgaggaaaaaggaacaaaaagaacgcagggaaacggatcttcgtgaagggttgcaattatacaagagcggcaattacgagcaagcgctggagaaattcgagtctgtactgggatcaaagccagagcctaatgaagcagctgtagcaagttacaatgttgcttgctgttattcaaagcttaatcagattcaagctggtctatcagcacttaaagatgccttgga

SEQ ID NO: 36995 - DNA, 348 bp, Gossypium hirsutum
  Clone ID: LIB3165-009-P1-K1-C1
atcaaactgaggatacacgtctttttctaaagcacaaaaagctctatggaggggtaacaatacatctggcttactctctaactaaagacataaacttggccttaaaggctggtgttgcaattctacctttcaatcaataaatacctatcgcgacaaagatggctttccctcctaaatgcattttggcaacaaacacattcactattgacctcaatttaataagacaaaaaatgaactcccaagatcgtagcatagagactcactttttcaatcctgcccatctgaaacctgtttgagagattatacctacatcttatacttccccacctataatgcgtgatcttatga

SEQ ID NO: 36996 - DNA, 385 bp, Gossypium hirsutum
  Clone ID: LIB3165-009-P1-K1-C10
gctaaattacaaaagcaactcaagatctttacagtcgaaattgacatgctggggagggcatatactctttgcaaaccgataggaacaatcttcaagaagagattgcacatggagcttctataaagaaggagctggagagtggctaggaacaaaatcaaggagctacaaaggcaaattcaacttgatgctaaccaaacaaaagctcagctattgtttgtcaagcaacaagcttctggtcttcaagcaaaagagcaagaagccatcaaaagtgatgctgagcttgagaagaaattgaaagctttaaaggagttagaaattgaagtcgtggagcttaggagacagaataaagagcttcaacacgaaaagagggagttcactgttaaac

SEQ ID NO: 36997 - DNA, 265 bp, Gossypium hirsutum
  Clone ID: LIB3165-009-P1-K1-C12
gccacgcttccaatacgattctatttctttattcgagcgagcacaaacccggggaaggcccacccaaattagctcgctcatatacacaatacggccgcctacaacgcataatgctccatagcacccaccgccattttaatgcctcatgtccacactgacgccttgatcacccactgctatctcttgccaactatacataatcgcgattccaaggcttatttttacgaacccgatgagctaagtccaaaaacccggaagctctctc

SEQ ID NO: 36998 - DNA, 199 bp, Gossypium hirsutum
  Clone ID: LIB3165-009-P1-K1-C3
cacacacttcccatacctttttttttcttcaaaaccaataattaaaaagaaaggttctttataaacccttcaatcacacaattaaacaatactctataatataaaaacaataagactcatctaccgctctatattataaattcctaacacctacttaatacaacttccgtaataaaaaccaactcacgcccaccaacca

SEQ ID NO: 36999 - DNA, 372 bp, Gossypium hirsutum
  Clone ID: LIB3165-009-P1-K1-C4
ctcaagctctctcttcctgtctttttctacttcgcctctttctctatgggtgcggtacaagcaccgtccatcaagtgctttcaattcaccattctggactaccaattctggcgctccagtttggaataacaattcatatctcactgttggacccagaggtccaattcttcttgaggactatcatctggcggaaaaactcaccatctttgacagtgagctaattccataacgtgtcttccatgctcggggaacaagcgcaaagtgtttcttcgaggttacccatgacattcctcaccttacatgcgctgattttctgcgagcacctggagttcaaacccctgttatcgtgcgattttcagccgtcatgcatga

SEQ ID NO: 37000 - DNA, 355 bp, Gossypium hirsutum
  Clone ID: LIB3165-009-P1-K1-C5
ctcaagctctctatgactatttttgtgtactaagccgagctcatcaaggagaggtacatgcaccgtcaatcaagggcttacaatccaccgttcctgactaccaatccaagccctccactgagaactaacaactatagatctcactagacggttcccaattgtgacaactagtagcttgaagactatcatccacaggaataacttgccaactgcaaccaagcgctacatagcaacacgtgttgtccatgctatgagagcaagcacaaatatcatcttcaaggtgacccacaacaattgtgaattgacatacgctcaatatctaacagcgacgctgaggttagaccgccgttataca

SEQ ID NO: 37001 - DNA, 382 bp, Gossypium hirsutum
  Clone ID: LIB3165-009-P1-K1-C6
ataaaaaaaaaaaaaaaatttttatatataaaaaaaaaaaaaaaaaaaaggaaagattatttttcctttccttcacctccttaccatcctcccctctcttcttcctctcttcttcctcctttttacctctctcttttcattctctcactttttctcccaataccccaattctccataactccttttatttactcaactattctacctcccttaacttcctactttttcctacttccttttcctcccactttttccacctttcccaccttttccttttatcttcacctcacatttttcacccatttaccctttttttattccttttcctccacctctttccccttttctctttccatttccattccactttcctcttcctttt

SEQ ID NO: 37002 - DNA, 383 bp, Gossypium hirsutum
  Clone ID: LIB3165-009-P1-K1-C7
cccacgcgtccgagtccaatcacttcctttactttcataacatttcacgaacggcactctccagtctccaatggcggctgccgtctccaccatcggtgctgtcaaccgagcaccgttgagtttgaatggatcaggtgccggagcttctgctccaagctcagctttcatggggaacagcttgaagaaagtgagcgctaggttcaacaacaacggcaaggctccagtgggaagtttcatgattgtggctgccaaagaaatcgacgaagacacacagaccgaccaggaccgatggaagggtcttgcttatgatatctccgatgaccaacaagacattaccagagggaaaggtatggtcgactcattgttccaagctcccatgaacg

SEQ ID NO: 37003 - DNA, 269 bp, Gossypium hirsutum
  Clone ID: LIB3165-009-P1-K1-C8
aagcacctccccataagcaaacctcaaattaaagcttggagagagacccaaaagcagtgtctaaggaagtgagtgaagaaagacagggtcgtaaggactatgtggaccctccaccggcacctctgattgatatggctgaactcaagtcatggtctttttacagagccctcatagctgagttcatagccactctcctcttcctctatgtcactgttgctaccgtaattggtcacaagaaacaacaagatgcatgtgatggtgttggtctc

SEQ ID NO: 37004 - DNA, 382 bp, Gossypium hirsutum
  Clone ID: LIB3165-009-P1-K1-C9
cccacgcttccgatgcgaggccatttcttcaaattagagtatgtaaagcatcggccgtctgtagctggtgcaatgattgattcacacgtcacagcggaatattggaagaataggactcaagagcggttgaagattaaaatgcctgagacctatgttgttcaccttggaaatagcaatgaactgatgcaagttgcagaagacagtgtggctaaaagggttttgcgtgaacatgttcgtgaatcgcttggagtgcgcaatgacgatttactctttgccttaataaatagtgtttcacgaggaaaagggcaggatctctttctacgcgctttctacgaggccttacaactgatcaagcaaaagaaaatgcaagtgccaccattgc

SEQ ID NO: 37005 - DNA, 216 bp, Gossypium hirsutum
  Clone ID: LIB3165-009-P1-K1-D1
gacacacttattttacacctctatatctcgacaaccaatagcactagaaaagaattactttataacccgttcgataccacaatacaacatcactcttggataaaatgccagtgtcgctaatcaaccgtgcactgtataatggccaatcaccattctgttaaatttcgtgctaaaagcgacccacgcgcccgttacaaaatacccgacccatattat

SEQ ID NO: 37006 - DNA, 382 bp, Gossypium hirsutum
  Clone ID: LIB3165-009-P1-K1-D10
aagtccaatcactcccaatactttcatatcatttcacgaacttcactctccaggctggaatggcggctgccgtctccaccatcggtgctgtcaaccgagcaccgttgagtttgaatggatcaggtgccggagcttctgctccaagctcagctttcatggggaacagcttgaagaaagtgagcgctaggttcaacaacaacggcaaggctccagtgggaagtttcatgattgtggctgccaaagaaatcgacgaagacacacagaccgaccaggaccgatggaagggtcttgcttatgatatctccgatgaccaacaagacattaccagagggaaaggtatggtcgactcattgttccaagctcccatgaacgatggtactca

SEQ ID NO: 37007 - DNA, 383 bp, Gossypium hirsutum
  Clone ID: LIB3165-009-P1-K1-D11
cccactcctccggcctcctaacattgactattggggtgaatcagacccacaagcacggctcgcctttacaatggcgagttctgaggaaggcgactcaagctcaactcgttcgatccaactcaaagccgagcgtaccatggggtccgattcagaggtctgtataaccttcacaataagcttccaagggttccaatcttcacctctttgggtctctgacccctgttctctatcttcagagcaacctttcctccctttagtacttcagcttctccaagaaaccatcagccgttcaccagcaatgcccaacaccatttgcccgaggtctcagcttcaaaaactcaaacccgaacccatttcttggatcattgagtctcactcacccg

SEQ ID NO: 37008 - DNA, 383 bp, Gossypium hirsutum
  Clone ID: LIB3165-009-P1-K1-D12
gatctcccctgttttattctctgttaattttataacttgggaacctagacacgcaaggctactgtttctcaattgaacaactttccatgcaagaccttcttaataatcccacaaaacagtaactttacctcaaagcttccggttctgcctctaaactctacaaaaccaactcagaattcgatcaagaaatctcaatttttgacccagaaatcagtccagccaatgcctgttttccagatccgtgcttcggacgccgacgatgaatggggcccagacaaggaggagccagttgtaatcgagagtcctggagtggccgtagcggaagagaagaagcctgacgatgcgggggaaatagagagcttgaagaaagctttggtggattc

SEQ ID NO: 37009 - DNA, 189 bp, Gossypium hirsutum
  Clone ID: LIB3165-009-P1-K1-D2
gccccacttcaaactcaatttcttatcacgaattccaagtacacagaggggaaggcctctatcaatgctgcccaaccagcttcacacaatactgaagccaagttcctaaaatgatctcatctacagattgagctcaaaactcctaaaccctattttgtagactctctgaatcccatcaaacgttacacc

SEQ ID NO: 37010 - DNA, 88 bp, Gossypium hirsutum
  Clone ID: LIB3165-009-P1-K1-D3
accacacttaacatacaattttttttcttgaaatccaagaacagaaaagaaagtttctttctaccttgtgcatgcaccgactccgaca

SEQ ID NO: 37011 - DNA, 377 bp, Gossypium hirsutum
  Clone ID: LIB3165-009-P1-K1-D4
ctcaagctctctcttcctgtcttcgtctacttcgcctctttctctatggatcggtacaagcaccgtccatcaagtgctttcaattcaccattctggactaccaattctggcgctccagtttggaataacaattcatctctcactgttggacccagaggtccaattctccttgaggactatcatctggtggaaaagcttgccaactttgacggggagcggattccagaacgtgttgtccatgctaggggagcaagcgcaaagggtttcttcgaggttacccatgacatttctcaccttacatgtgctgattttctgcgagcacctggagttcaaacccctgttatcgtgcgattttcaaccgtcatccatgagcgtgg

SEQ ID NO: 37012 - DNA, 380 bp, Gossypium hirsutum
  Clone ID: LIB3165-009-P1-K1-D5
gttagctttagcatacactactattacccactactagcaatggcttccgcagggatctcatcggctaccattgccactgcctctccggcacaggctaacatggtcacccctttcaccggcctcaagtctgcctctgctttcccagtcaccaggaaggccaacaacgacattacttctctcgcaagcaatggcggcagagtgcaatgcatgcaggtgtggcctcctactggaaagaagaagttcgagactctctcatacctccccgatcttacacccgtgcagttggctaaggaagtagattaccttcttcgctcaaaatgggttccttgcttggagttcgaattggaggagggattcgtgcaccgtaagtactcgagctt

SEQ ID NO: 37013 - DNA, 378 bp, Gossypium hirsutum
  Clone ID: LIB3165-009-P1-K1-D6
cccacgcgtccgattgaaccaactttgttatgctgagaaacaagctcggggggaagtgagtgtagagcttttggacacccaagtgaacccggctgtgtgggaaattagtggtcatatggtgttgaaaaggaggaaggactatgatgaggcgtccgacgaaaatgcttggaggttacttgcagaggtatctctctctgacgagaggtttgatgaagtgaatgcacttatctttgaagccattggcggtggcaaagatgcaattgaaaatgttgaggagcctgataccaaagctcaatctattgaaaaagagaatggcatcaccgaaacttcccaccatgctatggtggctgggacacaacaatgccttgttctgcagta

SEQ ID NO: 37014 - DNA, 393 bp, Gossypium hirsutum
  unsure (1)..(393): unsure at all n locations; Clone ID: LIB3165-009-P1-K1-D7
aaaatgccttcgaatgccttgcgagtttctatcttcnnttcctcttcttctctggtcaggtaagcctttttttntctcatttctcccaagcnttccccatctctttctctcctatctctctccctttccctcaaaccagacgatccatttcccttcacacacgccccatgaacatccttaaaaatctaggcttcggagccaacaacaagccagccccgtccatggagggttcctccatcgctcaaggtccagacgacgacgtccctgctcctggtcaacagtttgctcagttcggtgcgggttgcttttggggtgttgaattggccttccagagagttccaggggtgaccaaaacggaggtggggtatagccaagggtttatgcataatccta

SEQ ID NO: 37015 - DNA, 383 bp, Gossypium hirsutum
  Clone ID: LIB3165-009-P1-K1-D8
gaaccagggaacaccgaaagaagtatctcgagaaccatggacagagactggggctcgaaacccggttctggaggtgctgcctccgcccaaactgaagccatggaccgccgcgagcggctccgtcggcttgctcttgaaaccatcgatctcgccaaagatccctatttcatgcgcaaccacctcggcagttatgagtgtaagctttgtctgacgctacacaacaatgaagggaactatttggcacatacgcaagggaagcggcaccagaccaacttagctaagagagcggcgcgtgaggctaatgaggctccggctcagcctcagcctcacaagcgtaaagtttctgttcgtaaaacagtcaaaattggtaggccaggatatcg

SEQ ID NO: 37016 - DNA, 357 bp, Gossypium hirsutum
  Clone ID: LIB3165-009-P1-K1-D9
gttccatgtgaacggcacttgctcttgtgttagtcgatcctaagagacggggggaggccgtccgacagcgcgtgcagcgcgagcttcgaaagggaatcgggttaaaattcctgaaccgggacgcggcggctgacggcaacgttagggagtccggagacgtcggcgggggcctcgggaagagttatcttttctgtttaacggcctgcccaccctggaaacggctcagccggaggttgggtccagcggccggaagagcaccgcacgtcgcgtggtgtccgtagcgcccccggcggcccttgtaaatccggaggaccgagtgccgtccgcgcccggtcgtactcataaccgcatcaggtc

SEQ ID NO: 37017 - DNA, 213 bp, Gossypium hirsutum
  Clone ID: LIB3165-009-P1-K1-E1
accacacttcacatacaattttttatctacaaatccaaaatctataaggaaagttccaatataccttcttcactcactaactaaaacaacacagaagaccataacaccaatagaactctaatatcacatcaagattaaaatacctaacatctatataaatcaccttccttaacaaatccacctgatcccaaccacacaaaacatcaaccataa

SEQ ID NO: 37018 - DNA, 264 bp, Gossypium hirsutum
  Clone ID: LIB3165-009-P1-K1-E11
gtcccacttaactttcacatatatttcttgtcatccgtgatcggaaagcgaagctagattctctcttctgcatccactacctccgacaacacttcagtccctgtccaaaccaacactctagaccgattcaccatcaaaatacctaactccgctatccctgcctctatgaagcccaacaacctcatcacttctgtaacaaacaatagtgtgaaagtgcaatacattcaagttttctcttcttctcatacgaaaaagaagcagaca

SEQ ID NO: 37019 - DNA, 378 bp, Gossypium hirsutum
  Clone ID: LIB3165-009-P1-K1-E12
cccacgcttccgatgcgaggccatttctttaaattagagtatgtaaagcatcgaacgtctgtatctggtgcaatgattgattcacacgtcacagcggaatattggaagaataggactcaagagcggttgaagattaaaatgcctgagacctatgttgttcaccttggaaatagcaatgaactgatgcaagttgcagaagacagtgtggctaaaagggttttgcgtgaacatgttcgtgaatcgcttggagtgcgcaatgacgatttactctttgccttaataaatagtgtttcacgaggaaaagggcaggatctctttctacgcgctttctacgaggccttacaactgatcaagcaaaagaaaatgcaggtgccacca

SEQ ID NO: 37020 - DNA, 211 bp, Gossypium hirsutum
  Clone ID: LIB3165-009-P1-K1-E2
agcccacacttccgaccgaattttttctatctataacaaactacaaaaaggatggctctaatcgtccttatgctatcactacctccctcgattctgacaagcattcacttagcacacctgtagaaccgatatctatttacatgattaaaatcgctagtcctaactttaaaaatatcaaccaacatacacctgctagagatagcctaatgta

SEQ ID NO: 37021 - DNA, 380 bp, Gossypium hirsutum
  Clone ID: LIB3165-009-P1-K1-E3
cccacgcgtccggaacccatatactacttcagacgaagtatacgctttagggggacatatatgtatgtctgctcacaaagcacgaagaataattgatcagattcgtggacgttcctacgaagaaacacttatgatactagaactcatgccttatcgagcatgttatcccattttaaaattggtttattctgcagcagcaaatgctcgtcacaataggggtttcaatgaagcgagtttaatcattagtcaagtcgcagtaaatgagggaactactctgaaaagactaaaacctcgagctcgaggacggagttatctgataaaaagacccacttgtcatataactattgcattgaaagatcttgaatttgaaccacttgaca

SEQ ID NO: 37022 - DNA, 379 bp, Gossypium hirsutum
  Clone ID: LIB3165-009-P1-K1-E4
cccacgcgtccggtggagttctttttttttggttttgttcgccctttagcagggaaaaaaaaacatcaatcaattccctgccatggaaggagacttactagattgggaggtgctccacaactcggattctgactctaattctatcctggttaactcgccccaggtgaggaatcttgaggtaatcgaaggtgatactggagggatgattaggtctgattacttttctcttgataatcagagtatgtatgcgaaggaaggggatgcgagtgaagaaggctctattgagtcagataatccgagttggattgatcccaagccggagactcagtttaggaggaataattcgggtgatttttggtccgattcgggtagtgatcgg

SEQ ID NO: 37023 - DNA, 375 bp, Gossypium hirsutum
  Clone ID: LIB3165-009-P1-K1-E6
ctcaagctctcttttcctgtctttttctacttctcctatacctctatgggtgggtacaagctccttgcatcaagtacccccaattaaccattctgtactaccaattctagcgctccagtatggaatatcaatgtatgtctcactattggacccaaaggtacagttctgcttgatgactatcatctggtggaaaaacttgccaactttgacagagagcgaattccagaacgtattgtccatgctaggagagcaagcgcaaagggtttcttcgacgttacccatgacattcctcaccttacatgtgctgattttctgcgagcacctggagttcaaagccctgttatgcggcgatcttcaaccgtcatccatgagcgt

SEQ ID NO: 37024 - DNA, 384 bp, Gossypium hirsutum
  Clone ID: LIB3165-009-P1-K1-E7
ccagctttcatggacaagctagttgttctcatcaccaagaacttcatgaccctgccgtacattaaggttcctcttatcttgggtgtttggggaggcaaaggtcaaggaaaatctttccaatgtgagcttgtctttgccaagatgggaatcaaccccattatgatgagtgccggagaattggaaagtgggaacgccggagaaccagccaagttgatcaggcaaaggtaccgtgaggccgccgacattatcaagaaagggaaaatgtgttgcctcttcatcaacgatctcgacgctggagccggtcgtatgggaggaaccacacaatacacagtgtacaaccaaatggtgaacgccacactcatgaacatcgctgataaccccacc

SEQ ID NO: 37025 - DNA, 381 bp, Gossypium hirsutum
  Clone ID: LIB3165-009-P1-K1-E8
tttagctatagcatacactactagttcctactactagcaatggcttcctcagggaggtcatcggctaccattgccactgcctctccggcacaggctaacatggtcgctcctttcaccggcctcaagtctgcctctgctttcccagtcaccaggaaggccaacaacgacattacttctctcgcaagcaatggcggcagagtgcaatgcatgcaggtgtggcctcctactggaaagaagaagttcgagactctctcatacctccccgatcttacacccgtgcagttggctaaggaagtggattaccttcttcgctcaaaatgggttccttgcttggaattcgaattagaggagggattcgtgcaccgtaaatactcgagccta

SEQ ID NO: 37026 - DNA, 384 bp, Gossypium hirsutum
  Clone ID: LIB3165-009-P1-K1-E9
ccccacccaaaaaaaaaagaaaagtttatcccaggctctctcgaaaaacattggggtggattacgaaggctcttttcaacaacatactacgtcgtttcatccatcaagatttccatgaagctgtttctttcatgaccataattgatgcttttctcttcctcatggttcattcggtggatagattggggatatggcaccggttacctgttgtcttaggctcaatatatctggctgcacgtcgccatcttcaccagcaatacaatctcatcaatgtcggggtaactccatccggcgttcggcttagcccaggagattatccgcacagaacagctagtggaagttacaatgatcctttcaatgagggagctggcagccaaagatctt

SEQ ID NO: 37027 - DNA, 381 bp, Gossypium hirsutum
  Clone ID: LIB3165-009-P1-K1-F10
cttttgtataactgtagcatatattacttgtaagcagtaatagcaatggcctgctcgatgatctcatcggcaaccattgccaccgtgaactgctcctccccggcacaggccaacatggtggcccccttcaccggcctcaagtctgcctctgctttcccagtcactaggaaggccaacaacgacatcacttctcttgcaagcaatggtgggagagtgcaatgcatgcaggtgtggcctcctcttgggaagaagaagttcgagacactctcatacctccccgatcttacacccgtacagttggctaaggaagtagattaccttcttcgctctaaatggattccttgcttggaattcgaattagaggagggattcgtgcaccgt

SEQ ID NO: 37028 - DNA, 371 bp, Gossypium hirsutum
  Clone ID: LIB3165-009-P1-K1-F11
tcaagctctctcttactgtctttttatttttcgcctctttctctatggatccgtaggagcaccgtccatgaagtgctttcaattcaccattctggactaccaattctggcgctccagtttggaataacaattcatctctcactggtggacccagaggtccaattctccttgaggactatcatctggcggaaaagcttgccaactttgacagggagcggattccataacgtgttgtccatgctaggggagcaagcgcaaagggtttcttcgaggttacccatgacatttctcaccttacatgtgctgattttctgcgagcacctggagttcaaacccgtgttatagtgcgattttcaaccgttatccatgag

SEQ ID NO: 37029 - DNA, 225 bp, Gossypium hirsutum
  Clone ID: LIB3165-009-P1-K1-F2
aaaacacttaactcacaactttttttctctatatccatgaactgaaaggggggctccatttccatttctgcaaccactacctacttccaatctcacatccacttccaaaacaatcttctacaccaattcacatttaaaacaattaccatctctattaatacctatatatccacatccacctatacaattatcagtataatccttacatccaactacacaacatct

SEQ ID NO: 37030 - DNA, 377 bp, Gossypium hirsutum
  Clone ID: LIB3165-009-P1-K1-F3
cccacgcgtccgctggacattgtttccttgtatgacatctgtttccggggagggaagctaaccactcccagctttggtgatttgaaccatttgatatctgcaacaatgtctggagttacatgctgcttgcgattccctggtcagctcaactccgatctcaggaaacttgccgtgaatctcatcccctttcctcgtcttcactttttcatggtgggttttgctccactcacttctagggggtctcaacagtaccgagctctaacagtacctgagctcacccagcaaatgtgggacgcaaagaacatgatgtgtgctgctgatcctcgtcacggtcgatacttgactgcatctgctatgttccgtggtaaaatgagcac

SEQ ID NO: 37031 - DNA, 120 bp, Gossypium hirsutum
  Clone ID: LIB3165-009-P1-K1-F5
aacacgctttcgtttcaactttatttcaccaactccgtgactggcaggggggggacgtcctttactgttgtagccaatgcctgcttccagcctgtcagatacgggcggagagacatacct

SEQ ID NO: 37032 - DNA, 362 bp, Gossypium hirsutum
  Clone ID: LIB3165-009-P1-K1-F6
cccacactttcctttcaacttttttttttttgctccgcaacctgtttgggggggtcaaactgcccttctttaacccatgccaacttaccatctttaactacaaacttaaccaattcctacatttcatatcaatatatatatgtctaatcatcacaataatcacattcctacactcatactcactatccatgtatacactcctcattttccacaagccaataacatcttacatacctcttcatcatctacacaaatcgaacctacattgcctccactttcctttaaaaactctttctgtatattatgctaatctacttcaccctcccttactttaaacatccttttttctgggatatactaca

SEQ ID NO: 37033 - DNA, 376 bp, Gossypium hirsutum
  Clone ID: LIB3165-009-P1-K1-F8
ctcttatggtcctgactaatgtgtttttatcttctacatcctctgcaatgcgggaaggtggacctgatgttgttgggcttatcttaccaagtagcttcggagcttccttgtatttcatgaccagaaggaacttgaagttaggtaaggctacattaataactataggggggcttgttgctggtgcagtggtgggatcagccgttgaaaactggttgcaggtagacatagtcccatttcttggaatacactctccagctactgtagttggtgaaattatactcttctctcaattcttggtatctctctatctacggtaggaataagctggatgtttttgttatttaatatgtaaaacctgtaactattcattttcatg

SEQ ID NO: 37034 - DNA, 351 bp, Gossypium hirsutum
  Clone ID: LIB3165-009-P1-K1-F9
aaaacgcctagctcaaaaccttttttttttattcccataaattcccctcggggcccgggtctcttttcccacataccgccccaaaaagctccccattccttgtcaatcctaaccctataaatcccattcccagatccctcacaaagcaattccttgacagacccaacgctgtccaactcgcatcaagagccatggacatcatccaatcgcctactgccacgaggcaatccgcagtcctcagtcacctcttaatcttccccgtcagcaccccactatcagtggcgaggccctctctatgcagaatatgtgctgcgttcttgcttggcactctgacttagcgcgcttttggct

SEQ ID NO: 37035 - DNA, 382 bp, Gossypium hirsutum
  Clone ID: LIB3165-009-P1-K1-G10
gacagcttctatcaacggttggttcctttcctcctcttcttccaccactaccgcctggtctttttccgctcgtcgacgacctacattgcggccttcagtcgtcgctagccttaactcttctccttctcctccgactcttatccaagaccgcccggtttttgctgcccctattcctttgctcaccccgagagaagagatgggaaacaagtcctacgacgaagccattgaagctctcaagaaacttctcagtgagaaaggagaactgaaagctgaagcagctgcaagggtagatcaaataacagcagagtttaacacagcatcagctgatggcaaaccatctgactctttctgtgagagactgaaagaaggcttcgtttacttc

SEQ ID NO: 37036 - DNA, 379 bp, Gossypium hirsutum
  Clone ID: LIB3165-009-P1-K1-G11
aaaacccttctctttctcccttatttatttatcaccgcaagtggaaagggcggaagggccttgattgcccgagagaagaactccttaaagccaactagctgctggcaaaagaaaccatcttgagtctaacaagaaagccatgtccatccactgcaagagactgtctgcaaacattcatatgtaccacaacgttatgaaaataccattagcacgcttatgcaaaacattcaaaagtcctcttgtacccgtgctttcctgatctcaaaaaataaacatctacactccacagaaagaacggatatgtcaagacagattgcaaagcatatcatctatctatgtcgaatcttggtactatataacatatcataaatgctctttc

SEQ ID NO: 37037 - DNA, 369 bp, Gossypium hirsutum
  Clone ID: LIB3165-009-P1-K1-G12
tcccacttctctttacacttcttataatcttaaccataactgctacaccgagatcagctctttttctccgatcacccacctcctctaatcctaccaacccttcccatttcaaaaccccttccctccaattccctctcctttccctcactcctcctaacctcacccaccattccaccttccttctcaccatcttcttcccctataaaatctaaaaactcttcacccaaatctccaacttaaccctctattaatcccacaccctttttgacttccttcaaaataaactcaactttttttccctttccttttctccctcaacccttttattttccctcccccttttttcccttttcctaatcatcttttttt

SEQ ID NO: 37038 - DNA, 52 bp, Gossypium hirsutum
  Clone ID: LIB3165-009-P1-K1-G2
gaaacgctttactttaaactttatttcacgagatccgtggtttgtagggggg

SEQ ID NO: 37039 - DNA, 382 bp, Gossypium hirsutum
  Clone ID: LIB3165-009-P1-K1-G3
caaccgcttacgataatgctttgtttcttgcctgctggaggaagagggggggaggtagagctagccaaggagaacaacaagagtgctgcatcttcatcagggaaaatcaccttgagcgtcacaaagagcaagccggagaccggtgaagttatcggtgtgttcgagagccttcagccatctgacactgacttgggtgccaagactccaaaggatgtcaagatcactggtgtctggtatgctcagcttgattcataaacaagtcttgtatgaatctgtttattctcggcgtgagattttgtaatttttaaacaagtgttgctaaactttgcagtaatccactgagaaacccttatcttctttgtatgttactatgctggctttt

SEQ ID NO: 37040 - DNA, 243 bp, Gossypium hirsutum
  Clone ID: LIB3165-009-P1-K1-G4
aaaaccctctactttcatcttttttttaccaactccttgaactgtatggggggctccaatctcctttctgcacccacttcctacgtacaaacttcaactcctgacggaagacattcctctataccaattcaatattaaaataattcatctcaccaaggatacataaattacctaagactaccataccatgatcaaccttttccctttctacatagtcataacatcttaccgtaatccccatca

SEQ ID NO: 37041 - DNA, 378 bp, Gossypium hirsutum
  Clone ID: LIB3165-009-P1-K1-G5
cccacgcgtccggcaattttctttttcatgatctcatcggctaccatgggcggcgtgaactgctcctccccggcacaagccaacatggtggcccccttcaccggcctcaagtctgcctctgctttcccagtcactaggaaggccaacaacgacatcacttctcttgcaagcaatggtgggagtgtgcaatgcatgcaggtgtggcctcctcttgggaagaagaagttcgagacactctcataccttcccgatcttacacccgtacagttggctcaagaagtagattaccttcttcgctctaaatggattccttgcttaggaattcgaattagaggagggattcgtgcaccgtaagtactcgagcttacccacgtacta

SEQ ID NO: 37042 - DNA, 213 bp, Gossypium hirsutum
  Clone ID: LIB3165-009-P1-K1-G6
cacacactttcctcacatttttttattattaactcctcgaattataagaagggcttgaacctcatttctataaccaatccctacttacaaacttcaaccacaaaccaatacatccttaacatcaattcacactaaaatacccatctcacaataatacaaactatcctcattcaccataccattatcaacactatcatttatttcaaaatcata

SEQ ID NO: 37043 - DNA, 382 bp, Gossypium hirsutum
  Clone ID: LIB3165-009-P1-K1-G7
cccactcgtccgccaacccttccgtttttaattgcttttgaagcaagaaaacggttgtgcagatgaaagaatttggattaccaatgaaattatccataacccaactgttaataagcgattagaggagatggaagttaaaaatattcctatcgaggaagggaagaaacggtttgatgtagtggataagaaggatgtcgtggttttgcctgcttttggagctgcagttgatgagatgttggttttgaatgacaaaaatgtgcaaattgttgatacaacttgtccttgggtaactaaggtatggaacgtagtagagaagcacaagaaaggagactttacttcaatcatacatggtaaatatgctcatgaggagacaattgcaact

SEQ ID NO: 37044 - DNA, 379 bp, Gossypium hirsutum
  Clone ID: LIB3165-009-P1-K1-G8
ataatggtgtcctttactgtttctttagctaaaccaacccttcaagcaaatggaaagggttttgcggaattctcaagtctgcacaactcatctagccttacctttgccaggaaaacctcggatgactttcaatcagtcattgctttccagacatctgctttgggaatcaataatggtggataccggaaaggcgtagtagaggcaaagctaaaggtcgctattaatgggtttggtaggattggcaggaacttcttaagatgctggcatggccgttaggactccccacttgatgtcattgcaatcaatgacactggtggtgttaagcaagcttgtcaccttctcaagtatgactctacccttgggatatttgaagccgatg

SEQ ID NO: 37045 - DNA, 249 bp, Gossypium hirsutum
  Clone ID: LIB3165-009-P1-K1-H1
aacacgcgttcgtccaaactttttttttacaattccgtgaatgggaaggggggctctattgttacgtctaaaggcaatgccaccgtccaatctctaatcacgaaccatagcaagcgtgtacatcaactcactattaaaaccctacatattgccatagatacctatgttatactctgccacctcatgcgttatcactataaacgtcatcatcaacttcacaacatttacaagtacttttcaatacataca

SEQ ID NO: 37046 - DNA, 390 bp, Gossypium hirsutum
  Clone ID: LIB3165-009-P1-K1-H10
aaaacccttctttttttccctcatcaatccaccatgggaggaggaaatggccgaaaagccaagatggcccgtgagaagaacttggaaaagcaaaaagctgctggcaaaggaagccagcttgagtctaacaagaaggccatgtccatccagtgcaaggtgtgtatgcaaacattcatgtgtaccacaacggaagtgaaatgccgggagcacgctgaggcgaagcatccaaagtccgacgtgtacgcgtgctttcctcatcttaaaaaataaacatcgaaactccacagaaagaacggagatgtcaagacagcttgtaatgcatatcatctatctatgttgtatcttggtactctataatttatcttaaattctctttcacaagcctgtaaa

SEQ ID NO: 37047 - DNA, 377 bp, Gossypium hirsutum
  Clone ID: LIB3165-009-P1-K1-H11
accatcttcctttctcaatggcattggcttcccaagcctgcctgttcactccggcaagcctccgtaccccaaaatccggccaccgcatcgccgccgggttacggaaacaaccaccattcctaacactccctagcttcaagtccccaaaaatgatcatcgccccacgcaccatcaatgccgaagcaaccgaagagaaagccgagacaaccgccacaaaggaagcaccagtcggtttcaccccaccagagctggacccaaacaccccatcaccgatcttcggcggcagcaccggcgggcttttacgcaaagcacaagtggaagagttttacgtcatcacatgggagtcacccaaggaacaaatcttcgagatgccaaca

SEQ ID NO: 37048 - DNA, 276 bp, Gossypium hirsutum
  unsure (1)..(276): unsure at all n locations; Clone ID: LIB3165-009-P1-K1-H12
ntcacgcgttcctttcatctctttttctagagctccgtgaccagtaaggggggctacaatctccgttcttcaagcactgccaacgtacaaacttaaactacaaaccgtagcgactccattcatcatttcactctataaatcactgatatcgccaaaaatccatatgctaagcgacaaccaccatgccagttgtaaacctaaccatttgtccacacggtacacaacatcaaaacgtacttttcatgccatacgcacatgaacgcgtaccataccaac

SEQ ID NO: 37049 - DNA, 57 bp, Gossypium hirsutum
  Clone ID: LIB3165-009-P1-K1-H2
gaaacgcggtagtttgaacgttgttttacgaactccgtggatggtagggggggcacg

SEQ ID NO: 37050 - DNA, 348 bp, Gossypium hirsutum
  Clone ID: LIB3165-009-P1-K1-H3
cccacgcgtacgtccacgctttcttccacgctttcggtgaacggcactgggaggtggatttgtccatcctaagagactgcagaagcccattcgacagcgcgtacagcgcgagcttcgaaagggaatcgcgttaaaattcctgtaccgagacgcgtcggttgacgagtacgttagggtgtccgaatacgtgggctgcggcctctgcatgagttatcttttctgtttaacgagctgcccaccttgtaaacggataagcccgaggttggttccaccggcctgaatagcaccgtacgtcgtgtggagtacagaagcgcccccgacagtccttgtaaatccaatgggccgagt

SEQ ID NO: 37051 - DNA, 244 bp, Gossypium hirsutum
  Clone ID: LIB3165-009-P1-K1-H4
agccaacactttcctcacatcttttttttttcatctccttttactataagaaagactccaatcttctttctttaaccaattcctacttacaaacttcaacaacataaccaaacaattcttcaactccaattcaaaattaaaatattcaatctcactaatgataacataacttatactcatattatcataccattatcaaccttatacttaattacaaatgcataacaactttactatactttca

SEQ ID NO: 37052 - DNA, 386 bp, Gossypium hirsutum
  Clone ID: LIB3165-009-P1-K1-H5
cccacgcgtccgggggtcttatgtatctctcagcacatttgggaacttggagaggacaacagaatggctggaggttgttttcaacatcattgttcttactagtggacttcttctagtcacaatgttgattggtaacatcaaggtgtttttgcatgcaacaacgtccaagaaacaagcaatgcaattgaagatgaggaacatagagtggtggatgaggaagaggcgcctgccttctgggttcaagcaaagggtccgcaactacgagcggcaacggtgggcggccatgcgtggtgtcgatgaatgccagatgatcagaaacctccccgaggggctccggagagatatcaagtaccatctttgcctggatttagttagacaggtaccat

SEQ ID NO: 37053 - DNA, 385 bp, Gossypium hirsutum
  Clone ID: LIB3165-009-P1-K1-H7
ggagactagtgtcacgtgctacgctcgtgggattgttcttcctggtgtctctgctaagcactcctcggcattagtctcccctccatccacatctccttccttcagctctaagagccttaaaacaagttcactatttggagaatcattaagggttgttccaaggtcatcattgaaggtttcaaaggcaaagcacactacttcactagtgacaaaatgtgaaattggagagtctttggaagagtttctcacaaaggcaacaacagataaggcattgattagattaatgatgtgtatgggtgaagcattaagaacaattgcttttaaagttagaacagcttcatgtggtggtactgcttgtgttaattcctttggtgatgaacaactt

SEQ ID NO: 37054 - DNA, 386 bp, Gossypium hirsutum
  Clone ID: LIB3165-009-P1-K1-H8
gtaaaaatgtcagctgccccttcttcaatgcgctgctgggtggattttaatggcaagaattatctgtctcatggtaaattagtgtgtttgcctcccagaatggggtcatcaatgctttcataccattccagagctgattttctgaaactcaatagccttacttcactttcttctttccagcataggaatgggaaactcaaacttcagtcaaagcctatggcaccatcaagaaagttacatcaaccatgtgcattggttattagatgtgatcaccctcaaaatgcggatttgcctcgctattattccaagaaagagaagaagcccttccctgtgcccatagtggagctgaggcgagctgctagggagaggttcaagaaaagcagagg

SEQ ID NO: 37055 - DNA, 381 bp, Gossypium hirsutum
  Clone ID: LIB3165-009-P1-K1-H9
cggacgcgtgggtcaccctaggggtggatcatgttcctctgttatctgggcggactgcccttcagtgttatgaagatttcatgcttagttttgttaacaaatttgaatcctttattggaactgtaattgaagaaataagcatcggtcttggtccttctggagaacttaagtatcctgctcatccttttggtgatggtagatggaaattccctggcatcggtgaattccagtgctatgataagttcatgatggaggacttaaagatggctgcatgccgagaaggaaaacctcaatggggggacaaagggccacagaatgcttgctgttacaacagtcttccatctggggtgcccttctttgaagagggaaaggagagctttc

SEQ ID NO: 37056 - DNA, 287 bp, Gossypium hirsutum
  Clone ID: LIB3165-011-P1-K1-A10
gtccgtctttctgttttactccacaaccactatcactaccattatggcttcggctactggttctgtagccaaacccaaccttcaaattcaagccaaagggaagggtggtgggtttgcaaatttcttaaggcttcacaacttcttttcttacctttcctttggcaagaaaacccttggtgacctccattcaactggtggttttcaaaacttttgttttagaagcaattatggccggttccagaaaaggattgccaaagccaaacttaagggggcttttaatgggtttg

SEQ ID NO: 37057 - DNA, 273 bp, Gossypium hirsutum
  Clone ID: LIB3165-011-P1-K1-A11
gtagggtggctattgtcccaaaggttgggtttttcggtcaaggccttcgtgaccggaaagggaccttgggaaacctggcctgaccaccttgctgccccattaaacaacattgcttggccctatgccacaatctttgccccgggaaagtgatcttagagagtaaaaggggtttcgcctcgaaattgttttatttgggggggagaatgaaattttgcggcacaattaaagaaagcatattgaatttttgtggtcctcaaaaaaaaataatgaata

SEQ ID NO: 37058 - DNA, 416 bp, Gossypium hirsutum
  Clone ID: LIB3165-011-P1-K1-A2
cccacgcgttcgcccacgcgtccgcccacgcgtccgataccctcaaaattccactaaaaaatggcctccacagcttccctctccaccgccgtagccaccacctctttcctccgcggccatccggcgccgaaaaccctaaactcccttcctttcaaccaatctcttttcgggctaaaaccccaacgaaatggccgtctcaccatggcagcatacaaggtgacactgttaacacccgaaggaccccaagaattcgtgtgccccgacgacgtatacatcgttgaccaagctgaggaagaaggcattgatcttccgttctcgtgtagggctgggtcttgttcttcgtgtgccggagtgattaagcaaggctccgtcgatcaatccgacggtaatttccttgatgatgaccagattgctgc

SEQ ID NO: 37059 - DNA, 405 bp, Gossypium hirsutum
  Clone ID: LIB3165-011-P1-K1-A3
actcccaatactttcataacatttcacgaacttcactctccagtctccaatggcggctgccgtctccaccatcggtgctgtcaaccgagcaccgttgagtttgaatggatcaggtgccggagcttctgctccaagctcagctttcatggggaacagcttgaagaaagtgagcgctaggttcaacaacaacggcaaggctccagtgggaagtttcatgattgtggctgccaaagaaatcgacgaagacacacagaccgaccaggaccgatggaagggtcttgcttatgatatctccgatgaccaacaagacattaccagagggaaaggtatggtcgactcattgttccaagctcccatgaacgatggtactcactatgctgtcatgaagctctatgagtacattag

SEQ ID NO: 37060 - DNA, 106 bp, Gossypium hirsutum
  Clone ID: LIB3165-011-P1-K1-A4
ccgtcacgctttcgggtcattggaacaacgtaggcaagttaagtcggcaaaaaggatccgtaacctggggaaaaggtttggctttaagggccgtgcccgggggtcc

SEQ ID NO: 37061 - DNA, 151 bp, Gossypium hirsutum
  Clone ID: LIB3165-011-P1-K1-A5
tcggccaagcgttcggatgacttcaacaacttcttgattgtttaggcttcacccgatacatttggttaacacagagacaccattcccgatggggcactttttttggtgcgacacatgtgggccccaaaatgggtgtgtatccactttcatg

SEQ ID NO: 37062 - DNA, 216 bp, Gossypium hirsutum
  Clone ID: LIB3165-011-P1-K1-A6
cccacgcgtccgaaaagttgtttcagataatgataagggattccagcgcttcttggattctggtcagtacaaatctaatagcattctccggtatgagcgtgtctttggaccaggatatgtgagcacaggaggaattgaaacacccaaagaatttgtggggaagttagatcttaagcctggccaaaaagtgctagatgttggctgtggcattggggg

SEQ ID NO: 37063 - DNA, 419 bp, Gossypium hirsutum
  Clone ID: LIB3165-011-P1-K1-A7
cggacgcgtgggcggacgcgtgggctagtacccactactagcaatggcttcctcaatgatctcatcggctaccattgccactgcctctccggcacaggctaacatggtcgctcctttcaccggcctcaagtctgcctctgctttcccagtcatcaggaaggccaacaacgacattacttctctcgcaagcaatggcggcagagtgcaatgcatgcaggtgcggcctcctactggaaagaagaagttcgagactctctcatacctccccgatcttacacccgtgcagttggctaaggaagtagattaccttcttcgctcaaaatgggttccttgcttggaattcgaattagaagagggattcgtgcaccgtaaatactcgagcctacccacgtactacgatggacgctactggaccatgt

SEQ ID NO: 37064 - DNA, 422 bp, Gossypium hirsutum
  Clone ID: LIB3165-011-P1-K1-A8
gacgggaagtctttcgctgagaaagagtctctctacttcatggaaacttccgctctcgaagctacaaatgtagagaacgcatttgccgaagttcttactcaaatctaccatatcgtaagcaaaaaagccatggagacagctgacgaagggactgcatcaaccgttccttccaaaggcgagaaaatcgatgttggtaaagacatctccgcaatgaagaaagggggttgttgctcaagctaagaaaatgacataaacccgaacatccaattgtttaacgacgcagctgggggttgttctgctgtgtcggttttgtagaatcttctcgaaaaggcgcctaacagtaggaatttcgggtgagatcgggtcggtttacatccaaattttttttccagggaattatattgttgaatttagataggtga

SEQ ID NO: 37065 - DNA, 416 bp, Gossypium hirsutum
  Clone ID: LIB3165-011-P1-K1-A9
cccacgcgtccgaaaatcagttgcttcacaatggcctctacaaccatggctctttcttccccatcattcgccggtaaggcagtgaagttctccccttccacccctgaaatccggggaactggccgtgtttccatgaggaaaaccaccaagcctgttccttctggtagcccatggtacggtcctgaccgagttttgtacttgggtccactttccggtgagccaccatcttacttgaccggtgagttccctggtgactatggttgggacactgctggactctcagctgatcccgagacctttgctaggaaccgtgagctcgaagtcattcactgcagatgggccatgttgggagctcttgggtgcgctttccctgagctgttggctaggaacggtgtcaagttcggtgaagctgtatg

SEQ ID NO: 37066 - DNA, 426 bp, Gossypium hirsutum
  Clone ID: LIB3165-011-P1-K1-B1
gaaaaacaaaaatggccatggcaatggcgcttcgacgactctcctcttccattgacaagcctctccgtcctttcttcaatgccccttccctctattacatgtcgtctttgccaaatgaagctgtgtacgagaaggagaaacctggcgtcacttggccaaagcaactgaatgctccacttgaaaccgttgatcctgaaattgctgacatcatcgaacttgaaaaagcgcgccaatggaagggacttgaactcattccatcggagaacttcacgtcggtgtcagtgatgcaagcagttgggtctatcatgaccaacaagtacagtgaagggtatcccggtgctagatactatggagggaatgagtacatcgacatggcagagatattgtgtcagaagcgtgctctggaagcattcaggttagatcctg

SEQ ID NO: 37067 - DNA, 419 bp, Gossypium hirsutum
  unsure (1)..(419): unsure at all n locations; Clone ID: LIB3165-011-P1-K1-B10
cccacgcgtccgtccacgcgtncggttttgatggggaaggaacagagcttagatgagacttcaaactccatttctaattctggaagtgaaagaacgcctcttttgaacaaggaggcaagtaagcaaacaaatgggcaacaagcagctgaaagtcctctgtcagaccttgagcaaggcattgcagaagaggcagtcaatgttggattttggagagtatttgcactggcaaagccagatgcttggaagatatttgttgccacctttgcattattgatagcatccactacaaatctcttgattcctaaatatggtggaatgatcatagacattgtttcaagagatataaggacacctgaacagcattcagaggccctggaagctgtcaagaatactgtaacatacattgtgctgatcgttgt

SEQ ID NO: 37068 - DNA, 419 bp, Gossypium hirsutum
  Clone ID: LIB3165-011-P1-K1-B11
cccacgcgtccggaaaaacttaatcatggctcggttgacgttcgtgacctccatcatccttctgctatgctccgttgccgctggatcaactttcgacgactccaaccccatccagatggtatccgatggcctcaccggcttcgaatcctccgttcttcgtgtcatcggtcacactcgccatgctctctccttcgcccgttttgcatacaagcatgggaagaggtatgaaaacgtggaggagatgaagctacggtttcagattttcgaagacaacttggatttaatcagatccactaagaagaagggactgccttatactcttgctgtcaatcagtttactgattggagctgggaagagttccagaaacacagattgggggctgctcaaaactgctctgctaccacaaagggcaatcacc

SEQ ID NO: 37069 - DNA, 442 bp, Gossypium hirsutum
  Clone ID: LIB3165-011-P1-K1-B2
agataaaaacactttggcggtggagatagcaacaacagagtggctgtgggtaggtctggtttcactggctcctttgttcaagctgtgcttgccgatgccagaagcatcaaggttggcccacctcccccttcctctggtggactgcctggaactctgaactctgatgagccaagagaccttgttctgccatacaaagacaggttcttcctccaaccacttactccagctcaggcagcacagagagcaaaggaatcagccaaggatattctgggtgtcaagaacttgattgacaaaaaagcctggccttatgtcatgaatgatctccgtctcaaggccgagtatctccgctatgacctcaacaccgtcattgctgccaagcccaaagatgagaagaaaactctcaaggacctcaccaaaaagctcttcagtaccatcgatgatc

SEQ ID NO: 37070 - DNA, 417 bp, Gossypium hirsutum
  Clone ID: LIB3165-011-P1-K1-B3
gttgagcagcaaaagcggtcacagtcccaagctgaggcccaagcagagcagtccctatctcagtctcatgctcagtagccatgactgcctcctgtgccaaatgctgttgatggccgagtatcattttgccttaattttatgtttgttttggtcaccttgttccattctatgtatttaaaggaggcggctttgcttcatggtggaagatcacctgtctgacccccaagttattcatttgtttgtgtggaagaatacatcattcacagaactatcgaagtttgtaaaaaaaaaaagggcgcaaaaggaaagaaaaaatccgagtttgagcttaaatgtatgtaaatttgtaccattgtaacattgcacgactgtaatcatcctcagattttttagagtgatgtttcttgttttgcaatc

SEQ ID NO: 37071 - DNA, 378 bp, Gossypium hirsutum
  unsure (1)..(378): unsure at all n locations; Clone ID: LIB3165-011-P1-K1-B4
ttcatacgttactagattatttcgtttctatgttatcaccacgggtacanacatgtgtcgttcctaaaatacctttgatgcccggttctgagccaccaatgctggtgctccagttgggaatcagtatctaatcacttaccgggggcgcaggaggtgcaatcatccttagagactatcattacgtggacaagctccctaatatgagtagtgtacgcttacctaaacgtgtcgttcatgctaaacgagccagcgcgaaagggttctcagaggccactaatgatctatccgacctgacatgtgctgttctcctccgtgccccttgagtacagacccggctcattggtagatcgtccacggttattcttatacgcggttgtc

SEQ ID NO: 37072 - DNA, 422 bp, Gossypium hirsutum
  Clone ID: LIB3165-011-P1-K1-B5
aaaaaaaaaaaagaaatctccaacccaaacccttcctccgccggcatttgtttgcaaaaaaaaaaaaaaaagaagttcaaattgaagaatgcctgttttttcttcaagagctttgtccaggacctccgccaggcttagaaggcaaaaaggggcccctaaaggcaattggcccgccgggtccaggacctttgctgtttctatgggggagctaaccagggaaaggctgaaagacccttttttacatttggttgctgccttgccgacccggcaggccgaataagccctccgtgtcgccggcaaaggcttttcctttaccttcaaggttgaacccgcccttaacaccctggtcgactttgcttacaataagggttacgggttttcaatttgataagctaatttttaagcttattttctttttcttt

SEQ ID NO: 37073 - DNA, 346 bp, Gossypium hirsutum
  Clone ID: LIB3165-011-P1-K1-B6
aaagggttggcttacgatatttcggacgaccatcaagacattactcgagggaaagggatggtggattccctggtccaaagtcccattgattattggacctaactttgctgccatgagtccctatgattccatcagccaaggtcttaaaccgtccattttgaccaccaccttggttggtttttacttcgttcctgctttcatgaccaagcttgttgtcaacttaagcaggaacttaatgtccttccttaacattaaggttcctttattcctgggtttttggggaggcaaaggccaaggaaattctttccattgtaagcttgtgtttgccaagatggttttcaccccc

SEQ ID NO: 37074 - DNA, 417 bp, Gossypium hirsutum
  Clone ID: LIB3165-011-P1-K1-B7
actaggggcactggcattacagtctgtggtgaacaccaaaattgagcaaacattttctcttggtgggtgcaccctcactattgttgtgccaagtgcaaatgggccacttgtgatcggactcgagacgagccaggccctatggctggagattatttgcacctttgtatttctttttgcttccatatggattgcttttgataaacgtcaagccaagcacttgggtcgagtggtggtttgctctatcattggtgttgaggtgggccttatcgtatttatctcaactactgtaacttccaccaagggatatgcaggggttgggatgaaccctgcaagatgtttgggtccggctttaattagaggcggccacctttggaacggacactgggttttttgggctggacctgtcgttgcttgtgt

SEQ ID NO: 37075 - DNA, 387 bp, Gossypium hirsutum
  Clone ID: LIB3165-011-P1-K1-B8
gttaccgtattgccggtggaccactcggtgaagtgactgacccattgtacccaggtggtagctttgacccattgggtcttgctgatgacccagaggcattcgctgagctcaaggtgaaagagatcaagaacggtaggttggctatgttctcaatgttcgggttcttcgttcaggccatcgtgaccggaaagggaccattggagaacttggctgaccaccttgctgacccagtcaacaacaatgcttgggcctatgccaccaactttgtccccggaaagtgaacttagagagtgaaaagggatttgtcttgttcatgtttttatttgttggtgtgaatgtaaatttgttgcacaatcaatgaaagcagaatgtgaattttgtgtgctc

SEQ ID NO: 37076 - DNA, 423 bp, Gossypium hirsutum
  Clone ID: LIB3165-011-P1-K1-B9
atatggttccctgtttttttttcatttatttacttccccctgttacgtgctaacattagatttcagatccgacgcctgctctgctctgctgtcttgtccgactcaaattccataccggagctcaactctctcgctctccgccgacgcctgagaacaagatcttgtctctagaaaggtacgttctttgatcaaatccgatcccatcaatttaatctctgcttagatcctcgcattttgcgaaaaccatgagctccaattatgggaaaggttcatctggttcgctaaaatccttcgatttcgatctcggcctcggatcgggccgacccaaatccctcaatgaccaaaagaacaaaaccacttcttcctttttatcttattcatcagcaacatctgcaccatcgaagcccgcatgggaacccaaca

SEQ ID NO: 37077 - DNA, 413 bp, Gossypium hirsutum
  Clone ID: LIB3165-011-P1-K1-C11
caaatttcaaaacaccccccaaatctctgggttttttttttgtaccatggtttcctcttcttcttttttcttgagccaaacccatgaaaaaaaaacctacggggctattcgttccggggtcgtggtcctgttccgtaaccttatgggccttatttttgatagggtcattcagggcaaactccgtttcagatgaaccagtgagaggtagccagctccggaaccgaccctgcgatgaaatctatgtcgttggcgaaggtgaaactcttcactccatcagcgacaagtgtggcgacccgttaatcgtcgaacggaacccgcttatccatgaccctgacgatgttttccccggccttgttatcaagatcatcgcttcaactgataggaatttatagaggtagctgcttatacacatg

SEQ ID NO: 37078 - DNA, 373 bp, Gossypium hirsutum
  Clone ID: LIB3165-011-P1-K1-C12
cccacgcgtccgcaccaacaaaatcagttgcttcacaatggcctctacaaccatggctctttcttccccatcattcgccggtaaggcagtgaagttctcccctttcacccctgaaatccggggaactggccgtgtttccatgaggaaaaccaccaagcctgttccttctggtacccaatggtccggtcctgaccgagtttggacctggggtccactttccggtgagccacctttttactggaccggggagttccctggtgactttggtggggacactgctggactctaagttgttcccgaaaccttggctaggaaccggaagctcgaagccttcaactgcaaatgggccatgtgggaagctctggggggggtt

SEQ ID NO: 37079 - DNA, 427 bp, Gossypium hirsutum
  Clone ID: LIB3165-011-P1-K1-C2
ctcttttgtataactgtagcatatagtactagtaagcagtaatagcaatggcctcctccatgatctcatcggcaaccattgccaccgtgaactgctcctccccggcacaggccaacatggtggcccccttcaccggcctcaagtctgcctctgctttcccagtcactaggaaggccaacaacgacatcacttctcttgcaagcaatggtgggagagtgcaatgcatgcaggtgtggcctcctcttgggaagaagaagttcgagacactctcatacctccccgatcttacacccgtacagttggctaaggaagtagattaccttcttcgctctaaatggattccttgcttggaattcgaattagaggagggattcgtgcaccgtaagtactcgagcttacccacgtactacgatggacgctactggac

SEQ ID NO: 37080 - DNA, 420 bp, Gossypium hirsutum
  Clone ID: LIB3165-011-P1-K1-C3
aatggcggtctcacttcaagctgcagctaccctgatgcaaccaatcaaggttgctgcaccatcaaggaccaatgtgccgctcaggtcctcccagagcgtttctaaggccttcggtttggagcctgttggtgctaggcttacctgctctttgcaaactgacctcaagaacttggctctgaagtgtgttgatgctaccaagctcgctggtttcgctcttgctacatctgctcttgttgtctcgggagcaagcgctgaaggagtttcaaagcggctaacctacgctgaaatccaaagcaagacattcgatgatgtcaaaggaacaggaactgctaaccagtgcccaaccatcgatggtggtgtcggctcttttggctgtaagcctcgcaaatactacgcccagaagttctgcttggagcccac

SEQ ID NO: 37081 - DNA, 203 bp, Gossypium hirsutum
  Clone ID: LIB3165-011-P1-K1-C4
gaccgaaagtgttttaccaatacagagtacgtttacttaatgataacgtgcattgtaggcgctacaactgcccattatctttgagccaaagctgtttctgaaatctaccatctggggggagaaattagccaggggacaggttggctaggggcggacatttacgttacgttcaaagggggggactttggtgttggcaaagggat

SEQ ID NO: 37082 - DNA, 252 bp, Gossypium hirsutum
  unsure (1)..(252): unsure at all n locations; Clone ID: LIB3165-011-P1-K1-C5
gtgcccctaatgttcttggagactgtccattctgccatagagctcttcttactttggaggaaaagaagatttcctacaacatgcaccttatcaatatcagcgacaaacctaaatgggttttggagattagtcccaaaggggaaggtcccatggtgaaatttgattaccaatgggnggccgattccgaagtaaatggtggaatccctggagaaaaattcccttaaccttgtcttaaaaacccttcttaatttg

SEQ ID NO: 37083 - DNA, 422 bp, Gossypium hirsutum
  Clone ID: LIB3165-011-P1-K1-C6
ggaaaggcagttccctaaccaacaaaatctgaatgatcctgacctttatcactatgcagtattgtcagacaatgttctggctgcttctgtcgttgttaactccacaatttcctctgcttaggagcccgagaaaattggttttcatgtggtgaccgattctctcaatctcccagcaatttcaatgtggcgtttatataaatcctcctggcaaagctacaattcatgtgtcagagcgtataaaattttgattggggatccactcaggataattcgacacttgaatgaacagaaatcctatgatccaagatattcttttgcccttaaccatacttggttctatctgcctgacatatttccagcactgaataagattgtgctcttcgatcatgatgtgggggtgcacagagagttaactgtgattt

SEQ ID NO: 37084 - DNA, 421 bp, Gossypium hirsutum
  Clone ID: LIB3165-011-P1-K1-C7
cccacgcgtccgattaggccaaccagcgctattaaaatttgctatcccaaatcgttatgatcttaatctcaaactcgatctctctgcttgtattttcttttttgttagttcatattaatctcagcaccaaggaaccaactatgttcgtggacctaaatggttgtgaagttgctgtcgatcaagtctttttcatcatctatctcaaccattatgtatttttttttgttcattttgtagcctttgaattagaccctatagttcttgatgtatcacaaataatattcctagtagcgttgacttttgtcatatttcgatttggacatagtacttttgcagctgatgatgtttttgtatcattgctggttggaacatatcgatgttatgatgtcgatgactagcttccttgatccattgtatttca

SEQ ID NO: 37085 - DNA, 424 bp, Gossypium hirsutum
  Clone ID: LIB3165-011-P1-K1-C8
ccagctttcatggacaagcttgttgttcacatcaccaagaacttcatgacccttcctaacattaaggttcctcttatcttgggtgtttggggaggcaaaggtcaaggaaaatctttccaatgtgagcttgtctttgccaagatgggaatcaaccccattatgatgagtgccggagaattggaaagtgggaacgccggagaaccagccaagttgatcaggcaaaggtaccgtgaggccgccgacattatcaagaaagggaaaatgtgttgcctcttcatcaacgatctcgacgctggagccggtcgtatgggaggaaccacacaatacacagtgaacaaccaaatggtgaacgccacactcatgaacatcgctgataaccccaccaacgttcagctccccggtatgtacaacaaggaagagaacc

SEQ ID NO: 37086 - DNA, 425 bp, Gossypium hirsutum
  Clone ID: LIB3165-011-P1-K1-D1
catgggtgttgtaatcattgacggatcgacggtgagagcctttgtgactgacgaccagcagttcacgaagagcgtggatgagcgtttcgcagctcttgacctcaacaacgacggtgtcctctccaggtccgagcttcgcaaggccttcgagtctctgcgtctcctcgagtcccacttcggtgtcgacgtcgccactccccccgacgagctcactcagctttacaactccattttcgagaggttcgattgcgatggcagcggcaccgttgacctccaggagttcagatctgagatgaagaagattctgcttgctattgctgatggattgggatcttgccctatccagatggttcttgaggatgatgaccaaagttttctgaagaaagctgctgatcttgaggctgctaagctcgatccaaaccatg

SEQ ID NO: 37087 - DNA, 414 bp, Gossypium hirsutum
  Clone ID: LIB3165-011-P1-K1-D10
gtttgtctcagatttttgaagatggcccgtaccaagcagacagcccgtaagtcgactggtgggaaggctccaaggaagcaacttgctaccaaggctgcccgtaaatctgccccaaccaccggtggtgtgaagaagcctcatcgctaccgtcctggaactgttgctcttcgtgaaattcgaaagtaccaaaagagtactgagcttcttatcaggaaattgcctttccagaggcttgttcgtgaaattgcccaggacttcaagactgatttgcgtttccagagccatgctgttctagctctccaggaagctgcagaggcataccttgtgggtctttttgaagacaccaacctttgtgcgatccacgccaagcgtgtcacaattatgcccaaagacatccagttggctcgtaggatc

SEQ ID NO: 37088 - DNA, 332 bp, Gossypium hirsutum
  Clone ID: LIB3165-011-P1-K1-D11
accacgcgtccgcccacgcgtgcgggagatccaaaagttcttacgggttatatgggaaaaaataagggctttttgccatcaaacccttctgagatttctattcagcgaaatcaaatgaaggaaattatctactctctacttcctgcttgcaaagaacctgatcctgattctggtattccttttaaggcagatgcaatcattgcaaatcctccagcatacgggcatacccatgtggcagaagcactaaaagtaccagttcatatattcttcactatgccatggacgccaacaagtgaatttccgcatcctttggcccgtgtgaagcaacctgc

SEQ ID NO: 37089 - DNA, 424 bp, Gossypium hirsutum
  Clone ID: LIB3165-011-P1-K1-D12
cccacgcgtccggcaagagtacataaaagggattagtgcttggaatttcaacctagaggacttaaaaagtcaggctgcactcattcaagatgacgatgatgcaccaaatgcagaagatcaagatgggagcaggaaacaaagggaccggcatgatgtagttgggttatcagctgagaggatatctcctgaaatgcctaataattccattgctgcaagtagccaggaggacggacttagtgatcttcatgatttggagagttcacttgcttcatttcctattaagccacttcaagcactcaaaggctgttttgacattggtgaagctgagggtacaaatggtccaaattggaaaggtgttacccaattggaaagtgaacagttaattacaaagtcatcaagagccatggaccaagatgctggaaga

SEQ ID NO: 37090 - DNA, 422 bp, Gossypium hirsutum
  unsure (1)..(422): unsure at all n locations; Clone ID: LIB3165-011-P1-K1-D2
cccacgcgtccgcccacgcgtccgcccacgcgtccggttggctcgtaagctttcttcgtgctctccaagcaagtttgagaaattttattttttagcaatcaacagtgatggcttcatctctagctctcaagaggctcctctcatgcaacatcctccctagctccttgcgggtggtccgcccaatggccatcgctccatcctcctccaggctctttaacaccaatgccatgcgtgagttcgacgacgatggtgatgggcgtgacctcagtgatgaacgccagcgttcactttctcgccgcggtgacggtttcttcacagaggtgttcgatccttttgctccaacaaggagcctgagccaagtcctgaacatgatggatcagttcatggagagcccatntctctccgcttcccgtggcatgggg

SEQ ID NO: 37091 - DNA, 391 bp, Gossypium hirsutum
  Clone ID: LIB3165-011-P1-K1-D3
cccacgcgtccgaaaacactgaaaaagcaaaaagcttttcaaaaaccaaaacaatggtgtttttattttaacattcgaaccatatttctactttttctttccttaaaacatcgaaaattcgactaaaaccaaacatcaaatctctaatttacattcttagcagcttttttttttgttcccttcagaaaatgagtccaaggcaagaccttctcaaaatgacggcgttcttcatctcgccggagaaaccgcgagacatatccgtactcatcacccgaaccgctctcctcctctgccttttcacctccattactctcgtcctttgcgtatctttctcgaaccggcctcacccgttctctcggttcactttccctaacaggaaaagcttcccccg

SEQ ID NO: 37092 - DNA, 156 bp, Gossypium hirsutum
  Clone ID: LIB3165-011-P1-K1-D4
ttgttgttgaagaagtgctactaccatggctacaaataagagcgttggggacttgaagggagctggtttgaagggaaagaaagggtttggtagaatcgatcttaacgttccattggatgattacttcaacattactgatgacccaaggatccgggc

SEQ ID NO: 37093 - DNA, 418 bp, Gossypium hirsutum
  Clone ID: LIB3165-011-P1-K1-D5
gtgaagatggggaaacctattattaaggggaaggcatgtgtttgagaaatggggatgatggcaagtgtttcttcaatggaattttggtgcatccttaacctcagagccactcttattactcttcttcttattctcttttttcatctttccaagaaactttactctaaattctttcctcctccttccgttcttcatcttccttctccttcttcatccacttcccttcctgaatctcaatcaagaatcccagagattgtatctgattcagacttgaagtttttgattgataatctggatgagaagctcgatgaggacgagaaatgggagactgtaattgataagaaaaccaactctttatcctacacggcaaaatgctgctgacctaagaataaaccactaaaatacctgagcacgactg

SEQ ID NO: 37094 - DNA, 428 bp, Gossypium hirsutum
  Clone ID: LIB3165-011-P1-K1-D6
caaaaatataatccgccatggatgttctcaaagcttctcctaccattgttcattcaccatacattccaacaacaacaagaaacaaaacccagtttgctaaacccatctttcacaatttgaacttacaattaccatgttatacaagaaatggatcgaaatccaggttgtttacgaccttatcatcgtccccaatatcaacaacggagtctattgagccacctatgccggaagttgaggctgaggtcggtaaagagagattcgattggtactcacagtggtatccagtgatgcctgtatgtgatttggataagagggtgccacatggtaagaaagtattgggacttgatctagtggtgtggtgggataagaacgagaatgaatggaaagtgttcgatgatacttgtcctcatagattagctcctttatct

SEQ ID NO: 37095 - DNA, 405 bp, Gossypium hirsutum
  Clone ID: LIB3165-011-P1-K1-D8
atcagttgcttcacaatggcctctacaaccatggctctttcttccccatcattcgccggtaaggcagtgaagttctccccttccacccctgaaatccggggaactggccgtgtttccatgaggaaaaccaccaagcctgttccttctggtagcccatggtacggtcctgaccgagttttgtacttgggtccactttccggtgagccaccatcttacttgaccggtgagttccctggtgactatggttgggacactgctggactctcagctgatcccgagacctttgctaggaaccgtgagctcgaagtcattcactgcagatgggccatgttgggagctcttgggtgtgttttccctgagctgttggctaggaacggtgtcaagttcggtgaagctgtatggttc

SEQ ID NO: 37096 - DNA, 421 bp, Gossypium hirsutum
  Clone ID: LIB3165-011-P1-K1-D9
tatagattcttctagttccgaccaaaaaaagaattgctcatctttccttcagagaatatttgttttgagtgaaaaaaaaaatgttgggagtattcagcggagcgatagtgtccccgccggacgagctggtggctgccggttgcaggacgccgtcgcctaagataacggcggacgctcttgtgaaacggttcatcgaggcaaacccctccaccgtgtctatgcagatcggagatcatgtccaattcccttattctcaccgtaacgagtctgctttacttcccaggtcattcgcggtgaaagatgaaatattctgcatgtttgagggggcacttgataacttagggagtttaaagcagcaatatggacttggtaagtcagcaacagaggtggtataggtgatagaagcttacaaggctcttcg

SEQ ID NO: 37097 - DNA, 424 bp, Gossypium hirsutum
  Clone ID: LIB3165-011-P1-K1-E10
atcttccttccttttcattccttttgctatggcaggaactggggtggtcgctgtttatgggaacggcgcaatagctgaaacccacaaatcccctttctccgtcaaggttggcctagcccaaatgctccgtggcggggtgattatggatgtcgtcacccctgaccaagctcgcatcgctgaagaagctggagcctgcgccgtcatggctcttgaacgagtccccgccgacatccgagcccaaggtggcgtggcgcggatgagtgacccacaactcatcaaagaaattaagcaagctgtcaccattcccgtcatggccaaggctcgtattggccatttcgttgaggcccagatccttgaagccattggcatcgactatgttgacgagagcgaagtccttaccctcgccgacgaagaaaaccacatt

SEQ ID NO: 37098 - DNA, 397 bp, Gossypium hirsutum
  Clone ID: LIB3165-011-P1-K1-E11
gttctgggttttagctgcaattttttgcactgaaagaggacttggctgtgaaaaattgaacttcaagctatttaggactctttaaattttctagtttgtgtcatagtgctgggaaaatggcgaatgctatatcgatatcgccatattttagaccttcagatactagatcaatgggggtacttaatgttcttggtgggagagtattaatggagaactctttagggaaacttaggtgcgggtcttcgagtccgagccaaaggtctaatatgcctcattttagatgttccaccaactcccatagcgttagtccgtatcaaaataaggacccttttctgaatatgcacccagaagtttcgatgcttagaggtgaagggaatcctatagtaacaaacccgag

SEQ ID NO: 37099 - DNA, 421 bp, Gossypium hirsutum
  Clone ID: LIB3165-011-P1-K1-E12
cccacgcgtccggagaaagcactgaaaacgcataaccatggcctctgcttctctcctcaagacttcaccagttttagacaagtctgagtgggttaagggtcacacccttcgccaaccttccacttctgcggtgaggtgccaccctgttgcaccctctggactaactgtgcgtgcaagctcatatgccgatgagcttgtcaagactgctaaagctattgcttctcctggccgtggaattttggccatggatgagtccaacgctacctgtgggaaacgtttggcctcaatcgggctagaaaacacagaggctaaccgccaagcctacaggacgttgcttgtttcagctcctggccttggtcagtacatctctggtgccatcctctttgaggaaaccctctatcaaaccacaattgatggcaag

SEQ ID NO: 37100 - DNA, 111 bp, Gossypium hirsutum
  Clone ID: LIB3165-011-P1-K1-E2
cccacagcgtccgtaatacttctccatacgactttatttttgagaggcgcgtacagcgaggagggatgtttccggtgacgatgatcataacactatgtttctcttctttgt

SEQ ID NO: 37101 - DNA, 420 bp, Gossypium hirsutum
  Clone ID: LIB3165-011-P1-K1-E3
cccacgcgtccggccatggattccctcacttgcacggcctctgacctcgtccccctcctctcctcctccgccaatgcaaccgccctcgcctccttcctttgcgcccgtttctccaccatctccagccaactctctgacgccactcacgccgttgacaacacttacctcctcttctccgcttacctagtcttcgccatgcaactcggctttgccatgctttgtgctggctctgtcagagctaagaacaccatgaacatcatgttgactaacgtccttgacgctgcagccggtgctctttcttattacctctttggttttgcctttgcctttggtgccccttctaatggtttcattggacgtcatttctttggtcttaaagcatacccttcaccccgaggagattatagttttttctttatc

SEQ ID NO: 37102 - DNA, 427 bp, Gossypium hirsutum
  Clone ID: LIB3165-011-P1-K1-E4
cccacgcgtccgattttccttatccttgaagttgacgaaaatgctctgaaaaggaaaggaacagtaacaagatttgcagaaaaggagatttatttgctgcaaatactacgatgaatcaagacaatgaacaagacaataaccctgatgcgttagatgattttctgctaaagcgcaaacgtggtcgcccaagaaagcacccaaaacatgatttaaatcagggggagaatgctcagatgccttggaatcagaacctgaaccatgctgagaatgcccatgtcccacctggatttggagcagtgaatggaaaccgacctcaccaagtgaatcctgatgcaaatgacgtaatggttggtcaggctgttagtggtgttattgaggcagcattcgatgccggatatttgcttactgttagggttggcaactctga

SEQ ID NO: 37103 - DNA, 419 bp, Gossypium hirsutum
  Clone ID: LIB3165-011-P1-K1-E5
cccacgcgtccgcccacgcgtccgatttccgtttctcgagtttccttttcgatcttcaaactcgtagttgggcttatagaaatcctgtgggaaaataatgtctgatcacgaagacaagcacgaggaatcgttgttggagaagatatcagagaaggtcaaaggccatgatttatcttcctcctcctcggattccgatgatgacaagccatcagaatcctccatgaaggccaaagtcttccgtctgtttggaagagaaaggcccgtccacgacgttttcggtggaggcaaacaggctgatattttcctgtggaggaacaaaaagatttcggcaggagcactaggtgttgcaactgtgatttgggttttgtttgaattgctcgagtaccatcttctcacactagtctgtcacttagtgatac

SEQ ID NO: 37104 - DNA, 427 bp, Gossypium hirsutum
  Clone ID: LIB3165-011-P1-K1-E6
gaaaaaggaagagatcaacagtgctggtggtggtggggtgaggccaaagcttgtgcttcaaccacgtacggttcccgtgatggaggagtgtaaaaaggactcgacggtggccaagcccaaaggggcaaatcctttcggccaggcaaggccgagagaggaggtgttgaaggaaaaggggaaagactggaaggagatcgatgaaaagcttgaagctatgaagattaaagaggcagtagctgttacagagaaagagagaggggcaaaggcaagcttcggtaatggccatatcccggctgacaagagctggaggaagagtgaacctgttgaagctacagctgatgctgatcatcaaccccaaagtgctgaggaatcggagaatggccatgttgcagagaattgaagatagacactgacaaatgcgaagcat

SEQ ID NO: 37105 - DNA, 292 bp, Gossypium hirsutum
  Clone ID: LIB3165-011-P1-K1-E7
ctcaaaccctaaaagaaacagcggaagggcgctgcttgcactttccatcaatggtgtttgggagccataagagcacgagcatgagggcttcactcaagcaaaactacaaggtttttatataagtaaaggagcatcacatgaagtaagctattgaagcgaagatagtggtattgaaccgttagagaaaggttgagaaagaccctggcctccccagtgattgggctttcaaggaacaagaactcaaggctctcgaggctcgccgagctcgggcactcgaggaattagagcaaaa

SEQ ID NO: 37106 - DNA, 422 bp, Gossypium hirsutum
  Clone ID: LIB3165-011-P1-K1-E8
cggacgcgtgggctaccattatggcttcggctactgtttctgtagccaaacccaaccttcagattcaggcaaaaggaaagggtgttggttttgcagatttctcaggcctacacaactcctctactagccttccctttgccaggaaaacctctgatgacttccattcactcgttgcttttcagacatctgctctaggaagcaataatggcgggtacaggaaagggatggcagaggcaaagctaaaggtggctataaatgggtttggtaggattggcaggaacttcttaaggtgctggcatggccgtaaagactccccacttgatgtcattgccatcaatgacactggtggtgttaagcaggcttctcaccttctcaaatatgattccacccttggcatcttcgctgccgatgtcaagcctgtc

SEQ ID NO: 37107 - DNA, 423 bp, Gossypium hirsutum
  Clone ID: LIB3165-011-P1-K1-E9
gaattttcagtcgtcttctcttttagtcctctcgatcccaaagcaagctctcgattccgaatctctcccagaagatgcagatctttgtgaaaacccttactggtaaaaccatcacccttgaggtggaaagctccgatactattgataatgtcaaggccaaaatccaagacaaagaaggcattcctccagaccaacagaggcttatttttgccggaaaacaactcgaggatggccgaactcttgccgactacaacatccaaaaggagtccaccctccacctagtccttcgtctaaggggtggcatgcagatatttgtgaaaacccttacgggcaagaccatcaccctcgaggtggaaagttctgatacgattgataatgtcaaggccaagatccaagacaaggaagggatccctccagaccaac

SEQ ID NO: 37108 - DNA, 387 bp, Gossypium hirsutum
  Clone ID: LIB3165-011-P1-K1-F1
ctctcttcaaattctaacctcgaaagctttcgagattctcattttgctaagcgtattttagatcgggagtttagaggttattcattaatggcggatacagagacatttgctttccaagctgagatcaatcagcttcttagcttgatcatcaacactttctacagcaacaaagagatctttcttcgtgagctcatcagcaacgcatccgatgctttggataagatcagatttgagagcttaacagacaagagcaagctcgatgctcaacctgagctcttcatccacattattccagacaagactaacaacacactgtccatcattgacagtggtgttggcatgactaaggctgatttggtgaataatcttggtacaatcgcaagatct

SEQ ID NO: 37109 - DNA, 424 bp, Gossypium hirsutum
  Clone ID: LIB3165-011-P1-K1-F10
cgaatttgtgctagactttgaggagatatatgtgattgattcaaagaccaagtcaattaccagagcaaaggttttggtcactgttccaggaggaagaaaccgggatagaaagaatgacctacttgttatacgtgataacggaaactccttcaaaataattcattcgagtgaaagagatgatcctacaactgtaatcgaaagggaagaatgggacaaaaccagacaagacatggaaagacatctcaggaagctacgagatttcagcatttcgaattggttctaatcgaacgtcgaggttgtttcatgaagattgcctggatttatcagcacggtgagaaaatgaaggatgaacttgtaaaatcaaaacttgagacttaggattaggaaattcactttcttcaccaatggttcctagctgaagctg

SEQ ID NO: 37110 - DNA, 401 bp, Gossypium hirsutum
  Clone ID: LIB3165-011-P1-K1-F11
attctctgaaaatttttgtgctgaacttcttttttctctttgtaccaccatgtgtggaggtgctattatctccgatttcataccgccgtcgcggtcgcgacgattgacggccgatttcttgtggcccgatctgaaaaaatccgggttgaagaaagggtcgggtaagagatactcgaagcccgtgatcgacttgggcgatgatttcgagactgactttcaagagttcaaagatgaagaatctgatatagatgattatgatgttgatgatgttttggctgatgtaaagccctttgcttttaacgctacaaagaaacctgcttctgctgtatctcatggttcgaactctgaaaaatccatgcaattcaatggtcaagctgagaaatgcgcggaaagaaagagga

SEQ ID NO: 37111 - DNA, 420 bp, Gossypium hirsutum
  Clone ID: LIB3165-011-P1-K1-F12
gaaagacgttagtagcggaaaattttgaacgttactattaaggaaggataatgctatccttgcgcttcgctattcctaccgcgaatacattaactccgcccaagattaaaccaaaaccgggtttagtagtacaaaccgcttggaaccaaacggacctttttccttctcttcccaaacgaaatgattataagctacaagcagctaccacggacttatctgtggcgggagatataccggcggaggaggtggtggagcttccggcggagctgagcagagagttgatgccgaagcacgtagcggtgataatggacgggaacgggcggtgggctcggcagcggggattggcgacatcagcgggacacgaagccggtgtaaaggcgttgagggagctggtcgaactatgttgccagtgggggatcc

SEQ ID NO: 37112 - DNA, 424 bp, Gossypium hirsutum
  Clone ID: LIB3165-011-P1-K1-F2
aacatggtcgctcctttcaccggcctcaagtctgcctctgctttcccagtcatcaggaaggccaacaacgacattacttctctcgcaagcaatggcggcagagtgcaatgcatgcaggtgtggcctcctactggaaagaagaagttcgagactctctcatacctccccgatcttacacccgtgcagttggctaaggaagtagattaccttcttcgctcaaaatgggttccttgcttggaattcgaattagaggagggattcgtgcaccgtaaatactcgagcctacccacgtactacgatggacgctactggaccatgtggaagctgcctatgttcgggtgcaccgactcggctcaagtattgaaggagcttgaggaatgcaagaaggaataccccaatgcattcattagaatcattggcttcg

SEQ ID NO: 37113 - DNA, 408 bp, Gossypium hirsutum
  Clone ID: LIB3165-011-P1-K1-F4
cccacgcgtccgctttgccaagatgggaatcatccccattatgatgagtgccggagaattggaaagtgggaacgccggagaaccagccaagttgatcaggcaaaggtaccgtgaggccgccgacattatcaagaaagggaaaatgtgttgcctctttatcaacgatctcgacgctggagccggtcgtatgggaggtaccacacaatacacagtgtacaaccaaatggtgaacgccacactcatgaacatcgctgataaccccaccaacgttcagctccccggtatgtacaacatggaagagaaccctcgtgtttcgatcattgtcaccggtaactatttcttgacgctgtacgcgccgttcattcttgactgtcgattggtaatttttattggtctctttctatttaa

SEQ ID NO: 37114 - DNA, 426 bp, Gossypium hirsutum
  Clone ID: LIB3165-011-P1-K1-F5
cggacgcgtgggctagtacccactactagcaatggcttcctcaatgatctcatcggctaccattgccactgcctctccggcacaggctaacatggtcacccctttcaccggcctcaagtctgcctctgctttcccagtcaccaggaaggccaacaacgacattacttctctcgcaagcaatggcggcagagtgcaatgcatgcaggtgtggcctcctactggaaagaagaagttcgagactctctcatacctccccgatcttacacccgtgcagttggctaaggaagtagattaccttcttcgctcaaaatgggttccttgcttggagttcgaattggaggagggattcgtgcaccgtaagtactcgagcttacccacgtactacgatcgacgctactggaccatgtggaagctgcccatgttcgg

SEQ ID NO: 37115 - DNA, 427 bp, Gossypium hirsutum
  unsure (1)..(427): unsure at all n locations; Clone ID: LIB3165-011-P1-K1-F6
acactcttcaagcttttcattacagactctttcaagaatttcctgaaagaaaagaagagaaagaagaagaagatgttgctggggaagaggccaaggccacctatgaaaagaaccacaagcatgacagagatcacttttgatctaaacaccaccaccaccaccaacgccgaacctccaccctctgatccacataacccttttaacaactaccccaaacaggcttcccctttcggtggcgcagcaccttctgtagctgttgctggcggtggtgttggacttgaagggttggatcaacggttgttggcgacggtgtcacctagagttcatagaaggcattcagctgattttatggaaacacctcatttcttaaggtcttgcggtctttgtagacgtngncttgttcctggccgtgacatctacatgtata

SEQ ID NO: 37116 - DNA, 409 bp, Gossypium hirsutum
  Clone ID: LIB3165-011-P1-K1-F7
gctggaaccatcctcacaaacccctgattacctaatctcacccataacaccgccggcaccaccatcaccgccgccgccgcccacaaaacccaatcagtttctatccttgatatccaacagaccatcccttagagtgacttcagagttcgacagtgatagccgtgtgttctttcacaaagtgtcttttaagttgttcgatgaccttgctaagcttaaactatccttcgttaataacgttaaacgtgagatctcggagcctcttttggcgttaacttcgaagcatttgtctattcactatgatcctgaggaaaaaaatgctcttatcaagacatcttttgatgtgggtcctaaattgcagttcaaagctgctcatgatgttaaggcaaaacgaggcgaggttgcaatgatt

SEQ ID NO: 37117 - DNA, 421 bp, Gossypium hirsutum
  Clone ID: LIB3165-011-P1-K1-F8
gaaaaatggcttctgcttccgctactctcctcaagtcttcacctattatcgacaagtccgagtggattaagggccaaaacctccgccacccttcggtttgttttgtacggtcacaccctacatcggccgcctttgccgtccgtgctagttcatatgccgatgagcttgttaagaccgcgaaaactgttgcatctccaggtcgtggtattttggccatggatgaatcaaatgctacatgtgggaaacggcttgcctcgattggtctcgagaataccgaggcaaaccggcaagcttaccgtacccttctcgtgtctgcccctggcctcggtgactacatctcgggagctatccttttcgaggagactctctaccaatctaccatcgatgggaaaaagatggtcgatgttcttgttgagcaaaa

SEQ ID NO: 37118 - DNA, 416 bp, Gossypium hirsutum
  Clone ID: LIB3165-011-P1-K1-G1
cccacgcgtccgcccacgcgtccgaagagatatgattatagtgaaaaactaaacataataatgccccttcgacttgcttcattgatttgccctctcaaagcccaagaaaaatggcttctgcttccgctactctcctcaagtcttcacctattatcgacaagtccgagtggattaagggccaaaacctccgccacccttcggtttgttttgtacggtcacaccctacatcggccgcctttgccgtccgtgctagttcatatgccgatgagcttgttaagaccgcgaaaactgttgcatctccaggtcgtggtattttggccatggatgaatcaaatgctacatgtgggaaacggcttgcctcgattggtctcgagaataccgaggcaaaccggcaagcttaccgtacccttctcgtg

SEQ ID NO: 37119 - DNA, 424 bp, Gossypium hirsutum
  Clone ID: LIB3165-011-P1-K1-G10
cccacgcgtccgatgggtccgatccataatccgacggaatcgggccagggtctcgaaccccatgaaccaccgtttaggggatttgccccgcttgccttaccccaacttttactacgcgctagaagatcttttggagtcatacgcgccatcattgacctactctgtgtaccgctcgtcgatcataataggcgcgtcgtcgagaagcgtgtacaacgcgctacttacatcagcagtgtacgcattgatatgtcgatacgagggtttaccgtttcgatacccaggtagccggtacacatgggagcatttttgcgacatgtccgatgcacgcgtgctcgccaagcagcatatatgggccgcagtgactcccagtgccaagaaccaagcctttaattgcactaacggcgatatgttcacttagaaaagc

SEQ ID NO: 37120 - DNA, 427 bp, Gossypium hirsutum
  Clone ID: LIB3165-011-P1-K1-G11
gcgctttagctatagcatacactactagtacccactactagcaatggcttcctcaatgatctcatcggctaccattgccactgcctctccggcacaggctaacatggtcgctcctttcaccggtctcaagtctgcctctgctttcccagtcaccaggaaggccaacaacgacattacttctctcgcaagcaatggcggtagagtgcaatgcatgcaggtgtggcctcctactgggaagaagaagtttgagactctctcatacctccccgatcttacacccgtgcagttggctaaggaagtagattaccttcttcgctcaaaatgggttccttgcttggaattcgaattggaggagggattcgtgcaccgtaagtactcgagcttacccacgtactacgatggacgctactggaccatgtggaagctg

SEQ ID NO: 37121 - DNA, 424 bp, Gossypium hirsutum
  Clone ID: LIB3165-011-P1-K1-G12
atctgtccgtctctctgttttactccacaaccactatcactaccattatggcttcggctactgtttctgtagccaaacccaaccttcagattcaggcaaaagagaaagggtgttggttttgcagatttataatgcctacacaactcctttactagccttccctttgccaggaaaacctctgatgacttccattcactcgttgcttttcagacatctgctctaggaagcaataatggcgggtacaggaaagggatggcagaggcaaagctaaaggtggctataaatgggtttggtaggattggcaggaatttcttaagatgctggcatggccgcaaggactccccacttgatgtcattgccatcaatgacactggtggtgttaagcaggctcctcaccttctcaaatatgattccacccttggca

SEQ ID NO: 37122 - DNA, 397 bp, Gossypium hirsutum
  Clone ID: LIB3165-011-P1-K1-G2
cccacgcgttcgcagttcctcaatctctctaatcctcgctttcttccccatcaaacacaccttcgattttcccaaggttgtagaagatggcagaaggtgaggatattcagccacttgtttgtgacaatggaactggaatggttaaggctggatttgctggggatgatgctccccgagccgtattccctagcatcgtcggtcggccacgtcacaccggtgtgatggttggcatgggccagaaagatgcatatgttggtgatgaagctcaatcaaagagaggtattttgactttgaaataccctattgagcatggtattgtgagcaactgggatgatatggaaaagatttggcatcataccttttataacgagcttcgtgttgtcccggaagagcaccc

SEQ ID NO: 37123 - DNA, 416 bp, Gossypium hirsutum
  Clone ID: LIB3165-011-P1-K1-G4
cctttgtagagatccgggatccattgtcaccatgtcttgctcaaatctgacaatgtgggtgtcctcaaaaccctctctttctgacacttcttcactctctttccgttctttcatcagcccttttcagctcccgtctcagagctcaacccccggtaacccttccaggtcctcatctgtaaccccagttcactgtggtcttcgtgagcttagagaccgtattgattcagtaaagaacacgcagaagatcactgaagctatgaaacttgtggctgctgctaaagttaggagagcacaagaagctgttgtcaatggcagacctttctctgagtccctggttgaagttctttacaacatcaatgaacagctccagactgaagacatagatgctcctctcacatacgtcaggcctgtcaaaa

SEQ ID NO: 37124 - DNA, 348 bp, Gossypium hirsutum
  Clone ID: LIB3165-011-P1-K1-G5
cgagggccctttcgaggtatctaccgatggctccctcaaattcgaggagaaagatgggattgattatgctgccgtcacagttcagcttcctggtggtgagcgtgtgcctttcctgttcaccatcaagcaattggttgcatcaagcaaacctgatagctttggaggagacttccttgtaccatcctaccgtggctcatctttcttggacccaaagggaaggggtggctcaaccggctacgataatgcagtggccttgcctgctggaggaagaggggatgaggaagagctagccttggagatcaacaagagtgctgcatcttcatcagggaaaatcaccttgagcgtcac

SEQ ID NO: 37125 - DNA, 428 bp, Gossypium hirsutum
  unsure (1)..(428): unsure at all n locations; Clone ID: LIB3165-011-P1-K1-G6
gtgcgtgcaagctcatatgccgatgagcttgtcaagactgctaaagctattgcttctcctggccgtggaattttggccatggatgagtccaacgctacctgtgggaaacgtttggcctcaatcgggctagaaaacacggaggctaaccgccaagcctacaggacgttgcttgtttcagctcctggccttggtcagtacatctcaggtgccatcctctttgaggaaaccctctatcaaaccacaattgatggcaagaagatggttgatgttcttgttgagcagaacatagtccctggtatcaaggttgacaagggtcttgttccactggctggttcaaacaacgagtcatggtgnnaaggtctagatggcctngctccacgttcagctgcatactaccaacaaggaagctcgtttgcataatggcgtac

SEQ ID NO: 37126 - DNA, 423 bp, Gossypium hirsutum
  Clone ID: LIB3165-011-P1-K1-G7
ctattattagaattgaacacttaaagggagatcaagttcaaaaactgggatggctctgagtacacgtggaggaattgctggccactttggtgccaattgctgtttattggatatactcaggtatgtatgtgatgtttgagtcaaggtttgagaagtacaagttgcactccaagaaagaagaggaggagaagaatttggtttccagaaaggaagtcttcaaagccgttctttgccatcaagtcatagtaattgctattaacctcttcacgtatgcggttacaagagaaaaagatggtgaggcatctccaaagaaatcactaaccttgcttcttctagccaagcaattggtgatagcaatgggggtgatagatacatggtcggtttttgtgcattggtacttgcatcaaaacaagtttttataca

SEQ ID NO: 37127 - DNA, 401 bp, Gossypium hirsutum
  Clone ID: LIB3165-011-P1-K1-H1
ctccatttctcttcgtttcggttcttcctcttttgaggattacgacaaaccacccaaactaaccccatctttcctaatcgggaaactcctctcctctttctggatttatctggaaaataaaaaacccaaatagtaaatccaaatctttctttgttttcctcccccccaatactcatggagatggaagcctcttcagctaatcaacgcctccattttgggaagatgggatatggatgccaacattataggaggagatgcaagattcgagctccatgttgcaacgaggttttctcgtgtcgccattgccataacgaagctgtgaacctgttaagtaacccttttgacaggcacgagcttgttcgaaaagatgttaaacaaagtatttgctcggtttgtgacac

SEQ ID NO: 37128 - DNA, 424 bp, Gossypium hirsutum
  Clone ID: LIB3165-011-P1-K1-H10
cccacgcgtccgcccacgcgtccgtttcgtttcaactcaaaccttcgtcttgtctccctttctacagagcaacgtgaagaaggggaaagaatggggaaaataacgtataagagactgaagggaagtcaaaacatgaggcaaaggctactcttagcaacattaaaatcaactccggttctcatagaagacatccacgccgacgacaccttacctggtctccgaccgcatgagatttccctccttcgtctctttgaaaagctcacggatgactgcctaattgaaatcaatgaaactggtacaaaattgaagtacaagcctgggattatagttggagggagtcatctggtgcatgattagggtggtagtagagcaattgggtattttttggaagccttgatcttgcttggtttatttgctaggaaaa

SEQ ID NO: 37129 - DNA, 422 bp, Gossypium hirsutum
  Clone ID: LIB3165-011-P1-K1-H11
cccacgcgtccggccttcacaacttacaactcagcctctcctctctctttctctcttcgcctccaaatggcttctgccaccacttccaccactctttccctcctcaaaaccaccgcctccaccacctcttcctccgcctcccgctcttctgcatccctcatccgccttccttccacgcgccgccacctcaagtcctctcctctcatccacagcctaagcttctcctccgctgcttctggggactctctgctttccctccatgtctcctccaaagttcgatctttcaagggaaaagggtcaagaggggttgtttcaatggccaagaagagtgttggggacttgactgccgctgatttgaaagggaagaaagtgtttgtgagggctgacttgaatgttccattggatgatagccagaacatcac

SEQ ID NO: 37130 - DNA, 396 bp, Gossypium hirsutum
  Clone ID: LIB3165-011-P1-K1-H12
cccacgcgtccgcccacgcgtccgtttagaaagttcttttccgacagcaagcatacctgacgtagaaaacccaaagccaaagcgagggaaaggagaagacgtagaagacgttgaaagaagaatagagattatgacgttggctctctcttcggcaacgtctgcttcttatttcatcactcgtcataatgcaaagccttctccggttatcaaaacgaccttcatgactctgaaaccagcgtcgtttccttcccctttaaccgccgtcattgtgtctgccggggcgcggaggatcgtttcttgccaagctgtctccaccgcttccctcgacaaggacgagaaaaaccgcgcggctttggggtccgccgaagccgacgaggaagctaaagtaggggccaa

SEQ ID NO: 37131 - DNA, 400 bp, Gossypium hirsutum
  Clone ID: LIB3165-011-P1-K1-H2
cccacgcgtccgcccacgcgtccggtttcttcatacattggactagaccttgggtccataacaaattatcctctttccagctttcctctatcaaaggtttatttgagtgttaggctgttgttgctttcataagaatcgagtatgatcctatgcatttattttatgttcgtaattcagtggagatatgtaatatagagaaacaaaatcagagttcaatttcaactttgagaagttcatataagacaaagcctttctacatcatctctccacttctatttccccatattgctgcttcttggtgtaagttggaaccatttatgatgtcatgatctttggtttttttactccaaataaagaggattggctatggaagcgtggccataatggggacgtttccttg

SEQ ID NO: 37132 - DNA, 414 bp, Gossypium hirsutum
  Clone ID: LIB3165-011-P1-K1-H3
gtctgtctatcgcagccgagaagactccgtagttatactctatggcctcccaagttcttcctgaggcactgcatatgattccaagaaaccaagtacagccatttaacccagtgaagaatcgcgggttctctgcatttctgtctcgtggcccttctccattaactacttccaaggtttcggtttctgggtttcattcaaaattccctgtggggtcgagtttcagttgttttgctcgaaggggtttcgttgtgagggcagaatctaaccctgaaggtgtaggcgaagctgaagctgaaagaaatgaaaatggtggtgcagaacccgaaatgaaagctatagccgaagctgaagctgaaggtgaaggtgaaggaaacgatgacgctggagaacagaaacccaaagagcctagaatac

SEQ ID NO: 37133 - DNA, 428 bp, Gossypium hirsutum
  Clone ID: LIB3165-011-P1-K1-H4
gataaaaatggcgatggcgagtgttcgatctggtctcctacgagcagcccttcgcggcggctctcgtcctactgctcctcccacgcgtggcttcgcttcctcttctcatcacgatgatgcttatgaaaccgcaaaatgggaaaagataacatatttaggtgttgctacctgcactgttttagcgatttataacctatcaaaaggtcatccccaccatgaagagcctcctgcatacccatatttgcacattcgcaacaaggagttcccatggggtccggatggtctgtttgagagaaaggagcatcactagggatggccggatggatgcatatctttccgagttcggcgcatttttatcatttctctgagaaatcaatcagataattctggggatcttttagaattttagcactcgatttccggtttat

SEQ ID NO: 37134 - DNA, 425 bp, Gossypium hirsutum
  unsure (1)..(425): unsure at all n locations; Clone ID: LIB3165-011-P1-K1-H5
ctcacctcttcagagaaagaatcttcttcttcttcttcttcttcttcttcttcttcttcactttacatccatcaaggctgaagaaaaaaattaggttattctgagtgatgggtgtgagctgccgttgttcccacacctcccatatcactgaaatcatcataaccagcttctttcgtcataagtcttaaaacaagtgaacaactttgtgttctttaaaatccaaaagccagagtagtctttctttctcttctttttcttttgttttttatgttaaatttttatatcatttgatgatatggtgaagatgatttcttgaacaagatcgatcatttagcttgaaactctcatggcgggtgggaaaggcgtctcttagaataatactaataggtgttgtggttctagtaatctctctgntttacttcaaa

SEQ ID NO: 37135 - DNA, 423 bp, Gossypium hirsutum
  Clone ID: LIB3165-011-P1-K1-H7
cccacgcgtccgcttatctagggttagggttttgctccttctgagtttctctctcaataccaaaaatatctccaaattgaagatgatgcaacaaccagcacaagctatggtaccaccaccaatggctccaccaccttctatggcgggtgctccacagacccaacaacagtaccaatatcagcaaccacctccggctccggttcctcagacacaaccaccttacatgatgatgaacatgatgcagccgcctcagagtcatcctccacctatgtggcccccacaacaaggttcggctggggtaccagctcaacaacagccagcgggtcaaccggctaacgcagatgaagttcggactttgtggatcggagatttgcagtattatatggatgagaattatctcttgagctgttttgcccaaactgg

SEQ ID NO: 37136 - DNA, 293 bp, Gossypium hirsutum
  Clone ID: LIB3165-011-P1-K1-H8
tcagataacaatttcacagttgttttcttcactctctctctcagccatggctgcagccatctccaccgtcgccgccgttgccgccgccaaccgagctctgggagtgtcagtcccaacctcagctttcatggggaagaaagtgagctcgagattcaacaacaccaggcaggttccttcgggaagttttaaggtgatgcggcccgaaaagagatagacgtagagacacagaccgaaaaggaccgatggaaagggttggcttacgatatttcggacgaccaacaagacattactcg

SEQ ID NO: 37137 - DNA, 376 bp, Gossypium hirsutum
  Clone ID: LIB3165-011-P1-K1-H9
cttccggtgttcctagttgaactcaaccggatcattttctttggggggaaccaaaggggaaaaggctggttgatttttatttccaagaccaataccaaccgcgaaaagcgtggcctatcaaccctttacacctccgaatttagaacttagaggtgtcaaaaaagtcaccacagggatacctgttttgtggcacccaagcttttatagccactttttttttagacccttagatgggggctttccctatctttgagaagcagttttccccatgtgttgttttgcccacccaccaataggaaacgtgtgctgggtttaccccgtcgagagacaggtttttttcccctactgatgcccgcgtcacaatatttttacaccc

SEQ ID NO: 37138 - DNA, 400 bp, Gossypium hirsutum
  Clone ID: LIB3165-012-P1-K1-A10
gccagcatgataatggctccctcaaagcctgtaatctccattgctgctttatcatccttgttttccaaacccaaactcaaacaaataccacaactttccctcccaaaactccccactccaaagttcttgaaaacccaacaaatgccctcactctcgtacaccactctcaaatctatctccctcttcacagtcaccactttatcctttgccccaccttctgttgctgcagaaatagaaaaggccgctcttttcgatttcaacttaaccctccccatcatgatggtccagttcttgttcctcatgtttgctcttgacaaggtctactttaccccactcgggaaattcatggattagagagattgctgccataaaggagaaacttgccagtgtgaaggacacg

SEQ ID NO: 37139 - DNA, 390 bp, Gossypium hirsutum
  Clone ID: LIB3165-012-P1-K1-A12
gaagaattaaaataggagactccgcccatttttcttcattttcctccaaccataatcattatatttatatttcttcctctctcttctttatttcttcaagtttaaggcctcaaaatggaggcagccactgtggttggatcttctatgtctctacatcgaacttcatgctccgctgccagatccgcccttttagctgccaatggcccgctctttccacgtttcgctgctaaccctcgctcctccttctcgatcaagctttattcttcagtttcatattccaaaatcacggaataggagaatgggtttggggggtaggagaggcatggtggtaaaggcgtcttcatctcctgactcagctgaacccaatgctcaaattgcgtcacttcggat

SEQ ID NO: 37140 - DNA, 411 bp, Gossypium hirsutum
  Clone ID: LIB3165-012-P1-K1-A2
cacactctcaaattcagttaacaatttcacagttgttttcttcagtctctctctcagccatggctgcagccatctccaccgtcgctgccgctgccgccgccaaccgagctctgggagtgtcagtcccaacctcagctttcatggggaagaaagtgagctcaagattcaacagcaccaggcaggttccttcgggaagttttaaggtgatggcggcggagaaagagatagacgaagagacacagaccgaaaaggaccgatggaaagggttggcttacgatatttcggacgaccaacaggacattactcgagggaaagggatggtggattccttgttccaagctcccatgaatgatggaactcactatgctgtcatgagttcctatgaatacctcagccaaagtcttaaaacgt

SEQ ID NO: 37141 - DNA, 277 bp, Gossypium hirsutum
  Clone ID: LIB3165-012-P1-K1-A3
ccatgggagacgagtcatacgaggaagccattgaagctctcaagaaactgctcaatgagaaaggagaattgaagagtgcagcgacggcaaaggtagagcaagtgacagctgagttgaagactgctgcttcctccgatgagtctgttgaccgcttgaaacaaggcttcatttacttcaagactgaaaaatacgaaaagaatcctgctctgtatggtgagcttgccaagggtcaaagcccaacgtatatgatagtggcatgctcggactcaagggtgtg

SEQ ID NO: 37142 - DNA, 348 bp, Gossypium hirsutum
  Clone ID: LIB3165-012-P1-K1-A4
ggggctctcttgccttgtcttttgccactttttttgaatatacttgaaccaaagaagtcttgctgtaatggcggggcgagtatcacttctgtccaaaactactttcaagctctactctatcttatctttttcggtctctatcattccgtcgtcctttcgcccctaccacaccaggaatctacatctatgctctgtgcatagatcagttaaaccccaatcctgtcaagctaagatctaaggggaagagtgaatgctatgtgcttctgcctacttatgactcagctgagaggagacaaatcatggagaactaataatatagctgttctgtgctgctggatgatatctaac

SEQ ID NO: 37143 - DNA, 410 bp, Gossypium hirsutum
  Clone ID: LIB3165-012-P1-K1-A5
cccacgcgtccgctttaaagaaatattctttaccaccatttgtgagttgataatttctgagttgtactttgatggctgttgcagcagctagctgcttcaacaacacttgcttcattactttgaaacccaatagttcaatctcaaccaccaactttcccttatctttttcttatccaatcttcaacggctgcaatgggatttcagtgaccagaattgggtctagctcaaaaacatacgccaagtttgagaaatttcaaggtgacccttcagaagctaatggtgaagatattatagtatcttctctacaaacccaggaacaaaccattgaagaagaagaagaagatgacagttgtttgccatctgacttggaaggtgccagggaggcaatcaggtgaagcaagtgccttgtt

SEQ ID NO: 37144 - DNA, 404 bp, Gossypium hirsutum
  Clone ID: LIB3165-012-P1-K1-A6
cccacgcgtccgcccacgcgtccggccaaaacctccgccacccttcggtttgttttgtacggtcacaccctacatcggccgcctttaccgtccgtgctagttcatatgccgatgagcttgttaagaccgcgaaaactgttgcatctccaggtcgtggtattttggccatggatgaatcaaatgctacatgtgggaagcggcttgcctcgattggtctcgagaataccgaggcaaaccggcaagcttaccgtacccttctcgtgtctgcccctggcctcggtaactacatctcgggagctatccttttcgaggagactctctaccaatctaccatcgatgggaaaaagatggtcgatgttcttgttgagcaaaatattgtccctggtatcaaagttgacaggggt

SEQ ID NO: 37145 - DNA, 327 bp, Gossypium hirsutum
  unsure (1)..(327): unsure at all n locations; Clone ID: LIB3165-012-P1-K1-A7
aacggaatggcccgggctccgacgccgatcgcgtccgcgataaataataaaggatcacaaataaatacagtatctattactactctttnntagatttctntnnttctgcntttgcgagtttgctcntnngaaaatatnnngtgtaataccannaatttntnnttttnnnaaaaatgggaacccnncctccttacccattggctnnntcttttcggggcccctttaaacaccaatttagcaagggaccctattttggctttattctttcgcttacctggttggggctaatttttcttttgctttggcgtgttggnctttttctttctc

SEQ ID NO: 37146 - DNA, 401 bp, Gossypium hirsutum
  Clone ID: LIB3165-012-P1-K1-A9
gtgagactcttttgtataactgtagcatatagtactagtaagcagtaatagcaatggcctcctccatgatctcatcggcaaccattgccaccgtgaactgctcctccccggcacaggccaacatggtggcccccttcaccggcctcaagtctgcctctgctttcccagtcactaggaaggccaacaacgacatcacttctcttgcaagcaatggtgggagagtgcaatgcatgcaggtgtggcctcctcttgggaagaagaagttcgagacactctcatacctccccgatcttacacccgtacagttggctaaagaagtagattaccttcttcgctctaaatggattccttgcttggaattcgaattagaggagggattcgtgcaccgtaagtactcgagc

SEQ ID NO: 37147 - DNA, 399 bp, Gossypium hirsutum
  Clone ID: LIB3165-012-P1-K1-B10
cccacgcgtccgctggatatattcagcaagccttgcacaatggccaccatcacctctgccgctgtcgctatcccatctttcaccggccttaaagccggtgcaaccgcagctaaagttagcgccacagccaaggttgcagcctctccagtcccaaggggcagcatcaaggcctccctcaaagacgttggtgttgctgttggggcaactgctgcaagcgtaatccttgccagcaatgccatggccattgaagtcttgctcggcagtgacgatgggggtctggctttcattcccaaagaattcagcgtaagcccaggggagaagattgtgttcaagaacaatgccggattcccacacaatgttgtgttcgatgaggacgaaatcccaagcggcgtcgacgta

SEQ ID NO: 37148 - DNA, 394 bp, Gossypium hirsutum
  Clone ID: LIB3165-012-P1-K1-B11
tcgccacgcgtccggacggcttctatcaacggtgggcctacctcctcttcttccaccactccacctccttttttccgctcgtcgacgacctacattgcggcttagtcgtcgctagccttaactcttctccttctcctccgactctatccaagaccgcccggttttgctgcccctattcttgctaccccggagaagagatgggaaacaagtcctacgacgaagccattgaagctctcaagaaacttctcagtgagaaaggagaactgaaagctgaagcagctgcaagggtagatcaaataacagcagagttaaacacagcatcagctgatggcaaaccatctgactcttctgttgagagactgaaagaaggcttcgtttacttcaagaaagaaaa

SEQ ID NO: 37149 - DNA, 372 bp, Gossypium hirsutum
  Clone ID: LIB3165-012-P1-K1-B2
ctctgttttactccacaaccactatcactaccattatggcttcggctactgtttctgtagccaaacccaaccttcagattcaggcaaaaggaaagggtgttggttttgcagatttctcaggcctacacaactcctctactagccttccctttgccaggaaaacctctgatgacttccattcactcgttgcttttcagacatctgctctaggaagcaataatggcgggtacaggaaagggatggcagaggcaaagctaaaggtggctataaatgggtttggtaggattggcaggaacttcttaaggtgctggcatggccgtaaagactccccacttgatgtcattgccatcaatgacactggtggtgttaagc

SEQ ID NO: 37150 - DNA, 410 bp, Gossypium hirsutum
  unsure (1)..(410): unsure at all n locations; Clone ID: LIB3165-012-P1-K1-B3
cccacgcgtncgctcagaagggaaaaaagtagcgtatccgtagagggaggaccagaaattcaatgggtttcaccatgggtttgaacttcgttctcctcttagtcatggtagctaccaatatcctttccctttatcatctctcttccaccgtccaatctcccaaccctcctccccctgttcccgtccctgaccaccttctccgtcagcttaacaccatacgcgccagcattaaccacctcacgcgccataacccttcttcttcatccaccactgctgaacccagttctgctgtacctcgagatcttatcctccactctcagatcggtcccattgcttcttcttgtcacaaccatcctgatcttcttcataggtatatgaattacactcctttttcgacttgcccttacgat

SEQ ID NO: 37151 - DNA, 392 bp, Gossypium hirsutum
  Clone ID: LIB3165-012-P1-K1-B4
cccacactctcaaattcagttaacaatttcacagttgttttcttcagtctctctctcagccatggctgcagccatctccaccgtcgctgccgctgccgccgccaaccgagctctgggagtgtcagtcccaacctcagctttcatggggaagaaagtgagctcaagattcaacagcaccaggcaggttccttcgggaagttttaaggtgatggcggcggagaaagagatagacgaagagacacagaccgaaaaggaccgatggaaagggttggcttacgatatttcggacgaccaacaggacattactcgagggaaagggatggtggatttccttgttccaagctcccatgaatgatggaactcactatgctgtcatgagttcctatgaatac

SEQ ID NO: 37152 - DNA, 406 bp, Gossypium hirsutum
  unsure (1)..(406): unsure at all n locations; Clone ID: LIB3165-012-P1-K1-B5
ccctaacttctacattaggcaagaagctcctaatgtttgagagagatggcttcaaaaagatcggcatcggttgccctcttttttgcactcaacattctcttcttttcacttgtcagtgctaattgttcttgcccttcccccaagccaaaaccaaaccccactccctccccaactcctgctgcggaaggaaagtgccccataaatacccttaaactaggtgtatgtgctgaggtgcttggtttagtcaatgtaactgttgggtcacccncagttcaaccttgctgcacccttatcaaaggccttgctgatcttgaagctgctgtttgcctttgcacagcgatcaaaggcaacattttgggtatcaatcttaatatcccagtttccctcagcttgcttctaaatgtct

SEQ ID NO: 37153 - DNA, 407 bp, Gossypium hirsutum
  Clone ID: LIB3165-012-P1-K1-B6
gtcagccgccgctcaagtctttactcaaaagacacacacagcctctctccccttcatattcccacttccaaattattcctccctggttttcttccgactatggaagacggtttagggcagtcgccgacatcagccatacgccgccgctactccatcacaaccccagtacaaatccctacaaagctaactctactcacaccaaagccgctccaaaccgccaccagcctctcaaacggcagcgccaccgctcctttgtctcttgacctcgagcttatctctctcaaagcttctttcgcttcctacacttcactcaaagacatcctcccttcccccgctgtcgccgtcaactctccgaccgccgccggatccgctaccagttccgggtacgaaatctccatacgtaaccg

SEQ ID NO: 37154 - DNA, 68 bp, Gossypium hirsutum
  Clone ID: LIB3165-012-P1-K1-B7
gccacgcgtcgccacgcgtcgagttggtaacccctgttttggtgaatgaaacatggtcggacttaaac

SEQ ID NO: 37155 - DNA, 389 bp, Gossypium hirsutum
  Clone ID: LIB3165-012-P1-K1-B8
ggtgccaatcaaaaccaagctcagcaacaagagaaaacagcaccagaagccatcaccgacggtcactgtccacaaaggccgtgaattctgctggttaactcaagaagatgtgattagattcctactcagctcaattggcctcttttcacctgtccctgctttctccatcgacactcttggcatcatcagctctgaaatcctcaccattgagtaccactcccctgcttctgcagccataggagccatttctcgaacccttgtggaccaaacttcagtggctgtggttgacagtgaaggctgtttgattggagaaatttctaccttcaccttggcctgcttcgacgagacggtggcagcagccgtcaagaccttgtcctccgggatctaat

SEQ ID NO: 37156 - DNA, 189 bp, Gossypium hirsutum
  Clone ID: LIB3165-012-P1-K1-C1
ccaggtaagccccaggggggcagggggctggttccggggttaaattaagcccctaattttttgttccatccaattggaccggttgtttagggttgatgaacaattccaagtcattgtttccaaataagaaggcttttttcgatttcccgggggcccgtccagttggggcttacttgacataactggggc

SEQ ID NO: 37157 - DNA, 406 bp, Gossypium hirsutum
  Clone ID: LIB3165-012-P1-K1-C12
gtccattgattcccttcccttactgctccctccctcttccattaaaaaagaagatagaaagcagctaccaaaatggctactttgctagcggctacaggtcgtagagcaactactctatctcgatccccggctctgtctcaagccgcttctctcattcctcgccgtggtcttgccggcgctgcggatcaccatggacccccgaaggttaattgttggcaagacccaatgaacccatctaaatggaaagaagagcactttgttattgtctctttatccggttggggcctgcttttctttagcggatacaagttcttcactaaaggcaaaggcaagaaggaagagaacatggtggaaacgacacattaatgaggttggagtttccaaattttacaaatagtccatgaat

SEQ ID NO: 37158 - DNA, 340 bp, Gossypium hirsutum
  Clone ID: LIB3165-012-P1-K1-C3
aagagaaagcactgaaaaagcaaaaccatggcctctgcttctctcctcaagacttcaccagtttgagacaagtctgagtgggttaagggtcacacccttcgccaaccttccacttctgtggtgaggtgccaccctgttgcaccctccggactaactgtgcgtgcaagctcatatgccgatgagcttgtcaagactgctaaagctattgcttctcctggccgtggaattttggccatggatgagtccaacgctacctgtgggaaacgtttggcctcaatcgggctagagaacacggaggctaaccactaagcctacaggacgttgcttgtttcaacctcct

SEQ ID NO: 37159 - DNA, 407 bp, Gossypium hirsutum
  Clone ID: LIB3165-012-P1-K1-C5
gttttccaatagttcgtaacaatgtcggtctcacttcaagctgcagctaccctgatgcaaccaatcaaggttgctgcaccatcaaggaccaatgtgctgctcaggtcctcccagagcgtttctaaggccttcggtttggagcctgttggtgctaggctcacctgctctttgcaaactgacctcaaggacttggctcagacgtgtgttgatgctaccaagctcgctggtttcgctcttgctacatctgctcttgttgtctcgggagcaagcgctgaaggagttccaaagcggctaacctacgatgaaatccaaagcaagacatacatggaagtcaaaggaacaggaactgctaaccagtgcccaaccatcgatggtggtgtcgactcttttgccttcaagcctgcaaa

SEQ ID NO: 37160 - DNA, 410 bp, Gossypium hirsutum
  Clone ID: LIB3165-012-P1-K1-C6
ggattacccgctgagtttaagcatatcaataagcggtgcaaagaaatataccagaaaatcaaaaagaagaagaaaagagatccccatgatgtctcttacaatcccaactaatctctcaaaatcaattttgaagccaaagctggagacccaagtgatccccaaggcttcatccagatcattgattgtatgctcctccagcaatccttcctcctccgacaaatcggcttcatcactccaggccttctcagcggctctcgctctttcttccatccttctttcggctccactccctgctgttgcggacattgcggggctcactccttgcaaagagtccaagcaattcgccaagcgcgagaagcagcagatcaagaagctggaatcctcgttgaagctttacgcccccgatagcg

SEQ ID NO: 37161 - DNA, 409 bp, Gossypium hirsutum
  Clone ID: LIB3165-012-P1-K1-C7
aaacacccaggtacagaagcactaacattttctctttggcttaccaaccttggatctgaaatggcaaagtcacccgaagaagaacaccctgtcaagacctttggctgggctgcaagggacccatctggtcatctctctcctttcaccttctccagaagggtaactggtgaagaagatgtgaggtttaaggtgctgtattgtgggatttgtcattctgaccttcacagtatcaagagtgaatggggctcctccaactaccccatggttcctgggcatgaaatagtaggggaagtgacagaagtaggcagcaaagtggaaaaggttaaggtgggagataaagtgggcgtgggatgcatggtcggagcttgccacagctgcgacagttgtgcaaacgaccttgaaaattact

SEQ ID NO: 37162 - DNA, 393 bp, Gossypium hirsutum
  Clone ID: LIB3165-012-P1-K1-C8
cccacgcgtccgcccacgcgtccgatctccctattctcaatggcaatggcaacccaagcctccctcttcactccatcaaccctccgcaccccaaaatccggcgaccgcatcgccgccgtgttacggaaacaaccaccattcctaacactccctagcttcaagtccccaaaaatcatcatcgccccacgcaccatcaaagccgaagcaaccgaagagaaagccgagacaaccgccacaaaggaagcaccagtcggtttcaccccaccagagctggacccaaacaccccatcaccgatcttcggcgggagcaccggcgggcttttacgcaaagcacaagtggaagagttttacgtcatcacatgggaggtcacccaaggaacaaatcttcgagat

SEQ ID NO: 37163 - DNA, 406 bp, Gossypium hirsutum
  Clone ID: LIB3165-012-P1-K1-C9
cccacgcgtccggatttaagttagtgagtttcttagtttccctagaagttaagcatggctcaaattaagaggatggagtgccaactcgagatcaagtcctcagctgataagttctttgatgcctacaagaccaaagcccagcttatgccaaaaatggccaatcaagtcgttagagatgtaaaacttgttgagggtagtggttgggattccgagggttcggttagacaatggtattttgttgccggaggtaagcttgagacttgtaaggaaatgatggaaaagggggaatgataaagacaggactattgtttacaaattggtggacggtgaaatcatgaaagctttcaaaagctggaactccatcctcaacgtgatgccgataggggaagggaagtttggtgaaatg

SEQ ID NO: 37164 - DNA, 410 bp, Gossypium hirsutum
  unsure (1)..(410): unsure at all n locations; Clone ID: LIB3165-012-P1-K1-D1
cccacgcgtccgcccacgcgtccggaaaaaaagaatatggaaaccgtaactttgacaggattacttcacaaggctgcggccgagttccctaccaggcgagctttatcagtttccggcaagttcgatttgacgcatgctcaattacaacacatcatcgatcatgctgcttctctcctcatcgcctccggcatccatcccggcgatgtcgtcgctcttactttcccaaacaccgnggagcttgttattatgttcttggctgtaattcgttgccgtgcaaccgccgcgccgttaaactcagcttatactggccgaggagtttgagttttacctttctgattcagaatccaagctgttattaatcccagccgaaggcatcaagccggctgaagccgccgcttccaagttgaaca

SEQ ID NO: 37165 - DNA, 406 bp, Gossypium hirsutum
  Clone ID: LIB3165-012-P1-K1-D10
aaaccttttacttctcaactctctcaaattcaccatggctgacaagtgcggcaactgcgactgctctgacaagagccagtgtgtgaagaaaggaaacgccttggtcattgagactgagaaaagctacatcagcactgtagtggtcgaggctgtggcagagaacgatggcaagtgcaagtgtggaactagctgcagctgcacaaactgcacatgtggcaatcattaagcagacatatatagaactgcacgatgttttagtccataattaaattaagttgaataattggtggcgtgttgcatgtttgtctccgcctcattgtataccatgatagaatggccatgtctatggactttgtctgattaatgaatgattattagcacaaaaaaaaaaattttaaaataatat

SEQ ID NO: 37166 - DNA, 402 bp, Gossypium hirsutum
  unsure (1)..(402): unsure at all n locations; Clone ID: LIB3165-012-P1-K1-D11
cttaaagctagcaagagcagtgctgcggcatttcttcctcagaagacccgtcaaacagaaatgaagttcaacattgcaaatccgactactggttgccaaaaaaagctggaaattgatgatgaccagaaacttcgagccttttttgacaagaggatctcacaggaagtcagtggtgatgccctcggtgaggagtttaagggctatgtattcaagatcatgggaggctgtgataaacagggttttccaatgaagcaaggagttctcactcctggacgtgttcgtcttttgcttcacagaagtactccctgcttccgtgggtatggtaggagaaatggagagcgcangaggaagtcagttcgtggatgcattggtagtcaggatcttttagttttgaacttggtt

SEQ ID NO: 37167 - DNA, 393 bp, Gossypium hirsutum
  Clone ID: LIB3165-012-P1-K1-D12
ggcttcattacctgcatccgcctgtgggactgggatacccttttccagggctggcttagggttgccagtgagagctgccccagatagcatatcggggaaggtggagaaaagcgtcaaggaagcacaggaggcgtgctcggatgaccactctagcggagagtgtgtagcggcatgggacgaggtggaagagctgagtgcaggatccagtcacgccagggacaagaagaaagacaacgatcctttggagaattattgcaaagacaaccccgagacagatgagtgccgcacttacgataattgaagtcttattatattatgacggccttttttgggtttggtgatgaaaaatttggagttggcctaaaactctgtttaagttgttaatgtcacact

SEQ ID NO: 37168 - DNA, 379 bp, Gossypium hirsutum
  Clone ID: LIB3165-012-P1-K1-D2
cccacgcgtccgcccacgcgtccgatatcaacccggtaccaagtccgcttaggaaaatcatcacggttgcatccattgccgccggcatccagtttgggtgggctctgcagctgtctctcctgacaccctatgtccagacccttggtgtaccccacgcttgggctgctttcatttggctttgcggtcccatttctggccttctggttcaacccattgtgggatacaacagtgaccgttgcacctctcggtttcggccgacgccgaccctttattgtcattggagctctttctgtctctatagctgtcttcctcatcggtttcgccaaagacattggccaccatgcgggagattccttggagagatcgactaaaccgagag

SEQ ID NO: 37169 - DNA, 332 bp, Gossypium hirsutum
  Clone ID: LIB3165-012-P1-K1-D3
gccaatctgtaaagtccaaagaagtcagcttcagctatcgtttctcaatgtctttcttcttctttatataatcttatatgtagtctaactctgcaatcttccaatcccagcaagcggcccaaccaaagtcagatgatgatagatcgttattcaatagctttgtttctggttttttcatatcttgttggcctcttggatgctagtgctggtgatgctgatccacgttacaggggttgtgtggcagaatgcgagaaaaactggttgtgctgggggaacttgctttccacactgcaagtttcctttccgatggtgttgcccaatgatggtcccat

SEQ ID NO: 37170 - DNA, 410 bp, Gossypium hirsutum
  unsure (1)..(410): unsure at all n locations; Clone ID: LIB3165-012-P1-K1-D5
ggcttctgccaccacttccaccactctttcccttctcaaaaccaccgcctccaccacctggtccggcgcctcccgctcttctgcatccctcatccgccttccttccacgcgccgccacctcaagtcctctcctctcatccacagcctaggcttctcctccgctgcttctggggactctctgctttccctccatgtctcctccaaagttcgatctttcaagggaaaagggtcaagaggggttgtttcaatggccaagaagagtgttggggacttgactgccgctgatttgaaagggaagaaagtgtttgtgagggctgacttgaatgttccattggatgatagccagaacatcactgatgacaccaggattcgtgctgctattcccaccatcaagcatntgattcagaatg

SEQ ID NO: 37171 - DNA, 393 bp, Gossypium hirsutum
  Clone ID: LIB3165-012-P1-K1-D6
acaagtcgttgtttcaacaggcaagttctatatgtttatgatccaaggctgacagactctgttctggaaccaattatatatcagggcagagtggcgtgtggttcaagaagagaacgcaatgagaggctgttaaactatgcatggacatgaggacggcacttaccagaactgaactagcatccctatctgaagaggctacatattgctggggctgtgaatggattggagactacaagagctacactgatggactctaggcagccccagagacatttgccaagaaccgtgagctcatagttattcactgtatgtggcatgtgtggggtgctctaggatgcgattctgctgcgcttttgactaggcatggcgatgaattcggtgaggctgcgagga

SEQ ID NO: 37172 - DNA, 397 bp, Gossypium hirsutum
  Clone ID: LIB3165-012-P1-K1-D7
cccacgcgtccgcccacgcgtccgcaccataactgaaaaagaaaaagaagagatgggagttttaggcaaagtggtggatgggattctattgctaacattcgtgtccatgtcggtggtgccagcgtgcttggactcccaggtacttttgcctaaagcccttttccccgatgtgctgggtcgtgtatatacatggtatacgacaacataccaagattatttgctgttggacgagcctcattttttcatggcacttatgaaattggaggcttgttttagtattgccgctcgctatacttaacacttatggcttgttgacctccaagccttggttcaacaccacctgccttatcttcggttctgctcttggtacctccacgacagctatggtgggagacat

SEQ ID NO: 37173 - DNA, 189 bp, Gossypium hirsutum
  Clone ID: LIB3165-012-P1-K1-E1
ggcagccgtgatggcgaccttgactatgcagtcttcagtggagaccaacaaagtcaccatgccagctgttgaccgagcaccggttaatatgtatggatcatgagacagagcttatgctgctaactcagctactatgaagaacatctttgaggatagtgggcgctaaacacaacaacatctgcatggctg

SEQ ID NO: 37174 - DNA, 373 bp, Gossypium hirsutum
  Clone ID: LIB3165-012-P1-K1-E10
cccacgcgtccggcaaaacggatttttgttaaaaaatgagtcagtgtgttccgagttgggaactggatgacaacaatccactcaccactcgccatcactcgttccgcttcaactcaaattccactgcccctgatgttcccatgttagattatgaagtagctgaattaacatgggaaaatgggcaactagccatgcacagcttaggtccaccgcgtgtggtggctaaacaactaaacgccaccacttgggataaaccaagagccagtggcggtggcggtggcactttagagtctatagtgaaccaggctacttgttttccatatggtagtaaggattctgtcggtgttggtggggatgaattggtatgttggac

SEQ ID NO: 37175 - DNA, 375 bp, Gossypium hirsutum
  Clone ID: LIB3165-012-P1-K1-E11
gtttctctcatcatcctctcaaaaccgaaactcgggaatttcaactcatcttacactttgactagcggttcacttcactgagtcaactaaaagttatggcgttacctactcatcagttacagagattccttgcaatcgagttcaatttcatcgtccaatcccaaaatcgcttacaggaaccaactaaccgcaacaacggcagtaagatctagtccaagaagcccctgccgttgctccgcgattgcaataaacgctccttcttcgctaacggatgtttccgggatccgttgggggtcgacgagtgtgcagggcaggcgcgaagagatggaggatgatttagttatacgatcggacggtcttgatggattctcgttc

SEQ ID NO: 37176 - DNA, 381 bp, Gossypium hirsutum
  Clone ID: LIB3165-012-P1-K1-E12
cccacgcgtccgtactttctagtctttacgcttctttcttttgcatttatttttatatccatttgagacgaaaggtagtgtggagtagtcctcgtcttcaacccaagacttgacccatcttatatatatatagttctttatttgtttggatcaaaatccaatatactaatccttcaaatcatatattacaaaagatgggagtagaaggcaccttggaatacatctctgatttgcttagcagcgtgaagaagaagaagaagaagaagcaaattcaaactgtagctctcaaaatcaggatggattgtgaaggttgtgctcgtaaggtcaagaaggtcctctccggcgtaaagggggcaaagtctgtggacgtggacttaaaac

SEQ ID NO: 37177 - DNA, 399 bp, Gossypium hirsutum
  Clone ID: LIB3165-012-P1-K1-E2
tggagctcaaggcaaaaagaacccaccgcttcattgttttcaaaattgaggagaagcaaaagcaagttattgtggagaagcttggtgaaccaaccgaaagctatgaggattttactaaatgtctccccgctgatgaatgtcgatatgctgtgtacgattttgattttctaacggccgagaacgtaccgaagagcagaatctttttcatagcatggtctcccgacacgtcaaggatcaggagcaagatgatttacgccagctccaaagatagattcaagcgagaactggatggaattcaggtggaattgcaagcaacagatccaactgagatgggtctcgatgtgttcaaaagccgtgctaactgaatacggttcttttaggcatttgcaaccgggaagc

SEQ ID NO: 37178 - DNA, 412 bp, Gossypium hirsutum
  Clone ID: LIB3165-012-P1-K1-E3
atactcccaaaatgtctcttacaatccccactaacctctccaaatcccttttgaagccaaagataaactcccaactcacccccaaagtttcacgatcattggtggtatgctccaccgacaagacttcatcgccaccatcatcagcttcaccactccaagccttctcagcagctcttgctctttcttccattcttctctcagccccgcagcctgccgtagctgatattgcaggcctcacaccatgcaaagagtccaagcaattcgccaaacgtgagaagcagcagatcaagaagctggaatcgtcgttgaagctatacgcccctgacagcgctccagctctcgctatcaaagcaaccatcgagaaaaccgagagacggtttgacaactatgggaagtaccggctggtggtgtg

SEQ ID NO: 37179 - DNA, 410 bp, Gossypium hirsutum
  Clone ID: LIB3165-012-P1-K1-E5
cccacgcgtccgctaaatcctcacacaatcacttaatagaaacccaataacttacaaatccaccatgtccggtagcaaagactgtggcggccaccacaaatccccccggaaaaatttccggcgagtcatctcttgtattctaatcctcctccttctcgttctcatcacaatcttactcatatgggcaatccttcgtcctagcaaacccaacttcactctcctcgacaccaccgtctacgccttcaacgccaccaccttcaacttcctcacttcaaactttcaaatcaccgtccgttcagaaaacccaaacgatgatatcggtatttattacgaccggctcgacgtttacgctacttaccggaaccaagaaataacactccggactcgattcccaccaacgtaccaaggcc

SEQ ID NO: 37180 - DNA, 407 bp, Gossypium hirsutum
  Clone ID: LIB3165-012-P1-K1-E6
cggacgcgtgggcgggataccagctgcccgggtgacgaagaaagaagatctcaaagcagcaattcagaaaatgttggacactcctggaccttacttgttggatgtgattgtcccacatcaagaacatgtcctgcctatgatccccagtggaggcgctttcaaagatgtgatcacagagggtgatggaagaacacaatattgacctcaatgagcatcaaatggttttttttttggggtaatgtatgtaatgaatgagggtgggttatgggggcttagtttctgagttctggaacatagtttttctatgcttttaaaagcaaccaattaggttttcagtttggtcttatgcaagtcttgtatgtctttagtaatgttatgtaatgggcgaatctaaacttgtttttgtt

SEQ ID NO: 37181 - DNA, 405 bp, Gossypium hirsutum
  Clone ID: LIB3165-012-P1-K1-E7
gctggggttaatcctttggcaggttgcttccctactttagctactattccagtctggattggcctgtatcaagctctctcaaatgtggcaaatgaggggctgttgacagaaggtttcttttggatcccatctttgggtgggccaactacaattgctgctcggcaaagtgggtctggaatttcttggcttattccatttgtggatgaccatccaccattgggttggcatgacactgctgcataccttgttttacctgtgcttcttgttgtcagtcaatatgtttcaatggagctgatgaagccaccccagacggatgatccagcccaaaagaacacacttcttgttttcaagtttctttcgcttatgattggttacttttcattatccgttccgtcaggatttttt

SEQ ID NO: 37182 - DNA, 367 bp, Gossypium hirsutum
  Clone ID: LIB3165-012-P1-K1-E8
ggcgggattacccgctgagtttaagcatatcaataagcggaggaaaagaaacttaccaggattcccctagtaacggcgagcgaaccgggaaaagcccagcttgagaatcggtcgccatcggcgtccgaattgtagtctggagaagcgtcctcagcgacggaccgggcccaagtcccctggaaaggggcgccggagagggtgagagccccgtcgtgcccggaccctgtcgcaccaagaggcgctgtctacgagtcgggttgtttgggaatgcagccctaatcgggcggtaaattccgtccaaggctaaatacgggcgagagaccgatagcgaacaagtaccgggaggggaaagatgaaaaggactttg

SEQ ID NO: 37183 - DNA, 396 bp, Gossypium hirsutum
  Clone ID: LIB3165-012-P1-K1-E9
cccacgcgtccgctcaaattcagttaacaattttacagtggtttttttaagcttcttttttagccatggctgcagccatctccaccgtcgctgccgctgccggcgccaaccgagctctgggagtgtcagtcccaacctcagctttcatggggaagaaagtgagctcaagattcaacagcaccaggcaggttccttcgggaagttttaaggtgatggcggcggagaaagagatagacgaagagacacagaccgaaaaggaccgatggaaagggttggcttacgatatttcggacgaccaacaggacattactcgagggaaagggatgggggattccttgttcccagctcccatgaatgatggaactcactatgctgtcatgagttcctatgaatacc

SEQ ID NO: 37184 - DNA, 187 bp, Gossypium hirsutum
  Clone ID: LIB3165-012-P1-K1-F1
ctcacgcgtactgtttgggtggccactaggggtttgatcatcgaactcatataggatggatacacagtcaaggaagaaccaacgcagaagattgtggaatcagacggtcacacccaatgttacacattgcggacatgacagttatatacaaagcatgatgaggtatatagcatgtgcgaggctgacg

SEQ ID NO: 37185 - DNA, 404 bp, Gossypium hirsutum
  Clone ID: LIB3165-012-P1-K1-F10
cccacgcgtccgatctccttcacttacaggagtatctattccaagaaagccatgacggatatggacagtacaaatgtctatgcttatatttccatcattgctctcttcgtctgtattcccccagccctcatttttgagggtcctcaattgttgaagcatggtttcaatgatgctattgctaaagtgggtatgactaagttcatctcagatcttttctgggtgggaatgttttaccatctctataatcagttggctaccaatactctggagcgggtggcaccactgacccatgcagtgggcaacgtgctgaaacgtgtatttgtcattggcttctcaatcattggctttggaaacaagatttcaactcagactggtataggaacagtcattgcaattgctggagg

SEQ ID NO: 37186 - DNA, 346 bp, Gossypium hirsutum
  Clone ID: LIB3165-012-P1-K1-F11
catagtccaacattttcataacaatggctgccatcacaaacgccgctgctacatcctccttcatggggacactcttccccgacgtctacacaagttcagggagattcgtcgccaggtttggctttggcggcaaaaaagcagctcccaagaaagtctcgaaacgaaccccagaccgccctctatggtacccaggagcagtggcgcctgattggctcgatggaagtttggtgggtgattacgggttcgacccgttcgggttagggaaaccggcggagtacttgcaatatgatttggattctttggaccagaacctggctaagaattcggctggtgaggataatggaac

SEQ ID NO: 37187 - DNA, 382 bp, Gossypium hirsutum
  Clone ID: LIB3165-012-P1-K1-F12
agaaaatataagccacacaaaaaaaacaaaaaaacaaacaaacaaacatttccgatccggaaaaaagttagatcgttgaccatgaactccggcacatccgacggagaattggcggcgcgtggatcgagcgggagggtgtgctccacatcgtcagcagacaagaaaaaagagaaggcaagagtgagccgcacgtcgatgatactgtggcatgcccaccaaaacgacgccggcgctgtccgcaagcttctcgaggaagatcgagctttggtcaacgctagagattacgacagccgtacgcctctccacgttgcttcgctccacggctggatcgacgtcgccaagtgcctccttgaatatggtgccgatgtcaactcccaagatc

SEQ ID NO: 37188 - DNA, 310 bp, Gossypium hirsutum
  unsure (1)..(310): unsure at all n locations; Clone ID: LIB3165-012-P1-K1-F2
cccacgcgtncgcccacgcgtccgattttctaattttatttccatttctctctccctcttttgtgaaatctccgggcttccaaatatacccccataatctcaaaactccggcgatttaaaattctcgtttcgatcttgagatcttattatcattgccggtttctttctggaaaaacggggattaaagacgaagaggagggatagaatcggaaaaagaaaggaaatcgcatgagctggttgggaaatctgggttttacttgcttctcttcgttgaaattgttccaacccattttataacgtgtcttttaaa

SEQ ID NO: 37189 - DNA, 411 bp, Gossypium hirsutum
  unsure (1)..(411): unsure at all n locations; Clone ID: LIB3165-012-P1-K1-F3
atatcttcctctccacccttgaaccatgtcggcttttgttggcaagtatgcagaggagttgatcaagaacgccaagtacatcgccacgccaggcaaaggtattttggcggcggacgagagcacaggcaccatcgggaagcgtctctcgagcatcaacgtcgagaacatcgagtccaatcgccaagccctccgcgagctccttttcacctctcccaacgcattatcctgcctctccggtgtcattcttttcgaggaaacactttaccagaaaacctctgacgggaaacccttcgttgaaatcctcgaagagaacaatgtcattccaggtatcaaggtcgatnagggcaccgttgagatagccggcaccaatggcgagaccactacttcagggttcgacttcctgggtgcgcg

SEQ ID NO: 37190 - DNA, 380 bp, Gossypium hirsutum
  Clone ID: LIB3165-012-P1-K1-F5
ctcttggaaggagaggaagatagttaaaaactcaaagaagggcttcaattagatcctcttgcttgctatcattccaaacttggagataagagaaagctgacccctggtttgcttatctgtaggatcccctggggaagctgctggtggtggtttttacaggcatttcaaataccattttctatggttctttggctgttctgattctaattgatgttggaggggttcactgaggattaagctcctcaatcatggaaggtctttgtgaaacaccagaaaatggtaaagtagcagatcccgaccttcggaatattcagtacttgccatcctctaccggattatcattactttggtttgatatgagagtcttctatgttagagtc

SEQ ID NO: 37191 - DNA, 397 bp, Gossypium hirsutum
  unsure (1)..(397): unsure at all n locations; Clone ID: LIB3165-012-P1-K1-F6
gtgcaatgcatgcaggtgtggcctcctactggaaagaagaagttcgagactctctcatacctccccgatcttacacccgtgcagttggctaaggaagtggattaccttcttcgctcaaaatgggttccttgcttggaattcgaattagaggagggattcgtgcaccgtaaatactcgagcctacccacgtactacgatggacgctactggaccatgtggaagctgcctatgttcgggtgcaccgactcggctcaggtattgaaggagcttgaggaatgcaagaaggaataccccaatgcattcattagaatcattggcttcgacaacgtgcgtcaagtgcagtgcattagtttcattgcctacaagcctncaggcttctaaagcttttataaacttt

SEQ ID NO: 37192 - DNA, 420 bp, Gossypium hirsutum
  Clone ID: LIB3165-012-P1-K1-F7
attcctctctcggtatatgttcaatcaaattccaacccaaagtactgctcaactttcttaatttccaacaagttttcttttaatttccctgtttttgcatcaattaaatatctcattactccagtacagactacagaggttttagccatggcgtcccttaacccaagtgggtatgaaaagttttcaggttcaccaccgaagcagggcaaagaagcagccacaactgggattccacttagctcctcaaaccaatacttcaacgagagttgtgagaccaatacccgtcttcagactaaaactcgagtcccttggtcttcagggctctgcgactgcttctctgattggagaaactgttgcatcacatgttggtgcccttgcgtaacttttggccagattgccgagatagtagataaaggatca

SEQ ID NO: 37193 - DNA, 329 bp, Gossypium hirsutum
  Clone ID: LIB3165-012-P1-K1-F9
cccacgcgtccggcgatggaatgtactgtggttaaaaaccaccgtctgtgtctcggacattcggcttttttatcattgctgagcgcattgtactctctgcgcaccaccatgcatgtcctcatcttcctcataagcttcttgttgagcttgagcctgtttcctacgcatctcttcctcaatgttaacatcatgcatggttgtttcctcgcactcatccagctccatgtcagtcagctgaaccgatgccttgggaggaagcacagcctccagtgccttgcattggtctggggtcaacgagtcagggacgtcaacagtgaagtgaatgaaaa

SEQ ID NO: 37194 - DNA, 253 bp, Gossypium hirsutum
  Clone ID: LIB3165-012-P1-K1-G10
ctcgcgcgcctgtacttaacagtaaatacgctaattcaatgggcgcttagaaccatatccatatattgcaaggggtcagggggctgatattcatgttaatagcccatgacttgacctagcttatatagtatatagattgttcataagtttggatcaaaaaacgccagtgctagtgacatatatcatatttaacagattatgtttgggtggagctccttgatgtacgtctcggatgagctcaacagcgagggga

SEQ ID NO: 37195 - DNA, 400 bp, Gossypium hirsutum
  Clone ID: LIB3165-012-P1-K1-G12
gctttaagcacaattttcttgctctagctattcttcttcccttccagactaacctatactgttccagatccaaactatgcaattaccgaattgccgtctataaatatcttagcaaaaggcttttgacaaacaatcttctttctggctgattttaaagagagactattcacaagaactcttcttcgtcttattagagcaagcaaattcaaaacaataaattagaaaagaaagagagaatcaaagatgtgcttggtgttcgtatgtgatgaggatgaaagggtgatatcgaggcagccggcaccaggagcctgtccctactgcggtgggatggtgcaagccatggatgttgaaagccagtggaggttctgctttttgcctttgtattttaagaccaaaagga

SEQ ID NO: 37196 - DNA, 380 bp, Gossypium hirsutum
  Clone ID: LIB3165-012-P1-K1-G2
ccattcccctctcttttcacctcatatttcatcaattacccaatcaccctttcacctttaaaaccaatcccccattttacatcccaatgcaacttccccttgtacacataccaaccatggaagcaacctcacttctttcttcatcttcttccttcaccctctctttccttccttcacctctttcttctccacatctccaccacaggtctcttttcttcaggggcatgtttccagttactgtaaacccgcagacatgttcaacagctgttgtccgcaaaaagttgagcttctgcacaaaggcagttcttggaggaaatgtgcatgtaacaggagttcctacttctgtccctgtaagagtagcacacgagcttcatcaagct

SEQ ID NO: 37197 - DNA, 394 bp, Gossypium hirsutum
  Clone ID: LIB3165-012-P1-K1-G3
caattttagggttttttctattatttcataatcagattctggattatccaaaactcaatcttcagatcaggtcttagttttctagttgttgggttctttcgacgagctaagtttcatgtctgatcttgacatccagattcctactgcctttgatccgtttgctgatgcaaatgctgaagactctggtgctggtgccaaggagtatgtgcatattcgtattcagcagcggaatggtaggaaaagcctgaccacggtccaggggttgaaaaaaagattcagctataacaaaattcttaaggacctcaagaaagagttttgttgcaatggcactgtggtccaagaccctgaattaggacaggtttttcagctttaaggcgatcaaaggaagaatgtt

SEQ ID NO: 37198 - DNA, 254 bp, Gossypium hirsutum
  Clone ID: LIB3165-012-P1-K1-G4
gaattgcccggcccacgcatccgtgtcaattcaatcaaaacaaatttttgttgatacgatgtttctgcgcctcctacagattgcggttttggatactggcgaaaggcaactatcctggaacttcctctttttgtttttcatctctactgtcgagctgatactgctcgccacatggatgtcatactaaaggctctagttggaacaaatttgccgccttttcaacatctgaggcgtgcgcaccagaactacacctg

SEQ ID NO: 37199 - DNA, 422 bp, Gossypium hirsutum
  Clone ID: LIB3165-012-P1-K1-G5
cgatggctctctcaaactcagtcccgtcagcttgcattatctgtctcagtgcttctaatcaattctatcccccatcttcacctttcaagtctctcaagccccctctcttctggccatggcaaaaggtgaaaatgggtcctttgactgtttctccaatggggtttgggacgtgggcatggggaaaccagcttctctggggttaccaaccttcaatggattctcaacttcaacaggtttttaatcttgccgtggagaatggcatcaatctttttgacaccgccgattcttatgggactggcagactcaacggacagagtgaaaagcttttagggaagttcattagagaatttcaaggggaaaaacggatacgagatgagattgtgattgccacaaagtttgcagcttacccatggcgtctaaca

SEQ ID NO: 37200 - DNA, 396 bp, Gossypium hirsutum
  unsure (1)..(396): unsure at all n locations; Clone ID: LIB3165-012-P1-K1-G6
gcctcaaccacgtctgctgctgcttctccttctctattccctctttcaatccatatataaatgattggctgtgaggtggaaaattaacaggattaggaggacactctttcgtcttaaagatggcttccgtgggcatggtgcctgcttctggtttaagagaatctagtactgccagtgttgagaagttacctgaggagatgaatgacatgaaaatccgagatgacaaagaaatggaagcaacagtagtggacggtaacgggactgagacagggcatataattgtgacaaccattggtggtagaaatgggcagccaaaacagacgataagttacatggctgaacgtgtggttggacatggatcatntgnagttgtcttccaggcaaagtgcttggaga

SEQ ID NO: 37201 - DNA, 409 bp, Gossypium hirsutum
  unsure (1)..(409): unsure at all n locations; Clone ID: LIB3165-012-P1-K1-G7
gaaaagatggactatgtgtacggaccaggaaagaaccatctctttgttccagggccggttaacatcccggaaccagttcttcgagccatgaacaggaacaatgaggattaccgttcccctgccattcctgccatgacaaaaactcttcttcaagatgtcaagaaaattttcaagactactactggaactccctttttgattccaactacaggaactggtgcatgggagagtgcactcactaataccctgtcccctggagatcgaactgtatcttttctaattggacaattcagtctgctgtggattgatcaacaacaacgcctcaacttcaacgtcgacgttgttgaaagtgagtggggtcaaggtgctaacctngacattctggcagaaaaacttgcagctgatcact

SEQ ID NO: 37202 - DNA, 299 bp, Gossypium hirsutum
  Clone ID: LIB3165-012-P1-K1-G8
gttaacaccagccagccaccctgtctgcgaagtcaagtttcagagagtacattggttttcatgccaagccaggaaaaaggtagtactacatagttgttgagttaagtcttgaatcttgagtccgatcatgagttgcaacggctgccgagtcttacggaaaggatgcagtgagtcttgtatattacgtccttgtttgcaatggattgagagccctgaagctcaaggccacgccactgttttcgttgccaagtttttcggccgtgctggtctcatgtcttttatttcaagccgttcctgaa

SEQ ID NO: 37203 - DNA, 222 bp, Gossypium hirsutum
  Clone ID: LIB3165-012-P1-K1-H1
cccacgcgtccggtattgtttgtgtgtgtagtctaacactgttgcaccaaacgcttgactagccaattgtctttgtattgcatttactgtttccgcattgagagcctgcccttgattgccgagtgccggtctgtctggctactgttccaatggagtccttcgctgctctacgatcatttcactattatgtgagtgctgcttcacaagctcgtctgacgcatg

SEQ ID NO: 37204 - DNA, 181 bp, Gossypium hirsutum
  Clone ID: LIB3165-012-P1-K1-H10
gaactacatgacccttcctaacattaaggttcctcttatcttgggtatttggggaggcaaaggtcaaggaaaatctttccaatgtgagcttgtctttgccaagatgggaatcaaccccattatgatgagtgccggagaattggaaagtgggaacgccggagaaccaccccagttgatcaca

SEQ ID NO: 37205 - DNA, 361 bp, Gossypium hirsutum
  Clone ID: LIB3165-012-P1-K1-H11
cccacgcgtccggcgggattacccgctgagtttaagcatatcaataagcggaggaaaaggttccatgtgaacggcacttgcacatgggttagtcgatcctaagagacgggggaagcccgtccgacagcgcgtccagcgcgagcttcgaaagggaatcgggttaaaattcctgaaccgggacgcggcggctgacggcaacgttagggagtccggagacgtcggcggtggcctcgggaagagttatcttctctggttaacggcctgcccaccctggaaacggctcagccggaggtagggtccagcggccggaagagcaccgcacgttgcgtggtgtcccgtgcgcccccggcggcccttgaaa

SEQ ID NO: 37206 - DNA, 158 bp, Gossypium hirsutum
  Clone ID: LIB3165-012-P1-K1-H12
tcgatcgtttacatgcccgacaacctttactactttttaagatgatgatactgggttcaattttgtgaatcaggtgaacccgtatcgcatcctgaagaaccaggctcttgaatctttgtaccgagtgaatattgggggcagctccatttcacctacac

SEQ ID NO: 37207 - DNA, 171 bp, Gossypium hirsutum
  Clone ID: LIB3165-012-P1-K1-H4
cttccgtatgtaccgcacttttcctgctattaagttttttcttatcttcccagactgacctatgcggtgccagatccaaatctatccaatgacggcattgccgtttaaatatctgaacccacacggctttggtgacagcatcttttgtgtggctggttacaaacgagagac

SEQ ID NO: 37208 - DNA, 420 bp, Gossypium hirsutum
  unsure (1)..(420): unsure at all n locations; Clone ID: LIB3165-012-P1-K1-H5
cgacccacgcgaccggttccttccttcgccgtctattgctttttgttacctcgatttcaagtgaatcagaatgggtaaggaaaagactcacattaacattgtggttatcggccacgtcgattctgggaaatcaaccaccactggccacctgatttacaagcttggtggtattgacaagcgtgtgattgaaaggttcgagaaagaagctgctgagatgaacaagaggtcattcaagtatgcttgggtgcttgacaagctcaaggctgagcgtgagcgtggtatcaccattgatattgccttgtgganaattgagaccacgaaatactactgcactgtgattgatgcacctggacaccgtgactttatcaagaatatgattactggtacgtcacaggctggctgtgctgttttgattattga

SEQ ID NO: 37209 - DNA, 283 bp, Gossypium hirsutum
  Clone ID: LIB3165-012-P1-K1-H6
catcgctcacatagcacaggctcgaaaaatagccctttttactttgttatatagattatgttatatagattattatttatctatatagagtattattaatccatagatatatagattctaaatttgattattattagatagattgattatatagctatatccaacttttctatagagatatagaacttttatcagtaattccatctcatttatattatattctatatcatccatatttttaaataaaacaatggctctaaagaaatatctctcataacacaac

SEQ ID NO: 37210 - DNA, 330 bp, Gossypium hirsutum
  Clone ID: LIB3165-012-P1-K1-H7
ctcaagctctctcttgctgtctaggtgtactttttctgtttatctatggatccctagaagcgccggccatcaagtgctatcaattcaccattctggactaccaattctggcgctgcagactggaataacaattcatatctcactgttggacccagagagtgcaattgtccttgaggactatcatgtggtggaaaagcttgccaactttgacagggagcggataccataacgtgttgtccatgctaggggagcaagcacaaagggtatatttgaggctacccatgacatttctcacgttacatgtgctgatattctgcgagcacctggagt

SEQ ID NO: 37211 - DNA, 361 bp, Gossypium hirsutum
  Clone ID: LIB3165-012-P1-K1-H8
gttgaaacgatttcgtttttggtgatagaaaacaaatggcggtttcatcatgttcatttactcttagccctagggtttgtaatccatattcttcatttgagtgccgtccagatcccgatttctccagtgcgccgatcggggacaagcctcgtcttgcctccagccgaagggtgacggcttcgtcgctttacgccggaggtatcagtagccgaggtttgtcttctctgatctttcgtttcccgccgaatttcgtgcgccagcttagcatcaaggctcgccgcaactttagcaatatcggtgttgcgcaaatagtcgctgcttcgtggtcgaatggtcctgctccagattcccccttcttggc

SEQ ID NO: 37212 - DNA, 397 bp, Gossypium hirsutum
  Clone ID: LIB3165-012-P1-K1-H9
cgattttctattttgttttctctccctccaattaagatgcagatcttcgttaagaccctgaccggcaagaccatcaccctcgaagtcgagagttccgacacgatcgacaacgttaaggcgaaaatccaagacaaggaagggatcccaccagaccaacaacgtctcatcttcgccggaaaacagctcgaagatggccggaccttggccgattacaacatccagaaggagtccaccctccatctcgtcctccgtctacgtggtggcatgcagatcttcgtcaaaaccctgaccggcaagaccataactttggaagtcgaaagctctgacaccattgacaacgtcaaggcaaagatccaagacaaggaaggcatcccaccagaccagcaaaggctcatat

SEQ ID NO: 37213 - DNA, 411 bp, Gossypium hirsutum
  Clone ID: LIB3165-013-P1-K1-A11
agcatattttatttatttaagtccttcaagctttatttcatgttcttcatcttcttcttttagttgttcatcaattaagcaagcttatagattccagccatggcggaaaagaaatggattctgatactttttttaactttcatcattgcagtgtctcaagttcaccatttatacatgggggaactagcaagcataatgcttgaaaagcttcaacaatggcggaaaccattcaacaatggtggaaagaacttagcaattggacctaacttaacagcttgtcattcatcgtacggtcgaccagatcttctggtttattgttgtccaccggggtttcagactccagtaccctttaccgattttaagttccctgacccatcaccggtccgggtccgacgaccggcgcatctttta

SEQ ID NO: 37214 - DNA, 453 bp, Gossypium hirsutum
  Clone ID: LIB3165-013-P1-K1-A2
cgaatcccgggcgcccaccgcatgcgtccgaccctcagacattgagatggaacgtacaagctgagctggttcactgcagatgggcaatgttgggagctgctggtattttcatcccagagttcttaaccaagattgggattttaaacactccatcgtggtactcagctggaacagaggaatacttcactgacaccacaactctcttcatcgttgagcttatttttatcggctgggctgaagggagaagatgggctgacattctcaagccagggtgtgtaaacacagaccccatcttccctaacaacaagctcaccgggactgatgttggatacccaggtggcctgtggtttgaccctcttggctggggaagtggttcgcctgagaagatcaaggagctgaggacgaaagagatcaagaatggccgattggctatgttggcagtgatgggtgcat

SEQ ID NO: 37215 - DNA, 389 bp, Gossypium hirsutum
  Clone ID: LIB3165-013-P1-K1-A3
gcttggcagaatcagtgattggtgcggaccctttcgacccggcgctctcactcagtgcgagcccggacctgttttgtttttgtaattatgtatttttcggacgaaatggaaatacacactactttttaggttgaatcactgaatacatagaacgaaagcgaagaaaatttcttaaatttgtagaaattgtcagttatcacctggcgttatatgtggatcacattgtgaggccggttcctgcgcgtccagttgaatcgggggctggtccctcgacggaggaaaaggagaacgcgaaggatacggaggttttccaaggaagcaatggggaggacccggttattcacgtggcggaatgccgcatacgacccgaggaagattgcacttataat

SEQ ID NO: 37216 - DNA, 397 bp, Gossypium hirsutum
  Clone ID: LIB3165-013-P1-K1-A6
tttctccacactgtatgctcctctcatccgtgacggtcgtatggagaaattttactgggcaccaactagggacgaccgtatcggtgtttgcaaaggtattttcaggaccgacggcgtccgagatgaagacattgttaagctcgtcgacaccttccccggccaatccatcgatttcttcggtgccttgagggctcgggtttacgatgacgaagtgaggaaatggatcagtgaggtcggagtcgcaagcgtagggaagaagttagtgaactcaagggaaggacctccaacatttgagcagccaaaaatgaccattgaaaagctattggaatatggaaacatgcttgttgctgagcaagagaatgttaagagagtccaattggctgacaaatacttgagt

SEQ ID NO: 37217 - DNA, 427 bp, Gossypium hirsutum
  Clone ID: LIB3165-013-P1-K1-A7
accactcgacattgaaactcatccttccccttctctctcaaatcctcctaccgtccttcttcaccacacaccacaactactatactcccaaaatgtctcttacaatccccactaacctctccaaatcccttttgaagccaaagctaaactccaaactcacccccaaagtttcacgatcattggtggtatgctccaccgacaagacttcatcgccactatcatcagcttcatcactccaagccttctcagcagctcttgctctttcttccattcttctctcagccccacagcctgccgtagctgatattgcaggcctcacaccatgcaaagagtccaagcaattcgccaaacgtgagaagcagcagatcaagaagctggaatcgtcgttgaagctatacgcccctgacagcgctccagctctcgctat

SEQ ID NO: 37218 - DNA, 418 bp, Gossypium hirsutum
  Clone ID: LIB3165-013-P1-K1-A9
cccacgcgtccgcccacgcgtccgctgggtttctttcaaaacaaggtttttctttgacgtatttcctcgctttcttttaaagagaaaccacaaagaaaaaggaaacgggttttgaagaaggagatggttttcatgtgtgagattttcttgcccggaggaaagttggaagaaagagagtgggaaaaggagagataataaaaaaagaagaagaaaaagatcaaatttgcctaaaaagccgtagtagcagaagtggaaaaagggggtaattcctttttaagcaaagaacaagaaccctaagtttttgtttgtttaatctgcttatctgctgggctaattggcaatgtctgctacgataatgagtgaaccaatggtggtatcagcaccatcaccagaaactcaagcaacatcagcaaaactt

SEQ ID NO: 37219 - DNA, 441 bp, Gossypium hirsutum
  Clone ID: LIB3165-013-P1-K1-B1
ctggctcggctccacgcgtccgttgttttttgtttccatggcggtaggcttatccgccgccgtaactcctaaacccttccgctcatttccgctgctgaagcctgctccaattttccatcctttactgcacctcccaaaaataacaacctacggagctcgaagaaagaaaagctttgctgtttgtttcgtggtggatgaagaacagaagcagagcgctcctacccagatcgtggaacaaggattcgaggaagttagagatcgtcagatcttaataccggcgcgtctgtcggagaaattagctagaaagagatccgaaaggtttacttacctcgttgccgctgtcatgtctagctttggaattacatccatgtctgttatggccgtttattacaggttttggtggcaaatggagggggggaggggcctctttctgaaatgttc

SEQ ID NO: 37220 - DNA, 418 bp, Gossypium hirsutum
  Clone ID: LIB3165-013-P1-K1-B10
cccacgcgtccgagacgaggttacagtcctacagagcctccgttcctcttcttccccttgtttctattttttaaattattattattgtagcattcgtctttcttcgattaaatccctacattttttttcctgaaaaatcccaaaattttcataaccagagcattgaattgaactcactttccatctttctcgccccattatttttttaaattttatttactaatcaacattttcttttctgttttcaagtgtttttctccgtcgatgaacttttccccttagaaaattaaaagtaatcggggttttatatgggcgcaaatattaatatggctaatttcagtacctccgctgtgctgacagcagttaatcactctcccggttgccctgaccaatcacatcctgccacgaggcctatttc

SEQ ID NO: 37221 - DNA, 407 bp, Gossypium hirsutum
  Clone ID: LIB3165-013-P1-K1-B11
gtggagcggaggatgttgctttgattgagtatgcaaaattgactggtaggccatttagggtgttcagccttgatactggcaggctgaacccagaaacctaccgattctttgatgaggttgagaagcattatgggattcgtattgagtacatgtttcctgatgctgttgaagttcaggccttggttaggagcaaagggttgttttcattttacgaggatgggcaccaagaatgctgccgtgttaggaaagtgaggcctttgaggagagcactcaaggggttgcgtgcctggattactggtcaaaggaaagatcagtctccgggaacttaggtcggaggttcctgttgttcaagtggatcctgttttcgaaggtttggatggtgggtatggagcttgctgagtggaacc

SEQ ID NO: 37222 - DNA, 416 bp, Gossypium hirsutum
  Clone ID: LIB3165-013-P1-K1-B12
ctcaaattcagttaacaatttcacagttgttttcttcagtctctctctcagccatggctgcagccatctccaccgtcgctgccgctgccgccgccaaccgagctctgggagtgtcagtcccaacctcagctttcatggggaagaaagtgagctcaagattcaacagcaccaggcaggttccttcgggaagttttaaggtgatggcggcggagaaagagatagacgaagagacacagaccgaaaaggaccgatggaaagggttggcttacgatatttcggacgaccaacaggacattactcgagggaaagggatggtggattccttgttccaagctcccatgaatgatggaactcactatgctgtcatgagttcctatgaatacctcagccaaggtcttaaaacgtacaatttggac

SEQ ID NO: 37223 - DNA, 432 bp, Gossypium hirsutum
  Clone ID: LIB3165-013-P1-K1-B2
gcgtccgccaagcctgcctcttcactccatcaaccctccgcaccccaaaatccggcgaccgcatcgccgccgtgttacggaaacaaccaccattcctaacactccctagcttcaagtccccaaaaatcatcatcgccccacgcaccatcaaagccgaagcaaccgaagagaaagccgagacaaccgccacaaaggaagcaccagtcggtttcaccccaccagagctggacccaaacaccccatcaccgatcttcggcggcagcaccggcgggcttttacgcaaagcacaagtggaagagttttacgtcatcacatgggagtcacccaaggaacaaatcttcgagatgccaacaggtggtgcagccatcatgagacaaggtccgaacctgctgaaattggctcgtaaagagcagtgcttggctcttgggacta

SEQ ID NO: 37224 - DNA, 418 bp, Gossypium hirsutum
  Clone ID: LIB3165-013-P1-K1-B4
gcgatggcctctcttctcagtccctctgcagcaatttctcttcgactcaagttgaatcgttcaagtgccgtatctgcaaatacaccctccaaaatttgttgtacttttcctggaaatggaagatgtcaaaggttaagtttcaagaccaaagctgcgggttcagttgaaggaaatgtactggacaaagaatcggctagtatcagtgacaagatagattatggagttgttggtattcaccatgttggaattctatgtgaaaaccttgaaagatcgcttgaattttatcagaatattttaggtcttgaaataaatgaggctaggccacatgataagcttccatacagaggtgcttggttggtgggtgggttctgagatgatacatttgatggaacttccaaatccagaccccttaatcgga

SEQ ID NO: 37225 - DNA, 404 bp, Gossypium hirsutum
  Clone ID: LIB3165-013-P1-K1-B5
caccagtcgtcccaagggtgttcctttgactcagctcaatttggggacttcagttttgaacattaaatcggtttacgaactcactgagtcagactcgacggtcattgtgctcccgttatttcacgtgcatggcttgttagctggcttactgagttcactcgtttccggagctgccgtcactctcccggccgccggcagattttctgcatcgacattttggacggacatgattaaatacaaagccacatggtacactgctgtccccacgatacaccagatcatattggaccgccatgagagcaatcccgaacgtccacggtaccccaagctaaggttcattagaagctgcagtgcatcattggcaccgagtatattagaacggctagaggcggcatttgacgcac

SEQ ID NO: 37226 - DNA, 422 bp, Gossypium hirsutum
  unsure (1)..(422): unsure at all n locations; Clone ID: LIB3165-013-P1-K1-B6
cccacgcgtccgcccacgcgtccgaaggccgtaatctgaaagacaagacacagagaaaaagagagagagagagagagatgtcgggaggaatagcgcgtggtcgactcgccgaggaacgtaaggcatggaggaagaaccatccccatggttttgttgcgaaaccagagacgttgcctgatggaacggtcaatttgatggtgtggcattgcacgatccctggtaaagcaggaactgattgggagggtggctacttcccgctcacgctccatttcagtgaagattatcccagcaagcctccaaagtgtaaatttccccagggctttttccacccaaatgtttatccatctggtactgtttgcctttcaatcctaaatgaagatagtggttggagaccagncataacctgtgaagcagattcttat

SEQ ID NO: 37227 - DNA, 372 bp, Gossypium hirsutum
  Clone ID: LIB3165-013-P1-K1-B7
accagcaccaacaccagcaaccaccactgcgctcaccagaaggtggtgaagctcctaagcctaagccaccaccgattggaccaaaaagaggaaccaaggtgaggatccttagaagggagtcctactggtacaatggctatggatccgttgttacagttgaccaggaccccaagactcggtacccggtggtggttcgattcaacaaagtcaactatgccaatgtatctaccaacaactatgcactggatgagattgaagaagttaaatgagattagtccatcaagtctttgtaattttatgttgtattttgtatcgtattacaacctcacaattcatatactaatgtaatgtatatctgcctttcaaatctaa

SEQ ID NO: 37228 - DNA, 422 bp, Gossypium hirsutum
  Clone ID: LIB3165-013-P1-K1-B8
aaaaggaataccttggttactggtggtgtgaggggaactcttccatggatggccccagagctgttgaatggcagtagtagcaaggtttctgaaaaggtcgatgtgttctcatttggtattgttctatgggagattcttactggcgaggaaccgtatgccaatatgcattatggagcaataataggaggcatcgttagcaacacgctcaggccacccgtaccaagctactgtgacccagaatggaagctactaatggagcagtgttgggctccggatcccgtggttcgaccttcattcacagagattgctagacgcttacgaatcatgtcatcagcatgccagacaaaaccacagggtcatcagatgcagaaccaagcatccaagtaaaatgtttctcaaataatccccttattttgatgcta

SEQ ID NO: 37229 - DNA, 91 bp, Gossypium hirsutum
  Clone ID: LIB3165-013-P1-K1-B9
gtgttttaaaccctaactatttatattctcatatggaaattttgattaagaaatactggtggctaatgcccccagcccctgtcggattttt

SEQ ID NO: 37230 - DNA, 430 bp, Gossypium hirsutum
  Clone ID: LIB3165-013-P1-K1-C1
gcgtccgcccacgcttccgaaaaagccaaggtcaaacgaaggcaaaaataaggttttccatggaaggggaagctggttcatacgaggacgttaagccaaacgtcgtcgctaaacaaagtaatggcgatgttgtcggggataatggtgttggaaatctgggatccgttgaagcccctgattttctttccaagaaaaatttccagaactgttccgtggcaactcctgcatctggactgaattccactggccctgctccatctcaactaaccatcttctatgatggacacgtttgtgtgtttgatgcaattcctgtggaaaaagtgcgggagattatgcttattgctgcaactggtgctgctaactctgttgacatgaagaaagttgcaactgattgtgccaccacctcacctgttcttacgaggtctccttc

SEQ ID NO: 37231 - DNA, 418 bp, Gossypium hirsutum
  Clone ID: LIB3165-013-P1-K1-C10
gtctccaccagctgctgccgctcaatgattatcactctgctccctccccaatatccatgcctctcctctctgtatttccattaatttgttttttttttttttttttttgcttttcttttcacatcaaacacctacaataacactgcaaccaatcttttcagcttaaccccccccaacaaaaaaaaagaaaaaggaaaaagaaaaaaactaagtgagaacattttcagtgagcctagtcgaaattgtatacggttttggggttttgtttggtgccgcatgtcaaattcagaggctgctgctaaaaacggagcaacaatggatacccagagacaacaagcgccggggaacggtgcccttgccgtcaagaaacctccctccaaagaccgtcacagcaaagtagacggtcgtggacggagga

SEQ ID NO: 37232 - DNA, 419 bp, Gossypium hirsutum
  Clone ID: LIB3165-013-P1-K1-C11
cccacgcgtccgatagcatacactactagtacccactactagcaatggcttcctcaatgatctcatcggctaccattgccactgcctctccggcacaggctaacatggtcgctcctttcaccggcctcaagtctgcctctgctttcccagtcaccaggaaggccaacaacgacattacttctctcgcaagcaatggcggcagagtgcaatgcatgcaggtgtggcctcctactggaaagaagaagttcgagactctctcatacctccccgatcttacacccgtgcagttggctaaggaagtggattaccttcttcgctcaaaatgggttccttgcttggaattcgaattagaggagggattcgtgcaccgtaaatactcgagcctacccacgtactacgatggacgctactggaccatg

SEQ ID NO: 37233 - DNA, 424 bp, Gossypium hirsutum
  Clone ID: LIB3165-013-P1-K1-C2
aagcactgaaaaagcaaaaccatggcctctgtttttctcctcaagacttcaccagttttagacaagtctgagtgggttaagggtcacacccttcgccaaccttccacttctgtggtgaggtgccaccctgttgcaccctccggactaactgtgcgtgcaagctcatatgccgatgagcttgtcaagactgctaaagctattgcttctcctggccgtggaattttggccatggatgagtccaacgctacctgtgggaaacgtttggcctcaatcgggctagaaaacacggaggctaaccgccaagcctacaggacgttgcttgtttcagctcctggccttggtcagtacatctcaggtgccatcctctttgaggaaaccctctatcaaaccacaattgatggcaagaagatgggttgtgttcttg

SEQ ID NO: 37234 - DNA, 426 bp, Gossypium hirsutum
  Clone ID: LIB3165-013-P1-K1-C3
gggcaactgcaggttgaaacatatgcttgtgctgttagtaacgtgtatacatttgggccaacgttttcgggctgaacactctcacacttcaaggcatttggcagaattttggatggtagagcctgaaatagcatttgcagatctacaggatgacatgaactgtgccgaggcttatgtgaagtatatgtgcaattggttgcttgataaatgccttgacgatatgcaattcatggctaaaagttatgataaaggttgcattgatcggttgagaatggttgcttcaattccctttgtacggatatcatacacagaagcggtggagcttttagaggaagctgtgaaaggtggtaagaaatttgagaatgaagtgaagtgggggattgatttggcttctgagcatgaaagatacttgactgaagttaaatt

SEQ ID NO: 37235 - DNA, 417 bp, Gossypium hirsutum
  Clone ID: LIB3165-013-P1-K1-C4
ggactgttttcgatgatgccactcctgagatggtgagggatttcttttgggacgatgaattccgatcaaaattgaagtgggatgaaatgcttcttagtgccgaaactctcgagtcgtctcccactgatggcaccatgatggtccagtgggttcgaaagtttcccttcttctgcagtgacagagaatacttgataggtcgtcggatttggtcgtgtggtcggacatattactgtgttacaaagggagtaccatatccctctattcctagaaaaaccaaacctaggcgcgttgatttatactattcaagttggtgcattcgtgcagctgaatcaaggaaaggggatggccagctgactgcatgcgaggtattactttttcaccatgaaaatatgggtataccatgggaaattgcaaagc

SEQ ID NO: 37236 - DNA, 418 bp, Gossypium hirsutum
  Clone ID: LIB3165-013-P1-K1-C6
gttttccttcccatcataccaactttctcctttgtatcattatctccttccatctcctgcccttttctccaaccagcttcttcctgaaaaccatgttaattggactcaaaccccagaggctcacgtttactctgctgatcttcctggtaactctctgccatggaaaattttctcttcattatcttcttttcctttaccttgttaatttatgtaccagaaattagttccatgccatggtttttcttttttttctttttgtcctatacattaggggtgaggaaggaggaaataaaagtggaagttgaggactcaagatatcttataattaggaccgaggccatcgatgactcaacaaaaccagccatggacttcaagaggaaattccggctgcctggttccatagatattgatggaatat

SEQ ID NO: 37237 - DNA, 420 bp, Gossypium hirsutum
  Clone ID: LIB3165-013-P1-K1-C7
aagaatcctgctctgtatggtgagcttgccaagggtcaaagccctaagtatatgattgttgcctgctcggactctagggtctgcccatctcatgtgctggacatgcaacctggtgaagcttttgtggtccgtaatgttgctaacatggtgccaccatatgaccagattaaatatgctggcattggatctgctattgaatatgcagttttgcatctcaaggtacaagaaattgtggtgattggacacagtgcctgtggtggaatcaaggggcttatgtctttcccatttgatggaaacaactcaactgatttcatagaggattgggttaagattggaatccctgctaagaccaaggtgctagctgaacatggtggtgagcctttgggagtccaatgtacacactgcgagaaggaagcagtg

SEQ ID NO: 37238 - DNA, 416 bp, Gossypium hirsutum
  Clone ID: LIB3165-013-P1-K1-C8
cccacgcgtccgcccacgcgtccggtaaatttcttttgcaatcctttgtagagctccgggatccattgtcaccatgtcttgctcaaatctgacaatgtgggtgtcctcaaaaccctctctttctgacacttcttcactctctttccgttctttcatcagcccttttcagctcccatctcagagctcaacccccggtaacccttccaggtcctcatctgtaaccccagttcactgtggtcttcgtgagcttagagaccgtattgattcagtaaagaacacgcagaagatcactgaagccatgaaacttgtggctgctgctaaagttaggagagcacaagaagctgttgtcaatggcagacctttctctgagtccctggtgaagttctttacaacatcaatgaacagcttcagactga

SEQ ID NO: 37239 - DNA, 414 bp, Gossypium hirsutum
  Clone ID: LIB3165-013-P1-K1-D10
cccacgcgtccgggccaatccattgactttttcggtgctctgagggccagagtttacgatgacgaagtgaggaaatggatcggagaggtcggagtcaatggtgtcgggaaaaagctcgtgaactcgagggaagggccaccatctttcgagcaaccgaagatgaccattgagaagctgttggaatatggatacatgcttgttgctgagcaagagaatgtgaagagggttcaattggctgacaaatatttgagtgaagctgcccttggaaatgctaatgacgatgctatcaagagaggagctttctaaatgggaaattaagctctaagggaagaaaaaaatctatattgggcacaaacaaaggaaatcccccctttgtgtcttaattgaatgttgttttccttttgtgttttaagt

SEQ ID NO: 37240 - DNA, 410 bp, Gossypium hirsutum
  Clone ID: LIB3165-013-P1-K1-D11
gctaaccaaagcacatacaaagctaccatggctaattttcaaatgaaaagagctcaacaatgcacaaacggcaagctttggaactcttccagcgaagctctaaccttgactgacaagaaagtttggcaaggctctcattatgcggatttcccagaaataattgaagatggagattcgagtgagtttacacatgaatcagtgactgatgatgctgatagtcatggttcagttgctggtcttgtgtacaggcgacgtgatggaaccaagtgggttgttgcctggagcaacccactagatgagaacagcaaggtctatactgatatccagagacaacctgttcactgggggcaaatcaaaaccaaccttgagaaaagaggaaaaccaaaatttaaagttacaaagtttgggta

SEQ ID NO: 37241 - DNA, 316 bp, Gossypium hirsutum
  Clone ID: LIB3165-013-P1-K1-D12
gtggagcggaggatgttgctttgattgagtatgcaaaattgactggtcggccatttagggtgttcagccttgatactggcacgctgaacccagaaacctaccgattctttgatgaggttgagaagcattatgggattcttattgagtacatgtttcctgatgctgaacaagctcaggcctaggttacgagcaaagggttgttttcattttacgaggatgcgcaccaagaatgctggcgtgtttggaaagtgtggcctctgaggagagcactcaaggcgctgcgtgcctggattactggttaaaggtaatatcagtc

SEQ ID NO: 37242 - DNA, 408 bp, Gossypium hirsutum
  Clone ID: LIB3165-013-P1-K1-D3
attcatagcccaaaaatcaaatggcctgggctcttttcagcagctaccgagttaccattggcagtttggtggccagtaacgcatgggcagtgaccagatctcgccatcggaggctccacacgaagaaatctgatttggccgtacagaggaggcgtgcgaaggaggctgcgcgaggagccactcgtgggagtcccaatttctggcctattctggcacgttccagaagctcccagtgctgctgagataattttggatgtattgggcctcgggttttagggcttattgggtcctgggttattaaaaatgggttaaaattattggattttatgtaattgggttaagggttttttgggggggttttgtttaattggattaaaaatgtatttgggctgctttaatttagtttaa

SEQ ID NO: 37243 - DNA, 390 bp, Gossypium hirsutum
  Clone ID: LIB3165-013-P1-K1-D4
cccacgcgtccgcccacgcgtccgggaattctcctccgttgctttataagatgagattgatcaagggaatagctaattttaggcgtctttacgctaattctatagacttgaacacaaaatcctacctctctacgacaaagcgcgcattttgcaggccaagtgaatacgcaaaggtcgttaacaccaccatcacttgttctccattttattgcagcaataacttaggatcgagatcccattcaagcagacccgaaatggaggggatagagcatagggtaatcaaagccaatggcataaatattcacgtcgctgagaaagggaaaggccctgtaatccttttccttccatggattcccagagctctggtatacatggcgcaatcagatcact

SEQ ID NO: 37244 - DNA, 313 bp, Gossypium hirsutum
  Clone ID: LIB3165-013-P1-K1-D5
atccggcgccacgctcatttgatctactctttgactatgaagcctccctttctcacccaaagggatctttaagggtttattagtggaagtgtgcaggcacatcctacttaagccccgattctttgttaaagtgtctcagacccatgaagaagctagccctatttttatttactgcctgcccatttgttaccaccacggtttcagcaacgccaggatttaatttgttattatacacaaatgagagaggacttagtacttttattactttgggagatgcagtaacacatgggccactttaccatgacgacgcttt

SEQ ID NO: 37245 - DNA, 423 bp, Gossypium hirsutum
  Clone ID: LIB3165-013-P1-K1-D8
gcttctgcttctcatttaaacattcaaggcaaaagaaaaagagacaaaacattgaaggaaatgacatgtttctgttgcttccttacaaccttgtaaagttataagcatcgtgtcagaatttctctctgccaattgccaaggttctcattatctatggtttgatggagatagagataagatagatcatggtaaaattagttgagtgcgttacatggtggattttgttaaggaggagattgcacctactagtcttaacatgtcatctaaaaaggagcttctttccacagccatgaagagaaccagcgagtggattttctctcaggagattcccagtgatgtcactgtccaagttggaggagtttctttctcactgcataagtttccattaatatctaagtctggatacgtaaggaaagttgtatc

SEQ ID NO: 37246 - DNA, 419 bp, Gossypium hirsutum
  Clone ID: LIB3165-013-P1-K1-D9
gtctttgccaagatgggaatcaaccccattatgatgagtgccggagaattggaaagtgggaacgccggagaaccagccaagttgatcaggcaaaggtaccgtgaggccgccgacattatcaagaaagggaaaatgtgttgcctctttatcaacgatctcgacgctggagccggtcgtatgggaggaaccacacaatacacagtgaacaaccaaatggtgaacgccacactcatgaacatcgctgataaccccaccaacgttcagctccccggtatgtacaacaaggaagagaaccctcgtgttccgatcattgtcaccggtaacgatttctcgacgctgtacgcgccgctcatccgtgacggtcgtatggagaagttttactgggcacccaccagggaagaatggatcggtgtttgcac

SEQ ID NO: 37247 - DNA, 396 bp, Gossypium hirsutum
  Clone ID: LIB3165-013-P1-K1-E1
acaaaatccgtaaatggctaccactgcttctccaatggcgactcagctgaagagcagctttacgtcgtctgttacaagaggactggtagtccccaggggcatttcgggatccccgttcaaagtatcttccggaaagaccaggaccccttgcttcactgtcaaagctgttcaatccgacaagtcaacatttcaagtaatccaacccatcaacggcgaccccttcattggaagcctggagactccaatcacctcaagccccttaattgcatggtacctttccaacctcccagcctataggacggcagtgaacccacttctgaggggaatcgaagtgggtctggctcacggcttcctcctggtgggtccattcgttaaggccggccctctaaagaacac

SEQ ID NO: 37248 - DNA, 411 bp, Gossypium hirsutum
  Clone ID: LIB3165-013-P1-K1-E10
ctcacttcaagctgcagctaccctgatgcaaccaatcaaggttgctgcaccatcaagggccaatgtgccgctcaggtcctcccagagcgtttctaaggccttcggtttggagcctgttggtgctaggcttacctgctctttgcaaactgacctcaaggacttggctctgaagtgtgttgatgctaccaagctcgctggtttcgctcttgctacatctgctcttgttgtctcgggagcaagcgctgaaggagtttcaaagcggctaacctacgctgaaatccaaagcaagacatacatggaagtcaaaggaacaggaactgctaaccagtgcccaaccatcgatggtggtgtcgactcttttgccttcaagcctggcaaatactacgccaagaagttctgcttggagcccac

SEQ ID NO: 37249 - DNA, 414 bp, Gossypium hirsutum
  Clone ID: LIB3165-013-P1-K1-E11
ctacattgccccagctttcatggacaagcttgttgttcacatcaccaagaacttcatgacccttcctaacattaaggttcctcttatcttgggtgtttggggaggcaaaggtcaaggaaaatctttccaatgtgagcttgtctttgccaagatgggaatcaaccccattatgatgagtgccggagaattggaaagtgggaacgccggagaaccagccaagttgatcaggcaaaggtaccgtgaggccgccgacattatcaagaaagggaaaatgtgttgcctcttcatcaacgatctcgacgctggagccggtcgtatgggaggaaccacacaatacacagtgaacaaccaaatggtgaacgccacactcatgaacatcgctgataaccccaccaacgttcagctccccggtat

SEQ ID NO: 37250 - DNA, 417 bp, Gossypium hirsutum
  Clone ID: LIB3165-013-P1-K1-E12
ctttccctcactttctaggttctactctttcagtgagggtttccaaattagcctatctttgatacgcaggtgtctggattggttaaagaatggccatgacgccacaaatggcttaataaataaatcccacacccagttggccaaagctttacaccgaagaagcaaagcagcatcggcatggcagtttattgcaattccgctcccttttcttgcaaagcctcgagaaacagagaccccacacccttatccgcactcttacccacccgtctcttctcacttcttcaacccccaatcagcttccatccagatagattaaagctctcaacttgcaggtgggataaggtggcttctgctgttgtttctgaagaaagtgcagttgggtcaagctcttctgggactgatgtattcaacctcact

SEQ ID NO: 37251 - DNA, 417 bp, Gossypium hirsutum
  Clone ID: LIB3165-013-P1-K1-E2
cccacgcgtccgcccacgcgtccgccccccactttcccccacatatccttcatttcccagatctgtgccactttttacttcttttttttattcattttatgctattttccaatgtcccaactccccatacccattgcttgacttcatgatcggtttttgtgttttcatagtggaatttgcattgcaaagattttggtttttttagctttcattgtaattagcttgtttttgcttctacatcaaacaaagatcccatcttttaaatacccaagagaggaaaagaaaaatatggcttcggtgaatctgtgttcttgggttcaatcttactccattttcaaccaagcttctagatccaaatattctcttttgcccagatcccttccattcaaccccctcatgaatctgtcatcttcaacc

SEQ ID NO: 37252 - DNA, 409 bp, Gossypium hirsutum
  unsure (1)..(409): unsure at all n locations; Clone ID: LIB3165-013-P1-K1-E3
ttcctcacttttctttggattancccttttctattatatcacagaagatttntgcagtctttctttcagacgcaagcagcaggcacctgtcctagaaacagagatcttctcaagttagttaaataacggtttttgctatccccattttgccctttcatcttcttcttctccttcatcggaagatgattagttggaacgatctttacaccgttttaacggcggtgatcccactgtacgttgctatgatcttggcttacggctccgtccgttggtggaaaatattcacccccgaccagtgctcgggtatcaaccgctttgtcgccatatttgccgttcctctcttgtctttccacttcatttccaccaatgacccttacgnccatgaacttaggttcatagcagccgacac

SEQ ID NO: 37253 - DNA, 416 bp, Gossypium hirsutum
  Clone ID: LIB3165-013-P1-K1-E4
cccacgcgtccgattcggatccgggtcacccgatttcaaaaatatccggtgagatttttgatgcagtgacggcgtgctggttttggatatggagacagagaatgcagtgaattacaagtttatggggaggagctttaatgatttgagtatcaacgatgattcttctgcttttagtgattgtaacagcgacagatccggtgagttctccacggcgtcatcgcaaagccggaggttatttctcgcttgtactaattctgataactccgatgaatttatacggcaactcgtatcggatctcggctcctgttcgattgatgagcaaaagaacgcggctttagagcttagattgttggcgaagaacaaaccggagaatcgaatcaagatcgctaaagccggtgcgatcaaaccgttgattt

SEQ ID NO: 37254 - DNA, 413 bp, Gossypium hirsutum
  Clone ID: LIB3165-013-P1-K1-E5
gtccaatcactcccaatactttcataacatttcacgaacttcactctccagtctccaatggcggctgccgtctccaccatcggtgctgtcaaccgagcaccgttgagtttgaatggatcaggtgccggagcttctgctccaagctcagctttcatggggaacagcttgaagaaagtgagcgctaggttcaacaacaacggcaaggctccagtgggaagtttcatgattgtggctgccaaagaaatcgacgaagacacacagaccgaccaggaccgatggaagggtcttgcttatgatatctccgatgaccaacaagacattaccagagggaaaggtatggtcgactcattgttccaagctcccatgaacgatggtactcactatgctgtcatgagctcctatgagtacattag

SEQ ID NO: 37255 - DNA, 421 bp, Gossypium hirsutum
  unsure (1)..(421): unsure at all n locations; Clone ID: LIB3165-013-P1-K1-E6
ccttcatttgttttcctctaaaaggaacaacagagaagaaaacttcatcaaacaaggaaaaaacttaacaagtaaaacaattgagagaagatgtcctggcaagcgtatgtagatgatcacttgatgtgtgatattgagggcaaccatctctctgccgccgctatcattggccaagacggcagcgtttgggcccagagctccaatttccctcagttcaagccagaagaaatcactggcatcatgaatgacttttctgaacctggatcgcttgctccgactggattgtaccttggtggcacaaaatacatggtgatccaaggtngaacccggagctgttattcgagggaaaaagggcccccggaggtgttactgttaaaaagaccaacctgtccttgatcaatgggatctatgacgagccaat

SEQ ID NO: 37256 - DNA, 413 bp, Gossypium hirsutum
  Clone ID: LIB3165-013-P1-K1-E7
tgaagctgagtaagtctcttctttctcctgtcgtttcaagattgaacgctggaaaaagctggcttttcttcaagctgattgaacgcaggcatccagccgcttaactccttcatatagtgagaatcagatcaccatgaacgcttcagcagcttccctatctgcgtgtattgctatcaccagcactaatgaagagctctttatcggtctcaacaaattgactagtggttctcctctaccgtgcaatgttatcgaagtaaatccttacagcttcaagcccgaatacttaccagatggtatgtggtttttgactagctcaaatgataacactgatatggaacatggcctctggaaggtcaaagaggaggcccgtgaagtcttctcaaactctgatattatcggttggagaaccactc

SEQ ID NO: 37257 - DNA, 422 bp, Gossypium hirsutum
  Clone ID: LIB3165-013-P1-K1-E8
tgagcctttcttttgagcttcaacttctttgatgggtgtgaatacataatgttaacagctaaactataaccaaagagtttgttttttgcttagcatggggagagatggaaaaagaaactaaccaagaaaacccatctctcctctcaaataataacatctccatcactaaagaaaactcctcccctaaaaaacaccctggaaacaccgctgcggctggtggcggagataggctgaaacgtgatgaatggagtgaaggagctgtttcaagcttgcttgaggcttacgaaaacaaatgggtgcttagaaatagagccaaactaaagggtcatgattgggaagatgtggctcgctatgtttcagctcgagctaattgtaccaagtcgccaaagactcaaactcagtgcaagaacaaagatgagtca

SEQ ID NO: 37258 - DNA, 440 bp, Gossypium hirsutum
  unsure (1)..(440): unsure at all n locations; Clone ID: LIB3165-013-P1-K1-E9
ccggcgggtcccacgcgtccggnttttcccttctctgctttaacgntttagtcccttgcccatagccttcttcatggatgtccctttcactcagtcctcagattctccgactccttcttgcaaagacaccttcttcatcacaatcttggccgattttgcattcaccctgttgttgttcatcgatctcttccccgatttccctggttacagtaatggctcgtctgcctttaattgcacaaagtgtgaggcgtaaaagaattggtgctgcattgacaatatggttggaaatctgtataattgcgattaggttcttatttagaatgggtgccaaccttagcctacatacttatagaccaatgattaggtcctacaccttagatttttatacaaaacgggattatgtgaaaaggcttgtatatgctagtgacgagacatgtatt

SEQ ID NO: 37259 - DNA, 359 bp, Gossypium hirsutum
  Clone ID: LIB3165-013-P1-K1-F1
cccacgcgtccgccaacattttcataacaatggctgccatcacaaacgccgctgctacatcctccttcatggggacactcttccccgacgtctacacaagttcagggagattcgtcgccaggtttggctttggcggcaaaaaagcagctcccaagaaagtctcgaaacgaaccccagaccgccctctatggtacccaggaacaggggcgcctgaatggctcgaaggaaggtttggtgggtgattacgggttcgacccgttcgggttagggaaaaccggcggagtacttgcaatatgatttggattctttggaccagaacctggctaagaattcggctggtgagataattggaactagga

SEQ ID NO: 37260 - DNA, 409 bp, Gossypium hirsutum
  unsure (1)..(409): unsure at all n locations; Clone ID: LIB3165-013-P1-K1-F10
ggaaggccaacaacgacattacttctctcgcaagcaatggcggcagagtgcaatgcatgcaggtgtggcctcctactggaaagaagaagttcgagactctctcatacctccccgatcttacacccgtgcagttggctaaggaagtggattaccttcttcgctcaaaatgggttccttgcttggaattcgaattagaggagggattcgtgcaccgtaaatactcgagcctacccacgtactacgatggacgctactggaccatgtggaagctgcctatgttcgggtgcaccgactcggctcaggtattgaaggagcttgaggaatgcaagaaggaataccccaatgcattcattagaatcattggcttcgacaacgtgcgtnaagtgcagtgcattagtttcattgccta

SEQ ID NO: 37261 - DNA, 414 bp, Gossypium hirsutum
  Clone ID: LIB3165-013-P1-K1-F11
cccacgcgtccgcaactttcttcttaagctcactgtagttactctctacctcccacagccgcatcatggccgattccgccaccgcgtcttcccccctaaaagtcatcgccggagctgattcttttggcgccgagctaaaagacgccatggtatcccacctccgctccctcaacatagaagtcgaagatctcggaatcacctcctactacaacatcggtgctgaagtcggccgtcgagtatcttccgccaccacctcgccctccttggagacccgtggcctccttgcttgcggaacgggcgtcggagtcgggatcttcgccaacaaattccccggcgtgttcgccaccacatgtctcactccggacgaagctcgcaacaatcgctccatcaataactgcaacgtcttggcactct

SEQ ID NO: 37262 - DNA, 408 bp, Gossypium hirsutum
  Clone ID: LIB3165-013-P1-K1-F12
tagggtttgtggagtacttcgtttttggttttgttcgctctttaactagaaaaaaaaaataaaaataaaacatcaatcaattcccagccatggaaggagacttactagattgggaggtgctccacaactcggattctgactctaattctatcctggttaactcgccgcagttgaggaatcttgagggaatcgaaggtgatactggagggatgataaggtctgattacttttctcttgataatcagagtatgtatgcgaaggaaggggatgcaagtgaagaaggctctattgagtcagataatccgagttggattgatcccaagccggagactcagtttaggaggaataattcgggtgatttttggtccgattccggtagtgatcggtcagatgatcgtaaaataagtg

SEQ ID NO: 37263 - DNA, 174 bp, Gossypium hirsutum
  Clone ID: LIB3165-013-P1-K1-F2
ctaacagccatgaaaatgttggagaaacatcgatggtcatcatacatacacctttttagctaatcagcaaggagatggaaatatgtgtatggggatgctttcattgtaatgcctctgttgagtgttgtacaaatacctttatgaaattagacgcaatgaatatttattaaggtt

SEQ ID NO: 37264 - DNA, 458 bp, Gossypium hirsutum
  unsure (1)..(458): unsure at all n locations; Clone ID: LIB3165-013-P1-K1-F3
cccacgccgtccgcccacgcgtnccgtttagctatnagcatacacctactatgttacctcactacnntagcaatggcttggctggagtgnnatctcatcggctacccattgccaccctgcctctccggcacaggnctannacatggtcgctctctttcaccggcctcaagtcntgcctctgctttcccagtcaccaggnaaggccaacaacgacattacttctctcgcaagcaatggcggcagagtgcaatgcatgcaggtgtggcctcctactggaaagaagaagttcgagactctctcatacctccccgatcttacacccgtgcagttggctaaggaagtggattaccttcttcgctcaaaatgggttccttgcttggaattcgaattagaggagggattcgtgcaccgtaaatactcgagcctacccacgtactacgatggacgctactggacca

SEQ ID NO: 37265 - DNA, 411 bp, Gossypium hirsutum
  Clone ID: LIB3165-013-P1-K1-F4
cccacgcgtccggtagagcttctttctagctatatccttatcagctttcaaagatggcaggaatcgcctttggtcgctttgatgattccttcagtttggggactgtcaaggcctaccttgctgagtttatctcaactttggtgtttgttttcgccggcgttggctctgccattgcttacaacaagttgacaactgatgcagccctagatcccgatgggctagtcgccattgctgtttgccatggatttgctctctttgttgcagtggctatcggtgccaacatctcaggtggccatgtcaaccctgcagtcacttttgggttagctcttggtggccaaatcaccatactaactggcatcttttactggattgcccaactttctggatccattgttgcttgcttcttgctca

SEQ ID NO: 37266 - DNA, 402 bp, Gossypium hirsutum
  Clone ID: LIB3165-013-P1-K1-F5
cccacgcgtccgctttaaccttgtacactactattacacttccggaaaaaaatcatggccaccgtcacgacgcaagcctctgccgctgttttccggccatgtgcatcgaaaacacggttccttactggttcttccggtaagttaaaccgagacgtttcatttaaaccagtggcttctacatcgactagctcattcaaagttgaagcaaagaaaggggagtggttacctggtcttccttcaccagcttacctcaatggcagtcttccaggtgataatggctttgatcctcttggattggctgaggaccctgagaacttaagatggtatgtacaagctgagcttgtgaatggacgttgggcttatgttgggtgttgcagggatgcttctggccgaagttttcac

SEQ ID NO: 37267 - DNA, 408 bp, Gossypium hirsutum
  Clone ID: LIB3165-013-P1-K1-F6
ctcaactcaaactcatcgaaccagcgcagcgagagattgaagatcagatattgaagcccctataatgggtgacgtcaagacagcggagagcagtaacaaagctaggctagccattatggagctggccaacatgataagcgtccccatgtctctcaacgctatcgtccgcctcaacgtacccgatgctatctggcaaggaggcgccaacacccctctctccgccgtccagattctctcacgggtactcccttacggcggcggagaccctgaaaacctccagcgtatcctccgtatgctcaccagctacggcgttttcgatgaacaccttaattgcagcggtgatgactcccactccccggagagaaaatactccctaactgacatcggaaaaacactcgtaacagacgc

SEQ ID NO: 37268 - DNA, 179 bp, Gossypium hirsutum
  unsure (1)..(179): unsure at all n locations; Clone ID: LIB3165-013-P1-K1-F8
ggggnaacanccataaaaaagttacaaaaacatctttggtgatcatacaaacacctatgtcggtagtcagctttgagatggaaatatgtctatcctgatgctttcatcgtaatgcctctgacgagtgttgaacaaataccttttatgaaatttagacgcattgaatattcatttaggtt

SEQ ID NO: 37269 - DNA, 419 bp, Gossypium hirsutum
  Clone ID: LIB3165-013-P1-K1-F9
cccacgcgtccgcccacgcgtccgcccacgcgtccgctccaacccaaacccttcctccgccggcatttgtttgcaaaaaaaaaaaaaaaagaagttcaaattgaagaatgcctgtattttcttcaagagctatgttcaggaactacgacaagcatagaaagcaaaaaagtgaccctaaaggcaaattgtccgacgtgttcaggagctatgctgattctaatggggagctaaacaaggaaaagctgaaagacgcttttctacatctggatgctgccatgccgtaccggcaagccgaagaagccctccgtgtcgtcggcaaaagctattacattaacatcaaggatgaaaccgaccttaacacccttgtcgactatgcttacaataagggttacgggtattcaatttgattagctaattta

SEQ ID NO: 37270 - DNA, 390 bp, Gossypium hirsutum
  Clone ID: LIB3165-013-P1-K1-G1
aaaatgctaaccctcttagagatgttgtctttttgggcactcccaaatatgcaatgggaaatgaactatggtatggaccagacagagtgaagtacttgggaccattttcagctcagactccatcttacttgactggagaattccctggtgactatggttgggacactgctggtttgtcagccgatcctgaggcatttgccaggaatagggctcttgaggtcatccatggaagatgggcaatgctgggagcactaggctgcatcacaccagaagtacttgagaaatggcttagggttgatttcaaggaaccatactgcggacgcgtgggcggacgcgtgggcggacgcgtgggcggacgcgtgggctccaaccttccatacaattctcacc

SEQ ID NO: 37271 - DNA, 428 bp, Gossypium hirsutum
  Clone ID: LIB3165-013-P1-K1-G10
cgaagtctgtttttcgttttctctctctatagctcaaagtcttggtttgctggaagagaagccaaaaccgcgaaagcctataccttccaaatctcttcaatctttcgtaagactattgcacagaaggttttttcttcttttttttcctttttatttgttacgttgttcgttcccttttaattccttttttttaccttcaactttcttccctttatctaattttggaaaattggagttctttggttcgcgccccttttaactttaatttcccttcaattccttaatttttttgggaagaattggttcgaattctgtgtctttgtggcttttgcaaaaattagggccttttgagggtgtaggtaccctctagggttcaacttttaaagggtcgatttttgaaggaaaattttgcttattttggggctttt

SEQ ID NO: 37272 - DNA, 407 bp, Gossypium hirsutum
  Clone ID: LIB3165-013-P1-K1-G11
ccatggcaacaaaagctgctttagctccttcaagaatccctgccaacaccaggcttccatctaagaccactcactctttccccactcaatgctcttccaagagactggaagtgactgaattctctggacttcgatccagctcatgcgtcacctttgccaagaatgttagagatacttcctttttcgacgtgctggctgcccaacttactcccaagagtgaaggtgtaccatcagcatctgttaggggagaaacagttgccaaactgaaggttgcaatcaatggatttggacgcattggcaggaacttcctcagatgctggcatggcaggaaggactcacccctcgaggttgttgttgtaaatgacagtggtggtgtcaagaatgcttcacacttgctgaaatatgac

SEQ ID NO: 37273 - DNA, 391 bp, Gossypium hirsutum
  Clone ID: LIB3165-013-P1-K1-G12
cccacgcgtccgcaaaatctcaaacccagatttgttctctctctctctctctctctccaatcaattaattcctccattggaggagcttagggtttgttggtgttctgatctttgctctgtctgaaaaataaacagaattataaaccaacaccaacgccatgggaagatttgaagagggaggattcgattcagtggtttgccctaagcctatacgaacctttagatggtctaccaactgttatcagactgagatggctgattcaaaagctggtgcagagcttcttgatataatcctctccgagtttcagggagggtatggggccgagaaccccaccgaccaaatggcttcatcaccaccgtatttctgtggatcaccgccgagcagggcgtc

SEQ ID NO: 37274 - DNA, 419 bp, Gossypium hirsutum
  unsure (1)..(419): unsure at all n locations; Clone ID: LIB3165-013-P1-K1-G2
cggtcttacttcttgctanctctccttccactaagatctaggcttgccttcactcactttcttttgtaattatattgttaattattactgttgttaatagactccagttttagtaatttcggtttgatggaccggaagcgaacggagagccccagctacacgcgccggtggagtagtcactcgggcacggggagcactggcggcggtgttgagtcacctgcattgtcgccggcgcataaccagccccgccacgcgcgttcttcctccgccactggcatttccagcataaagcgcacccaaaacttcgccgcgaaagctgcggctcagcggctggctcaggtcatggcttcgcaaaccactgacgatgacgatgaagaagatgacggcgacgatctaggtttccggtacagtgctccacc

SEQ ID NO: 37275 - DNA, 419 bp, Gossypium hirsutum
  Clone ID: LIB3165-013-P1-K1-G3
cccacgcgtccgttctactccatcttcactcttctttctcacccaaaccctacaaaatggccgccgccgcgcgccctcttgtctccgtccaaaccatagagtccgacatggctactgatgccactccaaccgttcctctcgctgatgtgatgaaagcctcgattcgacccgacatcgtcaccttcgttcacgacaatatatccaaaaacagccgtcaaccctatgccgtctccaaacgcgctggtcaccaaacttcagctgaatcctggggtaccggtcgtgccgtctcacgtatccctcgtgttcctggtgggggtactcaccgtgcaggccaaggtgctttcggaaacatgtgtcgcggaggacgcatgtttgctcctaccaagatctggcgccggtggcaccggaaaatcaacgtt

SEQ ID NO: 37276 - DNA, 415 bp, Gossypium hirsutum
  Clone ID: LIB3165-013-P1-K1-G4
caaaattgatcattctttatatgtttttctctcaaatcccgaatctgtctttacaatcaaagtgtcccaagctatggaaaatgaaacccaatctttattacccaaaaacagatcatcaaatccaagctattcaactccagaagggctcgaattaaggagtttcagattaggtctcaactggttttgtttagatcaatccaatttatggaaagtgagtctttcttggtctttcttcttcgtgcttgctattggggttccgattatttcgcactatgttcttttatgttcaaactgcgatgaaaagcatcggcgaccgtacgatgcgggggtcagttatcactttcctcttttggcggggtttcttttattagtttatcttcttgggctcggaaatatgggaaccaggagttccttt

SEQ ID NO: 37277 - DNA, 412 bp, Gossypium hirsutum
  Clone ID: LIB3165-013-P1-K1-G6
cccacgcgtccggtttgctcctggtggtgatgcgtggcatcccaaaaacagaaaagtaaagatgtctgttacagtgaaggagctcgggctttcaaagcatcaattccgccggttacgagagcttgttggaaagagataccatccaggcgaaggtgaacttacaattactagtgagaggtttgaacaccgtgaagagaacagaaaagattgcctcagaacactcttttctctcatcgaggaagccggaaaagctaacaaaatggtggaggaggctcgtactaaatatgtcaagaacaggcttcgagccaatccagcattcatggagagattgcgtgcaaagacgatgaaattgcaagaatctactacattcccaataatgaactctttaaaggaaattaattggttttttttt

SEQ ID NO: 37278 - DNA, 421 bp, Gossypium hirsutum
  Clone ID: LIB3165-013-P1-K1-G7
tgcaggtgtggcctcctactgggaagaagatgtttgagactctctcatacctccccgatcttacacccgtgcagttggctaaggaagtagattaccttcttcgctcaaaatgggttccttgcttggaattcgaattggaggagggattcgtgcaccgtaagtactcgagcttacccacgtactacgatggacgctactggaccatgtggaagctgcccatgttcgggtgcaccgactcggctcaggtgttggaggagcttgaggaatgcaagaaggcataccccaatgcattcattagaatcattggcttcgacaacgtgcgtcaagtgcagtgcattagtttcattgcctacaagcctccaggcttctaagctttttattaactttgtctctccatttgtttgaatttgtactcagaaaa

SEQ ID NO: 37279 - DNA, 320 bp, Gossypium hirsutum
  unsure (1)..(320): unsure at all n locations; Clone ID: LIB3165-013-P1-K1-G8
tccacgcgtacgatgatgatgggtccattctatcaattatcacagatcatattggtgttgaccttggttcaatcaaaggaagaagagccaattctggcggctttagaatagaaaacaggtgttaaaatcattattatgattatatagtattatttcctttcgcgtgctttagttgatcaagatcgagatcaaaaaaagggatacattttaataacggatggattgatctcattttctggtctacgtatgagaattggcagagttattatgttgctacttttatgcggnncaatcatgatgcacaggtcatattggggcct

SEQ ID NO: 37280 - DNA, 414 bp, Gossypium hirsutum
  Clone ID: LIB3165-013-P1-K1-G9
aatttccatagcttattttcatcaaccctttgtcgtctccgtacaagaccttgcttagaagaaaaatgtcaaccttccctgactctttcactcaactcgccgacgactccttagactcttttgactctgttccacaccaggatgaagacggtgccggctacgccggatacgacccttctcagcaattcgactctttcgccgaccactcggatcatgccaagggctccactgatgatgtgtttgcatcagattcatacacaaatggggtaggttttggccaagattttggcggatcggacggcccggttttgcctccgccggcggagatagagcctgaggaaggtgttgctctcagggaatggagaaaggagaatgcgattcggttggaggagaaagacaagaaggagaaggagt

SEQ ID NO: 37281 - DNA, 404 bp, Gossypium hirsutum
  Clone ID: LIB3165-013-P1-K1-H1
gtgaatgttgagaagaagggtatcacagctgaagatgtgaatcctgcattcagaaaggcagccaaggggccattgaagggcgtattggatgtgtgtgatgttcctcttgtctcggtggactttaggtgctctgatgtttcctccaccattgactcttcattgaccatggtcatgggagatgacatggtcaaggtggtggcctggtatgacaatgaatggggttacagccaaagggttgttgatttggcacacttggtggcaagcaagtggccaggcatgcctgcaggaggaagcagtgaccccttggaggatttctgcaagacaaacccagctgatgaagaatgcaaagtttacgaggcttaaatgattgcaattttcatttttttttaaattgttttccatgc

SEQ ID NO: 37282 - DNA, 311 bp, Gossypium hirsutum
  Clone ID: LIB3165-013-P1-K1-H10
gggaaaggttacatgtgaacggcacttgcacatgggttagtcgatcctaagagacgggggaagcctgtccgacagtgcatccagcgtgagcttggaaagggaatcgggttaaaattcctgaaccgggacgcgtcggctgacatcaacgttagggagtcctgagacgtcagcaggggcctcgggaagagttatctttgctgtataacggcctgcccaccctgagaactgctcaaccagacgtagggtccagcggccggaagagcaccgcacgctcacgtggtgtccggcgcgcccccggccgtccttgaaaa

SEQ ID NO: 37283 - DNA, 396 bp, Gossypium hirsutum
  Clone ID: LIB3165-013-P1-K1-H12
cccgaatggccgggtcgacccgaccgacccgtccggctttaaagtgactactttggttgctattaggccaagtgaacaatctgcttcaaagaaagaggtctctgatgcttcttggttatcaactgcttttgaagagccttatggaactgcagctaagatgcttgttaaaagaaggacttactgtttggagatgaactcgttttgatctctgcttcttgatctttgaagggagagcagtcgagcacaatagtcgagggggaagaaggcatagcatacttttggaaagctgacgatcaaacaacaattttgttacgtgttgtagctttttaatgcaagagcagtgtcctgtgaaagctgaaaccttgcttatgaatgccattgaaagcaatcgacgca

SEQ ID NO: 37284 - DNA, 423 bp, Gossypium hirsutum
  Clone ID: LIB3165-013-P1-K1-H2
caaaaacaaaataaaataaagaacacacaccattgttcgccaacacactaatgagctggggcatagccaccacatttccttcacttctttcctcatcaaagtccaagttcagtggcgccgccgtatcgttgcctagtgctgttggtaccaatgttggccaccgtgttagcatgtcagctgattggatgcctggtcaacctagaccaccttaccttgatggctcagcaccaggtgactttgggtttgacccactaagacttggtgaggtccctgagaaccttgagaggtacaaagaatctgagttgattcactgcagatgggctatgcttgctgttccaggtatattggtaccagaggccttagggttgggaaactgggtaaaagctcaagaatgggcagcaattccaggtggccaagccactt

SEQ ID NO: 37285 - DNA, 457 bp, Gossypium hirsutum
  Clone ID: LIB3165-013-P1-K1-H3
taccgggtcggaaaggccggacccacgcgtccgctatagcatacactactagtacccactactagttttggcttcctcaatgatctcatcggctgccattgccactgcctctccggcacaggctaacatggtcgctcctttcaccggcctcaagtctgcctctgcttacccagccaccaggaaggccaacaacgacattacttctctcgcaagcaatggcggcagagtgcaatgcatgcacgtgtggcctcctactggaaagaagaagttcgagactctttcacccctccccgatcttacacccgtgcagttggctaaggaagtggattaccttcttcgctcaaaatgggttccttgctaggaattcgaattagaggagggattcgtgcaccgtaaatactcgagcctacccacgtactacgatggacgctactggaccatgtggaagctgcctatg

SEQ ID NO: 37286 - DNA, 444 bp, Gossypium hirsutum
  unsure (1)..(444): unsure at all n locations; Clone ID: LIB3165-013-P1-K1-H4
gaccggaccgactgcccggcccacgcgtccgcccacgcgtccggtttaatctgctgtgctcgttgtagctcaccacccaaactttaacaatggccgtcggtaagaacaagaggatttccaagggaaagaagggaggaaagaagaaagcagctgatccatttgcgaagaaggattggtatgatatcaaggctccatcagtttttacgagcagaaatgttgggaagactcttgttacccgtactcagggtaccaagattgcttcagaaggactcaaacacagagtgtttgaggtttcactggctgatcttcaaggaggtgatgaggatcatgctttcagaaagattcgtttgagagctgaagatgttcaaggaaaaaatgttttgaccaacttctgnngaatgaattttacgactgacaagctgaggtccttgggtcgtaaatggc

SEQ ID NO: 37287 - DNA, 414 bp, Gossypium hirsutum
  Clone ID: LIB3165-013-P1-K1-H5
gtgagactcttttgtataactgtagcatatagtactagtaagcagtaatagcaatggcctcctccatgatctcatcggcaaccattgccaccgtgaactgctcctccccggcacaggccaacatggtggcccccttcaccggcctcaagtctgcctctgctttcccagtcactaggaaggccaacaacgacatcacttctcttgcaagcaatggtgggagagtgcaatgcatgcaggtgtggcctcctcttgggaagaagaagttcgagacactctcatacctccccgatcttacacccgtacagttggctaaggaagtagattaccttcttcgctctaaatggattccttgcttggaattcgaattagaggagggattcgtgcacccgaagtactcgagcttacccacgtact

SEQ ID NO: 37288 - DNA, 423 bp, Gossypium hirsutum
  Clone ID: LIB3165-013-P1-K1-H6
cggaatggccgggccgacccacccgacccgccacgctttaaaaggcagcttctgtgtttagtgtagccaggattttaaaaaaaacctccattaatggctgcactaaggagcttccttaggaaaagatgtttaacatgcgacgagctgatgatgacaaggaggctgatctccaccgaacccatcattgattccccttcttttgcacaaagactcagagatcttcccaaggatctccctggtactaaaattaagagggaggtttcgcagctaattggaagaacaccccttgtctttcttaataaagtaaccgaaggctgcggcgcgtatatcgctgtgaaacaggagatgatgcaacccacttctagtattaaagacagaccagcatttgccatgatcaacgatgcagaaaaagaaaacttaatc

SEQ ID NO: 37289 - DNA, 398 bp, Gossypium hirsutum
  Clone ID: LIB3165-013-P1-K1-H7
caacaagacattaccagagggaaaggtatggtcgactcattgttccaagctcccatgaacgatggtactcactatgctgtcatgagctcctatgagtacattagccaaggccttcgcacatacgacttggacaacaacatggatggattctacattgccccagctttcatggacaagcttgttgttcacatcaccaagaactacatgacccttcctaacattaaggttcctcttatcttgggtatttggggaggcaaaggtcaaggaaaatctttccaatgtgagcttgtctttgccaagatgggaatcaaccccattatgatgagtgccggagaattggaaagtgggaacgccggagaaccagccaagttgaatcaggcaagggtcccgtgaggccg

SEQ ID NO: 37290 - DNA, 413 bp, Gossypium hirsutum
  Clone ID: LIB3165-014-P1-K1-A10
tttcgtcaagtatgggagctggtaggagaatcttgggaggtttcaatttagcaatcctgatggtgatgatgctattgagcaccaaccgacactgtgcggccgacgcggttaagaagaataagagcatgagcagccgctggtgcgatgattcttcaaataaggagtgcctgcagctttcggacgacatagaaacgatggagctgttgatggattcagaagcaagcaaaatggtatttgaagcaagtgcagctatcgacttcgccagcagtaaaaatccaactaccagagcccttgacccttctccagctgcctgcgaccgtaatactggcaagtcttgcgaacctgatagtaatccaggcacaaaggtacctccaaattgttcactatacaccagagctggttgccactgattt

SEQ ID NO: 37291 - DNA, 413 bp, Gossypium hirsutum
  Clone ID: LIB3165-014-P1-K1-A11
ctcttttgtatacctgtagcatatagtaatagtaagcagtaatagcaatggcctcctcggggatctcatcggcaaccattgccaccgtgaaccgctcctccccggcacaggccaacatggtggcccccttcaccggcctcaaatctgcctctgctttcccagtcaccaggaaggccaacaacgacatcacttctcttgcaagcaacggtgggagagtgcaatgcatgcaggtgtggccgcctcttgggaagaagaagttcgagactctctcatacctgcccgatcttactcccgtacagttggctaaggaagtagattaccttcttcgctctaaatggattccttgcttggaattcgaattagaggagggattcgtgcaccgtaagtactcgagcttacccacgtactacgat

SEQ ID NO: 37292 - DNA, 411 bp, Gossypium hirsutum
  Clone ID: LIB3165-014-P1-K1-A12
cccacgcgtccgctaaactgccactgaatttgtcctcctctctcatccaaccaatctggagatcctttcccatactttttttttgtcttttttatttcctttttcaatttggttctacttgactcaagttcttcctccacttgaaggccacaattcattctttttttttcctgtgcttgtacacaatggctatgactgtaaatgcagcagtatctcttccatcttccaagtcatctaccctgtcatttaaaaactcagtcactgtccctgaaagaatcaacttcaacaagagtgttttgtacccaaaaaatgtcagccttggtggaaatgtggtttccattagagctcaggtcactacagaagctcctgcaaaagcaccaaaaatttccaagaaagatgacgagggtattg

SEQ ID NO: 37293 - DNA, 406 bp, Gossypium hirsutum
  Clone ID: LIB3165-014-P1-K1-A2
tcaatcctttctcagattcggactccaatcatgtgaagtgctacatccagcggcaaagggttgtcatttcttgagatcccaactctgatcccttctgaaatctttccttttacagttctcaccaagatgttcaaaaaattttcatctgaagatgtgtcttcacaaaaccaagtcaaagcatctgtgcagcggaaaattcggcaaagcattgctgaggagtacccaggacttgagcctgtgttggatgatttgcttccgaagaaggcccctttaattgttgtgaaatgtcaaaaccatttgaatctggtattggttaatagtgttccactattcttcaatattcgtgatggaccatacatgcccactcttagacttcttcaccagtattccaacataatgaaaaagt

SEQ ID NO: 37294 - DNA, 451 bp, Gossypium hirsutum
  unsure (1)..(451): unsure at all n locations; Clone ID: LIB3165-014-P1-K1-A5
ccggnccggaaannccggggcggaccaagccgtcgcccaacccttccgaccgatctcccttgtttaattttttgtaaattttataacttgggaacgtggacacccatggctactgtttctcaattgaacaactttccatgcaagaccttcttaataatcccacaaaacagtaactttacctcaaagcttccggttctgcctctaaactctacaaaaccaactcagaattcgatcaagaaatctcaatttttgacccagaaatcagtccagccaaggcctgttttccagatccgtgcttcggacgccgacgatgaatggggcccagacaaggaggagccagttgtaatcgagagtcctggagtggccgtagcggaagagaagaagcctgacgatgcgggggaaatagagagcttgaagaaagctttggtggattcgttttatgggacggatc

SEQ ID NO: 37295 - DNA, 415 bp, Gossypium hirsutum
  Clone ID: LIB3165-014-P1-K1-A6
aaaaagaaaaatggcttctgcttccgctactctcctcaagtcttcacctattatcgacaagtccgagtggattaagggccaaaacctccgccacccttcggtttgttttgtacggtcacaccctacatcggccgcctttaccgtccgtgctagttcatatgccgatgagcttgttaagaccgcgaaaactgttgcatctccaggtcgtggtattttggccatggatgaatcaaatgctacatgtgggaagcggcttgcctcgattggtctcgagaataccgaggcaaaccggcaagcttaccgtacccttctcgtgtctgcccctggcctcggtaactacatctcgggagctatccttttcgaggagactctctaccaatctaccatcgatgggaaaaagatggtcgatgttctt

SEQ ID NO: 37296 - DNA, 358 bp, Gossypium hirsutum
  Clone ID: LIB3165-014-P1-K1-A7
cgcctcgcttccaagggtttgctagtcacactatctacacccaaaggcttcggcagggggatggttaaagccaacaacatcactgaccaccagcttatccctgtgggcgacggctttctccgatttgaatcgatccaggatggttgggacgacgactacccgagacgcgcacacctcgaccaatacatgcaccaactggagctcgcaggcaaaccagcgatttcagcgatgataaagagatacgccgagcaaaaccgacccggttcttgctttatgaacaaccctgtcattccttgggcatctgatgttgctgaagtctcggcatcccttctgcaatgctttgggtgcagacttgcgc

SEQ ID NO: 37297 - DNA, 209 bp, Gossypium hirsutum
  Clone ID: LIB3165-014-P1-K1-A9
cccacgcgtccgcggacgcgtgggcttttttttcttttcccacttcaccttctcggggggcaacctctccacaccgccattgcatcgtctgcactctcaactggatcccctagtcttttaagctttaagtgaaaccgacaaccaattgaaacattttctttgtcccctgttagcaaacattgggaagcaggattttcaacatggacaag

SEQ ID NO: 37298 - DNA, 374 bp, Gossypium hirsutum
  Clone ID: LIB3165-014-P1-K1-B1
gcttcttttgttagaaagacgttagtagcggaaaattttgaacgttactattaaggaaggataatgctatccttgcgcttcgctattcctaccgcgaatacattaactccgcccaagattaaaccaaaaccgggtttagtagtacaaaccgcttggaaccaaacggacctttttccttctcttcccaaacgaaatgattataagctacaagcagctaccacggacttatctgtggcgggagatataccggcggaggaggtggtggagcttccggcggagctgaacaaagagttgatgccgaagcacgtagcggtgataatggacgggaacgggcggtgggctcggcagcggggattggcgacatcagcgggaca

SEQ ID NO: 37299 - DNA, 412 bp, Gossypium hirsutum
  Clone ID: LIB3165-014-P1-K1-B10
cataaaatctgtgcctgcccttttctctgcacacctcgggatatcagtttcaactccactcatcccacgggttgagtaccgagtccatatatcgttaagttcaaggaaggaacttgggcatcatgggtcttaaggcattagactatgagacaatgaatgaaaacgtgaagaaagttcaatatgcagttagaggtgagttgtatcttcgagcttctgagcttcagaaggaagggaagaagattattttcacaaatgttggcaatcctcaagctcttggacagaagccactgactttccctcgtcaggtggttgctttgtgccaagctccatttctgctagatgatcctaatgtaggacttatatttcctgctgatgccattgcaagagcaaaacattatctttcgttgacttc

SEQ ID NO: 37300 - DNA, 416 bp, Gossypium hirsutum
  Clone ID: LIB3165-014-P1-K1-B11
cccacgcgtccgaaggtatcctcctcaagccaagtatggtcactcccggtgcggagtgcagggacagggctactcctcaacaagttgctgattacaccctcagcctcctccgccaaagaatccctccagctgtccctggaatcatgtttttgtctggtgggcagtctgaagttgaggctaccttgaacttgaatgcaatgaaccaagctccaaacccatggcatgtgtcattctcatatgcaagagcccttcaaaacacttgcctgaagaagtggggaggcaggcctgagaatgtgaaggatgctcaggaagcgctgctcatccgagcaaaggccaactctcttgctcaactcggaaagtacactggcgaaggagagtcagaggaggccaagcaaggaatgtttgtcaagggttat

SEQ ID NO: 37301 - DNA, 416 bp, Gossypium hirsutum
  Clone ID: LIB3165-014-P1-K1-B12
aaaaaaacccaaaattcaaatctacagaaaccatgtcgtgttttttacaggcgccagtggctcacacaatcctatcttcagcttcttcatgtcgaactgttcgaagaacaaaggctttgaagcttaggtgcggagctttgggtgccaaaaacgccgccaaaatccccatgcctccgataaaccctaaggacccttttctttcaaagcttgcctccgttgcctcttcttcccccgaagcgctacataatggctcggctaatcccgatacgccgccgtttttggacttgtttgagtcccccaagcttatggctactcctgctcaagtggaaagatcagtgtcatacaatgagcacaggccgagaagccctccaccggacttaccttcattgcttcttaatggtagaatagtttacatt

SEQ ID NO: 37302 - DNA, 403 bp, Gossypium hirsutum
  Clone ID: LIB3165-014-P1-K1-B3
gcccaggattgaagagataagattatagcgaaaaactaaacataataaagccccttcgactggcttcattgatttgccctctcaaagcccaagaaaaatggcttctgcttccgctactctcctcaagtcttcacctattatcgacaagtccgagtggattaagggccaaaacctccgccacccttcggtttgttttgtacggtcacaccctacatcggccgcctttgccgtccgtgctagttcatatgccgatgagcttgttaagaccgcgaaaactgttgcatctccaggtcgtggtattttggccatggatgaatcaaatgctacatgtgggaaacggcttgcctcgattggtctcgagaataccgaggcaaaccggcaagcttaccgtacccttctcgtg

SEQ ID NO: 37303 - DNA, 420 bp, Gossypium hirsutum
  Clone ID: LIB3165-014-P1-K1-B4
gccgaaccctcaatttttttctgcaaccagcggtacccaaagatgcaaatcttcgtcaaagccctaacggggaagaccataaccctagaggttgagtcttccgacaccatcgacaatgtcaaagccaagatccaagacaaggaaggcatccgacccgaccaacagcgccttatctttgccggcaagcagctcgaggacggccgcaccttagccgactacaacatccagaaggaatccaccctccatctcgtgctccgtcttaggggaggtgctaagaagagaaagaagaagacctacaccaagcccaagaagatcaagcacaagaagaagaaggtcaagctcgctgtgctacagttctacaaggtgctaagaagagaaagaagaagacctacaccaagcccaagaagatcaagcacaaga

SEQ ID NO: 37304 - DNA, 417 bp, Gossypium hirsutum
  Clone ID: LIB3165-014-P1-K1-B5
cccacgcgtccgcccacgcgtccgcccacgcgttcgtttagaaccttttcttgcacgagaaaatggattcttcactcactgatcagcagcaagacaagtaccgttcttacttgcatggagaaggtgaaaagaataccaactggaagcttggtgctcctccaaactatgacactgttaacaagctctttgaagaaggccgaaccaagatatggcctcctgcatcactagaagagaaggtccagaaccttgtgaagacatgggaaatggaaatgttcaataaaatatccttccctgactacaaatcagtgaaactacagaattatacagtcagcgtgaatgggaggaaacctttgagtttagaagagaagaggaagctgggaggaggctataattcctttatgcaaacctccttaccag

SEQ ID NO: 37305 - DNA, 416 bp, Gossypium hirsutum
  Clone ID: LIB3165-014-P1-K1-B6
cccacgcgtccgcccacgcgtccggacaggaatgtagttgcacagctagctagaaaagccgtgagggctggattgaaggcaatcgcccttacaggtgatactgcgagactgggacgcagagaagctgatatcaagaacaggttcactggaccaccatttttgacattgaacaactgtgaaggttcggaccttggcaagagggataaagctgatgactctggtcttgcttcgagtgcggccggacaaatcgatcgctccctatagctgtgaggatgtgaaatggcttcaaacaatcactacattgccaattcttgtgaagggtgtactcactgctgaagatgcaaggatagcggtagacgctggagcatccggaatcatggtgttcaaccaccgagctggccaactcgattatgttt

SEQ ID NO: 37306 - DNA, 285 bp, Gossypium hirsutum
  Clone ID: LIB3165-014-P1-K1-B7
ggcgggattacccgctgagtttaagcatatcaataagcggaggaaaagaaacttaccaggattcccctagtaacggcgagcgaaccgggaaaagcccagcttgagaatcggtcgccatcggcgtccgaattgtagtctggagaagcgtcctcagcgacggaccgggcccaagtcccctggaaaggggcgccggagagggtgagagccccgtcgtgcccggaccctgtcgcaccaagaggcgctgtctacgagtcgggttgtttgggaatgcaagcctaatcgggc

SEQ ID NO: 37307 - DNA, 398 bp, Gossypium hirsutum
  Clone ID: LIB3165-014-P1-K1-B9
ttcgatttttgtattaagagtcgccctttggtgtttttctaattcaatcagtgaggtgagagaaaaatgtcttgctgtggtggaaactgcggttgcggctccggttgcaagtgcggcggcggcggcggctgcggctgcggcggttgcaagatgtaccctgagatgaactttgctgagcaaaccacaactgagacacttgttcttggcgtggcaccccggaaagtgaactttgatggagctgaaatggaaactggggctgaaaatggctgcaaatgtggagataactgcacttgcaacccttgcaattgtaaatgaggggaaaaaaaaaaccgaagcatattatggaagctgatctaaataatatatgatgtatttgggtttttattattagaataaag

SEQ ID NO: 37308 - DNA, 315 bp, Gossypium hirsutum
  Clone ID: LIB3165-014-P1-K1-C10
gatcctctttgcatgaccttgacatttggcatatgaaggttctataaatggtgacgaaactaattgcatgaccttgacatttggcatatgaaggttctttgacatcactgcaacagcaaataacatatcctgcaacgccaaagtatcctaagatcactcaataatagactgaataaccccggctccaaccgtcttccctccttctctgattccaatgtcatattttggagttttgtatttcttttgcttcagactcatgtctaatctagttggattggtaatattcatgtcacaattcgatatgattttattttc

SEQ ID NO: 37309 - DNA, 415 bp, Gossypium hirsutum
  Clone ID: LIB3165-014-P1-K1-C12
ttctctgtaaccttagtttgttccacagaagtgattattggttgagaaaacatggggaaggacaagcataagcctgatgataagggtctgttttcacatcttgctcatggtggtcatggacaccctcctggcggatatccaccggctggagcgtacccccctcaaggctatccaccagctggctaccctcctcaaggaggatacccccctcacggctatccaccatctggctatcctggtgcatcccattcagggcacagtggcatgggagcgctgcttgcaggtggtgcagcagctgccgcagctgctatgggggctcaccacgtgtctcatggtgctcatggtgctcatggtgcttatggtgctcatggtgcttatggtgctcatgggtttggtcatggtcatcatgggaagt

SEQ ID NO: 37310 - DNA, 402 bp, Gossypium hirsutum
  Clone ID: LIB3165-014-P1-K1-C2
gtttcgtgggccaaccccaaccttcagattcaggcaaaaggaaagggtgttggttttgcagatttctcaggcctacacaactcctctactagccttccctttgccaggaaaacctctgatgacttccattcactcgttgcttttcagacatctgctctaggaagcaataatggcgggtacaggaaagggatggcagaggcaaagctaaaggtggctataaatgggtttggtaggattggcaggaatttcttaagatgctggcatggccgtaaggactccccacttgatgtcattgccatcaatgacactggtggtgttaagcaggcttctcaccttctcaaatatgattccacccttggcatcttcgctgccgatgtcaagcctgttggcactgatggcatc

SEQ ID NO: 37311 - DNA, 435 bp, Gossypium hirsutum
  unsure (1)..(435): unsure at all n locations; Clone ID: LIB3165-014-P1-K1-C3
ccggnccgaaanccgggggggccacagcgtccgcccacgcgtccgttgccctttgttataggatcgccaatgagaagggcctccttcacctgctgcatcctttctaggaccctctccaccgttcacgacggaggaacagtcaaccttcaccctcgtctcctccgggtggcgctctttagcagcagcagaaccgacaattccaattctcgccgccattggatctctccgcttctcagttccttttcgaaaagctctggtcaagccgtctctctcggccttgtcggcgttgtcgcctctgtggccactgctgcttcggtctacgccaaggagccgccaccagctgaaatcatcccaaaggacgttgttctttatcagtatgaggcctgcccattttgtaataaagttaaagcattcttggactactatgatatacca

SEQ ID NO: 37312 - DNA, 416 bp, Gossypium hirsutum
  Clone ID: LIB3165-014-P1-K1-C4
caaggcacaatgattatggatctacatccttcctaggaatagatgatgcaattgaaaatgcagagaatctgaacactgccgaatcatggcatgtggtacaacatgaagtttggagagttgctagagctgtcaagcatgcctccttagtccttgatggaaaactcacatgaattctgcaagatggacctacccttgagacagcaatatacttcagtgagagtgacgaacatgagagagatctagattatagaaaattcacttacttccttgccagattacattaaaatcaatcatcagtactgagccttatttcaggtatttctatgtcagaatttcatactatagtcacagctttcatgaagggaacaacaaaatgggaatagcattggcatcgagaattaaggcaaatagaccaa

SEQ ID NO: 37313 - DNA, 218 bp, Gossypium hirsutum
  Clone ID: LIB3165-014-P1-K1-C5
attaaaaagggggccaggaaatttgaggaagtcctctttaaaaccaaatttgcatttaccttgctggtattggcaaatttttattcttccctctttcttctgttaacactttaatttattgtttactttaaaattcaaagaacaacctatttataactttggatcagccagtgttgactcttaaataatgtgtgctgctattacttattctgtctctt

SEQ ID NO: 37314 - DNA, 378 bp, Gossypium hirsutum
  Clone ID: LIB3165-014-P1-K1-C7
ctcgaggaaggttcgttcttttgtaatttctcatcatagttcttgtttaatttcgtttgggtttatcaagttcttcatgcgttttagttttatttaagcattggtcatttgttattattattattatttagggcttcacaattgatgatgaaaaggtttaattccccccccccttttcttttttggttcatgttagaagaaaaaatggagcaagagtcaacggggtctggaagttcaaaaatttcatcgttacaatgggttttcaaggacaagaacatggcttgggaagcatacaaaagcaagcccttttcacatagggttctgctttttctatccagtatgggaacgcttgtggcattccctgcctctagcctacta

SEQ ID NO: 37315 - DNA, 400 bp, Gossypium hirsutum
  Clone ID: LIB3165-014-P1-K1-C8
ctctttctattttcccactatctctttccatcattctacttttctactcaaccaagcgcgactcttaatgtttagaaaactgatattaaattccgattactactcttagatgtctcctttttcatttgtagtaaatgaatatcatgctaccgtgtcagtttcttgatatcatattttatgatgggattaggaaaaattttctattgttctttccccctccaagaaaagaagatactctctagggtctatatcaaatttttagtactgaaattatctgttttacagccacaccaggatgggccagcttattaccctgttgtagcaatcctgtctctaggatcacctgttgttatggacttcactcctcattcaagattaaattcatgcaaaagtacggtga

SEQ ID NO: 37316 - DNA, 388 bp, Gossypium hirsutum
  Clone ID: LIB3165-014-P1-K1-C9
cccacgcgtccgttttttttttttttttttttaagacaagaacaaagtggagattttatgacacaaaaatagaggatgcaaatccacttaaaacacaaaaggaaaacaacattcaattaagacacaaaggggggatttcctttgtttgtgcccaatatagatttttttcttcccttagagcttaatttcccatttagaaagctcctctcttgatagcatcgtcattagcatttccaagggcagcttcactcaaatatttgtcagccaattgaaccctcttcacattctcttgctcagcaacaagcatgtatccatattccaacagcttctcaatggtcatcttcggttgctcgaaagatggtggcccttccctcgagttcacgagctt

SEQ ID NO: 37317 - DNA, 400 bp, Gossypium hirsutum
  Clone ID: LIB3165-014-P1-K1-D1
gacgcttttctccccttctctgaaattcccttgctatcgttttctggaagaaaattttttgagatggcccgtacgaagcaaactgctcgtaagtctaccggcggcaaggctacaaggaagcaccttgccactaaggctgctcgcaagtcggcaccgacaaccggaggcgtgaagaagcctcaccgatatcgccctggaactgtagctctgcgtgaaatccggaagtaccagaaaagcactgaactcctcatcaggaaactgcctttgcaaaggctcgttcgtgaaattgcccaagactttaagaccgatctacgtttacagagccatgctgtattcgcgttgcaagacgcggcaaacgcataccttgttgggttgttcgaagataccaacctgtgcgcca

SEQ ID NO: 37318 - DNA, 415 bp, Gossypium hirsutum
  Clone ID: LIB3165-014-P1-K1-D11
cccacgcgtccgcagtgagactcttttgtatacctgtagcatatagtaatagtaagcagtgatagcaatggcctcctccatgatctcatcggcaaccattgccaccgtgaaccgctcctccccggcacaggccaacatggtggcccccttcaccggcctcaaatctgcctctgctttcccagtcaccaggaaggccaacaacgacatcacttctcttgcaagcaacggtgggagagtgcaatgcatgcaggtgtggccgcctcttgggaagaagaagttcgagactctctcatacctgcccgatcttactcccgtacagttggctaaggaagtagattaccttcttcgctctaaatggattccttgcttggaattcgaattagaggagggattcgtgcaccgtaagtactcgagc

SEQ ID NO: 37319 - DNA, 411 bp, Gossypium hirsutum
  Clone ID: LIB3165-014-P1-K1-D12
cttagattcatagcacttgtaaatttattattttttatttatttcttcttttggcgaaattcctatttgcaacaaagatgatagcttgcttgggtcgaatagtacacgacagcgacgccgagtcgaagctggacgacgacgtttccaccatattcaactctctcaatttacaaggcagcatcgaaaacggcgacgtttccggcatagccagtaaagatttcggcggtctttattcggttaagcccttgtatctaattagaccatcgggagccgaggatatatctcgggtcgttaaggccgccgccgggacgccccaccctgcggttgcggctaggggtaacggccactcaatcaacggtcaggctatggccgacggggggtacgtgatagacatgcgttccactggggaaa

SEQ ID NO: 37320 - DNA, 414 bp, Gossypium hirsutum
  Clone ID: LIB3165-014-P1-K1-D3
acccgtccgcccacgcgtccgcccacgcgtccgatgttgagatgaagggtatcacagctgaagatgtgaatgctgcattcaaaaaggcagctgaggggccattgaagggcgtattggatgtgtgtgatgttcctcttgtctcgggggactttaggtgctctgatgtttcctccaccattgactcttcattgaccatggtcatgggagatgacatggtcaaggtggtggcctgctatgacaatgaatggggttacagccaaagggttgttgatttggcacacttggtggcaagcaagtcgccaggcatgcctgcaggaggaagcagtgacccctcggaggatctctgcaagacacacccagctgatgaagaatgcagagtttacgaggcttaaatgatcgcaatcttcatttttt

SEQ ID NO: 37321 - DNA, 426 bp, Gossypium hirsutum
  Clone ID: LIB3165-014-P1-K1-D4
cagccgtccgatctcctccgccggagcttaattgcttcgccgttttttaccttctcgcagttcatttcccatggcggctggcttatccgccgccgtaccccttaaacctttcctttcatttcatccctcacccaagcaaaggctagttttcaaccctctacttcgcctcccacagctaacacacggtgctcgaaaggagacaaggctttccatttgtttcgtgttggaggaacaaaatgatgttgaaccccagaccttagtgaatctagtagaagaaggatccggttccgaggattttgggaacaaacagatcttaatacctccacatgtggcggagaaattagctagaaaaaaatccgaaaggttcacttacttggtcgctgctgtcatgtctagtttcggtatcacttccatggctatcatggc

SEQ ID NO: 37322 - DNA, 176 bp, Gossypium hirsutum
  Clone ID: LIB3165-014-P1-K1-D5
accacgcgtccgcccacgcattcgatgaactgatgtttgctttcacataccaaaacgaggagggtgtatttaaaaacgcatcccaacacccattaaacgacttattaaatgaatcacatcatcctgttgtttctttggaatacacacgctatgatatttcctccaccttctactat

SEQ ID NO: 37323 - DNA, 414 bp, Gossypium hirsutum
  Clone ID: LIB3165-014-P1-K1-D6
accaatgtcggtctcacttcaagctgcagctaccctgatgcaaccaatcaaggttgctgcaccatcaaggaccaatgtgctgctcaggtcctcccagagcgtttctaaggccttcggtttggagcctgttggtgctaggctcacctgctctttgcaaactgacctcaaggacttggctcagacgtgtgttgatgctaccaagctcgctggtttcgctcttgctacatctgctcttgttgtctcgggagcaagcgctgaaggagttccaaagcggctaacctacgatgaaatccaaagcaagacatacatggaagtcaaaggaacaggaactgctaaccagtgcccaaccatcgatggtggtgtcgactcttttgccttcaagcctggcaaatactacgccaagaagttctgctt

SEQ ID NO: 37324 - DNA, 332 bp, Gossypium hirsutum
  Clone ID: LIB3165-014-P1-K1-D7
atccattcaccgcttaatggctcgttcactttgccaaaccgtaatcaagctacgacgcggcaccaaaccttgcacatcttcctctcgtctcgtttcgttgcgaacccaatcgagccaacccaatcatttcgatcagtccgatgcttcttccgagtcttcctccgatccgctcctgcgaaaactcgaagacgccatccatcggatcattgttcgccgttcggcgcccgattggctccctttcctacccggatcctcttattgggtcccgcctcccacgtcgcaatcatacggccttgctcagattgttgagaaattggctaatactttgaccc

SEQ ID NO: 37325 - DNA, 395 bp, Gossypium hirsutum
  Clone ID: LIB3165-014-P1-K1-D8
gaagaattaaaataggagactccgcccatttttcttcattttcctccaaccataatcatgatatttatatttcttcctctctcttctttatttcttcaagtttaaggcctcaaaatggaggcagccactgtggttggatcttctatgtctctacatcgaacttcatgctccgctgccagatccgcccttttagctgccaatggcccgctctttccacgtttcgctgctaaccctcgctcctccttctcgatcaagctttattcttcagtttcatattcaaaatcacggaataggagaatgggtttggggggtaggagaggcatggtggtaaaggcgtcttcatctcctgactcagctgaacccaatgctcaaattgcgtgacttcggatggaatt

SEQ ID NO: 37326 - DNA, 404 bp, Gossypium hirsutum
  Clone ID: LIB3165-014-P1-K1-D9
ctcttcttcattttccaaagccaaaggccaataccctcctttcctctcttctcccctgcgctacaaggaaatggcaatttcatcaacagcagcagccactgccgcttcttctaagcttagatacccacacgcctcccctttcccaactcactcctcaaccaccacctctgcctttttctcctcaattccctctaaactaacccctacccacctctcctcttccttcctccctcctttcctcactaccgttgccaccacttacgtattccctcgccgtcgcgattctttcaccgtcaaagctgcccgtgggaaattcgaacgcaaaaagccccacgttaacatcgggaccatcggccatgtcgaccacggcaaaaccaccttaactgccgctctaactatggcct

SEQ ID NO: 37327 - DNA, 403 bp, Gossypium hirsutum
  Clone ID: LIB3165-014-P1-K1-E1
tgaagaaccgctttccggattagctttcaaaattatgaccgatccgtttgtgggatcccggacatttgtgagggtgtattcaggaaagctagctgcgggatcttatgttttgaatgctaacaaagggaagaaagagagaatcggtcgactattggaaatgcacgctaatagtctagaggacgttaaggttgcattgcccggcgatattgctgctcttgcaggtctaaaggatactataacaggtgaaactcttagcgaccctgaccatcctattgtacttgaacgaatggacttccccgatcccgtgattaaggttgctattgaacctaagactaaagctgatgtcgataaaatggctaatggtttgatcaagcttgctcaagaagacccttctttccacttc

SEQ ID NO: 37328 - DNA, 410 bp, Gossypium hirsutum
  Clone ID: LIB3165-014-P1-K1-E11
aaatcagttgcttcacaatggcctctacaaccatggctctttcttccccatcattcgccggtaaggcagtgaagttctccccttccacccctgaaatccggggaactggccgtgtttccatgaggaaaaccaccaagcctgttccttctggtagcccatggtacggtcctgaccgagttttgtacttgggtccactttccggtgagccaccatcttacttgaccggtgagttccctggtgactatggttgggacactgctggactctcagctgatcccgagacctttgctaggaaccgtgagctcgaagtcattcactgcagatgggccatgttgggagctcttgggtgtgttttccctgagctgttggctaggaacggtgtcaagttcggtgaagctgtatggttcaag

SEQ ID NO: 37329 - DNA, 414 bp, Gossypium hirsutum
  Clone ID: LIB3165-014-P1-K1-E12
cccacgcgtccgcttgactggtgttcaaggagctgtcaacgttcaaggagaggatcaaaagaagctcgacgttgtttctaatgaggtgttctctaactgcttgagatcaagtggaaggacagggattatagcatcagaggaagaagatgtgccagtggcagtggaagagagttactctgggaactatattgtggtatttgaccctcttgatggatcatccaacattgatgctgctgtttcaacaggttcaatttttgggatatacagtcccaacgatgaatgcctagcagaaatagatgatgattccactcttggttcagcagaacaaagatgtgttgtgaatgtgtgccaaccagggagtaatctattagctgctggatactgcatgtactcgagctctataatctttgtgct

SEQ ID NO: 37330 - DNA, 306 bp, Gossypium hirsutum
  Clone ID: LIB3165-014-P1-K1-E2
agccttccgccgggggtacctttaaatctttaacggccgctttatacgtgccaagctaatgagcgccgggcagcaatggattaactatatataactcacctgaatacaatccactgaacccacattcacagcgaacgggactggcagaaccatggcgtaaccgagaccaatcggagcgcgactctagtccgtctctgcagcaggactagtgacgtgtaggctcagaccgagctctcttgcgaacaggagcacccactgcttggaacatggtacgacttatgtcgcgaatcataaaccgcgcacggt

SEQ ID NO: 37331 - DNA, 438 bp, Gossypium hirsutum
  Clone ID: LIB3165-014-P1-K1-E5
aatcccgggtcggcccagccgtccgaaaccactttttgttttttggcgagcttttgattgattataaacagtccgtaactcgctggggggagggcaagataaacaagcgttgctgtttgaagcatttaatttgaattggtttgattatgggtgaacaagaaacaaagaccaaagtccctgacccagtggctaacgggacttctcttccggaaaaatccagtgaagttgtagcagagaaaaaagaggaagaagataatggggtaaaggaaatggaagaagataagaaaaatgatgagaaagttgagactgagaagatggatgaagaccaaccggtcaaggatgacacagaaagcaaagagacggaaaaagaagaaaaggaggaacctaaaactgaggcgatggaagatgaaaccaatgcaaaagaagatgttaggaaag

SEQ ID NO: 37332 - DNA, 411 bp, Gossypium hirsutum
  Clone ID: LIB3165-014-P1-K1-E6
aaactcaaccataactcatattgtctactgtttggtagcaaaaaggcatagccaagccaagcagaggaaaacatgaactcatcgcccaatcctccacaaccccctccgccgcagtcttccacttccaccaccgccactgatggctccggcaagaaagtcaggaaaccttacaccattactaagtcgcgtgagagctggactgaagaagagcacgacaaattccttgaagctcttcaactgtttgatcgggactggaaaaaaattgaagattttgtcggttcaaagacagttatccagattcgaagtcatgcccagaaatactttctgaaggttcaaaagaatgggactattgcgcatgtgccgcctcctcgtcccaagcgcaaagctgcacacccttaccctcaaaaggcc

SEQ ID NO: 37333 - DNA, 388 bp, Gossypium hirsutum
  Clone ID: LIB3165-014-P1-K1-E7
cccacgcgtccgcccacgcgtccgtgaagttttctttctcgattttctatttagccaaacaagatgcagatcttcgttaagactctaaccggcaagacgatcactctcgaggtcgagagctccgatacgatcgacaacgtgaaggccaaaatccaagataaggaaggcatccctccagaccagcagcgtctgatcttcgccggaaaacagctcgaagacggccggaccttggccgattacaacatccaaaaggagtcaactctccacctcgtcctccgtctgcgcggtgggatgcaaatcttcgtgaaaaccttgactggcaagacaatcactctcgaggtcgagagctccgacacgatcgacaacgttaaagcgaagatccaagaca

SEQ ID NO: 37334 - DNA, 407 bp, Gossypium hirsutum
  Clone ID: LIB3165-014-P1-K1-E8
gtttaggcagttgcgggtttataagactcctgtacttggagacacccagatatcagatgctaaagaggactgcaaattatgaggtaaggaaatatgaaccattcatagtggtagaaacaattggagagaagctatcaggatcaaatggctttaatgctgttgctgggtatatatttggtaagaattcaacaacagagaagataccaatgactactcctgtgtttacccacgcacttgatcccgaactatccgatgtatccatccaaattgttctaccatctgagaaagatataagcagtctgccagatcctagtcaagaaacagttaagttgagaaaagtggaaggaggggttgctgcagcattgaagttcagtggaaaaccaacagaggatgttgttcgtgagaaa

SEQ ID NO: 37335 - DNA, 394 bp, Gossypium hirsutum
  unsure (1)..(394): unsure at all n locations; Clone ID: LIB3165-014-P1-K1-E9
tgaaattggacggttctgatttgaagagacttacccacaattcttatgaagatggggccgctacgtgggccccattgtacatcaatccanttgacgtggaatggccgaggaagggcgaatgtgcatttgaggattgtcattggctgaatgaaatgccagggcgtggaaccaagttggtcggaccatgggggttagccaagcctctttgcggtgtattttaaatttgtatggtgtaattatgtgctttggagtattgtaaatctgtatggtgtacctaatctttgttttctttttcttggactagatagtagcgaaggaaataatgaacatatgtatgccccttcctcatgtaattagtntgtggaatctggaaaggacattctattccactcct

SEQ ID NO: 37336 - DNA, 405 bp, Gossypium hirsutum
  Clone ID: LIB3165-014-P1-K1-F1
gtcagcccatctctcaagaacttcttgctcagtatagcggctgggggtgtggttctggtcggcattgttggagctgtgattggcgtgtccaacttcgaccctgtcaagcggacctgagctgagctcatattgttctctcagatgctgtacatcttttttcttatgttatctgtttaataatgtttttgcagctataaactaccgtagctgtacttcggctgagaccctgtcaacttgtgaaaaaagatgtacagcatctctcaagaacttcttgctcagcatagcggctgggggtgtggttctggtcgccattgttggagctgtgattggcgtgtccaacttcgaccctgtcaagcggacctgagctgagctcatattgtgctctcagatgctgaacatcttttt

SEQ ID NO: 37337 - DNA, 403 bp, Gossypium hirsutum
  Clone ID: LIB3165-014-P1-K1-F10
ctcgtatcttcactctcccaccccgaccgcttgattttgatcagacggtaatcatgccgatcagaaacatagccgttggccggcctgaagaagctactcacccagatgctcttaaagcagctttagctgagttcatatcaacgttaatcttcgtttttgctggatctggttcaggcatggcttttaataagctgaccgacggcggtgcaacaactccggctggtctcgttgccgcctctctagctcacggatttgcgcttttcgtcgctgtatccgtcggcgctaacatctccggtggccatgtcaatcccgccgttacattcggtgctttcgttggcgggaacattactcttttacgtggtatcctttattggattgctcaactccttggctcaaccgtcgc

SEQ ID NO: 37338 - DNA, 404 bp, Gossypium hirsutum
  Clone ID: LIB3165-014-P1-K1-F11
agcattcgagcggccataaatccggctccgacccacccaaagtagcttgattttatttgatatatggtgaccgccgcagcatcctccatggcggccaccgccattttggttccacgtgtccacactgccgttaggatcacccactgctccgccttgccgtctctccctcctcgcgtttccagctcttctttttcctcttccgttaagctaagtccaggtacagctcttatacatggcctttttaacactcacttccaacatcacctgcgaaatgtaatcactagttccaagatttattttcttatttattaacttaaattttgaatgtattgaaattaaattgtattttttatgatagtaaaaatataattttatcgattaaataatttatattatcatgggtc

SEQ ID NO: 37339 - DNA, 355 bp, Gossypium hirsutum
  Clone ID: LIB3165-014-P1-K1-F12
gagaaacacaagctatcatttcaaaagcaaaagctaaagcaagaagataataaagagaggaattcaaggttgaaggagggtttctctttttctatttctttttctttttaaaatctgtgtggagaaaactgaattaggggaaaatgatgcaaactgagcagcagcctcagcaccaaaatcagttaacggttcaaaactctgggagtctcagctttagcagtcatttgtctaaggaagatgaggagatctcaaagtcggcgctttctactttcagagccaaagaagaggagattgaaaggaagaagatggaggttagagaaaaagttcagcttcagttaggccgtgttgaagagga

SEQ ID NO: 37340 - DNA, 419 bp, Gossypium hirsutum
  Clone ID: LIB3165-014-P1-K1-F2
agccttccgcccacccgtccgttttttaatctaaacctgaaatcaaactagaaaagatcagagagagggtgagaggcaccttgtaattgacttgaaccaattctgattctctcttgcatactatcaaatggcagctactgcagcaatcaccactctcccccagttcagtgggttaagacccaaagtttctactgctccagttaggagcctggcagcagttcaaccaatgaggcgcaaggggaagggtgctctcggtgctcgatgtgatttcatcggatcccccacaaatttgataatggtgactacaacaaccctgatgctgtttgctgggaggtttgggttggctccatcagcaaacagaaaggccaccgctggattgaagcttgaagtaagggactcaggcttgcagactggtgacc

SEQ ID NO: 37341 - DNA, 289 bp, Gossypium hirsutum
  Clone ID: LIB3165-014-P1-K1-F3
gtgtgggataagtgggagctctcgttctaatttgaaataccactacttttagcgtgattttacttattccgtgaatcggaggcggggcacggcccctctttttggacccaaggccgccttcggccgtccgatctgatctgattacttcaccctgtgtttacttccttcacctcttttttctccacatcttcaccacaggtttttttttttttgggccctggtttcagttactttaaaccccgaaacatttttcactagttttttttcacaaaatattttaatttttttc

SEQ ID NO: 37342 - DNA, 434 bp, Gossypium hirsutum
  Clone ID: LIB3165-014-P1-K1-F4
gcggaccaagccgtccggttttggttctttctgttttgccttctctgcttttcactgaaacgttaaaacagactcgggaccctttgagttttcccctgttgttttctttcaattacttcaagctggcgatcgataatcaagaacccactgtccgtgaaatcaagcccaagaacagaagaatcatgggagctggtgggcctgatgaagaagacaacaggtggcctccatggctgaaacctttgttaagagagcatttctttgttcaatgcaagcttcatgctgattctcacaagagcgaatgcaatatgtactgcttagattgcatgaacggcgctctctgttctttctgcttagcttatcacaaggatcatcgttacattcagattaggaggtcttcataccatgatgtgataagggtatctgagatacagaaa

SEQ ID NO: 37343 - DNA, 421 bp, Gossypium hirsutum
  Clone ID: LIB3165-014-P1-K1-F5
agccttccgccaaaccaaaatccaaaaattaagccaattttcagtatttttttaactatggcttcaaatccgaaggttttcttcgacatgacgatcggaggtcaaccggccggccggatcgtgatggagcttttcgcagacgtcactcctcgtactgccgagaacttccgggcactctgtaccggtgagaaaggcgtcggtcgttccggtaaaccactccactacaaaggctctaagttccaccgcgtgatccctgatttcatgtgccaaggaggtgatttcacagccggaaacggaaccggaggtgaatcgatatacggatctaagttcgccgacgagaacttcatcaagaagcacaccggacccggcatactatccatggcgaaacgccgtccccgaacgaaatgatctcagttcttta

SEQ ID NO: 37344 - DNA, 408 bp, Gossypium hirsutum
  unsure (1)..(408): unsure at all n locations; Clone ID: LIB3165-014-P1-K1-F6
cgttcaatatttggctctttgtttttgttttttggtttagagagatggatcatgcagcagatgctcataggactgatttgatgacaataacacgtttcgtgttgaacgagcaatccaagtatcctgagtctcgtggggatttcaccatcttgcttaatcacattgttcttgggtgcaaggttggttgctctgctgntaacaaggctggtcttgccaaactcatcggactcgctggggagactaatgttcagggtgaagaacaaaagaaattggatgtgctttcaaatgaagtctttgtcaaggctttagtaagcagtggcagaacatgcatccttgtcttagaagaagatgaagaggcgacttttgtagatccctcaaagcgtgggaggtactgtgttgtttttgatc

SEQ ID NO: 37345 - DNA, 377 bp, Gossypium hirsutum
  Clone ID: LIB3165-014-P1-K1-F7
caatggattacgatttcaggaacagaacgggttcaccgtacgaggcgcagatcccgatttaccggcaacaacccacttcatcgtcatctacccatccgatgtacggatcttcaatgtacccgaggatcggtggtcaacccgccgctcacagtgttgcccctcccaccactcgcgcctcttctttccaccagaattcttcgccttcctcttcctcgggattgggcattagggttgctttgaaaccagaatatcgtattacacctccgcctcagttgtctccccaagttggggatattcctcgaagcaattttcagtttgatttcgagtttgagaggaaaattttggctgaagcagaaaaagaaaacatgaattggagt

SEQ ID NO: 37346 - DNA, 344 bp, Gossypium hirsutum
  Clone ID: LIB3165-014-P1-K1-F8
gaaaatctttccaggatcaattttctcacaacaaaactgaaaatgtctcgctggtcaggaaaatgtggctgcggcgctgattgcaagtgtggcagtggctgtaacggatgcagtatgttccctgacatactagagaagactacaactgagactattgttcttggcgtggcaactcagaaaatgcactttgagggatctgagatgggagttggggttgagggtgtatcccccatgggggacgaccagaactgcgctcttaaggacatgggtccgagatcatcagaggtatgctgattgtaactttgctattacacaaaataaatggtattacttttataagtggc

SEQ ID NO: 37347 - DNA, 365 bp, Gossypium hirsutum
  Clone ID: LIB3165-014-P1-K1-F9
ccattcccctctcttttcacctcatatttcattaattacccaatcaccctttcaccttgggaaccaatcccccattttacatcccaatgcaacttccccttgtacacataccaaccatggaagcaacctcacttctttcttcatcttcttccttcaccctctctttccttccttcacctctttcttctccacatctccaccacaggtctcttttcttcaggggcatgtttccagttactgtaaacccgcagacatgttcaacagctgttgtccgcaaaaagttgagcttctgcacaaaggcagttcttggaggaaatgtgcatgtaacaggaagtcctacttctgtccctggaagagtagcacac

SEQ ID NO: 37348 - DNA, 401 bp, Gossypium hirsutum
  Clone ID: LIB3165-014-P1-K1-G1
agccttccgttgggtcttgggcttatctatcatttttgctttacagattgttttgaaaaacaccatctttcttgtgaattctgcaacctttggagtaacttaagaagaaatgggggaaaagagtttaattgccaaggatgtcaccgaattgatcggtaacacgccactggtatatctcaacaatgttgtagatggatgtgtggctaaaattgctgccaagttggaggcaatggaaccctgctccagtgtcaaggacaggattggatatagtatgattgcagatgcagaggagaagggtctcattgtaccaggcgagagtgtgctgatcgagccaactagtggtaataccggaatagggttggcattcatggcagctgctaagggttacagactcataatta

SEQ ID NO: 37349 - DNA, 413 bp, Gossypium hirsutum
  Clone ID: LIB3165-014-P1-K1-G10
ataaaatctcctcttttttttgttctttcgaatgctcctttgaaacgtggcgttgcttcgatttatgggtttatttccgattcgttcaacttgtttttagttgaaccagcattggatgatggcgtattattattccaagcttttttactcgttcctagcttcagctctgatcatattttctcttcaaatttatgggtgttttttttaatggtcggcggatcaagatccggttttgagggtgttataataaagctttgattgtctatgaagacatttcaatcatggaatgcactggtcaagaaaagaaatgctttagctgaagggggaaattgtggatttaaaatgaggcagcttccatttatgggagttatttgtacaggtatgttggtcattgtgtatagaactacggatta

SEQ ID NO: 37350 - DNA, 416 bp, Gossypium hirsutum
  Clone ID: LIB3165-014-P1-K1-G11
ctcaaattcagataacaatttcacagttgttttcttcactctctctctcagccatggctgcagccatctccaccgtcgccgccgctgccgccgccaaccgagctctgggagtgtcagtcccaacctcagctttcatggggaagaaagtgagctcgagattcaacaacaccaggcaggttccttcgggaagttttaaggtgatggcggccgaaaaagagatagacgaagagacacagaccgaaaaggaccgatggaaagggttggcttacgatatttcggacgaccaacaagacattactcgagggaaagggatggtggattccttgttccaagctcccatgaatgatggaactcactatgctgtcatgagttcctatgaatacatcagccaaggtcttaaaacgtacaatttggac

SEQ ID NO: 37351 - DNA, 419 bp, Gossypium hirsutum
  Clone ID: LIB3165-014-P1-K1-G12
cccacgcgtccggtggctacacgacctacttctgcggcgttgctccacgaggtggcaccgatgggtggaacaaaacaagctatagctcagatcatacgtgtcagcctgtgttcattgatgcagaagggaggcggaagccgatcacgtcttacactggtccgcacggtagcaccgagtattacgttacaaaaaccgagataatcgaggttccatatatggccgaatacaagcaaagggctcctgtaagagttgaggtggtgagggactatggtgagggtaagctgattactaggcccttaagtcccgggaaacggcgggagagttcaagtcctgttcggtatcatactgaagagaaatggaataagccttctagccccgttcagtatgacgtcaaagagaaatggaataagccatcgagt

SEQ ID NO: 37352 - DNA, 396 bp, Gossypium hirsutum
  Clone ID: LIB3165-014-P1-K1-G2
agccttccaaccggttcctaaatttctttaatcctaacttttttccccatcaaacacaccttcgattttgcgaaggttgtagaagatggcagaaggtgaggatattcagccacttgtttgtgacaatggaactggaatggttaaggctggatttgctggggatgatgctccccgagccgtattccctagcatcgttggtcggccacgtcacaccggtgtgatggttggcatgggccagaaagatgcatatgttggtgatgaagctcaatcaaagagaggtattttgactttgaaataccctattgagcatggtattgtgagcaactgggatgatatggaaaagatttggcatcataccttttataatgagcttcgtgttgccccggaagagcaccc

SEQ ID NO: 37353 - DNA, 106 bp, Gossypium hirsutum
  Clone ID: LIB3165-014-P1-K1-G3
tttaaaagacccaaaactaacgatatccacccacttgtaactgacaatggatctgaaatcgttaaggctacaattcctgggcatgatgctccacaacccttattcc

SEQ ID NO: 37354 - DNA, 186 bp, Gossypium hirsutum
  unsure (1)..(186): unsure at all n locations; Clone ID: LIB3165-014-P1-K1-G5
ccgttccatgtaacggcacttgcacatgggttatttatcctaaagacgggggaagcccggggcacaccgtcagcgcgagcttcnaaaggaatcgggtaaaattcctgaaccgggacgcggctgctgacagcaacgttagggagtccatgtacctcttcaatttacacataacatttttatttttct

SEQ ID NO: 37355 - DNA, 404 bp, Gossypium hirsutum
  Clone ID: LIB3165-014-P1-K1-G8
caaaaatggccatggcaatggcgcttcgacgactctcctcttccattgacaagcctctgcgtcctttcttcaatgccccttccctctattacatgtcgtctttgccaaatgaagctgtgtacgagaaggagaaacctggcgtcacttggccaaagcaactgaatgctccacttgaaaccgttgatcctgaaattgctgacatcatcgaacttgaaaaagcgcgccaatggaagggacttgaactcattccatcggagaacttcacgtcggtgtcagtgatgcaagcagttgggtctatcatgaccaacaagtacagtgaagggtatcccggtgctagatactatggagggaatgagtacatcgacatggcagagatattgtgtcagaagcgtgctctggaagca

SEQ ID NO: 37356 - DNA, 201 bp, Gossypium hirsutum
  Clone ID: LIB3165-014-P1-K1-G9
gacaccatagcgcttttatatagtgacataaatataatatactgggcgcggttttacaccgcgttgactgtgaaaacactgtcgtgacccaacttaatatcctcgcagaacatatccctttctccagatgtcgtaatatcgaaaaggggcgcacagatcgcgcttttcaacacatgcgcacactgtatgtggaatgtgaca

SEQ ID NO: 37357 - DNA, 400 bp, Gossypium hirsutum
  Clone ID: LIB3165-014-P1-K1-H10
gaaaaagtctctgacacttgcaacacaataaactacacataaaatctgtgcctgccctttgctctgcacacctcgggatatcagtttcaactccactcatcccacgggttgagtaccgagtccatatattggtaagttcaaggaaggaacttgggcatcatgggtcttaaggcattagactatgagacaatgaatgaaaacgtgaagaaagttcaatatgcagttagaggtgagttgtatcttcgagcttctgagcttcagaaggaagggaagaagattattttcacaaatgttggcaatcctcatgctcttggacagaagccactgactttccctcgtcaggtggttgctttgtgccaagctccatttctgctagatgatcctaatgtaggacttatat

SEQ ID NO: 37358 - DNA, 309 bp, Gossypium hirsutum
  Clone ID: LIB3165-014-P1-K1-H12
accacacgcgttcgtccgacgcgtacgtccacgcgtccggtttagatggtgatgaaaaactctgtagtccggataaatttattttggcaaagatttcgttaaaataattcagatttagtggggactggggagttgctctccaaacaatttttctattttaccatgaaagttttgctttagaaaaaagctgataaaaagagcagtgactaatgccattgccgcctctctgatttgttggtttttatgaattcagggatactttatatttaaagttctaattttaataattggttctggttcaaggtggtt

SEQ ID NO: 37359 - DNA, 413 bp, Gossypium hirsutum
  unsure (1)..(413): unsure at all n locations; Clone ID: LIB3165-014-P1-K1-H2
aagataagagaaggcactgaaaacgcaaaaccatggcctctgcttctctcctcaagacttcaccagttttagacaagtctgagtgggttaagggtcacacccttcgccaaccttccacttctgcggtgaggtgccaccctgttgcaccctctggactaactgtgcgtgcaagctcatatgccgatgagcttgtcaagactgctaaagctattgcttctcctggccgtggaattttggccatggatgagtccaacgctacctgtgggaaacgtttggcctcaatcgggctagaaaacacagaggctaaccgccaagcctacaggacgttgcttgtttcagctcctggccttggtcagtacatctctggtgccatcctctntgaggaaaccctctatcaaaccacaattgatggc

SEQ ID NO: 37360 - DNA, 297 bp, Gossypium hirsutum
  Clone ID: LIB3165-014-P1-K1-H3
acccgggccggaccacacgcgtccggagggaccgcttctctcttctcttcctcctctttatctccgtcgttgcttcggccgtcggcgccgacgttaatagcgatgacgatcctctcatccgtcaagttgtttccgatggtggtgtcgaggaggactccgatgaccatctccttaatgcggagcaccacttcacgctgttcaaatccaagtatgggaaaacctacgcatcccaggaggagcacgattaccgactggtagtcttcatggctaacctgcgtcggtccaagcgtcatcagg

SEQ ID NO: 37361 - DNA, 418 bp, Gossypium hirsutum
  Clone ID: LIB3165-014-P1-K1-H6
gacgaccacgcgtttcatccgactcgaaatatggattattgaaaaaaaaagtagaacatgtattgggatatttcctttcaactacaacaatattctagtatttatttgatatgacatgaatagttgaagggaattccccgaagagaaaatggattatgggagtaacaaaaaaaacctgacttgaacgatcctgtattaagagctaaattagctaaaggtatgggtcataattattatggggaacccgcatggcccaatgatcttttatatatttttccagtagtaattctcggtactattgcttgtaacgtgggcttagcggttctagaaccttcaatgattggtgaacccgcggatccatttgcaactcctttggaaatattacctgaatggtatttctttcctgtatttcaaatac

SEQ ID NO: 37362 - DNA, 411 bp, Gossypium hirsutum
  Clone ID: LIB3165-014-P1-K1-H7
gtttgtttgttttctggtgctttctttctctatcctgaaaccacagccgtaaccatgtcgtccttgctagccaacggtatttccagcttctcaccacagcctacttccgattcaaccaagttccttaaagggttcttcccaaagctcgattccgtcaaacccataaccccaaaactccaaagttcaaggcttttgaaggtcagagcagatgttggtttcgatcctcaaaccctcacgtcagatcccagctcttcatcaggtaaatcctacgatgacaaaatccaggaaattcttcgaaaccgtgattatgataaaaagtttggctttacgatggatatcgattcttttgcgatacccaaagggctttctacagaaacaattcgtttaatttcttctttaaaggaagaacct

SEQ ID NO: 37363 - DNA, 418 bp, Gossypium hirsutum
  unsure (1)..(418): unsure at all n locations; Clone ID: LIB3165-016-P1-K1-A1
caagaagcgagctttgcacctgcaggaaaacattcacaaagataaagctgaattccaagaagcaaagatgttgagcgtctcaattgcgtccccagctaccttaactctccctccaaaacccaaatcctcaattcccaaaacttccttcaccggcgttagaatccagcacttatgtccccaacggttgccttctcaggcgacctgcttttggcaaccgtcaccttcgtcctccgtggtcatgatggctaagagagaagaagaaatgaaggaaataagagccaaaaccactgaggaaatcaacgatgaagtggttgaattaaaaggtgagcttttgatgcttcgtctccagaaatcggttcgtaatgagttcaagtctagcgagtttgggcgaatgcgccaaaggatngctcgcatgctt

SEQ ID NO: 37364 - DNA, 424 bp, Gossypium hirsutum
  unsure (1)..(424): unsure at all n locations; Clone ID: LIB3165-016-P1-K1-A12
ggaaagcaaagcaaacgaaactcctctcnctcatctcactccttacccaaaacaacgggggctttcaccttgtttaaatttttttcctctcttcgtccaagatgccggctgctagcacaaatatgtctgaccgagagggagaatcatttgttgaggttgatcccactggtcgctttgggcgctataatgatttgcttggtgcgggtgcagtaaagaaggtttacagggcatttgatcaggaggaaggtatagaggtggcctggaatcaagtgaaattgactaacttcagtgaagacctgtgcttatcaataggcttcaatccgaggtacagttgctgagaacgttgaaaaacaagtatatcattgtttgctacagtgtctggagggatcgagaacataacacattaaattttatcactgaggtc

SEQ ID NO: 37365 - DNA, 520 bp, Gossypium hirsutum
  unsure (1)..(520): unsure at all n locations; Clone ID: LIB3165-016-P1-K1-A2
gggaatggaccgggctcgagcccacggcgtcacgcnccacagcgtgacgtcaaacttcaagatacacccaatttcactagttttgttttctgtcacctcnntctctctcagcgcagtggcnntgcagccnnatctccaaaccgtcgcccgccccgctgccccgccgcccaacccccgagctctgggaggtgtnncagtcccaaacctcagnctttcatnggggaaagaaaagtgaagctcgaagattcacacaacccaccacggcaggttctcttcgggaacgttttaaaggtgatcggcggcccgaaaatagagatacgaccgaagagacacccagaccgaaaaaggacccgatgggaaaagggggttggcttaccgaaatatttcggaccgactcaacaacgacaattactnnncgagggaaaaggggatgggtgcgattccttggttccaaagcctcccatgaatggatggaacctnncactatgctgtcatggaagttcctatgaaataccatcag

SEQ ID NO: 37366 - DNA, 420 bp, Gossypium hirsutum
  Clone ID: LIB3165-016-P1-K1-A3
ggagactccgcccatttttcttcattttcctttatactataatcattatatttatatttcggcctctctcttctttatttcttcaagtttaaggcctcaaaatggaggcagccactgtggttggatcttctatgtctctacatcgaacttcatgctccgctgccagatccgcccttttagctgccaatggcccgctctttccacgtttcgctgctaaccctcgctcctccttctcgatcaagctttattcttcagtttcatattcaaaatcacggaataggagaatgggtttgggggtaggagaggcatggtggtaaaggcgtcttcatctcctgactcagctgaacccaatgctcaaattgcgtcacttcggatggaatctccaattggtcagtttttgtctcaaatcttgataagtca

SEQ ID NO: 37367 - DNA, 426 bp, Gossypium hirsutum
  Clone ID: LIB3165-016-P1-K1-A4
ggcgggtacaggaaagggatggcagaggcaaattttaaggtggctataaatgggtttggtaggattggcaggaatttcttaagatgctggcatggccgtaaggactccccacttgatgtcattgccatcaatgacactggtggtgttaagcaggcttctcaccttctcaaatatgattccacccttggcatcttcgctgccgatgtcaagcctgttggcactgatggcatctctgttgatggcaaggttatcaaggttgtttctgaccgcaaccctgccaacctcccatggggggaccaggaatagatctagtcatcgaaagaaccggtgtgtttgtcgatagagaaggtgcaggtaagcacattcaagcaggagccaagaaagtgctgattactgccccaggtaagggtgacatccccacctatt

SEQ ID NO: 37368 - DNA, 423 bp, Gossypium hirsutum
  Clone ID: LIB3165-016-P1-K1-A5
gttgaaaagcagtgctgattaggtcagtggcgtttgtcgatggcggaagataaggcagagacacaagcgttcactcctggtcccggatatcggcaattcaaggggagagatgaattcccctccaacattttgcacggcacattagcttgtgccatctggattggatctatgcattttaacgtctccctcctccttttctccttcctcttccttcctttctccaaattccttttggtggttggagtgcttttgattttcgtcgttcttcctattgatcataacagtaaatttgggctgaattggccaggtatatatgtcagcacatgtccagttattttccagccactcttcacgttgaggacatcaacgacttccatcctggccgtgcttacgttctcggttatgccccacattcagtgttgc

SEQ ID NO: 37369 - DNA, 344 bp, Gossypium hirsutum
  Clone ID: LIB3165-016-P1-K1-A6
ctccttgtaaggcgtttgctccaccacgtttgtttccttgtggtaagaaagttattacagccagatgttctgataggaagtcggttcttacttgtggtcagcggtgtggtaaacttcttgagtgtgggcgccatcagtgtgaacgtatttgccatatcggagcttgtgatccttgcaaggttctaattaatgccccctgtttctgcaagaaaaaggttgaagttgtcatctgcggtgacatggttgtgaagggaaaggtgaaagcagaagatggcattttttctatgtgtttaacatgctaatgaagtttaaatggtgtaaccattactgtgcttaaatattgc

SEQ ID NO: 37370 - DNA, 430 bp, Gossypium hirsutum
  unsure (1)..(430): unsure at all n locations; Clone ID: LIB3165-016-P1-K1-A7
ggacagggccgggctcactgtttaacaaaaaatnggacataaactctctagcctctctttttttttctttaacnaacccaagntttctatttggtctgggttctttgcatttnnccattagctaaaccttgtaaaangaacaaagannaataaaactctttgatggaagcgcgcaaggaatggtggctaacagggcaagtcctgaaacgtttggttaatgaatccaagcaatcacgcaatggtgaaatgagttctagatcacctgtttcctacactccatcaaggtatgtatcttcattgtcaccttttggttccaagaatcatagcagatcagattcataggtgctagaaatgtgtcgaacaatgttggttttggtgttgggccaccaattcgatccattactggcgaggcattgaaatgaagcgatac

SEQ ID NO: 37371 - DNA, 394 bp, Gossypium hirsutum
  Clone ID: LIB3165-016-P1-K1-A8
aatggctctgcccttagctggagctacctaattcagggtgccaagctctgaggcattctgtaagccacttccggtgaagccatggagggcaatgggcggtgttaaaagacccaacggaaggcttcaagtcaaggctggtgtttcttcgttcaaggaaaaggcggtgacggggttgacagcggcagcactgacgacatcgatgatgatgccacagatggctcaagcggctgatggagtcaccccatctctcaagaacttcttgctcagcatagcggccgggggtgtggttctggcgccattgttggagccgtaattggtgtgtctaacttcgaccctgtcaagcggagctaagctcatataattctctctcatgctgtacatcttttttctcatc

SEQ ID NO: 37372 - DNA, 338 bp, Gossypium hirsutum
  Clone ID: LIB3165-016-P1-K1-A9
cccacgcgtccgtgatcttccgttctcgttattgctgggtcttgttcttcgtgtgccggagtgattaagcaaggctccgtcgatcaatccgacggtaatttccttgatgatgaccagattgctgcaggttttgtcctcacttgtgttgcttaccctcagagtgatgttgttattgagacccacaaggaggaacagcttaccgcttgattatatatgattctatataatataatcatcaactagaccaatatttaatcatctttctcctgtctagatgatttatgtgtgttatattggtcggagggattaatttcatgtacttgtttgagggaagccat

SEQ ID NO: 37373 - DNA, 420 bp, Gossypium hirsutum
  Clone ID: LIB3165-016-P1-K1-B1
cccacgcgttcgcccacgcgtccggtgagactcttttgtatacctgtagcatatagtaatggtaagcagtaatagcaatggcctcctccatgatctcatcggcaaccattgccaccgtgaaccgctcctccccggcacaggccaacatggtggcccccttcaccggcctcaaatctgcctctgctttcccagtcaccaggaaggccaacaacgacatcacttctcttgcaagcaacggtgggagagtgcaatgcatgcaggtgtggccgcctcttgggaagaagaagttcgagacttctcatacctgcccgatcttactcccgtacagttggctaaggaagtagattaccttcttcgctctaaatggattccttgcttggaattcgaattagaggagggattcgtgcaccgtaagtactc

SEQ ID NO: 37374 - DNA, 421 bp, Gossypium hirsutum
  Clone ID: LIB3165-016-P1-K1-B11
gaaaaaggggaaacccaaaatgtttgcctttgtttggtctgccgttcaaccaccatcagtgcaccatgaacgatggatggtggtctaccaaagcgttccccttatgccttcatttaaagcccagcctcaaggctcatcaatttcggcctcaaaacccctctcaaccttcgacgccggcgaagaagacgaggatttggtggctcgttcgcaaagtaagtcttctatcttctctttattatactaaaaagcatgcagagcaaaaaagaaaacaaaatagacctgagaaaaataatgtacagacttttgaaatctttttttctttttgattgctcttttttttttatgtttcaatctatgtgtgtataaaaataccatgtttttttttattcccgaaattcccctattttcaatcagttccctc

SEQ ID NO: 37375 - DNA, 289 bp, Gossypium hirsutum
  Clone ID: LIB3165-016-P1-K1-B12
cggacgcgtgggcggacgcgtgggttccgttgtagctgactatcatttctacttctgttacgatggcggctactaccttctctccttccttctccactccctcggtcaattcttccttcaaaggccaaaaaactttaaccaaccctaatctaagctttttggccctaagttccaaaatcctggaggtttttaaaagcacccagcctgcctcctgataaggctgggggctaacttttggcctttcgattggcttccgttcctgccgtccaaacacacatatttttcgatt

SEQ ID NO: 37376 - DNA, 414 bp, Gossypium hirsutum
  Clone ID: LIB3165-016-P1-K1-B3
cttttgttagaaagacgttagcagcggcaaatttttatacgttactcttaaggaaggataatgctatccttgcgcttcgctattcctaccgcaaatacattaactccacccaagactaaaccgaaaccgggtttagtagtacaaaccgcttggaaccaaacggacctttttccttctcttcccaaacgatatgattataagctacaagcagctaccacggacttatctgtggagggagatataccggctgaggaggtggtggagctgccggccgagcttcgcagagagttgatgccaagcacgtagcggtgataatggacgggaacgggcggtgggctcggcagcggggattggcgacatcagcaggacacgaagccggtgtaaaggcgttgagggagctgatcgaactatgtt

SEQ ID NO: 37377 - DNA, 427 bp, Gossypium hirsutum
  Clone ID: LIB3165-016-P1-K1-B4
cccacgcgtccgttagcattagcactagcactttttgcaaccatggcctccgccgcatgtggcgggcaccaccacgcactcacaaccaatggcagatcatcatcattatcgccgtcgctgcgccaggtttcaaacatgaagcctacccagcaggtggtgtgcaaggctcaaaagcaggaagatgatggaagccttgtgtcccgtaggttggctctcactgtactcattggtgctgccgctgttggctctaaggtttctcctgctgatgctgcctatggtgaagctgcaaatgtatttggaagccaaaaacagacacagacttcatgccatacagtggggatggattcaagctctcgataccatcgaaatggaacccaagcaaagaggtggagttcccaggtcaagtgctgaggtacgaggacaactt

SEQ ID NO: 37378 - DNA, 427 bp, Gossypium hirsutum
  Clone ID: LIB3165-016-P1-K1-B5
cccacgcgtccgcttctccagtcccttgccgtctagtaagcaaaatcgaaataatagaacaaggattaagagggaagagatcgctatggtggttacgaccttattgtctccctgtaattcaattctagtccgcgggtttcccataagagaaaacgaatcatcatctcccccattgtttttaagcgttagagacaggtttctgaatcggaacaaaaggttatcccgtggcggtttgcttgtgcagcttaatgcaaccgaaggttcagccgattcaagtaagtccgaagaaagtataccttttgggctaaacccgattccgacgagcctccaccttgggctcaaggtgaaggcaagagttccacagcacagcagagttttgaggttcctttcttcgtttacttgcttgcttcagcggtgaccgccattg

SEQ ID NO: 37379 - DNA, 417 bp, Gossypium hirsutum
  Clone ID: LIB3165-016-P1-K1-B7
cggacgcgtgggcggacgcgtgggaaatttttgtgaaacttatctcgacctcaaagggggccctcccgaaaccgctagagccgtcgttcaccgagcaatcatcactgacttacaaaacaagcgtcgtggcacagcttctacactcactcgtggtgaagtccgtggtggaggaaaaaagccttaccctcaaaagaaaaccggacgtgctcgccgtgggtctacgcgcaccccgctccgtcccggtggtggtgttatcttcggacccaaacccagagactggtcggtttagatcaataaaaaagagaaaaggttggcgatttcgacggcgttatccagtgcggctgagaacacgatagttgttgaagattttggggataaatttgagaaaccgaaaactaaagagtttattgacgcttt

SEQ ID NO: 37380 - DNA, 418 bp, Gossypium hirsutum
  Clone ID: LIB3165-016-P1-K1-B8
aacttgagtagggttccccttttccaaattcttatctgtgttcagcgatggcggttgctgtggcagtaacaggtggaggtgggcaatacaatggtaggatgacctggttcgttgttctgtcatgtatgatggctgccatgggaggcgtcatctttggctatgatattgggatttcaggtggagtgacatctatggagccatttctcaagaagttcttcccagaagtatatagaaagatgaaggtggacaccaaaatcagtaactactgcaaatttgatagccaactgttaactcatttacatcttcactatacatagctgggctagtcgctacgttcttcgcctcatcagttacaaaagttttcggtcgtaagccgtcaatcttgacaggaggtgctgcattccttgctggttcagcc

SEQ ID NO: 37381 - DNA, 363 bp, Gossypium hirsutum
  Clone ID: LIB3165-016-P1-K1-B9
agactcttttgtataactgtagcatatattactagtaagcagtaatagcaatggcctccgccatgatctcatcggcaaccattgccaccgtgaactgctcctccccggcacaggccaacatggtggcccccttcaccggcctcaagtctgcctctgctttcccagtcactaggaaggccaacaacgacatcacttctcttgcaagcaatggtgggagagtgcaatgcatgcaggtgtggcctcctcttgggaagaagaagttcgagacactctcatacctccccgatcttaccccgtacagttggctaaagaagtagattaccttcttcgctctaaatggattccttgcttggaattcgaatt

SEQ ID NO: 37382 - DNA, 235 bp, Gossypium hirsutum
  Clone ID: LIB3165-016-P1-K1-C1
gagagcagcaaccatggatctaatcaaagatgcctgtgagaattggggcttctttgaggcgttgaaccatgggatttcctatgaatttctggacagagtggaaagcttgacgaaagaacatgtccagaaatgcatggtgcaaaggtttaaggaactggaagcaagcaaggcccttggggtctacaagctgaaggtactgatattgactgggaaagaaccctctatttgcgccatc

SEQ ID NO: 37383 - DNA, 397 bp, Gossypium hirsutum
  unsure (1)..(397): unsure at all n locations; Clone ID: LIB3165-016-P1-K1-C10
cccacgcgtccggggaaatgatttcaaanaaaaacagaaagcctccccgttggaagagtgagctcttgtacatttaagttcctttagtgccatagaataagaaaaaaggttatcccttttgcacaaaaaaaaaaaaaaaaaaaaaaaaaaaaaaaaaaaaaaaaaaaaaaaaaaaacccaaaaaaaaaaaaaaaaaaaaaaaaaaaaaaaaaaaaaaaaaaaaaataatctaaaatatagagacacctaaataaaattctctggccgtatttttacaacattgggactgaaaaaaccttgggttgcccatggggtgcgttctttaacatatccctttttagacagctggcataataacaaagaggcccacactaatccttcttcaaaacatttaccc

SEQ ID NO: 37384 - DNA, 196 bp, Gossypium hirsutum
  unsure (1)..(196): unsure at all n locations; Clone ID: LIB3165-016-P1-K1-C11
cccacacttccacaaaattttccaaaacnngttcaaaccaacaacaacagnaaaacccgcccttttttaaaaactttttgccccaaaaaaaaaancaataaaaatttccttccctaaatatctacttaaaaaaaaacaaataaactccacaaataaaatataaatctcaatagacaataaaaactacatcataatc

SEQ ID NO: 37385 - DNA, 422 bp, Gossypium hirsutum
  Clone ID: LIB3165-016-P1-K1-C12
gcgggctcacataaacacaatagccaatttgtcatctccaacttctgctctaaccggtgcccgttttgcccccatcttctcccccaattctctcctctacccgtcctctccttcactcacagcctcaaacctatcctgccaaagctcaagtctctgatttccctcaaaagagacaaccacccctcaaccttaaccgtcaaagcccagaccttggacttctccggctcattctttgagggtggtttcggctccgatgatgacccgccttcccaacccggctctggcataaccgcctggaggataaagaggaaccccaatgcccaccgggcctccgacagtacgagacaatggccgtcttgagacccgacatgtctgaagatgaaaggctttgctcttacccagaagtacgaggagcttcttgt

SEQ ID NO: 37386 - DNA, 416 bp, Gossypium hirsutum
  Clone ID: LIB3165-016-P1-K1-C2
cccacgcgtccgaaatcatccagactatcatgtgacagatcttatttgccttggatggtgttgattcaattggaattgtgcacagagatattaagccacaaaatattattttctctgaagggtctcgtacatttaaaatcattgatctaggagctgcagcagatttgagagtgggtatcaactacattccaaaggaatttcttttggatccaagatatgctgcaccagagcaatatatcatgagtacacaaactccttctgcaccttctgctccagtggcaactgcactttccccgttttatggcagatgaatctgccggatcgatttgacatctacagtgctggtctcattttccttcaaatggcatttccatctttaaggacggacagcgcattgattcaattcaaccgtcagc

SEQ ID NO: 37387 - DNA, 415 bp, Gossypium hirsutum
  Clone ID: LIB3165-016-P1-K1-C3
cccacgcgtccggcttttgagaagttcttcaacactagttcttggatctctggtatcttggatagctgctgatagtcctagcaacaacaatcattactatgaaaccagcagcccctttaggcattacccatcgagctcttttcatggtcacacccaccataacaggctctcgtttcattcttctccaggctccgtccacctatctactgtagtttcttgtggctcttccccggtatctccttctgttgatcagttttctgattttgagcttacagggtttcgtcgggctcaatctaagggaacttggaagggctcgcccatgctgcttgcgatggcaatgatgaattctacaagcggaaccaacctaagaagttttctgcaaggcacaacaagaagtgcttgatgttgcaaacca

SEQ ID NO: 37388 - DNA, 431 bp, Gossypium hirsutum
  Clone ID: LIB3165-016-P1-K1-C4
gtccgcccacgcgtccgcccacgcgtccgtgaaactttttttttctgccacaaaaagctcccccggcccgactcccctggcatcaacagcacaattctaaacccaaaaacataaaaaaatggcagcaagtgtagcaacaatggcgatgctcaatgcaaaatgcctaagcatcagctcaactaagatgagcagcccaacaaagccaaccccaaagcccttctcccttctctccatgcagaacctccccaaaggcctcaccatctcaaaaccagccaacaactcaaacctaccttcttcactcgctggagcgccattgctggagctatcttctcaaccttaagttcatgtgaccccgccttagctgcacaacagattgctgaaatagctgaaggagacaaccgtgggctagctctattgcttcccataatccc

SEQ ID NO: 37389 - DNA, 433 bp, Gossypium hirsutum
  Clone ID: LIB3165-016-P1-K1-C6
acgcgtccgggcaaaaccagtttcaattgaagtgtggaactttattgggaaatacagagttattagcacgaaacctatgcctggaactcgatggatcaacctcttaatcgagcaagattgccgtgtcgaaatatgtactgagaagaaaacaattttgtccgttgaggatatcatttctttgattggcaataagtgcgatggggtgattggacagttgactgaagactggggggagactttatttgcagctttaagcagagcaggaggcaaagcatttagtaacatggctgttggttacaacaatgttatgttaatgctgccaacaagtatggtgttgctgttggtaacactcctggtgtactcacagaaacaacggcagagctagcggcttctctttctttggcagctgctaaaagaattgttgaagcagatg

SEQ ID NO: 37390 - DNA, 419 bp, Gossypium hirsutum
  Clone ID: LIB3165-016-P1-K1-C7
cccacgcgtccgcccacgcgtccgcccattttttcggccaatggaagggacttgaactcggtccatcggagaacttcacgtcggtgtcagtgatgcaagcagttgggtctatcatgaccaacaagtacagtgaagggtatcccggtgctagatactatggagggaatgagtacatcgacatggcagagatattgtgtcagaagcgtgctctggaagcattcaggttagatcctgaaaaatggggagtgaatgtgcagcccctttctggttctccttccaattttcaagtttacctgcactcttaaagcctcatgacagaattatggcacttgatcttccccatggtggtcatctctctcatggttatcagacggacaccaaaaagatatctgctgtgtccatattttttgagacaatgc

SEQ ID NO: 37391 - DNA, 419 bp, Gossypium hirsutum
  Clone ID: LIB3165-016-P1-K1-C8
ttcaattacttcaagctggcgatcgataatctttaacccactgtccgtgaaatcaagccgaagaacagaagaatcatgggagctggtgggcctgatgaagaagacaacaggtggcctccatggctgaaacctttgttaagagagcatttctttgttcaatgcaagcttcatgctgattctcacaagagcgaatgcaatatgtactgcttagattgcatgaacggcgctctctgttctttctgcttagcttatcacaaggatcatcgttacattcagattaggaggtcttcatacatgatgtgataagggtatctgagatacagaaatacctggacatatctggaatccagacttatgttatcaacagtgctaaggttgttttcatcaatgagaggcctcagccaaggcctggaaaaggt

SEQ ID NO: 37392 - DNA, 428 bp, Gossypium hirsutum
  Clone ID: LIB3165-016-P1-K1-D1
agccttccgattttttcccttgaagttccttggcagttatgttttggcaagagtggcatgttctgcccataacaggcgtttctggtgaaaccaacgaggacccatatggtcaaaaacgaaaagggaatgaggatcacatgccaggccactagcatccctgctgatagagtgccagacatgggcaagaggcagctcatgaatctgcttctgttgggggctatttcactcccctcaggtttcatgttggttccttatgcagccttctttgtcccatctgggggacggggtaccggtggtggcaccgtgccaaggacgcaatcggaaacgatgtaattgctgaagaatggctcaagactcatggccctggggaccgtaccctgactcaaggattgaagggagacccaacctacctagtcgtagagaaagac

SEQ ID NO: 37393 - DNA, 410 bp, Gossypium hirsutum
  Clone ID: LIB3165-016-P1-K1-D10
ctttagagttctttacaatgtgaccgttttctttctaaatctaaataccactacggggggcgttattttacttattcaatcaatacaattgccaggcaataactattataaactgcccaatgccagattagtaacatcgaatctaatcaaagatatctgtaagaagtgcgacttctttgaagcgctgcaccactggaatccctatgcaattgatcgacagagtgtcaagcttgacgaaggagcatttcatgaaatacatggtgcaaacgcttatggtactgaagccaagcaaggccctgaaggtcaacaggctatacatactgctttcgactcagaaagtaccttctatatacgccgtttccatgaatccaacatggctgcaatcccagggctaacctatgaacacagca

SEQ ID NO: 37394 - DNA, 423 bp, Gossypium hirsutum
  Clone ID: LIB3165-016-P1-K1-D11
cccacgcgtccgcttaacaaaaaaaaaaaaaaactgtctcagatctgaggtgccgttgctgatttgttcatcagcttgattgaatctgacgcctattatcgtcgccggcaccgatctgttgctttaaaaagaaatggagaatttaatttctcttgtgaacaagattcaaagagcttgcaccgctcttggtgaccatggagaagcaagtgcattgccgactctttgggactcattacctgcgattgccgtcgtcggcggtcagagttcagggaaatcttcggtgctcgaaagcattgcggcaaagattttttaccccgtggatcaggaattgttacccggagacctctggtgttgcagcttcataagactgatgaaggaagcagagaatacgctgaatttcttcaccttccaagaaaaagattc

SEQ ID NO: 37395 - DNA, 424 bp, Gossypium hirsutum
  Clone ID: LIB3165-016-P1-K1-D12
aaatcaagcacggtttctttaagagacatattttgtctccgtgtgtgtcagaggtcggggatgatttgcaaaaggccatgctgtcatgtcagggtttcccagcagggggctgaattcagcacatgtattcagaattctcatgatgatccatcaaatgtagaagtagcctccccaatttttaaaactgatggagccagtgctcagcaactaattctggatgaagacggttctgagcttcggaaacagcttccagcttttgttaattctgcaactttgggaggaatggaatctgcccatcatgtggctcaaacttagagacaatattctctccttatctggagccaatccaaatacacagtgagctaaatgttgacaatgatgcagggagtaataatggccttgaactgccagaatttggggctga

SEQ ID NO: 37396 - DNA, 430 bp, Gossypium hirsutum
  Clone ID: LIB3165-016-P1-K1-D5
cccacgcgtccggtggctgatcctcaaggtgatgttgcccagacttttcagaaccttggagtatgtgttgtgcaacagtgtgccaagattcgccagcaagtatcaacagcagttacatatgacaaatccatcaaggccataagagttaaggtaccggattcagaggaagaattccttctgcatcctgcaacagtaagacggaatgaccgctctgcccaaagtgtggatgagtggaccggggagcaaaagctgcagtacggtgacattccagaagatattgaacctgaagaaattcgaccttgggaaactatgctgtgtcaattacgtggccagatggatttagccagatcgctccctatgatcagctccagatgatagagcgtttagtggatgtttcctcaaccgacagccgtccaatcattgatgataa

SEQ ID NO: 37397 - DNA, 418 bp, Gossypium hirsutum
  unsure (1)..(418): unsure at all n locations; Clone ID: LIB3165-016-P1-K1-D7
gggattatcaatttgaagccttcttcgattttcctctttcaagatgcaaattttcgtcaagacccttactggcaagaccatcacccttgaggtggaaagttctgataccatcgacaatgtaaagaccaagatccaagacaaggaagggatcccaccagaccaacagaggcttatctttgctggtaaacagctggaggatggccgtacccttgctgactacaacatccagaaggaatccacactccatttggtcctccgattgaggggtggtatgcaaatttttgtcaagaccctaccgggaagaccatcacccttgaggtggaaagttctgataccatcgacaatgtaaaggccaagatccaagacaaagaagggatcccaccagaccagcagaggcttatctntgctggtaaacagc

SEQ ID NO: 37398 - DNA, 419 bp, Gossypium hirsutum
  Clone ID: LIB3165-016-P1-K1-D8
cccacgcgtccggaaggccaacattgaagagataagattatggtgaaaaactaaacataataaagtccctcataacattcttcgacttgcttcattgattagcccaaagataaacataaccaaaaagaaaaatggcttctgcttccgctactctcctcaagtcttcacctattatcgacaagtccgagtggattaagggccaaaacctccgccacccttcggtttgttttgtacggtcacaccctacatcggccgcctttaccgtccgtgctagttcatatgccgatgagcttttaagaccgcgaaaactgttgcatctccaggtcgtggtattttggccatggatgaatcaaatgctacatgtgggaagcggcttgcctcgattggtctcgagaataccgaggcaaaccggcaagctt

SEQ ID NO: 37399 - DNA, 420 bp, Gossypium hirsutum
  Clone ID: LIB3165-016-P1-K1-D9
gagctgtcttttttccctccaacaatcctttttcaaacaaaacataacaacaacagcggcggcaataataataatcacaaatatctcgcaccaaaacccaaataacccacctgcttcctcatgccttattcatcatcatcatcatcaatggctagcaaattggctttcactttgatgcctcctcgtttcttcactgcgactattcaaaaacccgtggtttgtttctcttcttcttcttcttcttcttctatcagggttcaacccagtgggaagcatctatgttttcgacgccgttgctcttactacccctcaaggctactgccgatcaacaaggtcaggtcgaagaagatgaagttggtgatagtaaaattctgccttactgtagcatagacaagaaagagaagaagtctttgggtgaaa

SEQ ID NO: 37400 - DNA, 410 bp, Gossypium hirsutum
  unsure (1)..(410): unsure at all n locations; Clone ID: LIB3165-016-P1-K1-E1
ttcaaatccgtacggaacttagcggtagatcgtttaaagaggcttttaatttttccggtggagtgcgacggaaagggccagacctaatgatgtagtggtcttcccggaagatgagaattatcagtctttcacttcatttttgctgcagcgattccgctagctataaggtttggcagtcatcctcaacaagtcgtcttctccttcttcccataagggtaagggtcctgaatcagctcctncaagatcacatccaatgtcaagcagaacttgcagtttttgaagttgtggaaggattccaaaagagtaaatctagtgcacctaagcctgcaactagttataggagaaaagaggtgcaaaaggaagagcttcctgaagacataaaactttatcgtgatcctacaacgaccctt

SEQ ID NO: 37401 - DNA, 396 bp, Gossypium hirsutum
  unsure (1)..(396): unsure at all n locations; Clone ID: LIB3165-016-P1-K1-E10
gaattccctggatgataggccaagatgtgtaattagtcatgttaggcaccggcagacgccgcctanacagatgcttagacagtttgaaaataacatcgtgacaaagtaagaggatgggtagggttttccgtaaagacagctaccgtataacagccgggctgatattttactatgccataagatttgaaccctgcggtctaaaccaactatatgctatgaactatggaacaataccggttgtccatgcagtcngtggactgagagacacagtgcagcagttcaatcgttaagagttggggtcggtggcatttgacagtgcggatgcaagaagttgatacatgcataggtaactgtttgtgcatatcggagttaaaacaattgggaagggttgaaata

SEQ ID NO: 37402 - DNA, 422 bp, Gossypium hirsutum
  Clone ID: LIB3165-016-P1-K1-E11
caaggcacaaaatttgacccaaaatggcctctgtttgtgcttcttcggctattgcagctggtgccatctcatcccccagttcccagaagactggatcagtagtggggacaacaaaggcttctttccttacagggaagaaacttagatctgtgagaaagtacacaaaaccagctgccggaccaacatttccagtgtgcgccgccgccgaccccgacagacccctttggttcccaggcagcactcctcctccatggctggatggcagtctccctggtgactttggtttcgatcctctggtcttgggtctgaccctgagacattgagatggaacgtacaagcagagctggttcactgcagatgggcaatgttgggagctgctggtattttcatcccagagttcttaaccaagattgggattttaa

SEQ ID NO: 37403 - DNA, 420 bp, Gossypium hirsutum
  unsure (1)..(420): unsure at all n locations; Clone ID: LIB3165-016-P1-K1-E12
cccacgcgtccggtcattatccctcaacctttctccaaaatatggcagccacttgcgggagcccatcaaccgtcgttggtctcggtggcaccgccacctgtatgtcatccccgccgatgaaaacccgcctctcttcagggtttctgaaatctggggtgacggctaggaaccctttgaggctggctggtgcttgtgggggcaagtttacttgcttcgagagagactggctacgaagggactttaacgtgataggatttggactgattgggtggatagcaccatctagcataccggcatcgatgggaagagcttgactggccttttctttgaaagcattggaactgagctcgctcacttncctacacctncgccacttacctctcaattcttgttgtggttggtattatggcacctaggact

SEQ ID NO: 37404 - DNA, 419 bp, Gossypium hirsutum
  Clone ID: LIB3165-016-P1-K1-E2
ttcatttcaaagattctctcaaaacagtgagggtgttgtagttcgagttatcgacgacgggtggtttcaacacgaaaaaaaatggataacttttacgcaccagggaagaaccatctcttcgttccgggtccggttaacataccggaacccgttattcgagccatgaaccggaacaacgaggattaccgttccccggctattccggcgatgacaaaaacccttctcgaagatgtcaagaagatattcaagactacgaccgggactccttttatgatcccaacaacaggaaccggtgatgggagagtgcacttactaatacgttatcccccggtgaccgaatcgtatcgttcctcattggacaattcagtcttctttggatcgatcaacaacaacgtctcaaattcaacgtcgacgttgtc

SEQ ID NO: 37405 - DNA, 422 bp, Gossypium hirsutum
  Clone ID: LIB3165-016-P1-K1-E3
cccacgcgtccggaaaaactaaacataataaagtttctcataacattcttcgacttgctgcagtgattagcccaaagataaacataaccaaaaagaaaaatggcttctgcttccgctactctcctcaagtcttcacctattatcgacaagtccgagtggattaagggccaaaacctccgccacccttcggtttgttttgtacggtcacaccctacatcggccgcctttaccgtccgtgctagttcatatgccgatgagcttgttaagaccgcgaaaactgttgcatctccaggtcgggtattttggccatggatgaatcaaatgctacatgtgggaagcggcttgcctcgattggtctcgagaataccgaggcaaaccggcaagcttaccgtacccttctcgtgtctgcccctggcctcggt

SEQ ID NO: 37406 - DNA, 423 bp, Gossypium hirsutum
  Clone ID: LIB3165-016-P1-K1-E4
gtccgcccagacttcactcccctctcacagcaacacttttagcactatccacacttgctttctgggcgtgtgccttccagtacatccccattttaaagccttggaaagcaggcagacagacagcattaaggaatctcgaatctcaactgggtatggaaattactgcaacggctatgactatgactgtcactacgggattacagtttgctggttctctcaatcataaacagacttcttttttaggagttcccttgaggctgtcaatgtcaaaccctcagccatctttaccctctgtcttcctcaagttcaagccaaagctcgcacccgaacggaagatcgtgaggcccgccattctcgcattaggaagaagattgaagggacaccagatagaccaagactgtgtgtcttccgctcgaacaagca

SEQ ID NO: 37407 - DNA, 445 bp, Gossypium hirsutum
  Clone ID: LIB3165-016-P1-K1-E5
aaaacaggcgggacccacgcgtccgaaaagcagctcccaagaaagtctcgaaacgatctcttgaccgccctctatggtacccaggagcagtggcgcctgattggctcgatggaagtttggtgggtgattacgggttcgacccgttcgggttagggaaaccggcggagtacttgcaatatgatttggattctttggaccagaacctggctaagaattcggctggtgagataattggaactaggaccgaggttgccgacgtgaaggcgacgccgtttcagccttacagcgaggtttttggtctacagaggtttagggagtgtgattgatccatggacggtgggccatgttggctacgcttggtgcacttaccgttgaatggctcactggtgttacatggcaagatgctggcaaggtggagttagttgagggttcatcgtatctcggc

SEQ ID NO: 37408 - DNA, 425 bp, Gossypium hirsutum
  Clone ID: LIB3165-016-P1-K1-E6
aaaaagatcaaataattctctgtttcgatggttttagagaactgaagaagaaccaatggggggttaatataaaaaatctgaaaatttataaaacaacaataaagataaaaggaaaaaacgggtggtgatttgagtttgatttgcagttagccaaagcaaagcgatgacacttcaagcaacttcctgcaactttggagccatttcatctctgcttcgtcctcctaaaatttcccgtcatcgtttcgtgatcagagctgaagtggaaccgtcagagaaatctgtggaaatcatgaggaaatctcagaacaatatgcacgtcgctcaggaacctatttctgtatggataagggagttacttctgttgtaatcaagggattggcggagcataaagattcgttgggtgcgccactttgcccttgtaggca

SEQ ID NO: 37409 - DNA, 391 bp, Gossypium hirsutum
  Clone ID: LIB3165-016-P1-K1-E7
cccacgcgtccgcccacgcgtccgatttgtggtaagcgctccggagaatccgagagacgcccgcgatgatccgaaccaaaggagaagcggggaccgggaatgttatcgaagctgttaggcatgtcagatccgtgatgggggatattagggcccttaggaacatggatgatgatgaggttttcagcttcgctaagaaaatccagtctccctacgatttggttatgcaaacgaagcagctggggaggttgccagtggttcagttcgccgccggaggagtggccacaccggcagatcggcgttgatgatgcagttgggttgtgacggagtgtttgtcggatctggggtttttaagagtggtgacctcgtttagctgtcccgagctatttgttag

SEQ ID NO: 37410 - DNA, 417 bp, Gossypium hirsutum
  unsure (1)..(417): unsure at all n locations; Clone ID: LIB3165-016-P1-K1-E8
ctctgatttctcaattctcaattctcttctattgtggtagccaccaaaccaaagcatgggtgtctctctaagttcagtcttcgggtttaatttaaagtatgtctcgagatcctgtattggaggagcttcggttcttaaggccaaccccagtgtatctccctttcaaatgtatggctccgggggacttgtacaccaaaaaagaaggggattatgtctttcagttgaagacagagaccgactagtcgcgaatagcagcataaaggattctggtgatgctgagaagctggtttctatgatcgagtttcagccctgaatcccccatcattggataatgaatcgcgctcccctacctctggagcctagtaatggttcaatggtttcttcaactccgatgcangaggcctcatcacctccaaa

SEQ ID NO: 37411 - DNA, 380 bp, Gossypium hirsutum
  Clone ID: LIB3165-016-P1-K1-E9
cggcacttgcacatgggttagtcgatcctattatacgggggaagcccgtccgacagcgcgtccagcgcgagcttcgaaagggaatcgggttaaaattcctgaaccgggacgcggcggctgacggcaacgttagggagtccggagacgtcggcgggggcctcgggaagagttatcttttctgtttaacggcctgcccaccctggaaacggctcatccggaggtagggtccagcggccggaagagcaccgcacgtcgcgtggtgtccggtgcgcccccggcggcccttgaaaatacgaggaccgagtgccgtccgcgcccggtcgtactcataaccggatcaggtcttcaaggtgaacagcctttggtcaatggaacaatgt

SEQ ID NO: 37412 - DNA, 413 bp, Gossypium hirsutum
  Clone ID: LIB3165-016-P1-K1-F1
gcctcccacctccctccctcgtgactcccctttctttcttcttctcccaattccttccccgtggctcccatgactctctcttcttccctttccttttccttttccttcctcccattattaaatcactacactcgtcatcatcatgcggtcgccgcagggtttccgcaacggcgagaccccttcccctcataaccgaatccctacgcctcacttccacaacaccgtcacgctccgtaaactcaaacgcttcaactcactgattctcgtcttccgagtcaccgctttcactttctcctcgcttcctccgttttcatggtcactaactctcgcggctccggttcccctcattggttcgattatgacgctttcagattcgttttcgccgcgaacgcaatcgttgctctatattcatt

SEQ ID NO: 37413 - DNA, 416 bp, Gossypium hirsutum
  Clone ID: LIB3165-016-P1-K1-F10
gccacgcgtacggagaaaacggaggcattatttgtttctgaagggctcgactttagcaggctgaaaaagaagaagaagaaaccagtagaggccaatacattcactgacgaaagtggggatgcaggagatgattttgatggtcatattgatggggatgaagaaggtgaaggcattgtgttgcgacaaccgtgcccttgagatggaactgaccgtgattatatatatgatgagctactcggccggctgttcaacattctccgggagaacaaccctgagcttgctggacacagacgctcactgttatgaggcctccacaagttcttcgtgggggcaccaagaaaactgtatttgtaaatttcatggatctatgcaagacaatgcatggacaacctgaccatgtgatggccttcttgctt

SEQ ID NO: 37414 - DNA, 420 bp, Gossypium hirsutum
  Clone ID: LIB3165-016-P1-K1-F11
gttcgttcctttcctttcctttccttttctctctctctagcaatggagtcgcgatggttagcacgcgcttctgttatcaccggcttacctcagctcaggccgaagctttcgccggggattgtcaacgtttcgtatgcttcggctaagccgatcggagccgtcggtgaaggcgggaacgtcatatggcggaggcaactaaggccctccttgctactcgaatgctcgtcggttagcaagcgagaggttctgaaaccggtttcggctgccgcgtcgtcaccggccgagggaggaagcgttccgccggggaggggaagatcgctccggttggattcttcgagaagtatcctgctcttgttaccggatttttcttcttcatgtggtacttcttgaatgtaatattcaacattctcaacaagaaga

SEQ ID NO: 37415 - DNA, 426 bp, Gossypium hirsutum
  Clone ID: LIB3165-016-P1-K1-F12
cccacgcgtccgcaagtttgttgtaaactaagctagaaccagcagccaacatggccgcagtagcagcctccaccgctgccgcctcccttggcgtctctgaaatgctcggtaaccctctgaatttcagtggtggagctaggtcatcggctccaacaccatccaactcatccattttcaagaccgttgctcttttctccaagaagaaggccgctcctccaaagcccaaggctgctgctgtcgccccggccgatgaagagctggctaagtggtacggtccggacagaaggattttcttgccgaaggtctgttagacagatcggagatcccagagtacttgaacggagaagttcccggagactatggatacgatccgtttggtctgagcaagaagccagaagactttgcaaaatatcaagcatatgagtt

SEQ ID NO: 37416 - DNA, 413 bp, Gossypium hirsutum
  Clone ID: LIB3165-016-P1-K1-F2
atctacagttcacttctgcttctgcctgcctgtctttaatggcttactacaaactctgagcccgctttctgctctacactcttcttttccactcaacattcaccactgcttgcaattcatgcaaacccaaacctccaccatgccctccaccagcaacccctgcttattgccctaaggacacattgaagctcggtgtttgcgctgacgtgcttggacttgtcaacgtgattgtcggaacccctccttacagcaaatgctgtgctttgcttcaagggttggctgatttggaagctgcctttgcctttgcactgccattaaagccaatgtacttggaatcaacctcaacatcccagtttctcttagtctaatccttagtgcatgtcagaaggaggttcctccaggcttcaaatgtg

SEQ ID NO: 37417 - DNA, 396 bp, Gossypium hirsutum
  Clone ID: LIB3165-016-P1-K1-F3
cgccacccagctgctgcaaatctctctcgaaacatttcctccggttccaacttcagctcaggaatatgtcaggggaagaagttgcggttgcccaacccgaggcggcgcctgcactcggtgagccaatggacatcaacacagccttgccccttgtggttaggaagtcacgagctcacggtgggctcgcacggggattacatgaagctgctaaggcaattgaaaagcacaatgcacatctttgcgttatagctgatgactgtgaccagccggattatgttaagctggtcaaggcactttggctgatcataatgttaaagtgctacgtgccccgagcgcaaaatcacttggcgagtgggctggtttgtgtaagatagactctgagggtaaagcacgaaa

SEQ ID NO: 37418 - DNA, 425 bp, Gossypium hirsutum
  Clone ID: LIB3165-016-P1-K1-F4
gttaagtcacgcctctctcttaaatctctgttcatttcttcttcacttcttcttaaaaccgctgaaaaggactgcctcaaacaaggaagacaatggcgttttctgagttcaggccactagacgagaactcgctcatcgaatacattaaagccacgccgtctttgtcatcgaagatcgtcgacaactatgatggtttaaagattaaggaagttggagatggcaatcttaatttcgtctacatcatcgttggcccttctggttcttttgtaatcaagcaggcacttccctacgtacgactattggggaatcttggcccatgactaaggaacgagcatatttcgaagcgttggcgttaaaacaacatggtgcgttatgccctgaacatgttcctgaagtttatcactttgaccgtaccatgtccttga

SEQ ID NO: 37419 - DNA, 428 bp, Gossypium hirsutum
  Clone ID: LIB3165-016-P1-K1-F5
atgactggtcaggctatcttgctgttgctgatttggttcagaaagcacgtctgaagcttgaccgcgtcgctctgcttccacgcttcgagtcaaccgaaaattccgcttcccaagtgggtaacgaagattggcgaatcccaatcaagtatcttctttgcggatcgttcaggacagcattatcagcaatgtctatcactggctgttgatgatcttgcagttcttgatggaaagactccggttcaagtctaccagggcttttgcgagagctttaagtccacattctcacctttcatgggttctccatcacgggcatctcaatgggtcttggaccagatggtgaactccggtatccctcacaccacaagcctgccaagagtggcacgattactggagtcggggagttccaatgttatgacacaaacatgctt

SEQ ID NO: 37420 - DNA, 399 bp, Gossypium hirsutum
  Clone ID: LIB3165-016-P1-K1-F7
cccacgcgtccgaaatcagttgcttcacatttttctctacaaccatggctctttctgcgcggatcattcgccggtaaggcagtgaagttctccccttccacccctgaaatccggggaactggccgtgtttccatgaggaaaaccaccaagcctgttccttctggtagcccatggtacggtcctgaccgagttttgtacttgggtccactttccggtgagccaccatcttacttgaccggtgagttccctggtgactatggttgggacactgctggactctcagctgatcccgagcctttgctaggaaccgtgagctcgaagtcattcactgcagatgggccatgttgggagctcttgggtgtgttttccctgagctgttggctaggaacggtgtcaagt

SEQ ID NO: 37421 - DNA, 422 bp, Gossypium hirsutum
  Clone ID: LIB3165-016-P1-K1-F8
gatctccaacgttgaaaccttatctacaaagtgtagaagctctcattcactaagcttgggctttcgctttcaatattatatcctataaggaattgtttgataataaaagtatggtataaaatctagtgttttctatatatgaatgtgatcccttggcggcaataatgtccacggcttcggtctccggcttctgcctctcttccaataccacctctccttctaactcactccggcaacccacattgcggcggccctctatcatcgccaacctcaactcttccacttctcctcctaactcatccgaaatcaaccagttttcgcagcacctactcctttgctcactccttccaattggaaagaaaccatgggagacgagtcatacgaggaaagccatgaagctctcaagaaactgctcaatgaga

SEQ ID NO: 37422 - DNA, 404 bp, Gossypium hirsutum
  Clone ID: LIB3165-016-P1-K1-F9
cataggccgctgtctttcccttttttatcaaaattcccggctagaatcgacgcgtcggaagctcatagcccaagcttccatggggttagcttcggccgttcaccagggcggtggcattcgaatctctcttaatttccatctcagagttgcctcagtgtcgcctacggttcaattgcccagatggaccggattccgcttctcaaaccatcgtgtctcccttgtccattcagtaagtcataaacgccgcacgatatgtttcccagttgctcgctccaagggaatggacaggaggataatttgtctagagaagaggagaggagagcttcaaattcttatgctgattcccaggagaaacttcagaaaagtgaagcttatgcatcatctggttaaaactgttgcttttt

SEQ ID NO: 37423 - DNA, 397 bp, Gossypium hirsutum
  Clone ID: LIB3165-016-P1-K1-G1
cccacgcgtccggaaacagaatttgtaactggttttcctcttgcctagcgggcaaggatggcggtccgtggaaaagatgattcattcggatccgcatgaaagcccaactccattgcattgccagaatccatgttgtatatttgaaagaagttgacctccttgcttctctcatggtacaatcctcttcccgctgagccccctttctcctcggtccacagagacaaaatggaatgtaggactaggactggcgccaacagttaatcacggaagaaaggactcactgagccgggatcactactaatactaatctaatctaactaatactaatctaatactaatagaatactaatctaatactctaatactaatagaatagaaaaaatagaatagaaaatac

SEQ ID NO: 37424 - DNA, 418 bp, Gossypium hirsutum
  Clone ID: LIB3165-016-P1-K1-G10
aaaatcagttgcttcacaatggcctctacaaccatggctctttcttccccatcatgcgccggtaaggcagtgaagttctccccttccacccctgaaatccggggaactggccgtgtttccatgaggaaaaccaccaagcctgttccttctggtagcccatggtacggtcctgaccgagttttgtacttgggtccactttccggtgagccaccatcttacttgaccggtgagttccctggtgactatggttgggacactgctggactctcagctgatcccgagacctttgctaggaacgtgagctcgaagtcattcactgcagatgggccatgttgggagctcttgggtgtgttttccctgagctgttggctaggaacggtgtcaagttcggtgaagctgtatggttcaaggccgggtc

SEQ ID NO: 37425 - DNA, 349 bp, Gossypium hirsutum
  Clone ID: LIB3165-016-P1-K1-G11
cgacgtgctgatcaagagcacaagaaggtttttttgattaattacttaattaatcaggcggttatgataactagtgagcacggattgatgaatgttccattaggttttatatatgtatctaatgtgtatgtattatgtgtactactatgcttcactaggagtaaaggcaaatctggtgtgaaactaagtcaattatgatgactagtgagcatggatattgatgaatgttccattagtttttatatataatatctatatgtattctatatatttctctgcttcactgggaataaaggcaatctggtattgaacaaaatattatgaataaaactagaagcttatattcttc

SEQ ID NO: 37426 - DNA, 428 bp, Gossypium hirsutum
  Clone ID: LIB3165-016-P1-K1-G12
agagaaatctaaaattctctcagagctcttttctgtggccatcctggctcgtcccggggcaccaccgccttcggccacacgagcttcacgcgcctcacgcgccaccgtctgagccattgtgcccgacagctaatggctttcaaaaccctattctttttgcaacgaatcaaaaggtatcgaactctttcgacagaacaagcgttaatttggcttcaactacagcctgatctgaggcctggaatcacggcgttgatggtggacatgatcgatggtggcctcgatttgggagctggacgacgtccctgaaccttccagaattagcggcggtttgaggagaaagaaggcagaaaccctagggtttcctaccttggtgtaatagtttgggccagttgggccactttagtcctgggctaggtagggtgtaatgg

SEQ ID NO: 37427 - DNA, 388 bp, Gossypium hirsutum
  unsure (1)..(388): unsure at all n locations; Clone ID: LIB3165-016-P1-K1-G2
acccttccgtaaaaactaaaacaaactttttagttctcaactttttcaaattcaccatggctgacaagcggggaaactggcaatgcgctgacaggagccagtgtgtgaaaaaaggaaacagcttggtcattgagactggagagagctacatcaacaccctagtggtcgagcctcttgcagaaaacgattgcaagtgcaagtgcggaactagctgcaactgcacaaactgcacatgtggcagtcactaagcagacatatagaatgatgaagtttgggacctaaaaagaataaaagttgggttgaatatttgtgtcttttggtgtaagttgagtgtgttttcttgtctatcntgccgatgattgtctatgtctctcattttatacaatga

SEQ ID NO: 37428 - DNA, 435 bp, Gossypium hirsutum
  unsure (1)..(435): unsure at all n locations; Clone ID: LIB3165-016-P1-K1-G3
acccttccgattccttccctcctttctaattttcctctgattcaaacaggaaacaacgaactcgccttgaaggttttttttaaaaccagaaaaaatagagaatagaaaattctaagataaaattatgagtaaatcttggtttgacaaaagctacaatggggttgggcccaacgatgatttctttgatgacgtaataaagtatttggatttgccattggaagacgttgaaggacctgatggcaatggtagtacagaggacgtaaataattttcttctgcccgtggaagagaacaatgatggtggtgaaactgggattgtgattttgaaaacttagagccgncacctaccaatgttttggccagcttatcttccgggttctatggtgatttcttcagtgatagtttggcccaaaactttaccgattcttgtgatgga

SEQ ID NO: 37429 - DNA, 415 bp, Gossypium hirsutum
  unsure (1)..(415): unsure at all n locations; Clone ID: LIB3165-016-P1-K1-G4
cccacgcgtccgcccacgcgtccgacccaccattctttcattagccctcaaccatacgccgagagatggcagccacttttgcaagcccatcaaccgtcgttggcctcggtggcaccgccacctctatgtcatccccgccgatgaaaacccgcctctcttcagggtttttgaaatctggggtgacggctaggaaccctntgaggctggctggtgcttgtgggggcaagtttacttgcttcgagagagactggctacgaagggactttaacgtgataggatttggactgattgggtggatagaccatctagcataccggccatcgatgggaagagcttgactggccttttctttgaaagcattggaactgagctcgctcactttcctacacctncgcctcttacctctcaattctgg

SEQ ID NO: 37430 - DNA, 418 bp, Gossypium hirsutum
  Clone ID: LIB3165-016-P1-K1-G5
gagtatgtaagtagagaatcatgcctgatgttatttctattactgctctgaattggtcccggctgccagaagcaatttgatttaaagcatcttcttaaccaataattgtgtttcttcaaataagcttttggtattttgctgctctctccttgaaatattggatcaactgacatgttcgttttgaaattggatgcttaggatttgtttggcctagatgttttataaaaaactgttgttcaagtagatctcttctagtgctgtaaaagattaaattaaaaatatttaaaaaaacctaaacttattaaactgagggttttgttggtacaatgtaagaatgtggcaagaaggttggaggcagttcactcgatgggctgagagttgtaagtggtagtagatagattggtcccctcttgttatg

SEQ ID NO: 37431 - DNA, 432 bp, Gossypium hirsutum
  Clone ID: LIB3165-016-P1-K1-G6
ccggccactatctttctctttgaaaaatcttagcataataaaatcccgacatggaaaccgctggtggttcaatccttcacactctcgccttctccagtaacaccgcaactgcaactattaacaataaccaccatctttttctgcctcctaaaaccaatccttcattttcctctactttcccgaggaacttcaacttccatggaaaacccctgcaattcaatggcttcactgctttcagctcgccttctagtgcccagagccaaaacccacctcaggaactagctgttcttctcgaagttgatggggcattatggatgcatatcgtttgggtaatcgccaagccttcaatttagcatttcaaaagctcgggcttgactgcgcaaactggactgaacccgtgtattcagatcttgtaaggagaagtgctggtaa

SEQ ID NO: 37432 - DNA, 408 bp, Gossypium hirsutum
  Clone ID: LIB3165-016-P1-K1-G7
catcatcactcatggctatcgaggcttggtttttggatgaaagcaaagaagaccaaacgctgcctcatcgacgcaaccccaacgaacctgtttcgttggagcacttggcagagctgggagtgttgtattggcatttgaaccccgaggattatgagaacgatgaagagttgaagaagattagagaagccagaggttataattacatggatttgcttgatttatgccctgagaaagttgccaactatgaggagaaactgaggaacttttacaccgagcacatccatgccgaccaaggatacgctactgcttggaaggcagcgggtattttgatgttagggacaaggatgaccggtggattcggatttggatcaaaggaggtgatcttattatattgcctgctggaatcta

SEQ ID NO: 37433 - DNA, 382 bp, Gossypium hirsutum
  Clone ID: LIB3165-016-P1-K1-G8
gtgagactcttttgtatacctgtagcatattgttatagtaagcagtaatagcaatgggcggctccatgatctcatcggcaaccattgccaccgtgaaccgctcctccccggcacaggccaacatggtggcccccttcaccggcctcaaatctgcctctgctttcccagtcaccaggaaggccaacaacgacatcacttctcttgcaagcaacggtgggagagtgcaatgcatgcaggtgtggccgcctcttgggaagaagaagttcgagactctctcatacctgcccgatcttatcccgtacagttggctaaggaagtagattaccttcttcgctctaaatggattccttgcttggaattcgaattagaagagggattcgtg

SEQ ID NO: 37434 - DNA, 418 bp, Gossypium hirsutum
  Clone ID: LIB3165-016-P1-K1-G9
gttccatgtgaacggcacttgcacatgggtttttcgatcctaagagacgggggaagccggtgcgacagcgcgtacagcgcgagcttcgaaagggaatcgggttaaaattcctgaaccgggacgcggcggctgacggcaacgttagggagtccggagacgtaggcgggggcctcgggaagagttatcttttctgtttaacggcctgcccaccctggaaacggctcagccggaggtagggtccagcggccggaagagcaccgcacgtcgcgtggtgtacggtgcgcccccagccgccttgaaaattctgaggaccgagtgccgttcgcgcccggtcgtactcataaccgtatcatgtcttcaaggtgaacagcctgtggtcaattgaacaatgtacgcaagggaagtcggcaaaattgat

SEQ ID NO: 37435 - DNA, 420 bp, Gossypium hirsutum
  Clone ID: LIB3165-016-P1-K1-H1
ctcttattggataaataaagaagagaagtagtttcaaagatgattcagctcagtattaagagggttcctactgttgtttcgaattatcaaaaggatgaggcggaagagactgctcgccggagcggtggatgtgggaaagaattgccttagaaactgttgcatttcaggagcaaagcttcctttatatgctttcaagaaggagagtgaaaaagatgcatttgaaagtgataacaaagagcctccggttgcttttcttgattctctcgttcttggggagtgggaggatcgcatgcaaagaggctctttcgatatgatgttactgcctgtgaaaccaaggtgattcctggtgaatatggctttattgctcagctgaacgagggccgccaccttaagaagaggccaactgagttccgtgtagat

SEQ ID NO: 37436 - DNA, 326 bp, Gossypium hirsutum
  Clone ID: LIB3165-016-P1-K1-H11
tcgacggcttccatcaacggttggtgccttacctcctcttcttcctccaccaccacctccgctttttccgctcgtcgacgacctacattgcggccttcggtcgtcgctagccttaactcttctccttctcctccgactcttatccaagaccgcccggttttcgctgcccctgttcctttgctcaccccgagagaagagatgggaaacaagtcctacgacgaagccattgaagctctcaagaaacttctcagtgagaaaggagaacttgaagctgtagcacctgcaagggtagatcaaatacagcagagttaaacacaacatcagct

SEQ ID NO: 37437 - DNA, 412 bp, Gossypium hirsutum
  Clone ID: LIB3165-016-P1-K1-H12
atttgctatgcacatttggcagcctcacaggtgggtacattcatgaagtttgaagataccgcagagacatcctcgagccatggtggagttactgcacccggagccatttctgtccctcagctgccgaggttgaaggagaacgtctgcaattccatgttcttctgctgagcccccatgttttgtataggcttttggttgttaccaaaacgactgaaacgtttttaagttatatgaaagttgaaaaaaaaagtagggttataattgatgatgtgatggtggttgaaacatcatcccatttggggttttgccctactgtatgtaggatatatgaaggtatgtttgactagcacttgttaaatggctttcgcctctgtagcacctgtaatcctgtttggtgataatcaatgcatag

SEQ ID NO: 37438 - DNA, 422 bp, Gossypium hirsutum
  Clone ID: LIB3165-016-P1-K1-H2
atcggttccacgccgaacaccaccgtccaagattacaggaacccgatgtttttaaagctggggcgattgggagcctctggtatatttattgggcgaccagtggtgttctcattagctgctgaaggagaagctggcgtgaggaaagtgctttcgatgctgcgtgaggagtttgagctaaccatggcgttgagcggttgtcgttctcttaaagaaatcactcgtgaccacatcatgacagaatgggacagtcctcatcctcgtccggccccgagactgtagagccttatatattatgggctggaactttagcctagcaaatcgcaagatgaacttagtcggagctcaagagatatatatagcatttgcattgcattaatggcataaaattactgttttttttcttctttgggaacatgttactg

SEQ ID NO: 37439 - DNA, 431 bp, Gossypium hirsutum
  Clone ID: LIB3165-016-P1-K1-H4
cacacttgcggttgcgcttcaagagtgttaagttccttcaaaatgctgacaataaccaccgcctgcgccttcgcctccatatctccaccaacaacacctaacctccaactaatcaaccgccgtcacttgctgcttctcacttccctctccttatcttcattctcagtctcagattcggtggccactgctcgtggccttctccagatgcccccacctcgcctcactaacaggtactttttggtgagggctggggagtcccaatatgagagcctcggaataatcaacaccaaccctgtagcaaaacttctgttgatagtgggttatcagacaaggggaaaaaacagactctgaaatctgctttggaattgaaggctatgggggcctgtgaaaggaattgctggatttggccttctattactcaaagagcttac

SEQ ID NO: 37440 - DNA, 471 bp, Gossypium hirsutum
  unsure (1)..(471): unsure at all n locations; Clone ID: LIB3165-016-P1-K1-H5
ccgggacatggaacgggccggacccacgcgntccggagatatagagaaagcacctgaaaacgcanaaaccatggctctctgcttctnctcctcaagacttgaccggttttagacaagtctgagtgggttaagggtcacacccttcgccaaccttccacttctgcggtgaggtgccaccctgttgcaccctctggactaactgtgcgtgcaagctcatatgccgatgagcttgtcaagactgctaaagctattgcttctcctggccgtggaattttggccatggatgagtccaacgctaccttgggaaacgtttggcctcaatcgggctagaaaacacagaggctaccgccaagcctacaggacgttgcttgtttcagctcctggccttggtcagtacatctctggtgccatcctctttgaggaaaccctctatcaaaccacaattgatggcaagaagatggntgatgttct

SEQ ID NO: 37441 - DNA, 423 bp, Gossypium hirsutum
  Clone ID: LIB3165-016-P1-K1-H6
ccaccatcacccccaaaaaacaaagcaaattgttgattatggcaacacaagcacttgtatgatcggctcttacctactcagtggagactgcaaggcagattcttggagctaaacgacaaattgggccttcaaggaaaggatcctttgttgttaaggcagcttcgactccacccgttaagcaaggagctgatagacctttatggtttgcatctaaacaaagcctttcatacttggatggcagccttccaggtgattatggatttgaccccttgggactctcagaccctgaaggtccaggagggttatcgagcctaaatggctagcctacggtgagatcatcaacgggcgttatgctatgttgggtgcagtaggtgcgattgcccctgaaatacttgggaaggccggtcttatcccagcagaaac

SEQ ID NO: 37442 - DNA, 415 bp, Gossypium hirsutum
  Clone ID: LIB3165-016-P1-K1-H7
gctgataaccccaccaacgttcagctcctttgtatgtacaacaaggaagagaaccctcgggttccgatcattgtcaccggtaacgatttctcgacgctgtacgcgccgctcatccgtgacggtcgtatggagaagttttactgggcacccaccagggaagataggatcggtgtttgcacaggtattttcaggaccgacaatgttcccgttgatgacattgttaagcttgttgacaccttcccgggccaatccattgactttttcggtgctctgagggccagagtttacgatgacgagtgaggaaatggatcggagaggtaggagtcaatagtgtcgggaaaaagctcgtgaactcgagggaagggccaccatctttcgagcaacctacgatgaccattgagaagctgttggagta

SEQ ID NO: 37443 - DNA, 416 bp, Gossypium hirsutum
  Clone ID: LIB3165-016-P1-K1-H8
gtggtttgtgagataaaaacaaaaaaaaattcttatacaaacacacacacatcgaaaggcagtaaaaaaaggttggaattgttactctataagcgccgtctacaaatctcttctctatttcacttcgaagcggagaagaaaatagctcaaatatcgaaaaccgtaataatgggaggaggtggtgctggtggttcagtgaaagatgtgcagtccaagggtgagctcgatgggttacggcagagtggcgcaacgcttatccttcacttctgggcttcgtggtgtgaggcttcaaaacagtggaccaagtgttttctcaccttttcaccgatttccccaacttttactttcttagggtagaagctgaagaaccacctgagatatttgaggaatactcgggttctgcttggccttttttt

SEQ ID NO: 37444 - DNA, 408 bp, Gossypium hirsutum
  Clone ID: LIB3165-017-P1-K1-A1
cccacgcgtccgaactcattccccgcaaaaccttaacatttcttgatctcaccttccctcatttcgtcaaaaaaatatctccgcacccaaagctcgtaatctctctctattcaccatggcaacttctacttcttctttgctccaatccaacactttgaacttgaaacactatttcccccttcatttgcctcttccttcccctcctcgcctatctaatttcactggaactttggctttcaacggtcaacgttcggcaaagttcactgttaaatgcttcttctcgtcggagcagaagaaacatttgacgagctcgagtttgggctccaacaaccagttgagttccagctcaaatgacaaaaacccattcgacattattgctcaaacaatgttaaaagctttgaacgcgtt

SEQ ID NO: 37445 - DNA, 407 bp, Gossypium hirsutum
  Clone ID: LIB3165-017-P1-K1-A10
cccacgcgtccgacataaccaaaaagaaaaatggcttctgcttccgctactctcctggagtcttcacctattatcgacaagtccgagtggattaagggtcaaaacctccgccacccttcggtttgttttgtacagtgcaaccctacatcggccgcctttaccgtccgtgctagttcatatgccgatgagcttgttaagaccgcgaaaactgttgcatctccaggtcgtggtattttggccatggatgaatcaaatgctacatgtgggaaacggcttgcctcgattggtctcgagaataccgaggcaaaccggcaagcttaccgtacccttctcgtgtctgcccctggcctcggtgactacatctcgggagctatccttttcgaggagactctctaccaatctaccat

SEQ ID NO: 37446 - DNA, 409 bp, Gossypium hirsutum
  Clone ID: LIB3165-017-P1-K1-A11
cccacgcgtccggtaagcagtaatagcaatggtctcctccatgatctcatcggcgggcggtgccaccgtgaaccgctcctccccggcacaggccaacatggtggcccccttcaccggcctcaaatctgcctctgctttcccagtcaccaggaaggccaacaacgacatcacttctcttgcaagcaacggtgggagagtgcaatgcatgcaggtgtggccgcctcttgggaagaagaagttcgagactctctcatacctgcccgatcttactcccgtacagttggctaaggaagtagattaccttcttcgctctaaatggattccttgcttggaattcgaattagaggagggattcgtgcaccgtaagtactcgagcttacccacgtactacgatggacgctactggacc

SEQ ID NO: 37447 - DNA, 403 bp, Gossypium hirsutum
  Clone ID: LIB3165-017-P1-K1-A12
cttcgctgaattttcgtgatcgtcgagaaagaaaatgatgggaaggaaattcttcggcggcggaaattggaaatgcaatggaaccactgaggaagtgaataagattgtgagtactttgaatgctggagaggtgccttctccggatgttgttgaggttgtggttagccctccatttttgttccttcctttggtaaaaacttcactgagacctgagttccaagtcgctgcacaaaattgttgggtcaagaaaggaggtgctttcactggtgaagttagtgcggagatgcttgtcaatttgagcattccttgggttattattggtcattctgagaggagacttattttgatggagtcaaatgagttcgttgcggataaggttgcttatgcactttctcaaggcttg

SEQ ID NO: 37448 - DNA, 376 bp, Gossypium hirsutum
  unsure (1)..(376): unsure at all n locations; Clone ID: LIB3165-017-P1-K1-A2
cccacgcgtccgcccacgcgtccgnttcagntttcttttgtgttttaagatatgggaactcaagggcctccagaaaatggttatggcagaagcaacagcttggaagagaaatcagcaaaggagaaagcaatcgatgagtggctgccaatcacctcatcaagaaatgcaaaatggtggtatccagctttccacaatgtcaccgttatggggggagctggtgtccccagtctccctaaccccatggcaaaactcggatggggtcctggggtgactgttctaatcctatcatggattattaccctatatacactatggcaaatggtggaaatgcatgaaatggttcctggaagacgtttcgatagataccatgaactgg

SEQ ID NO: 37449 - DNA, 316 bp, Gossypium hirsutum
  Clone ID: LIB3165-017-P1-K1-A3
agcctctcctctctctttctctcttcgcctcctttatgtttttctgccaccacttccaccacgcttggccttcttaaaaccaccgcctccaccacctcttcctccgcctcccgctcttctgcatccctcatccgccttccttccacgcgccgccacctcaagtcctctcctctcatccacagcctaggcttctcctccgctgcttctggggactctctgctttccctccatgtctcctccaaagttcgatctttcaagggaaaagggtcaagaggggttgtttcaatggccaagaagagtgttggggacttgactg

SEQ ID NO: 37450 - DNA, 412 bp, Gossypium hirsutum
  Clone ID: LIB3165-017-P1-K1-A5
cccacgcgtccgcccacgcgtccgatgttgagatgaagggtatcacagctgaagatgtgagtgctgcattcagaaaggcagctgaggggccattgaagggcgtattggatgtgtgtgatgttcctcttgtctcggtggactttaggtgctctgatgtttcctccaccattgactcttcattgaccatggtcatgggagatgacatggtcaaggtggtggcctggtatgacaatgaatggggttacagccaaagggttgttgatttggcacacttggtggcaagcaagtggccaggcatgcctgcaggaggaagcagtgaccccttggaggatttctgcaagacaaacccagctgatgaagaatgcaaagtttacgaggcttaaatgattgcaattttcattttttttaaaaa

SEQ ID NO: 37451 - DNA, 413 bp, Gossypium hirsutum
  Clone ID: LIB3165-017-P1-K1-A6
ccaaaactcacttctcttggctctcatgcttcttttctaccatcccttgcgactaggcccgagagtttttcaacaaagctaggaacaagcaccagctctcgcttcattaccaaggctacagccgctcctgggaccaaggatgctccgagtgatgagcgagttcagaaggttcacagcattgaggaattcgacgaagctctcaggaaggctaaaaacaggcttgttgtggtggaatacgccactagcttcagctatcatagcagtaaaatttacccgtttatggtagaccttagcaggacatgcaacgatgtcgaattcatcctcgtgatgggtgatgaatcggacgagactagggagctttgcaaaagagagaaaattacgaaagtcccgcactttagcttctacaagagcat

SEQ ID NO: 37452 - DNA, 264 bp, Gossypium hirsutum
  Clone ID: LIB3165-017-P1-K1-A7
gcatgttgtatcctctgctcattagttctgtttgtattcttgtctgtttgatcacaaccctatttgctaccgatttgttcgaaatcaaggttgtcaaggaaattgaaccagctttgaagaagcagctcatcatctccactattcttatgacagtaggaattgcaattgttacttggattggtgtgccatcttccttcaccatttacaattttggggttcagaaagttgttaagaattggcaactatttttgtgcgtgggtgttg

SEQ ID NO: 37453 - DNA, 333 bp, Gossypium hirsutum
  Clone ID: LIB3165-017-P1-K1-A9
gcaaaaataatggccgcttttgtttcgttgcaaagctcaatgactgctcgttctctatcctcaaactccttcttgggccaacgtctctcaattcctccttctctctcccctcttcacatcaaaccaagagagaatccatgtctcattgtagtgaagcttaaacgatgggaacggaaggaatgtaaaccgaacagccttccagttttgcataaaatgcatgttaaggttggagataccatcaaagtaatatcgggtcgtgataagggcaagattggagagataagcaagatcttcaagcataacaccaccattgtagtgaaagatataaacctg

SEQ ID NO: 37454 - DNA, 403 bp, Gossypium hirsutum
  Clone ID: LIB3165-017-P1-K1-B1
gcttcttttgttagaaagacgttagtagcggtttatttttaacgttactattaaggaaggatagggctatccttgcgcttcgctattcctaccgcgaatacattaactccgcccaagattaaaccaaaaccgggtttagtagtacaaaccgcttggaaccaaacggacctttttccttctcttcccaaacgaaatgattataagctacaagcagctaccacggacttatctgtggcgggagatataccggcggaggaggtggtggagcttccggcggagctgagcaaagagttgatgccgaagcacgtagcggtgataatggacgggaacgggcggtgggctcggcagcggggattggcgacatcagcgggacacgaaaccggtgtaaaagcgttgagggagc

SEQ ID NO: 37455 - DNA, 398 bp, Gossypium hirsutum
  Clone ID: LIB3165-017-P1-K1-B10
gtttttcatcttctacaacaactgtctgtgctttcttgttcatcaccgctttgttggcgggttcttgcatgattctctgcttctataggcagagactgaatatcgtgttctcgactgtttcgatgcgtttgagacccaaaaagagttgttctggagttgagtgctttggaggttttcacataaaacaacgatttttttatcttttcttgtttctaagaggggctcatacttgatacagctttcatagttttcgactttgtcacccttttttgtcatttgattttgtttaaatagttgtctacagtttttccgggtattttgaggggggttttagttgagttttaccgagttttgcttccaaaaatgttagagcatcgaaaacaaaccatgaatctgag

SEQ ID NO: 37456 - DNA, 369 bp, Gossypium hirsutum
  Clone ID: LIB3165-017-P1-K1-B12
cccacgcgtccgatgggttctcagggatcggttatggcgatgcttttgctgatgaggttgactttatcatcagcttccgacatgtccattatatcctacgatgaaacacatcccgacaagtcaacgtctagttggagaacagacgacgaagttatggccatgtacgaggagtggcttgtaaagcatggaaaaacatacaacggtttgggtgagaaagagaggaggttccagatttttaaggataaccttaggttcatcgatgaacataacgccgatgagagtcagagttttaatgttggtttgaaccgctttgctgatcttaccaacgaggagtaccgagccatctacctgggaatcaaagaacccaac

SEQ ID NO: 37457 - DNA, 412 bp, Gossypium hirsutum
  Clone ID: LIB3165-017-P1-K1-B2
cttttctaccagttttggttctcgaagcttctttctttactgaacgctcccagacctctgccatcggattctatcgccctcgacactgctctggacaaccaattatccaggtaagtcattccttgtctcttcaatccttcctttgctttcctgatttagggacttttttgaaacgacattcttcgaaactctggcttaattcttttatgtctaaaatgtatgccctaaacactgatttgtcctcctcgttattttgaaattttttgatgatactgagagcgtcaccttcgatctccacttgtcggaatcctctttctattccccactggatggcctgtaataggccagcgcttcttccgtgaaaggcgtggccactcaattattcatcagcaattgagatcccagaaaaatt

SEQ ID NO: 37458 - DNA, 414 bp, Gossypium hirsutum
  Clone ID: LIB3165-017-P1-K1-B3
ggcattcttatttctgaaaactgaaaatggctttcaccgccgccctctccacttccacgggcaggagcacctcattcgtccgccccaaactttaagcaggctcttttcgggctaaaaccccaaagaggtgggcgtcttacaatggcagtatacaaagtaacgctgctcactccggaaggacctcaagagtttgagtgcccagatgatttgaagatcctggacccggcggaggagaacgggattgatcttccgtactcgtgcagggctggtgcttgctcttcatgtgctgggagagtcaaagaaggcagtgtggaccagtctgaaaatagcttccttagtgatgaacaaacagaagaaggctttgttctcacttgcgttgctctcccaacaagtgatgtcgtcattgaaacacac

SEQ ID NO: 37459 - DNA, 411 bp, Gossypium hirsutum
  Clone ID: LIB3165-017-P1-K1-B5
cccacgcgtccgggaaaaagaaaggaaaatgttcgatcaagaacgagattgggatttctatctgggaaccgtatcgaacagtgcaagagactcgagtttcgctaacgatccagcctccgatccttctcttcttcacgccgtcaagaaactctgcgatttctgtagacaagaagagaaatcctctgaggatttggtcgctagggtttatcctcatatcaacaagctcttccaacgctctactgcttccctctctcaacctacctctcccaacggaattctcttactggtcattcttcaatttttccttgattttggagaggtggttctccatgatgctgaccctagtctgaggacatttttccgttcatgtttgagccgtgagttcgcagatcctgttgttgcagctgcaac

SEQ ID NO: 37460 - DNA, 409 bp, Gossypium hirsutum
  Clone ID: LIB3165-017-P1-K1-B6
aaagagcatatcttgttggctaaacaggtcggttttcctaacgtggttgtgttcttgaaggacgggaccaggtagatgatgaagagcttttgcaattagtcgaattggaggtgcgtgaattgctttctagttacgaatttcccggtgatgatgtccctattatttctggctccgcacttttagctttagaagctttgatggctaagcccagtattcctaggggtgaaaaccaatgggtggataagatttatgaacttatggatgctgttgatagttacattcctgttcctcaaagacaaacagatttgcctttcttgttagctgttgaggatgtgttttccatcacgggtcgtggtactgttgccactggtcgtatcgagagaggtactgttaagggtggagagactgt

SEQ ID NO: 37461 - DNA, 408 bp, Gossypium hirsutum
  Clone ID: LIB3165-017-P1-K1-B7
cccacgcgtccgcccacgcgtccggtttaatataaaaggggaaaggggtgcactcggcagaggaagtttggagaggaagaaaaaaaaactctgatacagaaaaaataatcttgtaaaattgacgaagatggtgttggcaaacaaggaaatggtggtctactgcttcgacactttgatcgcccattataacagcgaggaggctgctccgcccgctttcgatgagggccaacacccattgtttgtcacttggaagaaggttgtgaatggtggggagcctcgtctacgaggatgtatcggcacacttgaagcttgtcagttgattaatgggtttagggactatgctctgacgagtgctttgagggaccgcaggttccctcctattcaagctaaagaactgcctaacttaga

SEQ ID NO: 37462 - DNA, 408 bp, Gossypium hirsutum
  Clone ID: LIB3165-017-P1-K1-B8
ggcaaaatggcctctgtttgtgcttcttctgttattgcagccgttgccatctcatccccgagttcctagaggagtggatcagtagtgaggacaacaaaggcttctttccttacagggaagaaacttcgatcagtcaaaaagtacacaaaaccagcagcagcccgaacagttccggtgtgtgcagtggctgaccccgaccgacctctttggttcccaggcagtactcctcctccatggctcgatggcagcctccctggagacttcggttttgatcctctaggccttggatcagaccctgagaccttgagatggaacgtacaggcagagctcgtccattgcagatgggcaatgttaggagccgctgggattttcatcccagagttcctaaccaaaattggcattttaaac

SEQ ID NO: 37463 - DNA, 411 bp, Gossypium hirsutum
  Clone ID: LIB3165-017-P1-K1-B9
cccacgcgtccgcccacgcgtccgcgctttttttaatcaactccggattttgtaatccgccgttcgtacgcggcggtgtaaaggaaaagagaggtgaggagaggaggatgttggaaaaccctacacccaccgcagctgatgccgctcctgccatcaaacgctatgctccttccaatcaacgaaatcgatctctcggacgccgtaaatctggagagaagaatcaaggtgccacatcgagaaacattaatccagtcggggatgctgggagcagcgctatcctgaatgaagacaaccctcgtcatgctttgatacctttagaaggctgttctagaagtgatgcctctcggcttttaagcaatcgttgggcagctgtcttacatcgctaccatgatacatccattgatttgtctg

SEQ ID NO: 37464 - DNA, 387 bp, Gossypium hirsutum
  Clone ID: LIB3165-017-P1-K1-C10
gtttcatcaacgatatcttcgagaagcttgcttatgaagcctctaggctcgcgaggtacggcaagaaacccaccatcacttccagggaaatccagaccgctgttaggcttgtacttcccggtgagcttgccaagcacgccgtttctgaaggtaccaaggccgtgaccaagtttacttcatcttgaaaaggctattagttgatctgtagttggggttagggttaggaggttgctttttaaattagatcggtgtggtttttatgtttatttttctgaaatttctgcatatttattttgatatatggtttgtattggcgagatggatctactcgatcctgatatgactattgtagaaattaatgctattaacgacaacttaatttcttgg

SEQ ID NO: 37465 - DNA, 422 bp, Gossypium hirsutum
  Clone ID: LIB3165-017-P1-K1-C11
ctctactccaaattttctctagaaccatacttcgagatggcttttcttatgccttcacctgaaatttccacgcgccgctgcaaaatttttctctaaccctaccccccgccctaaatttctcaagagctgcgcgatttcgaagaacgacgacgagaaagtttggtcaaggaccaacgctagggtcggtgttaaagatgccggcagtacggtttcgtgtttgagccaaaacttgaggttgtacgtacaattttcggctccggtgaagcgaggatcgaagcccagcaaagaggaagaggagaagcaggattattacgtgaatatgggttacgctattcggaccttgagagaggagttcccggacatcttttacagggagctcagttttgatatttacagggatgacattgtattcaaagatcctc

SEQ ID NO: 37466 - DNA, 407 bp, Gossypium hirsutum
  Clone ID: LIB3165-017-P1-K1-C12
caaggtcttgacggtctttcatcccgcacagttgcctactaccagcagggtgctcgttgggccaaatggcgtaccgttgtgagcattccaaatggtccatctgccttggcagtgaaagaagcagcttggggacttgctcgctatgccgccatttctcaagacagtggactggtcccgattgtggagccggaaatcttgcttgatggtgaccatggaattgataggactttcgaagtagcgcagaaggtttgggctgaggttttcttctaccttgctgagaacaatgtcatgtttgagggcatccttctcaagcccagcatggtcactcctggtgctgaatgcaaagacaaggccaccccacagcaagttgctgattacaccctcaagctcctccacaggagaatcct

SEQ ID NO: 37467 - DNA, 409 bp, Gossypium hirsutum
  Clone ID: LIB3165-017-P1-K1-C2
ttgaacacttaaagggagatcaagttcaaaatctgttatggcttttgtaacgtcggaggaatgggtggccactttggtgccaattgctgtttattggatatactcaggtatgtatgtgatgtttgagtcaaggtttgagaagtacaagttgcactccaagaaagaagaggaggagaagaatttggtttccagaaaggaagtcttcaaagccgttctttgccatcaagtcatgtcaattgctattaacctcttcacgtatgcggtaacaagagaaaaagatggtgaggcatctccaaagaaatcactaaccttgcttattctagccaagcaattggtgatagcaatggtggtgatagatacatggtcgttttttgtgcattggtacttgcatcagaacaagtttttatac

SEQ ID NO: 37468 - DNA, 412 bp, Gossypium hirsutum
  Clone ID: LIB3165-017-P1-K1-C3
aaaacctctgatgacttccattcactcgttgttttttttacatctgctctaggaagcaatgagggcgggtacaggaaagggatggcagaggcaaagctaaaggtggctataaatgggtttggtaggattggcaggaacttcttaaggtgctggcatggccgtaaagactccccacttgatgtcattgccatcaatgacactggtggtgttaagcaggcttctcaccttctcaaatatgattccacccttggcatcttcgctgccgatgtcaagcctgtcggcactgatggcatctctgttgatggcaaggttatcaaggttgtttctgaccgcaacccttccaacctcccatggggggacctaggaatagatctagtcatcgaaagaaccggtgtgttcgtcgatagagaag

SEQ ID NO: 37469 - DNA, 297 bp, Gossypium hirsutum
  Clone ID: LIB3165-017-P1-K1-C4
cactgatccaaatgctgataactttgatccatctgctagaagtgatgatggaacttgcgagtacgaattttaaccttgtattatagtagtattgggttgaaaaagaaaaccctttttctattttatgtaatgatgtgagattgttccaaaactatcgtttgccttttgttgttccaattatatgattttgctttctcaaaaaaaaaaaaaaaaaaaaaaaaaaaaaaaaaaaaaaaaaaaaaaaaaaatataaaaaaataaatataaaaaaaaaaaatattaaaataaaaataaatt

SEQ ID NO: 37470 - DNA, 410 bp, Gossypium hirsutum
  Clone ID: LIB3165-017-P1-K1-C5
gatcgttgatcgagttaattgattgaatcaattcatttgaaccgaatagaattaatgtcgagcgagtagattcagcaatgaaaggcgtctccttggcgccgggagattacatccacttcaagtcccaagtccctcttcacaagatacctgtaaggttctttcaagtccctcttcacaagatacctattggcacaaagcaatggcgatattatgattttggtcccaaagtagtttctcctctcatatgtcttcctggaattgcagggacagcagatatctactataaacagatcatgtccttgtccatgaaggtttggaatcatcaagagtggattcaaagttttgagaagttcttggatgtcatcaatgttcatcatatacatttatatggtacatctctaggaggattc

SEQ ID NO: 37471 - DNA, 409 bp, Gossypium hirsutum
  Clone ID: LIB3165-017-P1-K1-C6
gtcccctgtaccaactccagaaacacagtttttttcttacttgtcttccccccctcaccgctcggtggctgcaatcactaatttcttaactaagccacctacttccgatcttcacttcaccccaaaactcacttctctttgctctcatgcttcttttctaccatcccttgcgactaggcccagatctttttcaacaaagctaggaacaagcacaagctctcgcttcattaccaaggctacagctgctcctgggaccaagaatgctccgagtgatgagcgagttcagaaagttcacagcattgaagaattcgatgaagctctcaggaaggctaaaaacaagcttgttgtggtggaatacgccactagcttcagctatcatagcaataaaatttacccgtttatggtagac

SEQ ID NO: 37472 - DNA, 319 bp, Gossypium hirsutum
  Clone ID: LIB3165-017-P1-K1-C7
cccatacttccttatcaaacacaacatatatatctatcaacatcctcattactaccgcgcggctcaatcaccaatcaacaccgccccaacacttaaactcccttctctatccactcatccccacttatatattctacacccaatagcaactttcacatttacactgataactctagaaataccataaaaatttgaatgctaacattaattctcatttctacaccctcatgcatcgaactacatctatcctctctactcctacatctctcatcctcattctttaactactcattcattaaaatttcctagattttaccaa

SEQ ID NO: 37473 - DNA, 409 bp, Gossypium hirsutum
  Clone ID: LIB3165-017-P1-K1-C8
attggctctgacacaaaaagaaaaatgtttgtttcacttcccacaccccatctccggtcggtcccttctccaaccccactttctttcaaactctccttcgcattccctgaaaccagaaggaaatcactaagcatcagctctactccgaagggaacaccatctccttctttggcttacgtgccactgagggtgactgccagttctcaagccgcttctgcacctactgtcaatttgacggcaattcccaccgaaatgaaggcttgggtgtacggggaatatggaggtgttgatgtgttgaagttggatgagaaagtgagcgttccagaagtgaaggaagatgaggttttgataaaagtggctgctgctgcccttaaccccgttgatgccaagcgaaggcagggcaagttta

SEQ ID NO: 37474 - DNA, 409 bp, Gossypium hirsutum
  Clone ID: LIB3165-017-P1-K1-C9
ctttatatttatatatttttttgcttgtttatttgcaccaatggcgaccgatgctaaaggagatccagagccgcactgcagagaagacgatgacaacgctcccgccaccgccgcagacgatgaggacaccggtgctcaagtagctcctatcgtcaagctcgaggaagtcgctgtcactactggtgaagaagacgaggatccgattctcgatctgaaggcaaagctgtatcgattcgataaggaagggaatcaatggaaggagagaggagttggaaatgtgaagctcttgaagcacaaagtcaatggcaaagtccgtctagtcatgcgccaatctaaaacccttaagatctgtgctaaccatttcgttattccaacaatgacggtgcaagaacattctggaaatgataaa

SEQ ID NO: 37475 - DNA, 335 bp, Gossypium hirsutum
  Clone ID: LIB3165-017-P1-K1-D1
cccacgcgttcgctttgtgatggggatatcaatacttgtggctgtcacagtgcttgtttacattgaagataacattgggtggggatggggccttggagtccccaccatcgccatgtttttgtccatcatcacgttcatcatcggctatccactttaccgacacatggatccggcagggagtccgtttacccggttgttacaggtctgtgtgtcagctttcaagaagaggaagttggccatggtttctgaccccaacttgttgtatcggaatgatgagcttgacgcctccattttcgtaggtggaaaacttgttcacaccccagacatgacatttc

SEQ ID NO: 37476 - DNA, 406 bp, Gossypium hirsutum
  Clone ID: LIB3165-017-P1-K1-D10
cagccaaacacggctatatagaaatatttaatgcaaaaaaaaaaaaatattctccttggtgtttctcttctcctgcaaattattttctacaatacccttaaaaaatggcggcatcttctagaaaatcgagtggaccggttctccgatccctctccccatcaggccgattcagttctcattatgtgtcacactctccgtcttcttcttcctcggcttttgcttattccagttcgagctttacttcacgctcttctactttctttaatcaacctagatctatttctccgccgcgcgtcaatgtttataaccacactcaatcgtcgcagtctgttcgattctcgctcgatagccgtccgatctcgccgaatcgttcgatttcagctgtccgtagaaacgccgaggcgtt

SEQ ID NO: 37477 - DNA, 408 bp, Gossypium hirsutum
  Clone ID: LIB3165-017-P1-K1-D11
ggaaatttctcaaggattctcattgcttttcttaggcaaatcccaaagccataacagatgcaatctctcgtacccaaccgcccaccgcccaccgccaccaatggttccgccgtcgtcaacaccgccgccaaacccccaacaaatccaacaattcctctcctccgtcctctcccaacgcggcccttccgccctcccttactccgaagacaccaaatggctaatccgtcaacaactcgtttccctcatctccaactacccttccctcgaacccaagaccgccacttttacccataacgacggccgatccgttaacctcctccaagccgacggcaccatccctatgcctttccaaggcgtcacttacaacatccccatcattatctggctcatggaatcttaccctcgtta

SEQ ID NO: 37478 - DNA, 407 bp, Gossypium hirsutum
  Clone ID: LIB3165-017-P1-K1-D12
cccacgcgtccggcatacaggtaaagagtctgttatttacaaacatgtggctgggggggagaaaagggccatctgggttttcgtcatcttccacagctgaggaagttacacaggggatcgatggcactggtctcactgccattgttacaggagcatccagtggtattggcactgaaaccgcacgtgttcttgctctgcgtggtgttcatgtaattatgggggtcaggaatgtggctgctggtagagatgttaaagaagcaattgtgacggaaattccaacagctaaagttgatacaatggaattagatctcagttcaattgcatctgtgaggaaatttgcagcagatttcagctcctcaggtcaccctatgaatcttcttatcaataatgcaggaattatggcaact

SEQ ID NO: 37479 - DNA, 412 bp, Gossypium hirsutum
  Clone ID: LIB3165-017-P1-K1-D2
ctttaaccctttttttttatttttttttaaaataaatctcttttaaatgaacaacaaagaacagggaaaatccgaagaagaagaagaggaagtagtgatggaatcgaagcctttacgtttccttactcaacaatctttatttgtagccgttcgatctggtgaacttgaagcggtgaagcagatattagataagttgaagaaagatgatgaagcgtgtgatggatcatcaacggtgtatgatctgatggctgctcaaagtgaatcaggggctactgctttttatattgcagctgagaataatttcaatgaggtttttgattatttgatcaaattttgtgatgtggagattgttaagatcaggtctaagtctgatatgaacgcttttcatgttgctgctaaacttggacatttg

SEQ ID NO: 37480 - DNA, 410 bp, Gossypium hirsutum
  Clone ID: LIB3165-017-P1-K1-D3
gtgagactcttttgtatacctgtagcatatatttattttaagcagtaatagcaatggcctgctggatgatctcatcggcaaccattgccaccgtgaaccgctcctccccggcacaggccaacatggtggcccccttcaccggcctcaaatctgcctctgctttcccagtcaccaggaaggccaacaacgacatcacttctcttgcaagcaacggtgggagagtgcaatgcatgcaggtgtggccgcctcttgggaagaagaagttcgagactctctcatacctgcccgatcttactcccgtacagttggctaaggaagtagattaccttcttcgctctaaatggattccttgcttggaattcgaattagaggagggattcgtgcaccgtaagtactcgagcttacccacg

SEQ ID NO: 37481 - DNA, 410 bp, Gossypium hirsutum
  Clone ID: LIB3165-017-P1-K1-D5
cccacgcgtccgcccacgcgtccgaatatgtatctttcatgttagcagcaggggccaaagtggcgtacgagaaagaaaggagcatcggatggctatgtcttgtagttgtcatgtcaagtgctgcaacagtgtaccagttgtattgggactttgtaaaggactggggtttgcttcaaatgaattccaagaacccttggctaaggaatgaactaatgcttcgtcgaaagttcatttactacttctccatgggattgaaccttatcctcaggctggcttggctgcaaacagttgtccattcaacctttgaacatgttgattacagggtaaccggactgtttttggcggcgcttgaggtgattagaagaggactgtggaatttctacaggttggagaatgagcatctaaataac

SEQ ID NO: 37482 - DNA, 406 bp, Gossypium hirsutum
  Clone ID: LIB3165-017-P1-K1-D6
gggatggtggattccttgttccaagctcccatttattatggaactcactatgctgtcatgagggcctatgaatacatcagccaaggtcttaaaacgtacaatttggacaacaacatggatggtttctacatcgctcctgcattcatggacaagcttgttgttcacatcagcaagaacttcatgtccctccctaacattaaggttcctctaatcctgggtatttggggaggcaaaggtcaaggaaaatctttccaatgtgagcttgtgtttgccaagatgggtatcaaccccatcatgatgagtgccggagaactggaaagtggaaacgccggtgaaccagccaagttgatcaggcaaaggtaccgtgaagccgccgacataatcaaaaagggcaaaatgtgcgcct

SEQ ID NO: 37483 - DNA, 408 bp, Gossypium hirsutum
  Clone ID: LIB3165-017-P1-K1-D7
ctgaattgctctcttttgagttttgaataagatttacgcaaagaaaggtcctttaagatgaggggaagtctttggcatcttgggcaatcgattacacgccgtgtagctcaggctgacaagaaggctgcagcacgtcgattctttgcttcagaagctgatctgaaaaagactgttctttatgacttccacgttgctcatggtgggaagatggtcccattcgctggatggagcatgccaatccagtacaaggactcgatcatggactctacggtgaattgcaggcagaatggttcactctttgacgtttctcatatgtgtgggttgagccttaagggaaaggactgtgttccattccttgaaaagctcgtcattgctgatgttgctggactcgcccctggaacgggaaca

SEQ ID NO: 37484 - DNA, 407 bp, Gossypium hirsutum
  Clone ID: LIB3165-017-P1-K1-D8
cccacgcgtccgattttctcgctccctttactttaatccaaagcttcctcccctcgctctgacatccacttctaaaccttcttttctctttccaaccaggaaactctctcttccttctctccacagtctcattttcaatcaatccaaaaacagttctaacaataattctagtaatagttgcatagtttcttcagctttcgattccttctttattctctgcacttcgcttgctctatctttctcgctattcgtaaccgatgtgggagccgcctcggcctttgtggtgacccctccccggaaattacagtccgatgagttggctacggttcgtctttttcaagagaacactccctctgttgtttatatcaccaatctcgccgtcaggcaggatgcttttacgttggatg

SEQ ID NO: 37485 - DNA, 408 bp, Gossypium hirsutum
  Clone ID: LIB3165-017-P1-K1-D9
gccaggattgaagagataagattatagtgtattactaaacataataaagcccctgcgacgcgcttcattgatttgccctctcaaagcccaagaaaaatggcttctgcttccgctactctcctcaagtcttcacctattatcgacaagtccgagtggattaagggccaaaacctccgccacccttcggtttgttttgtacggtcacaccctacatcggccgcctttgccgtccgtgctagttcatatgccgatgagcttgttaagaccgcgaaaactgttgcatctccaggtcgtggtattttggccatggatgaatcaaatgctacatgtgggaaacggcttgcctcgattggtctcgagaataccgaggcaaaccggcaagcttaccgtacccttctcgtgtctgct

SEQ ID NO: 37486 - DNA, 404 bp, Gossypium hirsutum
  Clone ID: LIB3165-017-P1-K1-E1
gaactaaattccccagaatttgcttcagtaatttctgtctcagttatggcttcttcaggtacccgcaagccttcattcaatgttgagaaatctggtgtaagaggggttccttcccttgctaggtccccttcttctttcaaggttgaagccagtggtggcaagaagatcaagaccgacaagccttatggaatcaatggtggtatgaacttgagggatggtcttgatgcctctggaaggaagggtaagggaaagggtgtttaccaatatgttgacaaatatggtgctaacgtcgatgggtacagtcctatctacaacaccaacgactggtctcccagtggtgatgtttatgttggcggtactaccggattggcaatctgggcggttaccctagccggaattcttgc

SEQ ID NO: 37487 - DNA, 279 bp, Gossypium hirsutum
  unsure (1)..(279): unsure at all n locations; Clone ID: LIB3165-017-P1-K1-E10
aaaaaaaaaaaaaaaaaaaaananaaaaaaaaaaaaaaaaaataaataaaaaaattaaaaaaaaaaaaattaaaaaaaaaaaataaaaaaaaaaaaataaaaaaaaataaaaaaaaaaaaaaaaaaaaaaattaaaaaaaaaaaaaaaaaaaaaaaaaaaaaaaaaaaaaaaaaaaaaaaaaaaataaaaaaaggagaaaaaaaaaaaaaaaaataaaaaataaaaaaaaataaaaaaaaaaaaaaaaaaaaaaaaaaaaaaaaaaaaaaaaaaaaaaa

SEQ ID NO: 37488 - DNA, 420 bp, Gossypium hirsutum
  Clone ID: LIB3165-017-P1-K1-E11
gcgtgagccgctatagttacgattccctccagcctagattcttatatttgtgtttcccctctgcaaaggggttagtcttcattcgcttcgttgaatttctatcttcttttgatctgaacggagtttggtaatccagttttcgtcttctgttgattcaggaaatcttagtttttgaattgcgtgactgaatgatctaatggagtctaaaggtgggaaaaagaagtccagtagtagtaagtctttattctacgaagctcctctcggttacagcattgaagacgttcgaccaaacggtggaatcaagaagttcagatctgctgcttactccaactgcgctcgcaagccatcctgatatactcacaagcgtgccgtctgaccactagtagtggttaataaaactgttatttgctttgttagtta

SEQ ID NO: 37489 - DNA, 403 bp, Gossypium hirsutum
  Clone ID: LIB3165-017-P1-K1-E12
gtactctcagttttagcttcttcttattcttttcgtttacgcaaaacttcgaacagctgctggtcttacctcaatggctctccctcagctaataccttctcactcttcttcttcactcactcaccagccttccataaaccctaacgcagccaatccataccccatgttgaagtcctttttgaagccatcttctctctctcaatctcgcaggtttcacaggctcagctctcttcgagcttcggcctcttccttccccgatcatcaccaaacagatccttctaaaccagacgacgtcgtagagctccctatattccctctgcccttggttctctttcccggcgctatcctccctctccagattttcgagttcccgtaccgcattatgatgcacacgctccttcac

SEQ ID NO: 37490 - DNA, 408 bp, Gossypium hirsutum
  Clone ID: LIB3165-017-P1-K1-E2
cccacgcgttcggagactcaccaaagcacgaatgtttttatctttcagaaaatggattccgatgggaagagtgcataaccgcatggataagctcacactaacccgtcaattttggatccaattcgggattttccttggggggtatcagtaaggaattggaatgtaataatattgattcatataggaggaaaaggttctctattgattcaaatgctgtacctatgggatagggatagagaaagaggaaaaaccgaagatttcacatagtgcttttgatcgaaaaatcaatctgatttatttcgtacccctcgctcaatgagaaaatgggtcagattctataggatcaaacctatgggacttagggaatgatggaagggaataaaataaaaaaaaaaaagaaatcaaaaa

SEQ ID NO: 37491 - DNA, 405 bp, Gossypium hirsutum
  Clone ID: LIB3165-017-P1-K1-E3
cccacgcgtccgcttagagtctctctcagattttaactagagtgtttacatcctggtaagagggggagttgccatggcttcagcttcctccaattcactatcaatctcaccctcatccaccctcgtggatgccaaagctcctcgtcaaccaactgctgcatccccacaatgtgtcactcttcctactcttcctcccccacccgttcagtcccagagtcgtccctggaagaccactgcctactgtcgcaagattgctcgaaatgtgatggctatggccactggtgagactttggccacgcgtgaagctccaaccgaagttaccccaactgagctgacagagtttatcaacaaaatacaagaaacatgggataaagttgaggacaagtacgcagtgagttcacttgc

SEQ ID NO: 37492 - DNA, 261 bp, Gossypium hirsutum
  Clone ID: LIB3165-017-P1-K1-E4
cccacgcgtccgatccccttccaacgatggactgcttctctcttctcttcctcctccttgcctgcgtcgttgcttcggccgtcgtctccgacgttaatagcgacggcgatcctctcatccgtcaagttgtttccgatggtggtgtcgaggaggactccgatgaccatctccttaacgcggagcaccacttcacgctgttcaaatccaagtatgggaaaacctacgcatcccaggaggagcacgattaccgactgggagtct

SEQ ID NO: 37493 - DNA, 413 bp, Gossypium hirsutum
  Clone ID: LIB3165-017-P1-K1-E5
gcaaaagagcataacgttgaagacacggcggttaatatatgctgctgaaaacaaccaatcgagtgattatggatcgtctacacagaaaatcaaagacgaaagtgatacccaaggtctttcgcaatggaagtgtatgagttcaaatgttagcgatacaggcagagagcagcagggaaattctgtcaaaccgggtcaggagtcgcttcaaaatgagggtcaagctgaagggatatctgacaagctatttgtatctgaaaattcagagagatttgtggaggttgctcattgcagtggcacttgtgaatcaattgcattaaaactcgaagagaactctgcgtttgttgacgagatggcacataatgttgttggactacaaagtgataaaagaattgcatatgttatgattggagttg

SEQ ID NO: 37494 - DNA, 415 bp, Gossypium hirsutum
  Clone ID: LIB3165-017-P1-K1-E6
gtctctctcagatcagaactagagtgtttacattctgttaagaggttgagttgccatgggttcagcttcctccaattcactatcaatctcaccctcatccaccctcgtggatgccaaagctcctcgtcaaccaactgctgcatccccacaatgtgtcactcttcctactcttcctcccccacccgttcagtcccagagtcgtccctggaagaccactgcctactgtcgcaagattgctcgaaatgtgatggctatggccactggtgagactttggccacgcgtgaagctccaaccgaagttaccccaactgagctgacagagtttatcaacaaaatacaagaaacatgggataaagttgaggacaagtacgcagtgagttcacttgctgtagcaagtcttgttttggtctggggt

SEQ ID NO: 37495 - DNA, 408 bp, Gossypium hirsutum
  Clone ID: LIB3165-017-P1-K1-E7
attcaaggcacaaaatttgacccaaaatttcttttgtttgtgcttcttcggctatggcaggtgttgccatctcatcccccagttcccagaagactggatcagtagtggggacaacaaaggcttctttcctttcagggaagaaacttagatctgtgagaaagtacacaaaaccagctgccggaccaacatttccagtgtgcgccgccgccgaccccgacagacccctttggttcccaggcagcactcctcctccatggctggatggcagtctccctggtgactttggtttcgatcctctcggtcttggttctgaccctgagacattgagatggaacgtacaagcagagctggtgcactgcagatgggcaatgttgggagctgctggtattttcatcccagagttcttaa

SEQ ID NO: 37496 - DNA, 391 bp, Gossypium hirsutum
  unsure (1)..(391): unsure at all n locations; Clone ID: LIB3165-017-P1-K1-E8
tcgnccacacgttcgnccacacgttcgatttatactttccttgcacaatggccaccatgaccggtgccgctgtcactataccatatttcaccggccttaaagcccgtgcaaccgcagctaaagttagcgccacagccaaggttgcagcctctccagtcccaagggtcagcatcaaggcctccctcaaagacgtcggtgttgctgttgcggcaactgctgcaagcgcaatccttgccaacaatgccatggccattgaagtcttgctcggcagtgacgatgggggtctggctttcattcccaaagaattcagcgtaagcccaagggagaagattgtgttcaagaacaatgccggattcccacacaatgttgtgttcgatgaggacgaaaatcc

SEQ ID NO: 37497 - DNA, 412 bp, Gossypium hirsutum
  Clone ID: LIB3165-017-P1-K1-F1
cccacgcgtccgcccacgcgtccgggaggtgtttatttatccgacggcagtgataacgaatggggttattgggattcgaataacgggaaagacagctccgatacttattatcagaaaatgatccaagctaatcctggaaattcgcttctcctcagcaattacgctagattcttaaaagaggttcgtggggatttagtgagagcagaagaatattgtgggagagcaatcttggcaaatccaaatgatgggaatcttctctccatgtacgctgatttaatctggcaaactcataaagatggtcctagagctgaaacttactttgatcaagccgttaaatctgcccctgacgactgttttgtactagcatcatatgcacgatttctttgggatgctgaggaggaagacgatgaat

SEQ ID NO: 37498 - DNA, 167 bp, Gossypium hirsutum
  Clone ID: LIB3165-017-P1-K1-F11
cccacgcgtccggagattatcaatttgtatccttcttcgaatttcctcattcaagaggcgaattttcgtcaagaccctcaccggaaagaccatcacattggaggtggagagttctgatactattgacaatgtaaaggccaagattcaggacagggaaggattccccc

SEQ ID NO: 37499 - DNA, 390 bp, Gossypium hirsutum
  Clone ID: LIB3165-017-P1-K1-F12
cccacgcgtacgtgagaacccattctggtcttactgatggagatgctacatcatgttcgagctaaccttgtaccaataatcgacaggtttcaccatcaagctttctaagcagaagttagctggtaccatccatggtagtgacagatccagttgttgcgcctgcaagtgcactggttcaggagcttcagagcaagcctgatctccgaatgaaacacgagttgcttgcctataaaggtccagatcaatcaacggacacaagtactgtgacagaccagtttgaagcatcctcttatggaacatcatactgcctggatgcaggcaccatccagcataatatctctctgcccagctttgtggaaggtgatgttcaatcacatcctcagaacaatc

SEQ ID NO: 37500 - DNA, 410 bp, Gossypium hirsutum
  Clone ID: LIB3165-017-P1-K1-F3
gagagaaatcaatggcttccacttcagcagttttaatggctctgccactaactcgtgctgcccagaacagggtgcctgcctctgaagctttctttaagccattgccactcaagccatcgggggcaatcccaactacaacatccaatggaaggcttcaagtcaaggctgctgcttcttcactcaaggacaaggcaatcacaggattgacagcttctgcaatcacaacatccatggtgatccctgaggtggctcaagctgctgatggagtttccccttctctcaagaactttttgcttagcattgtggctggtggtgttgtgcttgttgccattgttggagctgtaattggtgtgtccaacttcgaccctgtcaagcggacctgaaccatataagctctcagatgctactat

SEQ ID NO: 37501 - DNA, 433 bp, Gossypium hirsutum
  unsure (1)..(433): unsure at all n locations; Clone ID: LIB3165-017-P1-K1-F4
aacccgacccacccgaccaaaaanatactataaantntaacttcttcatattttattatatanacaaaaaacaaaccccccgcccttattaaaaaaattaccccccccaaaaaaaaaaacattattactcaaactcttcactcaatcaccaaccttacataaaccctaactcatccaatccataccccacttttaacactctatataaaaaccatatactctctcataaacttccttccaacacaatcttaaatattcatttatataccgcctcttccttcccccatcatcaccaaacaaatccttctaaaccagactacgtcttagaactccctatattccctctgcccttggttctcttccccggcgctatcctccctctccaaaattttcaattcccttaccgcattattatgcacacgctccttcacac

SEQ ID NO: 37502 - DNA, 417 bp, Gossypium hirsutum
  Clone ID: LIB3165-017-P1-K1-F5
aaagaaagaaaaaaagcagagaatcacaataattgttgcagcagtggcagcaacagcatcagctgaactactggtatcaagttcccgctctttgtcacggctgtcaccatttcagctatgcgtatttgattccaagtccctcgtgtcatgccccagcaatggcaatggcattaacaacagtatcaagagaaggcatgttaggtgcctggctgtggggacagcaccagaggcagaaaccaagaaaagtgggttcgaaatccagacactaacaggttggttgttgaagcaggaacaggcgggtactattgatgctgagctcactattgtcctttccagcatttccatggcctgtaagcaaattgcttctttggttcaaagggctagtatttcaaacttgactggtgttcaaggagctgt

SEQ ID NO: 37503 - DNA, 363 bp, Gossypium hirsutum
  Clone ID: LIB3165-017-P1-K1-F6
cgggaagctgcaaatgtatttggaaagccaaattcatacacagagttcatcccatacaagggggaggggttcaagctgtcaataccatcaaaatggaacccaagcaaagaggttgagtacccaggtcaagtcctgagatacgaggacaacttcgactccaccaccaatgttgctgtcctggtcactcctactgataagaagtccattactgacttcggttcccctgaaaatttcctctctaaggtggactatctgcttggaaaacaagcatactctggcttaactgatgctgagggtgggtttgactcaaatgcagtggcaactgcaaacattattgagacttcaactctgtgatcggaggga

SEQ ID NO: 37504 - DNA, 406 bp, Gossypium hirsutum
  Clone ID: LIB3165-017-P1-K1-F7
cccacgcgtccgcccacgcgtccgattatcttttatttcttcttttgttggccaaatcatgaccactctcgtgaccggtgtgtttctcctcctactatccgtcgccggcgtcgtatccgccgctagatatatcaccggtgatgttctccggttaccttcggaagcttcaaggttcttccgatggaggagcgatgatgatgaagttggtggcacaagatgggcggtcctgattgctggatctaatggatattggaattacaggcatcaggctgatgtttgtcatgcttatcaactcctaaggaacggtggtttgagagaggaaaatatcattgtctttatgtacgatgatatcgctttcaatgtagaaaaccctaggcctggtgttatcattaacaatcctcatggc

SEQ ID NO: 37505 - DNA, 393 bp, Gossypium hirsutum
  Clone ID: LIB3165-017-P1-K1-F8
cccacgcgtccgaaaacactgaaaaagctaaatgcttttcaaaaaccaaaacaatggtgttttattttaacattcgaaccatatttctactttttctttccttaaaacatcgaaaattcgactaaaaccaaacatcaaatctctaatttacattcttagcagcttttttttttgttcccttcagaaaatgagtccaaggcaagaccttctcaaaatgacggcgttcttcatctcgccggagaaaccgcgagacatatccgtactcatcacccgaaccgctctcctcctctgccttttcacctccattactctcgtcctttgcgtatctttctcgaaccggcctcacccgttctctcggttcacttcccctaacaagaaagctttcccccgacc

SEQ ID NO: 37506 - DNA, 407 bp, Gossypium hirsutum
  Clone ID: LIB3165-017-P1-K1-F9
cccacgcgtccggagattatcaatttgttgccttcttcgaatttcctcattcaagatgcggattttcgtcaagaccctcaccggaaagaccatcacattggaggtggagagttctgatactattgacaatgtaaaggccaagattcaggacaaggaaggcatccccccagaccagcaaaggttgatcttcgctggtaagcaacttgaggatggccgcacgttggctgattacaacatccagaaggagtccacactccacttagtgcttcgcctccgtggaggaatgcaaatttttgttaagactttgactgggaagaccattacattggaggtagagagttcagataccattgataatgttaaggcaaaaattcaggacaaggagggaattcccccagaccaacaga

SEQ ID NO: 37507 - DNA, 414 bp, Gossypium hirsutum
  Clone ID: LIB3165-017-P1-K1-G10
cccacgcgtccgtttacttcacttgtctctctttaccaaaaagaacaaatcaaaagaatgagcaatggcttcaatcccgtgtacttttcaaataccctttacttcaaaacccgtaaattctcttccatctctgccaaaactcagctccaagtttctgggctctcaaaaaactctatcttggtcaaggccctcaagaattggaccctctaatggttcaagaactcaatgctggttcaagtttggtaagaacggcgttgatgctgaaggtgctggcatttatggcagccagggcagggatgattttgacagggatgatgttgagcagtacttcaactacatggggatgcttgctgtcgaaggttcctacgataagatggaagctcttttgaaccaaaacatacacccagtagacat

SEQ ID NO: 37508 - DNA, 409 bp, Gossypium hirsutum
  Clone ID: LIB3165-017-P1-K1-G11
cccacgcgtacgcccacccgttcgcatttttttagtgctcactacatttctctcggcgggggtctcaacattcctaatctccaaagcctatcatatccctaatccattcccctattatcttcttactagcgtctaccatcaaaaaacactctcgatctatcttcactcaccatactccagctttacttcacactctcaagccacgttcagttcttgctgcactccttgactgaagccaactctcactctgtttttcgagaactctgccagatagaggcatctctaattccccatttagatcataagtttactctcataacgagtactacttgacacacactttatcaattcagcaaatacattggtcatgatcgtggtaataaaaaaagctatgagcaatttgacatga

SEQ ID NO: 37509 - DNA, 415 bp, Gossypium hirsutum
  Clone ID: LIB3165-017-P1-K1-G12
cccacgcgtccgattaaattgaatcaatttcttttaccatgttgctcatgtctaggcatgcagtgagcttgaagagagatcaccctttactccatttccaagctcaagggctcaagcctaaacctgtctctcatctcttcttcaatccattgtctaacggtgtccatacttcatccaaagctttcaccactttagctatctttaaatcaaagaccaaagcagctcccaagagggttgagccaaagtcaaagccaaaggttgaagatgggatctttggcacctctggagggattggttttaccaagcaaaatgagctctttgcgggacgtgttgccatgcttggttttgctgcatcattgctaggcgaagcaataacagggaaaggaatcctagcacagctgaatttggagactgg

SEQ ID NO: 37510 - DNA, 349 bp, Gossypium hirsutum
  Clone ID: LIB3165-017-P1-K1-G2
ggagaggaagatagttaaaaactcaaagaagttttttttagatcctcttgcttgctatgatgtgcaaacttggagataagagaaagctgacccctggtttgcttatctgtaggatcccctggggaagctgctggtggtggtttttacaggcatttcaaataccattttctatggttctttggctgttctgattctaattgatgttggaggggttcactgaggattaagctcctcaatcatggaaggtctttgtgaaacaccagaaaatggtaaagtagcagatcccgaccttcgggatattcagtacttgcccatctctacccgattatcattactttgggttgatatg

SEQ ID NO: 37511 - DNA, 420 bp, Gossypium hirsutum
  Clone ID: LIB3165-017-P1-K1-G6
atcttcgtcaaaaccttaaccggcaagaccattttcttctaagtcgagagctccgacaccgagcggtatgtgaagtctaaaattcaagacaaggaaggcatcccaccagaccagcagcgtcttatcttcgccggaaaacagctcgaggacggccgtaccttggccgattacaacatccagaaggaatctaccctccaccttgtcctccgtcttcgtgggggtatgcagatcttcgtcaaaaccttaaccggcaagaccatcaccctcgaagtcgagagctccgacaccatcgataatgtgaagtctaaaattcaagacaaggaaggcatcccaccagaccagcagcgtcttatcttcgccggaaaacagctcgaggacggccgtaccttggccgattacaacatccagaaggaatccacc

SEQ ID NO: 37512 - DNA, 409 bp, Gossypium hirsutum
  Clone ID: LIB3165-017-P1-K1-G7
tatactcccaaaatgtctcttacaatctttattatcctctccaaatcccttttggagccgaggctaaactccaaactcacccccaaagtttcacgatcattggtggtatgctccaccgacaagacttcatcgccactatcatcagcttcatcactccaagccttctcagcagctcttgctctttcttccattcttctctcagccccacagcctgccgtagctgatattgcaggcctcacaccatgcaaagagtccaagcaattcgccaaacgtgagaagcagcagatcaagaagctggaatcgtcgttgaagctatacgcccctgacagcgctccagctctcgctatcaaagcaaccatcgagaaaaccaagagacggtttgacaactacgggaagtacgggctgctgt

SEQ ID NO: 37513 - DNA, 304 bp, Gossypium hirsutum
  unsure (1)..(304): unsure at all n locations; Clone ID: LIB3165-017-P1-K1-G8
aaaaaaaattatttaaaaaaaaaaaaaannnaataaaaaaaaaaaaaaaataaaaaaaaaagataaaaaaaataaaaaaaaataaaaaaaataaaaaaataaaaaaaaatataaaaaaaaaaaaaaataaaaataaaaaataaataaaaaaaaaaaaaaaaaaaaaaaaaaaaaaaaaaaaaaaaataaaaaaataaaaaaataaaataaaattaaagataaaaaaaaaaaataaaaaaaaaaaaaattaaaaaaaaataanaaaaaaaaaaaaaaaaaaaaaaaaaaaaaaaaataaaaaaaa

SEQ ID NO: 37514 - DNA, 414 bp, Gossypium hirsutum
  Clone ID: LIB3165-017-P1-K1-H1
cccacgcgtccgcccacgcgttcgcccacgcgttcgtttatttcaaagattctctcaaaacagtgagggagtagtagttcgagttatcgacgacgttttttttcaacacgaaaaaaaatggataacttttacgcaccagggaagaaccatctcttcgttccgggtccggttaacataccggaacccgttattcgagccatgaaccggaacaacgaggattaccgttccccggctattccggcgatgacaaaaacccttctcgaagatgtcaagaagatattcaagactacgaccgggactccttttatgatcccaacaacaggaaccggtgcatgggagagtgcacttactaatacgttatcccccggtgaccgaatcgtatcgttcctcattggacaattcagtcttctttgg

SEQ ID NO: 37515 - DNA, 412 bp, Gossypium hirsutum
  Clone ID: LIB3165-017-P1-K1-H10
actcccttcaaatcctcgtctcaacaatttttttttaaagcctagtaaaatggcggccacatttagcggtgatgaaactgctcctttcttcggcttcctcggagccgctgctgccctcgttttctcctgtatgggtgctgcgtacgggacggcgaagagcggtgtcggggtggcatcgatgggagtgatgaggccggagctggtgatgaaatcgatcgtgcccgttgttatggctggagttttaggtatttatgggttgattattgcggttattatcagcactgggattaacccaaaggccaaatcttactacctgttcgatggctatgctcatctttcctctggtctcgcttgtggcctcgccggtctctctgccggtatggccattggaatcgtcggcgatgctggagtt

SEQ ID NO: 37516 - DNA, 414 bp, Gossypium hirsutum
  unsure (1)..(414): unsure at all n locations; Clone ID: LIB3165-017-P1-K1-H11
cgatactcaacggngttttgtgattaaaaaaactaccaagattgtggcaaaacaagaggggttccctgcatgaaccatggctagtggagaacgggttgaaggggtctagcaaggagattcgccatggcaggactgcacacaacatgtcgtcttcgtcgttgcggaaaaaatcggacctgacgcttgtttccaaggttcggtatgcaatgcttaggcagttcctcgccaatcttcaagaggtcatattagggaccaagctctccgttctcttcccagctattccattggccattgttgctgagtgttatggatttggaagaccctgggtgtttgcattaagtttacttggacttacaccattggctgaacgagtcagctttctcaccgagcaaattgcttattacactggtccaa

SEQ ID NO: 37517 - DNA, 423 bp, Gossypium hirsutum
  Clone ID: LIB3165-017-P1-K1-H2
gagagataagagaaagcactgaaaacgcaaaaccatggcctctgcttttcttttcaagacttcaccagttttagacaagtctgagtgggttaagggtcacacccttcgccaaccttccacttctgcggtgaggtgccaccctgttgcaccctctggactaactgtgcgtgcaagctcatatgccgatgagcttgtcaagactgctaaagctattgcttctcctggccgtggaattttggccatggatgagtccaacgctacctgtgggaaacgtttggcctcaatcgggctagaaaacacagaggctaaccgccaagcctacaggacgttgcttgtttcagctcctggccttggtcagtacatctctggtgccatcctctttgaggaaaccctctatcaaaccacaattgatggcaagaagat

SEQ ID NO: 37518 - DNA, 406 bp, Gossypium hirsutum
  Clone ID: LIB3165-017-P1-K1-H3
cccacgcgtccgcccacgcgtccgccaggcttttacttatcaaaataaacccatcttcttgattggcaggcaatcaaaaagccaaaaatcatggcactgagaatgtgggcttctactactgccaatgccctcaaaatttcttgtgctaccaccaaagcccctgttttctccctctccagatgcttttccactgttttggatgggttgaaatatgctgaatcacatgaatgggtgaagcacgaaggtccagtagctaccattggcatcactgaccatgctcaggaccatttaggagaagtagtgtttgtagagctgccagaaccaggtggttcagtgagcaaaggaaaagggtttggagctgttgaaagtgttaaagcaaccagtgatgtcaattcccctatctctg

SEQ ID NO: 37519 - DNA, 416 bp, Gossypium hirsutum
  Clone ID: LIB3165-017-P1-K1-H4
ctcaatttgaagcaacatcatagaactgctttttctttgttccactcttctgttactgtggaagggtcatgatgaataagctagccttgccagagtccagcactttcccaggaaagccaatgccacccacagctgaatgctggtttgatgatgcatgcatccttgacatggactactttgtgaagaccatctcaggcataaaggccaagggtgttcgtcccgacttagtaggctcaatcatagcacattatgcatcgaaatggctacctgatctatccggcaatgacaccgaaaagggtcctatgagcctccaagagtcatcgccggagagtgtcacggtttcacggatgaaaaagaggttctttgttgaaaccttggtgggaatcttgccacctgagagagattccatcccctgc

SEQ ID NO: 37520 - DNA, 407 bp, Gossypium hirsutum
  Clone ID: LIB3165-017-P1-K1-H5
cccacgcgtccgcaacaaaatcaactgcttcattatggcctctacaaccatggctctttcgtccccatcattcgccggtaaggcagtgaagttctccccttccacccctgaaatccagggaactggccgtgtttccatgaggaaaaccaccaagcctgttccttctggtagcccatggtacggtcctgaccgagttttgtacttgggtccactttccggtgagccaccatcttacttgaccggtgagttccctggtgactatggttgggacactgctggactctcagctgatcccgagacctttgctaggaaccgtgagctcgaagtcattcactgcagatgggccatgttgggagctcttgggtgtgttttccctgagctgttggctaggaacggtgtcaagttcg

SEQ ID NO: 37521 - DNA, 416 bp, Gossypium hirsutum
  Clone ID: LIB3165-017-P1-K1-H6
gcaaaaggcaaaaaagccatgtcaaagctggttgtgtttcagcccacaaagcagcctcccgtctggctcctctcttcctctctttcccacttcaatggcaccaagctctgccaaatccagtacaagagaaaggtatatcagccaaaaggtgcattgcatattgcagcatccagcaccaagaagattctcataatgggaggcactaggttcattggtgtgtttttatcaagactccttgtaaaagagggtcatcaggttactttgtttactagaggtaaagcaccagttactcaacaattgcctggtgaatcagacagtgactacgctgagtttaaatccaagattttgcatttgaaaggagatagaatggacttcgattttgtgaaatccagtctttctgcagaaggctacgatgt

SEQ ID NO: 37522 - DNA, 410 bp, Gossypium hirsutum
  Clone ID: LIB3165-017-P1-K1-H7
cccacgcgtccgctcaaattcagttaacatttttacagttgttttcttcagtctctctctcagccatggctgcagccatctccaccgtcgctgccgctgccgccgccaaccgagctctgggagtgtcagtcccaacctcagctttcatggggaagaaagtgagctcaagattcaacagcaccaggcaggttccttcgggaagttttaaggtgatggcggcggagaaagagatagacgaagagacacagaccgaaaaggaccgatggaaagggttggcttacgatatttcggacgaccaacaggacattactcgagggaaagggatggtggattccttgttccaagctcccatgaatgatggaactcactatgctgtcatgagttcctatgaatacctcagccaaggtctt

SEQ ID NO: 37523 - DNA, 404 bp, Gossypium hirsutum
  Clone ID: LIB3165-017-P1-K1-H8
cccacgcgtccgagattatagtgtaaatttagtcataataaagcccctcataacatcctgggacttgcttcattgattagccctctgaaagcccaagaaaaatggcttctgcttccgctactctcctcaagtcttcacctattatcgacaagtccgagtggattaagggccaaaacctccgccacccttcggtttgttttgtacggtcacaccctacatcggccgcctttaccgtccgtgctagttcatatgccgatgagcttgttaagaccgcgaaaactgttgcatctccaggtcgtggtattttggccatggatgaatcaaatgctacatgtgggaagcggcttgcctcgattggtctcgagaataccgaggcaaaccggcaagcttaccgtacccttctc

SEQ ID NO: 37524 - DNA, 409 bp, Gossypium hirsutum
  Clone ID: LIB3165-017-P1-K1-H9
ctcttttgtatacctgtagcatatagttttagttagcagtaatagcaatggcctcgtccgggatctcatcggcaaccattgccaccgtgaaccgctcctccccggcacaggccaacatggtggcccccttcaccggcctcaaatctgcctctgctttcccagtcaccaggaaggccaacaacgacatcacttctcttgcaagcaacggtgggagagtgcaatgcatgcaggtgtggccgcctcttgggaagaagaagttcgagactctctcatacctgcccgatcttactcccgtacagttggctaaggaagtagattaccttcttcgctctaaatggattccttgcttggaattcgaattagaggagggattcgtgcaccgtaagtactcgagcttacccacgtacta

SEQ ID NO: 37525 - DNA, 383 bp, Gossypium hirsutum
  Clone ID: LIB3165-018-P1-K1-A1
caaaatttgacccaaaatggcctctgtttgtgcttcttcggctattgcagctgttgccaggtcatgccccagttcccagaagactggatcagtagtggggacaacaaaggcttctttccttacagggaagaaacttagatctgtgagaaagtacacaaaaccagctgccggaccaacatttccagtgtgcgccgccgccgaccccgacagacccctttggttcccaggcagcactcctcctccatggctggatggcagtctccctggtgactttggtttcgatcctctcggtcttgggtctgaccctgagacattgagatggaacgtacaagcagagctggttcactgcagatgggcaatgttgggagctgcttgtattttca

SEQ ID NO: 37526 - DNA, 421 bp, Gossypium hirsutum
  Clone ID: LIB3165-018-P1-K1-A10
gagactcttttgtatacctgtagcatatagtaatagtaagcagtaatagcaatggggtcgtccatgatctcatcggcaaccattgccaccgtgaaccgctcctccccggcacaggccaacatggtggcccccttcaccggcctcaaatctgcctctgctttcccagtcaccaggaaggccaacaacgacatcacttctcttgcaagcaacggtgggagagtgcaatgcatgcaggtgtggccgcctcttgggaagaagaagttcgagactctctcatacctgcccgatcttactcccgtacagttggctaaggaagtagattaccttcttcgctctaaatggattccttgcttggaattcgaattagaggagggattcgtgcaccgtaagtactcgagcttacccacgtactacgatggac

SEQ ID NO: 37527 - DNA, 417 bp, Gossypium hirsutum
  Clone ID: LIB3165-018-P1-K1-A11
cccacgcgtccggtaaatttctcttgcaatcctttgtagagatccgggatccatgggcaggatgtcttgctcaaatctgacaatgtgggtgtcctcaaaaccctctctttctgacacttcttcactctctttccgttctttcatcagcccttttcagctcccgtctcagagctcaacccccggtaacccttccaggtcctcatctgtaaccccagttcactgtggtcttcgtgagcttagagaccgtattgattcagtaaagaacacgcagaagatcactgaagctatgaaacttgtggctgctgctaaagttaggagagcacaagaagctgttgtcaatggcagacctttctctgagtccctggttgaagttctttacaacatcaatgaacagctccagactgaagacatagatgc

SEQ ID NO: 37528 - DNA, 417 bp, Gossypium hirsutum
  Clone ID: LIB3165-018-P1-K1-A12
atactctatatcaccatggcaatgaccactttccatatgccacgaccttctttctggaagggtcagggtatcagattttcacagaaaccatcatggttccgagctcaacccagaaccaaactcaacccctcagtcaacattaaagcttcagctggtgtacgaaaagaagatatcgtcatcgtcggagctgggattgctggtctcgccactgccgtgtctcttcgcaggctagggattgggtcagtggtgcttgagcaagcagcgtcgcttagaactggtggaacctcacttacccttttcaagaatgggtggcgggtattggatgccattggtgttgctgatactctcaggggccaatttcttgaaattcaagggatggcggtgaattcagaagatggaagggagttacgctccttc

SEQ ID NO: 37529 - DNA, 400 bp, Gossypium hirsutum
  unsure (1)..(400): unsure at all n locations; Clone ID: LIB3165-018-P1-K1-A2
aaaaaaaaaaaaaaagcagagaatcaaaataatggttgtagcagtggcagcaacagcatcggctcggctaccggtatcaagttcccgctctttgtcacggctgtcaccatttcagctatgcgtatttgattccaagaccctcgtgtcatgccccagcaatggcaatggcagtaacaacagtatcaagagaaggcatgttaggtgcatggctgtggggacagcaccagaggcagaaaccaagaaaagtgggttcgaaatccagacactaacaggttggttgttgaagcaagaacaggcgggtactattgatgctgagctcactattgtcctttccagcatttccatggcctgtaagcaaatngcttctttggttcaaagggctagcatttcaaacttgact

SEQ ID NO: 37530 - DNA, 71 bp, Gossypium hirsutum
  unsure (1)..(71): unsure at all n locations; Clone ID: LIB3165-018-P1-K1-A3
naaaaaaaaaaaaaaaaaaaaaaaaaaaaaaattttttttttaaaaaaaaaaaaaaaaaaacgcccgggct

SEQ ID NO: 37531 - DNA, 404 bp, Gossypium hirsutum
  Clone ID: LIB3165-018-P1-K1-A4
gctttttccgttaaaaaaaaccctaaaattttttaattttctctcaacctccagccgaatcgtaatgtccagacctccaattgctcgcttgtaaccggcgaagcaaggccctccaacgaagcggtacgtggagatgtgaagagggcgttcatgggcgtgtcaacgtgaaatatgggaggtggaagcgtgggctgaagcaatggcgtgcgtagaggctggcacgaaggcagcagcaacgcaagggggaaagggaaagggttctgaaaactccaaaaacctgggcctactgggcttggttcatttcattcagtattaggccattgtaaaactttttgggcctgtttaaaatgcaataggtttgtattttgggccgggttaaatatgggttttacacttctattagt

SEQ ID NO: 37532 - DNA, 415 bp, Gossypium hirsutum
  Clone ID: LIB3165-018-P1-K1-A5
cccacgcgtccgctcaatcgaaacagaggaagttaagttatgcattagcaagaaaaaatgggttccgcaacactctcaactctttctctcagttccccttcttatccttcacccactactactacagcccattttttcaaaaccccttctcttcaattccctctccgttccaccgccactactaccctcacccaccgtaccacattcctccgtcctctcaacgccaccgcggcacccgaaaaaatcgaaaacctcggcactgaaatctccaacttaaccctcgaagaagcccgaacactcgtcgactacctccaggacaaactcggtgtctccgccgctgcatttgcccccgcggccgtagctgtcgcagcaccagatgccggtggtgccggaactccagttgttgaggaaaaga

SEQ ID NO: 37533 - DNA, 435 bp, Gossypium hirsutum
  Clone ID: LIB3165-018-P1-K1-A6
cccggcccgacccacgcgtccgcccacgcgtccggaagaagagaaaaaggaagattaattcccagagattatactaaaagtgcatgtccactgtgaagcttgtgctagaaaagttgcaagaaccctcaaaggatttgaaggagtggaggatgttgcgactgatagcaaggcaaataaggtggtggtgaaaggaaagacggccaaccccgtcaaggttcacgaaaggctattaaagaaatacggtagaaaagtggagttagtctcgccgttgccggaaccaccgacgccggaagagaacatggcagaaaacaaagaagctaaacccaaagaagaagaacagaaacaagagccttctgcagtgataacggtagtattgaaggtcggcatgcattgtgaagcatgcgctcaagcattgcgtaagcgaataaggaagat

SEQ ID NO: 37534 - DNA, 387 bp, Gossypium hirsutum
  Clone ID: LIB3165-018-P1-K1-A7
gtcatctgtctgtctctctgttttacttcacattcactatcactaccattatggcgtccgctactgtttctgtagccaaacccaaccttcagattcaggcaaaaggaaagggtgttggttttgcagatttctcaggcctacacaactcctctactagccttccctttgccaggaaaacctctgatgacttccattcactcgttgcttttcagacatctgctctaggaagcaataatggcgggtacaggaaagggatggcagaggcaaagctaaaggtggctataaatgggtttggtaggattggcaggaacttcttaaggtgctggcatggccgtaaagactccccacttgatgtcattgccatcaatgacactggtggtgttaagc

SEQ ID NO: 37535 - DNA, 264 bp, Gossypium hirsutum
  Clone ID: LIB3165-018-P1-K1-A8
cccacgcgtccgctcaaaagagtctgttatttttcttacttcctcaaaccaaaaggcacgccagcattataattgcttcctcaaaacctgtaattttcaatggttgtttaataatcctttttttccaacccaaacttaaaccaattccaccacttttccttccaaaacttcccaacccaaaagtcttgaaaacccaacaaattcccttacttttcttcaacaattttaaatttattttcctttttacaagcaccactttattct

SEQ ID NO: 37536 - DNA, 374 bp, Gossypium hirsutum
  Clone ID: LIB3165-018-P1-K1-A9
ctttcatcatgaggttgttaagagggctttggttcttgctatggaaattcgaacagctgggccatttttgctgaaactcttgaaggaagcagctgaggaagggttgataagttcgagtcaaatggtgaaagggtttgctcggttagcagagagtcttgatgaccttgccctagacattccatctgcaaaaaccttgtttcaatcgattgtacccaaagctatttctcaagggtggcttgatgcatcattcatgaaatcctcatgtactgatggagaggctcaaaatgaagacaaaaagttagaccggtacaagaaggagattgtaactataattcacgagtattttctctcggatgatattcctgaactcattc

SEQ ID NO: 37537 - DNA, 406 bp, Gossypium hirsutum
  Clone ID: LIB3165-018-P1-K1-B1
gttagctttagcatacactactagtacccactactagcaatggcttcctcaatgatctgggggggtaccattgccactgcctctccggcacaggctaacatggtcacccctttcaccggcctcaagtctgcctctgctttcccagtcaccaggaaggccaacaacgacattacttctctcgcaagcaatggcggcagagtgcaatgcatgcaggtgtggcctcctactggaaagaagaagttcgagactctctcatacctccccgatcttacacccgtgcagttggctaaggaagtagattaccttcttcgctcaaaatgggttccttgcttggagttcgaattggaggagggattcgtgcaccgtaagtactcgagcttacccacgtactacgatggacgctact

SEQ ID NO: 37538 - DNA, 412 bp, Gossypium hirsutum
  Clone ID: LIB3165-018-P1-K1-B10
cggacgcgtggggttattaatgcattggtataacttgaatgccaggctttatgttgggcagaggtgcttatatttccagaaaccgcttctcgagtctggaactcttggtgccaaatgcaacacacagatggttattcctcacctaactgaaaactatggtgcttcaagagacccacctgagaaacaagctcctatgtgcacagtgcactcatttcctcacaatattgaccattgtctgacatgggctcggtctgagtttgagggtctactggagaaaactcctgctgaagtgaatgcttatctgtccaacccagttgagtataaaactgcacaaaggactgctggcgatgctcaggcaagagataatttggaacgtattcttgaatgcctcgagaaagagaagtgtgtgaca

SEQ ID NO: 37539 - DNA, 423 bp, Gossypium hirsutum
  Clone ID: LIB3165-018-P1-K1-B11
cccacgcgtccgagactcttttgtataactgtttcatatagtactagtaagcaggggtaggaatggcctcctccatgatctcatcggcaaccattgccaccgtgaactgctcctccccggcacaggccaacatggtggcccccttcaccggcctcaagtctgcctctgctttcccagtcactaggaaggccaacaacgacatcacttctcttgcaagcaatggtgggagagtgcaatgcatgcaggtgtggcctcctcttgggaagaagaagttcgagacactctcatacctccccgatcttacacccgtacagttggctaaggaagtagattaccttcttcgctctaaatggattccttgcttggaattcgaattagaggagggattcgtgcaccgtaagtactcgagcttacccacgtact

SEQ ID NO: 37540 - DNA, 404 bp, Gossypium hirsutum
  Clone ID: LIB3165-018-P1-K1-B3
cccacgcgttctcaaaaacataaaaaaaatggctgcatgtgtagcaacaatggcgatgctgagtgcgaaatgcctaagcatcagctcaactaagatgagcagcccaacaaagccaaccccaaagcccttctcccttctctccatgcagaacctccccaaaggcctcaccatctcaaaaccagccaacaactcaaacctaccttcttcactcgctggcagcgccattgctggagctatcttctcaaccttaagttcatgtgaccccgccttagctgcacaacagattgctgaaatagctgaaggagacaaccgtgggctagctctattgcttcccataatcccagcgatcgcttgggtcctcttcaacatcctccagccagcacttaaccagctgaatcgaatga

SEQ ID NO: 37541 - DNA, 414 bp, Gossypium hirsutum
  unsure (1)..(414): unsure at all n locations; Clone ID: LIB3165-018-P1-K1-B4
cctattatcttccttccttttcattccttttgttatttcaggaactggggtggtcgctcgtaggggaacggcgcaatagctgaaacccacaaatcccctttctccgtcaaggttggcctagcccaaatgctccgtggcggggtgattatggatgtcgtcacccctgaccaagctcgcatcgctgaagaagctggagcctgcgccgtcatggctcttgaacgagttcccgccgacatccgagcccaaggtggcgtggcgcggatgagtgacccacaactcatcaaagaaattaagcaagctgtcaccattcccgtcatggccaangctcgtattggccatttcgttgaggcccagatccttgaagccattggcatcgactatgttgacgagagcgaagtcttaccctcgccgacg

SEQ ID NO: 37542 - DNA, 263 bp, Gossypium hirsutum
  Clone ID: LIB3165-018-P1-K1-B5
gaggaattctatcaccttattactctggctaaggataaattagacaagtcaatggtggccccgcattatatcttgttatagcattgaaactcaaattcgaaccagctctggcatgtttcttcagaaagctcatgatgaagtagttgctgatatctaacctaggattgctgcatggactttccttccattaaagaatggggtgtccatgcatatactacattaccagaatgttctatagttttaaccacattttcatttttttt

SEQ ID NO: 37543 - DNA, 422 bp, Gossypium hirsutum
  unsure (1)..(422): unsure at all n locations; Clone ID: LIB3165-018-P1-K1-B6
cccacgcgtccgcatcgctctttttcatcgattttatttcttcaaacccatctgtcaaaagaacgctccactcattccatccatgacgcttggctcangaggatccagtgttgtggtgcctcggaacttcagattgctggaggagcttgagcgtggagaaaaaggtattggagatggtactgtcagctatggaatggatgacggagatgacatttacatgcgctcttggactggcaccattattggtcctcataatactgtacatgaaggtcgaatctatcagctgaagctgttctgtgataaagattatccagagaagccaccaagcgtccgttttcattcaagaatcaacatgacttgtgttaaccacgaaactggagtggtggaaccaaagaagtttggacttcttgcaaattggcaga

SEQ ID NO: 37544 - DNA, 399 bp, Gossypium hirsutum
  Clone ID: LIB3165-018-P1-K1-B7
atttcctagtcttccacgatgactcccctccttttcttcctcctcctcctcgtccgcctcctttcgtcagctgctttaatctccgccgccgccgccaccaccgcatatccttccatcccgggcaccgattccacaactgattgtggcctatccggaggagacgagaatccagttcccatccgtcgcgaagtctacggtaacggcaagatattcgacatcagccataggtacaccgtcgacatgccgtcttgggaatccaaggacggcgtaggacagttcctatggttgcctaaaagcatgaagaacggttccctcgctaataattcggagatgaaactcccaactcacaccggcacccaccttgacgctcccggacacgtcatcgatcggtacttcgat

SEQ ID NO: 37545 - DNA, 354 bp, Gossypium hirsutum
  Clone ID: LIB3165-018-P1-K1-B8
cggagaaccagccaagttgatcaggcattggtttcgtgaggccgccgacattatcgggagggggaaaatgtgttgcctctttatcaacgatctcgacgctggagccggtcgtatgggaggaaccacacaatacacagtgaacaaccaaatggtgaacgccacactcatgaacatcgctgataaccccaccaacgttcagctccccggtatgtacaacaaggaagagaaccctcgtgttccgatcattgtcaccggtaacgatttctcgacgctgtacgcgccgctcatccgtgacggtcgtatggagaagttttactgggcacccaccaaggaagataggatcggtgtttgcac

SEQ ID NO: 37546 - DNA, 369 bp, Gossypium hirsutum
  Clone ID: LIB3165-018-P1-K1-B9
cggacgcgtgggcggacgcgtgggcgtgtacgctttggcggacgcgtgggcggacgggtggtcagtgagactcttttgtatacctgtagcatatagtaatagtaagcagtaatagcaatggcctcctccatgatctcatcggcaaccattgccaccgtgaaccgctcctccccggcacaggccaacatggtggcccccttcaccggcctcaaatctgcctctgctttcccagtcaccaggaaggccaacaacgacatcacttctcttgcaagcaacggtgggagagtgcaatgcatgcaagtgtggccgcctcttgggaagaagaaattcgagactctttcatacctgcccgatcttacttccctacag

SEQ ID NO: 37547 - DNA, 406 bp, Gossypium hirsutum
  Clone ID: LIB3165-018-P1-K1-C10
cccacgcgtccgatcacccccaaaaaacaaagtttattgtagaagatggcaacacaggcgctggtatcatcgtctcttacctactcagtggagactgcaaggcagattcttggagctaaacgacaaattgggccttcaaggaaaggatcctttgttgttaaggcagcttcgactccacccgttaagcaaggagctgatagacctttatggtttgcatctaaacaaagcctttcatacttggatggcagccttccaggtgattatggatttgaccccttgggactctcagaccctgaaggtccaggagggttcatcgagcctaaatggctagcctacggtgagatcatcaacgggcgttatgctatgttgggtgcagtaggtgcgattgcccctgaaatacttggga

SEQ ID NO: 37548 - DNA, 401 bp, Gossypium hirsutum
  Clone ID: LIB3165-018-P1-K1-C12
cggaactagcgagacctgaggaaaagcttgctggtcttcgaattgatgggaaatgtgacgccaggagccggatgtctttttacactggcatagggattcattcactgatgcctgatggttctttgggacccgaaacagaggttagaggattgcctgatggtgctaagattaattttgttacttggtctaatgatggtaaacttttggcctttagtgttcgttttgaggaagaggagagtagttcaagtaaacttagagtgtgggttgccgatgtcgagactggaatggctaggccgctgtttcagtctccagatatttatctgaatgcagtgtttgataattatgtttgggtggataactctaccctcttagtttgtactattcctttgtctcgtggagat

SEQ ID NO: 37549 - DNA, 472 bp, Gossypium hirsutum
  unsure (1)..(472): unsure at all n locations; Clone ID: LIB3165-018-P1-K1-C2
atacccgggctcgaccccacgcccgtccgtnattgaattcaaagaaccttgacccatgccccagtatcttcgtatttttgctttctttctttcctatatgccggggtagcactttccctccattttcaagatcggagagcaaagttattacccttgtgaacaaacctgcaaggaaaagccatntggccctgnggtaccttggcagtgcagngtcagtccaactcctaaaaatggtgcgattccaatcttggtagtggtgaagaagtagttcttgacgttccacagaaatggtctgggaggatatgggccaggcaaggttgtaatttcaacagtaatggcaagggttcttgtgatactggtgactgctccggacgacttcagtgccaaggaacaggcggtacaccacctgcaaccgtgatagaaatgactcttgggtcatcttcttcaccactgcatttctatgatgtaagtt

SEQ ID NO: 37550 - DNA, 300 bp, Gossypium hirsutum
  Clone ID: LIB3165-018-P1-K1-C4
ataaatattctattccctttcgagataaagagaaacatttatttcaagttacaacctaagagcctttttcaacatcttatctttctttgattccagaacacaacaagatccatttctatctatatattctatctattctataatagatagaaacctaaatcaaatcatgtcttcacatatcaaatatttccatatcgatacatatgacacttttgttctgccaatgtgatggagagtgagtgcgaaaaagaaaccttcattttgagcctcctattatttaatttaatattatttaatatt

SEQ ID NO: 37551 - DNA, 427 bp, Gossypium hirsutum
  unsure (1)..(427): unsure at all n locations; Clone ID: LIB3165-018-P1-K1-C5
gcaagaccaagtaaaacgagtcctaagcaagattaaatagccagaaacaaactcgaaagagaagagggagtaaagcttgaaaatgtgccaagcaagtatccgattttgaggaggcggcatagattggttgttttaatacttgactgctatgacagcaacgggttacctgagaagaagatggctcaaattatacaagacatatttaaggctgttcggctggacactcaaaatgcaaaattcacaggttttgctatatcgactgctatgccagtctcagaaacaatggagttcttgaaatcagcaaagattcaagtaaatgagtttgatgctctgatctgtggcagtggcagtgaagtgtattaccctggaacttacacaacaaaaagatggaaagcnttttgctgatcctgattatgcctctcatatt

SEQ ID NO: 37552 - DNA, 426 bp, Gossypium hirsutum
  unsure (1)..(426): unsure at all n locations; Clone ID: LIB3165-018-P1-K1-C6
agcaattgtcctcaaatatctcatacaaggaattaatttgaatcaatggctcaaaccagtcgcgcggatgtctagccatgcagtgagcttgaanagagatcaccctttactccatttccaagctcaagggctcaagcctaaacctgtctctcatctcttcttcaatccattgtctaacggtgtccatacttcatccaaagctttcaccactttagctatctttaaatcaaagaccaaagcagctcccaagagggttgagccaaagtcaaagcccaaaggttgaagatgggatctttggcacctctggagggattggttttaccaagcaaaatgagctctttgtgggacgtgttgccatgcttggttttgctgcatcattgctaggcgaagcaataacagggaaaggaattctagcacagctgaatt

SEQ ID NO: 37553 - DNA, 400 bp, Gossypium hirsutum
  Clone ID: LIB3165-018-P1-K1-C7
cccacgcgtccgtaaaataggagactcctcccatttttcttcattttcctccaacgataggcattatatttatatttcttcctctctcttctttatttcttcaagtttaaggcctcaaaatggaggcagccactgtggttggatcttctatgtctctacatcgaacttcatgctccgctgccagatccgcccttttagctgccaatggcccgctctttccacgtttcgctgctaaccctcgctcctccttctcgatcaagctttattcttcagtttcatattcaaaatcacggaataggagaatgggtttggggggtaggagaggcatggtggtaaaggcgtcttcatctcctgactcagctgaacccaatgctcaaattgcgtcacttcggatggaatc

SEQ ID NO: 37554 - DNA, 407 bp, Gossypium hirsutum
  Clone ID: LIB3165-018-P1-K1-C8
cccacgcgtccgcaactcgattatgttcctgctactatcatggccttggaagaggggccgaaggcttttcaaggtcgggttcctgtcttcttggacggtggtgttcggcgtggaaccgatgtttttaaagctttggcattgggagcctctggtatatttattgggcgaccagtggtgttctcattagctgctgaaggagaagctggcgtgaggaaagtgctttcgatgctgcgtgaggagtttgagctaaccatggcgttgagcggttgtcgttctcttaaagaaatcactcgtgaccacatcatgacagaatgggacagtcctcatcctcgtccggccccgagactgtagagccttatatattatgggcttggaactttagcctagcaaatcgcaagatgaactta

SEQ ID NO: 37555 - DNA, 392 bp, Gossypium hirsutum
  Clone ID: LIB3165-018-P1-K1-C9
gcatactatcaaatggcagctactgcagtaattaccactctcccccagttcagtggttagcacccaaagtttctactgctccacttaggagcctggcagcagttcaaccaatgaggcgcaaggggaagggtgctctcggtgctcgatgtgatttcatcggatcccccacaaatttgataatggtgactacaacaaccctgatgctgtttgctgggaggtttgggttggctccatcagcaaacagaaaggccaccgctggattgaagcttgaagtaagggactcaggcttgcagactggtgaccctgctggttttacacttgctgacactttggcttgtggtgttgttggccatatttttggtgttgggatcgttcttggtctcaagaacatt

SEQ ID NO: 37556 - DNA, 425 bp, Gossypium hirsutum
  Clone ID: LIB3165-018-P1-K1-D1
agcaaaatattgtccctggtatcaaagttgacatgggtttggttccactccctggttccggcacgagtcatggtgccaaggtcttgacggtctttcatcccgcacagctgcctactaccagcagggtgctcgtttcgccaaatggcgtaccgttgtgagcattccaaatggtccatctgccttggcagttaaagaagcagcttggggacttgctcgctatgccgccatttctcaagacagtggattggtcccgattgtggagccggaaatcttgcttgatggtgaccatggaattgataggactttcgaagtagcgcagaaggtttgggctgaggttttcttctaccttgctgagaacaatgtaatgtttgagggcatccttcttaagcccagcatggtcactcctggtgctgaatgcaaagaca

SEQ ID NO: 37557 - DNA, 405 bp, Gossypium hirsutum
  Clone ID: LIB3165-018-P1-K1-D10
cggacgcgtgggctttgttgagacttttatacttatctttgctgaattttcgtgagcgtcgagaaagaaaattatgggaaggaaattcttcgttggcggcaattggaaatgcaatggaaccactgaggaagtgaataagattgtgagtactttgaatgctggagaggtgccttctcaggatgttgttgaggttgtggttagccctccatttgtgttccttcctttggtcaaaacttcactgagacccgatttccatgtcgctgcacaaaattgttgggtcaagaaaggaggtgctttcactggtgaagttagtgcatagatgcttgtcaatttgagccttccttggggtaattattggtcattctgagaggagacttattttgaaggagtcaaatgagttcgttg

SEQ ID NO: 37558 - DNA, 419 bp, Gossypium hirsutum
  Clone ID: LIB3165-018-P1-K1-D12
cccacgcgtccgcccacgcgtccgcccacgcgttcgcaaaatttgacccaaaatgggctgggtttgtgcttcttcggctattgcagctgttgccatctcatcccccagttcccagaagactggatcagtagtggggacaacaaaggcttctttccttacagggaagaaacttagatctgtgagaaagtacacaaaaccagctgccggaccaacatttccagtgtgcgccgccgccgaccccgacagacccctttggttcccaggcagcactcctcctccatggctggatggcagtctccctggtgactttggtttcgatcccctcggtcttgggtctgaccctgagacattgagatggaacgtacaagcagagctggttcactgcaaatgggcaatgttgggagctgctggtattttca

SEQ ID NO: 37559 - DNA, 421 bp, Gossypium hirsutum
  unsure (1)..(421): unsure at all n locations; Clone ID: LIB3165-018-P1-K1-D2
ttctattcagttttgtaagagctatggctaattacattgaggttggtggtgagttccacggcaaggactaccatgatcctncacccgctccattggtcgacgctcaagagttagccaagtggtctttttacagggctgtcatagctgagttcattgccactctcctctttctctacatcactgtcttgactgtgatcggttacaagacccagaccgaccctgctaagggcggtgaagattgtggcggcgttggcattctcggcattgctttgggcttttggtggcatgatctntatccttgtttactgcactggcggtatttctgggggacacatcaacccagcagtaacctttggacttttcttggctaggaaagtgtcgttggttcgagccatattttacatgggtgctcagtgtttgg

SEQ ID NO: 37560 - DNA, 400 bp, Gossypium hirsutum
  Clone ID: LIB3165-018-P1-K1-D3
cccacgcgtccgccttttctcctttttctttttctcatacaagatgggttctcagggatcgggggtggcgatgcttttgctgatgatgttcactttatcatcagcttccgacatgtccattatatcctacgatgaaacacatcccgacaagtcaacgtctagttggagaacagacgacgaagttatggccatgtacgaggagtggcttgtaaagcatggaaaaacatacaacggtttgggtgagaaagagaggaggttccagatttttaaggataaccttaggttcatcgatgaacataacgccgatgagagtcagagttttaatgttggtttgaacccgtttgctgatcttaccaacgaggagtaccgagccatctacctgggaatcaagaaacccaac

SEQ ID NO: 37561 - DNA, 342 bp, Gossypium hirsutum
  Clone ID: LIB3165-018-P1-K1-D4
gttttctgctctgtttttcagtgacaagttttttttgtaaaaccagtttcaattgaagtcggcagcctaaatgggaaatacagagttattagcaccaaacctatgcctggaactcgatggatcaacctcttaatcgagcaagattgccgtgtcgaaatatgtactgagaagaaaacaattttgtccgttgaggatatcatttctttgattggcaataagtgcgatggggtgattggacagttgactgaagactggggggagactttatttgcagctttaagcagagcatgaggcaaagcatttagtaacatggctgttggttacaacaatgttgatgttaat

SEQ ID NO: 37562 - DNA, 428 bp, Gossypium hirsutum
  Clone ID: LIB3165-018-P1-K1-D5
cccacgcgtccgtgatgattctgtctccaagactaccaaaccatcgtctccgaaattctgtgagacgcttttgagttcatttcctctatgtcgtcagggtttgatttgtcgagtttgttcgaaaacaagaggaaaccgaggacgatgttcacgtcgagatgttcacctacaacaatcatggcgaaaattgaagttgtggtgaaggggttgaacttcagagtaggaaaagtcaaggacttcaagatgaaactacaagggtcatcagaaggacggaaagggaagctcttggtgactgcggaggtgtctgaagtggcaccggaggtagcaattgtggaattctccaagtcttccggtgacaccttggaatatgctcagttctgcgaggaaagtgtgaggcctgcattaaaagacattgtttggacatggca

SEQ ID NO: 37563 - DNA, 425 bp, Gossypium hirsutum
  Clone ID: LIB3165-018-P1-K1-D6
atacactactagtacccactactagcaatggcttccttaatgatctcatcggctaccatggccgctgcctctccggcacaggctaacatggtcacccctttcaccggcctcaagtctgcctctgctttcccagtcaccaggaaggccaacaacgacattacttctctcgcaagcaatggcggcagagtgcaatgcatgcaggtgtggcctcctactggaaagaagaagttcgagactctctcatacctccccgatcttacacccgtgcagttggctaaggaagtagattaccttcttcgctcaaaatgggttccttgcttggagttcgaattggaggagggattcgtgcaccgtaagtactcgagcttacccacgtactacgatggacgctactggaccatgtggaagctgcccatgttcgggtg

SEQ ID NO: 37564 - DNA, 416 bp, Gossypium hirsutum
  Clone ID: LIB3165-018-P1-K1-D7
tttctttctcacttgtcttcctcccctttccttttaatggctgcaatcactaatccgttggctaaaccacctccttccgatcttcttcacttcaccccaaaactcacttctcttggctctcatgcttcttttctaccatcccttgcgactaggcccagatctttttcaacaaagctaggaacaagcaccagctctcgcttcattaccaatgctacagccgctcctgggaccaaggatgctccgagtgatgagcgagttcagaaggttcacagcattgaggaattcgacgaagctctcaggaaggctaaaaacaggcttgttgtggtggaatacgccactagcttcagctatcatagcactaaaatttacccgtttatggtagaccttagcacgacatgcaacgatgtccaattcat

SEQ ID NO: 37565 - DNA, 418 bp, Gossypium hirsutum
  Clone ID: LIB3165-018-P1-K1-D9
gcaactcccgatatgggaagttcaccaccgttttaatgtcatctacttcccagtcggcagcaaggccgccgcgaagggtggcaagaaagctgccaaaaccgccatcaaagagacccttttgacaccaaggttttacacaaccgactttgatgaaatggaggcgcttttcaacactgagattaacaagaaccttaaccagtccgaatttgaggcactgctgcaagagttcaagactgattacaatcagactcactttgtaaggaacaaggagttcaaagaagctgctgataagattgatggtcctttgagacaaatcttcgttgagttcttggagaggtcttgtactgctgagttctctggttttctcctctacaaagaacttggaaggaggctgaagaaaaccaatccagttgtggct

SEQ ID NO: 37566 - DNA, 409 bp, Gossypium hirsutum
  Clone ID: LIB3165-018-P1-K1-E1
tctcaggttaataaaaatactgaagctccatccaagatcttccttatcaactgcttgtgtgctatgtaacaaccattactcggacatgaggttgcagctgaatatgcaaagaaacttggcactacgattgataatcatgtaaatgttctcgtggaaaaagaagttgacacaattcttagaagatgtgatttatcaacgaagatgcatcacttccataattggtttaacaaggatacaacagctgggacgccattggctgagttagaagacacaactccagcttctctttcagagtgtttgaaggcctttttcggatttattttgggaagtgacagttcgctgcctgagtttgaacaaatgcaagttccaaagttgcgttctgatgcgtgtatacaggtagctaagtcat

SEQ ID NO: 37567 - DNA, 421 bp, Gossypium hirsutum
  Clone ID: LIB3165-018-P1-K1-E10
aattaatcaaccacacactcaggcagccttggtatcagcctcagctttgttaaccgccaggttcaccaccaccctccaaaacaaacatggcagccgccacaacatcgccactccatcgttccaaggcctcaggcccctacgcaaggccccctcctccaagctcgcccccttgtcttgtggtagaaaggttggtggtgtgaaggctgagctaagcgccccagtggtgataagcctaagcacaggcctctcccttttcttgggtcggttcgtgttcttcaacttccaaagagagaacgtggcgaagcaagtgcctgagcaaaacgggttgacccatttcgaagcgggtgacactcgagccaaggagtatgttagcctcctgaaatccaacgatccggtgggattcaacctggtggatgttctg

SEQ ID NO: 37568 - DNA, 417 bp, Gossypium hirsutum
  Clone ID: LIB3165-018-P1-K1-E11
taacatttcacgaacttcactctccagtctcctatggcggctgccgtctccaccgggggggctgtcaaccgagcaccgttgagtttgaatggatcaggtgccggagcttctgctccaagctcagctttcatggggaacagcttgaagaaagtgagcgctaggttcaacaacaacggcaaggctccagtgggaagtttcatgattgtggctgccaaagaaatcgacgaagacacacagaccgaccaggaccgatggaagggtcttgcttatgatatctccgatgaccaacaagacattaccagagggaaaggtatggtcgactcattgttccaagctcccatgaacgatggtactcactatgctgtcatgagctcctatgagtacattagccaaggccttcgcacatacgacttggac

SEQ ID NO: 37569 - DNA, 410 bp, Gossypium hirsutum
  unsure (1)..(410): unsure at all n locations; Clone ID: LIB3165-018-P1-K1-E2
attttctactgcttttcttctcttccaagccttctttctcttctgtgtctttcgtcgctggtcgagccatggttctcgaggctactatgatatgcattgataactcagagtggatgcgaaacggcgattattctccgtctcgatttcaagcccaagctgatgctgttagtcttatctgtggagctaaaacccagtctaatccggagaatacggtggggattttgactatggcgggcaaaggagtacgtgtattggctactcctactagcgatcttggaaaaatcttgtcttgcatgcacggtcttgaaatggggggtgagatgaacctagcagctggaattcagattgctcagttggctctaaagcatcgncaaaacaaaaatcagcaacaaaggattatagtttttgct

SEQ ID NO: 37570 - DNA, 408 bp, Gossypium hirsutum
  unsure (1)..(408): unsure at all n locations; Clone ID: LIB3165-018-P1-K1-E3
atcatgcgtagaancattatctgctgctttacttatttgtggggaagaggaaactgcacggtcgctgttatgcaagttcaaatggggtcatcccttcctgtcccttaacagggaacttttgaaggcatattctgaatgtgaaaatagtgctgacatcatatcagtccaaaattcttggctttcccaacaaaggcaggtccctaaggttccaccagatgcagcagaaggtgcatccaatgattcagaagatgaggagggttcttccaatgattctgaagatgggctacctcctctagaaaggaacatgaaccattttagtttgcaggaaagtgatgatgaaagtgagttagtagtattcagcaatagtttcattcacaagtaaacaccattagtaagttgaaagaggga

SEQ ID NO: 37571 - DNA, 227 bp, Gossypium hirsutum
  unsure (1)..(227): unsure at all n locations; Clone ID: LIB3165-018-P1-K1-E4
ataacccgggccgaccgcacgcgtccgcacttgcaactganatggcccctgttactcgcgttaaagctgtcgctccaggttttggccctgccaactttgcagcatacatcacaaaanatnaggatgtgaagaaggttaacgaggaaaagaccttacttggaaggcttggtaccccaaaagacatggctgctgcagctgctttttttgtattcgaaaatgcttgtttt

SEQ ID NO: 37572 - DNA, 410 bp, Gossypium hirsutum
  Clone ID: LIB3165-018-P1-K1-E5
cccacgcgtccgcccacgcgtccggagaacctttgtgttccgatcatcgtcaccggtaacgattgctcgacgctgtacgcgcctctcatccgtgacggtcgtatggagaagttttactgggcacccaccagggaagataggatcggtgtttgcacaggtattttcaggaccgacaatgttcccgttgatgaccttgttaagcttgttgacaccttcccgggccaatccattgactttttcggtgctctgagggccagagtttacgatgacgaagtgaggaaatggatcggagaggtcggagtcaatggtgtcgggaaaaagctcgtgaactcgagggaagggccaccatctttcgagcaaccgaagatgaccattgagaagctgttggaatatggatacatgcttgttgc

SEQ ID NO: 37573 - DNA, 425 bp, Gossypium hirsutum
  Clone ID: LIB3165-018-P1-K1-E6
cccacgcgtccgcccacgcgtccgttcttattgtgacttgaactcatagggaagaaaagggatgggtggaatcaaatatgtagtagttacagacaaaagtattcggttattggtgaaaaatcaatatacttttaatgtcgaatcaggattaactaggacagaaataaagcattgggtcgaactcttctttggtgtcaaggtaatagctatgaatagtcatcgactccccggaaagggtagaagaatgggacctattatgggacatacaatgcattacaggcgtatgatcattacgcttcaaccgggttattctattccacctcttagaacgaaaagaacttaaaatcaaaatacttaatagcatggcgatacatttatacaaaacttctaccccgggcacacgcaatggagccgtagacagtcaa

SEQ ID NO: 37574 - DNA, 358 bp, Gossypium hirsutum
  unsure (1)..(358): unsure at all n locations; Clone ID: LIB3165-018-P1-K1-E7
caagcttctattcagttttgtaagagcttttgtttaggacattgaggttggtggccagcccaggccaaggactaccatgatcctccacccnctccattggtcgacgctcaggagttagccaagtggtctttttacagggctgtcatagctgagttcattgccactctcctctttctctacatcactgtcttgactgtgatcggttacaagacccagaccgaccctgctaagggcggtgaagattgtggcggcgtttgcattctctgcattgcttgggcttttggtggcatgatctttatccttgtttactgcactgcctttatctctgggggacacattcaacctcacagtaaccttt

SEQ ID NO: 37575 - DNA, 420 bp, Gossypium hirsutum
  Clone ID: LIB3165-018-P1-K1-E8
attcagcgaaggggtgctctgagatcacatactaaaatggtgaaggccgttgccgggctgcgcagcaatgaaggtgttagcggaactgttttcttctcccaagaaggagatggtccaactaccgtgactgggaacctttctggtcttaagccgggactccatggcttccatgttcatgcccttggggacacaactaacgggtgcatgtcaactggaccccattttaatcctgctggcaaagagcatggtgctccagaagatgagaaccgccatgctggtgatctagggaatgtcactgttggtgatgatggctgtgcaagcttctccatcaccgacaaacagattcctctcacaagcccaaactccattatcggaagagctgtagttgtccatgcagatcccgatgaccttggcaagggc

SEQ ID NO: 37576 - DNA, 336 bp, Gossypium hirsutum
  Clone ID: LIB3165-018-P1-K1-E9
gaagaactaaattccccagaatttgctttatttttggctccctcagttatcgctgggtcaggtaccctcaagccttcattcaatgttgcgaaatctggtgtaagaggggttccttcccttgctaggtccccttcttctttcaaggttgaagccagtggtggcaagaagatcaagaccgacaagccttatggaatcaatggtggtatgaacttgagggatggtcttgatgcctctggaaggaagggtaacggaaagggtgtttaccaatatgatgacagatatggtgctaacatcgataggtacagtcctatatacaacaccaacgactggtcttcc

SEQ ID NO: 37577 - DNA, 424 bp, Gossypium hirsutum
  Clone ID: LIB3165-018-P1-K1-F1
ttgaacacttaaagggagatcaagttcaaaaactgggatggcttttgtaacgtcggagcagttgctggccactttggtgccaattgctgtttattggatatactcaggtatgtatgtgatgtttgagtcaaggtttgagaagtacaagttgcactccaagaaagaagaggaggagaagaatttggtttccagaaaggaagtcttcaaagccgttctttgccatcaagtcatgtcaattgctattaacctcttcacgtatgcggtaacaagagaaaaagatggtgaggcatctccaaagaaatcactaaccttgcttcttctagccaagcaattggtgatagcaatggtggtgatagatacatggtcgttttttgtgcattggtacttgcatcagaacaaggttttatacaaacaccttcatgtt

SEQ ID NO: 37578 - DNA, 419 bp, Gossypium hirsutum
  Clone ID: LIB3165-018-P1-K1-F10
gaatctacaaaagggctacttctccacttggtctctgaaccaaaccatgggttctgctgggatcactctcccaacccttcaaggttctctatttcaatctcatttcctaaccggggggttccccggtggtgaaaagggattgaaaaagttcattgaggaaaacccaccaccggcgaagcaatcagtttccgattcggtaagtattgctaggcttgggaagccaaaatcaccggagttgccactgttaatgccgggaatgatcgcgattgttaagaacccgaacaaccccttctacatgtactgcggcattgtgcagcggatcactgatgggaaagcaggggttcttttcgaaggtggaaactgggatagattgatcacgtttcgactggacgagcttgaacgcagagaaaaaggccctt

SEQ ID NO: 37579 - DNA, 408 bp, Gossypium hirsutum
  Clone ID: LIB3165-018-P1-K1-F12
cccacgcgtccgcaactcaccatttggtgtatttgaatgctaaatccctgagacagatatggttttgccatccccacttctatgagctgatggtgcatgctttacagtgaaattgctcttattttatccaatttaatcttgtctagtgtggtaacatctgcgctaactttcttgcaggtaattagatgctggaatgcttatttgggtcatgaaattttcaaaagtgtagtaggtcttggagggttgggccgtgggcctgagctttgtgtatggtcattactttctttgaggtgcggaactgttgttagtgcagacagcaccggatctgttcagttctggaatggtgataatgggactcttcttcagacacattctacccacaaaggtgatgtgaatgccttggcagca

SEQ ID NO: 37580 - DNA, 419 bp, Gossypium hirsutum
  Clone ID: LIB3165-018-P1-K1-F2
taaaatgaccacaattttgggtattcacttaatttttctaggtataggtgcttttcttctacgattcaaggctctttattttgggggcgtatacgatacctgggctccgggagggggagatgtaagaaaaattaccaacttgactcttagcccaagtgttatatttggttatttactaaaatcgccctttggaggcgaagggtggattgttagtgtggacgatttggaagatataattggaggacatgtatggttaggttccatttgtatatttggtggaatctggcatatcttaaccaaaccttttgcatgggctcgccgtgcacttgtatggtcgggagaagcttacttgtcttatagtttaagtgctttatccgtttttggtttcattgcttggtgctttgtctggttcaataata

SEQ ID NO: 37581 - DNA, 370 bp, Gossypium hirsutum
  unsure (1)..(370): unsure at all n locations; Clone ID: LIB3165-018-P1-K1-F3
gtagcagccattaaagccatgtctccgtgcgttacctacgccgctcgaaccctcggctggcgcgacggcgccgncgcgtcacacctaaagctcatctctcttgtagtaatcttcatctccagcatcgccggcatatcttcccctatcttcctagctcgttacttccaagggaaacccgtttacgacaaggcgattttggtaatcaagtgcttcgccgccggcgtcatcctctcgacctccttagttcacgtcctccccgaagccttcgctgctctctccgattgccacgtcgcttcccgccatccgtggaaggatttccctttcgctgggctggtcacgttactcggagcccttctggctcttttcgtcg

SEQ ID NO: 37582 - DNA, 429 bp, Gossypium hirsutum
  unsure (1)..(429): unsure at all n locations; Clone ID: LIB3165-018-P1-K1-F4
attcccgggctgtatcatcttattttggtataccctcttcttttttttttttttcttattttctctncttgcaaagatggcaccagcctcagcatgcttgctaggaaacggtctgtctactcacagaactaaatcgaagttgagtaaagacttttatgggaggaatattgtatttacccccgccatttcatcgttgggtcggaaatcgaatgccgtacttgtaaaggcatctttaaaacttaaacaacatgaaggaagaaggggattcttgaagtcattactcggaactgctggaattggagttccggctttactaggaaatggtgaagcgtatgctttttaacaaggggtttcttcctctagaatgttcttatttttagtttttaaatttttttatttcattatctggttatataaatttttttcttt

SEQ ID NO: 37583 - DNA, 405 bp, Gossypium hirsutum
  Clone ID: LIB3165-018-P1-K1-F6
cttcccttaattactaatggaatagaacaaatattaatcctttctccgaaagaatccaccgaagaggggaggtattccaatgcaataaagttacatagtgtctatttttcgttgataaaggggtatttccatgggtttgccttggtatcgtgttcatactgtcgtattgaatgatcccggtcgcttgctttctgttcatataatgcatacggctctggttgctggttgggccggttcaatggctctatatgaattagccgtttttgatccctccgatcccgttcttgatccaatgtggagacaaggtatgttcgttatacccttcatgactcgtttaggaataaccaattcatggggcggttggagtattacacgggggactataacaaatgcgggtttttggag

SEQ ID NO: 37584 - DNA, 419 bp, Gossypium hirsutum
  unsure (1)..(419): unsure at all n locations; Clone ID: LIB3165-018-P1-K1-F7
cccactcctcctgtactagtaagcagttttagttatggcctcctccatgatctcaccgcaaccattgccaccgtgaactgctcctccccngcacaggccaacatggtggcccccttcaccggcctcaagtctgcctctgctttcccagtcactaggaaggccaacaacgacatcacttctcttgcaagcaatggtgggagagtgcaatgcatgcaggtgtggcctcctcttgggaagaagaagttcgagacactctcatacctccccgatcttacacccgtacagttggctaaagaagtagattaccttcttcgctctaaatggattccttgcttggaattcgaattagaggagggattcgtgcaccgtaagtactcgagcttacccacgtactacgatggacgctactggaccatgtg

SEQ ID NO: 37585 - DNA, 404 bp, Gossypium hirsutum
  Clone ID: LIB3165-018-P1-K1-F8
taactcttcaaccaaaaccctatacacttattttaaaagctcaatttctctagaaccagctcgccaattcgctctttcttcgctcgaccgcctgctgttcttcgctctccttacccttttgcatccctcagaaaagaagaaaaaaaaccgttgacttttcgtttttggggggggggccaaactcgaagaccccaatttgttcaaaaagagagagggttgaaaaatggatcaagggttactggatgatattataaaccggcttttggaagttaggggtcgaccagggaaacaagttcagttatctgaatcagagatccggcagctttgtttggtttctaaagagattttcttacaacaacctaatttgttggaacttgaagcccccatcaagatttgtggtgata

SEQ ID NO: 37586 - DNA, 436 bp, Gossypium hirsutum
  Clone ID: LIB3165-018-P1-K1-G10
gttcagcaggtcatcaaagacatcagggagttcaaagagaaaattaaggttgacaaggttgttgtactctgggctcgaaacactgagaggtacagcaatgtcattgtggggctaaatgacaccgtggaaagccttatggcttctttggagaagaatgaatcagagatttctccttccactttgtatgctattgcttgtgttcttgaaaatgttcctttcatcaatggcagcccacaaaacacctttgttccagggttgattgatttggctattcaaaggaactgtctgattggaggagatgacttcaagagtggccagaccaagatgaaatctgtcctcgtggatttccttgttggggctggtatcaagccaacatcgatagtgagttacaaccatctgggaaataatgatggcatgaatctgtcagcaccccaaa

SEQ ID NO: 37587 - DNA, 418 bp, Gossypium hirsutum
  Clone ID: LIB3165-018-P1-K1-G12
cggacgcgtggggttactctctacctttcacattcgcatcatggccgattccgccgccgggtcttcccccctaaaagtcatcgccggagctgattcttttggcgccgagctaaaagacgccatggtatcccacctccgctccctcaacatagaagtcgaagatctcggaatcacctcctactacaacatcggtgctgaagtcggccgtcgagtatcttccgccaccacctcgccctccttggagacccgtggcctccttgcttgcggaacgggcgtcggagtcgggatcttcgccaacaaattccccggcgtgttcgccaccacatgtctcactccggacgaagctcgcaacaatcgctccatcaataactgcaacgtcttggcactctccggcatgtcaacgtccgccgataccgct

SEQ ID NO: 37588 - DNA, 406 bp, Gossypium hirsutum
  unsure (1)..(406): unsure at all n locations; Clone ID: LIB3165-018-P1-K1-G2
atttgtcccgcgcgacacccaattcttctccatttcatatcttccgnggcgtttcaattggtcaggttagatcaagcatttctcttttcctttcttcttcttatctctgccaaaaaagaaatttaaattcttcagcagatctcatacaaaaaagcaaaaccaaaggtaatggcggggctgttcggatcgcaatcctctacggttgcacccatgattgtcaccagcacaccatccacagatctcgccttgactaattttgcttattgctccccttccgatcttcaaagcttcgccgtccctggctccaaactctttcttcgctaacgtcggggatgccttccntcttactgtttcttctcatgaaagcatacgcaatggatatattgctctaaatgctatccatcgt

SEQ ID NO: 37589 - DNA, 400 bp, Gossypium hirsutum
  unsure (1)..(400): unsure at all n locations; Clone ID: LIB3165-018-P1-K1-G3
gaaagggattcttcaagctggttcttcatatttttattacaaataatgtacgaaagcatgaaagtgagagtcgaacacgtcgttgaaacaagaaaaattagtgaggaatacaacaccagcgatgaagtccgtcaggttttcagtcaatggagtattgatggatttacccgtcaaaatcaccccacagtgatccaggttttattggaccaaaataaagacaaagacatcacaggcaattgcttgcccaacctggtttatgtctctaggcaaaaaagcaagacatccnctcatcatttcaaagccggtgcacttaatgtcctggtccgagttttgctgccatgaccaatgcacctgttattttaaccttagactgtgacatgtactccaatgatcccacaac

SEQ ID NO: 37590 - DNA, 424 bp, Gossypium hirsutum
  Clone ID: LIB3165-018-P1-K1-G4
aaaaatggcttctgcttccgctactctcctcatgtcttcacctattatcgacaagtccgaggggattaagggccaaaacctccgccacccttcggtttgttttgtacggtcacaccctacatcggccgcctttaccgtccgtgctagttcatatgccgatgagcttgttaagaccgcgaaaactgttgcatctccaggtcgtggtattttggccatggatgaatcaaatgctacatgtgggaagcggcttgcctcgattggtctcgagaataccgaggcaaaccggcaagcttaccgtacccttctcgtgtctgcccctggcctcggtaactacatctcgggagctatccttttcgaggagactctctaccaatctaccatcgatgggaaaaagatggtcgatgttcttgttgagcaaaatatt

SEQ ID NO: 37591 - DNA, 422 bp, Gossypium hirsutum
  Clone ID: LIB3165-018-P1-K1-G5
ctcactatgctgtcatgagttcctatgaatacattagttaaggtcttaaaacgtacaatggggacggcaacatggatggtttctacatcgctcctgcattcatggacaagcttgttgttcacatcagcaagaacttcatgtccctccctaacattaaggttcctctaatcctgggtatttggggaggcaaaggtcaaggaaaatctttccaatgtgagcttgtgtttgccaagatgggtatcaaccccatcatgatgagtgccggagaactggaaagtggaaacgccggtgaaccagccaagttgatcaggcaaaggtaccgtgaagccgccgacataatcaaaaagggcaaaatgtgcgccttgttcattaatgatctcgatgctggtgccggtcgtatgggaggaaccacccaatacacc

SEQ ID NO: 37592 - DNA, 182 bp, Gossypium hirsutum
  unsure (1)..(182): unsure at all n locations; Clone ID: LIB3165-018-P1-K1-G7
cccactcttacttccatcntccaacttttctttaagaaacagccaaaggacccgccccaatataacaattcaactccccaaaatggatccataacctagggaaaaggattgactctgaggactgaacacaacggtcccagtccctaacccatctgctgcctacgcactgctcgagctgctcc

SEQ ID NO: 37593 - DNA, 424 bp, Gossypium hirsutum
  Clone ID: LIB3165-018-P1-K1-G8
cccacgcgtccggcgaggggagtagatacatgtttcaatgagaaggagcttagtatggacgccaagacagaattccggttgggacaccacgtcccaagactaccaagctcatctttcccgaatggaaagatcagccaccatgatccctggtgcccctcagtaccccgatgtccacaaggccttcaacaacaaggttgagtttccggaagaagatcagtgcactgagcggtccccaacggcaaactcccgaaagaaggttcaggtggttgagcatgcagagaccgttgatgaagccacccttgattctcaagctgatagctacatccagcaaaaacacaaagcctttgaactgtgcaaatggaagaccttcaaaatgcactagagtttgagacttttggagtaagcatgtcgatcatgatttaat

SEQ ID NO: 37594 - DNA, 394 bp, Gossypium hirsutum
  Clone ID: LIB3165-018-P1-K1-G9
caaactggtaaccctttggatccaacttttctttgttgcaaaaaatcaatctgtcggggcgaccatctcggctaccaccacccctgcagctcttgttcacaagacattgcccaggattgcatccccagtccccattgggtcgccaacaatgggaaagagggggaaggtgatgatgatgtgtagcatggagaagaagagtgagaatgggtcaaacatggggatgagtgcatcattgctggcagcagcctgtgcagcaaccatgtcaagcccagccattgctctggtggacgagagaatgtccactgaaggaacaggacttccctttggtttgagcaacaacctcctcgggtggatcctgtttggtgtgttcggcctgatctgggctctttacttc

SEQ ID NO: 37595 - DNA, 357 bp, Gossypium hirsutum
  Clone ID: LIB3165-018-P1-K1-H1
ataagagaaagcactgaaaacgcaaaaccatggtctctgcttctctcctcaagacttcaccagtggtagacaagtctgagtgggttaagggtcacacccttcgccaaccttccacttctgcggtgaggtgccaccctgttgcaccctctggactaactgtgcgtgcaagctcatatgccgatgagcttgtcaagactgctaaagctattgcttctcctggccgtggaattttggccatggatgagtccaacgctacctgtgggaaacgtttggcctcaatcgggctagaaaacacagaggctaaccgccaagcctacaggacgttgcttgtttcagctcctggccttggtcagtaca

SEQ ID NO: 37596 - DNA, 412 bp, Gossypium hirsutum
  Clone ID: LIB3165-018-P1-K1-H10
gcttgcttcagcaccatcagttgcttttctagttatgtgcggtggtcacaagttgcctgggatcagagtccagcaggctaaattttctgattccaaaggatcaggtgccagtgaaggaagaagagctgctatgctctacttggcagctggccttttcaccacagatgttgcttcttctgcaaatgctggggtcattgacgagtaccttgaaaagagcacagctaacaccgaattgactgacaagaagaggttggcaacaagtggcgcatacttttgcagagcatacactgttcaatttggcacttgcaagttccctgagaacttcactggctgccaacatcttgcaaagcaaaagaaagtaccattcatctgtgatgatgtggccttggcatgtgaacggaaggacaaatac

SEQ ID NO: 37597 - DNA, 418 bp, Gossypium hirsutum
  Clone ID: LIB3165-018-P1-K1-H11
cccacgcgtccgagtatccactttacttatcttcaatatctctctttggcgggtcgctggtgccttactacctagaagagactgcaaactgggggctggacgtaaacaatcttcgtgaatcagttgcacaggctcgcttcaaaggaataactgtgagagcaatggtaattattaaccctgggaaccctactggtcagtgtctcagtgaagctaatttaagagaaatattgaacttctgttaccaagaaaacttggtattacttggagatgaggtttaccaacagaatatataccaggatgagcgcccctttatcagttctagaaaggtgttgatggatatggggcctccaattagcaaggaagtccagcttgtttctttccacactgtgtctaaaggatattggggtgaatgtgggca

SEQ ID NO: 37598 - DNA, 450 bp, Gossypium hirsutum
  Clone ID: LIB3165-018-P1-K1-H12
attggagggccgggcccggcccacgcgtccggatcccttggcggcaataatgtccacggcttttgtctccggcttctgcctcacttgcaacgccacctctccttctaactcactccggcaacccacattgcggcggccgtctatcgtcgccaacctcaactcttccacttctcctcctactctcattcgaaatcaacccgttttcgcagcacctactcctttgctcactccttccaattggaaagaaaacatgggagaccagtcatacgaggaagccattgaagctctcaagaaactgctcaatgagaaaggagaattgaagagtgcagcgacggcaaaggtagagcaagtgacagctgagttgaagactgctgcttcttccgatgagtctgttgaccgcttgaaacaaggcttcatttacttcaagactgaaaaatacgaaaagaatcc

SEQ ID NO: 37599 - DNA, 412 bp, Gossypium hirsutum
  Clone ID: LIB3165-018-P1-K1-H2
cccacgcgtccgggctaccactgcttctccaatttcttctcagctgaagagcagctttagggcgggtgttacaagaggactggtagtccccaagggcatttcgggatccccgtttaaagtatcttccggaaagaccaggaccccttgcttcactgtcaaagctgttcaatccgacaagtcaacatttcaagtaatccaacccatcaacggcgaccccttcattggaagcctggagactccaatcacctcaagccccttaattgcatggtacctttccaacctcccagccctataggacggcagtgaacccacttctgaggggaatcgaagtgggtctggctcacggcttcctcctggttggtccattcgtaaaggccggccctctaaggaacactgcggtggcgggtcaagc

SEQ ID NO: 37600 - DNA, 393 bp, Gossypium hirsutum
  Clone ID: LIB3165-018-P1-K1-H3
cagaaaatcaaaaagaagaagaaaagagatcctttttttttttttaacaatccaaactaaggtttgaaaatcaattttgaagccaaacttgaaaaccaaattaatcccaaaggtttaatcaaaatcaatgatggtatgcctcctccagaaatccttcttcttccgcaaatcggctttataacttcaggcctctcagcggctctcgctctttcttccatccttctttcggctccactccctgctgttgcggacattgcggggctcactccttgcaaagagtccaagcaattcgccaagcgcgagaagcagcagatcaagaagctggaatcctcgttgaagctttacgcccccgatagcgcaccggctctcgccatcaaagccaccatcgagaaa

SEQ ID NO: 37601 - DNA, 466 bp, Gossypium hirsutum
  unsure (1)..(466): unsure at all n locations; Clone ID: LIB3165-018-P1-K1-H4
cggaattggaagganccgaccccagcgcgtactcgcgtttcgctcaattcaaatttccanntttctcatacaccattattttnctttcaccnnncatcaagcccttttcatccagaggcgcttctcctttcaacctaagctttcaatcnntctcttcannacccaagcccttctttcaaatcttctcaaccactncccagatcccctnntccctctctcaacccctctctttttcacgccacctttctccttctcctcaaacctctgcaccacttcgcctctcttcatggccggtgccaaaatgtctagcctccgcccgcttccagctacgccactcgctttagccgatgtatccaagtccaacaacacccttgatgccaccagctcccacattgaaaaggtcgagaaaatcttctccgacccacaagtcctccagttcttcaccaaccccaccattgatgtcctc

SEQ ID NO: 37602 - DNA, 402 bp, Gossypium hirsutum
  Clone ID: LIB3165-018-P1-K1-H5
ctcaaacaaaccttttacttctcaactctctcatattcaccatggctgacaagtgcggcagctgcgactgctctgacaagagccagtgtgtgaagaaaggaaacgccttggtcattgagactgagaaaagctacatcagcactgtagtggtcgaggctgtggcagagaacgatggcaagtgcaagtgtggaactagctgcagctgcacaaactgcacatgtggcaatcattaagcagacatatatagaactgcacgatgttttagtccataattaaattaagttgaataattggtggcgtgttgcatgtttgtctccgcctcattgtataccatgatagaatggccatgtctatggactttgtctgattaatgaatgattattagcacaaatctgttccatg

SEQ ID NO: 37603 - DNA, 415 bp, Gossypium hirsutum
  Clone ID: LIB3165-018-P1-K1-H6
ggagggccggcccacgcgtacgctttctccatctctctcctttcccccacaatcattgcttaccttcattctctatctcccggtctggaccctacttaccggttctcctctgacaatggattgctgctcgtcgacttcgtcggtttgtactgtaaatccaaacctactaccaggcggaggcttcccctctccctcaatactcggactatgcgccgcttttcaacctccgccgccaataattctgttagggccgttcttgatcatcttccaactactactactactactactactactactactactactactactactactacttccgtttcttctgcgtctgatcatcaatcatccgcttctcaacctaaggttgcaaatttagaggatataatatcagaaagaggtgcttgtg

SEQ ID NO: 37604 - DNA, 415 bp, Gossypium hirsutum
  Clone ID: LIB3165-018-P1-K1-H7
ctttaatcatcttattttgatggcagcattgttagcatgcttgctaggaaatgggggcgggactcacagaacaaaatcgaagttgagtaaagaattttatgggaggaatattgtatttacccctgccatttcatctttgggtcggaaatcgaatgccgtactcgtaaaggcatctttaaaacataaacaacatgaaggaagaaggggattcttgaagtcattactcggaactgctggaattggagttccggctttacttaggaaatggtaaagcatatgctgatgaacaaggggtttcttcctcgagaatgtcgtattctaggtttttggagtatttggacaaggacagggttaaaaaagtggatttgtttgaaaatggaacgatagctattgtggaagctgtctctcctgagtt

SEQ ID NO: 37605 - DNA, 408 bp, Gossypium hirsutum
  Clone ID: LIB3165-018-P1-K1-H8
gccgttaaaaagtcggatgaacttccgtttctttcaagtatcgacatggaatcaagggcgccatttttctccaacaaaataaatctcgagattgatatttatgtcactcgagaatccgggccttcaatggaagaaggtaaggttcatgtggcatcgagctcttcctgccctttctcgggccgcagcatgtcgccgttggttggcaccggaaacaacgtatggtctggcctatatgttattatatcaacagtcggatttatcattttaatggccctgttaaggattttctacattaagccatacaatgtatctacctggtggtacctaggccttcttttcattgcatgcatggtcacgagtgttgttatcttcggtggtctcgtgatcggtttatggcatctctggaat

SEQ ID NO: 37606 - DNA, 436 bp, Gossypium hirsutum
  Clone ID: LIB3165-019-P1-K1-A1
caaaacccccaacatctgcaacaaatccccctcatctttgttccacaaacagcaccaatgggctgcacttcaactgtttcaatggcactgccactatcacccaccacccaaaccaaagtctccatccccaaccctgtcctcaacccacttccactcaagcattcatcaatggctgccaccccaactacaagacccaatgcaacaaaacttgaagtcaaggcttcttcttcttcttcttcttcttcaaacaaggagaaggcagtgactatgttgacagcagctgcaatgacaacatcaatgatggtccctgaaatagctcaagcagctgatggggttaccccttctctcaagaacttcttgcttagcattgctgctggcggtgttgtgcttgtcgccattattggagctgtcattggtgtctctaactttgaccctg

SEQ ID NO: 37607 - DNA, 388 bp, Gossypium hirsutum
  Clone ID: LIB3165-019-P1-K1-A11
ccacgcgtccggcttccgcaatctatggtttcgcctctactctccttccctcccttccgatctactccttcccgtcgttgttttcttccatggcggcggattcaccttcctcagccctgcatcccaggcgtacgacgccgtttgtcgaggttcgcccgaagtttcctgctttcgtgtctcgcaattaccgtctagctccgaacatatctacccatctaatacgacgacggattcgacgttcttaagtttttaaactacaacttcgcacagtctaccggaaacgctgactatcacgggtttctagccggagatagcgcggcggaccatcgctcaccacgtagcagccgggcttgggagctgggttgaacattgaggtgatggactcgtt

SEQ ID NO: 37608 - DNA, 251 bp, Gossypium hirsutum
  Clone ID: LIB3165-019-P1-K1-A2
catacgcgaacgtttaaacacaaattgctgatgtcacaaacgccgctgctacatcctccttgatggggacacgcttccccgacgtctacacaagttcagggagattcgtcgccaggtttggttttggcggcaaaaaaaagcagctcccaagaaagcctagaaacaaacctccgaccgtcctctatggtacccaggagcggtggctactgattggctcgatggaagcttggtgggtgattacgggttcgacc

SEQ ID NO: 37609 - DNA, 409 bp, Gossypium hirsutum
  Clone ID: LIB3165-019-P1-K1-A4
aaccattatccagccactgggaaaatgaactcatttaacggtcaccggagagttgaaaaccaatgacccattttcgttttctccatcttcttgtagagattgagatatgttgaagccattgacgacaacgcttagctcctcgtgcttagggtcaggtgtacggatacaccatgtatatttcacaaagcatggtgaccttatcaggtcttatgaagggtctcgttttacaaaaacttccgaaggttcattgcatttcaattctgatgagcaaaatttttcccgaattggaagattaaaaaccaggtgccagcaccagcaacatgtatttcccaacagtatagcacacatttcagctgatggcactcatcaagaccaaaatgatgtttttaaagcaacattgatatggagg

SEQ ID NO: 37610 - DNA, 430 bp, Gossypium hirsutum
  Clone ID: LIB3165-019-P1-K1-A5
aaacccggaaaggtaacaattagtggatatgcattatcaggagggggccgaggaatcgagagagttgatatatctattgatggcggtaaaacctggttggaagcatctagatctcagaaaaccggtgccccttacatagcagatcatgtaagcagtgacaaatgggcatgggtgctttttgaggtcacagttgatatcccatacagtactgagatcgttgccaaagcggtggattcggctgcaaatgtgcaacctgaaaacgtgcaagatatttggaacctaagaggtattctcaacacttcatggcatcgagttcaagttcgcgtcgggcactcaaatatgtaaatggaacagttaaataacttgattagcatgctgaaatatgtggctgaactttctttaccattgtgttttttgagaaaataatatc

SEQ ID NO: 37611 - DNA, 305 bp, Gossypium hirsutum
  unsure (1)..(305): unsure at all n locations; Clone ID: LIB3165-019-P1-K1-A6
catgaccactctcgtgaccggtgtgtttctccttctactatccgncgccggcgtcgtatccgccgctagatatatcaccggtgatgttctccggttaccttcggaagcttcaaggttcttccgatggaggagcgatgatgatgaagttggtggcacaagatgggcggtcctgattgctggatctaatggatattggaattacaggcatcaggctgatgtttgtcatgcttatcaactcctaaagaacggtggtttgagagaggaaaatatcattgtctttatgtacgatgatatcgcttttcaat

SEQ ID NO: 37612 - DNA, 426 bp, Gossypium hirsutum
  unsure (1)..(426): unsure at all n locations; Clone ID: LIB3165-019-P1-K1-A7
cccacgcgtacgttcaaacacaaatgactccatttaacagactcgacaatgctgcttaacgtgggtacttccataagatcagctactcgattttctcctttcattataacccattcttctccttcatctccttcttcgttttgtttcagtttctctccaaagcaaaccgtctcttttactctacaatcatcgcaaatggcgtcttttactacgttatctcaatcgcctccaaagctattgtttcgtcagttgttcgagaaagaatcatctacttatacttaccttcttgctgattgttcccaccctgataaaccagcgcttttgattgaccctgtagacaggactgttgatagagatttaaatttggttaaagaattgnngctgaagcttatttatgctatgaacactcatgtacatgctgatcat

SEQ ID NO: 37613 - DNA, 463 bp, Gossypium hirsutum
  Clone ID: LIB3165-019-P1-K1-A8
ggcccggaagacccgggccgaccgcacgcagtgcgcccacgcgtccgaccacgcgtacgtttctatttatttttctcttcctccaatgaagatgcagatcttcgttaagaccctgaccggcaagaccatcaccctcgaagtcgagagttccgacacgatcgacaacgttaaggcgaaaatccaagacaaggaagggatcccaccagaccaacaacgtctcatcttcgccggaaaacagctcgaagatggccggaccttggccgattacaacatccagaaggagtccaccctccatctcgtcctccgtctacgtggtggcatgcagatcttcgtcaaaaccctgaccggcaagaccataactttggaagtcgaaagctctgacaccattgacaacgtcaaggccaagatccaagacaaggaaggcattccaccagaccagcaaaggctcatctttgccgggaaa

SEQ ID NO: 37614 - DNA, 419 bp, Gossypium hirsutum
  Clone ID: LIB3165-019-P1-K1-A9
cttcactctcctctttatccatcaaccctctaattagtatttcttcttcttcttcttcttcaaaagcttcatcccgccatcttccctcattctcaaaacgttttggcgtctattgccaggttaataattcagaaatcaaagctcgaattagcgattgttccaacaatacgtatgaagttagggatgctaagtttaagatctggaaacccttgctttcaacagcattggcagcagccatagttgtttttggctctgatatctctgctatggctgaacttaataagtttgaggcagaaactcgtggtgaatttggtatcggatctgctgcacagtttggttctgcggatttgaaaaaagctgttcacgtgaacgaaaatttcagaagggcaaacttcacatctgctgatatgagggaatct

SEQ ID NO: 37615 - DNA, 309 bp, Gossypium hirsutum
  unsure (1)..(309): unsure at all n locations; Clone ID: LIB3165-019-P1-K1-B1
ggcgggaccggcccggacgacccacgcgtacgaccacgcgtncggccgcaagaaacatggcgatgtcgacagtgttgatgatgatgaagagaagcgtcaccaccaccgctataaggcccaccaccataagcgccatgatgactatgacgactagtcagactggccgttccctctacaaatggaaatctgcagtaatagctattaaataaatgatcgaggcatgccacctntgatcgtttcttctaccatttccgtgtgttttttgtgtgtgtgtcagtgtttgatcgtcaataaaatgcccgaacatta

SEQ ID NO: 37616 - DNA, 426 bp, Gossypium hirsutum
  Clone ID: LIB3165-019-P1-K1-B11
cccacgcgtccgtccaaacccagcttattctgttgctctccctctcgcgcaatggaaaccaacgacgacacctccaaagctaagggcttaagctttgatgatttcctcagcaagaagccctactctcctcctacttgggcctcccatctcaaaccaatcccttcccatgtcttctccctcgcccatcttcctactccaattcacaagtggaatctgcctaatttgccccaaaacacggaagtttggttgaagcgtgacgatctttcaggtatgcaattgagcggtaacaaagtcaggaaattggagttcttattggcggaagcagtggcacagggtgctgattgcatcattacaatcggcggcatccaaagcaaccactgccgcgccaccgctgtcgctgctaagtatttgaatctagactcctat

SEQ ID NO: 37617 - DNA, 403 bp, Gossypium hirsutum
  Clone ID: LIB3165-019-P1-K1-B12
cccacgcgtccgcccacgcgtccgatcgtctcttatctccatttgtatccccacctttctggtcactctgctatacctcatcaacatcccaacttctcacgccttcctcccactaacttatccttaccagtcatatttaaggcctcgtttccgaaaaaatgtatcattttagtccccagggcatcatcatcgtcttcaggtcaatccagtgttggaaaaaaggtttatgaatttgatcctcatccaactctcaccaatgatgacctcaagccgacaagaccaagtcaaaggaactaccactggaagcaaatggccagacattgggttggtcttgttgttggtgttccagcatattacatggcaggtagtcttgttgagctggggatggcttggtggcaaggga

SEQ ID NO: 37618 - DNA, 407 bp, Gossypium hirsutum
  unsure (1)..(407): unsure at all n locations; Clone ID: LIB3165-019-P1-K1-B2
ttcaagaatttccttaaagaaaagaagagaaagtttaagatgttgttgctggggaagaggccaaggccacctatgaaaagaaccacatgcatgacagagatcacttttgatctaaacaccaccgtcaccaccaacgccgaacctgcaccctctgatccacatnaaccctttaacaactaccccaaacaggcttcccctttcggtggcgcagcaccttctgtagctgttgctggcagtggtggtggacttgaagggttggatcaacggttgttggcgacggtgtcacctagagttcatagaaagcattcagctgattttatggaaacacctcatttcctaaggtctngcggtctttgtagacgtcgccttgttcctggccgtgatatctacatgtataggggtgatac

SEQ ID NO: 37619 - DNA, 430 bp, Gossypium hirsutum
  Clone ID: LIB3165-019-P1-K1-B3
atcaatttttgttttctcagtttctttgcgattttccgacatggggtttttaagatctgtgaagataagggaagtttggtcggataatttagaatcagagttcgagctgatcagtcgggtaattgatgacttccctttcgtttccatggacactgaatttcccggtcttgttttcagaccaaaagtggacctcactaggccttaccatgagcaactcctccgaccctccgatcattacaagatcctcaaatccaacgttgatgctctcaacttgatccaagtgggcctcactctctccgattcttcaggtaacctgccggttctcggaaccgacgacactcagttcatctggcaattcaatttctgcgacttcgatgtggagcgtgacgctcacgcccctgattccattgagcttttgaggaggcaaggg

SEQ ID NO: 37620 - DNA, 427 bp, Gossypium hirsutum
  unsure (1)..(427): unsure at all n locations; Clone ID: LIB3165-019-P1-K1-B5
cccacgcgtccgcccacgcgtncgcggacgcgtgttgttagtgagctcatataccgggaaattcttgagtatcatcctaaaatgttgaaagagtatctggaaggatcagagccaactggcttcatgtatccaagtgcggttgaccatttcaagaagcagtttgccttccttgaggagcactatggaaatggtacgactgcagctccacttgagagacaacatgcatctttgccaaggccatgtgtgttatattcagataattcagtacaaaactcaacagatgtgacagataacttatctaaatgttccatcaaggaaactgagaaaccccaaacagagagaagctttccaatccctatgtcaaggcttccccctcaagttcctcaaagcatccaaggtgctgccagacctgggaaagtagttggat

SEQ ID NO: 37621 - DNA, 397 bp, Gossypium hirsutum
  Clone ID: LIB3165-019-P1-K1-B8
aacataacaacaacaacaacaacattaataattttcacaaatatctcgcaccaaaacccaaataacccacctgcttcctcatgccttattcatcatcatcatcatcaatggctagcaaattggctttcactttgatgcctcctcgtttcttcactgcgactattcaaaaacccgtggtttgtttctcttcttcttcttcttcttcttctatcagggttcaacccagtgggaagcatctatgttttcgacgccgattgctcttactacccctcaaggctactgccgatcaacaaggtcaggtcgaagaagatgaagttgttgatagtaaaattctgccttactgtagcatagacaagaaagagaagaagtctttgggtgaaatggaacaagagtttct

SEQ ID NO: 37622 - DNA, 386 bp, Gossypium hirsutum
  Clone ID: LIB3165-019-P1-K1-B9
caacaatgttcttaagggagctccttatccaccatctttgcttatggcagatgcatggacaaagccgtattctcgggaatacgctgccttccctgcttcctggcttcgaactgctaagttctggcctactacaggacgtgttgacaacgtatatggtgatcgcaacgtcatctgcacccttcttcccgtatcgcagatggttgaagaggctgctgcagccaattcgtaggcctaggcctcatctatgttgtcattgaagccaacattttctttttccttcaacaaaaaaggggtgggggggggggggtccaatgtctttcttgttcatgtacacaaactattcaccatttgcatatgttctaagctgtgactttcattttattggt

SEQ ID NO: 37623 - DNA, 423 bp, Gossypium hirsutum
  Clone ID: LIB3165-019-P1-K1-C10
aaaaaaaataagacatgtatttggatatttcctttcaactacaacaatattctagtatttatttgatatgacatgaatagttgaagggaattccccgaagagaaaatggattatgggagtaacaaaaaaaacctgacttgaacgatcctgtattaagagctaaattagctaaaggtatgggtcataattattatggggaacccgcatggcccaatgatcttttatatatttttccagtagtaattctcggtactattgcttgtaacgtgggcttagcggttctagaaccttcaatgattggtgaacccgcggatccatttgcaactcctttggaaatattacctgaatggtatttctttcctgtatttcaaatacttcgtacagtacctaacaagttattgggtgttcttttaatggtttcag

SEQ ID NO: 37624 - DNA, 230 bp, Gossypium hirsutum
  Clone ID: LIB3165-019-P1-K1-C11
cccacgcgtccgaattcagttaacattttcacagttgttttcttcagtctctctctcagccatggctgcagccatctccaccgtcgctgccgctgccgccgccaaccgagctctgggagtgtcagtcccaacctcagctttcatggggaagaaagggggctaagattcaaccacaccaggccgggtccttcgggaaggtttaaggggatggccgcggggaaaggggttgg

SEQ ID NO: 37625 - DNA, 410 bp, Gossypium hirsutum
  Clone ID: LIB3165-019-P1-K1-C12
gagaattggaaagtgggaacgccgttataaccagtcaagttgatcaggcaaaggtaccgtgaggccgccgacattatcaagaaagggaaaatgtgttgcctcttcatcaacgatctcgacgctggagccggtcgtatgggaggaaccacacaatacacagtgaacaaccaaatggtgaacgccacactcatgaacatcgctgataaccccaccaacgttcagctccccggtatgtacaacaaggaagagaaccctcgtgttccgatcatcgtcaccggtaacgatttctcgacgctgtacgcgcctctcatccgtgacggtcgtatggagaagttttactgggcacccaccaaggaagataggatcggtgtttgcacaggtattttcaagaccgacaatgttccccgtga

SEQ ID NO: 37626 - DNA, 408 bp, Gossypium hirsutum
  Clone ID: LIB3165-019-P1-K1-C2
atcaccaacaaaatcaactgcttcacaatggcttctacaactatggctctttcttccccatcattcgccggtaaggcagtgaagttctccccttccacccctgaaatccagggaactggccgtgtttccatgaggaaaaccaccaagcctgttccttctggtagcccatggtacggtcctgaccgagttttgtacttgggtccactttccggtgagccaccatcttacttgaccggtgagttccctggtgactatggttgggacactgctggactctcagctgatcccgagacctttgctaggaaccgtgagctcgaagtcattcactgcagatgggccatgttgggagctcttgtgtgtgttttccctgagctgttggctaggaacggtgtcaagttcggtgaagct

SEQ ID NO: 37627 - DNA, 394 bp, Gossypium hirsutum
  unsure (1)..(394): unsure at all n locations; Clone ID: LIB3165-019-P1-K1-C5
tagttattcattttcttgtctctnctaatcttttatattttctttnttnnnnaagaaaaaaattgtaaatccttcttgctgtttttgtgccatgggtgttgcagttctaaaaccagaagactgtttaaagctacctaatcccatgaaacaacctcaaaacccttggcataatcctaatcccaacactaaccgcacgaatcgttcacaagggaaccgtaagaagcgttctcccaacacctcccctccttctcgtcccaccgtcggtcgccccaaagctccggccaagaatctcgtcatgggtcaagtcaagatcctcaaacgcggcgaagatcttaaacaatctaagccggataagcatgtgaggttcgcgaaggaaatgttgatgtagatctgg

SEQ ID NO: 37628 - DNA, 428 bp, Gossypium hirsutum
  Clone ID: LIB3165-019-P1-K1-C7
ctttttcatcacttttatccatggttataaccttagcagctgcagcagtcccagcactgtcttccctctcccatcgagctccaattccttccatttccttcctcttccccgactccaccagacccttttctctttcccgctcattccgctccttttccctcactccccaagccaaagcctcagacatcgaaatctcctttttcgacgacctcaaccccgaagacgaacctgtcgcctttgacccgccaacacccccagaagggttcatccctccacctgctttcgacgatggccccgaggaaaccgaggacgaagtcgccgctgcctatgaggagctctacggcccagcctacagtggggtctccgttctaggcaacgatgtttatgtaatggactctaaagtgaagaaaacgagtgcatttggaaaa

SEQ ID NO: 37629 - DNA, 392 bp, Gossypium hirsutum
  Clone ID: LIB3165-019-P1-K1-C8
atgattgtggctgccaaagaaatctacgaagacacacagaccgaccaggaccgatggaagggtcttgcttatgatatctccgatgaccaacaagacattaccagagggaaaggtatggtcgactcattgttccaagctcccatgaacgatggtactcactatgctgtcatgagctcctatgagtacattagccaaggccttcgcacatacgacttggacaacaacatggatggattctacattgccccagctttcatggacaagcttgttgttcacatcaccaagaactacatgacccttcctaacattaaggttcctcttatcttgggtatttggggaggcaaaggtcaaggaaaatctttccaatgtgagcttgtctttgccaagatggg

SEQ ID NO: 37630 - DNA, 258 bp, Gossypium hirsutum
  Clone ID: LIB3165-019-P1-K1-C9
gaattcttctcttaattactaatggaatcgatcttatattaatcctttcttcgaacgaatccacccaaaaggggaggtattccaatgcaataaagtgacatagcgaatatcgctggttgcttaaggactattggcatgggtatgcctggtgatggtgaatatactggcacattgaatgagcctggtcgatggattaatgttcatattgtgcatactgatatgcgtgctgtgcgtgcgctcttattgacatctatatga

SEQ ID NO: 37631 - DNA, 374 bp, Gossypium hirsutum
  unsure (1)..(374): unsure at all n locations; Clone ID: LIB3165-019-P1-K1-D1
cccacgcgtncgnccacgcgtncgnccacgcgttctaaacttctctagttaactttctgtttgtcccactgctgtcattggaatccgaagtatatatatttcattttcataaaggaattgaaaaaggaaacttcatgcgaatctttcatcttctatgttttacttaatttggatccaaattcctcagaaaggcctttttcttctttgaatcttccattttcatccttaatcctccatgggcaagggtggtggttgtgtccccagcaagaaaaagcatccttcctncgccgaagaccctgctcgccgccgtgggtcttncacaacagccgncaacaacgcacccattcccgccaccgatgaagaaacccgcgaaa

SEQ ID NO: 37632 - DNA, 422 bp, Gossypium hirsutum
  Clone ID: LIB3165-019-P1-K1-D12
aatggagtccattgaacattgcattttgtgcactttgtggcatcttgggaggcactgttggtggattgcttggttctggtggtggattcattttgggtcctctcctccttgaaattggtgtgattccacaggtggctagtgcaacagcaacattcgtgatgatgttctcttcatccttgtccgttgttgaattctatttgcttaagaggttcccaatgccctatgctttgtacttgatgggagtatctattttggctggtttctggggacagtatttcgtgagaaaactaataacaatccttaggagagcttcacttattgtgttcatcctatctggtgtcatctttgcaagtgctctcaccatgggagtcattggcattgagagaagcattcgaatgattcacaaccatgagttcatgggg

SEQ ID NO: 37633 - DNA, 423 bp, Gossypium hirsutum
  unsure (1)..(423): unsure at all n locations; Clone ID: LIB3165-019-P1-K1-D2
cccacgcgtncgcccacgcgtccgaatttatctttcccagctttcaaagcaacccttctttgctcctttgctctcctcactgggttttaaggattccaccctccaatcaagctatttccctatggcttccaatttgcagaaggaatccacttcttccgatgagaaatcgactttgacaacggagagcaaaagttctaacccagaaacatccaccgccgagaacaaaacttcttccactgggccgtctcaaccagcacaggctggagcttcccctaccactatgcctgggtttgtgccacccaatccttttgatttctcagccatgagtggccttcttaatgatccaagcatcaaggaactagctgagcagatagctaaagatccttcattcacccaaatggcagaacggctcactaagacatt

SEQ ID NO: 37634 - DNA, 409 bp, Gossypium hirsutum
  Clone ID: LIB3165-019-P1-K1-D3
cccacgcgtccgatttagctatagcatacacttctagtacttactactagcaatggcttcctcaatgatctcatcggctaccattgccactgcctctccggcacaggctaacatggtcgctcctttcaccggtctcaagtctgcctctgctttcccagtcaccaggaaggccaacaacgacattacttctctcgcaagcaatggcggtagagtgcaatgcatgcaggtgtggcctcctactgggaagaagaagtttgagactctctcatacctccccgatcttacacccgtgcagttggctaaagaagtagattaccttcttcgctcaaaatgggttccttgcttggaattcgaattggaggagggattcgtgcaccgtaagtactcgagcttacccacgtactacgat

SEQ ID NO: 37635 - DNA, 397 bp, Gossypium hirsutum
  Clone ID: LIB3165-019-P1-K1-D5
cccacgcgtccgaaacaagtcatggctctatctttcacagctgcaacaacactatacatttctggcaacaacattcatgcctcaacccccaaaaacgcctccttattctcaaattctaccatcagtttttcagcaaagcagagaagaagactaagcatcaggagctctggtgatgtatcatccgagacaccaacgactgaaacagaatctgaaaagtccattgatgaagctcctaaaggacctccttctttgatctctgctcttaatgttgaacgagctcttcgtggcatcgcaatcacagacgcagatcactatggtagactcggccttcaaagagggtgttcttatgaacaggtcactgtggcctacagaaacatggttgatgaactcctgaatc

SEQ ID NO: 37636 - DNA, 443 bp, Gossypium hirsutum
  Clone ID: LIB3165-019-P1-K1-D6
gcgaccacgcgtccgccacgcgtccgattcatgtctctccttttaaccttggtttttgccacttcaattttctggttaacatggatgtaccttaaatccaagaaggggaagccgccacccccaccaggccctctaggcctccccttggtgggaaaccttcccttccttcgtactgaccttcactcctacttctctgaactagctcacatctacggtccagttgtgaaactccagcttggaggcaagcttgcgatcctgataacctccccatccacggctcgagaagttcttaaagaccaagacatcgcgtttgctaaccgtgatgtgcctgtggttgccaaggttgtaaccggcggccgtgatatagtttggaacccctatggcccggaatggaagatgttaaggaaagtatgcgttatcaagatgcttagcaatgctacttt

SEQ ID NO: 37637 - DNA, 409 bp, Gossypium hirsutum
  Clone ID: LIB3165-019-P1-K1-D9
cccacgcgtccgcccacgcgtccgtttgaagtgtataagattatggtgaaaaactgaacatggtaaagtccctcataacattcttcgacttgcttcattgattagcccaaagataaacataaccaaaaagaaaaatggcttctgcttccgctactctcctcaagtcttcacctattatcgacaagtccgagtggattaagggccaaaacctccgccacccttcggtttgttttgtacggtcacaccctacatcggccgcctttaccgtccgtgctagttcatatgccgatgagcttgttaagaccgcgaaaactgttgcatctccaggtcgtggtattttggccatggatgaatcaaatgctacatgtgggaagcggcttgcctcgattggtctcgagaataccgaggc

SEQ ID NO: 37638 - DNA, 436 bp, Gossypium hirsutum
  unsure (1)..(436): unsure at all n locations; Clone ID: LIB3165-019-P1-K1-E10
ggaaaacccggcccgacccacgcgtccggnccagctccccggnatgaacaattttgaagttttcccccgcggccccatcagcgncacgggtgacgttttctccacactgtatcctcctctcatccgngacggccgtatggagaaattatactgggcaccaactagggacgaccgaatcggtgtttgcaaaggtattttcaggaccgacggcgtccgagatgaagacattgctaagctcgtcgacaccttccccggccaatccatcgatttcttccgtgccttgagggctcgggtttacgatgacgaagtgaggaaatggatcagtgaggtcggagtcgcaagcgtacggaagaagttagtgaactcaagggaaggacctccaacatttgagcagccaaaaatgaccattgaaaagctattggaaatggaaacatgc

SEQ ID NO: 37639 - DNA, 422 bp, Gossypium hirsutum
  Clone ID: LIB3165-019-P1-K1-E12
agttgcttcacaatggcctctacaaccatggctttttcttccccatcattcgccggtaaggcagtgaagttctccccttccacccctgaaatccggggaactggccgtgtttccatgaggaaaaccaccaagcctgttccttctggtagcccatggtacggtcctgaccgagttttgtacttgggtccactttccggtgagccaccatcttacttgaccggtgagttccctggtgactatggttgggacactgctggactctcagctgatcccgagacctttgctaggaaccgtgagctcgaagtcattcactgcagatgggccatgttgggagctcttgggtgtgttttccctgagctgttggctaggaacggtgtcaagttcggtgaagctgtatggttcaaggccgggtctcaaatctt

SEQ ID NO: 37640 - DNA, 354 bp, Gossypium hirsutum
  unsure (1)..(354): unsure at all n locations; Clone ID: LIB3165-019-P1-K1-E2
gttaaatgtttattgttctctaaatattcctatttcggaacatattaagcttgggaatagtgatggttgaggcttacctaagttccatggtggacccaagctgcctcatcgggtttcagtcagggcgttaaaagatgagatggacggtggtatgagcggcggctttcaaggccggagctgggaacctggcttggaaattgaggtcccttttgaacaaagaccggtgaatgagtactcgtctctgaaagatggacctctgtattcatggggcgaactgggaccaggccaatttttccttcgactaggaggactctggctggtaactttcacggntcttggagtcccaatagcagc

SEQ ID NO: 37641 - DNA, 433 bp, Gossypium hirsutum
  unsure (1)..(433): unsure at all n locations; Clone ID: LIB3165-019-P1-K1-E4
gccaacatgataagcgtccccatgtctctcaactctatcgttcgcctcaacgtacccgatgctatctggcaaggaggcgccaacacccctctctccgccgtccagattctctcacgggtactcccttacggcggcggagaccctgaaaacctccagcgtatcctccgtatgctcaccagctacggcgttttcgatgaacaccttaattgcagcggtgatgactcccactccccggagagaaaatactccctaactgacatcggaaaaacactcgtaacagacgctgagggtctatcctatgcaccatatgtcctccagcaccaccaggatgctntgatgagagcgtggccattggtgcacgaagcagtgctgaatccgacatcggagccattcgtgaaggcgaatggtgagggagcttatagttactatggga

SEQ ID NO: 37642 - DNA, 455 bp, Gossypium hirsutum
  unsure (1)..(455): unsure at all n locations; Clone ID: LIB3165-019-P1-K1-E5
ccgggnncgacaccacgcccgtccgcnntttcataaccattgtcacgaacccttcactctccatgtctttcaatgtgtcggctgcncgnnctccaccatgcggtgcgtgtgcaaccgagcanctcgttgagtttgaatgggatcagggtgcnncggagcttctggcttccaagactcagctttcatgggggaaccagcttgaagaaaggtgagcgctagtggttcaacaaccaacggcaagtgctttccagtgggaaggtttcaatgatttgtgggctgccaaaaggaaatcgacgaaagacaccacaagaccgacccaggacccgatgggaagggtctttgcttatgatatcntccgatgaccaacaagacattaccagagggaaaggtatggtcgactcattgttccaagctcccatgaacgatggtactcactatgctgtcatgagctccta

SEQ ID NO: 37643 - DNA, 423 bp, Gossypium hirsutum
  Clone ID: LIB3165-019-P1-K1-E7
ctcttttgtataactgtagcatatattactagttagcagtaatagcaatggcctcctccatgatctcatcggcaaccattgccaccgtgaactgctcctccccggcacaggccaacatggtggcccccttcaccggcctcaagtctgcctctgctttcccagtcactaggaaggccaacaacgacatcacttctcttgcaagcaatggtgggagagtgcaatgcatgcaggtgtggcctcctcttgggaagaagaagttcgagacactctcatacctccccgatcttacacccgtacagttggctaaggaagtagattaccttcttcgctctaaatggattccttgcttggaattcgaattagaggagggattcgtgcaccgtaagtactcgagcttacccacgtactacgatggacgctact

SEQ ID NO: 37644 - DNA, 332 bp, Gossypium hirsutum
  Clone ID: LIB3165-019-P1-K1-E8
gttccatgtgaacggcactggcacatgtgttatttgtatcctaagacacggatggagacggggcgactgtgattccagaacgagcttccaaagggaatggggataaaaactctgaaccccaacgcggtaactgacggcaacacttggaactgcggaaacgcaagtgtgggaaaacctacgagttatatgatgtgcacaacgacctactgacagtgtaaacggctaacccggaggtaggcaagacggatcagatgatgaacccacgtgccgtgcatggcgtcacaaagttttccgatttaactacatcggaggaccgacggcagtatctacgc

SEQ ID NO: 37645 - DNA, 380 bp, Gossypium hirsutum
  unsure (1)..(380): unsure at all n locations; Clone ID: LIB3165-019-P1-K1-E9
acttgatcgagaagcagatgatctatctgtgcttattgctttgggggaaactcaagtgatgtcagagaccaaaaaggcccttacaaattctggagtaaacattttttctttggaggaaatagctggtggtaaaatggatgggaaaaaaaggagtaaccatgttctggtagtcaagaacttgccataccggtcattagagggtgaactagcttagatgtttggaaaatttgggagtttagacaagattattcttccttcaacaaaaacattggccctggttgtttttctataaccagctgaagctcgtgcagcatttaagggtttagcatacaaacgtttcaaggatgctnncttatacttggagtgggcttctgacaatg

SEQ ID NO: 37646 - DNA, 321 bp, Gossypium hirsutum
  Clone ID: LIB3165-019-P1-K1-F1
actgcttctccaatggcgactcaactgaagagcttctttacttcgtctgttacaagaggagtggtagtgcccatgggcatttcgggatccccgttcaaagtatcttccggaaagaccaggaccccttgcttcactgtcaaagctgttcaatccgacaagtcaacatttcaagtgatccaacccatcaacggcgaccccttcattggaagcctggagactccaatcacctcaagccccttaattgcatggtacctttccaacctcccagcctataggacggcagtgaacccacttctgaggggaatcgaagtgggtctggct

SEQ ID NO: 37647 - DNA, 406 bp, Gossypium hirsutum
  unsure (1)..(406): unsure at all n locations; Clone ID: LIB3165-019-P1-K1-F10
gattgcacaaaaccaaatcttctttgctttgctattttggttcgttttgctaagaactgggtaacgcacagcaaaaaaccgtggaggaaaccaacaagaaccaagcggtggttcttgccctctatgaagccttaaacacacgagacgtcaacaccgttcaccaaatccttgctcccgacctagagtggtggttccacggtccacccactcaccagtttttgatgcgcttactcaccggcgcttcatccgacgatcctttccgtttcgaggtcgaccctgtctcagtcaccacctttggatccaccgtcatcgttgaaggctgtgataacagccgntcgatctcctgggttcacgcttggactgttcgtgatgggataatcacccaagtgagggagtatttcaacac

SEQ ID NO: 37648 - DNA, 366 bp, Gossypium hirsutum
  Clone ID: LIB3165-019-P1-K1-F11
cccacgcgtccgcggaatctgaaagacaagacactgagaaaaagagagagagagagagagatgtcgggaggaatagcgcgtggtcgactcgccgaggaacgtaaggcatggaggaagaaccatccccatggttttgttgcgaaaccagagacgttgcctgatggaacggtcaatttgatggtgtggcattgcacgatccctggtaaagcaggaactgattgggagggtggctacttcccgctcacgctccatttcagtgaagattatcccagcaagcctccaaagtgtaaatttccccaaggctttttccacccaaatgtttatccatctggtacttgttggctttcaatcctaaatgaggatagt

SEQ ID NO: 37649 - DNA, 327 bp, Gossypium hirsutum
  Clone ID: LIB3165-019-P1-K1-F12
gttttgcaaaatggcgtactgtggtaagcattttcaatggaccaactgaacttgctgtgaaggaagcagcctggggactcgctcgctatgccgccatctcccaggacaatggattggttccaattgttgagccagagatcttgcttgatggtgatcacggaattgacaggactttcgaagtagccaaaaaggtatgggctgaggttttcttctatcttgcccagaacaatgtgatgtttgaaggtatcctcctcaagccaagtattgtcactcccggtgcggagtgcaaggacagggctactccttaacaagttgctgattacaccc

SEQ ID NO: 37650 - DNA, 326 bp, Gossypium hirsutum
  unsure (1)..(326): unsure at all n locations; Clone ID: LIB3165-019-P1-K1-F2
cccacgcgtncgcccacgcgttcgcccacgcgttcgttcagtttacaatttcacagttgttgtcttcacgctctctctcagccatggctgcagccatctccaccgtcgccgccgctgccgccgccaaccgagctctgggagtgtcagtcccaacctcagctttcatggggaagaaagtgagctcgagattcaacaacaccaggcaggttccttcgggaagttttaaggtgatggcggccgaaaaagagattgacgaagagacacagacctgaaaggaccgatggaaagggttggcttacgatatttcggacgaccaacaagacatt

SEQ ID NO: 37651 - DNA, 384 bp, Gossypium hirsutum
  Clone ID: LIB3165-019-P1-K1-F5
cccacgcgtccgtgaacacttaaagggagatcatgttcaaatactgggatggcttttgtaacgtcggaggaattgctggccactttggtgccaattgctgtttattggatatactcaggtatgtatgtgatgtttgagtcaaggtttgagaagtacaagttgcactccaagaaagaagaggaggagaagaatttggtttccagaaaggaagtcttcaaagccgttctttgccatcaagtcatgtcaattgctattaacctcttcacgtatgcggtaacaagagaaaaagatggtgaggcatctccaaagaaatcactaaccttgcttcttctagccaagcaattggtgatagcaatggtggtgatagatacatggtccgttttt

SEQ ID NO: 37652 - DNA, 410 bp, Gossypium hirsutum
  Clone ID: LIB3165-019-P1-K1-F6
gaggattcagtgattgtaatgacagttatgattttgccattaactacggtcccaaagtggagaaaactgctcaaaactacgcaaattacagcagttggaacaccttggaagggaggttcgaagctgaaacattgatggcggacgatgagtccggaatttccagtcctcctttatggaaatccagtcctcaacatgaaaacaacgttaattaccggtgtctatcgccatcgtcgagagctcaagccatagctagaggccaaaaggagcttatggaaatggttagtaaaatgcccgagtcttgttacgagctttcgttgaaagatctcgtggaacatcagcctgtcgttgttgtggaaccgaagcaagagagtttcgcccaagggagaggttcaaattcgatcgatgaacgc

SEQ ID NO: 37653 - DNA, 343 bp, Gossypium hirsutum
  Clone ID: LIB3165-019-P1-K1-F7
cgtcctcttaacgatatcctctgtttgcagttaagaaaagcaaatcatggctgctaccacggtcccagccgccgcaaggcagctatctcctaaagaagccgatatccagatgatgttggctgccgaggtccatctcggtaccaagaactgtgatttccaaatggagcgttacgtcttcaagcgtcgcaatgacggaatttacatcttcaaccttggcaagacctgggagaagcttcagcttgctgctcgtgtaattgtcgctatagagaaccctcaagatatcattgtccaatctgcaagaccctatggtcagagggctgtcttgaaatttgctcagtacact

SEQ ID NO: 37654 - DNA, 375 bp, Gossypium hirsutum
  unsure (1)..(375): unsure at all n locations; Clone ID: LIB3165-019-P1-K1-F8
gagcttctttctagctatatccttatcagcttttaaagatggcaggaatcgcctttggtcgctttgatgattccttcagtttggggactgtcaaggcctaccttgctgagtttatctcaactttggtgtttgttttcgccggcgttggctctgccattgcttacaacaagttgacaactgatgcagccctagatcccgatgggctagtcgccattgctgtttgccatggatttgctctctttgttgcagtggctatcggtgccaacatctcangtggccatgtcaaccctgcagtcacttttgggttagctcttggtggccaaatcaccatactaactggcatcttttactggattgcccaacttcttggatcca

SEQ ID NO: 37655 - DNA, 426 bp, Gossypium hirsutum
  Clone ID: LIB3165-019-P1-K1-F9
cccacgcgtccggttttccaatagtttgtaactttgtcggtctcacttcaagctgcagctgccctgatgcaaccaatcaaggttgctgcaccatcaaggaccaatgtgctgctcaggtcctcccagagcgtttctaaggccttcggtttggagcctgttggtgctaggctcacctgctctttgcaaactgacctcaaggacttggctcagacgtgtgttgatgctaccaagctcgctggtttcgctcttgctacatctgctcttgttgtctcgggagcaagcgctgaaggagttccaaagcggctaacctacgatgaaatccaaagcaagacatacatggaagtcaaaggaacaggaactgctaaccagtgcccaaccatcgatggtggtgtcgactctttttgccttcaagcctggcaaatacta

SEQ ID NO: 37656 - DNA, 225 bp, Gossypium hirsutum
  Clone ID: LIB3165-019-P1-K1-G1
cgccgttctaaatcacagaaagctttgaagaatttgcttttggaggtgcaaaacatggggccgaagaaaggtggaaaggtggctgtgcccgccaagaagaaacaagagaaggttgtcaatccgttatttgagaagcgtccaaagcagttcggcattggaggggctttacctcctaagaaggatttgcatcgattcgtgaattggcctaaggttgttcgtattcaa

SEQ ID NO: 37657 - DNA, 401 bp, Gossypium hirsutum
  Clone ID: LIB3165-019-P1-K1-G10
cccacgcgtccgcggcttcggtctccggcttctgcctctcttccaataccacctctccttgtaactcactccggcaacccacattgcggtggccctctatcatcgccaacctcaactcttccacttctcctcctacactcatccgaaatcaaccagttttcgcagcacctactcctttgctcactccttccaattggaaagaaaccatgggagacgagtcatacgaggaagccattgaagctctcaagaaactgctcaatgagaaaggagaattgaagagtgcagcgacggcaaaggtagagcaagtgacagctgagttgaagactgctgcttcctccgatgagtctgttgaccgcttgaaacaaggcttcatttacttcaagactggaaaatacgaaaag

SEQ ID NO: 37658 - DNA, 374 bp, Gossypium hirsutum
  unsure (1)..(374): unsure at all n locations; Clone ID: LIB3165-019-P1-K1-G12
gtaaagcttccttcacgtagaaaaatcaactcttcctttccctcacgaaacttggatttcggtctcctcagcttcacttcctcgtaaaagtttcctttttgccgctccttccccctagggtttcgtatagtaaggaacgaggggatcgaacataatcaaatcgaatggattggggaaacgtaaccgcagaggatctgatcgacgcgcttcgtgaagttgactggtcatcaccgccacgacctctccccgaattcttctctcgtttcaccttccctcgatcatatgccaaatggaatagccgccttaaatgcaatctctactactaccgaaccaattatntcatcatgattgttgtcattcttggtttgggattc

SEQ ID NO: 37659 - DNA, 421 bp, Gossypium hirsutum
  unsure (1)..(421): unsure at all n locations; Clone ID: LIB3165-019-P1-K1-G2
cttctgcttctgcctgcctgcctgcctgcctgtattggctttctacaaactctgtgccctggttctgctcttcactcttcttttccactcaacattcaccactgcttgcaattcatgcaaacccaaacctccaccatgccctccaccttcttgccctaaggacacattgaagctcggtgtctgtgctgacgtgcttggacttgtcaacgtgattgttggaacccctccttccagcaaatgctgtgctttgcttcaaggattggctgatttggaagctgccctttgcctttgcactgccattaaagccaatgtacttggaatcaacctcaacatcccagtttctcttagtctaatccttagtgcatgtcagaaggaggttcctncaggcttcaaatgtgaataaaaaagatatattatcatg

SEQ ID NO: 37660 - DNA, 426 bp, Gossypium hirsutum
  Clone ID: LIB3165-019-P1-K1-G3
gtgagactcttttgtataactgtagcatatagttctagtaagcagtaatagcaatggcctgctccatgatctcatcggcaaccattgccaccgtgaactgctcctccccggcacaggccaacatggtggcccccttcaccggcctcaagtctgcctctgctttcccagtcactaggaaggccaacaacgacatcacttctcttgcaagcaatggtgggagagtgcaatgcatgcaggtgtggcctcctcttgggaagaagaagttcgagacactctcatacctccccgatcttacacccgtacagttggctaaggaagtagattaccttcttcgctctaaatggattccttgcttggaattcgaattagaggagggattcgtgcaccgtaagtactcgagcttacccacgtactacgatggacgct

SEQ ID NO: 37661 - DNA, 322 bp, Gossypium hirsutum
  unsure (1)..(322): unsure at all n locations; Clone ID: LIB3165-019-P1-K1-G6
cccacgcgtccgaaaaaaagtcctctttataaacccttgccttcctgtaaccctctctgtatgtccttcgattcgcttaccttttcctttttggccatggctacttgttcagcggacttagctccgcttcttggccccaacgccaccgcagcagccgactacatatgcaacaagttcagtgacacttcctttgccgttgacaatacttaccttctcttctcagcctacctcgtcttctccatgcaacttggcttcgccatgctttgcgctggttcagtgcgtgccaaaaacaccatgaacatcatgcttactaacgtnctcg

SEQ ID NO: 37662 - DNA, 313 bp, Gossypium hirsutum
  Clone ID: LIB3165-019-P1-K1-G7
aagattatagtgaaaaactaaacattataaagccccttcgacttgcttcattgatttgccctctcaaagcccaagaaaaatggcttctgcttccgctactctcctcaagtcttcacctattatcgacaagtccgagtggattaagggccaaaacctccgccacccttcggtttgttttgtacggtcacaccctacatcggccgcctttgccgtccgtgctagttcatatgccgatgagcttgttaagaccgcgaaaactgttgcatctccaggtcgtggtattttggccatggatgaatcaaatgctacatgt

SEQ ID NO: 37663 - DNA, 281 bp, Gossypium hirsutum
  unsure (1)..(281): unsure at all n locations; Clone ID: LIB3165-019-P1-K1-G8
gaaaaacgggccgaccaacgctttcnaacngcaaaaatataaaaaaacatttataaattttataaacaaaacaaaaaaagcgcaaactcgtgcatttttcaaaacttcttcccacccccacaacaccacacaaacttaaaaactttccctctgacaccctcacaccctattgcctaacctacctctcactttctccaacctcttccccatgaaagctgagctatcaacaaaagctccagcacctcatccattcaaactcaacaactctcctactacaccac

SEQ ID NO: 37664 - DNA, 331 bp, Gossypium hirsutum
  Clone ID: LIB3165-019-P1-K1-G9
cccacgcgtccggccggtgcaaccgtagctaatgttagcgccacagccaaggttgcagcctgtccagtcccaaggggcagcatcaaggcctccctcaaagacgttggtgttgctgttggggcaactgctgcaagcgtaatccttgccagcaatgccatggccattgaagtcttgctcggcagtgacgatgggggtctggctttcattcccaaagaattcagcgtaagcccaagggagaagattgtgttcaagaacaatgccggattcccacacaatgttgtgttcgatgaggacgaaattccaagcggcgtcgacgtattcaaaatcttca

SEQ ID NO: 37665 - DNA, 372 bp, Gossypium hirsutum
  Clone ID: LIB3165-019-P1-K1-H10
cggaagctaagcttttgtttatcgttcgaatccttggtatcaatgctatgcacccgaggacgagaaagattttgcagctcttgcgattgagacagattttcaatggtgttttccttaaagtaaacaaggcaacaatgaacatgcttcacctggttgaaccttacgttacatacggataccctaatctcaagagtgtgaaggaattgatttacaaacgaggtttcgggaagttgaacaagcagagagttgctttgaccgacaatgcaatcgtcgagcaggcgcttggcaaatacgggatcatctgtgtcgaagatctcatccatgagatcatgacagtggggtctcattttaaagagggccataacttccttt

SEQ ID NO: 37666 - DNA, 418 bp, Gossypium hirsutum
  Clone ID: LIB3165-019-P1-K1-H11
cccacgcgtccgctcgaactggtttaagatctcatctcagtgaacaatggctagtctttacagaggggcatcaaggaaagacaagcagaagggaagacaccatggattaagccaacagaagaggcaagagattaaggaagcatttgaactgtttgacactgatggctcaggtaccatcgatgccaaagagctgaatgttgccatgagggctcttggtttcgaaatgacagaagagcaaatcaatcaaatgattgcggatgttgacaaggatggcagtggtgccattgactttgatgaatttgttcacatgatgactgccaagatcggggagagggacactaaagaagagcttatgaaagcattccaaatcattgatcaagataacaatggaaagatatctgctgatgacgttaaacgc

SEQ ID NO: 37667 - DNA, 420 bp, Gossypium hirsutum
  Clone ID: LIB3165-019-P1-K1-H12
acaccgatcaacagcagtggtcaatgagtatggtaacaacaatatataactatccgagcccacgttttatctcttcaccgaaaagaaaaaccacgtataggagggaacagccgcaggatctgagatacaacggctgaaagtcggcaaatactaacatataaagagtctccatgggatctctggacctaagctcaagatcagaagttgttaccattcatgttaatgaagcaaaaaacttactgcagtcaggctaccgttacatcgatgtcaggacagtggaagaattcgagaagggacatgtggaagcagcgaatattcttaacatcccatacttgttcatcacaccagaaggtagggtgaagaatcctgagttcttgaaagaggtttcatctctctgcaaggaggaagatcgtctcatag

SEQ ID NO: 37668 - DNA, 403 bp, Gossypium hirsutum
  unsure (1)..(403): unsure at all n locations; Clone ID: LIB3165-019-P1-K1-H2
agaaattcaattatggcggaaaagtttctgttctatattgcttaaagggttgncgacanagtgtgccgtgtcactgtagaggaagttcgcttggcgtttaatgtcaaaaccgatctgaaaaagctggaggacaccatgatcagcattaaagctgtgctcttggatgccgagcggcaacagcaccaaaatgaaaagctgcgcctctgtatggngaagctcagagacatctnttacgatgctgaggacgttattgacgatttcaagtgtgaagctctccggaaacaggacggcatcaatcatcccgacatcaaaaactaaaggtgcgagttttaggttcctgttgtttgtctttttcattctctttaaaaatgagtcataaaatcaaagacatcaatgggagact

SEQ ID NO: 37669 - DNA, 428 bp, Gossypium hirsutum
  Clone ID: LIB3165-019-P1-K1-H3
caaagagaagaaacccagagctcaaacgaagaacatgttgattaaacaaaacgccataagtgggacaatgacatactctctttgcttgaagccgaagaggatgagcccagccaagacttgtcacccctcatcaccactttacaacaacagctctcctcggactccgttttggatgcccctttccctctttgtcaaccagcaacaccatcgccctcgaaacccgacaaggaaaacgccaccgccgccctcagcttagaagactgcacatcagcaacttgttccttgaaagaagatgatgatgataaagagcaagtcataagacatttgcttgaagcctctgatgatgagctggggattccaaatagagaagatggcgatggaaatggtagcggtggtggtggggatgtggctttgaagttttgagtgga

SEQ ID NO: 37670 - DNA, 378 bp, Gossypium hirsutum
  Clone ID: LIB3165-019-P1-K1-H5
agcatatagtaatagtaagcagtaattttaatggccttctccatgatctcatcggcgaccattggcaccgtgaaccggtcctacccggcacaggccaacatggtggcccccttcaccggcctcaaatctgcctctgctttcccagtcaccaggaaggccaacaacgacatcacttctcttgcaagcaacggtgggagagtgcaatgcatgcaggtgtggccgcctcttgggaagaagaagttcgagactctctcatacctgcccgatcttactcccgtacagttggctaaggaagtagattaccttcttcgctctaaatggattccttgcttggaattcgaattaaaggaaggattcgtgcaaccgaagtactcgagc

SEQ ID NO: 37671 - DNA, 367 bp, Gossypium hirsutum
  Clone ID: LIB3165-019-P1-K1-H6
ggaatgcccggggcgaccgatgcgaacggcaagacacaattcaacagctggtttattgactctgtctataacacatggctgcagccatggccaccgtcgacgccgttgccgacaacaaccgagctctgtgagtgtcagcaccaacctgagctttcatggggaagaaagtgagctcgagattcaacaacaccaggcaggttccttcgggaagttttaaggtgatggcggccgaaaaagagatcgacgaagagacacagaccgaaaaggaccgatggaaagggttggcttaccgatattgggacgaccaacaagacattactcgagggaaaggggatggtggattccttgtttcaagctcccatgaatg

SEQ ID NO: 37672 - DNA, 337 bp, Gossypium hirsutum
  Clone ID: LIB3165-019-P1-K1-H7
gtggttttcttttaatttggtcactgttgaaattgtatggtcatacttgcatggatcgatctcccctgttttcttctctgtaaattttataacttggaacctagacacccatggctactgtttctcaattgaataactttccatgcaagaccttcttaataaccccacaaaacagtaactttacctcaaaacttccggttctgcctctaaactctacaaaaccaactcagaattcgatcaagaaatctcaatttttgacccagaaatcagtccagccaaggcctgttttccaggtccgtgcttcggacgccgacgacgaatggggcccggacaagga

SEQ ID NO: 37673 - DNA, 399 bp, Gossypium hirsutum
  Clone ID: LIB3165-019-P1-K1-H8
gctttagctaaccaaagcacatacaaagctaccatggctaattttcaaatgaaaaaagttgaacaatgcacacacggcaagctgtggaactcttccagcgaagctctaaccttgaccgacaagaaagtttggcaaggctctcattatgcggatttcccagaaataattgaagatggggatgcgagtgagtttacacatgaatcagtgactgatgatgctgatattcatggttcagttgctggtcttgtgtacaggcgacgtgacggaactaagtggattgttgcctggagcaacccacaagctgagaacagcaaggtctatactgatatccagagacaacctgttcactgggggcaaatcaaaaccaaccttgagaaaagaggaaaaccaaaatttaaa

SEQ ID NO: 37674 - DNA, 363 bp, Gossypium hirsutum
  unsure (1)..(363): unsure at all n locations; Clone ID: LIB3165-019-P1-K1-H9
ctttttgttaatctctctgcctggaactgcaattaaaaactgtccattgacactgntctcgtttttttctctatttgaacaagcatgggtttaggccataaaatcaggaccggatatgcgaagctcagctttctttcgagactggctcgtcagtctcatgatgctaagactcttccagcattgccctgccaaatcatgaagcaagatggagatagactacgatcccttgcactctttggggcaggggtctcagggcttttgggttgtgctaccatagcttattctgatgaggctgagcatggtttggcggttcctaactatccttggcctcatcaaggcatactaagctcatatgaccatgct

SEQ ID NO: 37675 - DNA, 252 bp, Gossypium hirsutum
  Clone ID: LIB3165-020-P1-K1-A1
accactgcttctccaatggcgactcagctgatgagcatctttaggtcgtctgttacaagaggactggtagtcccccaggggcatttcgggatccccgtttaagtatcttccggaaagaccagacccctttgcttcactgtcaaggctgttcaatcccgcaagtcaacattttaagtaatccaacccatcaacggcgaccctttcattggagcctggagactccaatcacctcaagccccttaattgcatggt

SEQ ID NO: 37676 - DNA, 398 bp, Gossypium hirsutum
  Clone ID: LIB3165-020-P1-K1-A11
cccacgcgtccgccaacattgaagagataagattatggtgaaaaactaaacataataaagtccctcataacattcttcgacttgcttcattgattagcccaaagataaacataaccaaaaagaaaaatggcttctgcttccgctactctcctcaagtcttcacctattatcgacaagtccgagtggattaagggccaaaacctccgccacccttcggtttgttttgtacggtcacaccctacatcggccgcctttaccgtccgtgctagttcatatgccgatgagcttgttaagaccgcgaaaactgttgcatctccaggtcgtggtattttggccatggatgaatcaaatgctacatgtgggaagcggcttgcctcgattggtctcgagaataccga

SEQ ID NO: 37677 - DNA, 432 bp, Gossypium hirsutum
  Clone ID: LIB3165-020-P1-K1-A12
cccacgcgtccgcgacggcttccatcaacggttggtgccttacctcctcttcttgctccaccaccacctcctctttttccgctcgtcgacgacctacattgcggccttcggtcgtcgctagccttaactcttctccttctcctccgactcttatccaagaccgcccggttttcgctgcccctgttcctttgctcaccccgagagaagagatgggaaacaagtcctacgacgaagccattgaagctctcaagaaacttctcagtgagaaaggagaactgaaagctgaagcagctgcaagggtagatcaaataacagcagagttaaacacaacatcagctgacggcaaaccatctgactcttctgttgagagactgaaagaaggcttcgtttacttcaagaaagaaaaatatgaaaagaatcctgctctgtatg

SEQ ID NO: 37678 - DNA, 433 bp, Gossypium hirsutum
  unsure (1)..(433): unsure at all n locations; Clone ID: LIB3165-020-P1-K1-A2
tcggaaatacatgtctcttcttttattccttcgcatctaactctctaaaccttggatccttcaatcttgatcgttggatccatctttttccttccattcaacccaagactatatttggtgacagcaatgtctcctgcatccaaagtcgagtccaaagataaaaaatccagcaaggactctcagaaggcttctgcaaggccttctggacctgctaatgcagctagtggtgctccagctagtgcttacaatccacttttgggaacattccataccattgaaacagcaccatcatcatctgcttcacctcttcagagcaatggtcgnttccgaaacatagacgacacagatgagcatttgggaggctcacttggagcntggattgagtttgattcaatatctaataatggtagctgggtcggtgaatcagaagagc

SEQ ID NO: 37679 - DNA, 111 bp, Gossypium hirsutum
  Clone ID: LIB3165-020-P1-K1-A3
cccacgcgtccgcaaattttcatcacccatcaagcttttcatcaagggcttcccttcaacaggcttaaatctttcttcaaccaaagcttctttcatcttctcaacacccca

SEQ ID NO: 37680 - DNA, 433 bp, Gossypium hirsutum
  Clone ID: LIB3165-020-P1-K1-A4
tttagctatagcatacactactagtacccactactagcaatggcttcctcaatgatctcatcggctaccattgccactgcctctccggcacaggctaacatggtcgctcctttcaccggtctcaagtctgcctctgctttcccagtcaccaggaaggccaacaacgacattacttctctcgcaagcaatggcggtagagtgcaatgcatgcaggtgtggcctcctactgggaagaagaagtttgagactctctcatacctccccgatcttacacccgtgcagttggctaaggaagtagattaccttcttcgctcaaaatgggttccttgcttggaattcgaattggaggagggattcgtgcaccgtaagtactcgagcctacccacgtactacgatggacgctactggaccatgtggaagctgcccatgttcg

SEQ ID NO: 37681 - DNA, 434 bp, Gossypium hirsutum
  Clone ID: LIB3165-020-P1-K1-A5
ggagagccttttttttgtgtagcgattctcagttagtcttttctttaagcttacagcttctctccagagttttataatgggtaaggagaaggttcacatcaaccttgttgtcattggccatgtcgactctggcaagtcgaccactactggtcatttgatctacaagctaggtggtattgacaagcgtgtgattgagaggttcgagaaggaggctgctgaaatgaacaaaaggtcattcaagtatgcttgggtgcttgacaagcttaaggctgagcgtgaacgtggtatcaccattgatattgccctgtggaagtttgagaccaccaaatactattgcaccgttattgatgcacctggacaccgtgactttatcaagaacatgattaccggtacctcacaagctgactgtgctgttctcattattgactcaacca

SEQ ID NO: 37682 - DNA, 252 bp, Gossypium hirsutum
  Clone ID: LIB3165-020-P1-K1-A6
cttctccaatggcgactcagctgaagagcagttttaggtcgtctgttacaagaggactggtagtccccaggggcatttcgggatccccgtttaaagtatcttccggaaagaccaggaccccttgcttcactgtcaaagctgttcaatccgacaagtcaacatttcaagtaatccaacccatcaacggcgaccccttcattggaagcctggagactccaatcacctcaagccccttaattgcatggtaccttt

SEQ ID NO: 37683 - DNA, 384 bp, Gossypium hirsutum
  Clone ID: LIB3165-020-P1-K1-A7
gggaggcaaaggtcaaggaaaatctttttaatgtgagcttgtctttgccaagatgggaatcaaccccattatgatgagtgccggagaattggaaagtgggaacgccggagaaccagccaagttgatcaggcaaaggtaccgtgaggccgccgacattatcaagaaagggaaaatgtgttgcctctttatcaacgatctcgacgctggagccggtcgtatgggaggaaccacacaatacacagtgaacaaccaaatggtgaacgccacactcatgaacatcgctgataaccccaccaacgttcagctccccggtatgtacaacaaggaagagaaccctcgtgttccgatcattgtcaccggtaacgatttctcgacgctgtacgc

SEQ ID NO: 37684 - DNA, 416 bp, Gossypium hirsutum
  Clone ID: LIB3165-020-P1-K1-A8
ccgtgtcttgcttgtaactcatcctcttattatttctttaaataaaacccattttcaagactcagccttcgttcaaatttccaagctgcaagcttgaaaagattgacactttcatggttcaaagcttgtaactccctctcattctttgacaaagcccttgttaacctttgtcttcttttctcttgatctatcaaggacgggaaaaaatgtttggtacccaaagtaaaagagaccttactttggaattgcaagcacaatttccaattttaaggccaagcatccatgcaagaagagctaatcttacagtgaaattccaagacctttatgggtttactgttgaaggtaatgtggatgatgttaatgtgttgaatgaggtaagagaaaaggtaaggcaacaagggcgagtttggtgggca

SEQ ID NO: 37685 - DNA, 429 bp, Gossypium hirsutum
  Clone ID: LIB3165-020-P1-K1-A9
gttttggcatcatctttccgttgttttaaatcgtttgatgcgtcggtgatagatcggaaagatggcgattcatcgtacagcaagaaacagcggcagcggcgtcggagtagcaggggcgacgattggaggttttggatttacagttagattattggcttctgcaattacggttgcaatctgtttcttctttgctctttctttcttcttcacttaccactctctgtctcctcatcttcaaacaaaccttggtttctcaactgattcctatggaatcggatccacgaggaggtccgttttggcacttaaatcggatccgctcaagcctcgactggatcagatccggaaacaagccggcgatcaccgttctcttgtcctcgcttacgcgtcttacgctcggaaattgaagcttgaaaactcgaagctcgttag

SEQ ID NO: 37686 - DNA, 398 bp, Gossypium hirsutum
  Clone ID: LIB3165-020-P1-K1-B10
caagcttttcatcaatggcttcccttcaacatgcttcaatctctcttcaacccaagcttctttcatcttctcaacaccccagatcccttccctctctcaacctctctttttcagccactttcccttccctcaaactctgcaccactcgccctcttcatggcggtgccaaaatgtcagcctccgccgcttccagctacgccaccgctttagccgatgtagccaagtccaacaacacccttgatgccaccagctccgacgttgaaaaggtcgagaaaatcttctccgacccacaagtcctccagttcttcaccaaccccaccattgatgtcctcaaaaaacgtcaggttttggatgagattgttagctcctccgagcttcagccgcacacggcgaatttt

SEQ ID NO: 37687 - DNA, 385 bp, Gossypium hirsutum
  Clone ID: LIB3165-020-P1-K1-B11
gtctcaagctctctcttcctgtcttcgtctacttcgcctctttctctatggatccctacaagcaccgtccatcaagtgctttcaattcaccattctggactaccaattctggcgctccagtttggaataacaattcatctctcactgttggacccagaggtccaattctccttgaggactatcatctggtggaaaagcttgccaactttgacagggagcggattccagaacgtgttgtccatgctaggggagcaagcgcaaagggtttcttcgaggttacccatgacatttctcaccttacatgtgctgattttctgcgagcacctggagttcaaacccctgttatcgtgcgattttcaaccgtcatccatgagcgtggaagccc

SEQ ID NO: 37688 - DNA, 435 bp, Gossypium hirsutum
  Clone ID: LIB3165-020-P1-K1-B12
cccacgcgtccggtcctcaaatatctcatactaggaattaaattgaattaatggctcaaaccatgttgctcatgtctagccatgcagtgagcttgaagagagatcaccctttactccatttccaagctcaaggactcaagcctaaacctgcctctcatctcttcttcaatccattgtctaatggtgtccatacttcacccaaagctttcaccactttagctgtctttaaatcaaagaccaaagcagctcccaagagggttgagccaaagccaaaggttgaagatgggatctttggcacctctggagggattggttttaccaagcaaaatgagctctttgtgggacgtgttgccatgcttggttttgctgcatcattgctaggcgaagcaataacagggaaaggaatcctagcacagctgaatttggagactggaa

SEQ ID NO: 37689 - DNA, 434 bp, Gossypium hirsutum
  Clone ID: LIB3165-020-P1-K1-B3
gccgccttttgggaagaagaagttcgagacttttcattacctgcccgatcttactcccgtacagttggctaaggaagtagattaccttcttcgctctaaatggattccttgcttggaattcgaattagaggagggattcgtgcaccgtaagtactcgagcttacccacgtactacgatggacgctactggaccatgtggaaactgcccatgttcgggtgcaccgactcggctcaggtgttgaaggagcttgaggaatgcaagaaggaataccccaatgcattcattagaatcattgggttcgacaacgttcgtcaagtgcagtgcattagtttcattgcctacaagcctgaaggctactaagttgtttacttccctcctaggaattccatttgtttcaaagttgtacttaaattaagcccctcaaacccccccc

SEQ ID NO: 37690 - DNA, 429 bp, Gossypium hirsutum
  Clone ID: LIB3165-020-P1-K1-B4
cccacgcgtccgaaagtccaatcactcccaatactttcataacatttcacgaacttcactctccagtctccaatggcggctgccgtctccaccatcggtgctgtcaaccgagcaccgttgagtttgaatggatcaggtgccggagcttctgctccaagctcagctttcatggggaacagcttgaagaaagtgagcgctaggttcaacaacaacggcaaggctccagtgggaagtttcatgattgtggctgccaaagaaatcgacgaagacacacagaccgaccaggaccgatggaagggtcttgcttatgatatctccgatgaccaacaagacattaccagagggaaaggtatggtcgactcattgttccaagctcccatgaacgatggtactcactatgctgtcatgagctcctatgagtacattagc

SEQ ID NO: 37691 - DNA, 435 bp, Gossypium hirsutum
  Clone ID: LIB3165-020-P1-K1-B5
atcactcaccattgttccaagtttgttgtaaaccaagttagaaccagcagccaacatggcctcattagcagcctccaccgctgccgcctcccttggcgtctctgaaatgcttggtaaccctctgaatttcagtggtggagctaggtcatcggctccaacaccatccaactcatccactttcaagaccgttgctcttttctccaagaagaaggccgctcctccaaagcccaaggctgctgctgtcgccccggccgatgaagagctggctaagtggtacggtccggacagaaggattttcttgcctgaaggtctgttagacagatcggagatcccagagtacttgaacggagaagttcccggagactatggatacgatccgtttggtctgagcaagaagccagaagactttgcaaaatatcaagcatatgagttgat

SEQ ID NO: 37692 - DNA, 432 bp, Gossypium hirsutum
  unsure (1)..(432): unsure at all n locations; Clone ID: LIB3165-020-P1-K1-B6
cccacgcgtccgaaacaatttggatgacatagttatccaaaatgatcccaaattaatcttcgtatgttgatgtatgataaaaccagcaaagcaaagccaatagaattcccatccacaaacactccaccaatccgtaataatggctacttagctctctctttccaagttcctctcctcctttttgccttccattcctncaccaccaccgncgccgccgnccaaagcgcctcttctcaacaacctttcactctcatcccaaaagcccaaaagcactctcctttcgttgtcagctcaagaggatcaatctccttcatcatcaactgaattgtcatcagttatatgcccttcccttgcatattcgaatactcttttcttcaaatcagcttacaacgttcaagttattgtggatgataatgaacctgaagaaaagct

SEQ ID NO: 37693 - DNA, 431 bp, Gossypium hirsutum
  Clone ID: LIB3165-020-P1-K1-B7
cccacgcgtccgaaattttcttttacttttcctatcttgaaatcccagagctttgtctcagctctctctctctctctctcatcttttacatggcatctcaagccagcctcctccttcaaaaacagctcaaagatctttgtaagaatccggttgatgggttctcggctggattggtcgatgagaacaatatctttgaatggagtgtaacaattattggacctcctgatactctttatgaagggggatttttcaatgctatcatgagttttccaccaaattatccaaacagccctccaacagtcaaatttacatcagagatttggcatcctaatgtttatcctgatgggcgtgtttgcatatcaattcttcatcctccgggtgatgatccaaatggctatgagcttgcaagtgagcgctggatgccagtccat

SEQ ID NO: 37694 - DNA, 432 bp, Gossypium hirsutum
  Clone ID: LIB3165-020-P1-K1-B8
cccacgcgtccgcccacgcgtccgcccacgcgtccgaaaaaaggtttaaaaactcgctcaaccccttttatgtccggcccaactccggccgtggtccaatcatcggaccgacgtcgtccaccgcgccggccaccatacacggtggccgaaaatcgaaagaaggttggggaagaagtcaacgaggtaggtggccattttggtgttagcgggctaggggagccgaccctcgagtgaagaacgtgctgacgaggcacgtgggcgatagcagggaggcacgacgctaaagggtggctaaggtttcctttgctgaaactagtttaggtagtgggcttatcgggcttagggttattttaattttgggcctattgggttgtaattttggctgggtttaattgtgtttaatgtttgagttgatgtaatgggcttatttat

SEQ ID NO: 37695 - DNA, 431 bp, Gossypium hirsutum
  Clone ID: LIB3165-020-P1-K1-B9
cccacgcgtccgcccacgcgtccgcaaatttttgaggaaatcccagtttccatgaaaattcttgggacatctcgacctttgcctctccctttatataacaattctcctcctttctctcatccacacttttctccttcaattttcccatcaacccattattctcacaagttttcgcaatccatggctgcttgcattgacatctcaagaacaacagactcttcccaactttcccaacgtccaaacatttctcaacctgatgaagttctttacaagtatggaagtttctgcagatccactttcccaaataatgtttcgagcgtacccttgaataaaaaccacacaaaaaccatccctacaagaaaatctgttgatttttctttagaagaaaaagaagaggttggtgctttatggctgaaaatgaaagaagaagc

SEQ ID NO: 37696 - DNA, 431 bp, Gossypium hirsutum
  Clone ID: LIB3165-020-P1-K1-C10
cccacgcgtccgcccacgcgtccgtaagaactaaatccatcccaacttgtttcagatctaggtacttcagaataccctgctgaaatgaatcaaaagggcttgatttatagttttgttgcaaaaggaactgttgttttagctgagcacacatcatattctgggaactttagtaccattgctgttcaatgtttacagaagctgccttcaaatagcagcaagttcacgtattcttgtgacggtcacacatttaacttcctcattgacaatggatttgtgtttctagttgtcgcagatgaatcagttggcaggagtgtgcctttcgtttttcttgaacgggtgctagatgattttaaacaacgatatggtgcaagtataagaaatgagggtccccatcctttagctgatgatgacgatgatgacgacttatttga

SEQ ID NO: 37697 - DNA, 434 bp, Gossypium hirsutum
  Clone ID: LIB3165-020-P1-K1-C12
cccacgcgtccggcgaaacccagcatctaaacatccaccccctatttttccatggccaccaaaactgcatcatcgtcaagctcaaagtcacaagcccgtacatgcctatgctcccctactacgcacccagggtccttcaggtgcagcctacacaggaatttcaacaagccaccgactggccggagcagggcggttcgtatcgcaccgaattcctgggagttagccctgcaagccaaagcaaattccatcaaggcgttgctgctccaaatcattaaaccatcgagccatgacttgcaaaggagaaggaatttccagcctaagccttccaggttttgcatgttgaatggcaacagaaacgggttcggggtggctgtttcctgataatatattggcctcccttagtgtttactttaatgtatatatacaaggattta

SEQ ID NO: 37698 - DNA, 156 bp, Gossypium hirsutum
  Clone ID: LIB3165-020-P1-K1-C2
agccttccgttagaacccacaaagggtgtgggtcgattaatactgcaggacggtggtcatggaagtcgaaatccgttaaggagtgtgaaccacctcacctgccaaatcaactagccccaaaaatggttggccctaaagcccgggacctatacccgg

SEQ ID NO: 37699 - DNA, 56 bp, Gossypium hirsutum
  Clone ID: LIB3165-020-P1-K1-C3
gcgttcggaaggattcctggccaacaccaggcttcctttataccactcactctttc

SEQ ID NO: 37700 - DNA, 433 bp, Gossypium hirsutum
  Clone ID: LIB3165-020-P1-K1-C5
cccacgcgtccggaagatcaaacgaaatcgtttattagccattctttcaagctccttttttgtggtcttcatcgaccacacagtttaactcaccgcctcgcccatggaagctctcagctctcaacccctcgcccttctctccatcttctctcctaaaccaaaagatttcccggctagaatcatccgctttcccacccattccaaaaaggacggtaacgattccgatatccaatatgatcctaacaacacaagcatcgttcctcttgtcggcaatcaaactttctcccaggatgcagcgatgggattggttctaagcgcggcgtctgtaagaggatggacaacaggatcgggcatggagggtccatctgtacccgcccgaaccgatgatgaccaatctaatacggagcaaggtttcacctttccatggtctctc

SEQ ID NO: 37701 - DNA, 363 bp, Gossypium hirsutum
  Clone ID: LIB3165-020-P1-K1-C6
cccacgcgtccgacaaaaggtcacactcaaatttgtagacatatcttgctccattaagaggggagtttgcccttgacttgaccgtccttatacctgtaaacacatctccaaaaactgtacctgtcgtaaaacgctcataagttgactcaacatgtaattgtggccgtctttgaaaccgtttttggtcggttcttacaagttttaagacaggttgattatctgggaagtaggttctagacttgggtatcttttgctttaacttttgatgtaaaataacctggcactgaatgtggactgttgggggaaatttggagggatatcaaatccatcatcgagcaggcagctgtcagtgaggtttttttt

SEQ ID NO: 37702 - DNA, 425 bp, Gossypium hirsutum
  Clone ID: LIB3165-020-P1-K1-C8
ctgagtacaaaatagaactagaggcttgctctaaaaactatactctctgattatctctcttcttcgagccgctaggtcgtactgttttagcttcaagtctctcttttttgaaagttcctagttaatactgcataatgggtaaggagaaggttcacatcaacattgttgtcattggccatgttgactctggaaagtcaaccacaacaggtcacttgatctacaagcttggaggtattgacaagcgtgtgatcgagaggttcgagaaggaagctgctgagatgaacaaaaggtcattcaagtatgcctgggtgctcgacaaattgaaggctgagcgtgagcgtggtatcaccattgatattgccttgtggaagtttgagacgaccaagtactactgcactgtcattgatgctcctggacatcgcgac

SEQ ID NO: 37703 - DNA, 419 bp, Gossypium hirsutum
  Clone ID: LIB3165-020-P1-K1-C9
cccacgcgtccgcccacgcgtccggatttttttcattcgtttcttctcacgctcgattaccttacaaaaagagaaaatgaccaagtgttacccaactgtgagcgaggaataccagaagtcagttgaaaaggccaagaggaagctcagaggtctcatcgctgagaagaactgtgctccactcatgctccgtttagcgtggcactcagctggaacttttgatgttaagaccaagaccggaggtccattcggaaccatgaagcatcctgctgagctcgcacatgctgctaacaacggcctagatatcgccgtcagacttctcgagccgatcaaggagcagttccctaacctcacctacgctgacttctatcagcttgctggtgtcgttgccgttgagattactggtggacctgaaattccct

SEQ ID NO: 37704 - DNA, 428 bp, Gossypium hirsutum
  Clone ID: LIB3165-020-P1-K1-D1
gttcaaggccggatctcagatcttcagcgattgtgggcttgactacttgggaaacccaagcttgatccacgctcaaagcatcttggccatctgggcttgccaagttatcttgatgggagctgttgagggttaccgtattgctggcgggcctctcggtgaggtgaccgaccccttgtacccaggtggcagcttcgacccattgggtcttgctgacgacccagaggcattcgctgagcttaaggtgaaggagatcaagaacggcagattggctatgttctccatgtttggattcttcgtccaagccatcgtcaccggaaagggaccattggagaacttggctgaccaccttgctgacccagttaacaacaatgcctgggcctacgccaccaactttgttcccggaaagtgagattagatggtgagagtga

SEQ ID NO: 37705 - DNA, 433 bp, Gossypium hirsutum
  Clone ID: LIB3165-020-P1-K1-D10
gcgaaaaagctccacaaaagaaactgaaattataggttgtggatgtgaaagatggaaggagttgagcatagagttattaaggtgaatggcataaacatgcacgtagcagagaaaggggaaggcccactcattcttttcatccatggcttccccgagctatggtactcttggcgtcaccagattgcttctttgtcttccaaaggttaccgagctgtggcacccgacctgagaggctacggtgacacggatgcgccagatttggtcaccagttatacctgcttccatatagtgggggatttggttcagcttttaaatattatttcccctaacgaacacaaagtgttggtagtagggcatgactggggagctgccatagcttggtatttgtgtttgtttaggccagacaaagtgaaagctgtgttcaacctcagtg

SEQ ID NO: 37706 - DNA, 428 bp, Gossypium hirsutum
  Clone ID: LIB3165-020-P1-K1-D11
cggacgcgtgggcggacgcgtgggttcttttttcttttcttttcttttttccaccctgtttatttataatttctctctaatattccaattcctcgccgattaattcgtacgcaagtcggggtcgaacatgccggcgccgccggtttagtttcctgggcttttttttttcctttctactctccagatccgtttaatcgccatcaggagttgagggtagtttggttcagtttgttgtgactgaaaagaaaaaaagagaagaaaatggagttgtctgggttctccagatgagaactgatgttattgacagtagaaggaggagggttcttctcttcttcagcgtccgggtatagcaagggcttggcccttcttctgttgggtcagaagcacgaggacaagtccatgagagtttcgccgtggaatcattacca

SEQ ID NO: 37707 - DNA, 289 bp, Gossypium hirsutum
  Clone ID: LIB3165-020-P1-K1-D12
cccacgcgtccggatcagtgagactcttttgtttaacctgtagcatatagtaatagaaggcagtattagcattggcttcttcaatgacttaatgggaaccaatggcaacggggaccggttcttcccgggacaaggcaacaaggggggcccctttaaccggcctaaaatctgcctctgctttcccagtcaccaggaaggccaacaacgacatcacttctcttgcaagcaacggtgggagagtgcaatgcatgcaggtgtggccgcctcttgagaagaagaagttagagac

SEQ ID NO: 37708 - DNA, 439 bp, Gossypium hirsutum
  unsure (1)..(439): unsure at all n locations; Clone ID: LIB3165-020-P1-K1-D3
cccgtccggtggtttctttgtctctctagctagctatagctcttcttctctttgccgtgttccactttttttatttcatttaaaaaattgggttttcttttgaaataataaatcgactcatatgtagtatctgattntntaattttttgcgggtgtggcttgttaaatttcttgagcacattggaatgttaggtgttactagcacttgcagaacaaaaaaaagaaagagttggtctttacatccccttttgtgtttatgtttttttattgtttttcttagttaaagatttactgtatagatcttgatttttgggtttttccttcttttttcaacgtgtacttcccaaatatagaaatatgtaaatcattcaaactgcatgggatttattttatctgttttattttcattgaagtagtagttaaggacttttatatagca

SEQ ID NO: 37709 - DNA, 436 bp, Gossypium hirsutum
  Clone ID: LIB3165-020-P1-K1-D4
acaaaccaaaagatatgcttactcacaacgtgtctgcgccgtcttctctatgcccaagtctttccaatgactggcatttccatgtatctgatcagcttatatttcctcacaatctaaacccaaatctattttggagagcaagcagaaagattaagggatgccgactcaaggctagcttttgggagtccatcagatcagggattttgaagaacaacacaacacaaatcgttgaaccaccctctacacttgaagaagaggaagaacccttgcctgatgaatttgtgcttgttgaaaagtctcaacctgatggtgaaattgaacaaataatattctcttctggaggagatgtggatgtctgcgagcttcaagccctatgtgataaggttggctggccaaggagaccattgtcaaaactagcagcggctttaaaaaatag

SEQ ID NO: 37710 - DNA, 437 bp, Gossypium hirsutum
  Clone ID: LIB3165-020-P1-K1-D5
aaattcagataacaatttcacagttgttttcttcactctctctctcagccatggctgcagcgatctccaccgtcgccgccgctgccgccgccaaccgagctctgggagtgtcagtcccaacctcagctttcatggggaagaaagtgagctcgagattcaacaacaccaggcaggttccttcgggaagttttaaggtgatggcggccgaaaaagagatagacgaagagacacagaccgaaaaggaccgatggaaagggttggcttacgatatttcggacgaccaacaagacattactcgagggaaagggatggtggattccttgttccaagctcccatgaatgatggaactcactatgctgtcatgagttcctatgaatacatcagccaaggtcttaaaacgtacaatttggacaacaacatggatggtttctacatc

SEQ ID NO: 37711 - DNA, 72 bp, Gossypium hirsutum
  unsure (1)..(72): unsure at all n locations; Clone ID: LIB3165-020-P1-K1-D7
ttccggggcgccacgcgtccgcttattccgtgaatcggaggcggggcacggtacctctntanggacccaagg

SEQ ID NO: 37712 - DNA, 418 bp, Gossypium hirsutum
  Clone ID: LIB3165-020-P1-K1-D8
gtttggcatgcacaacagagaaaatgtcttggtattttgctatgcattgagcccaaatgatgggacagagtggaggttgcgaatacagtcagaagctgagcacttcatagatgtatcgtctatgtcctctgatatgattgcaaagatgataaatgaggacaaaatacaaattcttgtcaatcttaatggttatactaagggagcaaggaatgaaatatttgctatgcaacctgctcctattcagatttcttacatgggatttcctgggactactggtgcatcatatatacactacttggtcacggatgagtttgtttcacctcttcacttttctcatatctactctgagaagcttgtacaccttcctcattgttattttgtaaatgactataagcagaaaaatcttgatgtcttggat

SEQ ID NO: 37713 - DNA, 420 bp, Gossypium hirsutum
  Clone ID: LIB3165-020-P1-K1-E1
atcggcaaacaaaccaagtcaacctaaagccttatgcaccatggcaacctctgctatccaacaatctgctttcgttggccagaccgctttgaagcagtccaatgagctcttacgcaaagtcggagctttcgatggtggtcgtgttaccatgcgcagaactgtgaaaagtgcccctaccagcatctggtacggccctgaccgcccaaagtacttgggtccattctcagaccaaatcccatcatacctgacaggtgaattccctggtgactatgggtgggacactgctgggttatcagctgacccagagacatttgctaagaaccgtgagcttgaagtgatccactgcagatgggcaatgcttggtgcccttggttgtgtcttccctgaaattctttcaaagaatggagttaagttcggaga

SEQ ID NO: 37714 - DNA, 260 bp, Gossypium hirsutum
  Clone ID: LIB3165-020-P1-K1-E10
gcttcacaatggcctctacaaccatggctctttcttccccatcattcgccggtaaggcagtgaagttctccccttccacccctgaaatccagggaactggccgtgtttccatgaggaaaaccaccaagcctgttccttctggtagcccatggtacggtcctgaccgagttttgtacttgggtccactttccggtgagccaccatcttacttgaccggtgagttccctggtgactatggttgggacactgctggactctca

SEQ ID NO: 37715 - DNA, 429 bp, Gossypium hirsutum
  Clone ID: LIB3165-020-P1-K1-E11
gatttctctatcctccgctcactccatatatttacaacaagctcgaatatttaaatggagatattgggttttatcttttagtttaattgaagagagaagaagcgagaggtaccagcgtccgccatggctggtttgcaaagatcagcggtgtcttttaggaggcaagggtcttcggggcttgtttgggatgacaagtttttgtcggagttgaatcaagggaaaccagaagagcagcaacaaggaggagacacgaaacagctgcagaaagaggaaccaaggcagttgcaagacaatcgtaacccagaaaagattgacgttgttaagggtgttgcccccatcaacaccatcgaaagaaaccgatcaaatggtgaaagacgaggttaccggactggtggcaaggtatcccctgctattgacccgccttctcca

SEQ ID NO: 37716 - DNA, 435 bp, Gossypium hirsutum
  Clone ID: LIB3165-020-P1-K1-E12
gtgagactcttttgtatacctgtagcatatagtaatagtaagcagtaatagcaatggcctcctccatgatctcatcggcaaccattgccaccgtgaaccgctcctccccggcacaggccaacatggtggcccccttcaccggcctcaaatctgcctctgctttcccagtcaccaggaaggccaacaacgacatcacttctcttgcaagcaacggtgggagagtgcaatgcatgcaggtgtggccgcctcttgggaagaagaagttcgagactctctcatacctgcccgatcttactcccgtacagttggctaaggaagtagattaccttcttcgctctaaatggattccttgcttggaattcgaattagaggagggattcgtgcaccgtaagtactcgagcttacccacgtactacgatggacgctactggacca

SEQ ID NO: 37717 - DNA, 429 bp, Gossypium hirsutum
  Clone ID: LIB3165-020-P1-K1-E2
accaaaataagttgcttaacaatggcctctacaaccatggctctttcttccccatcatgcgccggtaaggcagtgaagttctccccttccacccctgaaatccggggaactggccgtgtttccatgaggaaaaccaccaagcctgttccttctggtagcccatggtacggtcctgaccgagttttgtacttgggtccactttccggtgagccaccatcttacttgaccggtgagttccctggtgactatggttgggacactgctggactctcagctgatcccgagacctttgctaggaaccgtgagctcgaagtcattcactgcagatgggccatgttgggagctcttgggtgtgttttccctgagctgttggctaggaacggtgtcaagttcggtgaagctgtatggttcaaggccgggtctcaaatc

SEQ ID NO: 37718 - DNA, 437 bp, Gossypium hirsutum
  Clone ID: LIB3165-020-P1-K1-E3
agccttccacaaaaataagttgcttcacaatggcctctacttccatggctctttcttccccatcattcgccggtaaggcagtgaagttctccccttccacccctgaaatccggggaactggccgtgtttccatgaggaaaaccaccaagcctgttccttctggtagcccatggtacggtcctgaccgagttttgtacttgggtccactttccggtgagccaccatcttacttgaccggtgagttccctggtgactatggttgggacactgctggactctcagctgatcccgagacctttgctaggaaccgtgagctcgaagtcattcactgcagatgggccatgttgggagctcttgggtgtgttttccctgagctgttggctaggaacggtgtcaagttcggtgaagctgtatggttcaaggccgggtctcaaatc

SEQ ID NO: 37719 - DNA, 448 bp, Gossypium hirsutum
  Clone ID: LIB3165-020-P1-K1-E5
caacgcgtccggttgagttgccatggcttcagcttcctccatttttctatcaatctcaccctcatccaggggggtggatgccaaagctcctcgtcaaccaactgctgcatccccacaatgtgtcactcttcctactctttctcccccacccgttcagtcccagagtcgtccctggaagaccactgcctactgtcgcaagattgctcgaaatgtgatggctatggccactggtgagactttggccacgcgtgaagctccaaccgaagttaccccaactgagctgacagagtttatcaacaaaatacaagaaacatgggataaagttgaggacatgtacgcagtgagttcacttgctgtagcaggtcttgttttggtctggggtactgctggaatggtctcggcaattgataaacttcctgtgatttccacatttctcgaggtcgtgggt

SEQ ID NO: 37720 - DNA, 332 bp, Gossypium hirsutum
  Clone ID: LIB3165-020-P1-K1-E7
cccacgcgtccgcccacgcgtccggttgttcaatttcattatgtttattctaatgatgcttagatttgattcatttttctatcgaccttcctcttcttcttttttcgtttcttagatcgtttctatggtttagggtttcttgttctttttaataatttatcgatctgtaaagttcgatttttgtgttctgtttttaattttttggtgttgtcttttttcttttttctaattttttattttttattgttttttttacgttattttcatttttcctatttattattcattggtttgttctttcttttttttcttctttctttttattttttttt

SEQ ID NO: 37721 - DNA, 297 bp, Gossypium hirsutum
  Clone ID: LIB3165-020-P1-K1-E8
gcttttcattccttgtatggcaggaactgtggtggcgtgttatgggaacggcgcaatactgaaacccacaatccttctcgcaaggtggcctacccaaatgctcgggcgggtgattatggatgtgcacccctgccaactgatgtgaaagctgacctcccgcatggtctgacggtccgcgcatcggcccaaggctgccggtgggccacactataaagaattaagcagcgaccattccgcaggccaagctgatgccattgtgggccaatctgagcatgcatgcttgtgcagagcgagtct

SEQ ID NO: 37722 - DNA, 98 bp, Gossypium hirsutum
  Clone ID: LIB3165-020-P1-K1-E9
cccacgcgtccgatttattctggatttattctttgtattatcatatgatgtttttgagtgtttatactttttaaattttaaaatttcgttcttgatct

SEQ ID NO: 37723 - DNA, 68 bp, Gossypium hirsutum
  unsure (1)..(68): unsure at all n locations; Clone ID: LIB3165-020-P1-K1-F1
cttcgcggaattccccattttttcccaatcatttttttgtttaattnnggggttatgtggccatgagt

SEQ ID NO: 37724 - DNA, 434 bp, Gossypium hirsutum
  Clone ID: LIB3165-020-P1-K1-F10
cccacgcgtccgtttagctatagcatacactactagtacccactactagcaatggctgcctcaatgatctcatcggctaccattgccactgcctctccggcacaggctaacatggtcgctcctttcaccggcctcaagtctgcctctgctttcccagtcaccaggaaggccaacaacgacattacttctctcgcaagcaatggcggcagagtgcaatgcatgcaggtgtggcctcctactggaaagaagaagttcgagactctctcatacctccccgatcttacacccgtgcagttggctaaggaagtggattaccttcttcgctcaaaatgggttccttgcttggaattcgaattagaggagggattcgtgcaccgtaaatactcgagcctacccacgtactacgatggacgctactggaccatgtggaagct

SEQ ID NO: 37725 - DNA, 433 bp, Gossypium hirsutum
  Clone ID: LIB3165-020-P1-K1-F12
gatttttgtattaagagtcgccctttggtgtttttctaattcaatcagtgaggtgaagaaaaatgtcttgctgtggtggaaactgcggttgcggctccggttgcaagtgcggcggcggcggcggctgcggctgcggcggttgcaagatgtaccctgagatgaactttgctgagcaaaccacaactgagacacttgttcttggcgtggcaccccggaaagtgaactttgatggagctgaaatggaaactggggctgaaaatggctgcaaatgtggagataactgcacttgcaacccttgcaattgtaaatgaggggaaaaaaaaaaccgaagcatattatggaagctgatctaaataatatatgatgtatttgggtttttattgttagaataaagcagccatggttcattaggtgttttgcttcttgtatccat

SEQ ID NO: 37726 - DNA, 254 bp, Gossypium hirsutum
  unsure (1)..(254): unsure at all n locations; Clone ID: LIB3165-020-P1-K1-F2
cccacgcgtccgcccacgcgtccggatcgcgtggccgccctttttttttttttttggggggggggaaaaagaaactcatgatattacagtggcattaacaaagtctatttcagttctttctcgcagattacagaataaatttacacatgttttactgagatcaagaaaggagcagaaagggatttggcaatggagcttttagccggagggggggggagggntntttttttatttttttttttnttttttttttt

SEQ ID NO: 37727 - DNA, 359 bp, Gossypium hirsutum
  Clone ID: LIB3165-020-P1-K1-F3
aaattattcttttaaacgaaggtattcgtgcttgtatggcggctcaagatcagcctcatgaaaaccttatattccctgaggaggttctaccccggggaaacgctctttaatggaactttagctttagccggtcgtgaccaagaaaccaccggtcgcttggggggcccgggaatgccccggcttatcaatttatcccggaaaactattggggggctcatgtagcccatgccggattaatcgtattctgggccggagcaatgaacctatttgaagtggctcattttgtcccagaaaaacccatgtacgaacaaggattaattttactttcccacctaagctactctagggctgggggggta

SEQ ID NO: 37728 - DNA, 434 bp, Gossypium hirsutum
  Clone ID: LIB3165-020-P1-K1-F4
cccacgcgtccgttgcatcaaaaagaaaaagtgagcttttttgaaggagcggaacttcataaatcaatacacaactcctcaattttctcaaaaaaaatggaattcgttattgaacaaggcaaacaaccacaccaagaatgctctactttgcttctgcctgctttgtcgattgggaatgtggggcaactagcggtggatttattagtatcatcaatgaaagcagagagaattgggtacttagatgatccctttgtgcttccttgtgttggaaatgatgcttatggccctattccatgtggtgaccttgctcttcctcttgaagcttacgagtcagcttttagtcgagttgctctcctccaacagcggtctcccgtcgttaagggacgaatggttgaaattgccaaaaacttggcaaattttgctgctgcaagtgg

SEQ ID NO: 37729 - DNA, 435 bp, Gossypium hirsutum
  Clone ID: LIB3165-020-P1-K1-F5
aacaaaatcagttgcttcacaatggcctctacaagcatggctctttcttccccatcattggccggtaaggcagtgaagttctccccttccacccctgaaatccggggaactggccgtgtttccatgaggaaaaccaccaagcctgttccttctggtagcccatggtacggtcctgaccgagttttgtacttgggtccactttccggtgagccaccatcttacttgaccggtgagttccctggtgactatggttgggacactgctggactctcagctgatcccgagacctttgctaggaaccgtgagctcgaagtcattcactgcagatgggccatgttgggagctcttgggtgtgttttccctgagctgttggctaggaacggtgtcaagttcggtgaagctgtatggttcaaggccgggtctcaaatcttcagt

SEQ ID NO: 37730 - DNA, 433 bp, Gossypium hirsutum
  Clone ID: LIB3165-020-P1-K1-F6
aacaaccgtacttataacagattaaaggaagcccctcacactgaaagcaaaaagggacattggtgattccaacaaaagcctttagcggtttcatcagatctaccacaatcgcaaaccgtgcaaacttctctctccttgattttgttgtgttatagttcacctttaccaccttctccaatgtccttgctattattctcaacagtttcttgttataatacctatacgggagccccgacattctcatccacaccactatctttgagggatgttgcttgttcgtagagaagtctcgactctaaggttgaacagtgaggtaattcccataaaccatttatggtccctctgtgagtgctttggtatagtcttgactcaaagcaaactttaccaagtaataatcattgtctatgtcgatcacctgaaatgatctaacaag

SEQ ID NO: 37731 - DNA, 405 bp, Gossypium hirsutum
  Clone ID: LIB3165-020-P1-K1-F7
ctgattcgaaagactggaggcgagtgggtatagttagcccagtcaaagatcaaggctcgtgtggatcttgctggacattcagtaccactggagctcttgaggcagcttaccatcaggcatttgggaaagggatctccctatctgagcagcagcttgtggactgtgctggagcttttaacaacttcggttgcaacggggggttgccatcccaagcctttgagtacatcaaatataacggcggcctcgatacggaggagtcatacccttacactgcaacaaatggtctatgcaaattctcttctgaaaatgttggtgttaaagtccttgactctgtcaacattaccttgggtgctgaagatgaattaaagcatgcagttgccatggtccggcctgttagtgtggcat

SEQ ID NO: 37732 - DNA, 429 bp, Gossypium hirsutum
  Clone ID: LIB3165-020-P1-K1-F8
gaaaaatggctttggcaagcttggtgagaagaaaggcataccttttgtctagaaacctgtcgaattcgcccgcagatgcgttgaaatactctttttcactcagcaatttctcgaggggtttcgcttcaggatctgaagagaacgacgtcgtcgtcatcggcggcggacccggcggctacgtggcagctatcaaggctgcacagctaggtctcaaaacaacctgtatcgagaagcgtggtaccctcggtggtacttgccttaacgttggttgcatcccatctaaggcgcttcttcattcatcccacatgtaccatgaagctacgcattcatttgctggccatggtgtgaaattctcctctgttgagattgatttgcctgccatgatggcccaaaaggacaaagctgtttctaatcttacccgtggtatcg

SEQ ID NO: 37733 - DNA, 420 bp, Gossypium hirsutum
  Clone ID: LIB3165-020-P1-K1-F9
cttttatcgtctctgctgtttgatgtattgctcttgtctctcagactttcccatgtgtatatatcttctttgacccaaattcattgcctctaaatctttgtcttaaaatcatgtttcttcttgttttctagttttccgcaaaaaagataacacacacccaattttgtcgttgtttttgttgttactttcccatctttgttttgtttgagggagagaattactttcgttgaaaaaaaataaaaccaaggagatggtgtcacgaagtttttgtaagagaagggaaatggcggcggttcttcccgcctggatcatggtagcgattttggttttggaggctagtctggtcatgggtggttttcaagcgagtttgaaactggagaggaggattccactggtgagtcatgaagtggagctgggtcg

SEQ ID NO: 37734 - DNA, 273 bp, Gossypium hirsutum
  Clone ID: LIB3165-020-P1-K1-G1
ctcttctgctctcttccttcccaacacaacataggttattcgggttttgggtggaggcggcggcggcggcggcggccctgtctgaaattaacaggtctcgtaatcgacatgcgaccaaaggggtcgtttgtatctgctgccggtttcgatagcagtctctctgttgtcatcaaaagcacacgacacatgaccaagctaatcttagatcccatatattatcacactgaaaaagtggctgatggattgactggagctgaatggcacggatgggtt

SEQ ID NO: 37735 - DNA, 435 bp, Gossypium hirsutum
  Clone ID: LIB3165-020-P1-K1-G10
cgctcttcatttcccataccttgtttccctctaaatctcgcctctttcgtgggttaaccctttctccacaccgccatggtttcgcttccttcaccaactgctctaaaaacaacgataacctcacaacaccaccttcacaagatcaagataaaaaacttccttcttctaaagagcaactgtcttttgctgctgcaacaggggagcttttcttggggattgcatcaaaattaattaaaaacagattgaataatgaagattcaacaagcctggtttttctcagacccagaaagagaatcaatgagagtgaggttgaatataatggaaacaatgataaggagagaattgggttagtgatgaaggatgagatagaaccagatgtgatatgggaacaaagggttaaagacattgaagctgagaatgaaagaagagtggtta

SEQ ID NO: 37736 - DNA, 439 bp, Gossypium hirsutum
  Clone ID: LIB3165-020-P1-K1-G11
atgtccacggcttcggtctccggcttctgcctctcttccaataccacctctccttctaactcactccggcaacccacattgcggcggccctctatcatcgccaacctcaactcttccacttctcctcctacactcatccgaaatcaaccagttttcgcagcacctactcctttgctcactccttccaattggaaagaaaccatgggagacgagtcatacgaggaagccattgaagctctcaagaaactgctcaatgagaaaggagaattgaagagtgcagcgacggcaaaggtagagcaagtgacagctgagttgaagactgctgcttcctccgatgagtctgttgaccgcttgaaacaaggcttcatttacttcaagactgaaaaatacgaaaagaatcctgctctgtatggtgagcttgccaagggtcaaagcccaa

SEQ ID NO: 37737 - DNA, 437 bp, Gossypium hirsutum
  Clone ID: LIB3165-020-P1-K1-G12
cccacgcgtccgcaacaaaatcagttgcttcacaatggcctctacaaccatggctctttcttccccatcattcgccggtaaggcagtgaagttctccccttccacccctgaaatccggggaactggccgtgtttccatgaggaaaaccaccaagcctgttccttctggtagcccatggtacggtcctgaccgagttttgtacttgggtccactttccggtgagccaccatcttacttgaccggtgagttccctggtgactatggttgggacactgctggactctcagctgatcccgagacctttgctaggaaccgtgagctcgaagtcattcactgcagatgggccatgttgggagctcttgggtgtgttttccctgagctgttggctaggaacggtgtcaagttcggtgaagctgtatggttcaaggccgggtctt

SEQ ID NO: 37738 - DNA, 411 bp, Gossypium hirsutum
  unsure (1)..(411): unsure at all n locations; Clone ID: LIB3165-020-P1-K1-G2
cccacgcgtccggtcggcttttgttggcaagtatgcagaggagttgataaagaacgcgaactacatcgtcacgccaggcaaaggtattttggcggcggacgagagcacaggcaccatcgggaagcgtctctcgagcatcaacgtcgagaacatcgagtccaatcgccaagccctccgcgagctccttttcacctctcccaacgcattatcctgcctctccggtgtcattcttttcgaggaaacactntaccagaaaacatctgacgggaaacccttcgttgaaatcctcgaagagaacaatgtcattccaggtatcaaggtcgataagggcaccgttgagatagccggcaccaatggcgagaccaccactcaagggttcgactccttgggtgcgcgtngtcagcaatacta

SEQ ID NO: 37739 - DNA, 435 bp, Gossypium hirsutum
  Clone ID: LIB3165-020-P1-K1-G3
actcttttgtatacctgtagcatatagtaatagtaagcagtaatagcaatggcctcctccatgatctaatcggcaaccatggccaccgggaaccgctcctccccggcacaggccaacatggtggcccccttcaccggcctcaaatctgcctctgctttcccagtcaccaggaaggccaacaacgacatcacttctcttgcaagcaacggtgggagagtgcaatgcatgcaggtgtggccgcctcttgggaagaagaagttcgagactctctcatacctgcccgatcttactcccgtacagttggctaaggaagtagattaccttcttcgctctaaatggattccttgcttggaattcgaattagaggagggattcgtgcaccgtaagtactcgagcttacccacgtactacgatggacgctactggaccatgtgg

SEQ ID NO: 37740 - DNA, 430 bp, Gossypium hirsutum
  Clone ID: LIB3165-020-P1-K1-G4
ccactttttatttctccaaagcctagcctggtgtgttttcctttttgcttcgagttaaaagggagttccttttcacagttatcatggctttgaatctggtttctcctactgaaatccattctatctccttcttgggttcaactcattccagctccttctccaagctatttccagggtgttttgctttgaaaaaagactgtcccaccacctttgggaggaaatgtcaatgttcaactcaggctcctcaaccaccacctgcatggcctggacgtgcttctccagatcccggacgcaaaacttgggatggccccgagcctatctccatcgttggttcaactggctccattggaactcagacgtctgacatacctgcagagaatccacctaaattcagagttgtggcgcttgctgctggttcaaatgtgaccct

SEQ ID NO: 37741 - DNA, 430 bp, Gossypium hirsutum
  Clone ID: LIB3165-020-P1-K1-G5
gtaaagctaagccatgaaaccccaatcgctttgcatcttttttcttctccatttcttcgctgtactatgcacggcggcgtcggagtatgaagatccgagcaacggcggaaccatcgtttttactacacttggccgatcaaattatgcttgggacatctatactcttccaacttccgacccaccaagtccttccaatgaacttcgggttaccgacggcgaatctgtcaacttcaacggccagttcccttcgacctcaccgtcctctgttctctctctgctacataaccgaagcctaattcgaaccccaggtccacaagctccgccgcccctccagctcgtctacgtgacggaacgcaatgggatgccgaatatttactacgacgcgctttattacagtgcgccgggaagtactagatcgagatcggcactt

SEQ ID NO: 37742 - DNA, 420 bp, Gossypium hirsutum
  Clone ID: LIB3165-020-P1-K1-G6
cccacgcgtccgatttttcctgcattttctttctctccaaacagaaatcttagatcatttctagacgcagcgaacgatggagaaagcgatcaaccgacagcaagttttgcttcaacaccttaatccttcagcttcttctttttcgtcgcaccaaaacaactctgccctctctgcatcggcttgtttagctggagatagcgctgcttatctaagaactaatgtatttggagatgatgtggtgatagtagcagcatataggaccgcgctttgcaaatccaagcgagggggtttcaaggatacttatcctgatgatttacttgcacctgttttaacggcagtgatagagaaaacaaatttgaatcctagtgaagttggggataatggtgtgggaacggtattggcaccaggatctcaacgagc

SEQ ID NO: 37743 - DNA, 170 bp, Gossypium hirsutum
  Clone ID: LIB3165-020-P1-K1-G8
gatgaactctcagacttgtaagcgtaatcattgatcgtagttttgcttctacgagtcgtataatcagaatctgactataatcagaatatgacttgttttgcgaatttaacttgttttgcttgtcaagagaacatttatatattatatacaaatgtacagagcttttaatc

SEQ ID NO: 37744 - DNA, 432 bp, Gossypium hirsutum
  Clone ID: LIB3165-020-P1-K1-H1
caggctttgaggagtggttttaatggtcaaagagtggttgttttagagaaaagaagtctaaatgagagaaggttctgtcgagttcccattaaagcacagatgcaaacagggcttattggtaaaacccaaaagtggtgggagaaggggaatcaaccaaatatgaaagaagtgacatctgcacaagacctggtggactcacttttgaatgctggggataaacttgttatagtggattttttctctcctggttgtggtggctgcaaggctcttcatcccaagatttgccaattggcagagatgaatccggatgtgcagttccttaagctgaactatgaggagcataaatccatgtgttatagccttaatgtacatgtgttgcctttctttaggttctatagaggagctcagggtcgtttatgcagctttagctgc

SEQ ID NO: 37745 - DNA, 413 bp, Gossypium hirsutum
  unsure (1)..(413): unsure at all n locations; Clone ID: LIB3165-020-P1-K1-H11
cggacgcgtgggctattatttaatttaatattattaaatattgtattagattgaaaaataggaacttcgaatctttttctgatatacataaagtaaatagaaaaagattcgaagtggatttctcgacccgtgaaatgaaaaaatagcctctggagtttttttgttttatattcatctgaaggaaatatgagaaagaaaacaataaataaaagaaataaaatgaaggaaatatatcagactatagtaatttaatacacatagaaattagaaaaatacataaaaatattgatttttatcaatttcacgaacaagatccaagaataagattagttgatggaggggggaggggngatctggggatcaaccagtagcgagagaagggatcgcttcttccttgaattgaagagttcgtc

SEQ ID NO: 37746 - DNA, 418 bp, Gossypium hirsutum
  Clone ID: LIB3165-020-P1-K1-H12
tgattcgtatacctgtagcatctagacatagtaagcagtaggagcaatggcctcctccaagatctcaccatgtggcattgtcaccgtgaaccgctcctccccggcacaggccaacatggtggcccccttcaccggcctcaaatctgcctctgctttcccagtcaccaggaaggccaacaacgacatcacttctcttgcaagcaacggtgggagagtgcaatgcatgcaggtgtggccgcctcttgggaagaagaagttcgagactctctcatacctgcccgatcttactcccgtacagttggctaaggaagtagattaccttcttcgctctaaatggattccttgcttggaattcgaattagaggagggattcgtgcaccgtaagtactcgagcttacccacgtactacgatggacgc

SEQ ID NO: 37747 - DNA, 434 bp, Gossypium hirsutum
  unsure (1)..(434): unsure at all n locations; Clone ID: LIB3165-020-P1-K1-H2
agccttccgtcgggttgtggtccgtgccgcccccgccggcctttgaaattccgaaggaccaattgcggtccgcccccggccgtcctaataaccgattaaggtttccaaggtgaccagcctttgttcaatggaccaatgtaggcaagggaagtcggcaaaatggatccgtaacctcggaaaaaggattgcttttgagggctggcaacgggggtcccagtcccgaacccgtcggctgccggcgcactgctcgagctgctcccgcggcgagagccggtcgncgcgtgccgcccgggggacggactgggaacggttccctcgggggccttcncgggcgacgaacagtcgactcagaactggtacggacaaggggaatncgactgtttattaaaacaaagcattgcgatggtccctgcggatgctcacgcaatgtgatt

SEQ ID NO: 37748 - DNA, 187 bp, Gossypium hirsutum
  Clone ID: LIB3165-020-P1-K1-H3
aaaaaaaaaagagaggtgtgaggccagaccgtattccggtggaactccggccaagggtccggccaccgaagcctcgttggccccggccccggccactgtccacggtgcccgtaaaggtgaccagtccgtgacagaaggtagtaggagagttgtgggcatgcatggtgtgcgcgctgagtgacttgcg

SEQ ID NO: 37749 - DNA, 440 bp, Gossypium hirsutum
  Clone ID: LIB3165-020-P1-K1-H4
cccacgcgtccgcccacgcgtccgagaatcataaaaataaacagagagagggaaaaaaaacaataaagagaaaaaatggatgaagaggagcatgaggtgtacggaggggaaatccccgacgaaggagagatggagggcgaattggaccctcagaacgccgacgtcgacatgtccgccgccgatgaagacgctgtcaaggaattggacgagatgaagaaacggttgaaggaaatggaagatgaagcggcggcactccgggaaatgcaggccaaagtcgagaaggaaatgggtgctgttcaagatcccgctggtgcaacagctaatcaggcgagcaaagaggaagcagattcacgatcagtttttgttggcaatgttgattatgcatgcacacctgaagaagtgcagcagcattttcaatcttgtggcactgtaaacagagt

SEQ ID NO: 37750 - DNA, 438 bp, Gossypium hirsutum
  Clone ID: LIB3165-020-P1-K1-H5
gcaattccaagacacaagaaccaagacacataccacgatggcaacaacgacggagaagcaagccatggttgttggaatcgacgacagcgagcacagtacgtacgcgctgcagtggatcctcgatcacttctttgctcctttcgcttccaatcctcctttcaagctcgtcatcgttcatgccaagccttctgcttcttctgctgttggtctcgccggacctggagctgctgatgtattgccctatgtggatgcggatttgaggaagatcgctgccagggttgttgagaaagccaaggaactctgccttagcaaatcggtacatgatgccgtagttgaagtgggggaaggtgatgcaaggaatgttctctgtgacgctgtagaaaaacaccatgcctccattctcgctgttggtagccatggttatggagctataaagag

SEQ ID NO: 37751 - DNA, 403 bp, Gossypium hirsutum
  Clone ID: LIB3165-020-P1-K1-H6
gatttttggacgaacttgggttgattcaccaggagagatgatcatgacgaatttgactactggggacaaagttgtgctttattttcaaccatgtggctggtttggagctggtcgttatgaagtggatggttatgtttataatgctgctgaggaacctaaaatattgatgacagggaagtggaatgagtcaatgagttatcagccatgtgatatggaaggagaacctcttcagggcacagaattgaaagaggtgtggcatgttgctgatactccaaaaaacgacaaattccagtttacatattttgcacacaaaataaatagctttgacactgcccctaagaagttgctagcatcagactctcgtctccggcctgatagatttgcacttgagaagggtgattta

SEQ ID NO: 37752 - DNA, 431 bp, Gossypium hirsutum
  Clone ID: LIB3165-020-P1-K1-H8
agagagctcccttcatacgttactaaattatcttctttctcttctcttaccatggatccttacaagtttcgtccttctagttcctttgattccccgttctggactaccaattctggtgctccagtttggaacaataactcatcacttactgtgggagcaagaggtccaattctccttgaagactatcatttggtggagaagctagctaatttcgacagagaacgcatacctgaacgtgttgttcatgctagaggagccagtgcgaaagggttctttgaggtcactcatgatatatctcagctcacatgtgctgatttccttcgtgcccctggagtgcagaccccgctcattgttagattctccacggttattcatgaacgtggtagtcctgaaactttgagagacccccgaggtttcgctgtgaaatttta

SEQ ID NO: 37753 - DNA, 424 bp, Gossypium hirsutum
  Clone ID: LIB3165-020-P1-K1-H9
cggacgcgtgggccacaaccatcttattttgtgaccacttacgcacaaatgatgaccttttcagtggagcaagcctccaccatggaaagatcagttggaggtttccaaattcctgcaggttccctcactgtcttctttgtggcagctatattgatcactctggctgtttatgaccgtctcgttatgccattatggaagaaatggaaaggaaaaccaggtttcagcagcctacagagaattgccttaggcttagcactatcaactatgggaatggcatctgccgcagtagccgaggtgaaaagactggaagtggctcgagccacgggtgcaagtgcaacgactggaaccctgcctgtaacagtgttcatattgatcccacagttcttcctagtgggtgccggtgaggctttcatttacacaggcc

SEQ ID NO: 37754 - DNA, 419 bp, Gossypium hirsutum
  Clone ID: LIB3165-021-P1-K1-A10
caaaatcagttgcttcacaatggcctctacaatcatggctctttcttccccatcattcgccggtaaggcagtgaagttctccccttccacccctgaaatccggggaactggccgtgtttccatgaggaaaaccaccaagcctgttccttctggtagcccatggtacggtcctgaccgagttttgtacttgggtccactttccggtgagccaccatcttacttgaccggtgagttccctggtgactatggttgggacactgctggactctcagctgatcccgagacctttgctaggaaccgtgagctcgaagtcattcactgcagatgggccatgttgggagctcttgggtgtgtattacctgagctgttggctaggaacggtgtcaagttcggtgaagctgtatggttcaaggccgggt

SEQ ID NO: 37755 - DNA, 413 bp, Gossypium hirsutum
  Clone ID: LIB3165-021-P1-K1-A11
gtttgtgaggaaagtaatgaatttgttttttttaagttcaagttgattctaaaagtttgtatttagtgcattaaaatatgaagttgaagatatgtcatgccagccagtattgctggtgaagttcttcagttggttctatatgatttggggagggctagccccatgtcaaagcataagcaaaagcaacagatacgtgaaatgataaaatcaagaggttgaataacggttatattatatgacaggtccaattctccttgaagactatcatttggtggagaagctagctaatttcgatagagaacgcatacctgaacgtgttgttcatgctagaggagccagtgcgaaagggttcttcgaggtcactcatgatatatctcagctcacatgtgctgatttccttcgtgcccctggag

SEQ ID NO: 37756 - DNA, 426 bp, Gossypium hirsutum
  unsure (1)..(426): unsure at all n locations; Clone ID: LIB3165-021-P1-K1-A2
cggaatggcaggcctgtgctgaatggcaatggcaacccaagcctcctttttaactccatttttcttttgcaccccaaaatccggcgaccgcatcgccgccgtgttatggaaacaaccaccgttcctaaccgtccgtagcttcaagtccccaaaaagcatcatcgccccacgcaccatcaaagcccaagcaaccgaagaggaagccgagacaaccgccacanaggaagcaccagtcggtttcaccccaccagagctggacccaaacaccccatcaccgatcttcggcggcagcaccggcgggcttttacgcaaagcacaattgggagagttttacgtcatcacatgggagtcacccaaggaacaaatcttcgagatgccaacaggtggtgcagccatcatgagacatggtccgacctgctgaaattg

SEQ ID NO: 37757 - DNA, 419 bp, Gossypium hirsutum
  Clone ID: LIB3165-021-P1-K1-A5
aaaatcagttgcttcacaatggcctctacaattatttttctttcttccccatcattcgccggtaaggcagtgaagttctccccttccacccctgaaatccggggaactggccgtgtttccatgaggaaaaccaccaagcctgttccttctggtagcccatggtacggtcctgaccgagttttgtacttgggtccactttccggtgagccaccatcttacttgaccggtgagttccctggtgactatggttgggacactgctggactctcagctgatcccgagacctttgctaggaaccgtgagctcgaagtcattcactgcagatgggccatgttgggagctcttgggtgtgttttccctgagctgttggctaggaacggtgtcaagttcggtgaagctgtatggttcaaggccgggtc

SEQ ID NO: 37758 - DNA, 426 bp, Gossypium hirsutum
  Clone ID: LIB3165-021-P1-K1-A6
ctcaaattcagttaacaatttcacagtggttttttttagtctctctctcagccatggctgcagccatctccaccgtcgctgccgctgccgccgccaaccgagctctgggagtgtcagtcccaacctcagctttcatggggaagaaagtgagctcaagattcaacagcaccaggcaggttccttcgggaagttttaaggtgatggcggcggagaaagagatagacgaagagacacagaccgaaaaggaccgatggaaagggttggcttacgatatttcggacgaccaacaggacattactcgagggaaagggatggtggattccttgttccaagctcccatgaatgatggaactcactatgctgtcatgagttcctatgaatacctcagccaaggtcttaaaacgtacaatttggacaacaacatgg

SEQ ID NO: 37759 - DNA, 374 bp, Gossypium hirsutum
  unsure (1)..(374): unsure at all n locations; Clone ID: LIB3165-021-P1-K1-A7
gtcgttcacacacacaatcttcaatggtattgtcntatccttcccgtctttctggcaacagaaacggcacaagattcattaccccagcgagtaaaaggaaggagaacggtggtccaacttcaagaaaccagcagcttgccaagttccaactcaaggtttccaacacggttatcgcaaggtctgtggtggttttattcggacttggattcattgatgctgggtatagtggggattggtcaaggattggagtgatctcaaaggacgtggaggacttgctaaagattgctgacttcatggtttgtacgttatgcatctttattgtatcttcctttacgaaacagactactgacacttaaccttctttagctaatata

SEQ ID NO: 37760 - DNA, 405 bp, Gossypium hirsutum
  Clone ID: LIB3165-021-P1-K1-A8
ggcgtccgagatgaagacattgttaagtctttctacaccttccccggccaatccatcgatttcttcggtgccttgagggctcgggtttacgatgacgaagtgaggaaatggatcagtgaggtcggagtcgcaagcgtagggaagaagttagtgaactcaagggaaggacctccaacatttgagcagccaaaaatgaccattgaaaagctattggaatatggaaacatgcttgttgctgagcaagagaatgttaagagagtccaattggctgacaaatacttgagtgaagctgccctcggtgaagctaatgaagattccatcaatagaggaactttctatggcaaagcagcacaacaagttggggttccagttcccgaagggtgcactgatccaaatgctgataac

SEQ ID NO: 37761 - DNA, 416 bp, Gossypium hirsutum
  Clone ID: LIB3165-021-P1-K1-A9
cccacgcgtccggaaaaacctttcttgttattttcactatctccctattcccatacaacaacatatccttcaaattcccgcaacttttcaaccaatcaaaaatcctttgtttcagatcataactttgacgcaattctcacataacccagaattttctttttcttttttggtttttggtgctcaaaaaggaagtcggtcttttttttgtttgtttgtcactgttgattacttgtttttcaagttgatttttattatttctgctatttttttaactttctttttgttcccttgggagattctggttgtgattatgaataataactggagaagacaaaaaggtgaaattcatcatcatcatcaaggaatgcaggggacaagatcatatacccgaaagccatctcttgctacgtggcagc

SEQ ID NO: 37762 - DNA, 198 bp, Gossypium hirsutum
  unsure (1)..(198): unsure at all n locations; Clone ID: LIB3165-021-P1-K1-B1
cccacgcgtncgctcaaattcagataacaattttacttttgtttactncactctctctcgcagccatggctgcagccatctccaccgccgccgccgctgccgccgccaaccgagctctgggagtgtcagtcccaacctcagctttcatggggaagaagtgagctcgagattcaacaacaccaggcatgttccttcggg

SEQ ID NO: 37763 - DNA, 419 bp, Gossypium hirsutum
  unsure (1)..(419): unsure at all n locations; Clone ID: LIB3165-021-P1-K1-B10
cgagatttcaaatccggagttgaactcatcattcggatttataaggttacggaagctaccgatcatttcccgagcctccatttggaaggaccgaatcaagtccgagctgaactgtggactgcttcgattggagggttgagcatgaatgatttcattgtagctgccaagatagatgaaataaaaacatcggatcttgcgcctcgtaaacggatttgggcataaatcggagcactgattttcttttttccggcaagttatcggagcatatccgatgaaaccatggaagtcataagactcagggaacttcaatgcttttgatgaaagattcgaacatttttcgacacatacactccttttttatccttctaagcttttgtatatggaattatntgttgttagtaacatcattttttaacaat

SEQ ID NO: 37764 - DNA, 418 bp, Gossypium hirsutum
  Clone ID: LIB3165-021-P1-K1-B11
cccacgcgtccgtttagctatagcatacactactagtacccactactagcaatggcttgctcaatgatctcatcggctaccattgccactgcctctccggcacaggctaacatggtcgctcctttcaccggcctcaagtctgcctctgctttcccagtcaccaggaaggccaacaacgacattacttctctcgcaagcaatggcggcagagtgcaatgcatgcaggtgtggcctcctactggaaagaagaagttcgagactctctcatacctccccgatcttacacccgtgcagttggctaaggaagtggattaccttcttcgctcaaaatgggttccttgcttggaattcgaattagaggagggattcgtgcaccgtaaatactcgagcctacccacgtactacgatggacgctact

SEQ ID NO: 37765 - DNA, 401 bp, Gossypium hirsutum
  Clone ID: LIB3165-021-P1-K1-B2
cttccttccttttaattcctttggctatggttttttttggggtggtcgctgttaatgggaacggcgcattacctgaaacccacaaatcccctttctccgccaaggttggcctaccccaaatgctccgtggcggggtgattatggatgtcgtcacccctgaccaagctcgcatcgctgaagaagctggagcctgcgccgacatggctcttgaacgagtccccgccgacatccgagcccaaggtggcgtggcgcggatgagtgacccacaactcatcaaagaaattaagcacgctgtcaccattcccgtcatggccaaggctcgtattggccatttcgttgaggcccacatccttgaagccattgacatcgactatgttgacgagagcgaagtccttaccctc

SEQ ID NO: 37766 - DNA, 278 bp, Gossypium hirsutum
  Clone ID: LIB3165-021-P1-K1-B3
gtttcttttagctcacaggttccattgtttttcatttttaaagagcaaaaaacagaggggaaatcaatggaagggaaagaagaagatgttaaattgggagctaacaagttctcagaaaggcagcctattggaacagcagctcagtcccaaaatgataaggattacactgagccaccaccagcacccttgtttgagcctagtgagttgacctcatgggtctttttaccgagcttgaatcgctgagttcgttgctactttccttttcttggatatctcgg

SEQ ID NO: 37767 - DNA, 427 bp, Gossypium hirsutum
  unsure (1)..(427): unsure at all n locations; Clone ID: LIB3165-021-P1-K1-B4
nccacgcgtnncgccacgcgtncgaaagaatgttaattttagaagaagaaaaatggctggtgttactctctcaacaacactgtctctccggttaccctcttatcctccacccacttactgttatcctacgcaccctgcccttttcaaaaccccttctctccaattccctccccgttccgccactcctactaacctcacccaccgttccaccggccttctgcctctcaatgccactgccgcgcccgaaaaaatcggaaaactcggcaccgaaatctccaacctaaccctcgaggaagcccgcacccttgtcgactaccttcaagagaaactcggcgtctccgccgccgctttctcccccgcagccgttccagttgccgcccccggtgttgccgatgccggagagactgttgtcgaagagaagactgag

SEQ ID NO: 37768 - DNA, 187 bp, Gossypium hirsutum
  Clone ID: LIB3165-021-P1-K1-B6
taacaacagctgctttcagtgtcgcactctgtcagatctgttatttcaggactaactccatgtacagaggctacgccagtcggacaacgtgtgctgcaaccaattacgaccttagaacattcagtgcagatctatactcaaggccgtgatccacgtctacctcttaaaccagcgatctataaaaccc

SEQ ID NO: 37769 - DNA, 330 bp, Gossypium hirsutum
  unsure (1)..(330): unsure at all n locations; Clone ID: LIB3165-021-P1-K1-B7
cccacgcgtncgnccacgcgtccgaattatgttcccttcgataattctctcctcgcgatggactntacattattattattattatagaattattattttcctgttaatttatataaatactctccgctcttcttcttcttcatcacttgcaacttcaacaaacatccatggcctcctttggtctatattctattctctccgccggtttcctctatttcggtttcattacctcgaggaagcgccgacgtctgcctttgcctcctggtgctaaaccatggcccatcattggcaactcgccacatatgagccctgtgcctcaccaaagtttag

SEQ ID NO: 37770 - DNA, 328 bp, Gossypium hirsutum
  unsure (1)..(328): unsure at all n locations; Clone ID: LIB3165-021-P1-K1-B8
gtctgaccctgagacattgagatggatcgttcttgcagagctggttcactgcagatgggcaatgttgggagctgctggtattttcatcccagagttcttaaccaagattgggattttaaacactccatcgtggtactcagctggaacagaggaatacttcactgacaccacaactctcttcatcgttgagcttatttttatcggctgggctgaagggagaagatgggctgacattctcaagccagggtgtgtaaacacagaccccatcttccctaacaacaagctcaccgggactgatgttggatacccangtggcctgtggtttgac

SEQ ID NO: 37771 - DNA, 345 bp, Gossypium hirsutum
  unsure (1)..(345): unsure at all n locations; Clone ID: LIB3165-021-P1-K1-B9
cccacgcgtccgaaaatcatggccactgtttttacgcaagcctctgccgctgttttccggccatgtgcatcgaaaacacggttccttactggttcttccggtaagttaaaccgagacgtttcatttaaaccagtggcttctacatcgactagctcattcaaagttgaagcaaagaaaggggagtggttacctggtcttccttcaccagcttacctcaatggcagtcttccaggtgataatggctttgatcctcttggattggctgaggaccctgagaacttaagatggtatgtacaagctgagctngtgaatggacgttgggctatgttgggtgttgcagggatg

SEQ ID NO: 37772 - DNA, 420 bp, Gossypium hirsutum
  Clone ID: LIB3165-021-P1-K1-C1
cccacgcgtccgagattccaaaaaccaaccttttctttcactgataaaactgctgtccgacggtcatcaccaaagtctgaagctaccccaccatccgcaggggcggctgcggctaagtcccctgtcaactattcttttgccgatgttgttcttcgggtcttattatttgccgctactctaacttcagtggtggtcatggctaccagcagggaaaccgagctggttccagtgccaggctttcctttagttaggatccaacttcaagcaaagttcaatcattcacctggccctcgtatatttcataggcagcattatcagtaacaggcttctacagcattatcactacgttggcatcactttcaatcgtgcttaaccctacctattccaaaaccttcttgctcttttttgctttcttcgatg

SEQ ID NO: 37773 - DNA, 420 bp, Gossypium hirsutum
  Clone ID: LIB3165-021-P1-K1-C11
cagcattgttaaagcccaactccttactttttttacctcttcaaagagtaacaccaacagccaaaactagacgtttctcttgcaaagtcctaaactctggccatccagactcggaattaaatcaaatacagaaaaagcagagtcctttggattcaagttttgtaactcaattacgtaggagttgcagcaatgggaaagtgtcggctttggctaatggggtgtcagttgtagcaaaagaaccagaccatgatttgaaaacccagggtagaattttgttctctgatgtggtggtgcaaaagaggagggaagtgttttggaggggaaactggaacgctttggatatagcctctgcaggtattgtcttggccatgcatttactcagcctttgcgcacctttttacttcaattggcctgcttttt

SEQ ID NO: 37774 - DNA, 417 bp, Gossypium hirsutum
  Clone ID: LIB3165-021-P1-K1-C12
gggcgttagtcagcggcacagagaggtgtttgttgaataatattgaggagggagagggtggaaatggtgaatatgaagaactggagaagataagtccgagggtttttgaggatttgtcgccggaggctttgaagtatattgagaagctgcaagctgagttatctgatatggaggaggaactgactgctcaaaagaaggaaaatgtgcgaatggagtgtggcagggaaaacatgaatggtttgttagagtatttacgatccttggatgctgacatggtgacagaattatcccaaccatcatcggtacaagtggaggaaatgatccatcagcttgttcagaatatattgcaaaggttgttcaaggatgcctgtatgagagattcacggatagtaaacacgggaaatcttcaagatgctg

SEQ ID NO: 37775 - DNA, 114 bp, Gossypium hirsutum
  Clone ID: LIB3165-021-P1-K1-C5
gggccggaaaaaccggggcggaccacacgcgtccggatgtggaacggcaagagccggtccgccatttttttcttgccgtgacaccacccgggtggggggggcggccaaagcccg

SEQ ID NO: 37776 - DNA, 410 bp, Gossypium hirsutum
  Clone ID: LIB3165-021-P1-K1-C7
gaaatttgcctatccccccaacttcattttctttatggctcaaattacatttcttgctgctgtttgtgctcttcttctatcacattcctttatatcaggagtgcaaggaacaagctttaccatagtaaacaaatgcaattacgtggtatggcctggagttctctcaaacgcgggcgtttccacaatttccaccacaggtttcactctccgaagaggtgaatccaaaaccattagcgccccggcatcatggggaggtcgtttttggggaaagacccattgctccctagattccgccggtaaattctcatgtttgacgggcgattgtgcttccgggaagctagaatgttcaaggaacggcgctgctacgcctgccactttggctgaatttaccttggacggtgccgggggtc

SEQ ID NO: 37777 - DNA, 419 bp, Gossypium hirsutum
  Clone ID: LIB3165-021-P1-K1-C9
cccacgcgtccgcggacgcgtgggtcttatttaatttttggtagcagagaggagatcatcacgagatggagaagaaagggacagtactgatgcaaaggtttgaggtgggacgattactgggtcaagggacattcgccaaggtttaccaagccaggaacctaagaaccggcgaaagttgcgccattaaaaccatcgataaagagaagataatgaaaggaggtttgatagatcaaatcaaacgtgaaatctcagttatgcgcctcgttaaacatcccaatgttgttcgactctatgaggtaatggctagcaaatcaaagatatatttcgtgatggaatatgttaaaggcggtgagcttttcaacaagatcgctaaagggaagctcaaggaagatgacgcccgacgctatttccagcaattg

SEQ ID NO: 37778 - DNA, 449 bp, Gossypium hirsutum
  Clone ID: LIB3165-021-P1-K1-D1
aaaaccggggcggccccacgcgtccggacggtttccatcaacggttggtgcctaacttttttttcttcctccaccaccacctcgtgtttttccgttcgtcgacgacctacattgcggccttcggtcgtcgctagcctaaactcttctccttctcctccgactcttatccaagaccgcccggttttcgctgcccctgttcctttgctcaccccgagagaagagatgggaaacaagtcctacgacgaagccattgaagctctcaagaaacttctcagtgagaaaggaagaactgaagctgaagcagcttgcagggtagatcaaataacagcagagttaaacacaacatcagctgacggcaaaccatctgactcttctgttgagagactgaaagaaggcttcgtttacttcaagaaagaaaaatatgaaaagaatcctgctctgtatggtga

SEQ ID NO: 37779 - DNA, 419 bp, Gossypium hirsutum
  Clone ID: LIB3165-021-P1-K1-D11
cccacgcgtccgccaaaatatggcagctacttttgtaagcccatcaaccgtcgttggtctcggtggcaccgccacctgtatgtcatccccgccgatgaaaacccgcctctcttcagggtttctgaaatctggggtgacggctaggaaccctttgaggctggctggtgcttgtgggggcaagtttacttgcttcgagagagactggctacgaagggactttaacgtgataggatttggactgattgggtggatagcaccatctagcataccggccatcgatgggaagagcttgactggccttttctttgaaagcattggaactgagctcgctcacttccctacacctccgccacttacctctcaattctggttgtggttggtattatggcacctaagactgttcatcactcttacttttg

SEQ ID NO: 37780 - DNA, 420 bp, Gossypium hirsutum
  unsure (1)..(420): unsure at all n locations; Clone ID: LIB3165-021-P1-K1-D2
gcgagacttttttgaatacttgtaacatattttattgttaagcaccaataccaatggcggcctcaatgatctaatcggcgaccattgccaccatgaaccggtcttacccggaacaagcccaacatggtggcccccttcaccggcctaaaatctgcctctgctttcccagtcaccaggaaggccaacaacgacataacttctcttgcaagcaacggtgggagagtgcaatgcatgcacgtgtggccgcctcttgcgaagaagaagttcgagactctctcatacctgcccgatcttactcccgtacagntggctaangaagtagattaccttcttcgctctaaatggattccttgcttggaattcgaattagaggagggattcgtgcaccgtaagtactcgagcttacccacgtactacgat

SEQ ID NO: 37781 - DNA, 427 bp, Gossypium hirsutum
  unsure (1)..(427): unsure at all n locations; Clone ID: LIB3165-021-P1-K1-D3
cccgggccgccccacgcgtccgncgacggcttccatcaacggttggtgccttttttctttttcttcctccaccaccaccggctcgttttccgctcgtcgacgacctacattgcggcctccggtcgcggctagccttaactcttctccttctcctccgacctctatccaagaccgcccggttttcgctgcccctgttcctttgctcaccccgcgagaagagatgggaaacaagtcctacgccgaagccattgaagctctcaagaaacttctcagtgagaaaggagaactgaaagctgaagcagctgcaatggtagatcaaataacagcagagttaaacacaacatcagctgacggcaacccatctgactcttctgttgagagactgaaagaaggcttcgtttacttcaagaaagaaaaatatgaaaag

SEQ ID NO: 37782 - DNA, 449 bp, Gossypium hirsutum
  Clone ID: LIB3165-021-P1-K1-D4
gggaaaacccggcgcgacccacgcgtccgaagggatcagaaaagagtggtggagcaacatgtctgtttaaccaggcattctcagtggggggcgatggaagtcaatggggaacttcaagtatgcccttgtggttccgggggcaatttacagcacctactcgttcataatgtgcaaagatgaaaacgagaggaactggttcatgtttttggtcttaccatttctggtgtttagattgattcactatcaactatggatttcatactctcgctatcgcactgccaaagggaacaaccggatacttgacaagagcatcgacttcgaccaagttgaccgagagagaagctgggacgatcagataatactgaacggaatattgttctacggggcggggatagtgttaaaagatcaatttaacatgcctttctttaaagccgacgggacactgatca

SEQ ID NO: 37783 - DNA, 420 bp, Gossypium hirsutum
  Clone ID: LIB3165-021-P1-K1-D5
aaaataattatttacaaaatggcatccgcttttgcttttgcttctggaacctcaccttgattcttaccctctaacagcctcaaacccaaacattcaccgcttcgtcgtcctttggcgcctattaacataagatccgaaagcatggctactgagaaactcggcatcaaagttgaaaccaacccctcagaatccaagctttctcagcttggtgtacgccagtggcccaagtggggttgtcctcctagtaaattcccatggacatatagttcaaaagagacatgttatctattggaagggaaagtcaaggtataccctgaaggtagcaatgactttgttgaaattggtgctggtgatttagttgagtttcctaaagggatgagttgcacttgggaagtttcagtggcttgtgacaaacactat

SEQ ID NO: 37784 - DNA, 429 bp, Gossypium hirsutum
  Clone ID: LIB3165-021-P1-K1-D6
gcgtccgaacaaaatcagttgcttcacaatggcctcttttactttggctctttcttccccatcattcgccggtaaggcagtgaagttctccccttccacccctgaaatccggggaactggccgtgtttccatgaggaaaaccaccaagcctgttccttctggtagcccatggtacggtcctgaccgagttttgtacttgggtccactttccggtgagccaccatcttacttgaccggtgagttccctggtgactatggttgggacactgctggactctcagctgatcccgagacctttgctaggaaccgtgagctcgaagtcattcactgcagatgggccatgttgggagctcttgggtgtgttttccctgagctgttggctaggaacggtgtcaagttcggtgaagctgtatggttcaaggccgggtc

SEQ ID NO: 37785 - DNA, 263 bp, Gossypium hirsutum
  Clone ID: LIB3165-021-P1-K1-D8
gttaccctcaagccttcattcaatgatgagaaacctggtgtaagaggggttccttcccttgctaggtccccttcttcttctttcaaggttgaagccagtggtggcaagaagatcaagaccgacaagccttacggaatcaatggtggtatgagcttgagggatggtgttgatgcctctggaaagaaaggtaagggaaagggtgtttaccaatatgttgacaaatatggtgctaacgtcgatgggtacaagcctatctacaacac

SEQ ID NO: 37786 - DNA, 420 bp, Gossypium hirsutum
  Clone ID: LIB3165-021-P1-K1-D9
tgagggaagatggaggcttcgaagtttttaataatgcaatcctgaatttgtcggggcggcacaaggagcatatcagtgcctatggtgagggaaacgaaagaagactgaccggaaagcatgaaacggccagcatcaacacgttttcatggggagtggctaatcgcggttgctcaatccgagttgggcgtgacactgagaagaatggaaaaggttacttggaagatcggcgtccggcatcgaacatggacccatatgttgtgacagcattgctggcagaaactacactattgtatgagccaacacttgaagctgaagcacttgctgctcaaaagattgctttgaatgtctaaattaaagcagtttagctttattcatagagatggttttctattttattttcaattaggctgggttttggga

SEQ ID NO: 37787 - DNA, 419 bp, Gossypium hirsutum
  unsure (1)..(419): unsure at all n locations; Clone ID: LIB3165-021-P1-K1-E1
gcagctgcaccacacctccagagaagagggtttgtttaaaaaaaccgtcgccgttttggctgctttttttacttcgttctttctccttctccgaagttcctctttcgttctttcattaattcagtattgtaaaaaatggccgacggtgaggatattcaacccctcgtctgtgataatggaactggaagggtgaaggctgtttttgctggtgatgatgctccaagggcagtttttcccagaattgttggtcgtccccggcacactggtgttatggttgggatgggtcagaaagatgcctatgtangagatgaagcacaatctaaaagagtatccttactttgaaatatctattgagcatggtattgtgagcaaactggatgatatggaaaagatcttgcatcatacattctacaatgaac

SEQ ID NO: 37788 - DNA, 420 bp, Gossypium hirsutum
  Clone ID: LIB3165-021-P1-K1-E11
catttggctagggtaatatacccatcattccttaccaccgctcctccaccgtatacggtggtcggggagacgtaaaatggtccccttagcctcgtttgaaacgcctttgaaggctaggctaccaaaactgaaagaatcgaaggaggccctcaacccccccttttgggtccgatgtcggcgatgaaaaagtgttctccgacgcgcgaccacgagatccaggtcgtgtcagaggctgatggttggtgccccgagccgtggtggcacacgtggcagaggaggcagcggttgaaagtctgcaactaggttttttgctgctgaaaatttttagttggttgggctgtcttgggctttaaggtttgtatttaattggctttggtttagtagtgggctgatggggtttgggtagtttgtaatttgggc

SEQ ID NO: 37789 - DNA, 417 bp, Gossypium hirsutum
  Clone ID: LIB3165-021-P1-K1-E12
cctcactccgccatcttcaataatttcttcctttgatctttgttagagattagctttttaatttttcattatgggaaagatcaagatcggaatcaatggatttggaaggatcgggcgtttggttgcgagagttgctctccaaagcgatgatattgagctcgttgctgttaacgatcctttcatcaccactgaatacatgacgtacatgtttaagtacgacagtgttcacggtcaatggaagcatcatgagcttaaggtgaaggactcaaagacccttctctttggtgaaaagcctgtcacagttttcggtatcagaaaccctgaggaaatcccatgggctgaggctggagctgagtatgttgttgagtctactggtgtttttactgacaaggacaaggctgctgctcacttgaaggg

SEQ ID NO: 37790 - DNA, 52 bp, Gossypium hirsutum
  Clone ID: LIB3165-021-P1-K1-E2
gtagatttacgggaataaaagctaaggttttttttttggaggagggttccaa

SEQ ID NO: 37791 - DNA, 392 bp, Gossypium hirsutum
  unsure (1)..(392): unsure at all n locations; Clone ID: LIB3165-021-P1-K1-E3
cagaaggttcaaagatttttaagagaccaacttccatgggctgctacatctggggctgtgctaaatggattaggctcttcatttctttgtggggaaaagaggacccaagccctttggggtgctagcattggggccaaaggctcgccctcccctgctgctggaactagaaagttgatcgttgtggcagccgccgcacctaaaaagtcttggatccctgctgntaaaggtggtggcaacttcattgacccagagtggctcgatggatcgctccctggagactacggatttgacccactaggtcttggaaaagacccagcattcctcaaatggtaccgagaagctgagctgatccatggatgttgggccatggctgctgtcgtctgcatcttcgt

SEQ ID NO: 37792 - DNA, 312 bp, Gossypium hirsutum
  Clone ID: LIB3165-021-P1-K1-E4
cgcgtccgcccacgcgtccgcccacgcgtccgttttgatttctttggtcttaataaccttcgggatgcctgtttctttgcttaatactcacgcttctgtaaaatcacagggtggtggttgtttgaccttttgaaattgaaatggtttcttgtacaattccttcatggaccttaattggtcttgtaagatcttttcttgatcttacactagcttatttccttttatgtggatcaaccttgggtttttttgcttggaaattttttcatgtttttggttttcatctgccatgtcccttgctctgggtttttgggg

SEQ ID NO: 37793 - DNA, 424 bp, Gossypium hirsutum
  Clone ID: LIB3165-021-P1-K1-E5
atagcatacactactagtacccactactagctttgttttcctcaatgatctcatcggctgcgagggccactgcctctccggcacaggctaacatggtcgctcctttcaccggtctcaagtctgcctctgctttcccagtcaccaggaaggccaacaacgacattacttctctcgcaagcaatggcggtagagtgcaatgcatgcaggtgtggcctcctactgggaagaagaagtttgagactctctcatacctccccgatcttacacccgtgcagttggctaaggaagtagattaccttcttcgctcaaaatgggttccttgcttggaattcgaattggaggagggattcgtgcaccgtaagtactcgagcttacccacgtactacgatggacgctactggaccatgtggaagctgcccatgtt

SEQ ID NO: 37794 - DNA, 442 bp, Gossypium hirsutum
  Clone ID: LIB3165-021-P1-K1-E6
aaccgggggaccacgcgtccgcaccacccttttttaattaccacctaaactttactttaacataaccgaccgggtctacctggacttttccctctgcccgacctacttccgcaacgctactgccgccgacagcatccctctatgctccgacccttctccgttaggccgcctagtcctcggcctctacggcaacctccttcctctaactgtctccactttcaagcgcatgtgcacctcttcctcctacaaaaacaccctcgtccacaaaatattccctgggcagttcttccaagctggacgccaaggccgcagtagagaatacggcgaagtccgtttgccccctgccttggacttgcctcggaacactgagactgtcgactctaaggccttcttgcttaaacattcaaggcccggtgtcgtttccctttgtttgtcagagaac

SEQ ID NO: 37795 - DNA, 417 bp, Gossypium hirsutum
  Clone ID: LIB3165-021-P1-K1-E8
gagactcttttgtatacctgtagcatatatgtttagtaagcagtaatagcaatggcctgctccatgatctcatcggcaaccattgccaccgtgaaccgctcctccccggcacaggccaacatggtggcccccttcaccggcctcaaatctgcctctgctttcccagtcaccaggaaggccaacaacgacatcacttctcttgcaagcaacggtgggagagtgcaatgcatgcaggtgtggccgcctcttgggaagaagaagttcgagactctctcatacctgcccgatcttactcccgtacaggtggctaaagaagtagattaccttcttcgctctaaatggattccttgcttggaattcgaattagaggagggattcgtgcaccgtaagtactcgagcttacccacgtactacgat

SEQ ID NO: 37796 - DNA, 406 bp, Gossypium hirsutum
  Clone ID: LIB3165-021-P1-K1-F1
aaaccggggcggccccacgcgtccgaggctctttaatttacacccaaaaaatatattatttttcattttttttaaaaaacccgggggggctttaccaatcacaggtcataaccaacgaaaggaaacccccattctcccattatctgtaagagaagagaagctttggaataagtcttcaatggctgcttctacttcggtttcagtagctgggttaaagggaagtttagggaagagttccttcaatggaggtgaagattatgccatgttggcggctaaatcggctcccaacgtcgttcgaatcggaaagccagttcgagctcagccgatgatgaagaacgttaatgaagggaaagggtgtttgcgccgcttgtggggttactcgccaaatcgtgggcaaaagaggttc

SEQ ID NO: 37797 - DNA, 408 bp, Gossypium hirsutum
  Clone ID: LIB3165-021-P1-K1-F10
gtccttgttccagacctatttcgtggttacttttgggaaaagggccaaccaaaaccaatgtttgaacaatggctggctagccaagaccttcagagggttgcaaatgacatagcaacctcaacaaaatggatggttgatgaatttagagctgcaggaatttcaaagaaacttggtatcattggattttgctttggcggtggccgtgtgatcgatgttttagccgctgaccagggtgcttgttttagcactgctgtctcattctatgggaccaggatggatccgacaccggcatctaaaataaaggtgcctgtgttgttcatttcaagggatgatgacccgctctgtcctattggtgttttgagcaagttcgagaagatcattggcaacggctctagggttgtaatcttc

SEQ ID NO: 37798 - DNA, 420 bp, Gossypium hirsutum
  Clone ID: LIB3165-021-P1-K1-F11
gttactggtctcttggatcctcctgatttaattaagcctccaaagatccttgtcatcgaaggactgcaccccatgtttgatgaacgtgtgagggatctgttagacttcagtatctatttggatatcagcaatgaggtcaaatttgcatggaaaattcagagggacatggctgagagaggacacagccttgaaagcattaaagccagtattgaagccagaaagcccgatttcgatgcctttatcgatcctcaaaagcaatacgccgatgcagtaatcgaagtgctcccaactcagctgatcccagatgacaatgaggggaaggttttgagagtgaggttgataatgaaagaaggggtggagcatttcagtccagtttacctgtttgatgaaggctcaaccatctcatggataccatgtgga

SEQ ID NO: 37799 - DNA, 416 bp, Gossypium hirsutum
  Clone ID: LIB3165-021-P1-K1-F2
cccacgcgtccgcccacgcgtccgcgcacagttagtttgatgccgacatcactgaagctgcatggccgatggatgaaaaacgggctactgcgtttggtttaatgaagattgacgaagaaggacgaatcatcgaattcgctgagaaaccaaaaggcgaccagctaaaagctatgcaggttgatactacaattttagggcttgatgatgagagagcaaaagaaatgcctttcattgctagcatgggcatatatgttgtgagtaaaaatgtgatgttgaatcttcttcgagaccagtttccgggagccaatgattttggaagtgaaataattccaggtgctacttccattgggatgagggtgcaagcttacctgtatgatggctactgggaggacattggtacgattgaggcattttat

SEQ ID NO: 37800 - DNA, 423 bp, Gossypium hirsutum
  unsure (1)..(423): unsure at all n locations; Clone ID: LIB3165-021-P1-K1-F3
agactcttttgtataactgtagcatatagtttttgtttgcagtaatagcaatggcctcgtcgatgatctaatcggcaaccattgccaccgggaactgctcctccccggcacaggccaacatggtggcccccttcaccggcctcaagtctgcctctgctttcccagtcactaggaaggccaacaacgacatcacttctcttgcaagcaatggtgggagagtgcaatgcatgcaggtgtggcctcctcttgggaagaagaagttcgagacactctcatacctncccgatcttacacccgtacagttggctaaggaagtagattaccttcttcgctctaaatggattccttgcttggaattcgaattagaggagggattcgtgcaaccgaagtactcgagcttacccacgtactacgatggacgct

SEQ ID NO: 37801 - DNA, 454 bp, Gossypium hirsutum
  unsure (1)..(454): unsure at all n locations; Clone ID: LIB3165-021-P1-K1-F5
cccggaataacccggngtcgaccccacgccgnntccgagttgnngtccaacgtgttggcattttgaagactggattaccattattctggtnngttccagatacatgtgcttgagatgaatcannctgaacaagctggcnngttgttctcttcccttgggatcctannagccaatagagggtgggacttggaatggtgcctggatgcctgttgannatattggcaatatcccacattagtgaaaatgatagaaatggagggggtttggtttgttatatatagaacccctccccctttggttgtatcatcccaaaatcttctcctttgtaatatttctagaggaaatattaatttggtagtgtccgaggacgtaagctaaattggccgaacctcgttaaaactctggtattttatttcttatttgtttgcttttatttaatagctttatgttggtt

SEQ ID NO: 37802 - DNA, 424 bp, Gossypium hirsutum
  Clone ID: LIB3165-021-P1-K1-F6
aacatggagactagtgtcacgtgctacgctcttttttttgttcttcctggtgtctctgctaagcactcctcggcattagtctcccctccatccacatctccttccttcagctctaagagccttaaaacaagttcactatttggagaatcattaagggttgttccaaggtcatcattgaaggtttcaaaggcaaagcacactacttcactagtgacaaaatgtgaaattggagagtctttggaagagtttctcacaaaggcaacaacagataaggcattgattagattaatgatgtgtatgggtgaagcattaagaacaattgcttttaaagttagaacagcttcatgtggtggtactgcttgtgttaattcctttggtgatgaacaacttgctgttgatctacttgccaacaagcttctttttg

SEQ ID NO: 37803 - DNA, 422 bp, Gossypium hirsutum
  unsure (1)..(422): unsure at all n locations; Clone ID: LIB3165-021-P1-K1-F8
cccacgcgtccgcccacgcgtccgattttcncgcatctttgtttgttcataaaatgatggtatagttttcttagaaaagccagagtgaaagaaagaaaaaaagtaaaagaaaaatggctttggcaagcttggtgagaagaaaggcataccttttgtctagaaacctgtcgaattcgcccgcagatgcgttgaaatactctttttcactcagcaatttctcgaggggtttcgcttcaggatctgaagagaacgacgtcgtcgtcatcggcggcggacccggcggctacgtggcagctatcaaggctgcacagctaggtctcaagacaacctgtatcgagaagcgtggtaccctcggtggtacttgccttaacgttggttgcatcccatctaaggcgcttcttcattcatcccacatgtaccat

SEQ ID NO: 37804 - DNA, 397 bp, Gossypium hirsutum
  Clone ID: LIB3165-021-P1-K1-F9
tatagcatacactactagtacccactactagctttggcttcctcaatgatctcatcggcgaccattgccactgcctctccggcacaggctaacatggtcgctcctttcaccggcctcaagtctgcctctgctttcccagtcaccaggaaggccaacaacgacattacttctctcgcaagcaatggcggcagagtgcaatgcatgcaggtgtggcctcctactggaaagaagaagttcgagactctctcatacctccccgatcttacacccgtgcagttggctaaggaagtggattaccttcttcgctcaaaatgggttccttgcttggaattcgaattagaggagggattcgtgcaccgtaaatactcgagcctacccacgtactacgatggacgct

SEQ ID NO: 37805 - DNA, 441 bp, Gossypium hirsutum
  Clone ID: LIB3165-021-P1-K1-G1
gggctggaaaaaccggggcggacccacgcgtccgagagaaagcactgaaaaagcaaaaccatggcttttgtttttttcctaaaaacttaaccggttttagacaagtctgagtgggttaagggtaacacctttcgccaaccttcaacttctgtggtgaggtgccaccctgttgcaccctccgaactaactgtgcgtgcaagctcatatgccgatgagcttgtcaagactgctaaagctattgcttcttctggccgtggaattttggccatggatgagtccaacgctacctgtgggaaacgtttggcctcaatcgggctagaaaacacggaggctaaccgccaagcctacaggacgttgcttgtttcagctactggccttggtcagtacatctcaagtgccatcctctttgaggaaaccctctatcaaaccacaattgatggc

SEQ ID NO: 37806 - DNA, 419 bp, Gossypium hirsutum
  Clone ID: LIB3165-021-P1-K1-G10
cacctctgccgctgtcgctatcccatctttcaccggccttaaagccggtgcaaccgcagctaaagttagcgccacagccaaggttgcagcctctccagtcccaaggggcagcatcaaggcctccctcaaagacgttggtgttgctgttggggcaactgctgcaagcgtaatccttgccagcaatgccatggccattgaagtcttgctcggcagtgacgatgggggtctggctttcattcccaaagaattcagcgtaagcccaggggagaagattgtgttcaagaacaatgccggattcccacacaatgttgtgttcgatgaggacgaaatcccaagcggcgtcgacgtatccaaaatctccatgcctgaagaagagctactcaatgccaaagacgagacttacgctgttaccttgactg

SEQ ID NO: 37807 - DNA, 411 bp, Gossypium hirsutum
  Clone ID: LIB3165-021-P1-K1-G11
cttctgccatcactctcccaaccctttatggttctctatttcaatctcatttcctaggaaaaagccccatcacccatcgtccttataaaccatttttctcggttgccaaacagcctaaaaaggccttctatgccaagtttgatctatttgaaatcttgggaggtagggggctctgcaatggagaaaaaggcattgaagttgagctaaagagaaacgtggatgaagcttcatcatttggtaacacagatgttgaaagttctgacagcacagcaatctcagttcaagatgatgctttcgaaaaggagatgatggggctaaccggggggttccccggtggtgaaaagggattgaaaaagttcattgaggaaaacccaccaccggcgaagcaatcagtttccgattcggtaagta

SEQ ID NO: 37808 - DNA, 424 bp, Gossypium hirsutum
  unsure (1)..(424): unsure at all n locations; Clone ID: LIB3165-021-P1-K1-G2
ctctcttgttgctgctaaagctgctggggctgttgttatagtcatgctaaacaatggctggctctgctgaactgaaaggggtgatcttgtgaggatgattgcagagctagtcagtaagaaaaaagggaaatttgaccacattgtaatcgagactacagggttggcaaatcctgcaccaataattcagacattttatgctgaggatcangttttcaatgatgtcaagttagatggtgttgttactctagttgatgcaaaacatgctggctttcatttggatgaggtcaaaccaaanggagtggtcaatgaggcagtagagcaaattgcttatgctgaccgcataattgtaaacatgactgatcttgttggtgagccagaaattacgtccctggttaagcggataaggagcattaatggtatggct

SEQ ID NO: 37809 - DNA, 372 bp, Gossypium hirsutum
  unsure (1)..(372): unsure at all n locations; Clone ID: LIB3165-021-P1-K1-G3
cgggccgaccacgcgtccgtccaaacccatggcatgtgtcattctaatattcatttcccctccaaaccactggcctgaggaggtggggaggcaaacctgaaaatgtgaaggatgctcaggaagtgttgttaatccaaccaaaggccaactttttggctcaactcggaaagtacaccggcaaaggagagtcagaggaggccaagcagggaatgtttgtaaagggttatgtctattagcatgtttgtatcttcaacagctctatgaatttcctgcactgaaaanttaattgaaagagcagaacactgatctttcattataaactccttggtttccccttttttccctctaataattatgttaaagcataagaat

SEQ ID NO: 37810 - DNA, 423 bp, Gossypium hirsutum
  unsure (1)..(423): unsure at all n locations; Clone ID: LIB3165-021-P1-K1-G4
cccacgcgttcgnccacgcgttcgaaaatattttgttttgggtgttnatgattcccgaccacacaacgaaatccatttaactttcccacccagcaatcatttagcttctgctntcttccatcttctctaccttcaatccattgttttaagaggaaactggaagggggatttcagataaaactctctctcgccttctatacgacacagttaaatatgtggaggatcaggtgcagactgtatgtgctagtgtcaaaaggttctactcagatgtaatgcaggatgtgatgcaagatttgcttctcccatcttcattggagcctgtgaaagcagtggctgcctctgacacggcaatagagaaaaatgttgggacattcaaaaagcctcaagtaggtataaaggtggctgctgtgaacgatgaaggtg

SEQ ID NO: 37811 - DNA, 424 bp, Gossypium hirsutum
  Clone ID: LIB3165-021-P1-K1-G5
cccacgcgtccggaaattcgaaagtaccagattagtactgagcttcttatcaggaaattgcctttccagaggcttgttcgtgaaattgcccaggatttcaagactgatttgcgtttccagagccatgccgttcttgctcttcaggaagctgcagaagcataccttgtgggtctctttgaagacaccaacctgtgtgcgatccacgccaagcgtgttactataatgcccaaggacattcagttggctcgtaggatcaggggcgagcgtgcttaatttccaagtgtgttaatcacacacttagaatggagaaactattgtttgttgttaggcaaatgtgttgtactatttttttatgtttatttttaatcctcttttaggacaagattaaatgataggtttatcttagtgcgtaggttccaatgtt

SEQ ID NO: 37812 - DNA, 440 bp, Gossypium hirsutum
  Clone ID: LIB3165-021-P1-K1-G6
cggggcggacccacgcgtccggttaagggtcacacccttcgccaaccttccatttttttggggaggggccaccctgttgcaccgtctggactaactgtgcgtgcaagctcatatgccgatgagcttgtcaagactgctaaagctattgcttctcctggccgtggaattttggccatggatgagtccaacgctacctgtgggaaacgtttggcctcaatcgggctagaaaacacagaggctaaccgccaagcctacaggacgttgcttgtttcagctcctggccttggtcagtacatctctggtgccatcctctttgaggaaaccctctatcaaaccacaattgatggcaagaagatggttgatgttcttgttgagcagaacatagtccccggtatcaaggtcgacaagggtcttgttccactggctggctcaaacaacga

SEQ ID NO: 37813 - DNA, 421 bp, Gossypium hirsutum
  Clone ID: LIB3165-021-P1-K1-G7
cccacgcgtccgatattggcacctaagttgcttctgcaggaaaaatggcatccatggggatgacaacatcattccttagcaccactaacctcacaaagggttctccaagaattacccagcggagactagtggttgccaatgctgctaagggagctcaagtggagagtgtccagatgagcggtgagaggaaaacagagggcaacaatggcaggagggagatgatgtttgcagctgcagctgctgctatttgctcggttgcgggggttgcaacggcggagcctaaacgtggtagcgcagaggccaagaaggcgtatgctcctgtttgtgttactatgccaactgctaggatctgtcgcaactgaggcagtgccactgcacattgctcgagtgccatgagactatgcttgttatgggcaggggc

SEQ ID NO: 37814 - DNA, 420 bp, Gossypium hirsutum
  Clone ID: LIB3165-021-P1-K1-G8
ggacagtgaggctgagggacagtatcttgtgtttgtctgagcctgaactatcaaaaaccacgatcacagcttccgttgagggaccttacgggcatgaaatgccataccacttgatgtatgagaacctgattttagttgcaggtggcattgggatttcgccattcttagcgatcttaagtgatatcctccaccgcattaacgatggaaaaccatgtctaccaagaaagattttggttgtttgggccgttaaaaagtcggatgaacttccgcttctttcaagtatcgacatggaatcaatttgcccatttttctccaacaaaataaatctcgagattgatatttatgtcactcgagaatccgggccttcaatggaagaaggtaaggttcatgtggcatcgagctcttcctgccctttctcgg

SEQ ID NO: 37815 - DNA, 422 bp, Gossypium hirsutum
  Clone ID: LIB3165-021-P1-K1-G9
ctcaaattcagttaacaatttcacagttgttttcttcagtctctctctcagccatggctgcagccatctccaccgtcgctgccgctgccgccgacaaccgagctctgggagtgtcagtcccaacctcagctttcatggggaagaaagtgagctcaagattcaacagcaccaggcaggttccttcgggaagttttaaggtgatggcggcggagaaagagatagacgaagagacacagaccgaaaaggaccgatggaaagggttggcttacgatatttcggacgaccaacaggacattactcgagggaaagggatggtggattccttgttccaagctcccatgaatgatggaactcactatgctgtcatgagttcctatgaataacctcaccaaggtcttaaaacgtacaatttggacaacaac

SEQ ID NO: 37816 - DNA, 258 bp, Gossypium hirsutum
  unsure (1)..(258): unsure at all n locations; Clone ID: LIB3165-021-P1-K1-H1
cgctatgtttcatctgatctgtttactcctgaatgtcttcttgattgccttgatttgtcctccgagcatcaagctatagatatcgccaaccgagtggaggcctcaatatatctgtggcgcagaaagaccaataccaaacctgtcaacaacacattccgctctagttcaaagtcgtcatgggacatggttaaggatctaatggttgatgctgaaaagagagaaatacttgcaaatagagctgaaagcctnctgctttgc

SEQ ID NO: 37817 - DNA, 423 bp, Gossypium hirsutum
  Clone ID: LIB3165-021-P1-K1-H11
tttagctatagcatacactactagtactcacttctagcaatggcttcctcaatgatctcatcggctaccattgccactgcctctccggcacaggctaacatggtcgctcctttcaccggtctcaagtctgcctctgctttcccagtcaccaggaaggccaacaacgacattacttctctcgcaagcaatggcggtagagtgcaatgcatgcaggtgtggcctcctactgggaagaagaagtttgagactctctcatacctccccgatcttacacccgtgcagttggctaaggaagtagattaccttcttcgctcaaaatgggttccttgcttggaattcgaattggaggagggattcgtgcaccgtaagtactcgagcttacccacgtactacgatggacgctactggaccatgtggaagctg

SEQ ID NO: 37818 - DNA, 426 bp, Gossypium hirsutum
  Clone ID: LIB3165-021-P1-K1-H2
ccgatacccaacgggcatttgctttcggattttttgtaggtttaacctcaggtgcctgggtgggggcaacactcgcagttggtttcctgtccgccggttctacatttaaggttgctacattggattcaatgcttgcagtagttaacatgagaatattcctcgaggaaggtataccaaatcaaaacgacggtatgacacaaccgatcttgaaagaaaccgaaggtgtgattcaaaaagatggcaatgttggtacaagaaagatgcctgtattcaagaccattccgtccttgaaagacattattcgcttgataaagagcagtccatcattttctcaagcagcaattgttgctttctttcagagtcttgcagagggtggaatgatatgttcgataatgtactatttaaaggctcgtttccactttaaca

SEQ ID NO: 37819 - DNA, 425 bp, Gossypium hirsutum
  Clone ID: LIB3165-021-P1-K1-H3
agaggccggatttcaaaaccctttctctttattttttttagaaaagagggaccaaagtgaaagaaaatcgaagtatagatttgattttcaatctgcattttcagggtgtggaacaatgggtgcaggtggcagaatgtcggttcctccaagtcaaaggaaacaagaatcgggctcaatgaaaagagcccctatatctaaaccaccatttactctcagtgaaataaaaaaagccatcccaccacactgtttccaacgctcacttatccgttcattttcctatctcgtttacgacttcattttagtctctatcttttactacgtagccaccacttacttccgcaacctccctcagccactatctttcgtcgcctggccaatttattgggctcttcaaggttcagtcctcactggcgtttgggttatcg

SEQ ID NO: 37820 - DNA, 428 bp, Gossypium hirsutum
  Clone ID: LIB3165-021-P1-K1-H5
taccgaatcggaagtgccggcgctagaccgtacccgtaccgctgtaactctccgatcatccatgacggttttatgtagaagatttactgggcacgcaccagggaagataggatcggtgtttgcacaggtattttcaggaccgacaatgttcccgttgatgacattgttaagcttgttgacaccttcccgggccaatccattgactttttcggtgctctgagggccagagtttacgatgacgaagtgaggaaatggatcggagaggtaggagtcaatagtgtcgggaaaaagctcgtgaactcgagggaagggccaccatctttcgagcaacctacgatgaccattgagaagctgttggagtattggaacatgcttgttgcagaacaagaaaacgtgaagagggttcaattgctgcaaatatttgagtg

SEQ ID NO: 37821 - DNA, 382 bp, Gossypium hirsutum
  Clone ID: LIB3165-021-P1-K1-H7
cccacgcgtccgcccacgcgtccgcccactctttcggttgttccaaaaaaaggcaaacgatagttttggaacaatctcacatcattacataaaatagaaaaagggttttctttttcaacccaatactactataatacaaggttaaaattggtaagtgcaagttccaccctcatgaacatcgccgataaccccaccaacgtccatctccccggtatgtacaacaaggaagagaacccccgtgtccccattatcgtcactggtaacgatttctccacactgtatgctcctatcatacgtgacggtcgtatggagaaattctactgttcaccaactaaggactaccgcgtcggtgtttgcaaaggtattttcaggaccgactgca

SEQ ID NO: 37822 - DNA, 421 bp, Gossypium hirsutum
  Clone ID: LIB3165-021-P1-K1-H8
aaaaacagtttcatttccattctaagtttgtgttttttatttgccttttgtggggtttgtttaaaaaaaattcagcaaaaatgtttattgagagttttaaggtagagagccccaatgtgaagtacacggagaatgaaattcagtctgtttacaactatgaaactacagagcttgttcatgagaacaaaaatggaacctatcaatgggttgttaaacccaaaactgtcaaatatgaattcaagactgatatccatgtccctaaattgggggtgatgcttgtgggatggggaggaaacaatggttcaaccctcaccggaggtgttatagctaacaaagagggtatctcttgggctactaaagacaaggtacaacaagctaattactttggttcattgactcaagcattaacgatccgagttgg

SEQ ID NO: 37823 - DNA, 400 bp, Gossypium hirsutum
  Clone ID: LIB3165-021-P1-K1-H9
cccacgcgtccgtaaaaactttcttttcttttcataattccccttcccccatctgtagcgttggtgctggttcatggatattgaacccttgtgggatcttggggggtggttttttattttcattgattgcatggcagctacacctaaaacaccatcgtcatcatcatccatagtggctgagacctttgccaaatcccactctcttcttttccttctcacccttttcttcattttccttctactccttaaccctaaacccacaaactaccccatggactcacccaatggcaccccttctatccctttcaaaaggcttcttttagatgcttcctcaaacatgaatttgcattccaagcaaacacgaaccttgggtacgtcgtcttcgtcacgtaaagagttt

SEQ ID NO: 37824 - DNA, 307 bp, Gossypium hirsutum
  Clone ID: LIB3165-022-P1-K1-A1
aaattatcagttgcagcaacttaatccatctcctaccttcatttaggtaacgccagtttttgcaatttctagggttttcctttttgtttagctactcttttcaattatttcatattatcagtttttttttttaaaaggggaagggaaaaaaattaagggagggttttaggttcggggggattttgggatgaaagaccaattgaattcggatctgtttgacccgagaaatgaaatggactcggattactcccgtggttccgccggttctggtggtgatttcggtttcgctctcaacgatagtaatttc

SEQ ID NO: 37825 - DNA, 417 bp, Gossypium hirsutum
  Clone ID: LIB3165-022-P1-K1-A10
ggcagctccatgtctctcaaaacgcaataccatttgctccgttgtcttcttaatcgaccgggtttagctccatacaatgatgccgtcaactgggttgttttcatctgatggaatcatttaaaaatcaacacacttggattctctttcatttcacatatttgctaaaccaccaaccaccctccaatcctccggatctcaacacacagttccataattgttgtgtgtgggaaaacgaaaaagggaattcatggaagagaggcatattctgtttgggaaatatgagatggggagattgcttgggaaaggcactttcgccaaagtctactacgcgaaggaattaaaatcgggtgaaagcgtggcgataaaggtcatcaacaaagctgaggtaaagaaagaaggcatgatggagcagatcaa

SEQ ID NO: 37826 - DNA, 415 bp, Gossypium hirsutum
  Clone ID: LIB3165-022-P1-K1-A11
cccacgcgtccgggttcccatcgtgttgacccatatggctaccggtttgggtgtattggccggggccgtttttgtcaaatcggtcatggaccagaaacccatggccggaccgttccagagatgccccacttgcaacggcacagggcgtgtctcgtgtatttgttcccgctggtcggatggcgatgtcggttgtcggacttgctcggggtcgggtcgcagggcttgtagcagttgcggcggatcaggtacgggccgccccattccggtccaactcattgtgcgtcaaccaaccaatcgaagcttctaattatcgagattttgctgtccttgaatcacgacagtcgtaagaactcttagcttactataaattgatctatatatatatatttttaggaattttattgtgaaatatata

SEQ ID NO: 37827 - DNA, 418 bp, Gossypium hirsutum
  Clone ID: LIB3165-022-P1-K1-A12
cccacgcgtccgcccacgcgtccgcccacgcgttcgcaccattgttccaagtttggtgtagaccaagctagaaccagcagccaacatggcctcattagcagcctccaccgctgccgcctcccttggcgtctctgaaatgctcggtaaccctctgaatttcagtggtggagctaggtcatcggctccaacaccatccaactcatccattttcaagaccgttgctcttttctccaagaagaaggccgctcctccaaagcccaaggctgctgctgtcgccccggccgatgaagagctggctaagtggtacggtccggacagaaggattttcttgcctgaaggtctgttagacagatcggagatcccagagtacttgaacggagaagttcccggagactatggatacgatccgtttggtctg

SEQ ID NO: 37828 - DNA, 452 bp, Gossypium hirsutum
  Clone ID: LIB3165-022-P1-K1-A3
gtaccgaattcgggattcggcccacgacctcacgcgggcctcctctcgtgaagaagaagttcgagacactctcatacctccccgatcttacacccgtacagttggctaaggaagtagattaccttcttcgctctaaatggattccttgcttggaattcgaattagaggagggattcgtgcaccgtaagtactcgagcttacccacgtactacgatggacgctactggaccatgtggaaactgcccatgtttgggtgcactgactcggctcaggtgttggaggagcttgagaattgcaagaaggaataccccaatgcattcattagaatcattgggttcgacaacgttcgtcaagtgcagtgcattagtttcattgcctacaagcctaaaggctactaagttgtttacttccctcctaggaattccatttgtttcaaagttgtacttaaatta

SEQ ID NO: 37829 - DNA, 422 bp, Gossypium hirsutum
  Clone ID: LIB3165-022-P1-K1-A4
ttcaacttctcgagcaccatatctacccttttataaattaaaacaattctaattgaatatcgcgctcgccatcgtcatattcccatttctctctcccaaaattctctctctttgactctttaatatgaggtgttgaccttccacaggatttctgtaaggattatatagcgttttgcccgacccggaaaatgcccatggaccgaaccctacaatcggagagcatgagatcgccgactgtactctcaatcgaatgtctaaaagggagctcaaaagctgacgaatggaccgcagacatgctccagactggcgatattgttgaagagattcgtattggatccggttcaggacttgcccataaggcaccttttaaaggcggcaggagcggagttcagagggttcttcatagctcctataagaacaaa

SEQ ID NO: 37830 - DNA, 435 bp, Gossypium hirsutum
  Clone ID: LIB3165-022-P1-K1-A5
cgatggctctctcaaactcagtcccgtcagcttgcattatctgtctcagtgcttctaatcaattctatcccccatcgtcacgctttcaagtctctcaagccccctctcttctggccatggcaaaaggtgaaaatgggtcctttgactgtttctccaatggggtttgggacgtgggcatggggaaaccagcttctctggggttaccaaccttcaatggattctcaacttcaacaggtttttaatcttgccgtggagaatggcatcaatctttttgacaccgccgattcttatgggactggcagactcaacggacagagtgaaaagcttttagggaagttcattagagaatttcaaggggaaaaacggatacgagatgagattgtgattgccacaaagtttgcagcttacccatggcgtctaacatcagggcaattt

SEQ ID NO: 37831 - DNA, 415 bp, Gossypium hirsutum
  Clone ID: LIB3165-022-P1-K1-A7
ggctctctactctacaattctgcttcctatcagtcagaacctgagatagtgaggtggctaagcaatggcagtttgcccagtatacaccacccaatctctcaactcaacatgttcaatctccacaccatcaaaaacccacttcagttctcaccacaaccacctagttttctacagaactagcaagagaactagcaagagaggtggcagcagctcatgtgtgataacctgctcagctggtgactcacaaacagttgtgattggtttagctgctgactcaggatgtgggaagagtaccttcatgaggaggctaacaagtgtgttcggtggtgcagctgagccaccaaagggaggcaaccctgattccaacacactgatcagcgatatgaccactgtgatatgtttagatgattatcat

SEQ ID NO: 37832 - DNA, 413 bp, Gossypium hirsutum
  Clone ID: LIB3165-022-P1-K1-A9
cccacgcgtccgcccacgcgtccgattactcactgataaccatgtccaagtgtagggatgaagaagatcccaccactcgaaaacccgaatacgatcgactaagcaaattgaaagctttcgatgaaacaagagctggtgtaaaaggacttgttgattctggaatcaaacatgttccaaggatgtttcatcatcaattcgagaataacccggtttcatgtggcatacaggttagtattcccattatagacctcgaaaaagtgaagcaaaatcgaactactcgtgaggagatcgtcgggaaagttcgaaacgcgtccaagacatggggattctttcaggtacttaaccatgggataccaatgaatgtcatggaggaaatgaaggacggtgcacgtaggttcttcgagcaagacgtt

SEQ ID NO: 37833 - DNA, 339 bp, Gossypium hirsutum
  unsure (1)..(339): unsure at all n locations; Clone ID: LIB3165-022-P1-K1-B1
taccgaatcgcaggttcgacccaggcgtacgcccacgcgtncgcttttgtataactgtagcatatagtactagtaagcagtaatagcaatgggctggtccatgatctcatcggcaaccattgccaccgtgaactgctcctccccggcacaggccaacatggtggcccccttcaccggcctcaagtctgcctctgctttcccagtcactaggaaggccaacaacgacatcacttctcttgcaagcaatggtgggagagtgcaatgcatgcaagtgtggcctcctcttgggaagaagaagttcgagacactctcataccttcccgatcttacacccgtaca

SEQ ID NO: 37834 - DNA, 355 bp, Gossypium hirsutum
  Clone ID: LIB3165-022-P1-K1-B10
ctcactcagtcggtccctaaggtcactgtctttttttacgttgccccaaacgttgtctgggccgattaagaaacatttaacgaccctaacacaccacgtggaatgccagctttctacttcgctacctcatacaagatcaccgtcatgctctcttcttatgctcaccaacacttcaaaatttactctgttatgcactctctaaccttactttcagctgatacatcaatctataggtttgccatacatgcctcttataaagttttgtcattatacgcaaatgaaccaaaatgcattattgcacaacactcgattattattgaaggcttctctgtcgatacttactatatgctgaaag

SEQ ID NO: 37835 - DNA, 383 bp, Gossypium hirsutum
  Clone ID: LIB3165-022-P1-K1-B12
acccgggcaaatactattgcaccgttattgatgcacctggacaccgtgtttttattaagaacatgattaccggtacgtcacggtctgactgtgctgttctcattattgactcaaccactggtggttttgaagctggtatctctaaagatggtcagactcgtgagcatgctttgcttgcttttaccctcggtgttaggcagatgatttgctgctgcaacaagatggatgcaacaaccccaaagtactcaaaggcaaggtttgatgaaattgtcaaggaagtctcttcttatcttaagaaagttgggtacaaccctgagaagatcccgtttgttccaatctccggttttgagggtgacaacatgattgagagatctacaaacttc

SEQ ID NO: 37836 - DNA, 414 bp, Gossypium hirsutum
  Clone ID: LIB3165-022-P1-K1-B2
aaaaaagtgagaaaggaataaagacagagaacgttgttaaggtgagttgaaatcaaatctgttatgctttaaattttctgggaggaattgtatctctctctctctctctcctctcagccggacgaaatagaggaaatttccgttggtataaaaatgcaggtgtttgatagaatgactattccaattcgcagagtttggagcggtgtcgccacccgcttcggcgttcgtaaaagtgctcatatgaagcttcgaaaagatataagctcttgcgaataccaggatgtgcgagtgatgtgggaaatgctgagcagaaacgaagcagaaaccattcgatccccaacaacaagtaaaggaagatgcagaaagagaccattgtggaattgctttgaatgggcaaagcgagctccttttttt

SEQ ID NO: 37837 - DNA, 272 bp, Gossypium hirsutum
  Clone ID: LIB3165-022-P1-K1-B3
attcttcaatccggatttccttgccaatctctatccatagtggaaatatgacgtcccaggggtcgtcttatcattagatttcccatcatatcccaacctactaaaccagtcgttgatttagaggtattactatcacagcgcgtgtcaaaaatgagatagaatttgtgaccctatataccatatcgcatatcacaaaagagtgcactcgggatagacgctgtgcttgaagacccccgacactctcgggaaacacgaagactctcttcaatttc

SEQ ID NO: 37838 - DNA, 420 bp, Gossypium hirsutum
  Clone ID: LIB3165-022-P1-K1-B5
aaaatcagttgcttcacaatggcctctacaactttggttctttcttccccatcattcgccggtggggcagtgaagttctccccttccacccctgaaatccggggaactggccgtgtttccatgaggaaaaccaccaagcctgttccttctggtagcccatggtacggtcctgaccgagttttgtacttgggtccactttccggtgagccaccatcttacttgaccggtgagttccctggtgactatggttgggacactgctggactctcagctgatcccgagacctttgctaggaaccgtgagctcgaagtcattcactgcagatgggccatgttgggagctcttgggtgtgttttccctgagctgttggctaggaacggtgtcaagttcggtgaagctgtatggttcaaggccgggtct

SEQ ID NO: 37839 - DNA, 380 bp, Gossypium hirsutum
  Clone ID: LIB3165-022-P1-K1-B6
accacacacttatcaccagggggtgatgattattattatcgccgccgctgcgcccgggtttaaacatcaagcctaaccaccaggtggtgtgcaaggctcataagcaagaagatgatggaagccttctgtcccgcaggttggctctcactgtactcattggtgctgcccctgatggcatctaaagattctcctgctgatgctgcctatggtgaagctgcaaatgtatttgcgaagccaacaacagacacagaattcatgccatacaatggggatggattcaagctgtcgataccatctaaatggaacccaagcaaagaggtggagtttccaggtcaagcgcttgggtatgacgacaacttcaacaccaccagcaatgtgag

SEQ ID NO: 37840 - DNA, 410 bp, Gossypium hirsutum
  Clone ID: LIB3165-022-P1-K1-B7
cccacgcgtccgggcttcaatattttgatgtgacaaaggaccgcaactgggcctgtggtatcgtaagtcgtaagtttcctggagttccctatacgttttatccgcagagaaaagggtgtaaagtttctctgtaccaagatgcccatatcccagacggatttgttcctaaaattcctcttgccggaggcaagaattatgagccacatagatgctgggaagatatttttgatgctatcaccaatgctaaacacatgatctacattactggttggtctgtttatactgagatcgctttggtgagagactcaagaaggccaaagcctgggggtgacatcactattggtgaattgctaaaaaagaaagcaagtgaaagtgtcagggttaatatgcttgtttgggatgatagaaca

SEQ ID NO: 37841 - DNA, 411 bp, Gossypium hirsutum
  Clone ID: LIB3165-022-P1-K1-B8
ggtgactttgcgagactcaacttccctaaccttcgtcaccacggttcccacgtaggtgacgtacaagcctttgccttcctctgttgacgctaagcttcaagccatttgtgagagcttggtacaaaaccctaagcaagggagcaagaagaaatcatccaaggttacggcagacaccaaaagcaggaacaacaaaaaatccgacatggcagagccaaagcccgaggagaatacagcgaaagtggagaactcctcatctttgtctacggttcaatccgagagtgagggttcggctgtatcttcacctttatcagatcttacattctcggatttcgacgaacaaccatggccggaagtcgtttcttcttcggaaacttttatgttgtccaagtacccttcagagatcgattggga

SEQ ID NO: 37842 - DNA, 420 bp, Gossypium hirsutum
  Clone ID: LIB3165-022-P1-K1-B9
cccacgcgtccgcacgaacttcactctccagtctccaatggcggctgccgtctccacgcatgggtgctgtcaaccgagcaccgttgagtttgaatggatcaggtgccggagcttctgctccaagctcagctttcatggggaacagcttgaagaaagtgagcgctaggttcaacaacaacggcaaggctccagtgggaagtttcatgattgtggctgccaaagaaatcgacgaagacacacagaccgaccaggaccgatggaagggtcttgcttatgatatctccgatgaccaacaagacattaccagagggaaaggtatggtcgactcattgttccaagctcccatgaacgatggtactcactatgctgtcatgagcttctatgagtacattagccaaggccttcgcacatacgacttgg

SEQ ID NO: 37843 - DNA, 371 bp, Gossypium hirsutum
  Clone ID: LIB3165-022-P1-K1-C1
aaaatcagttgcttcacaatggcctttacaaccttggttttttcttccccatcattcgccggtaaggcagtgaagttctccccttccacccctgaaatccggggaactggccgtgtttccatgaggaaaaccaccaagcctgttccttctggtagcccatggtacggtcctgaccgagttttgtacttgggtccactttccggtgagccaccatcttacttgaccggtgagttccctggtgactattgttgggacactgctggactctcagctgatcccgagacctttgctaggaaccgtgagctcgaagtcattcactgcagatgggccatgttgggagctcttgggtgtgttttccctgagctgttggc

SEQ ID NO: 37844 - DNA, 418 bp, Gossypium hirsutum
  Clone ID: LIB3165-022-P1-K1-C10
attctccctctgtgtctctctatatctttcattccatagcttttttttggtaaaaggccgtggatgggaatggaagagttcacccagattgtcctaatgctgcaaatccctaccatgaatgtggtggactctgcttagagaagattgctgaaggcaaaggaccaaaggcaaaagaaactaaaaagtcattaagttcaaaatttcttgatgcttccagaagctttggccggaaaaagaagggatccgactctctgctgagatcccctaaagcactcgagactacccctgcaataggtgcagtttatcctggtggccctaggtcacctcgttctcatttttctagaaagaaaatggaagcagaaaacggtgagtcgtattcatcttccgagcaacactctggcgagatatattcccaaga

SEQ ID NO: 37845 - DNA, 416 bp, Gossypium hirsutum
  Clone ID: LIB3165-022-P1-K1-C11
cccacgcgtccggttaaaagtgcacatcacagtatggcatcttcaccctttcaatggtcgagtccagttctcactctcctattatcatcgccgtcgttacgaaaatccccttgtcttcctttccatccttcattattctcgccgccccttacccagaagaccctcactttctcgactgggactagagccgtttcggggtccggaaaatcccctggtcttcctttccgtccttcattattctcgccgccccttactcagaagaccctcactttctcgactgggactagagccgtttcggggtccgggaagttctgttggagagccaaggcgtcgatgtccgggaccaccatggagaaagggaaagggaaagtcgaagttattgattccaaggagaatctttcggtttcgctcgctaa

SEQ ID NO: 37846 - DNA, 414 bp, Gossypium hirsutum
  Clone ID: LIB3165-022-P1-K1-C12
cccacgcgtccgcccacgcgtccggctctttctcttgctctctttagagtaaatggcttgggcaatcctttgtagagctccgggatccattgtcaccatgtcttgctcaaatctgacaatgtgggtgtcctcaaaaccctctctttctgacacttcttcactctctttccgttctttcatcagcccttttcagctcccatctcagagctcaacccccggtaacccttccaggtcctcatctgtaaccccagttcactgtggtcttcgtgagcttagagaccgtattgattcagtaaagaacacgcagaagatcactgaagccatgaaacttgtggctgctgctaaagttaggagagcacaagaagctgttgtcaatggcagacctttctctgagtccctggttgaagttcttta

SEQ ID NO: 37847 - DNA, 275 bp, Gossypium hirsutum
  Clone ID: LIB3165-022-P1-K1-C2
caaagctcatggtggagaagcttccataatggttaccataggtggatgaaccatcgaaatatggtgtggtggtgatggaagaatcaacaggacaagtggacaaattcgtggaaaaacctaaattgttcgttggaaacaaaatcaatgctgggatttatctgctgaacccttctgttcttgatagaatcgaactgagaccaacctcgattgaaaaagaggtcttcccgaagattgcagccgagaagaagctgtatgcaatggtcctacccagggtt

SEQ ID NO: 37848 - DNA, 277 bp, Gossypium hirsutum
  Clone ID: LIB3165-022-P1-K1-C3
cctgtatccagccaacccgagattttctatttttcgattctttttaggtcttttttcccaggttggtttgtatttctaaaacagaaacaaataggtgtctcaatggcagaagagagcggtgcccctgtaagttgtgctgatttgcccgttaaaaggcccagggaagacgaagaaaacggggtctcttctgctgctgctgctgttgccatggaaatggaagctgataccaataatacttccaaggaagctgatgggatttcctctgttattcctggat

SEQ ID NO: 37849 - DNA, 401 bp, Gossypium hirsutum
  Clone ID: LIB3165-022-P1-K1-C4
cccacgcgtccgcccacgcgtccggcggacagaatgagcaaggagctttctgcactcgctcgtagcagcatgaagatcaaggttgtcgctccacctgagcgaaagtacagtgtctggatcggaggctcgatcttggcttccctcagcaccttccaacaaatgtggatcgcaaaggctgagtatgatgaatcaggtccagcgatcgtccacaggaaatgcttctaaaatgcccataccatgaaagagagaagtactgtttcattgtttcttgatgcagcttggaactttgctttgttctaatggatttgttatccttctgtgtgttttcatgttggagtgaaacaatgaactttgagaaagccagtgatttgatttttgttccaattctttgaatctcagac

SEQ ID NO: 37850 - DNA, 364 bp, Gossypium hirsutum
  unsure (1)..(364): unsure at all n locations; Clone ID: LIB3165-022-P1-K1-C5
ccacgcgtccgcccttttctacattcaagtgcgcgtgttttnttttccttcgnacaangccacanggcaagggagggacccttgtttccgtctgtgccggccgctcttgcgacaacaaaatcatttgcgagactttagcaaccagcgaaagtgattccgacgaccacctccacccggcggagaaacatattgaagaagaaatcccatcggatttcccgccagaatcgttttggttatccaaagacgccgagttcgactggttcgatcgtaacgctttttacgaacggaaagattcgcatactagaaattcatgtgccaactctgcaaacctcaaccctaatcttaactcgatctccaattctca

SEQ ID NO: 37851 - DNA, 421 bp, Gossypium hirsutum
  Clone ID: LIB3165-022-P1-K1-C6
acctcacctcacctcacctcacctttctttccatttccactccctttctctatctttacgagttcagtagagaaagaaagcaggatgatgctcggaaaacgctcacgtcagccgatcaagaggacgacaagcatgacgggtatcaccgtcgatgtctccgacgcggaggatgtcgtcgaccagcaccaccaagactcaatcatatctcatcttcctccccctcaaatccaccctatgcatgaatcccccgacggtacctccctctacgatcaccgtttcttggccatggtgtcgcccagaaacccaacttctttcactaaccgtatcgtcgacagtagcaccacagacactgcttcttttttgcgagcttgttggctttgtaatcgccgcttagctcctggtcgtgacatatatatgtata

SEQ ID NO: 37852 - DNA, 325 bp, Gossypium hirsutum
  Clone ID: LIB3165-022-P1-K1-C7
ctcgatatgaagatatccatatcattctttcttttagttgtataatgtccaatcgagacggggcaaattaaagaatatacagcatggcatgttgcggttgggtgtaaacataagacaaatgcgaaccaataataacagccctcccttaacaaggttggttttaatacatttaaatgaaggcatggttaaggttatggttttttttttttaataaatcaatggacctaaacctgttaattattattttaaactttgaccaggtttaaaaaaaaacataatccttccattgaacaaaaaaaaacaaaagggggccgcccattttaaa

SEQ ID NO: 37853 - DNA, 407 bp, Gossypium hirsutum
  Clone ID: LIB3165-022-P1-K1-C8
gttaaggcaatggctaccctcagaatagctcttcgtaacgtccaccgcatcgttaatgccgccgccgtttccggccgtacaacaaccgttttcaggccacagtatggttgggtttcaacatatttttcaactaatattagtaacactcagccattaaacatcgatctttctaacgaagaaagcaaaaggcgtctttataacagattgttgtataggagcaaacaaagaggatttctggagctggatttggttttgggaaaatgggttgaagaacatatccattccatggatgaaaatggaattaaagctcttgttaatgtcctcgatttggaaaaccccgacctttggaaatggctaaccggtcaagaacaaccacccgaagcagtgactcttaatcctgtcttctc

SEQ ID NO: 37854 - DNA, 413 bp, Gossypium hirsutum
  Clone ID: LIB3165-022-P1-K1-C9
gaaaatcaaaaagaagaagaaaagagatccccatgatgtctcttacaatcccaacgaatcggtcaaaatcaattttgaagccaaagctggagacccaagtgatccccaaggcttcatccagatcattgattgtatgctcctccagcaatccttcctcctccgacaaatcggcttcatcactccaggccttctcagcggctctcgctctttcttccatccttctttcggctccactccctgctgttgcggacattgcggggctcactccttgcaaagagtccaagcaattcgccaagcgcgagaagcagcagatcaagaagctggaatcctcgttgaagctttacgcccccgatagcgcaccggctctcgccatcaaagccaccatcgagaaaaccaagagacggttcgacaac

SEQ ID NO: 37855 - DNA, 419 bp, Gossypium hirsutum
  Clone ID: LIB3165-022-P1-K1-D1
gcttaagccctttcctcttcgattttcacgtttttccctttttctctctctcctttgccggggccggcaacaccaccaccaatttcactctttggtcccgaaaaccccgccgaaatccaaccgctcccgctgctgccatgttattccctcaaaatcctgtcttttccgacacttgcgccgccatcattagcggttccatcgccctctctgtcctccgtttatggcaggagaccgccaaacgcggcctgtttgaccaggttctggactatggaaagatgaagccactgtgaaatcaatgagcagatgtggtgactacagggaacttcttaaaggaccactctattatgctacgacgattactttggcttgtgcattctattggaggacttcacctatagcaattgctgcaatatgtaacc

SEQ ID NO: 37856 - DNA, 417 bp, Gossypium hirsutum
  Clone ID: LIB3165-022-P1-K1-D10
caaaaccagaaagtaaaaagaacagagctttgatatcctaagctaatgtcggacgaggaggaccatttcgagtccaaggccgacgccggcgcctccaaaacctatcctcagcaggccggtactatccgtaaaaacggctacatcgtcatcaaaggccgtccttgcaaggttgtcgaagtttccacttccaagactgggaagcacggacatgctaagtgtcactttgttgggatcgacatcttcactgctaagaagctggaagatatcgttccttcttcccacaattgtgatgtgccacacgtcaaccgtactgattaccaattgatcgacatttccgaggatggatttgtgagcttgctgaccgacagcggagacactaaggatgatctaaggctcccaactgatgaaaacttgttg

SEQ ID NO: 37857 - DNA, 414 bp, Gossypium hirsutum
  Clone ID: LIB3165-022-P1-K1-D11
cccacgcgtccgaacaaattgattttcatagtttcccatttttatatatttaatgctatggatgtttcctttgggacgtgtctctgacactctttttatttacttgaaaccatctctttcttctctgacctccatccatgctttatttcgggagctctaaattctaattgcttctgaaactccaccccatatcttgccaagtaccatgacgtttaaaagagtagtttctcatgaaatttttgggcaccggctagttagccggtccaaatcgcctgttatttctattgtcttgttttcgcttcttatattttttatgtttgcatacagtatcatttctaacatgtcgctgcaatcggctgccttcaatgttcttcctatttcattcactatttctacgcaaaggaatatgatcgt

SEQ ID NO: 37858 - DNA, 414 bp, Gossypium hirsutum
  Clone ID: LIB3165-022-P1-K1-D12
cccacgcgtccggctctttgaatactccagtaccagtacaaggcaggtgattgaaaggagaaatctgcagtcagaaaggatcgatcgattggatccaatttcaacccttgagcttcagcttcaaagtagcacatgtgccatgttgggcaaggaaatagcagaaaagaccaaagagctgagacagctgagaggagaggagcttcaagggttagatcttgaagaattaaaacatctagagaaattacttgaaggaggccttaaccgagtcactcaaacaaaggatgaactatttttcaaagaaatcagcatccttaaaaggaaggaagtagaactgatggaagaaaaccagcaattgaaagagaaaatggggaattcacctcatgtggtccaaccagctgtggctcagcaaggcct

SEQ ID NO: 37859 - DNA, 407 bp, Gossypium hirsutum
  Clone ID: LIB3165-022-P1-K1-D2
gaagacacagttctctcatactaaaaaagacatggaagtttaccttgtaattagagattgggttgcattgcttgttgttgggttattaatgatatggggatggagaactttaaactgggtatggctggccccaaaaaggctcgaaaggtgcttgagacaacagggctttgcagggaatccttacaggttcctttctggtgacataaaagagctcttcactatgagcagacaaacaagagcgaaacctatgcctcttagtgatgatattgggccttatgttgttccttttcaacatcaaactgctaaccagtatggaaagaattcatttacgtggtttggtccaagaccaagggtgaacattacggaccccgaaaaaataagagaaatacttaacaaatttaatgact

SEQ ID NO: 37860 - DNA, 122 bp, Gossypium hirsutum
  unsure (1)..(122): unsure at all n locations; Clone ID: LIB3165-022-P1-K1-D3
acgagattttgaaggaaaataaagacaaggaagatgcagagtttaatggaacggttcaaacataagccacccaaagctttggatgaagacgaaactgagtttcttgataaaatnggagatgt

SEQ ID NO: 37861 - DNA, 339 bp, Gossypium hirsutum
  Clone ID: LIB3165-022-P1-K1-D4
cccacgcgtccgggctgactataaatcttatttattgttatggctactgaacaatgtgtgcggcggtggttgaaaaaaccctacacgaagggaaacatgaacaccatccgagcagtggccaaactcaggttcataaggagagtaagggtgtgaaataatcacatgggcacaaccaactgagtcatgacacacccaaaacacatgccgagtccaagaccgtgagccatggtgtccatgctcagcaacatgtggctcaaagcacggccatgcctacaacttgccatggaaagaaggaaaagaagatgaaagacaagaaggagaaagacaaggacaggaagg

SEQ ID NO: 37862 - DNA, 101 bp, Gossypium hirsutum
  Clone ID: LIB3165-022-P1-K1-D5
cttccgcgttcacagcagggatcgcgcgttgtttggggaaaaaagcagtcaagaagctgaacaacctcgccgcctttggaccagacggggtctgttgctcg

SEQ ID NO: 37863 - DNA, 420 bp, Gossypium hirsutum
  Clone ID: LIB3165-022-P1-K1-D6
ctttgtgaatcctttcaacccttgctttaacgtcccttttttttttctgaattacagagagaatgggattttccaaagacaagaggaagcagctgaacctgaaactatatgtatcaaacaacaaagcgagctaagatttgatggagatagcaatgaagcagttgaagaagggaaagcaggagagtggttgaacctgagcttgggtgggaattcagtatcaacagcaggagattctgacactcaactaacaccagtttcaaccaaggttttctcatgtaacttctgcatgaggaagttttacagttcacaagccttgggtggccaccaaaacgcccacaagagggagaggggtgcggccaggagataccactcccagcggatgacgtcgtcgtctatgatggctttgccaatgattagtag

SEQ ID NO: 37864 - DNA, 276 bp, Gossypium hirsutum
  Clone ID: LIB3165-022-P1-K1-D7
cccacgcgtccgaacttggaattatctgttttttctatcaattgtgcttatctagtgggagttggcaaaagtatcttcatactgtaagtaaatgtaattaggaaatgattttgtcccgtcccaacacttattttcatgatctatttttcttaaaatgatatattttgcacccatttctggaatccaatgtgcctccgacctttttcttttttggtggaagtttttaggtaagggaaggaggaaattaaaattttttgcttatccaaatcttatatc

SEQ ID NO: 37865 - DNA, 404 bp, Gossypium hirsutum
  Clone ID: LIB3165-022-P1-K1-D8
tacaactcagcgtctccactctctttctctctttgcctccaaatggcttctgccacgcactgccaccactttttccctcctcaaaaccaccgcctccaccacctcttcctccgcctcccgctcttctgcatccctcatccgccttccctccactcgccgccacctcaaatcctcttctctcatccacagcctaggcttctcctccgctgcttctggggactctctgctttccctccatgcctcctccaaagttcgatctttcaagggaaaagggtcaagaggggttgtttcaatggccaagaagagtgttggggacttgactgccgctgatttgaaagggaagaaagtgtttgtgagggctgacttgaatgttccattggatgatagccagaacatcactgatg

SEQ ID NO: 37866 - DNA, 412 bp, Gossypium hirsutum
  Clone ID: LIB3165-022-P1-K1-D9
gcatatagtaatagtaagcagtaatagcaatggcctcctccatgatctcatcggcgaccggtgccaccgtgaaccgctcctccccgacaggccaacatggtggcccccttcaccggcctcaaatctgcctctgctttcccagtcaccaggaaggccaacaacgacatcacttctcttgcaagcaacggtgggagagtgcaatgcatgcaggtgtggccgcctcttgggaagaagaagttcgagactctctcatacctgcccgatcttactcccgtacagttggctaaggaagtagattaccttcttcgctctaaatggattccttgcttggaattcgaattagaggagggattcgtgcaccgtaagtactcgagcttacccacgtactacgatggacgctactggaccatgt

SEQ ID NO: 37867 - DNA, 409 bp, Gossypium hirsutum
  unsure (1)..(409): unsure at all n locations; Clone ID: LIB3165-022-P1-K1-E1
cgacccacgcgtacggatgcttaaatntntgtaattctcactttttttttctttaaacacaccatcaattatcccgcgcgcttattttatttcttaacctcaccatattcaaccacttgtttgtcacaatggaactggaatggtgtctgcaaccatttcatgggaaatatgcttaatgttccaacatcaataccttcccttgatcaaaacctcacaccctttcgataccttgcaattcacataaccatacatctatcggtgataaatcttaatcaaagatagaccattggactttcaaataccctatagagcatgatattgcgagcaactgagattatatagaaaagatttggcatcataccttttataaaccgatcaaagatcaccaacagtccattacatgctcaaa

SEQ ID NO: 37868 - DNA, 433 bp, Gossypium hirsutum
  Clone ID: LIB3165-022-P1-K1-E11
ctccaccacagccaccctctccatcgctgtagccacggcggcgatgaatacgacgaccctaagttcccttgcattgagccaatcagttttcgggctgaagtcccaaagaaaaggccgctttaccatggcttcacacaaagtaacactgataactccgtcgggaaccaagcaattcgactgctcggacggcgactatatcctggaccgtgccgaggaagtaggaatggatctcccgtactcgtgcagggctggggcttgctcttcgtgtgcgggactgatcaaacaaggcaccgtcgaccaatcggacaatagcttccttgatgatgaattgattgatgcaggcttcgtcctaacttgtgttgccatccctaagagtgatgttatcattgagacacacaaagaggaggacctagtatcttaaaaggtgtcataa

SEQ ID NO: 37869 - DNA, 364 bp, Gossypium hirsutum
  Clone ID: LIB3165-022-P1-K1-E2
cccacgcgtccgcttttgtataactgtagcatatagtactagtaagcagtaatagcaatggcctgctccatgatctcatcggcaaccattgccaccgtgaactgctcctccccggcacaggccaacatggtggcccccttcaccggcctcaagtctgcctctgctttcccagtcactaggaaggccaacaacgacatcacttctcttgcaagcaatggtgggagagtgcaatgcatgcaggtgtggcctcctcttgggaagaagaagttcgagacactctcatacctccccgatcttacacccgtacagttggctaaggaagtagattaccttcttcgctctaaatggattccttgcttggaat

SEQ ID NO: 37870 - DNA, 249 bp, Gossypium hirsutum
  Clone ID: LIB3165-022-P1-K1-E3
ggaaatatatcagactatagtaatttaatacacatagaaattagaaaaatacataaaaaggttgggttttatcaatttcacgaacaagatccaagaataagattagttgatggagggggaggggtagatctggggatcaaccagtagcgagagaagggatcgcttcttccttgaattgaagagttcgttcaaaaaattcatctatctgattgatgagccataagacaattcatggttcagacgactagt

SEQ ID NO: 37871 - DNA, 422 bp, Gossypium hirsutum
  Clone ID: LIB3165-022-P1-K1-E4
gaaagcactaaaaaagcaaaaccatgggctcttcttctctacttaagacttcaccagctggagacatgtctgcgtgggttcagggtcacacccttcaccaaccttacacttgtgcggtgaggagccaccctgccgcaccctccggactaactgtacgtgcaagctaatatacccatcagcatagcaagactgctaaagctattgcttatcctggccgagggacttaccatatgaatgactgccaccctctctgacctaaagcgttcactctctatcaggctcgtaaacacagctgtttactgacccgcgtgctcatctgacctcgtcttagctgctcaacttattgatgacatatctggaggcgacatctgtgagctaactctatagctaaccacaatcgctggcatcaatatggttctttt

SEQ ID NO: 37872 - DNA, 420 bp, Gossypium hirsutum
  Clone ID: LIB3165-022-P1-K1-E5
ccacactctcaaattcagttaacaatttcacagttgttttcttcagtctctctctcagccgtgggtgcagccatctccaccgtcgctgccgctgccgccgccaaccgagctctgggagtgtcagtcccaacctcagctttcatggggaagaaagtgagctcaagattcaacagcaccaggcaggttccttcgggaagttttaaggtgatggcggcggagaaagagatagacgaagagacacagaccgaaaaggaccgatggaaagggttggcttacgatatttcggacgaccaacaggacattactcgagggaaagggatggtggattccttgttccaagctcccatgaatgatggaactcactatgctgtcatgagttcctatgaatacctcagccaaggtcttaaaacgtacaatttg

SEQ ID NO: 37873 - DNA, 409 bp, Gossypium hirsutum
  unsure (1)..(409): unsure at all n locations; Clone ID: LIB3165-022-P1-K1-E6
cccacgcctccgctagcattagcactagcacttgtagctaccatggcctccgncgcatggggctcgctccattactcactcacaaccaacggcanatcatcatcattatcgccgtcgctgcgccaggtttcaaacatgaagcctacccagcaggtggtgtgcaaggctcaaaagcacgaagatgatggaagccttgtgtcccgtaggttggctctcactgtactcattggtgctgccgctgttggctctaaggtttctcctgctgatgctgcctatggtgaagctgcaaatgtatttggaaagccaaaaacagacacaaacttcatgccatacagtggggatggattcaagctctcgataccatcgaaatggaacccaagcaaagaggtggagttcccaggtcaagtgc

SEQ ID NO: 37874 - DNA, 411 bp, Gossypium hirsutum
  unsure (1)..(411): unsure at all n locations; Clone ID: LIB3165-022-P1-K1-E7
accgatcgtcttcatggttaagcttcttgccctaccatttctcattacttatttcgtcacgtgtgttcccctagggaacactgcanctacaataacatcatgtacccaaacaccctaccccggtgtctgcaaccatttcatgggaaatggtgttaatgttgcaacatcaaaccttgcccttgatcaaacccgcttctccttccgtgaccttgcgattcaggtcaccctaaaccaagcggttcaagctcatcgcctcgtctctaccatggacttgacttctttcaatgagcgagccaaattggcttggaacgattgcttggagctctaccagaacaccatttcccatcttaaccgatcaaagagcaccaacagtccattagatgctcaaacctggttaagtgctgccattgc

SEQ ID NO: 37875 - DNA, 329 bp, Gossypium hirsutum
  Clone ID: LIB3165-022-P1-K1-E8
cccacacgtccggcggcggcggtgctgttggtcggaagtgttgggtagtgagttgggcggtggatggcgggaacggtgctggaggtcaaaaaccaaatttggaccccaatcccactcacaatcagagtgctttcatatctcggaaccaaacttatacgatgctgcaacaaccaatggaggttgctactcaatctgatgattacaaagaagcacctagaatacgtgattctttcaaaatattcaaggaaaaagaacctgttatgagatttacgaggctgatcaaaaagactgatcctgatgaaagagcagcggatgctcctagatatacc

SEQ ID NO: 37876 - DNA, 394 bp, Gossypium hirsutum
  unsure (1)..(394): unsure at all n locations; Clone ID: LIB3165-022-P1-K1-E9
ctcaaaccccattacttgcaccctcttttaatttactgcccaaccagaaaaaccggggccggtcttaatccataaatgggctgcgcacatacacancaagggctagcaccattagctatctctatggcactcaatttttctccagttctatacactgccaatgcaattgcatccgaatttgatgtgataaatcatggaccaccaaacgaatcttatgtagatgatgatactaatgcacttagtccagtgacaaaatctgatttgaagcgccttttgtctgatttggagtcaacgaagaacttacacatcaattttattactgttagaaagctcactagcaaagctgatgcttttgagtatgctgaccaagttctggagcgttggtatcctacac

SEQ ID NO: 37877 - DNA, 415 bp, Gossypium hirsutum
  Clone ID: LIB3165-022-P1-K1-F1
cgagaaggaagcagtgaatgtatcccttggaatcctgtttagttatccatttgtgagagagggatgtgtgaataaaaccctgggaatcaagggcggttactatgacttcgttaaaggaagtttcgagctatggagtcttcagttccaactttcaagctctctctctgtatgaaaacacaccaaaccatcaccattgacaccatctttgttccttaactaccaatcctttttcttacaatgtactatgttcatgtctttatcgtctattacaataaatatagatgatagagatcacctgccgcccgccgtctgcggtggtggctgcggtggctctttccatctataaattctcctttgaagaggtgttcattattcggttttaattgaattaatcggtagaaatttacttcggttc

SEQ ID NO: 37878 - DNA, 261 bp, Gossypium hirsutum
  unsure (1)..(261): unsure at all n locations; Clone ID: LIB3165-022-P1-K1-F10
ttcaattcctcatttcaagggagagagtgtatcagtgtttcttcccctctttacggaatgtctctccgccatggctctctccgtcnagaaaaccgcccgcggcccggagtacaagggcaaagacatgtcttaagctgacttcggtcgtctcgagatcgagttagctgaggttgaaatgcctggtttaatggcttgtagaaccgagttcggccctgcccaacctttcaaaggagccaaaattactggttctcttcacatgac

SEQ ID NO: 37879 - DNA, 262 bp, Gossypium hirsutum
  Clone ID: LIB3165-022-P1-K1-F11
ctgaattggctaaaaacttcatccatctatatatttattatggatacaacccagagggacggggccaattgctaccttatctgtccattctttaggctatagacgccaaaaggatcctcctttgtcaattaaatcttatcttgtatcaaaacccacaaaaaccgcacatcactttagcctggaaaactaaccgagagaggcctctttcgcatatagcctaaatgagcatggaagcatgcattggactaatggcacaaagctt

SEQ ID NO: 37880 - DNA, 419 bp, Gossypium hirsutum
  Clone ID: LIB3165-022-P1-K1-F12
agagtccaagctggcaaagatatttttgttaataaattgacattgcaacaggcgagggacgcgagagatgcattggcaaaattcatctatgcaagcttgtttgactggcttgtggaacaaatcaacaagtcacttggagttcataaaaaatacataggcaggtccataagcatccttgacatttatgggtttgaatcatttaagaaaaatagctttgaacagttttgtataaattatgcaaatgagaggctgcaacaacacttcaaccggtatctatttaagcttgggcaagaggagtatgggttggatgggattgattggaccaaagttgattttgaagacaaccaagagtgcttggacttatttgagaagaaaccattggggatattttctttgttggatgaggaatcaaaatttcc

SEQ ID NO: 37881 - DNA, 417 bp, Gossypium hirsutum
  Clone ID: LIB3165-022-P1-K1-F2
gggaccattgcacccattgccatcggcttcattgttggtgccaacatcttggccgctggggcatggtctggtggatccatgaacccagctcgctccttcggaccagcagtggctagtggcgacttcaacggcatatggatctactgggtgggaccactgatcggtggcggattgtctggtctcatctatggaaatgtgttcatgaactctgaccatgcaccattgtccaatgacttttaatcaagttattctcaggacagtctaatttgcttaatttgatcttttaatccattgcttagtgtaataaaatggcacttcttgttgttctttcctcttttagctttgggtttggttttgttttgttattgtttgtaaagttattgtcgccaatcgttgctatcgtggaaatgaatgagg

SEQ ID NO: 37882 - DNA, 329 bp, Gossypium hirsutum
  Clone ID: LIB3165-022-P1-K1-F3
gaacaacacacttaaaaacacttgtgatgatttttttatcgagtacttcaacagcctatggccaggggagagaaccatggtgtaaacactcattatacacctccagaacgactcacgctcgactgccttatcatacccgacgaccgcatcatgaaggatgactgttcacccaccaagctaaataggatcaaggaatgcacacttatttatagcaaccgcaatgatcccgttgatgacctagataagctaggtgacaccttcccgggccaatacattgactctcatggtgctctgaaagccatagttcacaatgactataataacaaatg

SEQ ID NO: 37883 - DNA, 288 bp, Gossypium hirsutum
  Clone ID: LIB3165-022-P1-K1-F4
cgaaatcgtgatgaccttcggattggtgtacacagtgttcgccacagccgttgatcccaggaacgcatgcttgggaacaatcgcaccattggcaattggtttcatcgtgggggccaacattttggcaggaggtgccttcgatggagcctcaatgaacccagctgtttcattcggaccagccttggttagctggacatgggacaaccactggatctactgggtcggaccccttatcggtggtgggctcgctggtctcatctacgagttcatctttatcagcaacaccca

SEQ ID NO: 37884 - DNA, 422 bp, Gossypium hirsutum
  Clone ID: LIB3165-022-P1-K1-F6
ctaacttctacattaggcaagaagctcctaaggtttgagagagatggcttcaaaaagatcggcgatcggttgccctcttttttgcactcaacattctcttcttttcacttgtcagtgctaattgttcttgcccttcccccaagccaaaaccaaaccccactccctccccaactcctgctgcggaaggaaagtgccccataaatacccttaaactaggtgtatgtgctgaggtgcttggtttagtcaatgtaactgttgggtcacccccagttcaaccttgctgcacccttatcaaaagccttgctgatcttgaagctgctgtttgcctttgcacagcgatcaaaggcaacattttgggtatcaatcttaatatcccagtttccctcagcttgcttctaaatgtctgctcaaaaaaagttcca

SEQ ID NO: 37885 - DNA, 376 bp, Gossypium hirsutum
  Clone ID: LIB3165-022-P1-K1-F8
aaaaaccctgattctattccctttgttttcaccgatcaaaatccccttctcatagatttgctctcttgatggaagagacgcgatgtgcaatttgactgttccaatttccttttcaacgttcaattaaaaccctagcctcttccttttgcttctatcggggggggggggaaggaatcatgtctttcgatctcatatgctgaagccgtcctgcagctgctttggatcctcccaagatctgtacggctgaggaccaaaagaagaaagatgatgaggatttggaatcatttcaacttttaccgtattccccgaagcttttgaatgatgctattcacgtctttgctcgcctttgcgattgctcttctcagcctcttctcac

SEQ ID NO: 37886 - DNA, 413 bp, Gossypium hirsutum
  Clone ID: LIB3165-022-P1-K1-F9
cccacgcgtccgcccacgcgtccgaactactattactaccattatggcttcggctgctggttctgtttccaaacccaaccttcagattcaggcaaaaggaaagggtgttggttttgcagatttctcaggcctacacaactcctctactagccttccctttgccaggaaaacctctgatgacttccattcactcgttgcttttcagacatctgctctaggaagcaataatggcgggtacaggaaagggatggcagaggcaaagctaaaggtggctataaatgggtttggtaggattggcaggaatttcttaagatgctggcatggccgtaaggactccccacttgatgtcattgccatcaatgacactggtggtgttaagcaagcttttcaccttctcaaatatgattccaccc

SEQ ID NO: 37887 - DNA, 417 bp, Gossypium hirsutum
  Clone ID: LIB3165-022-P1-K1-G1
gcagagtgggcagcctgaggatcttcataagacaaaactgctggcggtttctttcacaatgatgggatgagaggctatacaatcggagtggctatggcagagaagactgcgcccaaagtatatgatcatggaggtggtaaaggtggctacggaggtggtggcgacaggcgcagggatagttacagagatggtggttctggtccagataggcatcaccatggcggaaatcgttcgcgcccatactgagaggctctcagcttcaagtattttatgcactaagaatgtggtctaagggttctagttgtgttgtattgaagggagtgttcttgaacaggagactaagaagtaggttgttcacttgtctgggcaataccccttttttctccttttcctcctttgtctagtgttagcctgggg

SEQ ID NO: 37888 - DNA, 421 bp, Gossypium hirsutum
  Clone ID: LIB3165-022-P1-K1-G10
cggacgcgtgggcggacgcgtgggctgtcgcgtgggcgggactctcagactactggttcgagaccagctccaccatcacccccaaaaaacaaagcaaattgtagaagatggcaacacaagcacttgtatcatcgtctcttacctactcagtggagactgcaaggcagattcttggagctaaacgacaaattgggccttcaaggaaaggatcctttgttgttaaggcagcttcgactccacccgttaagcaaggagctgatagacctttatggtttgcatctaaacaaagcctttcatacttggatggcagccttccaagtgattatggatttgaccccttgggactctcagaccctgaaggtccaggagggttcatcgagcctaaatggctagcctacggtgagatcatcaacgggcgtta

SEQ ID NO: 37889 - DNA, 422 bp, Gossypium hirsutum
  Clone ID: LIB3165-022-P1-K1-G11
ctcaaatatctcatacaaggaattaaattgaatcaatggctcaaaccatgttgctcatgtctagccatgcggtgagcttgaagagagatcaccctttactccatttccaagctcaagggctcaagcctaaacctgtctctcatctcttcttcaatccattgtctaacggtgtccatacttcatccaaagctttcaccactttagctatctttaaatcaaagaccaaagcagctcccaagagggttgagccaaagtcaaagccaaaggttgaagatgggatctttggcacctctggagggattggttttaccaagcaaaatgagctctttgtgggacgtgttgccatgcttggttttgctgcatcattgctaggcgaagcaataacagggaaaggaatcctagcacagctgaatttggagact

SEQ ID NO: 37890 - DNA, 414 bp, Gossypium hirsutum
  Clone ID: LIB3165-022-P1-K1-G12
attccccaaaatttgtttcagtaatggctgccttagttatggcttcttcagttaccgtcaagccttcattcaatgttgagaaacctggtgtaagaggggttccttcccttgctaggtccccttcttctttcaaggttgaagccagtggtggcaagaagatcaagaccgacaagccttacggaatcaatggtggtatgagcttgagggatggtgttgatgcctctggaaggaagggtaagggaaagggtgtttaccaatatgttgacaaatatggtgctaacgtcgatgggtacagtcctatctacaacaccaacgactggtctcccagtggtgatgtttatgttggcggtactaccggattggcaatctgggcggttaccctagctggaattcttgccggtggtgcactttttg

SEQ ID NO: 37891 - DNA, 345 bp, Gossypium hirsutum
  Clone ID: LIB3165-022-P1-K1-G2
aaaaaaagaagtggggctttgaaattctctcctttctcagtctccgacctggctccggtgcggcggaccaccgtcatcgccgtcgtgccggcaaccgtaaacggtggccggaaatcgcccctaggagcgcaacttggacgacggtggggcgatgctgcaggcgtcggtggatgggacaggggtcagaggctgaacggctagggttttaggttttctttcatttttctttttctattttgtgtttgggccatgtgggttgtttagtgggtatttaggggttagtgggctatatttgagccccaaaattgggctgggcatagggtatatacgaatatcattctatat

SEQ ID NO: 37892 - DNA, 418 bp, Gossypium hirsutum
  Clone ID: LIB3165-022-P1-K1-G3
cgtgtgccccgacgacgtatacatcgttgaccaagctgaggaagaaggcattgatcttccgttctcgtgtagggctgggtcttgttcttcgtgtgccggagtgattaagcaaggctccgtcgatcaatccgacggtaatttccttgatgatgaccagattgctgcaggttttgtcctcacttgtgttgcttaccctcagagtgatgttgttattgagacccacaaggaggaacagcttaccgcttgattatatatgatactatataatataatcatcaactagaccaagatttaatcatctttttcctgtctgtttgatttatgtttgttcagtttggtcggagggatgatgttcatgtccctgtttgtgggagcctttaatgagttcatttgtaatggcatttcatgctttattttt

SEQ ID NO: 37893 - DNA, 258 bp, Gossypium hirsutum
  Clone ID: LIB3165-022-P1-K1-G4
cccacgcgtccgctatggcaaagcagcacaacatgttggggttccagttcccgaagggtgcgctgagccaaatgctgataactttgatccaacggctagaagtgatgatggaacttgcacttacaaattctagacctcgtattatagtagtattgggttgaaaaagaaaaccctttttctattttatgtaatgatgtgagattgttccaaaactatcgtttgccttttgttgttccaattatatgattttgctttctc

SEQ ID NO: 37894 - DNA, 440 bp, Gossypium hirsutum
  unsure (1)..(440): unsure at all n locations; Clone ID: LIB3165-022-P1-K1-G5
gttcttaaggtttcgtcctcgtattctcattgatgtaaacaagatagacatgaccacaactgtgttgggtttcaagagatcaatgcctatcatgattgccccaactgccatgcaaaaaatggctcatcctgaaggggagtatgcaacagctagggctgcatctgctgctggaactatcatgacattatcctcatgggcaacttctagtgttgaggaggttgcttcgacaggacccggcattcggtttttccaactctatgtatacaaggacaggaatgtagttgcacagctcgttagaagagccgaaagggctggtttcaaggcaattgcccttacggttgatactccgagactcggtcgcagagaagctgatatcaagaacaggttcactttaccaccatttttgacattgaagaacnttgaagtttggaccttggcaa

SEQ ID NO: 37895 - DNA, 56 bp, Gossypium hirsutum
  Clone ID: LIB3165-022-P1-K1-G6
ccaggattgaagagataagattatagtgaaaatctaatcataataaagccccttcg

SEQ ID NO: 37896 - DNA, 383 bp, Gossypium hirsutum
  Clone ID: LIB3165-022-P1-K1-G7
cttccaaaatcaattgcttcacaatggcctttttaacttttgctctttcttccccaacacgcgcgggttaagtaattaaattcttcccttccacccctgaaatcccgggaacttgccctgttttcattaagaaaaccaccaaacctgttccttctggtagcccattggaccggccttacccaattttggactttggttcaattttccgtgaaccaacattttacttgacccgtgaattccctggtgactattggtgggacacttcttgacttttaacttatccccaaacctttgcttagaaccctgagcttggagtcattcacttcaaattggccatgttgggagctcttgggtgtgtttttccttaacttgtggctaagaac

SEQ ID NO: 37897 - DNA, 414 bp, Gossypium hirsutum
  Clone ID: LIB3165-022-P1-K1-G8
cccacgcgtccgcttttgggcaatcaattttgtaagcaagtatggctaaggacggggaggttggtggtgagttccaagccaaggactaccatgatcctccaccagctccattagtggacggggaggagttgacaaagtggtcattttatagggctgtaatagccgagtttattgccacgctcttatttttatacatcactgtgttgacagtgatcggatacaagagtcaggttgaccctgataagggcagtgacgaatgcggtggtgttggcattcttggcattgcttgggcttttggtgggatgatctttatccttgtttactgcactgctggtatctctggaggacacatcaacccagcagtgacctttgggcttttcttggctaggaaggtgtccttagttcgagccatat

SEQ ID NO: 37898 - DNA, 415 bp, Gossypium hirsutum
  Clone ID: LIB3165-022-P1-K1-G9
gacggcttccatcaacggttggtgccttacctcctcttcttcctccaccaccacgtcctggttttccgctcgtcgacgacctacattgcggccttcggtcgtcgctagccttaactcttctccttctcctccgactcttatccaagaccgcccggttttcgctgcccctgttcctttgctcaccccgagagaagagatgggaaacaagtcctacgacgaagccattgaagctctcaagaaacttctcagtgagaaaggagaactgaaagctgaagcagctgcaagggtagatcaaataacagcagagttaaacacaacatcagctgacggcaaaccatctgactcttctgttgagagactgaaagaaggcttcgtttacttcaagaaagaaaaatatgaaaagaatcctgctctg

SEQ ID NO: 37899 - DNA, 423 bp, Gossypium hirsutum
  Clone ID: LIB3165-022-P1-K1-H1
gactggtaataaaagactccacgctgacgctccctcccttcctttcctctatctaacgggtggcttctcttagctgcctttcgattcttggattgagttgttaaggcactagaaaccatcgtttctgaatctaattcaaacccatatttgttgaggattcgatcgttctgagtttgggatttttcccaggtaaaggaaacaatctgtggttcgaaaagccagaatagaatatgagtacaagtacggccacgtccggtacatgtttgatcatatgctccaatggaaaatcatctctcgaagccaaaacctccacgatgattacgttgaaatcgtcgtcgtttccttcccgtttaaccgccgtttctataaaggcgaggacgagagttgtttcctgccgagctgtctccaccgcttccgtcgaca

SEQ ID NO: 37900 - DNA, 272 bp, Gossypium hirsutum
  Clone ID: LIB3165-022-P1-K1-H10
ataacacaaagctctgaaaatgcacattcatgttctctgcttatttgctcaagagggcacgcggtttatacaagactgaaagggtctaaggttacaccttctgtcaacatgacattacctagtagaggcaccaccctgtggcacaatgccgactaactgtgccagcatgctcatatttccatacgctcacaaagtatattaaacctattggtcgtcctagccattgaatatgccccatagctgattacaaccctaccagctgtaaactcttc

SEQ ID NO: 37901 - DNA, 417 bp, Gossypium hirsutum
  unsure (1)..(417): unsure at all n locations; Clone ID: LIB3165-022-P1-K1-H11
cccacgcgtccgggcgatgatgctcctggagagacttggcacatggtcttcagcaccggaggagaggtcccctacagagaagggcaatccattggggtgattccagatggcgttgacaagaacggaaaaccacacaagctgagattgtactctattgctagcagtgctcttggtgattttggggactccaaaactgtatccctatgtgtgaaacgactggtatacaccaacgagaaaggagagcttgtcaaaggagtctgctccaatttcttgtgtgactngaaactctgggcggaagttaaaataactggacctgttggaaaagaaatgcttatgccaaaggatcccaatgccacaatcatcatgctcgctactggaactggaatcgctccctttcgatcatttctgtggaaaatg

SEQ ID NO: 37902 - DNA, 175 bp, Gossypium hirsutum
  Clone ID: LIB3165-022-P1-K1-H12
ggaattcgggattccaggccacgacccacgcgtgccattatttctttatccaaacagagaaaagacccatggaagccaacttaccggaaacctgaagcgatggcgtttcgtttgagcaacaacttagttggaatcctcaacttgattaccttcctcctctcgatccccattcttg

SEQ ID NO: 37903 - DNA, 421 bp, Gossypium hirsutum
  Clone ID: LIB3165-022-P1-K1-H3
cccacgcgtccggtatgcggtaacaagagaaaaagatggtgaggcatctacaaagaaatcgctaaccttgcttcttctagccaagcaattggtgatagcaatggtggtgatagatacatggtcgttttttgtacattggtacttgcatcagaacaagtttttatacaaacaccttcatgttccgcatcaccggctggttgttccctattcatttggaggacagtatatgcatccaattgaggggttcttggacaccatgggcggaacattagctgtactcctcttcggcatgtctcctcggactgccatgtttgtctactgctttaccatccttaaattagtggatgatcattgcgggatgaagcttcccggaaaccccttttacctctattctaacaacaatgcggcataccatgatgtc

SEQ ID NO: 37904 - DNA, 401 bp, Gossypium hirsutum
  Clone ID: LIB3165-022-P1-K1-H6
cgcccacgcgtgccattatttctttatccaagcagagacacgacagtgcaatgcatgcaggtgtggcctgctacgtggaaagaagaagttcgagactctctcatacctccccgatcttacacccgtgcagttggctaaggaagtggattaccttcttcgctcaaaatgggttccttgcttggaattcgaattagaggacggattcgtgcaccgtaaatactcgagcctacccacgtactacgatggacgctactggaccatgtggaagctgcctatgttcgggtgcaccgactcggctcaggtattgaaggagcttgaggaatgcaagaaggaataccccaatgcattcattagaatcattggcttcgacaacgtgcgtcaagtgcagtgcattagtttca

SEQ ID NO: 37905 - DNA, 419 bp, Gossypium hirsutum
  Clone ID: LIB3165-022-P1-K1-H7
cccacgcgtccgcccacgcgtccggttagctatagcatacactactagtacccactactagcaatggcttcctcaatgatctcatcgctaccattgccactgcctctccggcacaggctaacatggtcgctcctttcaccggcctcaagtctgcctctgctttcccagtcatcaggaaggccaacaacgacattacttctctcgcaagcaatggcggcagagtgcaatgcatgcaggtgtggcctcctactggaaagaagaagttcgagactctctcatacctccccgatcttacacccgtgcagttggctaaggaagtagattaccttcttcgctcaaaatgggttccttgcttggaattcgaattagaggagggattcgtgcaccgtaaatactcgagcctacccacgtactacgat

SEQ ID NO: 37906 - DNA, 409 bp, Gossypium hirsutum
  Clone ID: LIB3165-022-P1-K1-H8
gttcttgccactttgtagtttgagattctccttttgttctttgaaaccccaaacttagcgccaaaacttttagtttagaagtggaatcaaaataagaattcatccggttcttctctttgatgtgttattggtgccaagcagcagttgttggaaatggttgggtgatttaacttattcataataacagtgctattggttaaatacggaggtactttatcagaaaggttttgcagtgctctgttgttgtctgttgactcgtaggattaaataaaagaaacttctgcaatgcaaacgtctcagaaacataaaattacaggcaagtgcattgactggcccgtgcaagagctggagtcctattgttgtcctccaaaccagagcttagagccatgccagtcaggttctgatgatg

SEQ ID NO: 37907 - DNA, 419 bp, Gossypium hirsutum
  Clone ID: LIB3165-023-P1-K1-A1
aattgggggagaggaaatacttcaggggatggtataatatagggccagttggtcctatggggaatagggctggtggaatgggtcgtagaggtatcatgggaaatgggggaaatggatttgggcagggcatgggtgcaacaccttctcccatgcacccacagtcgatgatgggtcaaggtttcgatcctgcttttggtggacccatgggaagaatgggcggttatggaggttttcccggtgctccaacgccaccattttcagggattttaccttcatttcctcctgttggaggagttggtttgcctggagtggctcctcatgttaaccctgcattttttggaagaggtatgcctatgaatggtatggggatgatgccctcgagtggtgtagatggacctaatatgggaatgtggtcagat

SEQ ID NO: 37908 - DNA, 157 bp, Gossypium hirsutum
  Clone ID: LIB3165-023-P1-K1-A10
acacactcgtaccaaacaaacttgcaatttttttatgggctatacatataacttaggggggttcacaatcaacaccactttcatacaccctactaaataccaaaactctgtaatctccaaatctctgcatccacacaatgtggcactcaaactactc

SEQ ID NO: 37909 - DNA, 425 bp, Gossypium hirsutum
  Clone ID: LIB3165-023-P1-K1-A11
aaaaaaatctaggaaagcatcaagaatggaggcattgaggatggaagtattttgggtgaggctgattgtgttggttgccgtatttaaggtccaaaatgtggcggcagctgaagctccggcccctagtcccacctccgatgccacaatcttcgtgccgacggtgcttgcttcccttgttgctcttgcatttgggcttcttttttaaaatgctggtgttttatgagacctataatattttttaaaattcttttttattttctacttgtgactacagttcaatgtattcatatttttgttattgttgtagtttcagtatgtaattgttgtgatttgtttcctagtgacctaataaattatttgttttcttttcatatacaagtattggatgaaaatatttgttgtatttattatctaattttcataaa

SEQ ID NO: 37910 - DNA, 419 bp, Gossypium hirsutum
  Clone ID: LIB3165-023-P1-K1-A12
caacgacatcacttctcttgcaagcaatggttggagagtgcaatgcatgcaggtgtggcctcctcttgggaagaagaagttcgagacactctcatacctccccgatcttacacccgtacagttggctaaggaagtagattaccttcttcgctctaaatggattccttgcttggaattcgaattagaggagggattcgtgcaccgtaagtactcgagcttacccacgtactacgatggacgctactggaccatgtggaaactgcccatgtttgggtgcactgactcggctcaggtgttggaggagcttgagaattgcaagaaggaataccccaatgcattcattagaatcattgggttcgacaacgttcgtcaagtgcagtgcattagtttcattgcctacaagcctaaaagctactaag

SEQ ID NO: 37911 - DNA, 436 bp, Gossypium hirsutum
  unsure (1)..(436): unsure at all n locations; Clone ID: LIB3165-023-P1-K1-A2
cccacgcgtccgagagtctgcgcccctttcttagagttaccacagacggacatggcttgaatgagcatgacagcctctctccttccgagctcaagctccagtttgactagacttcctttcgagagctgctcgcagaggtgcgattgtggccaaggcgaccagcgccgaccaaggagacaaggccagcttggaaataatgaagcaagagggcagcaatgggaggagggaattgatctttgccgctgctgccgctgccgcttgctctgttgcaaatgttgcgatgggcgaagaagagcctaaacgtgggacggctgaagctaagaaaaaatatgctcctgtttgtgtcacaatgcctactgctagaatctgtcggaactgaaccttagtttctctgtatctaatgtggatntgtatgtgagattcatgtactgagttg

SEQ ID NO: 37912 - DNA, 434 bp, Gossypium hirsutum
  Clone ID: LIB3165-023-P1-K1-A3
ccccctcattctgagaaccctcatatggatactactcctcctcttgataacccggatggcatgggtagttcacacatagatattcaacaagatctcaactctcatatggatactccccctcatactgaaaaccctaatgatatgggcagtccacatatagatattcatcaagatctgtttccagattactatggtggaacagcttctgctccggctccggcttctgccctggattctgctccgtctgagccaaaacttgaatttgagggaaatgataaccataatggaaataatgatagtgctcctgtaattaaagataataattcccctccaccagttccacctggtagtagtggggaaggattaccttatgccccacccccagctgaaactgaagatacgaatagcggtcttgatttgtctttcttagacaa

SEQ ID NO: 37913 - DNA, 372 bp, Gossypium hirsutum
  Clone ID: LIB3165-023-P1-K1-A4
ccaacccttccgaccaaaataagttgcttaatattttcctttacaaccatggttttttggtgccattaattcgccggtagggcagtaaagttttccctttccacccttgaaatccggggaactggccgggtttccatgaggaaaaccaccaagcctgttctttttggtagccaatggaccggccctgaccgagttttgactttgggtcacttttccggggggcacccatctacttggaccgggagttcctggggactatggtgggacactgctggactcttagctgatcccggacctttgctagaacccggagctcaagtcatcactgcagatgggccatgttgggagcctcttggtgtgttttccctgagc

SEQ ID NO: 37914 - DNA, 432 bp, Gossypium hirsutum
  unsure (1)..(432): unsure at all n locations; Clone ID: LIB3165-023-P1-K1-A5
acccgtccgcccacccgtccggcgagaagagatcttcaccctaaaaaaataactttaaattcctcctgggcgttcttttttaaacctactgtttaattcctaaaaactaaattttcctggtaataataatacctataattaatcaatgatggaaaagtaaaaacccctgcctccttaataagtaatccgatattagccgtctgattcttttcccccagaatcagtaacccatttatctggaaaaaaaaggacggaaattccgattttatcttgaggaaattgaagaaaaaaaagggaaaattcattgtaagtatgcgaagttgggtgatggattcaggcaacggagcaactacttctcaacaaatgggatcgtgaccgaagatcttcgtgagagacatcaacangaattagaaaacttgacattaacaacac

SEQ ID NO: 37915 - DNA, 395 bp, Gossypium hirsutum
  unsure (1)..(395): unsure at all n locations; Clone ID: LIB3165-023-P1-K1-A6
ctcaaaacccattacttgtaccctcaagaaactaatttcccaatcagtaaaaccatctggggcggaaccaaaaaatgggttggttaatgcacagcagggcctagcaccataagctatctttttggcactcaatttttctccagttctatacactggcaaatgcatttgcatcgggaattggatgtgataaatgagggccccccaaaggaatcttatgtaggtgatgatgctaatgtgcttagtcgagtgacaaaatctgatttgaagcgccttttgtctgatttggagtcaaggaagaaccttncacatcaattttattactgttagaaagctcactagcaaagctgatgcttttgagtatgctgaccaagttcttgagcgttggtatcctacac

SEQ ID NO: 37916 - DNA, 370 bp, Gossypium hirsutum
  Clone ID: LIB3165-023-P1-K1-A7
cccacgcgtccgaagacctcaaaattatcatttaaaacgtttctcttatatttccctcgcggaaaaccgagagaaaaaaatccatgttcttgtcgaacataagacaaagtgctgaatttcccggtggaaaccgtccatttttttccggtcccacgaggattttccgccccatgttgcggctgagaagctgaaaaccgcattatcggagctgctagtgccgtatgatttcttagccggaaggttgaggtcgaacccggaaacaggtcggctggaaatcgactgtaactcggccggaatcggtttcgcggtggcttcaagcgattatgcgttggatgatgttggagacttgatttatcctaatccagcattt

SEQ ID NO: 37917 - DNA, 267 bp, Gossypium hirsutum
  Clone ID: LIB3165-023-P1-K1-A8
gtaccggccgcacaggccgcccaacctacccgttttttttttcctaacctttaaagaggattaattattaattaaattaagcgggaggtctgggtcaagtcttctttcttcaaccaccacaggtttctctctatttcaattaataccttttctttctttcttgctaaacacacatttttaccgtttccaatttattattattaataattttcggttttgagtttccaattggtggattggttgagtaattggttagaacttagtacc

SEQ ID NO: 37918 - DNA, 441 bp, Gossypium hirsutum
  Clone ID: LIB3165-023-P1-K1-A9
cccacgcgtccgcaaattcagttaacaatttcacagtggttttcttcagtctctctctgagggcggggctgcagccatctccaccgtcgctgccgctgccgccgccaaccgagctctgggagtgtcagtcccaacctcagctttcatggggaagaaagtgagctcaagattcaacagcaccaggcaggttccttcgggaagttttaaggtgatggcggcggagaaagagatagacgaagagacacagaccgaaaaggaccgatggaaagggttggcttacgatatttcggacgaccaacaggacattactcgagggaaagggatggtggattccttgttccaagctcccatgaatgatggaactcactatgctgtcatgagttcctatgaatacctcagccaaggtcttaaaacgtacaatttggacaacaacatggatgg

SEQ ID NO: 37919 - DNA, 423 bp, Gossypium hirsutum
  Clone ID: LIB3165-023-P1-K1-B1
cccacgcgtccgaaattaataaaatcttgatttagttgctctgcttttgcttcggtgagactgagttccaagcaaaacccctttttgtttttcgtctgattcagctaaggtcttctttgggtagtttgagatttgagttattcatcatactatggcttctcaaccttctaagggatcagttcatgatttcactgttaaggatgcaagagggaatgatgttgatttaagtatttacaagggcaaggttttgttgattgccaatgttgcatcacaatgtggcttgaccaattccaactacactgagctgagtaaattgtatgagcaatataaagatcaaggttttgagattcttgcattcccatgtaaccagattggaggacaggagccagggaacaatgagcaaatcttagagtttgcttgcac

SEQ ID NO: 37920 - DNA, 426 bp, Gossypium hirsutum
  Clone ID: LIB3165-023-P1-K1-B10
atctactcctcacctcacctttctccttcgctgtatggccacttccgccgctggcggtgccattaacccatccaacactcgccttggatggattgggactggcgtcatgggtcgatccatgtgtgctcatctgatcaacgctggctactctctcaccgtcttcaaccgtaccctttccaaagcccaacccctcgttgacatgggtgcccgcctagcccaaacacctcacgacctcgctgcccaatccgatgtcgttttctccatcgtcggttacccttccgacgtcctccaggtcctactcgatccctttaacggagccctctctggcctccgtcccggcggcatactcgttgacatgacaacatcggagccttctctcgccgtcgaaatatccaccgccgcatcttccaagaactgctcctcaat

SEQ ID NO: 37921 - DNA, 421 bp, Gossypium hirsutum
  Clone ID: LIB3165-023-P1-K1-B11
cccacgcgtccgaattccccaaaatttgttttattaatggctgcctcagttatggctggttcagttaccctcaagccttcattcaatgttgagaaacctggtgtaagaggggttccttcccttgctaggtccccttcttctttcaaggttgaagccagtggtggcaagaagatcaagaccgacaagccttacggaatcaatggtggtatgagcttgagggatggtgttgatgcctctggaaggaagggtaagggaaagggtgtttaccaatatgttgacaaatatggtgctaacgtcgatgggtacagtcctatctacaacaccaacgactggtctcccagtggtgatgtttatgttggcggtactaccggattggcaatctgggcgggtaccctagctggaatttcttgccgtggtgcac

SEQ ID NO: 37922 - DNA, 312 bp, Gossypium hirsutum
  Clone ID: LIB3165-023-P1-K1-B2
cccactcgtaccaactaaaattccaatttttttatggcctccacaactaaagaggagggggtcctatatagcaccttttacctacataggaacacagacagaaaaacagtaatctccgtaacttctcacaccgattaaattagagcaaatcacaccccaacgaaatggctcgctcaccatgtcagcatacacaccgacactcataacaccgatactaccacaaaaatccttctgctcactcgactcttacattatttacaaactttaggaagcacacatatactctcagatcttatacatagatacgtcttg

SEQ ID NO: 37923 - DNA, 430 bp, Gossypium hirsutum
  Clone ID: LIB3165-023-P1-K1-B3
acacaacataagttattctggtttttggtggttgcggcggcggcggcggcggggtttgggttccaatgcttaccttgattgttggatttgataccaaatctgccgctgctatttccaaatgcatgatcatgggggcatcagcatcgtcagtttggtataatcttagagtgccgcatcccacaaaggaagtgccaatcattgactacgatttggctcttcttttccagcctatgttgatgcttggcatcactgttggggtttgccttgagcgtcgttttcccttattggctcattactgtgctcatcatcatactcttcttaggtacgtcttcaaggtctttctataggggtattgaaatgtggaaagaagagacaattttgaataaagaactcaccaagccacaagaatcttttgtttattccaggggtg

SEQ ID NO: 37924 - DNA, 380 bp, Gossypium hirsutum
  unsure (1)..(380): unsure at all n locations; Clone ID: LIB3165-023-P1-K1-B4
ggcaaccaaagccctccctcttaactccatcaatcttttgcaccccaaaatccggcgaggggggggccgccgggtaacggaaccacccaccgttcttaaccgtccttagcttaaagtccccaaaaggcatcatcgccccacgcaccatcaaagcccaagcaaccgaagagaaagccgagacacccgccacaaaggaggcaccagtcggtttccccccaccagagctggacccaaacaccccatcaccgatcttcggcggagcaccggcgggcttttacgcanagcacaattggaagagnttacgtcatcacatgggagtacccaaggacanatcttgagatgcaacggtgggcagcatatgagcaggccgacctgtgaat

SEQ ID NO: 37925 - DNA, 431 bp, Gossypium hirsutum
  Clone ID: LIB3165-023-P1-K1-B5
cgtccgcccacgcgtccgtttggatctgggcatggccttattttcggcatatgagcattcacatggggcgggatttcggatccggccgtaaatcaaaatttgagcagcctccgccgcctgagtttggaactgggtatcgacggagacccgaatttgagcagcctccgcctcctgaatttgaatctgggtatggccggagacccgaatatggcgaacaagagtccgagttcggatctgagtatggcagcaaaccagagcacggagaatatggatccgaatatgggaggagacccaactatggggaacccgaatctgaataccgatctgggtttggccgaaaggcagagtatgaaggatgcggatccgaatatggaaccggatacggacggaggactgagggcgagtatggatcgggttaatgaggtaggaca

SEQ ID NO: 37926 - DNA, 419 bp, Gossypium hirsutum
  Clone ID: LIB3165-023-P1-K1-B6
cccacgcgtccgtttccggtgagccaccatcttacttgaccggtgagttccctggtgagtagggttggtacactgctggactctcagctgatcccgagacctttgctaggaaccgtgagctcgaagtcattcactgcagatgggccatgttgggagctcttgggtgtgttttccctgagctgttggctaggaacggtgtcaagttcggtgaagctgtatggttcaaggccgggtctcaaatcttcagtgagggtggacttgactacttgggtaacccaagcttgatccatgctcaaagcattttggccatctgggcttgccaagttatcttgatgggagccgtcgagggttaccgtattgccggtggaccactcggtgaagtgactgacccattgtacccaggtggtagctttgaccca

SEQ ID NO: 37927 - DNA, 54 bp, Gossypium hirsutum
  Clone ID: LIB3165-023-P1-K1-B8
cccacgcgtacgaagggaactttagatttacttacgatttccttatataaagaa

SEQ ID NO: 37928 - DNA, 342 bp, Gossypium hirsutum
  unsure (1)..(342): unsure at all n locations; Clone ID: LIB3165-023-P1-K1-B9
acacaacataagttattctggtncctataaattgtagcngcagcnccaactggggggcgttggtttatgtgggagggccacaccctaacctgtcaaaatctaaagggcctatttccaaatgcatgatcatgggggcatcagcatcgtcagtttggtataatcttagagtgccgcattccacaaaggaagtgccaatcattgactacgatttggctcttcttttccagcctatgttgatgcttggcatcactgttggggttgccttgagccgtcgttttcccttattgcctcagtaacacccccaatattacacttatctgttggaccacgccttaacttttt

SEQ ID NO: 37929 - DNA, 426 bp, Gossypium hirsutum
  Clone ID: LIB3165-023-P1-K1-C1
ctccgttgaaaacaataccgtttgcagccgattaaattgtagttgcagggccaggttagggtggtggcgccatgtcaaactccaagagcttagctgttcagattctaaagggcccatggctcatggttttcggctcactgttgatcatgtctgccgctggtgcaacctacatgtttagtctatactccggcgacattaaagaatcgctcggctatgaccaaaccaccctaaattatctcagtttcttcaaggatttaggcaccaacgttggggtcctttcgggtctcatagccgaggtaacacccccatggttcgtgttatctgttggtgcaggccttaacttctttgggtactttatggattgggttggccgtcaccaaaaggatccccaccaaagtgtggcaaatgtgtttgtatatttgcata

SEQ ID NO: 37930 - DNA, 415 bp, Gossypium hirsutum
  Clone ID: LIB3165-023-P1-K1-C10
ttgaacagcctcaatcaagtacttcaatttttggacatgatgaggaagctgaatgggcggaatacaaaataaaagaaacaaatatgttcactgttgacaaatatcaacagattggctttttccccaatgagagggctttttcattgaggtaccaaaccgccggaatgttagagaccgtgttacggcaaggggtattgggggaagatgacaccggagaggaatcaccaaaaaatgttaagcttccttcttgccagccttctatcgtttgtgaaaattgcctatattcacaagcaaaggatcgacgagcaagggccttccatatcatggaccccaaaggctttgtggatatgcttcttatcttccttgaggatagaggtgatggcccactcgttcatccatcacttggcaatataat

SEQ ID NO: 37931 - DNA, 419 bp, Gossypium hirsutum
  Clone ID: LIB3165-023-P1-K1-C11
atttacttactttccatttttctagattttctcttttattttccttcttttttcgcttcgtttgtttttctttgattttgatcatcaaaaaaggcttctttcataacacaagctttccttcaacttccaaagattcgttctaaaagagggaccaaaaagaaagatggtttgtttgcaaggaccggtgatttgccccgccgttgatagcaagcaagttggggtttatacgctgccgtttaatgggccttttccgaggtctagattgcatcagagtgatatatggggatataggagggatagttgatggaaaaggtaagccacgtggcatttccggtcacctgaaacggcggaggaggtttaacaccacggtgcaatgtatttttagttcatcttccgatgggaatggaagtatggctgag

SEQ ID NO: 37932 - DNA, 402 bp, Gossypium hirsutum
  Clone ID: LIB3165-023-P1-K1-C12
gagaaagcactgaaaaagcaaaaccatggcctctgcttctctcctcaagacttcaccagttttagacaagtctgagtgggttaagggtcacacccttcgccaacctccacttctgtggtgaggtgccaccctgttgcaccctccggactaactgtgcgtgcaagctcatatgccgatgagcttgtcaagactgctaaagctattgcttctcctggccgtggaattttggccatggatgagtccaacgctacctgtgggaaacgtttggcctcaatcgggctagaaaacacggaggctaaccgccaagcctacaggacgttgcttgtttcagctccctggccttggcagtacatctcaagtgccatcctctttgaggaaaccctctatcaaaccacaattgat

SEQ ID NO: 37933 - DNA, 399 bp, Gossypium hirsutum
  Clone ID: LIB3165-023-P1-K1-C2
cgggggggcgcaggcgtccgtggaattgaaaccctaaaaattccactaaaattttgtcttcaaaggtttccttttcagggggggtggcaacaacttttttcttcgcgggcaccccgccccgaaaaccctaaggttcctttctttcaaccaatcttttttcgggcttaaaccccaacgaaatgggcggctcaacatggctggatacaaaggggcacttgtaacacccggaggaccccaagaattcggggggcccgacgacgtttacatcgttgaccaagctgaggaagaaggcattgatcttccgttctcgggtagggctgggtcttggtcttcgtgtgccggaatgattaagccagggctccgtcgatcaatcccgacgggtaatttccttgatgatga

SEQ ID NO: 37934 - DNA, 331 bp, Gossypium hirsutum
  unsure (1)..(331): unsure at all n locations; Clone ID: LIB3165-023-P1-K1-C3
aaaccttaatcacccttccttttaaccaaatttcttttctncctaaaaccccaacaaaatgcccctcttaccattccttcatacaaaattacacttttaacaccctaaggaccccaaaaatttcttttccccaacatactttacatccttcaccaaacttataaataaagcattgatcttccgttctcgtgtagggcgggggggggctacttctgtcccggaatgattaaccaaggctccgtcgtacaatccgacggtaatttgccttgatgatgaccagattgttgcaggttttgtcctcacttgtgttgctaaccctcagagtgatgtt

SEQ ID NO: 37935 - DNA, 144 bp, Gossypium hirsutum
  Clone ID: LIB3165-023-P1-K1-C4
caaaaaagaaaaaaaaacacggtcaatttcactttatttgtgggggttttatttgcccgggggggggttttttttaaaaaaaatccaccaaaaaggttatttggaaggttaaaggggagagcccccaagtgaaatacaccggga

SEQ ID NO: 37936 - DNA, 123 bp, Gossypium hirsutum
  Clone ID: LIB3165-023-P1-K1-C6
aagagaaggaaaatcagggggaaaattaagttttgattaaatgaaaatggtacctaacagcgtaaatggcctgaggcaaagggtctaacagttcggttttttccttaaataactaaattcctt

SEQ ID NO: 37937 - DNA, 436 bp, Gossypium hirsutum
  Clone ID: LIB3165-023-P1-K1-C7
gttgaaagggctactagagaagcacgttaattagcagcagctgaagctcgtgcgagagctgaaagggcagctgttgaaaaggcatccactgaagcccgagaacgtgcagaaagggctgcagtgcagagagcacaggctgaagcccgcgaaagggcagcagctgaggcaagagaaagagcagaacgagctgctgcagaagcaagagagaggactgctgcaacaaaagctgaagctgaagcaaggcttagagctgaaagagctgctgccgagagggctgctgctgaagctcgagaaagagcagctgcttctgcaagggcgagccagcaaaagaatgacgatgatcttgaatcattctttatgggtttctcgagcaagcagtgcaccaaggccaagagctaactcatcagatcccctgtttgatggacaaaacaaggga

SEQ ID NO: 37938 - DNA, 428 bp, Gossypium hirsutum
  unsure (1)..(428): unsure at all n locations; Clone ID: LIB3165-023-P1-K1-C8
caagcagcaaggttttattgagaggcaggangttgaagcaaatggtagtggctacggtgggtgaatctggcatgaacctttcagatgatgttatagaaagtataattgacaagacctttgaggaagctgatacaaaacatgacgggaggatcgacaaggaagagtggagaagccttgttttgcgacatccatcccttctgaaaaatatgaccctgcaataccttaaggacatcaccacaacgttcccaagctttgttttccactctcaagttgatgatacctgagatcagcaattcgattcaagcttccatagaccggcttgtttcattctaggtggtttcaaatatgaatgccccaagagctagtgtatgtgatattctggtttattggttaaaaacaattcctagtgtgggtctaaattcaacaag

SEQ ID NO: 37939 - DNA, 429 bp, Gossypium hirsutum
  Clone ID: LIB3165-023-P1-K1-C9
gttgcagtcagcctgagttaatgatcataccatatgttctcttagagcattattgttgccccacactgtacagatcaaccaaaaggggattgttgtgggcgtcgtgaatgaatgctatcttgcttgtgggagttcagtgcggggagaggaagaacttcggtagtatatggtgtcagcatttggtctttgtcaatccatccgaaagcattcaacctccaggtgttatagcagttatgtagtcatcatgcttgaaagttgtagattcagattagtttagtttagtttagttttcataatattgtccaaggtttatttgggtggcacgctactcgctgccctttttccatccaattgaacttggtttgttctacgctcgtattcagtgccattacttatcgtactttgggtcaaagtgtattttttatcttc

SEQ ID NO: 37940 - DNA, 264 bp, Gossypium hirsutum
  Clone ID: LIB3165-023-P1-K1-D1
aaaacagaaccattgtgtagattttataacacaaaaatgggggggtgaaattcacttaaaacacaaaaaggaaacaacattcaattaagacacaaaggggggatttcctttgtttgggcccaatatagatttttttcttcccttaaagcttaatttcccaattagaaaggttcttttttggttgcattggcattaggattttcaagggccgctttacttaaatatttggcaagcaaatggaccctttttacaattttttggtta

SEQ ID NO: 37941 - DNA, 399 bp, Gossypium hirsutum
  Clone ID: LIB3165-023-P1-K1-D10
ctgtcctagtctagcgattctcagttagtcttttctttaagcttacattttctctccagagttttataatgggtcaggagaaggttcacatcaacctcgatgtcattggccatgtcgactctggcaagcagaccactactggtcatttgatctacaagcctaagaggtattcgacaagcgtgtgattgacaggatcgcgaacgacgctgttgaaatgaacaaaaggtcattcaagtgtgctcgggtgcttcacaagcttacggctgtgcgtgaacatagtatcaccactgatatatacctgtgcaagcttgcgaccacacaatactattgcgccgttattgatgcacctggacaccgtgactttatcaagaacatgattaccggtacctcacaagctga

SEQ ID NO: 37942 - DNA, 410 bp, Gossypium hirsutum
  Clone ID: LIB3165-023-P1-K1-D11
cccacgcgtccgagagataagagaaagcactttaaaagcaaaaccatggcctctgcttctctcctcaagacttcaccagttttagacaagtctgagtgggttaagggtcacacccttcgccaaccttccacttctgtggtgaggtgccaccctgttgcaccctccggactaactgtgcgtgcaagctcatatgccgatgagcttgtcaagactgctaaagctattgcttctcctggccgtggaattttggccatggatgagtccaacgctacctgtgggaaacgtttggcctcaatcgggctagaaaacacggaggctaaccgccaagcctacaggacgttgcttgtttcagctcctggccttggtcagtacatctcaaggtgccatcctctttgaggaaaccctctatc

SEQ ID NO: 37943 - DNA, 413 bp, Gossypium hirsutum
  Clone ID: LIB3165-023-P1-K1-D12
gcggcgggaaccaacttgaagcgcggctaacaactggttacaagccctcgggcctgttttgtcgccgtttctacccaatttccaaggataaagaagatgattattgcaatgctcctggggttgaaaccagggtccctgaatttggttctaccaactcccttctctaccttaaccctaatctcaagagtctcacggcatacatggcaccgttggtgaagttcctggaagggattggttatgtgagtggtgaaaccatgtttggagctccgtacgactttcgatatggcttagcagctgaaggccacccatcccacgtgggatccaagttcctgcaagacctaaaagatttgatagaaaaagcaagcgcttccaatggagggaaaccggtgattctcctcttccacagcttggga

SEQ ID NO: 37944 - DNA, 379 bp, Gossypium hirsutum
  Clone ID: LIB3165-023-P1-K1-D2
cccacgcgtccgcccacgcgtccgtggctttattcatatcagcattgttaaagcccaggtccgtacctttttaaccttttcaaagagtaacaccaacagccaaacctagacgtttctctggcaaagtcctaaactctggccatccagactcggaattaaatcaaatacagaggaaagcaggagtccttgggattcaagttttgtaactcaattacgtaggaagttgcagcaatgggaaagtgtcggctttgggctaatggggtgtcagttgtagcaaaaagaaccagaccattgatttgaaaaccccagggtagaaattttgttcttctgaatggtggtggtgcaaaaagagggaagggaaggtgttttgggaggggga

SEQ ID NO: 37945 - DNA, 410 bp, Gossypium hirsutum
  Clone ID: LIB3165-023-P1-K1-D4
attgagtttaaacaccgagtcatcatcatttatggttatcgaggcttggtttatgggtgaaggcaaagaagaccaaaggcttcctaatcgacgcaaccccaacgaacctgtttcgttggagcacttggcagagctgggagtgttgtattggcatttgaaccccaaggattacgagaacgatgaagagttgaagaagattagagaagccagaggttataattacatggatttgcttgatttatgccctgagaaagttgacaactatgaggagaaactgaggaacttttacaccgagcacatccatgctgacgaagagatacgctactgcctggaaggcagtgggtatttgatgttagggacaaggatgaccgatgggattcggatttggatcaaaggaggagactattata

SEQ ID NO: 37946 - DNA, 425 bp, Gossypium hirsutum
  Clone ID: LIB3165-023-P1-K1-D5
ccacgcgtccggttctagatcgcgatctagaacacaaaatcatttgtttcacaatggcctctacaaccggggcgctttcttccccatcattcgccggtaaggcagtgaagttctccccttccacccctgaaatccagggaactggccgtgtttccatgaggaaaaccaccaagcctgttccttctggtagcccatggtacggtcctgaccgagttttgtacttgggtccactttccggtgagccaccatcttacttgaccggtgagttccctggtgactatggttgggacactgctggactctcagctgatcccgagacctttgctaggaaccgtgagctcgaagtcattcactgcagatgggccatgttgggagctttttggtgtgttttccctgagctgttggctaggaacggtgtcaagttc

SEQ ID NO: 37947 - DNA, 423 bp, Gossypium hirsutum
  Clone ID: LIB3165-023-P1-K1-D6
aaaactcagaaacacgcaggaaacccaaagtttttttctttttttttccctcttttttggtacacaaaggtaataattttcgaaaatggcatttgctgttacctcctctccggctgcaatttctggttccagcttttctcgttcaagtgcctcatctgatctcagaattccgcaaattggttcatttcggctagcggatcgccatgcaacggtgaatctatctcaaaagcgttgcgcagtgaagcccgtgaatgcggagccaaagaggaacgattccatgctttctcatgctgcaaccacctctgctcctgaagtgtcggaaaaagttgaggtggaggattttgaccaattggccaaagaacttaacaatgcttctccactcgaaatcatggattaggctcttgagaaatttggaaacgacat

SEQ ID NO: 37948 - DNA, 430 bp, Gossypium hirsutum
  Clone ID: LIB3165-023-P1-K1-D7
cccacgcgtccgcccacgcgtccgtttttcttttgtttctctgcctggccgtccgggaggacaagagtcagagagcatggcaaccacactcagcctcctgaaatcccccttattaccccaaaagcctcactttctacaatctaaactccccctcctttctaaccccacaaagcaatttatctgcaatgagtcttttaaccctccaaaactcttcgctgagactgttcatcacctaaaatcagcttctcttccccttacaacactcgcatttcccttcttatttgacgccaaggatgctcttgctgttggtggagagtttgggattttgggagggtgaagttttgcacttgtacaccccattgtcatgggtggtctcttcttttacactttgtgggctgggtatttgggttggcaatggaggcgagtgagg

SEQ ID NO: 37949 - DNA, 235 bp, Gossypium hirsutum
  Clone ID: LIB3165-023-P1-K1-D8
caagggtgccagttccaccatcaccacctatttaagataaatttgattattatggggaggttaaaatttgaaattgttgaatccctttttactagttaatgcttaatttctttaatttttctattgtaatggcttaaattgagacaactcgttgtgtatgctgtaatttgctgttgttaacattactcttttaatttgagttattcttttctgctgttgagtttttttggggttc

SEQ ID NO: 37950 - DNA, 431 bp, Gossypium hirsutum
  Clone ID: LIB3165-023-P1-K1-D9
ggaatgggccagattttggccgccatggccgtcgcactcttgattcgcttgttctccgggcctggcccagctagcttgccggaagatgaaacctgtgaagaaaacgactccgtcaacggagatgatgctccgccatcagctggcaaagttcttccggtcaccataacgtggaggaacatcacatgttccctctccgataaacactcaaaatcagttcgctttctgcttaaagatgtgagtggagaggcaaaacctggaagattactcgccgtaatggggccatcaggatcaggaaaaaccactctgttaaacgttctggcgagtcagattttggcatcaccgcggttggcgttgtcagggtcttttggagttcaatggaaagcccagttcaactaaagcttacaaatttgcttatgtccgacaggaggatc

SEQ ID NO: 37951 - DNA, 226 bp, Gossypium hirsutum
  unsure (1)..(226): unsure at all n locations; Clone ID: LIB3165-023-P1-K1-E1
aaaacaagcatggtgatctacttaataagtatctctacttgtcccgaagggtcgacatgaggcaaatngagaagacaatccagtatttgattggatcaggaaatggatccacgtactgagaataatccttatctgggattcatctacacatcattccaagaaagggcaactttcattttcccatgggaatacagcccggctcgcaaaggagcatggtgacatcaag

SEQ ID NO: 37952 - DNA, 420 bp, Gossypium hirsutum
  Clone ID: LIB3165-023-P1-K1-E10
cccacgcgtccggaggcttcctccgttgtcaacggagccgaaccgatgcgagcgtgcggtcgttggtaacaccataggtcaggcaaatggtgtgtatgataagccgctcgatctacgcttctgcgattacactaacgagaaatcgaacctgaaggggaaatctcttgcggctgcacttatgtcggatgctaagtttgatggtgcagacatgtctgaagctgtgatgtcaaaggcttatgctgttggagctagcttcaaaggtacagacttctcgaatgcggttttggatcgagttaatttcggaaaagcgaatctgcaaggagctatattcaagaacacagtgttatctggttcaacattcgacaatgcgcagcttgaagatgcagttttcgaagataccatcatcgggtccatggatct

SEQ ID NO: 37953 - DNA, 422 bp, Gossypium hirsutum
  Clone ID: LIB3165-023-P1-K1-E11
gcaatctcttcactctcccaccacaggacattcacagtcccaaatatataacccctaaaaataaaaaataaaaataaaaaagagagaaaataatgacttttttggggggttagttagggtttgattcaagttttctggttgttgcaggaaaattttagttcagttgcattaatggcgtcatcatctctaccattacaagaggttcactttctctccccgagaactacttcgaagcaccggttttatctctctagatgttcttctctctctagagtttctcttgctgggaacggccatttaaggaacggtgtcgttttgcgttctcgagttcgagcgcttaaagaggaaggagtttcctatgaggaaagggagcgagaatttatcaaggaagtcaacggtgggtttggatcgaaagggaatgg

SEQ ID NO: 37954 - DNA, 419 bp, Gossypium hirsutum
  Clone ID: LIB3165-023-P1-K1-E12
attaaaatttatttcttgttagcatctatccttgtagagaggtgagggtacctaagacacaataatgaagatgggagaggatggagctgcaagaaatcaccttcacaacaaccaagtgttcgacctctccattgatgtgcttccacaaggtgggaccaagtgctatgatgacgacggccgcctcaagcgatctggaaccgtgtggaccgctagcgcacatattattacagcagtcattggttcaggggttctgtcactggcttgggccacggctcagctgggatggatcgctggtccaatagtgatgattttgttttcttttgtaacttattacacctccactcttcttgcccgttgttaccgctctggtgaccctgttaacggcaagcgaaactatacttacatggatgctgtccgat

SEQ ID NO: 37955 - DNA, 388 bp, Gossypium hirsutum
  unsure (1)..(388): unsure at all n locations; Clone ID: LIB3165-023-P1-K1-E2
ccggggcggccccacgcgtccgcccacgcgtccgcccacgcgtccgaaaagatatcttcaagcaaactgggttgttgaaggggcgtcgaagttgtgtgactcatgcaaataaccaacggcgactgtttcttgccgggctgcctcggcggttctatgctccaactgggactccaaaatccaacccagcaacaggctcgcctcgcgtcacgctcgagtttgggtctgtggagtctgcgaggcagcccccgctcacgtcacttgcaaggccgatgcagncgctctctgtattaccctgcgaccgtgacattcactccggcaacccttnttgctagcccgacacgagcgcccntncctgtaaaccccctcttctacgacttccgtcaaattc

SEQ ID NO: 37956 - DNA, 421 bp, Gossypium hirsutum
  Clone ID: LIB3165-023-P1-K1-E4
gttggttttagcatacactactagtacccattactagcaatggcttcctcaatgatctggtgggttaccattgccactgcctttccggaacaggctaacatggtcacccttttaaccggcctaaagtttgcctctgctttcccagtcaccaggaaggccaacaacgacattacttttttcgcaagcaatggcggcagagtccaatgcatgcaggtgtggccttctactggaaagaagaagttcgagactctctcatccctccccgatcttacacccgtgcagttggctaaggaagtagattaccttcttcgctcaaaatgggttccttgcttggagttcgaattggaggagggattcgtgcaccgtaagtactcgagcttacccacgtactacgatggacgctactggaccatgtggaagc

SEQ ID NO: 37957 - DNA, 403 bp, Gossypium hirsutum
  Clone ID: LIB3165-023-P1-K1-E5
gaacaccattgtgttgcacaacacatgtgaggttttcctgttggctgctcccattatcgtaggtttggttctccttgctgaacttagcaccaggatccagttcaaggctgatggagagggcaagttccacactttccatcctgtggctacaatcctcagttacctcaccaaagcccctcttgttccaccaggcacaccggtggtgaacgcactgtccaagcagcgtgcaatgctggagaacatactaagggccagcattggcttggctcctgaaaacaacatgattttggaatacaagtgaaaaagttgagagaaaagtggaacaaagctttggttcttagaactttaggaccattttccctttctctgtcgttttcataaaagctgtggttactgttgtcac

SEQ ID NO: 37958 - DNA, 425 bp, Gossypium hirsutum
  Clone ID: LIB3165-023-P1-K1-E6
cccacgcgtccgcccacgcgtccgcttcttcatttttcaatttcgaaaacctcagattggcagtatgatttaacacccaattccaaaaacccaacctttcccaaaaaatttccccctttttctgtacatttatacagagtcaacaatacccgtactgatagattcaaaacccaatggcggccgtcagttccctgtctttcccggcaatcggccaaacttccggcgacagaaaacttaatgtcccatcggctcgttacttggcttccaatttcgaaggattccgtttccgtacaagccttttatatcagtccgtaggacttcgagcttccactactgcttctccttccgttttttactgcatgtctactgctactgataccccgactgtttctgaaacgaagtcgagctttttaaaagtgtataag

SEQ ID NO: 37959 - DNA, 423 bp, Gossypium hirsutum
  Clone ID: LIB3165-023-P1-K1-E7
cccacgcgtccgcgctctgtttatatctcagttctccaagatgccctccttattcggcgctaacccttcatcctccgatcctgcaaacgacaccgtgccttccccttcctcttcttgttcctcctcctcgtctccggacatgtggaattacttttttatccctatcctcctctgcctcaccaaagaactttcccttgctaaagctcaaacctcaactggactcctcctcccgaatcaacgcggcgacggctcggccgatgattcactaatttccttttcgagttgcgcgaatgctgacccgaagctatattatcggcctgtgattgggatactgagtcatccaggagacggcgcgtcggggaggctgaacaatgatactaacgcttcctacatagctgcgtcgtacgtgaagtttgtggaagc

SEQ ID NO: 37960 - DNA, 303 bp, Gossypium hirsutum
  Clone ID: LIB3165-023-P1-K1-E9
gcccacctcgtgggaccattgattttcttatcttaacctaatggcaaggggatgaagtactgattcgggaagaacttaaagaggcttaggtgtttgacaggaccaaatggtcatattgtgtgagcttccatgtcatgacaaattggggactacagatagaagttgtagaatcggactatgttgaggatgcaataacttaggttgtaagtatgatggcataggtaaaaaggtaaaggggaacagcaatagttgtagacttatattaatggcatttgtttatgtctacttgtgatgtgctgtttt

SEQ ID NO: 37961 - DNA, 420 bp, Gossypium hirsutum
  Clone ID: LIB3165-023-P1-K1-F10
gcgaagctgatgaagcgcctgagactgttactggggatatagtctttgtccttcagcagaaggaccatccgaagttcaagaggaagggagaagacctgtttttggaacatactttgtctcttactgaggcattgtgtggctttcaattcgttataacccatcttgatggtcgacaacttctaatcaagtcgaaccctggggaggttgtgaagcctgattcttgcaaggcaatcaatgatgaggggatgccattataccagaggccattcatgaagggcaaattgtacattcagttcactgttgaattccctgattcccttggccctgatcaggttaaggcacttgaggccatcctgccttcaaaaaccaacctctcagttgagtgatatggagctagacgagtgtgaggagactacgcta

SEQ ID NO: 37962 - DNA, 418 bp, Gossypium hirsutum
  Clone ID: LIB3165-023-P1-K1-F11
gtccacttatttatcttcttatccacttccctctggtatttcatttatccctcgcccgtattctcttttactgcaaactgtgagcgagtgagtgagatggcttgctcagctacttcatcggccgcggctctcatctcctctaagccaagggctttctcctccaattccaagcccttctcccaatccctttctctccccaatcccttcactggtctccctgcccctctcctttctcgtcccgcctccttttccctctcccgcacctccccttctcgcaagtctttcgtcgtcaaagccaccagtgagcttccattggtgggaaatcctgcccctgattttgaggctgaggccgtctttgaccaggagttcattaaggtcaagctctccgaaatacattgggaagaaatatgtgattctc

SEQ ID NO: 37963 - DNA, 283 bp, Gossypium hirsutum
  Clone ID: LIB3165-023-P1-K1-F12
atcgttggtcggggaatcattaaggcagcgaacccagcggaggcagctcgtgagtaccgtcttcaaggatgggaagcatacatggctaaatgcacttaagagggtatcttatcttttaaatatgttacgtccctaataacataagggccaaattttgttgaatctatctatgattttgcatgattggcttgttatatttgtattacttgttgagggagatctttgggatcccattactgttttcatccttgtttgctgagggcaatttcttctatgttatttt

SEQ ID NO: 37964 - DNA, 54 bp, Gossypium hirsutum
  Clone ID: LIB3165-023-P1-K1-F2
ccaacccttccgaagtgcttgaaattgccggtaggttaaccgattggggcccgc

SEQ ID NO: 37965 - DNA, 391 bp, Gossypium hirsutum
  Clone ID: LIB3165-023-P1-K1-F3
aaccaccaccaacatagtccaacattttcatattattggctgcagtcacaaacgccggggctgcatcctccttaatggggacacccttccccgacgtctacacaagttcagggagattcgtcgccaggtttggttttggcggcaaaaaagcagctcccaagaaagcctcgaaacaaacctccaaccgccctttatggtacccaggagcggtggctcctgattggctcgatggaagcttggtgggtgattaccggttcgacccgttcgggtagggaaaccagcggagtacttgcaatatgatttggattctttggaccagaaacctggctaagaatatggcttggtgagatcattggaacttagaaccgaagttgccgacgtgaaggcgacg

SEQ ID NO: 37966 - DNA, 417 bp, Gossypium hirsutum
  Clone ID: LIB3165-023-P1-K1-F4
ctgttctatccctctctatacacatggttaaggtgaagatcggattcaccggatgcggtaggatcggtaggtgggtgcttcgagttgcttaaaaaagagacaatgttgaactcgtccttgttaacgatccttttatcactactgattacatgacatatatgttcaagtacgacagtgttcacgggcaatggaagcatcatgaactcaaagcaaggattcgaagacccttctgtttggcgagaagccagtcactgttttcggtattaggaacccagaggagattccatggggcgagaccggagctgaatacattgttgaatcaactggagtgttcactgacaaagacaaggcagctgcccactttgaagggtggtgctaagaaagtaattatatctgccccaagcaaggatgctccca

SEQ ID NO: 37967 - DNA, 382 bp, Gossypium hirsutum
  Clone ID: LIB3165-023-P1-K1-F5
aaagtattcctcacctggttgcccactcatctcgtctctgccgcgtatcgaccccgcattttattttatttatctcaatgggtttttctgatattattttcatggataaattatcttaattagtttccttctaatatcattcagctaatctggaagcagattttgggggttaagagattttatctacagagaagatggtgacatctgagcaagaacatgattttgttaagtggggtttgcaactattcaatagtgatccctatgctaattgtggatattgggggtgttaactcaagaaaatggagagtattacaatggaaatagtttcaaggaggattaccattacgacgcgggagaatgttgtaatgtggaaaatgatgag

SEQ ID NO: 37968 - DNA, 383 bp, Gossypium hirsutum
  Clone ID: LIB3165-023-P1-K1-F6
aaagtattcctcacctggttgcccactcatctcgtctctgccgcgtatcgaccccgcattttattttatttatctcaatgggtttttctgatattattttcatggataaattatcttaattagtttccttctaatatcattcagctaatctggaagcagattttgggggttaagagattttatctacagagaagatggtgacatctgagcaagaacatgattttgttaagtggggtttgcaactattcaatagtgatccctatgctaattgtggatattgtggtgtgttaactcaagaaaatggagagtattacaatggaaatagtttcaaggaggattaccattacgacgcgggagaatgttgtaatgtggaaaatgatgag

SEQ ID NO: 37969 - DNA, 407 bp, Gossypium hirsutum
  Clone ID: LIB3165-023-P1-K1-F7
gtctatatctctagctgcctctctagttgactctaccttacaaactcttccttaccgcagtttatattcatgtggtctctcccacaaatcaaccccgcattttattttatctatctcaatgcgtttttctcatattattttcatggataaattatcttaattagtttccttctaatatcattcagctaatctggaagcagattttgggggttaagagattttatctacagagaagatggtgacatctgagcaagaacatgattttgttaagtggggtttgcaactattcaatagtgatccctatgctaattgtggatattgtggtgtgttaactcaagaaaatgtatagtattacaatgtaaatattttcaatggaggattaccattactactcgttagaatgtttt

SEQ ID NO: 37970 - DNA, 431 bp, Gossypium hirsutum
  Clone ID: LIB3165-023-P1-K1-F8
cccacgcgtccggagactcttttgtataactgtagcatatagtactagtaagcaggagtgagcaatggcctcctccatgatctcatcggcaaccattgccaccgtgaactgctcctccccggcacaggccaacatggtggcccccttcaccggcctcaagtctgcctctgctttcccagtcactaggaaggccaacaacgacatcacttctcttgcaagcaatggtgggagagtgcaatgcatgcaggtgtggcctcctcttgggaagaagaagttcgagacactctcatacctccccgatcttacacccgtacagttggctaaggaagtagattaccttcttcgctctaaatggattccttgcttggaattcgaattagaggagggattcgtgcaccgtaagtactcgagcttacccacgtactacgatg

SEQ ID NO: 37971 - DNA, 400 bp, Gossypium hirsutum
  unsure (1)..(400): unsure at all n locations; Clone ID: LIB3165-023-P1-K1-F9
tcctctttctatttcatttactttttccccattttgcccctgcccttcattgtcgagggcccctctctctcgcttctcttccaatggagtcctccgctgctctccgctcctttcactattctgtaagtgctgtttcacaagcttgttgcacgcatgaaaggcccagtacattgcatatgtcttctagttgctggccaaattcaagaaaatcatgtgttccaggcttgatgtttggagggaagaacaattcttctacaagacgaactgtagttttagcatcctctgcaaagacgcctgaagctaccggnacagccaagtcaaatgttccaccagagagcaccaagaaaggctcattggagaagaaaccttcacggaaagccacttttccaaatggatttga

SEQ ID NO: 37972 - DNA, 391 bp, Gossypium hirsutum
  Clone ID: LIB3165-023-P1-K1-G10
cccacgcgtccgatttctttcccttcttttatcccccacctccattatcactctgcgggcaagctttttttattagttttatttcatatcccaaaaaccagccacgcccccactctaaccctaatttctcctccctttcccatccccatacccacaccacctttgccatgtctctagtcccctttcctttctttctcttcttcatctccctgttctttgccactttttccttcactatatccagccctgacgccctcaatgtccaatccctccctatatccacatccccacctgcaacgatccctgcatttccagagcaatccaatgtcgttggttgcccacttgacttacctgaacaactctttcacagcgttaagaacgcttgtggcac

SEQ ID NO: 37973 - DNA, 254 bp, Gossypium hirsutum
  Clone ID: LIB3165-023-P1-K1-G11
caacggtattaatcattgtaaattctgggttcaaagtatatgaaataaacaaactgtaaccctttggatccaactcggctttgttgcaaaaaatcaatctgtcatggcaaccatctcggctaccaccacccctgcagctcttgttcacaagacattgcccaggattgcatccccagtccccattgggtcgccaacaatgggaaagagggggaaggtgatgatgatgtgtagcatgttgaataagtgtttgaatg

SEQ ID NO: 37974 - DNA, 414 bp, Gossypium hirsutum
  Clone ID: LIB3165-023-P1-K1-G12
cttttatcgtctctgctgtttgatgtattgctcttgtctctcagactttcccatgtgtgtatatcttctttgacccaaattcattgcctctaaatctttgtcttaaaatcatgtttcttcttgttttctagttttccgcaaaaaagataacacacacccaattttgtcgttgtttttgttgttactttcccatctttgttttgtttgagggagagaattactttcgttgaaaaaaaataaaaccaaggagatggtgtcacgaagtttttgtaagagaagggaaatggcggcggttcttcccgcctggatcatggtagcgattttggttttggaggctagtctggtcatgggtggttttcaagcgagtttgaaactggagaggaggattccactggtgagtcatgaagtggagct

SEQ ID NO: 37975 - DNA, 415 bp, Gossypium hirsutum
  unsure (1)..(415): unsure at all n locations; Clone ID: LIB3165-023-P1-K1-G2
cccacgcgtccgcccacgcgtccggagccaattgctttggagcattaagtatggcaagggttgtaagtggacactagtatataaagttctcgacctcattttgcataaataaggacgactgaaactgaattatttgatgatcaaaggcatggaaactggaaacttctacattatgagtgatgatgatgtcgtcttttgtcttctccgatatccagcagcttcggtaggtttgcaaaggttgctgaggttgtttgcagcattgtatgtcctaatttatgttgttcaaggatggcttattttgtttctgaagttgtctgctgttggccaaacctgcttaagtccatttatatngtgtaaatngctctctgtttgttctatgaaattagtgtcttgctatttgcagagattgattatc

SEQ ID NO: 37976 - DNA, 248 bp, Gossypium hirsutum
  Clone ID: LIB3165-023-P1-K1-G3
ccaacccttccgttaaggcagccatggaatattctctactttggttacccccatttttgccagcatccttcaaaacaaacattgcaagccgcacaacaatcgcaacccatcggttcattggcctaagcccctacgcaagggtcccttcttcaaggttacccccatgtcttgtggtaaaaaaggttgtggtgtgaaagccgaacttaaccccccaatggtgataagcctaagcacaaggctcttccttt

SEQ ID NO: 37977 - DNA, 195 bp, Gossypium hirsutum
  Clone ID: LIB3165-023-P1-K1-G4
cttccgcatttttttggattttgaatagagccaagaggttttagggtaagctcattcctttggaggaagaggttttggggatttattccccattaattaaaaattattgggcgtgggagcccaattgatccgaagggtcatggttgggtccggaagggatcattggatttttggaattaaaaaaaatggatggga

SEQ ID NO: 37978 - DNA, 423 bp, Gossypium hirsutum
  Clone ID: LIB3165-023-P1-K1-G5
gggaactatagcaaagctttccctttatacattaactcgctcgagtatttcaagacccggtggaaatacgagaagaaccccaaaattagggaggctattacccagaaattcaccgagtatttacgccgtgccgaggagatccgtaccgttctcgatgaaggtgggcctggaccggctactaatgggggcgctgctgttgccactcgccccaaaagtaagcccaaggatggtagcggcggaggggaaggaggtgatgggaggatcccgatcaggctaagttgagagctgggcttgattcggctattattagggaaaagcctaatattaagtggaatgatgtggctgggttagaaagtgctaagcaggctttgcaagaagctgttattttgccagtcaaatttcctcaattttttactggaaaga

SEQ ID NO: 37979 - DNA, 405 bp, Gossypium hirsutum
  Clone ID: LIB3165-023-P1-K1-G7
ctcaaattcagataacaatttcacagttgttttcttcactctctctctcagccatgggtgcagccatctccaccgtcgccgccgctgccgccgccaaccgagctctgggagtgtcagtcccaacctcagctttcatggggaagaaagtgagctcgagattcaacaacaccaggcaggttccttcgggaagttttaaggtgatggcggccgaaaaagagatagacgaagagacacagaccgaaaaggaccgatggaaagggttggcttacgatatttcggacgaccaacaagacattactcgagggaaaagggatggtggattccttgttccaagctcccatgaatgatggaactcactatgctgtcatgagttcctatgaatacatcagccaaggtcttaaaacg

SEQ ID NO: 37980 - DNA, 230 bp, Gossypium hirsutum
  unsure (1)..(230): unsure at all n locations; Clone ID: LIB3165-023-P1-K1-G9
cccacgcgtccgcccacgcgtccgccgacttagntaaatgacttgagaggtgtannagaatttttttctctcgggcgaaatccaaataccactacnttaaacgttattttacttattcctcgaatcgaatgcacatctatctctatactgttacgtacaattgtttttcttctattttttttaaaataaatttttttcattttaactgtttattcttatattattttatt

SEQ ID NO: 37981 - DNA, 385 bp, Gossypium hirsutum
  Clone ID: LIB3165-023-P1-K1-H10
aacacacaggaaacccaaagtctttcttcttttttttccccctctttttttatggacaggggtaataattttcgaaaatggcgtttgctgttacctcttccccggctgcaatttctggttccagcttttctcgttcaagtgcctcctctgacctcaaaattccgcaaattggttcatttcggctagcggatcgccatgcaacggtgaatctatctcaaaagcgttgcgcagtgaagcccgtgaatgcggagccaaagaggaacgattccatgctttctcatgctgcaaccacctctgctcctgaagtgtcggaaaaagttgaggtggaggattttgagcaattggccaaagaacttaacaatgcttctccactcgaaatcatgga

SEQ ID NO: 37982 - DNA, 406 bp, Gossypium hirsutum
  Clone ID: LIB3165-023-P1-K1-H11
gttctttctttcactattagctgaacctcagttgagctcacataaacacaatagccaaggtggcatctccaacttctgctctaaccaattccccgttttgcccccatcttctcccccaattctctcctctacccgtcctctccttcactcacagcctcaaacctatcctgccaaagctcaagtctctgatttccctcaaaagagacaaccacccctcaaccttaaccgtcaaagcccagaccttggacttctccggctcattctttgagggtggtttcggctccgatgatgacccgccttcccaacccggctctggcataaccgccttggaggataaagaggaaccccaatgcccaccgggcctccgacagtacgagacaatggccgtcttgagacccgacatgtc

SEQ ID NO: 37983 - DNA, 326 bp, Gossypium hirsutum
  Clone ID: LIB3165-023-P1-K1-H2
cgggccggccccacccgtccggttttttgttttaagagtcgccctttggtgtttttttaatccaaccattgaggtgaggagggaggttttgctgtgggggaacctgcggttccggctccggttgcaagtccgccggcggcggcggttgcggttgcggcggttgcaagatgtcccctgagatgacctttgctgagcaacccacacttgagacactggttctgggcgtggccccccggaaggtgaattttgttggacctgaaatggaacttggggctgaaaatggctgcaaatgtggagataactgcacttgcaccccttgcatttgt

SEQ ID NO: 37984 - DNA, 65 bp, Gossypium hirsutum
  Clone ID: LIB3165-023-P1-K1-H3
gtccgcaaaattgattcctaaccttcggaaaaggatttgctcttaaggcttggcaccggggttcc

SEQ ID NO: 37985 - DNA, 422 bp, Gossypium hirsutum
  Clone ID: LIB3165-023-P1-K1-H6
tccgtgaaattcggccactttccaaagggtgccttcctgcatgttctgttgtctaggcgccatggccattctcaaatttccttcttaagacccttatattattcttccaatggatctttgcatctgcttttctcctccttttatcatgtcacgtaatttacccgttgaagagacaagggaactgtgctgctcagcagcttcagcacttgttactaaactgtcctatgcaatcttcatctttttatttgcagtggtaggagcaacattaggagccctgactggagcttttgttgggacgaaaacaaagatgggttgtcttcatggagccatggttggagccataaaaggcagctttttctccatcaatctcttcaaaatttcactcaaaatttgcagttccgaaatccgtgtctcaaaatcat

SEQ ID NO: 37986 - DNA, 411 bp, Gossypium hirsutum
  Clone ID: LIB3165-023-P1-K1-H7
gtgctctgcaaacaatccatcaacatcggcgttttatcttctgtcgattgctcggggcgcactttacacactaatatagaatgaaaaagaaactcatattataccaccactggaaatgtgtatgacctttattgctgctatgatgatggaacgtaatttaccgaattgaagagacagggcaactgtgctggtaaacaagttcagcacttgttactaaactgtgctatgcaatcttcatgtgcttatttgcagtggtaggagcaacattaggagccctgactggagcttttgttgggacgaaaacaaagatgggttgtcttcatggagccatggttggagccataaagggcagttttttttccatcaatctcttcaaaatttcactcagaatttgcagtttcgaaatccgtg

SEQ ID NO: 37987 - DNA, 424 bp, Gossypium hirsutum
  unsure (1)..(424): unsure at all n locations; Clone ID: LIB3165-023-P1-K1-H8
cttgagctttcttccatatttcccgaaagcattgaacatatatttctttcctttggttgccaatcttgtttctttttgtactttgttcggtttgttttggttttgtttcagagagaaatggctgggattgttgtgatttttgatttcgacaaaactattattgactgtgacagtgataactgggttcttgatgaattgggtttcaccgatttgttcaaccagcttcttcctaccatgccttggaatcctctcatggacaagatgatgaaggagcttcatgctcaaggaaaaaccattgatgacattgttgaggttctgaaacgagctcctatccatcctaggatagtccctgccattaaagcagctcatgctttagggtgtgaactcanggtggttagtgatgcaaacatgttcttcattgaaa

SEQ ID NO: 37988 - DNA, 423 bp, Gossypium hirsutum
  Clone ID: LIB3165-023-P1-K1-H9
cttgtcggaaggaagaagatatgggaagcgagtcatacgaggaagccattgcagggggggcgaagcttctcagtgacaaagctgatctcgggagtgtcgccgccgcaaaaatcaagcagataacagccgagttagaggcagctgccgattccactcagttcgacccggtcaagcggctcgagaccggtttccttcacttcaagaaagaaaaatttgacaaaaatcctgatctgtacggtgcacttgccaaagggcaaagacctaagttcttggtatttgcatgctccgactctcgggtgtgcccctcccacatcctgaatttccaaccaggggaggcttttatcgtccgtaacattgccagcatggtcccgccctatgacaagaaaaaaatactctggagctggggcggccatcgaatacgct

SEQ ID NO: 37989 - DNA, 336 bp, Gossypium hirsutum
  Clone ID: LIB3165-024-P1-K1-A1
cccacgcgtccgtcactgtatccatcgctgtagccacggcggcgacgaagacgacgaccctaagttaccttccatttaaccaatcagatttcgggctgaagtgccaaagaaaagggcgttttaccatggcttcacacaaagcaacactgataactacgtcgggaaccaagcaatacgactgctctgacggggactatatcctggaccgtggcgaggaagtaggaatggatctcccgtactcgggcagggctgtggctggctctttgagtgcgggactgatcaaacaaggaaccgacgaccaatcggtcgatagctgacttgatgatgaattgtttg

SEQ ID NO: 37990 - DNA, 414 bp, Gossypium hirsutum
  Clone ID: LIB3165-024-P1-K1-A10
cccacgcgtccgcccacgcgtccggcagcccggtttggcaggttcgtcgtggaggttcagctgttaagagctccgatgttatggcccggaccgctgaaaaaggtagcagtagaaaagaagttaccgaaactcgtcgcggtaaaattggtaacagtggcaacaacaatagtaacaaagccaaggtcttgaatttgaatgtgccaatgtgtattgggtataagcatcatttgaattgtagaatcgacaataacagtgccacggttgccggcattagcaccgacccgaacggcggcaggaatggtagaaccaacggccctaacgtcggaagcggtagtaacttttttaacttccggaatcttttcactaagaaagtttattaagcgtgtaaaccttttttaagttggattgtaattt

SEQ ID NO: 37991 - DNA, 413 bp, Gossypium hirsutum
  Clone ID: LIB3165-024-P1-K1-A12
cccacgcgtacgcaacgtctcaaattcaacgtcgacgttgtcgaaagtgagtggggagagggtgctaacctcgacgtttgggccgaaaaactcgcggccgatcgtacgcacaccattaaggctatttgtattgttcacaacgaaaccgcgactggagttaccaacaacttggccacagtgagaaaactactagatcattacgggcacccagcactgcttctcgtcgatggagtttcctcgatttgtgctctcgatttccgtatggatgaatggggagttgacgtaaccttaaccggctcgcaaaaggcgctttctcttccaaccgggatcgggattgattgcgctagcccgaaagctgtcgaggcgaccaaaaccgtgaaatcagtccgggttttcttcgataggaacgatta

SEQ ID NO: 37992 - DNA, 194 bp, Gossypium hirsutum
  Clone ID: LIB3165-024-P1-K1-A3
gtgctggtagggttagtttaggttgtgggctgatgggagttttaatttgggccatgtattattaattggactgttttattattattttttgaattttttttgatttgggctcgggctaaggttgaaattaggtttggttttattaggccccgggcaaaatttatgccttacactcttaatatactaatcttttc

SEQ ID NO: 37993 - DNA, 420 bp, Gossypium hirsutum
  Clone ID: LIB3165-024-P1-K1-A4
caagtttatcagccatgccgccaccaatgctccgccttatctcaaccacctccgtgtccaccgtagctggcctcccgccaatccttacgaaacctcccatttcaaatcaaaacctttccatcacccccagtgaagagaatcgacagaaagtgctccgccttatctctcgcagagacgctgcttttctctccttaatctccctctttccttccctactccatacccctcatgcttctgccttctccattggaatttcaggaccaaaggattggcttaaagagcaaaagaggaagtcttcgaaattcctattggcaccaatcgatgcttctcgacaaagccttcgctctgtttatcttttgctcatggacaaggaatcaactatttcgaatactgatttagaggaagtgcaaaagctcttga

SEQ ID NO: 37994 - DNA, 417 bp, Gossypium hirsutum
  Clone ID: LIB3165-024-P1-K1-A5
acgatactcaacggtgttttgtgattaaaaaaactaccaagattgtggcaaaacaagatggcttccctgcatgaaccatggctagtggagaacgggttgaaggggtctagcaaggagattcgccatggcaggactgcacacaacatgtcgtcttcgtcgttgcggaaaaaatcggacctgacgcttgtttccaaggttcggtatgcaatgcttaggcagttcctcgccaatcttcaagaggtcatattagggaccaagctctccgttctcttcccagctattccattggccattgttgctgagtgttatggatttggaagaccctgggtgtttgcattaagtttacttggacttacaccattggctgaacgagtcagctttctcaccgagcaaattgcttattacactggtccaaca

SEQ ID NO: 37995 - DNA, 420 bp, Gossypium hirsutum
  Clone ID: LIB3165-024-P1-K1-A6
atgttcagcactctagacactctgttcgagaaaacaggagtttccccgtcagaaatcgacggactcgtcgtcgatgtctcgttgttttcacctgcaccgtcgttaacatcccggattataaacaggtacaagatgagggacaacattaagtccttcagtctctccggaatgggatgtagtgcaagcatggttgcaatcgatatggtgcagcagttgttcaagacatacaagaaccagttcgccatcgttgtgagcaccgaatcaatcgctaggcattggtactgcggcaaagagaagtcaatgatgttatcgaattgcctgttccgtaacggagggtgttcaatcctcttaacaaacaaaagggacttgaaggatcgatgcttgttgaagttgaagtgtgccgtaagaaccaatatcggt

SEQ ID NO: 37996 - DNA, 298 bp, Gossypium hirsutum
  Clone ID: LIB3165-024-P1-K1-A7
aagaaaaacactctaaacactgtgagcgagaaaacttgtggtacggcgtcagaaatgggcatgctcttagtagatggatggctgttctcacctggaccattggttacatcccggattataaacaggtacaagatgatggacaacattaagttgtctatgctttacggggtgggatgtagagcaagcatggatgcaattgatatggtgcatgacggtgcttaagacatgcagaaaccagttcgatattgtagtgagcaccggatcaatgggtaggcattggtcctgaaggaaagagaac

SEQ ID NO: 37997 - DNA, 414 bp, Gossypium hirsutum
  Clone ID: LIB3165-024-P1-K1-A8
gtgagactcttttgtataactgtagcatatagtactagtaagcagtaatagcaatggcctgctccatgatctcatcggcaaccattgccaccgtgaactgctcctccccggcacaggccaacatggtggcccccttcaccggcctcaagtctgcctctgctttcccagtcactaggaaggccaacaacgacatcacttctcttgcaagcaatggtgggagagtgcaatgcatgcaggtgtggcctcctcttgggaagaagaagttcgagacactctcatacctccccgatcttacacccgtacagttggctaaggaagtagattaccttcttcgctctaaatggattccttgcttggaattcgaattagaggagggattcgtgcaccgtaagtactcgagcttacccacgtact

SEQ ID NO: 37998 - DNA, 235 bp, Gossypium hirsutum
  Clone ID: LIB3165-024-P1-K1-A9
ggaaatttccagctctggactattgacttccagctcagttcctctctcgcactatgatctgtatttttaatataatatatgagagaagaacatgcaaccttcatccacttaaatcaatgacaccctctttcttccttatctctgcatctctttgttttaactaccatctttgttcacgatggagattactgtacattctccattacatttcctttactaataaactatgttccat

SEQ ID NO: 37999 - DNA, 417 bp, Gossypium hirsutum
  unsure (1)..(417): unsure at all n locations; Clone ID: LIB3165-024-P1-K1-B1
cccacgcgtacgcccacgcgtccgnnnagctccttcaagaatccctgccaacaccaggcttccatggaagaccactcactctttccccactcaatgctcttccaagagactggaagtgactgaattctctggacttcgatccagctcatgcgtcacctttgccaagaatgttagagatgcttcctttttcgacgtgctggctgcccaacttactcccaagggtgtaggggtaccatcaacatctgttaggggagaaacagttgccaaactgaaggttgcaatcaatggatttggacgcattggcaggaacttcctccgatgctggcatggcaggaaggactcacccctcgaggtggttgttggaaatgacagtggtggtgtcaagaatgcttcacacttgctgaaatatgactccat

SEQ ID NO: 38000 - DNA, 371 bp, Gossypium hirsutum
  Clone ID: LIB3165-024-P1-K1-B10
gaatagtatgttagtgctacagaacccaatatctttcacaccataggatctcttcctggggactgaattcataaggatgagcccaccaaacctataaatgccatcaagcctattcaggagaatctaccggcttccgaacagactggggctaaagaaaccaaacatgtaaagggaactctacctgaaagattctttgacaataacgaaactgatttacgcacttaccacattaaacctctgaagatacatgtcaaatatgcggtcaaggaattagatacgttgatataagaagatttgccagcggtggacactcttatctaagacgacgatattgcttcgaggtaaaatgtttggggaggctgaatcttttg

SEQ ID NO: 38001 - DNA, 415 bp, Gossypium hirsutum
  Clone ID: LIB3165-024-P1-K1-B11
caaaaaaatgaaagcaatatcaccaccatcaacggcggctataatcatccactcccatcatcactacctaaatcaccgtcgttggtttttatctccgccgcctccatcaaaccggcagttccaccccgccgcgtcaatctcccgaccccatagtcttaaacttactttcataacaaaagcggccgattcaacttctcagcctaattcagcaaaaaccattgtcgctgatgatggattctcattgtccaagctttcatttggtgttgttggactcggtgttggaatttcgctcctctcgtatggttttggggcatacttcaacattcttccgggatccgaatggtccgcgataatgctgacttacggcttccctcttgcaataatcggaatggccctcaagtacgcagaactgaaa

SEQ ID NO: 38002 - DNA, 408 bp, Gossypium hirsutum
  Clone ID: LIB3165-024-P1-K1-B12
gtttttcaaaaatatgtgcaattttttttaaaaaaaaactcatgaacaattttattcgtggcggttgggaaaatgttatatgaaaactctctggtgtccgacttgttcgccgccgtggtttgctgcggcgttatattcgcgtttctcttactctggcaagtaaccgccaaatgcggcgtagatcagaaactgaataggaagcttgtgcatataagtatagggctagttttcatgctttgctggccattattcagtgcagggtatcgcggagcaattttagcagctataactcctggtgtcaatattatacgaatgcttcttatcggttctggaatttggaaagatgaagccactgtgaagtcaatgagcagatatggaaactacagggaacttctcaaaggaccactc

SEQ ID NO: 38003 - DNA, 414 bp, Gossypium hirsutum
  Clone ID: LIB3165-024-P1-K1-B2
cccacgcgtccgttttgttttctctccctccaattaagatgcagatcttcgttaagaccctgaccggcaagaccatcaccctcgaagtcgagagttccgacacgatcgacaacgttaaggcgaaaatccaagacaaggaagggatcccaccagaccaacaacgtctcatcttcgccggaaaacagctcgaagatggccggaccttggccgattacaacatccagaaggagtccaccctccatctcgtcctccgtctacgtggtggcatgcagatcttcgtcaaaaccctgaccggcaagaccataactttggaagtcgaaagctctgacaccattgacaacgtcaaggcaaagatccaagacatggaaggcatcccaccagaccagcaaaggctcatatttgccgggaaacaac

SEQ ID NO: 38004 - DNA, 413 bp, Gossypium hirsutum
  unsure (1)..(413): unsure at all n locations; Clone ID: LIB3165-024-P1-K1-B3
ctnctttggggagaaagacgnnagnagcggaaaattttgaacgttactattaaggaaggataatgctatccttgcgcttcgctattcctaccgcgaatacattaactccgcccaagattaaaccaaaaccgggtttagtagtacaaaccgcttggaaccaaacggacctttttccttctcttcccaaacgaaatgattataagctacaagcagctaccacggacttatctgtggcgggagatataccggcggaggaggtggtggagcttacggcggagctgagcagagagttgatgccgaagcacgtagcggtgataatggacgggaacgggcggtgggctcggcagcggggattggcgacatcagcgggacacgaagccggtgtaaaggcgttgagggagctggtcgaacta

SEQ ID NO: 38005 - DNA, 418 bp, Gossypium hirsutum
  Clone ID: LIB3165-024-P1-K1-B4
gaaaaagcatcgaaatgagttacgagggaggtcctcaagatcattatcctcctcccggttattcctctccttatcccccaccgggctatccatcagcccctcctcccccatcttacgaaggctatcctcctccgccaactggatatcctgcctatcctcctccgccgcctcgccagccctacgacggttaccaaggctattttgctgaagggtatccacctcctccgccccctcaacctcatcctcaatatcaacactaccaccactatgacccttaccattaccagaaccagtctgattctggctgtttctctttcttgcaaggctgtttggctgctctatgttgctgctgtgtgttggaggactgctgcttcttcctatgatataattcatgaaggatgaattatttcatttacat

SEQ ID NO: 38006 - DNA, 283 bp, Gossypium hirsutum
  Clone ID: LIB3165-024-P1-K1-B5
gaaaaaaaaaggtcttggtgatttacagtcttttctgggatctgattaatgggtttttttttaataatcggactgatggttaacactctactggattgattactcattatgatgtagagggagactagataacattgaactgtgggggccacatgatgtgcatcttgtcttaagtacttaagcaacctgtcgttcgcaccctaattgcggcttgagctgtacaacttactgtgagaccaggttgataaggttggactcatggtccgggtgtttaagctttgta

SEQ ID NO: 38007 - DNA, 132 bp, Gossypium hirsutum
  Clone ID: LIB3165-024-P1-K1-B6
acgaaatttttttttgaaaaccaactattcattcattagtgcgcagccttttcaaccactggaaatccaaaaaggataaaaacccaaaaatcgagaaacaaaggccaataacttaaagtaagttaaatacat

SEQ ID NO: 38008 - DNA, 355 bp, Gossypium hirsutum
  Clone ID: LIB3165-024-P1-K1-B7
ctcctcctccatggctcgatggcagcctccctggagacttcggttttgatcctctaggccttggatcagaccctgagaccttgagatggaacgtacaggcagagctcgtccattgcagatgggcaatgttaggagccgctgggattttcatcccagagttcctaaccaaaattggcattttaaacactccatcatggtactctgctggaaccgaggaatacttcactgacaccaccaccctcttcatcgttgagcttattttcatcgggtgggcagaagggagaagatgggctgacattctcaagcctgggtgcgtaaacactgaccccatattccctaacaacaagcttacggg

SEQ ID NO: 38009 - DNA, 373 bp, Gossypium hirsutum
  Clone ID: LIB3165-024-P1-K1-B8
ctcttttgtataactgtagcatatagtactagtaagcagtaatagcaatggcctcctccatgatctcatcggcaaccattgccaccgtgaactgctcctccccggcacaggccaacatggtggcccccttcaccggcctcaagtctgcctctgctttcccagtcactaggaaggccaacaacgacatcacttctcttgcaagcaatggtgggagagtgcaatgcatgcaggtgtggcctcctcttgggaagaagaagttcgagacactctcatacctccccgatcttacacccgtacagttggctaaggaagtagattaccttcttcgctctaaatggattccttgcttggaattcgaattaaaggagggatt

SEQ ID NO: 38010 - DNA, 430 bp, Gossypium hirsutum
  Clone ID: LIB3165-024-P1-K1-B9
cttatttcttcattataaaaaaagaaaagaaaagacatggctgctgttactgctgcagtctctgttccttctaccaaggccacctctctccctgctagaacctctcttgtctttcctgataggatcaccttcaagaaggtgcccgtttactacagagatgtttgcagtggggggagagtggtttctgtcagggcccaggttacaactgaagctcctgccaaagttgtaaaggaatccaagaaaaacgatgaaggtgttgtggttaacaagttcaggcctatcaacccttacattggtagatgccttctaaacactaagatcactggcgatgatgctcctggagagacttggcacatggtcttcagcaccgaaggagaggtcccctacaaagaaggacaatccattggggtgattccagatggcgttgaca

SEQ ID NO: 38011 - DNA, 392 bp, Gossypium hirsutum
  Clone ID: LIB3165-024-P1-K1-C1
cccacgcgtccgcccacgcgtccgggactggtcactcgccgtctaccaaggtatcttccgtgtctactgctgaaaataaagcatatagtattaccggatctcatgaggttcccggatctcttgatgccttagccaaagctaaaaaggctttacaaatgcagaaagatttagcagagaaactgaagaagatacctttgttgaataaaggcacaggctccagttcagtggggactagtgtaacagttcagggaccagtctcatcagtgactacagcaattgcaagtggaccatcaagctcgtcagtgcttccttctacctctgcagcagcagcttctatgaagccaccagctggtggggtggctgctgttcctggtcttgcttcaatatcaaac

SEQ ID NO: 38012 - DNA, 413 bp, Gossypium hirsutum
  Clone ID: LIB3165-024-P1-K1-C10
aacaaagtgaatgaagaaataatattaagctgaaaacttcttcaaattcaagagaaggaaagctcattctttcaattttgtcatggattatttgaaaacagtggttccttctcaactcctcgctgaacgtggctctaatctcgtcgtcatcaacccaggttctgcaaatattagagtagggttagctaagcaagactctccttttagcattcctcattgcattgctcgtcgcagcaaccagttacccaagttaaatgttcaagatcagttgcttaattctcaagttaccacagcgcagcatatggagcgcgaaaaggcatatgatgtgattgcgtcgttgttgaagatacctttccttgatgaagaggttgccaataattctattccccgaaagatgggacgtgttgatgggt

SEQ ID NO: 38013 - DNA, 151 bp, Gossypium hirsutum
  unsure (1)..(151): unsure at all n locations; Clone ID: LIB3165-024-P1-K1-C12
gngcaggaggganncgngcaccgnaaanactcgagcctacccacgnactacganggacgctgcgggaccangnggaagcggccnangnncgggngcaccgacncggcncaggganggaaggagcnngaggaangcaagaaggaanacccca

SEQ ID NO: 38014 - DNA, 416 bp, Gossypium hirsutum
  Clone ID: LIB3165-024-P1-K1-C2
gtgagactcttttgtataactgtagcatatagtactagtaagcagtaatagcaatggcctcctccatgatctcatcggcaaccattgccaccgtgaactgctcctccccggcacaggccaacatggtggcccccttcaccggcctcaagtctgcctctgctttcccagtcactaggaaggccaacaacgacatcacttctcttgcaagcaatggtgggagagtgcaatgcatgcaggtgtggcctcctcttgggaagaagaagttcgagacactctcatacctccccgatcttacacccgtacagttggctaaggaagtagattaccttcttcgctctaaatggattccttgcttggaattcgaattagaggagggattcgtgcaccgtatgtactcgagcttacccacgtactac

SEQ ID NO: 38015 - DNA, 414 bp, Gossypium hirsutum
  Clone ID: LIB3165-024-P1-K1-C3
caccaacatagtccaacattttcataacaatggctgcagtcacaaacgccgctgctacatcctgcttcatggggacacgcttccccgacgtctacacaagttcagggagattcgtcgccaggtttggttttggcggcaaaaaagcagctcccaagaaagcctcgaaacaaacctccgaccgccctctatggtacccaggagcggtggctcctgattggctcgatggaagcttggtgggtgattacgggttcgacccgttcgggttagggaaaccagcggagtacttgcaatatgatttggattctttggaccagaacctggctaagaatatggctggtgagatcattggaactaggaccgaagttgccgacgtgaaggcgacgcctgttcagccttacagcgaggttttggtct

SEQ ID NO: 38016 - DNA, 282 bp, Gossypium hirsutum
  unsure (1)..(282): unsure at all n locations; Clone ID: LIB3165-024-P1-K1-C4
aacaaaangaacaaaaacataatattaagctttttacttctacaaactcaaaagaacgaacgctcatttttacaatcttgcgaaaaactatcccaaaacaaaagctccttctcaactccacaatttacgtggttctaatcttcccatcatcaacccactttctacaaatattacacataccctttagctaaacaaaactcttcttttaccataccactctcatttctcctctcatcatccaattaccctaactaaattttcaacatcatcttcttaactctc

SEQ ID NO: 38017 - DNA, 408 bp, Gossypium hirsutum
  Clone ID: LIB3165-024-P1-K1-C5
gcgcccgtactcaccatcgttacaaaaaaaatatatacaaatgtaaacccagtgagacaacaatggacggattggcaacattcaccaatggctcataaattattttaaaacaaaagctcattctcaaaatctaggtaagcgaaggaattatatcatcgccatcaacaccatggaggtaatgaatatagaagaccggggttatacagaccatgactatagcctttattattaaactcatggttgcagctaccagaaactccaatgaaaagctggaaaagggcaacggctcggacagaatgatcatcttatctgaaggcatcataaacagatctcaaatcccacagcacttgaactgagaaattccctgtaactatagatacaatcctgttgggctgagccagaaatctg

SEQ ID NO: 38018 - DNA, 413 bp, Gossypium hirsutum
  Clone ID: LIB3165-024-P1-K1-C6
attccgatcagattcggaatcattgggtgtgccttgatagcccgcaaagtttctcgagctatccggcttgctcctaacgccactgtctccgccgatgccagccgctccttcgacaaagccgccaatttcgccaaggctaatggcttcccacctgacaccaagatctacggctcctacgagtcccttcttgacgaccccgacatcgacgccgtttatttgcctttacccactagccttcacctcaaatgggctgttttgacggctcacaaaaagaagcatctgctcacggagaaacccgtcgccttgagcgtggccgagtttgatcagattctaaaggcttgtgaagaaaacggggttcagattatggaccgtaccatgtgggtgcataatcccaaaacccataaaatgaagca

SEQ ID NO: 38019 - DNA, 390 bp, Gossypium hirsutum
  Clone ID: LIB3165-024-P1-K1-C7
ctcactcaacattcccatttccaatctccatttttcaaggtaaatatgccgatcagaggcagagcggttggccggcccgaagaggctactcaccccgatgctctcaaggctgctttggctgagttcatctcaaccttgatcttcgttttcgctggatcgggctcaggaatggtctttaacaagttgactgacaacggagcaaccaccccggctggtcttgtagccgccgctctagctcatggcttcggtcttttcgtcgctgtctccagtggcgccaacatcttaggtggccacatcaaccctgccggcaccttcggtgcttttgttggcggatacataaattttttgccccgcattttttactggaacggccaactcctaagtttaacc

SEQ ID NO: 38020 - DNA, 373 bp, Gossypium hirsutum
  Clone ID: LIB3165-024-P1-K1-C8
cccacgcgtccgcaacgtctcaaattcaatttcttcgttgtcgaaagtgagtgggggcggggtgctaaccttgacgtttgggccgaaaaactcgcggccgatcgtacgcacaccattaaggctatttgtattgttcacaacgaaaccgcgactggagttaccaacaacttggccacagtgagaaaactactagatcattacgggcacccagcactgcttctagtcgatggagtttcctcgatttgtgctctcgatttccgtatggatgaatggggagttgacttagtcttaacccggttcgcaaaaggcgctttctctttcaacccggattggtattgttttgcctagcccgaaagctttcgaggcgtccaaa

SEQ ID NO: 38021 - DNA, 411 bp, Gossypium hirsutum
  Clone ID: LIB3165-024-P1-K1-C9
gggggctggacgtaaacaatcttcgtgaattagttgcacaggctcgcttcaaaggaatagctgtgagagcaatggtaattattaaccctgggaaccctactggtcagtgtctcagtgaagctaatttaagagaaatattgaatttttgttaccaagaaaacttggtattacttggagatgaggtttaccaacagaatatataccaggacgagcgcccctttatcagttctagaaaggtgttgatggatatggggccaccaattagcaaggaagtccagctcgtttctttccacactgtgtctaaaggatattggggtgaatgtgggcagcgagggggatactttgagatgaccaacatttcttcaaagacagttgacgagatatacaagattgcatcaatattcctcaatc

SEQ ID NO: 38022 - DNA, 133 bp, Gossypium hirsutum
  Clone ID: LIB3165-024-P1-K1-D1
ggatccctttttttcttttttagtcttactgcaagaggcagatgagagctgtggaaaggccgctctacaacaaaacagtggtaagattagggggaattgattacctgcatatttggcgaaatgaagcgactcg

SEQ ID NO: 38023 - DNA, 386 bp, Gossypium hirsutum
  Clone ID: LIB3165-024-P1-K1-D10
ctccataaacacccaaagtaaaacgagtggagactttgagacaacatctgtggggtcccccctaaaaaagggtttgtaagagaaatggctactttcccagtgatcaacttagagaagcttaatggtgatgagagatcaagaatcatggagcaaatcaaggatgcctgtgaaaactggggattttttgaggtgatgaaccatgggattccacatgattttatggacactgttgagagattaacgaaagaacattataagaaatgtatggaacaaaggtttaaagaactggtagcaagcaaggctcttgaaggacttgaggctgaaattacggatatggattgggaaagtacatttcacttgtgccatcttcctgaatcaaacatggc

SEQ ID NO: 38024 - DNA, 400 bp, Gossypium hirsutum
  Clone ID: LIB3165-024-P1-K1-D11
ctccataaacacccaaagtaaaacgagtggagactttgagacaacatcttgtaggtcccccctaaaaaagggtttgtaagagaaatggctactttcccagtgatcaacttagagaagcttaatggtgatgagagatcaagaatcatggagcaaatcaaggatgcctgtgaaaactggggattttttgaggtgatgaaccatgggattccacatgattttatggacactgttgagagattaacgaaagaacattataagaaatgtatggaacaaaggtttaaagaactggtagcaagcaaggctcttgaaggacttgaggctgaagttacggatatggattgggaaagtacatttcacttgtgccatctccctgaatcaaacatggctgaaatcccagatc

SEQ ID NO: 38025 - DNA, 403 bp, Gossypium hirsutum
  Clone ID: LIB3165-024-P1-K1-D2
ttcatttcctttgccactttccctactttttcaaccaaaaaaaaaaaaccttcctttctcgtagctatggcgtttagaaccttagatatcaacgttatctctgcaaaaggcttgaaaaacgtcaacctcatcgataaaatggacgtttacgccgtcgtttcactcaagggtgattcatcgaagcaaaaattgaagacgctggtgcataaagattgtggcaaaaccccgaattggaattttccggtcaagttcaccgtcgatgaatcattggctaaaaacaataagcttagcatcaagttcaagatcatgtgtgaacgtatattcggtgataaagaacttggtgtagtcaacgttccggtcaaagagcttttggattcgccgggcgatggtgggtcaatgaaat

SEQ ID NO: 38026 - DNA, 412 bp, Gossypium hirsutum
  unsure (1)..(412): unsure at all n locations; Clone ID: LIB3165-024-P1-K1-D4
aggaanggccggaccgacgcaggcggttagctttagcatacactactaatacccactactatcaatggcttcctcaatgatctcatcgggtccattgccactggctgtgcggcacaggctaacatggtcacccctttcaccggcctcaagtctgcctctgctttcccagtcaccaggaaggccaacaacgacattacttctctcgcaagcaatggcggcagagtgcaatgcatgcaggtgtggcctcctactggaaagaagaagttcgagactctctcatacctccccgatcttacacccgtgcagttggctaaagaagtagattaccttcttcgctcaaaatgggttccttgcttggagatcgaattggaggagggattcgtgcaccgtaagtactcgagcttacccacgt

SEQ ID NO: 38027 - DNA, 202 bp, Gossypium hirsutum
  unsure (1)..(202): unsure at all n locations; Clone ID: LIB3165-024-P1-K1-D5
agaaaaaaacgaccgacgcgggcgaacaaantacatttctctcacctctccatactccaaattccatggctctcgtaaccactgcagtgtcctttccttctaccaactgcacctataaaactactcaaacctctatcatatctacttaaagaatctcattcaagatggtttatttttactacccaaactaatcaagtatacc

SEQ ID NO: 38028 - DNA, 387 bp, Gossypium hirsutum
  Clone ID: LIB3165-024-P1-K1-D6
cccacgcgtccggagacaaccgccacaaaggatgcaccagtcggtttcaccccaccagagctgggcgccaaacaccccatcaccgatcttcggcggcagcaccggcgggcttttacgcaaagcacaagtggaagagttttacgtcatcacatgggagtcacccaaggaacaaatcttcgagatgccaacaggtggtgcagccatcatgagacaaggtccgaacctgctgaaattggctcgtaaagagcagtgcttggctcttgggactaggcttaggtctaagtacaagatcaagtatcagttttatagggtgttccctaatggtgaggttcaatatttgcaccctaaaaatggggtgtaccctgagaaggtgaaccctggtcgaca

SEQ ID NO: 38029 - DNA, 188 bp, Gossypium hirsutum
  unsure (1)..(188): unsure at all n locations; Clone ID: LIB3165-024-P1-K1-D7
aaaccgggggcgacccacgcgnaccgcccacgcgnccgcccacgcgnccgaaaacaactgctncacaanggccncnacaaccagggcgggggcnnccccagcaggcgccggnaaggcagagaagnacnccccnnccaccccngaaaaccagggaaccggccgngangccangaggaaaaccaccaagc

SEQ ID NO: 38030 - DNA, 77 bp, Gossypium hirsutum
  Clone ID: LIB3165-024-P1-K1-D8
gactttgatggctggctttaattgggtaattttttttaacactgttactgatgaacgtgaggctttaataactgagg

SEQ ID NO: 38031 - DNA, 166 bp, Gossypium hirsutum
  unsure (1)..(166): unsure at all n locations; Clone ID: LIB3165-024-P1-K1-D9
aaccanggcaggccagggcaaacccgaaacccnnannnncccccaaagnanagnngccccgaaaccccaaaagggccgcaaagcaaacccangggcaggcncccncncncnnggcgaacgacagcaagcagaaagaagaaggganggcaaggggaaaacaaacccg

SEQ ID NO: 38032 - DNA, 417 bp, Gossypium hirsutum
  Clone ID: LIB3165-024-P1-K1-E1
atttagctatagcatacactactagtacccactactagcaatggcttcctcaatgatctcatcggctaccattgccactgcctctccggcacaggctaacatggtcgctcctttcaccggcctcaagtctgcctctgctttcccagtcaccaggaaggccaacaacgacattacttctctcgcaagcaatggcggcagagtgcaatgcatgcaggtgtggcctcctactggaaagaagaagttcgagactctctcatacctccccgatcttacacccgtgcagttggctaaggaagtggattaccttcttcgctcaaaatgggttccttgcttggaattcgaattagaggagggattcgtgcaccgtaaatactcgagcctacccacgtactacgatggacgctactggaccatgtg

SEQ ID NO: 38033 - DNA, 270 bp, Gossypium hirsutum
  Clone ID: LIB3165-024-P1-K1-E10
cccacgcgtccgctgaaaatgaactctaatgcttaagaaaaccccaaacttcggccaaacggaaaggcaaaaaagagaaatctttttttttgaatatttttaatccaaaaaggcttaatttctctttgcgtgtgtgtgtgtttgttttttgtttctctctctcgatttttcaaaatgcaaaaaaaaacggcgttttcgttcccccacgagattttggaacacgttttcttgtatatacaatcggaaagggaccaacacacagtgtttttg

SEQ ID NO: 38034 - DNA, 234 bp, Gossypium hirsutum
  Clone ID: LIB3165-024-P1-K1-E11
cccacgcgtccggctcttctttgggtggcctacaacattctgcaaccggctttgaaccagcgtaataggatgagatctcagtgagattgtggatcttgtatggggtgtaatggcatgtaaattacctgtaattgcaccttatgttaatgaagctttctcgttatttactttaaacaaaaaataaaaaaaaaaaaaaaaaaaaaaaaaaaaaaaaaaaaaaaaaaaaaagggaaa

SEQ ID NO: 38035 - DNA, 390 bp, Gossypium hirsutum
  Clone ID: LIB3165-024-P1-K1-E12
ggagtctgacatgtgtgcgagtcaacgggctcaaatacccggaaggcgcaaggaagctgacgggcgggataccttgtgggtgcaccatcgaccgaccttgatcttttgagacgggtacgggtgacagcattcctttaagaaccaagaaggatggttaactatgcctgagcccgactaaaccagatgaaactctggtggaggaccgcaccaatactgacgcgcatatcttgcgactgacttgagtataatggcgaaagactaattgaaccgaatattagctggctcactgcacagttttcataatgattgcgggagcccttagcgagttttattatgtcaacccaatgattaaaggcatcttgggctgatcgaaatatagctattcttaaa

SEQ ID NO: 38036 - DNA, 364 bp, Gossypium hirsutum
  Clone ID: LIB3165-024-P1-K1-E2
ccgggaaatcattcaagtttcttaattttcattcgatatcgaagatgtcaggatgttgtgaaagggaggcaagggacttggcaagggaggagcgaagcgccaccgtaaggtcctccgtgacaacatccagggcattacaaagccggcaattcgacgcttggcccgtaggggaggagtaaagcgtatcagtggcttaatctacgaggaaacccgtggagttctcaagatcttcttggagaacgtcattcgcgatgctgtcacctacactgaacatgccaggaggaagacggtgaccgccatggatgtggtttatgcttttaagaggcaaggtatgactttgtattgattcgtcgttagtccattt

SEQ ID NO: 38037 - DNA, 414 bp, Gossypium hirsutum
  Clone ID: LIB3165-024-P1-K1-E3
cccacgcgtccgcagaggagttgatcaagaacgccaagtacatcgccacgccaggcaaagggattttggcggcggacgagagcacaggcaccatcgggaagcgtctctcgagcatcaacgtcgagaacatcgagtccaatcgccaagccctccgcgagctccttttcacctctcccaacgcattatcctgcctctccggtgtcattcttttcgaggaaacactttaccagaaaacctctgacgggaaacccttcgttgaaatcctcgaagagaacaatgtcattccaggtatcaaggtcgataagggcaccgttgagatagccggcaccaatggcgagaccactactcaagggttcgactccttgggtgcgcgttgtcagcaatactataaagctggtgcgcgtttcgccaaat

SEQ ID NO: 38038 - DNA, 431 bp, Gossypium hirsutum
  unsure (1)..(431): unsure at all n locations; Clone ID: LIB3165-024-P1-K1-E4
cgggncgaccgacgcgnccggaaanataccagaaaancaaaaagaagaagaaaagaganccccaagagggcnctnacaagccgggcgaancgctcaaaagcaagggggaagccaaagctggagacccaagnganccccaaggctncatccagancanggangggatgctcctccagcaatccttcctccgacaaatcggcttcaccactccaggccttctcagcggctctggctctttcttccatccttctttcagctccactccctgctgttgccgacattgcggggctcactccttgcaaagagtccaagcaattcgccaagcgcgagaagcagcagatcaagaagctggaatcctcgttgaagctttacggccccgatagcgcaccggctctcgccatcaaagccaccatcgagaaaaccaagagacg

SEQ ID NO: 38039 - DNA, 231 bp, Gossypium hirsutum
  Clone ID: LIB3165-024-P1-K1-E5
gaccgacgcgtgcgcactcaccattgttccaagtatgttgtaaaccaagctttaaccagcacccaacatggcctcactggcaggctacaacgatggcgccttccttggcatatctgaaatgcaaaaaaaccctatgaattttagcgggggagctaggtcatcttctgcaacactatccaacttattcaaaatgaagaccgaaactgtttttttcaatcccaacgccgattt

SEQ ID NO: 38040 - DNA, 386 bp, Gossypium hirsutum
  Clone ID: LIB3165-024-P1-K1-E6
cccacgcgtccgtaacaatttcacagttggtttcttcattctctctctcacccatggctgccgggatattcaccgtagatgtcgctgccatcgccaaccgagctttgggagtgtcagtcccaacctcagctttcatggggaagaaagtgagctcaagattcaacagcaccaggcaggttccttcgggaagttttaaggtgatggcggcggagaaagagatagacgaagagacacagaccgaaaaggaccgatggaaagggttggcttacgatatttcggacgaccaacaggacattacttgagggaaagggatggtggattcctttgttcaagctcccatgaatgatggaactcactatgctgtcatgggtttctatgaataacct

SEQ ID NO: 38041 - DNA, 294 bp, Gossypium hirsutum
  Clone ID: LIB3165-024-P1-K1-E7
cgaactaatcatttactaaactttaaccctttttttatttgcaacagagagtgaatacatggggactcttcaacatgggatgagctgcttcagggttcttgctcacacccaatgtcgcatctaatttaagctttccttctaagaccaccaccgggttgttcccttcaaagaacaacaacaattccaggcttgtggtgaccagggcatctgacaaggctttttctccagcaccagctaccaccactgcaccatttagaaggtggtgaaaccccttaacccaatccaccacccttt

SEQ ID NO: 38042 - DNA, 412 bp, Gossypium hirsutum
  Clone ID: LIB3165-024-P1-K1-E8
acctccccaaaggcctcaccatctcaaaaccagccaacaactcaaacctaccttcttcactcgctggcagcgccattgctggagctatcttctcaaccttaagttcatgtgaccccgccttagctgcacaacagattgctgaaatagctgaaggagacaaccgtgggctagctctattgcttcccataatcccagcgatcgcttgggtcctcttcaacatcctccagccagcacttaaccagctgaatcgaatgaggagctccaaaggggttatcatagggctagggctcggaggattggctgcatcagggttcatgtcaacaccggaagcatcggccagtgagatagctatggtagctgatgctgcatctagtgacaataggggtacccttctcctcttcgttgtagcacc

SEQ ID NO: 38043 - DNA, 413 bp, Gossypium hirsutum
  Clone ID: LIB3165-024-P1-K1-E9
ggaagcttgatttcagtcctggtggtgtttccaccattttccaggttagtgatctcaaaagctcgcctggacctggaaaaaaggagcttagattggcaacaaaacaggctcttcaggttcttcaagataattatccagagtttgttgcaaaacaggtgtttattaatgttccttggtggtatctggcattctatacaatgattagtccatttatgacccaaagaactaagagcaagtttgtcattgcactgccatctaaatctgctgaaacacttttcaaatacataccacctgagcaagtgccaattcaatatggtggtttgagtgtggattattgtgattgcaatccagaattcagtgatgctgatcctgccactgagatgactgtgaaaccagggacaaagcaaactgtc

SEQ ID NO: 38044 - DNA, 410 bp, Gossypium hirsutum
  Clone ID: LIB3165-024-P1-K1-F1
ccggcctcaagtctgcctatgctttcccagtcactaggaaggccaacaacgacatcacttctcttgcaagcaatggtgggagagtgcaatgcatgcaggtgtggcctcctcttgggaagaagaagttcgagacactctcatacctccccgatcttacacccgtacagttggctaaggaagtagattaccttcttcgctctaaatggattccttgcttggaattcgaattagaggagggattcgtgcaccgtaagtactcgagcttacccacgtactacgatggacgctactggaccatgtggaaactgcccatgtttgggtgcactgactcggctcaagtgttggaggagcttgagaattgcaagaaggaataccccaatgcattcattagaatcattgggttcgacaac

SEQ ID NO: 38045 - DNA, 387 bp, Gossypium hirsutum
  Clone ID: LIB3165-024-P1-K1-F11
acactctcaaattcagataacaatttcacagttgttttcttcactctctctctcagccatggctgcagccatctccaccgtcgccgccgctgccgccgccaaccgagctctgggagtgtcagtcccaacctcagctttcatggggaagaaagtgagctcgagattcaacaacaccaggcaggttccttcgggaagttttaaggtgatggcggccgaaaaagagatagacgaagagacacagaccgaaaaggaccgatggaaagggttggcttacgatatttcggacgaccaacaagacattactcgagggaaagggatggtggattccttgttccaagctcccatgaatgatggaactcactatgctgtcatgagttcctatgaata

SEQ ID NO: 38046 - DNA, 413 bp, Gossypium hirsutum; identical to SEQ ID NO: 37254
  Clone ID: LIB3165-024-P1-K1-F12

SEQ ID NO: 38047 - DNA, 300 bp, Gossypium hirsutum
  Clone ID: LIB3165-024-P1-K1-F2
gaccgacgcgtgcgctttattattattattattcatttacctctgccctattcctaaccctaaccctcaaattcgctgtgaaaattccccccgctttgttcaaatcctttctctaattacactaaaagccccttcaatttttgataaattcaatgtattgtaaaaatttccccattccttttttttttaatttgagaaatttccatggccgccgttgttcaagaaaccatacaatgattgaatcattgcggtctccgttcaattgtatggggtttatgaaatgcctgagatccgaaaagg

SEQ ID NO: 38048 - DNA, 421 bp, Gossypium hirsutum
  Clone ID: LIB3165-024-P1-K1-F4
gggaaggaccggggggaccgagacacccatggctactgattctcaattgaataactttccatgcatgaccttcttaataaccccacaaaacagtgactttacctcaaaacttccggttctgcctctaaactctacaaaaccaactcagaattcgatcaagaaatcttaatttttgacccagaaatcagtccagccaaggcctgttttccaggtccgtgctttggacgccgacgacgaatggggcccggacaaggaggagccagttgtaatcgagagtcctggagtggccgtggcggaagagaagaagcctgacgatgcgggggaaatagagagcttgaagaaagctttggtggattcgttttatgggacggatcgtggcttgaaagctagcagtgagaccagagctgagattgttgagctt

SEQ ID NO: 38049 - DNA, 398 bp, Gossypium hirsutum
  unsure (1)..(398): unsure at all n locations; Clone ID: LIB3165-024-P1-K1-F5
cccacgcgtccgngcttcgacaggacccggcattcggtttttccaactctatgtatacaaggacgggaatgtagttgcacagctcgttagaagagccgagagggctggtttcaaggcaattgcccttacagatgatactccgagactcggtcgcagagaagctgatatcaagaacaggttcactttacccccatttttgacattgaagaactttgaaggtttggaccttggcaagatggatcaagctgatgactcgggtcttgcttcgtatgttgccggacaaatcgatcgttcccttagctggaaggatgtgaaatggcttcaaacaatcaccacattgccaattcttgtgaagggtgtactcactgctgaagatacaaggatagcggcagaggctg

SEQ ID NO: 38050 - DNA, 412 bp, Gossypium hirsutum
  Clone ID: LIB3165-024-P1-K1-F6
acttaattctcaatctcaaagtagaaagaagctgtgtttcgaagatttaaggataatattgagcaagaattcagcttttcatggagtttttcctcaggacgagaaagaggccgcgatcctactcatggccttatcgtatggtcttgttcatggttgaaatttctccccaccaccttagccttatatattgttgttttctaggtttaaataattagtgttgggagtgtagtagctaactaaggtcataaatgtttgaaactagaattgtcattgagtgtgaacaaaaagtaatttgttaaaataaagaaaaagagattagaaaagcaaaatgcatgtagaactttagagctttgattatcaggtgaatttgaacaggttggtaaccataattatggagctcttgttcttctac

SEQ ID NO: 38051 - DNA, 401 bp, Gossypium hirsutum
  Clone ID: LIB3165-024-P1-K1-F7
cccacgcgtccgaaaaaagtaaaccagagagaaaaaagagattcagctttcttaattttttggctttggtttttgtttttttgcaattctgttgttgtaatttgattgatttacgtgttaatcaacaagatttggtggtgaatttgactgaaatttaaggttttttagggatttttcgtggatattatgaatttttttcgagagttaatcagatgagagatctgagctaaaaaagagattttgaaaaatgacgaatacggaggtagctatgaaagggaattgtgtgaacggaagaggaggaggagagagcttttcttctggttatagtgagccaaatgatggtaggaacaccgtggaagggcaaaatggtcattcgactaatcaagctccggctacagacc

SEQ ID NO: 38052 - DNA, 414 bp, Gossypium hirsutum
  Clone ID: LIB3165-024-P1-K1-F9
gtccccgacttttctcgctcttcctcctccacagcaaaagcagataaaaaacctacgctgatggctggtcgttacgataaaaatcctttcgacgaggaagaagaagaagttaatccttttgctgatacaacagcaagagggaaggcacctggccagtctaaatttggaggaggtctattttcaacgcgcactgcaagcgttccacctgcctcaaactcaagactttcaccactacctcctgaacctgctggttttagttatgagcgtgaggcaacagttgatatccctcttgatacagcttcaggaggatcacgtaatcaggatttaaagaagaaagaaaaggaactccaggccaaggaggctgaactgagaaggcgggaacaggaagtgagaaagaaagaagaggcagtggca

SEQ ID NO: 38053 - DNA, 414 bp, Gossypium hirsutum
  Clone ID: LIB3165-024-P1-K1-G1
gaaggttcagagattttagagagaacaaacaacaatggctgctacatctggggctgtactaaatggattaggctcttcatttctttgtgggggaaagaggagccaagcccttttgggtgctagcattggggccaaaggctcgccctcccctgctgctggaactagaaagttgatcgttgtggcagccgccgcacctaaaaagtcttggatccctgctgttaaaggtggtggcaacttcattgacccagagtggctcgatggatcgctccctggagactacggatttgacccactaggtcttggaaaagacccagcattcctcaaatggtaccgagaagctgagctgatccatggacgttgggccatggctgctgtcgtcggcatcttcgtcggccaagcttggagtggcattcc

SEQ ID NO: 38054 - DNA, 403 bp, Gossypium hirsutum
  unsure (1)..(403): unsure at all n locations; Clone ID: LIB3165-024-P1-K1-G10
ggcctgnaagcaaaaggctactnnggaacaaagggctagcatnncaaactngactgggggggaaggagctgncaacgggcaaggagaggancaaaagaagctcgacgttgtttctaatgaggtgttctctaactgtttgagatcaagtggaaggacagggattatagcatcagaggaagaagatgtgccagtggcagtggaagagagttactctgggaactatattgaggtatttgaccctcttgatggatcatccaacattgatgctgctgtttcaacaggttcaatttttgggatatacagtcccaacgatgaatgcctagcagaaatagatgatgattccactcttggttcaacagaacaaagatgtgttgtgaatgtgtgccaaccaaggagtaatcta

SEQ ID NO: 38055 - DNA, 401 bp, Gossypium hirsutum
  Clone ID: LIB3165-024-P1-K1-G12
gtggcgtacagtttccgttatttttccttcactttccatttgttgaagcagagggaaggtgtcagcaatggcggccatgaatctggtttcagctggggttcactctttcaatttaaaggccggtaaaaggttttcaatttccaaacccaagggttgcaaattgggtccgcgagctgctttggtagaagccggaccaagaggcgatggttccccggcggctctgcaagtatcgagaggggaccttgcggcggacctgcaagcggaggccagggccatggtgcgagccgtaaatgcctccgtttacagccccgaacttcttgccaacaaatatgggtcacgaccttgtcaggcggcgaaaaggacattggaaatattggtagccttaggctcatttgctttgc

SEQ ID NO: 38056 - DNA, 415 bp, Gossypium hirsutum
  Clone ID: LIB3165-024-P1-K1-G2
atccaatccaacttaaccaagttggaaacttaagagagagaaacagctagcaatggaacatggggtgaacctacaggataccagatgggaaggctatgctgattggaggaatcgacctgctctcaagggtagacatggtggcatttttgcagcctcctttgtcttggttgtggaagtgctggagaacctggcgtacttggcaaatgccagcaacctagtgatgtatttgtccaagtacatgcacttatctccatctaaatcggcaaacaatgtcaccaatttcatggggactgcctttcttctagctctgcttggaggtttcttatctgatgctttcttcaccacttatcacatctacttgataagcgcattcaccgagtttctggggttgatcattcttacaatacaagcacgg

SEQ ID NO: 38057 - DNA, 436 bp, Gossypium hirsutum
  unsure (1)..(436): unsure at all n locations; Clone ID: LIB3165-024-P1-K1-G4
ccgggccgacccacgcgaccggngagactctnnngnataactgnagcatatagnactaggaagcagnaatagcaagggcctgctgcgtgatctcatcggcaaccattgccaccgtgaactgctcctccccggcacaggccaacatggtggcccccttcaccggcctcaagtctgcctctgctttcccagtcactaggaaggccaacaacgacatcacttctcttgcaagcaatggtgggagagtgcaatgcatgcaggtgtggcctcctcttgggaagaagaagttcgagacactctcatacctgcccgatcttacacccgtacagttggctaaggaagtagattaccttcttcgctctaaatggattccttgcttggaattcgaattagaggagggattcgtgcacccgaagtactcgagcttacccacgtacta

SEQ ID NO: 38058 - DNA, 419 bp, Gossypium hirsutum
  Clone ID: LIB3165-024-P1-K1-G5
gcaactcccgatatgggaagttcaccaccgtcagaatgtcatctacttcccagtcaacaacaaaggccgccgcgaagggtggcaagaaagctgccaaaaccgccatcaaagagacccttttgacaccaaggttttacacaaccgactttgatgaaatggaggcgcttttcaacactgagattaacaagaaccttaaccagtccgaatttgaggcactgctgcaagagttcaagactgattacaatcagactcactttgtaaggaacaaggagttcaaagaagctgctgataagattgatggtcctttgagacaaatcttcgttgagttcttggagaggtcttgtactgctgagttctctggttttctcctctacaaagaacttggaaggaggctgaagaaaaccaatccagttgtggct

SEQ ID NO: 38059 - DNA, 404 bp, Gossypium hirsutum
  Clone ID: LIB3165-024-P1-K1-G7
cccacgcgtccgcccacgcgtccgcaaattcagttaacaatttcacagttgttttcttcaggctctctctcagccatggctgcagccatctccaccgtcgctgccgctgccgccgccaaccgagctctgggagtgtcagtcccaacctcagctttcatggggaagaaagtgagctcaagattcaacagcaccaggcaggttccttcgggaagttttaaggtgatggcggcggagaaagagatagacgaagagacacagaccgaaaaggaccgatggaaagggttggcttacgatatttcggacgaccaacaggacattactcgagggaaagggatggtggattccttgttccaagctcccatgaatgatggaactcactatgctgtcatgagttcctatgaata

SEQ ID NO: 38060 - DNA, 414 bp, Gossypium hirsutum
  Clone ID: LIB3165-024-P1-K1-G8
cccacgcgtccgcttatggccactcctctgttcctcagaaactctctattccctcctctccaccattcctttctttccttccccaaatcttctttcccttcgtttccttcctccattaaatcaaggcctctaacttctaccatgatgagaggaagtgaaataacagaggaagtttccgaaaccaaagaggcagtaaatgtggatacaaagaagaaaactatatttgtagctggagcaacgggtagtactgggaaaagggtcgttgaacagctactttctaagggattttcagtcaaggctggggttcgtgatttggggaaagctaaaactttgctttctaacgacaacccatctcttcaaattgtgcaagcagatgtgactgagggatcagcaaagctagcagaagccattggt

SEQ ID NO: 38061 - DNA, 410 bp, Gossypium hirsutum
  Clone ID: LIB3165-024-P1-K1-G9
cccacgcgtccgaaacatcaatggcggcagctaagccattgccgtcatcccttcacactcacaaaattctctcttcatgcaaccaaattttaccttcgctcctccatttccgtcaacattacagcaacccaaaaagccaacaaccacaaaggcgaagaaaacactcaagctccttagatggcgcctacggcttggctatcaaagcttacatggaaaacccaaactccatttctggtttcgcaaacaaagtcattggctctctccctatagtcggccttgtcgctaggattttcagtgatgaaggcggtgttggtggggatatcattgattttgctgagtttagaagaagggtgggcaagaaatgtactgttactgattctagagccttttacgagttccaagaaaggaga

SEQ ID NO: 38062 - DNA, 371 bp, Gossypium hirsutum
  Clone ID: LIB3165-024-P1-K1-H1
cgcctggtaggattgtaagggcaattggagaattagctaaatctattggggctgaagggttggtggctggtcaagttgtggatataaatagtgagggactaacagatgtggggttggatcatttagaattcattcatgttcataaaactgctgctttgcttgaagctgctgtagttttgggggcaattcttggaggtggatgtgatgaagatgtggaaaggttgaggaaatttgcaaggtatattgagcttttgtttcaggttgcggatgacatacttgatgtgacaaaatcatctaatgaattagggaagactgcaggaaaagatttgttggctgataaagtcacttatccaaagttgattgggatagag

SEQ ID NO: 38063 - DNA, 405 bp, Gossypium hirsutum
  Clone ID: LIB3165-024-P1-K1-H10
acgcacacacgtccgtgcactgctccatgatctgatcggcaaccattgccaccgtgaaccgctgctccccggcacaggccaacatgggggcccccttcaccgccctcaaatctgcctctgctttcccagtcaccaggaaggccaacaacgacatcacttctcttgcaagcaacggtgggagagtgcaatgcatgcaggtgtggccgcctcttgggaagaagaagttcgagactctctcatacctgcccgatcttactaccgtacagatggctaaggaacgagattaccttcttcgctctaaatggattccttgcttggaattcgaattagaggagggatttttgcaccttaagaactcgagcttacccacgtaccacgatggacgctactggaccattggggaac

SEQ ID NO: 38064 - DNA, 416 bp, Gossypium hirsutum
  Clone ID: LIB3165-024-P1-K1-H2
cccacgcgtccgctcttctctcttgcttttcgtcttgcgttcttttgatatggcaggaaccggggtggttgcagtttatggaaacggggctataaccgagactcacaaatcccctttctcggtgaaagtggggctagcccaaatgctccgaggcggagttataatggacgtggtcactcccgatcaagctcgcatcgctgaagaagccggagcctgcgccgtcatggctctcgaacgagtccccgccgatatccgagcccaaggcggcgtggctcgaatgagtgacccacaactcatcaaagagattaagcaatccgttactatacctgtcatggcgaacgcccgtattggacatttcgttgaggcccagatcctcgaagccattggcatcgattatgttgatgagagcgaaattc

SEQ ID NO: 38065 - DNA, 414 bp, Gossypium hirsutum
  Clone ID: LIB3165-024-P1-K1-H3
ctctttctctctttgtctccgcccttttctcatggatccttttggtctcttctgtactggggctgttcttgcctgcggtctttactggttcgtctgccttttagggccggccgagcaaaagggcaagcgagccgtcgatctctccggcggctccatctctgccgagaaagttcaggacaactacaaacagtattggtctttcttccgccaaccaaaggagatcgaaaccgccgaaaaggttccagatttcgtcgatactttttacaacttagtcaccgatatttacgaatggggttggggtcagtccttccacttttctccttccattcgagggaaatctcaccgggacgctacgcgccttcacgaagagatggccgtcgatatgatcgaagtcaagcccggagatcgagtcct

SEQ ID NO: 38066 - DNA, 355 bp, Gossypium hirsutum
  Clone ID: LIB3165-024-P1-K1-H4
cccacgcgtccgcccacgcgtccgcccacgcgttcgcccacgcgtccggttggtgttattgaagacgaggaaaatgcctatactggaactagagtccggccctttgttgccacgccaagggttgaggatgagaagaagcaaagtcccactaccttgaacaagattttatgtcttgaagagcttttctctttggaggtttggagagcatctctggcagagctccttgggacagcagtgttggtcttcgcaatggataccatagtcatctcctcctacgagacacaaacaaaaacgccccaccttataatgtcatttcttattgctgtcactatcacagttctcctcctagccacgt

SEQ ID NO: 38067 - DNA, 402 bp, Gossypium hirsutum
  Clone ID: LIB3165-024-P1-K1-H5
atcggcttacccgccgttccagaaggttcgccgtcatcattcgaccgatactgatccccaacctattaaacttttgataggtcaattatgaggcaagatgaatgagatgatagaaaagcgtggcgtcatattagattaccttgtaagcccaacaattgtgagtggcacgcggatccttgaattggttgaggaaagagtgagcggactgctcgttagagatgggaccagcaatggcgatgaatttgctcttttttatttctttttcgaatgttactgtttctttaatggtggtgaacgcgcctgcgttgctggtggtgccggagctgctggctgtaatgaccattggtttttcggcgggggagagggcggaaattgaagcggagaggcggtggttgagcttgt

SEQ ID NO: 38068 - DNA, 401 bp, Gossypium hirsutum
  Clone ID: LIB3165-024-P1-K1-H6
cccacgcgtccgattccttcaccaccacagccgaacgggaaattgtgagagatgttaaggaaaagctgtcttacattgcccttgactatgaacaggagctagagacctcaaaaacaagttcatcagtagagaagagctatgagttacctgatggtcaggttattaccattggtgctgaacgtttcagatgccccgaagtgcttttccaaccatccttgattggtatggaagctgcaggcatccatgagactacatacaattcaataatgaagtgtgatgtggatatcaggaaggacttgtatggtaacattgtccttagtggtggtacaaccatgttcccgggtattgcggacagaatgagcaaggagctttctgcactcgctcctagcagcatgaaaatc

SEQ ID NO: 38069 - DNA, 306 bp, Gossypium hirsutum
  Clone ID: LIB3165-024-P1-K1-H7
cccacgcgtccgagaggttacatgttcaccaccactgctgaacgggaaattgtccgtgacatgaaagagaagcttgcttatgttgccctggactatgagcaggaactggagactgccaagagcagctcatctgttgggaagaactatgaggtgcctgacggacaaggcattactattggagctgagagaatcccgtggccggaagttcttttccaaccatcttttatcgggatggaagctgctggaatccattgaactacctacaactttatcatggagtgcgatgtggatattaagaaagatctt

SEQ ID NO: 38070 - DNA, 286 bp, Gossypium hirsutum
  Clone ID: LIB3165-024-P1-K1-H8
cggacgcgtgggcggtgacccatctaagttctttcaaagggacgatggattccaaagagatgtgtaccaaattgcattgtttctggcagtcctctactttgttgtacagttcctaaggacaaccctttaatacccaaaataatttcttcattatatatattttcatacttataattattgtaaatttgtaattatatacaccaatactcagaattttttttttctttttttttaaatgtatattcggaaaaacccttataaaaaaaattttaagcatattcttagt

SEQ ID NO: 38071 - DNA, 290 bp, Gossypium hirsutum
  Clone ID: LIB3165-025-P1-K1-A11
ggaaaaccggccgcgcccacgcaaccaaaagttccctcccactaaatggttttttttccctcataccaactttcgggtgggttattatcaccttccatctcctccctttctccaaccagctttttctgaaaaccatgttaattgactcaaaccctagaggctcacgtttactctctgatcttcctggttgatgaaggatggaaataaaattcaattgagactcaagatttttataattggaccgtgccatctatgactcaacaaaacctccatggacttaacattaaatt

SEQ ID NO: 38072 - DNA, 361 bp, Gossypium hirsutum
  Clone ID: LIB3165-025-P1-K1-A12
gaaaaccgggcccgacccacgcgtacggttgcctcttcatcaacgatctcgactttggatccggtcgtatgggaggaaccagcgcagggcacattgaacaaccaaatggtgaacgccacactcatgaacatcgctgataaccccaccaacgttcagctccccggtatgtacaacaaggaagagaaccctcgtgttccgatcatcgtcaccggtaacgatttctcgacgctgtacgcgcctctcatccgtgacggtcgtatggagaagttatactgggcacccaccagggaagataggatcggtgtttgcacaggtatttttcaggaccgaccatgttcccgttgatgaccttgataagctt

SEQ ID NO: 38073 - DNA, 328 bp, Gossypium hirsutum
  Clone ID: LIB3165-025-P1-K1-A2
cccacgcgtccggaggctttggaacaaaaagatatattatagccacacttcccacacccgaggtggggtctttcccttcttcaaccccactttctttcaaactcttcttcgcattccctgaaaccagaaggaaatcactaagcatcagctctactccgaagggaacaccatctccttttttggcttacgtgccactgatggtgagtgccagttctcaagccgctgctgcacctactgtcaatttgacggcaatttccaccgaaatgaaggcttgggtgtacggggaatatggaggtgttgatgtgttgaagttggatgatatagcgtg

SEQ ID NO: 38074 - DNA, 424 bp, Gossypium hirsutum
  Clone ID: LIB3165-025-P1-K1-A3
acccacgccgtccggccatggcaacaaaagctgctttagctccttcatgaatccctgccaacaccaggcttccgtctaagaccactcactctttccccactcaatgctcttccaagagactggaagtgactgaattctctggacttcgatccagctcatgcgtcacctttgccaagaatgttagagatacttccttttttcgacgtgctggctgcccaacttactcccaagagtgaaggtgtaccatcagcatctgttaggggagaaacagttgccaaactgaaggttgcaatcaatggatttggacgcattggcaggaacttcctcagatgctggcatggcaggaaggactcacccctcgaggttgttgttgtaaatgacagtggtggtgtcaagaatgcttcacacttgctgaaatatgact

SEQ ID NO: 38075 - DNA, 406 bp, Gossypium hirsutum
  Clone ID: LIB3165-025-P1-K1-A4
aaagcttacatgtttactttctgttaaaacccatttttcttttccttatgcatcactgatcccatgaaaatttgtcctctttttgtgtcatatatatctgcaagagagtgacatcatttatatccttaactagttcatataatcatttgttcgaataaacttagcttaatcttgatataaaagaatgggtctctcaagtctcccagccccatcagaaggagtgctatgtgtactcttggtaaacacagctttatccatatctatggttaaaggcataattcgatcaatccttcacattatcggtatccatctctcctcgtcctcgtcctcctcctcctcctcgtcatcatcatcatcatcatcatcatcgccatcctcggatcttattgaaatccctgcggtatca

SEQ ID NO: 38076 - DNA, 387 bp, Gossypium hirsutum
  Clone ID: LIB3165-025-P1-K1-A5
cggcccgccccacgcgtccggcgtgagccgttatagttacgagtccctccacttttttttcttataattgtgcttccccgctgcaaaggctttattcttcattcgcttcgccgaatttttatctactttttatctgaacggagtttggtaatccagttttcgtcttcggttgattcatgaaatcttagtttttgaattgcgtgactgaatgatctaatggagtctaaaggtgggaaaaagaagtctagtagttgtaagtctttattctacgaagctcctctttgttacagcattgaagacgtgcggcccaactgtggaatcaagaagttcaaatctgctgcttactccacctgcgctcgcaagccatcctgatatactcacaagcgt

SEQ ID NO: 38077 - DNA, 412 bp, Gossypium hirsutum
  Clone ID: LIB3165-025-P1-K1-A6
cccacgcgtccggtggctgatcctcaaggtgttttttttcagacttttcagaaccttggagtatgtgttgtgcaacagtgtgccaagattcgccagcaagtatcaacagcagttacatatgacaaatccatcaaggccataagagttaaggtaccggattcagaggaagaattccttctgcatcctgcaacagtaagacggaatgaccgctctgcccaaagtgtggatgagtggaccggggagcaaaagctgcagtacggtgacattccagaagatattgaacctgaagaaattcgacctatgggaaactatgctgtgtcaattacgtggccagatggatttagccagatcgctccctatgatcagctccagatgatagagcgtttagtggatgttcctcaaccgacagccg

SEQ ID NO: 38078 - DNA, 360 bp, Gossypium hirsutum
  unsure (1)..(360): unsure at all n locations; Clone ID: LIB3165-025-P1-K1-A7
ggaaanaccggcgcgacccacgcgttcgcccactcgttcgcccacgcgttcgaggtcgctttttgtctgccacaatttcggttgaaaagggacaattaaatgggaattgtctaagaagctcacaacatgaaggtactgggttcaggcgatcgagtcattgatttggctcatgggttcggtactgaccaatctgtttggaagcacttggtccctcacttagtcgactatttccgtgtcgtatagtacgacaacatgggtgccggaaccaccaaccccgaatactttgatattaattgttatgcttactctcggaaggatatgcttatgattttgcttgcgtaccttgaatgaaaatccact

SEQ ID NO: 38079 - DNA, 251 bp, Gossypium hirsutum
  unsure (1)..(251): unsure at all n locations; Clone ID: LIB3165-025-P1-K1-A9
acccacgcgtacgnccacacatacttaacggtgttttgttattaataataccaccaagattgcggcaaagcaggatggcttccctgcatgaaccacggctagcggacaacggcttgaagggatctagcaaggatattctccatggcaggacatgcacacaacatgtcgacttcgttattgcagaaaaaatcggacctgacgctagtttccaaggttcgctttgcaaagcttaggcagtccctcaccaatct

SEQ ID NO: 38080 - DNA, 432 bp, Gossypium hirsutum
  Clone ID: LIB3165-025-P1-K1-B1
gaccacgcgtccgcccacgcgtccgaaagcactgaaaaagcaaaaccatgttctctgcttctctcctcaagactgcaccagttttagacaagtctgagtgggttaagggtcacacccttcgccaaccttccacttctgtggtgaggtgccaccctgttgcaccctccggactaactgtgcgtgcaagctcatatgccgatgagcttgtcaagactgctaaagctattgcttctcctggccgtggaattttggccatggatgagtccaacgctacctgtgggaaacgtttggcctcaatcgggctagaaaacacggaggctaaccgccaagcctacaggacgttgcttgtttcagctcctggccttggtcagtacatctcaggtgccatcctctttgaggaaaccctctatcaaaccacaattgatggcaaga

SEQ ID NO: 38081 - DNA, 368 bp, Gossypium hirsutum
  Clone ID: LIB3165-025-P1-K1-B12
cccacgcgtccgactgtagcatatagtactagttagcagaatagcaatggcctgctccgtgatctatcggcaaccattgccaccgtaactgctcctccccggcacaggccaacatggtggcccccttcaccggcctaagtctgccttgtttcccagtcactaggaaggccaacaacgacatcacttctcttgcaagcaatggtgggagagtgcaatgcatgcaggtgtggcctcctcttgggaagaagaagttcgagacactctcataccttcccgatcttacacccgtacagttggctaaggaagtagattaccttcttcgctttaaaagggattcttgtttggaattgaattagaggagggattcg

SEQ ID NO: 38082 - DNA, 407 bp, Gossypium hirsutum
  Clone ID: LIB3165-025-P1-K1-B2
cccacgcgtccgaaagataaacataaccaaaattaattatggcttctgcttccgctactgtgctgaagtcttcacctattatcgacaagtccgagtggattaagggccaaaacctccgtcacccttcggtttgttttgtacggtcacaccctacatcggccgcctttaccgtccgtgctagttcatatgccgatgagcttgttaagaccgcgaaaactgttgcatttccaggtcgtggtattttggccatggatgaatcaaatgctacatgtgggaagcggcttgcctcgattggtctcgagaataccgtggcaaaccggcaagcttaccgtacccttctcgtgtctgcccctggccatggtaactacattttgggagctatccttttcgaggtgactctttaccaa

SEQ ID NO: 38083 - DNA, 396 bp, Gossypium hirsutum
  Clone ID: LIB3165-025-P1-K1-B3
cccacgcgtccgcaattatcaactgttgcgatttcttttcttcgcctctcctgtttcttgctcctaaaacatatagtcgactgcttcgaacttagttgagaaagatagatgcttaggttaaatgtttattgttctctaaatattcctattccggaacatattaagcttgggaatagttatggttcaggcttacctaagttccatggtggacccaagctgcctcatcgggtttcagtcagggcgttaaaagatgagatggacggtggtatgagcggcggctttcaaggccggagctgggaacctggcttggaaattgaggtcccttttgaacaaagaccggtgaatgagtactcgtctttgaaagatggacccttgtattcatggggccaactggga

SEQ ID NO: 38084 - DNA, 388 bp, Gossypium hirsutum
  Clone ID: LIB3165-025-P1-K1-B5
gcagtttttgataagaaaagagagggaaaaaggaaattaaagatgtcaacagcttcttcattttgttcatcaactcaagttaatggctttggagggggacttaggcttctaagaacccatctttctcaacccaagtccttttcttttactaggaggagaactgctacagtagtgaaggcaactgctcgagtcgataaattttcgaaaagcgatatcattgtttccccatctatactctctgctaatttcgctaagttgggggagcaggtgaaagccgtagaagtggcaggctgtgattggatccatgttgatgtaatggatggccgatttgttccaaacattacgattggaccctctgtggttgatgccttacgacctgtgacagatc

SEQ ID NO: 38085 - DNA, 213 bp, Gossypium hirsutum
  Clone ID: LIB3165-025-P1-K1-B7
atttatacgtgttttacaggaatctttctatttttgtggccgaatattcagaaggccaggctcgttttctactataaattaattcctccatatatgttctctaactgctctgtttctaaacttctataattctgaaactatagcaaattgctttcaactcacaattccctattgtctaatctactgacttttttcacatgaaactcactaata

SEQ ID NO: 38086 - DNA, 411 bp, Gossypium hirsutum
  Clone ID: LIB3165-025-P1-K1-C1
gcagaggcagcaatgggtgcatacaaagcaccaattccttatttcctttcttcacccaatggtaacgctaaaaccctgagaaccccatttttgaaccttggaaccaccagcaggcgcttccttttgttcttcctttcctctcctatccttcccagcagtaacagtcttgccctagacaatgctaaattgcttcagtccaatatcatggatgttttagcttccagttttgacccagtgagtcaagctgagaaagacgccagttccctcatcagtcgcagagtatctgaagctgtggagttgttggagagagggaaggaattgcaggctcagggtgattttcccaaagctcttcacttctttactttggtggttgaaaattataaagattttgcattctcagactatgcaaga

SEQ ID NO: 38087 - DNA, 385 bp, Gossypium hirsutum
  Clone ID: LIB3165-025-P1-K1-C11
cccacgcgtccgctttcatttatttatttgtttaaactcacacaagtttaggaagaagaagaagatgtcgtggcaaacgtatgttgatgatcacctgttgtgtgatatcgaaggcaaccatctctctgccgctgctatcatcggccaagacggcagcgtttgggctcagagctccaatttccctcagtttaagcaagaagaaatcaatggcatcatgaatgacttttctgaacccggatcacttgccccaaccggattgtaccttggtggcactaaatacatggtgattcaaggtgaaccaggagctgttattcgagggaagaagggccctggaggtgttactgttaaaaagaccaatcaggccttgatcatcggcatttatgat

SEQ ID NO: 38088 - DNA, 417 bp, Gossypium hirsutum
  Clone ID: LIB3165-025-P1-K1-C2
cccacgcgtccggacaccaagaaaagcctcaccacaagcctctcatcgacaatggcggctgccacttcgaactccgctttgcctaagctttctacgttaacttcgtccttcaaatcttccatacccatttccaaatccagccttcccttctccacaacccctcaaaagcccaccccttaccgctccttcgacgtttcctgctctctttctcatgcaagctccaaccccagatccgctgccgcatccgttacccaaaaaactgctcctccccattatttcatttccaggtatgcggatgatgagccccggaaaggcgctgatatcctggtggaagccctggaacgtgaaggggtcaaggatgtgtttgcctacccaggtggagcttcaatggagatccaccaggctttaaccccggtc

SEQ ID NO: 38089 - DNA, 330 bp, Gossypium hirsutum
  Clone ID: LIB3165-025-P1-K1-C3
agctccttcacaccctccattttttgagatgtttttttatgcaatcgtttcgttgaaagagagggcaggatcgagccaatatgcgattgcgaaattcattgaagagaagcataagcaattaccggcgaatttccgcatagtcttacttgttcagacgaggaagtttgttgcttccggaaagcttcgaaaagtgaaagcctttattaagctgccttcggcttatgccgtaactaagaaaccagccgccgtagctaagaaacctgccgccgcgaagcctaaatctgcaactaccactaccgtcgcaaagttcaagccgaaggctactaaaac

SEQ ID NO: 38090 - DNA, 373 bp, Gossypium hirsutum
  Clone ID: LIB3165-025-P1-K1-C9
cccacgcgtccgattaggccaaccagcgctattaaaatttgctatcccaaatcggtgatgatcttaatctcaaactcgatctctctgcttgtattttcttttttgttagttcatattaatctcagcaccaaggaaccaactatgttcgtggacctaaatggttgtgaagttgctgtcgatcaagtctttttcatcatctatctcaaccattatgtatttttttttgttcattttgtagcctttgaattagaccctatagttcttgatgtatcacaaataatattcctagtagcgttgacttttgtcatatttcgatttggacatagtactttagcagctgatgatgtttttgatcattgctggttggaacata

SEQ ID NO: 38091 - DNA, 417 bp, Gossypium hirsutum
  unsure (1)..(417): unsure at all n locations; Clone ID: LIB3165-025-P1-K1-D1
gtgagactctnttgtataactgtagcatatagtactagtaagcagtaatagcaatggccggctgcatgatctcatcggcaaccattgccaccgtgaactgctcctccccggcacaggccaacatggtggcccccttcaccggcctcaagtctgcctctgctttcccagtcactaggaaggccaacaacgacatcacttctcttgcaagcaatggtgggagagtgcaatgcatgcaggtgtggcctcctcttgggaagaagaagttcgagacactctcatacctccccgatcttacacccgtacagttggctaaggaagtagattaccttcttcgctctaaatggattccttgcttggaattcgaattagaggagggattcgtgcaccgtaagtactcgagcttacccacgtactacg

SEQ ID NO: 38092 - DNA, 314 bp, Gossypium hirsutum
  Clone ID: LIB3165-025-P1-K1-D10
cccactcttccggaaaaatggcatccttttcatgtacaccacaatcccttaccacggtgagcttacaaaaggttcttcaaggattacccaaccgagactcttgggtggcaaagcttcttaaggagctcaagtggagagtgtccagatgagcggcgagaggaaaacatagggcaacactggcatgagggagatgatgttttcagctgcagctgctgctatttgctctgttgcgggggttgcaacggcggagcctaaacgtggtagcgcagaggccaagaaggcgtatgcttctttttgtgtttctatgccaactg

SEQ ID NO: 38093 - DNA, 401 bp, Gossypium hirsutum
  Clone ID: LIB3165-025-P1-K1-D12
gctcttaaaaggttgatagacataagcatgggtgtcattacacctttatcggaacagctagacaaagccattgccaaatgctatggctctagtaaaccttaaggaattatcaactggagcttacaagcttttgcccgaaggtacacgcttggttgtatctgtacgtggtgacgagccctatgaagagctggaaatcctgaaagacattgatgctacaatgcttcttcataatataccttttgatgaagaaaagattggtcgagtgcatgcagcaaggaggttatttgagtatctatcggagaacagtcttgatttccctgtaatccatcatattcagtttccaaatgggactcacagggatgacttagtcattaatgctggcaccaatgctggagcccttc

SEQ ID NO: 38094 - DNA, 191 bp, Gossypium hirsutum
  Clone ID: LIB3165-025-P1-K1-D2
cccacgcgtccggaacgtataagcaaagcccactgtgggtgctgctactgctgctgctcgggagcctttaacatcagcatcagcaccatcatcttattctttattatcataatttataacttaatctaatcattaataatacctatgctgtttttcttttagtcatttacattatttctattgaatcctct

SEQ ID NO: 38095 - DNA, 266 bp, Gossypium hirsutum
  unsure (1)..(266): unsure at all n locations; Clone ID: LIB3165-025-P1-K1-D3
cggacacttgttcatatctactgctactgattccctttcttgctctgaaaccaanccgcgcgtggttaaattgtataagcgtcccattccccacagtgttcatcactgctattgccagagctgtttgtgcagcaacatttgttgaggtacaagatgacgtatcgatactatgcctgtttcggccttggattccttactgtctatgatcagctgttggaaggttacccgggtgatgaaggtctagattccacctttcaagcttatat

SEQ ID NO: 38096 - DNA, 431 bp, Gossypium hirsutum
  Clone ID: LIB3165-025-P1-K1-D5
gggccggacccacgcgtccgcccacgcgttcgaaataccaactggaaggatttttttataacgatgctggatgtttaccgggagcttatacatgaaggacttcgcatatggatattcagtggtgacacagatgctgtaatcccaattacatccacccgctacagtatagatgctctcaagcttgcaactatgaaaccatggcgtgcctggtatgatgatggccaggtaggaggatggacccaagagtatgaaggactgaagtttgtatcagtgaggggagctggacatgaagtccctttgcatagacccaaacaagctctcaccctcttcaaagctttcttatcaggaacctccatgcctgcctcttcctctgcccctgctcatgtccatgcttctcagctactcatctccgactgctgaacttttgggtt

SEQ ID NO: 38097 - DNA, 278 bp, Gossypium hirsutum
  Clone ID: LIB3165-025-P1-K1-D8
acccacgcaaccgccccttcctttcaatcttcttctctattttcttcatggaaaagctctcctgggtgggttatttcaaacccccgtttccaaaaccctactctaaaacccaccgccccattcctccgaccttccaaacccaacctcccttttttaaaccatccccattgccttccatcagatcctccattttcgaaccagtatgaagaaaccgttatactctcataaccttttggttaactgtacctttttcagtcttccaattcaatgctttaccc

SEQ ID NO: 38098 - DNA, 397 bp, Gossypium hirsutum
  Clone ID: LIB3165-025-P1-K1-D9
catccttgttttgaatggttctggtggtgttggaagcttagttattcagttagcaaaacgagtattcggtgcttcaaaagttgcggccacttccagtactggaaaactggagttactgaagagcttaggtgccgatttggctattgattacacaaaggagaactttgaagatttgccagaaaaattcgatgtagtctttgatgccattggacaatgtgatagggctgtgaaggcagtgaaagaaggcggcagcgtcgtggccttaaccggtgctgtgacaccgcccggttttaggtttgttgttacttctaagggagaggttcttaagaagctaaaattatatttagagagtgggaaaggtgaaccggttgtggatcccggggaccattcccattta

SEQ ID NO: 38099 - DNA, 370 bp, Gossypium hirsutum
  Clone ID: LIB3165-025-P1-K1-E1
ctgaaactgcctgagcaattgtagtaaccattttatttaccctagattctaatctatgtggtcacgctctgcataggcttcagcctacactctattcttcaaacgcttatctgcatttgaactgaacggagatctggactgcagttgtcgatccatgttgagtcaggagatgatacatgaatgaattgcgtgactgaatgatctactgaatgatcatagggagaataagagtggcagtaagaataacagtttattctacgattctccttacggatacagtatcgaatacagtataccaaacggtggaacaaacaagggcataactgctgttaactccaactgctactgcaagtgatcttgatagacttac

SEQ ID NO: 38100 - DNA, 236 bp, Gossypium hirsutum
  Clone ID: LIB3165-025-P1-K1-E10
gtcatctgtctgtctctctgttttacttcacattcactatcactaccattatggctgcgggtactgtttctgtagccaaacccaaccttcagattcaggcaaaaggaaagggtgttggttttgcagatttctcaggcctacacaactcctctactagccttccctttgccaggaaaacctctgatgactttcattcactcgttgcttttcagacatctgctctaggaagcaataat

SEQ ID NO: 38101 - DNA, 406 bp, Gossypium hirsutum
  Clone ID: LIB3165-025-P1-K1-E11
cccacgcgtccgattcctctcagagctcactatagatcttctctgttaaccatgggggcggacggatttgtaggagatgaacgcaaagttcaaaagaattactggattgaacactcggttgatctgacggtggaggctatgatgctcgactccaaagccgctgatattgacaaagaagaacgtcccgaagtgctctccttactccctccatatgaagggaaaaccattttggaactaggagctggcattggccgatttactggtgacttagctaagaaggctggtcatgttatagcattagacttcattgagaatgttataaagaagaatgaaaccatcaatggacattataagaacgtcaaattcctctgtgcggatgtcactttccctgatttggcttttacag

SEQ ID NO: 38102 - DNA, 359 bp, Gossypium hirsutum
  Clone ID: LIB3165-025-P1-K1-E2
cccacgcgttcgtccacgcgtccgcttatatcccaaaacccaaatcctcagccagaggcaggggaaacttcatttctctgccacaaaaagctcccccgccccaactcccctgggatcaacagcacaattctaaacccaaaaacataaaaaaatggcagcaagtgtagcaacaatggcgatgctcaatgcaaaatgcctaagcatcagctcaactaagatgagcagcccaacttagccaacctcaaagcccttcttccttttctccatgcagaacctccccaaaggcctcaccatctcaaaaccggtcaactactcaatcctaccgttttcactctctggcaactcctatgctggagcta

SEQ ID NO: 38103 - DNA, 190 bp, Gossypium hirsutum
  unsure (1)..(190): unsure at all n locations; Clone ID: LIB3165-025-P1-K1-E5
gggnggacccacgcgtccggggaaacaaatgttcactgcctactccaaaatttcttttattttgtcgaccataagggcggggggttttgttttttatttgagcaacaaccttcacacaaatgaatccgacaaggaatatattttggggatctaaaagaccttaactgcatcggctttatacggatttata

SEQ ID NO: 38104 - DNA, 414 bp, Gossypium hirsutum
  Clone ID: LIB3165-025-P1-K1-E6
cccacgcgtccgtccacgcgtccggttttgcttgaacccgacatccatggctacacacgcggggcgtagctccttcaaggatccctgcaacaaccaggcttccttctaagaccacacactctttcccctctcaaattcaatgctcttccacgagattacaagttactgaattctctggactgcgctccgcctcatgcgtcacattcgtcaacaatgctagagatgcgtcctttttcgatgtggtggctgctcaacttactccaaagactgcaggtggagcaacacctgttaggggcgaaacagttgccaaattgaaggttgctatcaacggatttggacgcatcggcaggaactttcttcgatgttggcatggcaggaagaactcttccctcgacgtgattgttgtatatgaca

SEQ ID NO: 38105 - DNA, 402 bp, Gossypium hirsutum
  Clone ID: LIB3165-025-P1-K1-F1
actggccttgctagtaagagacaaatggttcagttttttaacgggaaacccatgcctcgtgttcaaaggaaactcaatcttcaagttcgctgtttggcagaggacggtgatcaaaaggagccaatgccagcagcaagaacgcccgaacctaagcagagccctccacggatatcacccaaagtgagcacgaaaatcttcgatgtgtttgcctttagtgggcctgcaccggagaggatcaacggcaggttggcgatggttgggtttgtggcagcgctggcaatggagttatccaaatggcaagatgtgttgacccaaatatccaacggtgggatcccgttgttcgttgggactagtattgagttattcgcttgcatctttgataccgatgtttttaggtgagac

SEQ ID NO: 38106 - DNA, 278 bp, Gossypium hirsutum
  Clone ID: LIB3165-025-P1-K1-F11
ccgggcggacccacgcttccgttcacactttcgcaaaatcagttgctatttttattttctctacaaccatggctctagggggggcatcattctccggtatggcagaatatttttcccctttcaccccagtaagtcggggaacatggccgtgttttcatgatgaaaaccaccaagcctgattcttcaggttgcctatggatctgacctatctgagtattgtacttgtgtccaaatttcgttaagccaccatcatacttgatctgtttagtttctattgt

SEQ ID NO: 38107 - DNA, 352 bp, Gossypium hirsutum
  Clone ID: LIB3165-025-P1-K1-F12
ggaaaacccggcccgacccacgcgtccgcccacgcgttcgcccacgcgtccggaataaattatggtaaagagagaaccaaacagcaggggcaggaacagtgcaaaagttttctcaagaaaaagtggagatatataaaggttgataccttaactcaagaaaaaaaaatggcgttttacgtcgacgaagaagaggtctggaaatgtccgagtcatccttctaagcgtcgccgtactggtatctgcccgtgttgtcttctagacaaacttgctttttttttgctcgacttgcgcccacgcgcgttcttgtttatgtattacaaccttttcttctttttccttcttttacttcttt

SEQ ID NO: 38108 - DNA, 225 bp, Gossypium hirsutum
  unsure (1)..(225): unsure at all n locations; Clone ID: LIB3165-025-P1-K1-F6
cccacgcgtccgcccacgcgttcgagactcttttgtatacctgttttattttttaataggaagcagtaatagcgggggccttctccatgatctcattggcaaccattgccaccgngaaccgatcctacccagaacaggccaacatgttggtcctcttcaccgtcctcaaatctgcctctgctttcccagtcaccaggaaggttttctacgactttactttttctt

SEQ ID NO: 38109 - DNA, 216 bp, Gossypium hirsutum
  Clone ID: LIB3165-025-P1-K1-F7
tcataactttcacctaatcaaaacttttaatatattataaacctcaccacaccgggtccggtgaaacccaatccagcaccaatcatcacacctaccctgctgttttacagagacatttttctccattattggacaccacaaccatttatgtctgaccttattcttctcgaatacccacggtactacactcctctatacacaataccgcccaatacc

SEQ ID NO: 38110 - DNA, 413 bp, Gossypium hirsutum
  Clone ID: LIB3165-025-P1-K1-F8
attttctaaacacagcccccacttcaccaaacttctcagccctaaaaatcaaattgtttgggcatattccagcagccactgagtacaccacttcatcaggtgatcgatggcactccagcgacaatcgatgatgcctttggacccttccaacttcgattttcagcgaagagggcagagatccatggctgatttgtaaggttccattgtggctatggtcgtacggaaggaggggccgttcgtgggcgtggaggaggctcgaatgcttcggtactggtttcatgcgagactgctgcgcacttgagcttggtggctagggttccaaaaatctggttggggtttgagttttgggccattaggtgttgggctatttggggttaattgggttagatctgttatcgggcttaagggattta

SEQ ID NO: 38111 - DNA, 415 bp, Gossypium hirsutum
  unsure (1)..(415): unsure at all n locations; Clone ID: LIB3165-025-P1-K1-G1
cccacgcgtncgcccacgcgtncgcccacgcgttcgctccatttaccatctaccccttggggtcccttcgttgtcctccaagccccaagtttccaaatggtacctcctctttatgtggcccgtcacggtttggtctttgctcttaacttgggttttaggccatgcgtttatttcagagcggaacgcctttaagaaactcaaacttcaagcttgggttgttcccaaatacaatatgcaatattcttcaaaatggcaaagagaaactatcagtaaattgattggacaagccattcgagatgcagacaagaaaggagctaagtggctgagtttaggccttctgaatcagcatgaggtgtttagcagaaacgttgagctttatatgaaaaggaaccctcagcttaaaataaaagtcgta

SEQ ID NO: 38112 - DNA, 412 bp, Gossypium hirsutum
  Clone ID: LIB3165-025-P1-K1-G10
ggcccctagaatcctccataactgttttctagtatccatccaatggccaccctctcagctggtcctaacactaatcctaacaccaatttcctctcccccaccgatcaatctaatcacgaccgggaatctatccctcccatgcaacatcacccttcttccgaaacggactccgatgctaaccctaattttcactccccacttttgaacccccccgattcggttcctccagccgtggctccgtcgtctcttctccacctctccttcaaccaggatcatggctgctttgccgccggcactgaccatggcttccgaatctacaattgcgatccatttcgcgagatctttcgccgagacttcgatcgcggtggcggtatcggggttgttgagatgcttttttcgtgtaatattttgg

SEQ ID NO: 38113 - DNA, 410 bp, Gossypium hirsutum
  Clone ID: LIB3165-025-P1-K1-G12
ctctccacaaaacccgaaggaaaaaggaaaattcttttttcctctgtccttccctttcaacgcagaccgaaagagaaggcggagtcctcccacaatttcttgtggccaccaatcacgctctactcttaagggaagtcagcatggatcaggctcaacacccaactgtcatgcagaaggtagcagggcagctcactcgttttagcaattcccaagattttcaagggtatgatgggtctttccgtaggcctgctctctaccaaagaaatgttgcatatcaaaattgctccaatgctgcactgcagtaccctattgtccgagcttgtggagttaccagtgacatgcctatggttccatcaacagcatctgctatttgtattcaagctcctgctgagaaagggtttaccggcttt

SEQ ID NO: 38114 - DNA, 388 bp, Gossypium hirsutum
  Clone ID: LIB3165-025-P1-K1-G2
ctgaatctaaaatccaattccgccgacaaaaataaattttttagaaaaaaattacggctgggatgggattctcaacggaaaaaatcagaagagctaagcatgcatgatcttggtacactgataacccgaacaagttatcgtaagagcttgatggatggatcagggcggttgtctagccaaaatcgtctgaagtaagaggagtcattactctggatgccggctaaacatcttcaggtcgtgctgctgcaaatgcttttggaaacatagaccccacaaacatgacttggcaattccttattggtccttctcaccaggataacacttcaaaatgctctttctggaccgctacagggtacatgacaccaataggggacctaaccattgatgt

SEQ ID NO: 38115 - DNA, 127 bp, Gossypium hirsutum
  Clone ID: LIB3165-025-P1-K1-G3
gcaaggtctttgcttatgatatctccgacgacttacatgacattaccatatgggaagggtggggtcgattcattgttccaagctcccattgaacgaaggtacctcactatgcttgtaatgagctcct

SEQ ID NO: 38116 - DNA, 392 bp, Gossypium hirsutum
  Clone ID: LIB3165-025-P1-K1-G4
ccttaaaatcctccataactgttttttatttttatccaagggccaccctatcagctggggctaacactaattctaacaccaatttcctctcccccaccgatcaatctaatcacgaccggtaatctatccctcccatgcaacatcacccttcttcctaaacggactcctatgctaaccctaatttttactccccacttttgaacccccccgattcggttccttcagccgtggctccgtcgtctctttttcacctctccttcaaccaggatcattgctgttttgccgcccgcactgaccatggctttcgaatctacaattgcgatccaatttgcgagatctttctccgagacttctatcgcggtggctgtatcgtggttgttgagattcttttt

SEQ ID NO: 38117 - DNA, 383 bp, Gossypium hirsutum
  Clone ID: LIB3165-025-P1-K1-G5
cgcgcacttttaagtacaatccttcttacctgctctttttatttattctacgtccaccacaacagctggggctaatactaaacctaacaacaatttactataccccaccaatcaatataatcaccacctggaatctatcactacgatgcaacatcacccttgttcccaaacggaccccgatgctaaccctaattttcactacctacttttgaacccccaccattcggttcctccaacgccggctgctgtcgctcttatccacctattcttcaaccaggatcatggcatggtttgacgccggcactgaccatggattccgaatctacaattgcgatccattgcgcgagatctttctccgagacttccatcgcctgagcggaatc

SEQ ID NO: 38118 - DNA, 408 bp, Gossypium hirsutum
  unsure (1)..(408): unsure at all n locations; Clone ID: LIB3165-025-P1-K1-G6
ggtgctcatcaaagagagcaatggcnaaccacttttatctttcgattccaatatactctgggctggaaccgttgtacggagaaggatcacagcttgaagaagctaagctttgattcggtaaactgaagtccaggtttttcgaagtattcggtcacccttccgaagtcttcgctcgatctccagggagagtgaacttgattggagaacatattgactatgaaggatactcggtcttgccgatggcattccggcaagacacgattgttgcatttcgaaagcgtgacaaaggagaggctgaaaagcttcttcgaatagctaacgtcaatgataagtacactacttgtacttatcctgttgatcctaaccaggtaattgacttgaaaaaccatatatggagtcattatttta

SEQ ID NO: 38119 - DNA, 347 bp, Gossypium hirsutum
  Clone ID: LIB3165-025-P1-K1-G9
cccacgcgtccgttttcataggatgttgttcattaaatctccaaagagttgcaagggaagccagatctgatcatctgaaactacaccgacggcaatatcgtcgccttcttgctcgcacataaattaggtgtcacacagagcaccatcgcccatgctgtggagaatacataatatccagactcagatatctattggaagaagcttgaagacaaataccatttctcttgccacattactgctgatcttttagcagtgaaccatacagatgttatcatcaccagtactttccaggatattgcaggaagcaagggcacttgttgttcaatactatggccacactgcttttc

SEQ ID NO: 38120 - DNA, 404 bp, Gossypium hirsutum
  Clone ID: LIB3165-025-P1-K1-H10
cttttgtatacctgtagcatatagtaatagttttcagtaatagcaatggcctcctggatgatctcatcggcaaccattgccaccgtgaaccgctcctccccggcacaggccaacatggtggcccccttcaccggcctcaaatctgcctctgctttcccagtcaccaggaaggccaacaacgacatcacttctcttgcaagcaacggtgggagagtgcaatgcatgcaggtgtggccgcctcttgggaagaagaagttcgagactctctcatacctgcccgatcttactcccgtacagttggctaaggaagtagattaccttcttcgctctaaatggattccttgcttggaattcgaattagaggagggattcgtgcaccgtaagtactcgagcttacccacgta

SEQ ID NO: 38121 - DNA, 301 bp, Gossypium hirsutum
  unsure (1)..(301): unsure at all n locations; Clone ID: LIB3165-025-P1-K1-H11
ggcgggggggacccacgcgttctgaaggcatatcgatttatcaaaacatttttttttttacatagcatngttcgatagcggagggtatcattggagattttccaagttcctgactatggtctccaagaaacttgataaacaatgtgctgaacttcttgagggtttgcttcatcatggaaggcttaccctcaacaaatgttgtaaccaccaaatccatgtccaattggaagaattgaatttgtaccataaacccttgttatagttcttaaagctctttttatttaaccattcccttcctttt

SEQ ID NO: 38122 - DNA, 362 bp, Gossypium hirsutum
  Clone ID: LIB3165-025-P1-K1-H12
cccactcgttcgcccactcgttcgcgtactctttttttttggccgaaaatcacaaccttagaattagatttctagggtttttttgttagcaacctaaccaccattgttttggtgatcaattaacatgcaaacagtacccattcttcctgttgaaggcgctcgaccatgcttagagaaaattagtaagtattttcttcctcccgtttttatgttttttaaaaaaaaaaactttaaatcttacattattttctttaaaaacgaaaattggttcataaagcaaagaatcattacttcttgttttctcgcctttacctcaaaatttttgaagttttcgggcttttattgtgttcatatcacatact

SEQ ID NO: 38123 - DNA, 362 bp, Gossypium hirsutum
  Clone ID: LIB3165-025-P1-K1-H3
cacccgtccggacttttttgtatacctgtagcatatagtaatagtaagcagtaatagcaatggcctcctggtgatctcatcggcaaccattgccaccgtgaaccgctcctccccggcacaggccaacatggtggcccccttcaccggcctcaaatctgcctctgctttcccagtcaccaggaaggccaacaacgacatcacttctcttgcaagcaacggtgggagagtgcaatgcatgcaggtgtggcccgctcttgggaagaagagttcgagactctctcatacctgcccgatcttactcccgtacagttggctaaggaagtagattaccttcttcgctctaaatggattccttgcttgga

SEQ ID NO: 38124 - DNA, 400 bp, Gossypium hirsutum
  Clone ID: LIB3165-025-P1-K1-H7
cccacgcgtccggcttctgcctaacttccaacttcacctttccttctaactcactccggcggcccacattgcggcggccgtctatcgtcgccaacctcaactcttccacttctcctcctactctcattcgaaatcaacccgttttcgcagcacctactcctttgctcactccttccaattggaaagaaaacatgggagaccagtcatacgaggaagccattgaagctctcaagaaactgctcaatgagaaaggagaatggaagagtgcagcgacggcaaaggtagagcaagtgacagctgagttgaagactgctgcttcttccgatgagtctgttgaccgcttgaaacaaggcttcattaacttcaagactgaaaaatacgaaaagaatcctgctctgta

SEQ ID NO: 38125 - DNA, 432 bp, Gossypium hirsutum
  unsure (1)..(432): unsure at all n locations; Clone ID: LIB3165-026-P1-K1-A1
cgggnccgacccacgccgtccgatgaatatacctgaaaaataagttcttcgaaaatcgttatttcttgttnctgaatatnctctgatagtggcgtccgatcactagacttgtctgtagaagtcgcctgacattgtcttattattgtttttgagtcccccataagtctaattgaatgggttcttagtgaaatccctaactttgtaccttctaaacatgcatatgcctctgctgcgaaaggtgaagggacatttctatgaataaccgtctttaacaccattaaatttcccctcagatcccatcctacaagaccagacgttgatctgaatgttttgccatcgatcgctgcatcaaagtggatcatgattctcgttgatttctggagaacgatatcaaccataaagcataacagaagagtagacattggccattgt

SEQ ID NO: 38126 - DNA, 379 bp, Gossypium hirsutum
  Clone ID: LIB3165-026-P1-K1-A10
cccacgcgtccgcccacgcgtccgcccacgcgttcggagccatgctccttcatttctgtcctgcttcttctacttctccaccttccccttcttctttcacctccaattatttcctccacagattatcaatttccagaccaccgtacttggagttcccgttaaaacccagagcccatctctttaaatctacctctcctcccgtttcttactcgaccaagaccaagttgttgtatccttctgccaacagggctgatttcaggtcatacgctcttcctggatttgatttcgggagcgttgaatctgtgttggaggcagctggcgttttgactgccatcattgttgttcatgagacgggtcacttcctcgctgcttatctcca

SEQ ID NO: 38127 - DNA, 392 bp, Gossypium hirsutum
  Clone ID: LIB3165-026-P1-K1-A2
gctctagagactctctagtctcaccgaagttgcataaagaaaagtagctaactgccttggcttgtatctgcggtgctggaccaagtaccatgttttgtgggctactggctctcttcagtgttcacctagcctaatcaccgccctgaacccaccaaaccaccagatttgggtgctgggtttttgtctttatattagtattttctcatttctgtcaactttcaactaaacattgcagcttcttaatttgtgggggtttttttttttttttggtttgctgcttaatccatggcttcttccatgctgaatggagcatgaacctttacttttatccgaggtgtaaccccaaaaaatattgggtttttgggggtcaggtttacattggaaaacagttt

SEQ ID NO: 38128 - DNA, 359 bp, Gossypium hirsutum
  unsure (1)..(359): unsure at all n locations; Clone ID: LIB3165-026-P1-K1-A3
gttcagttgacaatggcatctttgcaagttttgcatgcaacaaatctgaagcagtcgccattgcaagggtttcttccactctcatcccgttatgctgtggctgcgcccctgaaatcgactgttttgtcgaggacaaagaccataggccagaagaaccaaaagagatcttttacagtggttgcagcagttggcgatgtatcagctgatggtaccaactatctgattgctggtgcaacccgtgttgctctgggtggaactgctttccctatcttcttctctcgcaaggacacatgtctctgaatgtgacggngctggctttgttcgtaaagctggagcaacattgaggccaaatgctgcac

SEQ ID NO: 38129 - DNA, 408 bp, Gossypium hirsutum
  Clone ID: LIB3165-026-P1-K1-A4
cccacgcgtccggtttttcaaaaatatatgcaatttaaaaaaaaacacacacacacataaacaattttattcgtggcggttgggaaaatgttatatgaaaactctctggtgtccgacttgttcgccgccgtggtttgctgcggcgttatattcgcgtttctcttactctggcaagtaaccgccaaatgcggcgtagatcagaaactgaataggaagcttgtgcatataagtattgggctagttttcatgctttgctggccattattcagtgcagggtatcgcggagcaattttagcagctatcactcctggtgtcaatattatacgaatgcttcttatcggttctggaatttggaaagatgaagccactgtgaagtcaatgagcagatacggaaactacagggaactt

SEQ ID NO: 38130 - DNA, 267 bp, Gossypium hirsutum
  Clone ID: LIB3165-026-P1-K1-A6
ccaaacgacgccctaaaccaaaagtcatggccaccccttccgcacgtgaggaaaacgtttacctggcgaaactcgccgagcaagccgagcgctacgaggaaatggtcaagttcatggagaacgtcgtctccgccgtccctgcccccgacgaactcaccgtcgaggaacggaacctcctctctgtcgcctacaaaaacgtgatcggcgctcgccgtgcctcttggcggatcgtttcctccatcgagcaaaaagaggaaggacgtggca

SEQ ID NO: 38131 - DNA, 396 bp, Gossypium hirsutum
  Clone ID: LIB3165-026-P1-K1-A7
cccacgcgtccgctaaaaccctaaaaaaaacaagaaacctttcaatggaaggagcacaaatggaggattttcggatcgaagagtgtgaaaatgacaacaatacacacgaagattctcaaatggaagaatctgagcaaaacaataaacacatggaggtcgcacccgccgttatttccgtccacccgacccggaactcagttgcagtcgctgtcgggtcggaccttcgtgtcttcaatctcctagaagattgtgctgtgattttggtggatgaggcaggcggggcttcacataatgattcaattagaggtattaaatatggagcaaatgggaaactctttgtatctgctggagatgacaagcttgtcaaggtttggtctaccgagtcttggcgctgta

SEQ ID NO: 38132 - DNA, 383 bp, Gossypium hirsutum
  Clone ID: LIB3165-026-P1-K1-A8
agagtacctttatgaggaggctaacaagtgtgttcggtggtgcagctgagccaccaaagggaggcaaccctgattccaacacactgatcagcgacatgaccactgtgatatgtttagatgattatcattcacttgacagaactggaaggaaagagaagggagtgacagcacttgacccaagagccaatgactttgacctcatgtatgaacaagttaaggctctcaagagtggtattgctgtcggcaagcctatctacaaccatgttactggtctcttggatcctcctgagctaattaagcctccaaagatccttgtcatcgaaggactgcaccccatgtttgatgaacgtgtgagggatctcgtagacttaagtatctatttt

SEQ ID NO: 38133 - DNA, 401 bp, Gossypium hirsutum
  Clone ID: LIB3165-026-P1-K1-A9
ggcaaagattgtggatatctcagaacattcactaactattgaggtaacaggagatccagggaagatggttgctgtgcaaagaaatttaagcaagtttgggatcaaagaaattgctagaacaggaaagattgctcttagaagggaaaaaatgggtgcatctgctccattctggcgattttcagcagcttcatatcctgatcttgaagaaacagtacctgataacgctcttgcaggggctagaaagcaatcagtatttagcgaggccgatgtttctggagggggagacgtctatccggtggagtcgcctgatggctttacaatcaatcaagttcttgatgctcattggggtgttctcactgatgaagatacaagtggacatcaatctcatactttatccatgc

SEQ ID NO: 38134 - DNA, 407 bp, Gossypium hirsutum
  Clone ID: LIB3165-026-P1-K1-B10
ctccctattctcaatggcaatggcaacccaagcctccctcttcactccatcaaccgggtggaccccaaaatccggcgaccgcatcgccgccgtgttacggaaacaaccaccgttcctaaccgtccctagcttcaagtccccaaaaagcatcatcgccccacgcaccatcaaagcccaagcaaccgaagagaaagccgagacaaccgccacaaaggaagcaccagtcggtttcaccccaccagagctggacccaaacaccccatcaccgatcttcggcggcagcaccggcgggcttttacgcaaagcacaattggaagagttttacgtcatcacatgggagtcacccaaggaacaaatcttcgagatgccaacaggtggtgcagccatcatgagacaaggtccgaacc

SEQ ID NO: 38135 - DNA, 392 bp, Gossypium hirsutum
  Clone ID: LIB3165-026-P1-K1-B11
cccacgcgtccgctcatccgtgacggtcgtatggagaaattttactgggcaccaactagggacgaccgtgtcggtgtttgcaaaggtattttcaggaccgacggcatcccagatgaagacattgttaagctcgtcgacaccttccccggccaatccatcgatttcttcggtgccttgagggctcgggtttacgatgacgaagtgaggaaatggatcagtgatgtcggagttgcaggcgtagggaagaagttagtgaactcaagggacggacctccaacatttgagcaaccgaaaatgaccattgaaaagctattggaatatggaaacatgcttgttgctgagcaagagaatgttaagagagtccaattggctgacaaatacttgagtgaagc

SEQ ID NO: 38136 - DNA, 404 bp, Gossypium hirsutum
  Clone ID: LIB3165-026-P1-K1-B12
cccacgcgtccgtaatgagggtgctggtctgggagcatcaattttccctggacttaatctgcttggtggtaacggaggtagttttggtttgtttggatcaggacttcctgaatttgaacaagtacagcaacaactaactcaaaatcccaacatgatgagggaaataatgaatacacctgctattcaaagtttggtgaataacccagagttaatgcgcactttgattatgagcaatccccaaatgcgtgagattattgaccggaatccagagcttgggcatatacttaatgatcctagcattctgcgacagactttggaagctgctaggaatcctgaactcatgcgtgaaatgatgcgaaacactgacagggctatgagtaatattgaatcctctcctgagggat

SEQ ID NO: 38137 - DNA, 357 bp, Gossypium hirsutum
  unsure (1)..(357): unsure at all n locations; Clone ID: LIB3165-026-P1-K1-B3
gtattaacccagctcgtagtcttggtgcagccatcattttcaacaaggacaagggctgggatgaccattggattttctgggtgggtccattcattggagcagcactagcagcactctaccacgttgttgttatcagggccattcctttcaagtcaaaatgatcaaaatcgacggtccaaatgatcatatgatctcaaaaaaatgaaaaatttcacccatgcaccctttcagtttgtgtatttcccatttgatccctttgtttttgtatatgtaagaatgtgtgtaatatatattatttacttcaatggggggagagccttggtnctttttttacttgctttttttttaagctaaaaa

SEQ ID NO: 38138 - DNA, 358 bp, Gossypium hirsutum
  Clone ID: LIB3165-026-P1-K1-B4
gttttcctccacaaccactatcactaccattatggcttcggctactgtttctgtagccaaacccaaccttcagattcaggcaaaaggaaagggtgttggttttgcagatttctcaggcctacacaactcctctactagccttccctttgccaggaaaacctctgatgacttccattcactcgttgcttttcagacatctgctctaggaagcaataatggcgggtacaggaaagggatggcagaagcaaagctaaaggtggctataaatgggtttggtaggattggcaggaacttcttaaggtgctggcatggccgtaaagactccccacttgatgtcattgccatcaatgacactggt

SEQ ID NO: 38139 - DNA, 407 bp, Gossypium hirsutum
  Clone ID: LIB3165-026-P1-K1-B6
gtgagactcttttgtatacctgtagcatatagtaatagtaagcagtaatagcaatggcctgctccatgatctcatcggcaaccattgccaccgtgaaccgctcctccccggcacaggccaacatggtggcccccttcaccggcctcaaatctgcctctgctttcccagtcaccaggaaggccaacaacgacatcacttctcttgcaagcaacggtgggagagtgcaatgcatgcaggtgtggccgcctcttgggaagaagaagttcgagactctctcatacctgcccgatcttactcccgtacagttggctaaggaagtagattaccttcttcgctctaaatggattccttgcttggaattcgaattagaggagggattcgtgcaccgtaagtactcgagcttaccc

SEQ ID NO: 38140 - DNA, 300 bp, Gossypium hirsutum
  Clone ID: LIB3165-026-P1-K1-B7
gttccttaatctcaaatctcatctgcaccagccgacgacatggggaggagacctgcaaggtgttatcgccaaatcaagaataagccataccccaaatctcgatactgccgtggtgtcccagatcctaagatcagaatttatgatgttgggatgaagaaaaaaggtgttgatgagtttcctttctgtgtccatcttgtgagttgggagaaggagaacgtctcaagtgaggcattggaagctgcccgtattgcctgcaacaagtacatggccaagtttgcagggaaggatgctttccatttg

SEQ ID NO: 38141 - DNA, 399 bp, Gossypium hirsutum
  Clone ID: LIB3165-026-P1-K1-B9
tatagcttccaaaaaccctaagcctgctcacttatttgcccgtttcatctttctttggctagctacttattaggtgcctgcattaaattgttagctgcattaaagaacgctatcatcagcttgtggtaatggacaaggtaagagacctggcatcgaagaaggctgctgtgatattcacaaagagctcatgctacatgtgttacagcatcaagacacttttttatgagcttggtgctagcccagctatccatgagctcgaccatgatcctagcgggagagatatggagtgggctctaagagggttagggtgtgacccctcagtcccagccgtgttcattggtggaagatttgtaggctcagccaaagatgtcatatcccttcatgtagatggatcactga

SEQ ID NO: 38142 - DNA, 404 bp, Gossypium hirsutum
  Clone ID: LIB3165-026-P1-K1-C10
cgattctcttccctttcatgaccacgagtatgtctcgtagctgctctcactgtggaaacagcggccacaactctcgtacgtgcggtgaagttgttgccggtgatgcaagcaatggcagcggtggaagtggaggaggagaagagaagggtatcatgttattcggtgttcgagtcatggaagggtcgttcaggaaaagtgttagcatgaataatctttctcagttcgatcaacctcaggtttctaacgccgatgctggctatgcttctgatgacgttcttcatggatctggaataggaagaagccgtgaacgcaagagaggtgtaccatggacggaagaggaacataaattatttttattggggttgcaaaaagtagggaaaggggattggagaggaatttcaaga

SEQ ID NO: 38143 - DNA, 404 bp, Gossypium hirsutum
  Clone ID: LIB3165-026-P1-K1-C11
gttttacaatagttcgtaacaatggcggtctcacttcaagctgcagctaccctgatgcaaccaatcaaggttgctgcaccatcaaggaccaatgtgccgctcaggtcctaccagagcgtttctaaggccttcggtttggagcctgttggtgctaggcttacctgctctttgcaaactgacctcaaggacttggctctgaagtgtgttgatgctaccaagctcgctggtttcgctcttgctacatctgctcttgttggctcgggagcaagcgctgaaggagtttcaaagcggctaacctacgctgaaatgcaaagcaagacatacatggaagtcaaaggaacacgaactgctaaccagtgcccaaccatcgatggtggtgacgactgctatgccttcaagcctgg

SEQ ID NO: 38144 - DNA, 395 bp, Gossypium hirsutum
  Clone ID: LIB3165-026-P1-K1-C3
gaattttccatgccttgtccaagcggaatccttctcttcctcatcctaatctcctcccagcttttattcgccgtagccgatgacgacaatctatccgcgtaccaagctcttaacagtacgacttcccagtaggcatccttcccaatggcgtggttgggtacgaattgaacagggaaacgggcgagttttcagcttatttgagtggaacctgcaagtttgacattgattcataccaactcagttacgaatccaccataaaaggagtgatctccccaggcaggataacaaatttgaagggagtgagcgttaagatcctcttcttctggcttaacatcggtgaagtgatacataatggggaccagatggagttctccgttgggattgcgtcggctaac

SEQ ID NO: 38145 - DNA, 408 bp, Gossypium hirsutum
  unsure (1)..(408): unsure at all n locations; Clone ID: LIB3165-026-P1-K1-C4
cccacgcgtncgnggacgcgtgggttgaattctttatttcacacaccaactcaacaatcaacctagtgaatacccataccatcccatagtaagaggatctgattgtctcccctctcatttaccgccatcaatggctaactctctgctctcttctaacttctttggtactcaacttttactgtctcctccaacaccaaaaactacaagaaagttgcaggttactcaatctatcctcaacaagaaacccaactctagccacactgttaaaaccctccaatctcatgccactcttgctgccttactcttctctgccgtagccccacaagcactagccgttgacaacgccccacccactccgtcacctgtaattgaagcccagcctacgaagccaagcccatcgaaccagtc

SEQ ID NO: 38146 - DNA, 406 bp, Gossypium hirsutum
  Clone ID: LIB3165-026-P1-K1-C5
acaaatttatcgtcgtcgagttttacgctccttggtgtgggcactgtaagaatcttgctgcagagtatgagaaagcagcatctatattgagtaaacacgaccctccagtcattcttgccaaagttgacgccaatgaggaagcaaacaaatatctagcaaatgaatatgaagtcaggggttaccctacacttaaaattttgagaaatggaggaaagaatgttcaggaatacaaaggtccacgtgaagctgatggtattgtggagtatttgaagaaacaaagtggtcctgcttctgctgaactaaagtcagcagaagatgccagtaatcttattgatggcaagaagatagtagttgttggggtgttcccaaaattctctggcgaagagtttgagagttatatggcact

SEQ ID NO: 38147 - DNA, 400 bp, Gossypium hirsutum
  Clone ID: LIB3165-026-P1-K1-C9
gtttttggcaggccttggattatgtcattgcatatgcaaggcaacaaggaattaggctgcggctcagcttggtaaataacttgcaaccatatggcggaaagacgcagtatgtcaactgggcatggcaagaaggcgttggtttgagctcttctaatgattccttcttctttgatccatctatccgcaaatatttcaagaattatgtcctgactgtccttaccaggaagaacactatcactggaattcaatatcggaatgatcccaccatctttgcttgggagttgataaatgaaccccgttgcatgactgatccttctggggatactcttcaagattgggtagaagagatgtcggctttcataaaatcaatcgacaaaaaccatcttttgaccattggctt

SEQ ID NO: 38148 - DNA, 127 bp, Gossypium hirsutum
  Clone ID: LIB3165-026-P1-K1-D10
ggatgatgttcatgtccctgcttgtgggatcctttaatgagttcatttgtaatggcatttgatgctttattttttaaggctttttcttcatttgtagtagtaataaatcaacattgttgttaaccct

SEQ ID NO: 38149 - DNA, 383 bp, Gossypium hirsutum
  Clone ID: LIB3165-026-P1-K1-D3
cttcaatttaaaattttctttgttagacacaaaaagcgatctagcttgaaaatttctatttgttttaataaaattttgtttgttttagggtttaggtgatggcttcgaagcggatcttgaaggagctcaaggatctccagaaagatcctcctacctcttgcagcgcaggccctgttgctgaagacatgtttcattggcaagcaactattatgggtcctcctgacagtccatatgctggtggagtgtttctagtcaccattcatttccctccggactatccatttaaaccaccaaaggttgcattcaggacaaaggtctttcacccaaatattaacagcaacggtagcatttgccttgatattttgaaggagcagtggagccct

SEQ ID NO: 38150 - DNA, 52 bp, Gossypium hirsutum
  Clone ID: LIB3165-026-P1-K1-D4
gttcatttcaagacatgtcatttaaaacacaagttgtttttcaagctagaaa

SEQ ID NO: 38151 - DNA, 399 bp, Gossypium hirsutum
  Clone ID: LIB3165-026-P1-K1-D7
cccacgcgtccgagagttctttttttcacagcaatggcagccatgaactccagtgttttgggatgcaactatgctatctcaggcactggatcatctgagcttaatgccaagcttgcttcagcaccatcagttgcttccccagttatgtgcggtggtcacaagttgcctgtgatcagagcccagcaggctaaattttctgattccaaaggatcaggtgccagtgaaggaagaagagctgctatgctctacttggcagctggccttttcaccacagctgttgcttcttctgcaaatgctggggtcattgacgagtaccttgaaaagagcaaagctaacaaggaattgaatgacaagaagaggttggcaacaagtggagcaaacttttccagagcatacact

SEQ ID NO: 38152 - DNA, 381 bp, Gossypium hirsutum
  Clone ID: LIB3165-026-P1-K1-D8
gacggggaaaaaaaacaaacaaactatgaccatgggtgctgcagagaagagggaggaagtgattcaagcatggtacatggatgatagtgatgaagatcagaggcttccccatcaccgtgaacctaaggaatatgtatccttggataaactttctgagcttggagtactcagctggcgattggatgctgataactatgaaaatgatgaagagttgaagaaaattcgtgaagaacgaggttactcctacatggacttctgtgaggtttgccctgagaagcttccaaattatgaggagaagataaaaaatttctttgaagaacatcttcatactgatgaggagatccgttactgtgtggcaggaagtggttattttgatgtacg

SEQ ID NO: 38153 - DNA, 402 bp, Gossypium hirsutum
  Clone ID: LIB3165-026-P1-K1-D9
tcggctttcaaatcgcctctctttcatccaacttcatcgttcagtcgttctcaaggggcattccctttcttcagcttccaaacacaataccttaccctcaacaaaccacctaccatcttacgctgctctaactcttccaccatttcttccaccactaatggtaataacaacaatatggcagggcttccggtgaagaagaagaggaaacggtataggaaacagtaccctggagagaatgagggcattactgaagagatgagattcgttgctatgagacttcgtaatattaaaggtaaaaaggtcagttccgatactgtttctgactctgaaaccgacactgaaaataccccaagcgatcaagagaaagaagaagattctgaaaatttgaaaagcggtgaaaat

SEQ ID NO: 38154 - DNA, 405 bp, Gossypium hirsutum
  Clone ID: LIB3165-026-P1-K1-E10
gtgagactcttttgtatacctgtagcatatagtaatagtaagcagtaatagcaatggcctcctccatgatctcatcggcaaccattgccaccgtgaaccgctcctccccggcacaggccaacatggtggcccccttcaccggcctcaaatctgcctctgctttcccagtcaccaggaaggccaacaacgacatcacttctcttgcaagcaacggtgggagagtgcaatgcatgcaggtgtggccgcctcttgggaagaagaagttcgagactctctcatacctgcccgatcttactcccgtacagttggctaaggaagtagattaccttcttcgctctaaatggattccttgcttggaattcgaattagaggagggattcgtgcaccgtaagtactcgagcttac

SEQ ID NO: 38155 - DNA, 399 bp, Gossypium hirsutum
  Clone ID: LIB3165-026-P1-K1-E11
cccacgcgtccgcgatgattcaattgataggatcgtggctggaatggaaggaacagggatgactgatggaaagagcaaaagcttggttgcataccacgaggttggccatgccatttgcggaactttgacaccgggtcacgatcctgttcaaaaagtcaccttgattccacgtggccaggcacgtggtcttacctggttcattccttcagatgaccctaccttgatctccaagcaacaactctttgcaagaattgttggtggacttggtggcagagccgcagaggaaatcatcttcggtgaacctgaggtgacaacaggtgcagctggtgatttgcagcagattactggtttggctaaacagatggtggtgacattcggaatgtctgaaattggtccatg

SEQ ID NO: 38156 - DNA, 349 bp, Gossypium hirsutum
  Clone ID: LIB3165-026-P1-K1-E12
tcggttgtggtgcgccctcgttcgttggtcctttcgctcccctaccattcggttgggtgggctgttgggcggtgtgcgtgggcgctactactagtacgcaataggcatatgagtggtgttttggttgtgtgtattggcaggctccatgctactcgcatcgaactgtggagccgcactcctcttcattaactccccttgttgtaatcgaactcaaggggtgcgatcgggatcctgtgctgcgtacctaagccagatggaattatggatgtgttgcgcgccctttttcataccgtgcccttcggggtgcgtggtggacctcaatcatgccttgtgtgccgagtgcgccccc

SEQ ID NO: 38157 - DNA, 402 bp, Gossypium hirsutum
  Clone ID: LIB3165-026-P1-K1-E2
aaaggttcttttggtcgtagaacttttttgggtttttgtttgtaattcgtttgattaccaaaagaaactgatttttttttcttttttgggttattttgtggatttctgggttttctttctcaagtttgctcgagagataaatggcacaacgttctcgtgtacccaagtttggcaattgggagagtgaaggtaatgttccttacacagcttatttcgataaggcacgtcagggtcgcaatggaggaaagattgtgaacccaaacgatccccaagagagtccggaattacatcaagattacggagctccgactagagctccccctgcttcacgaccaaaatcagaatcggatgaaccaataggacatggacctgcaagaaggggacacgaacgaggaaggagca

SEQ ID NO: 38158 - DNA, 400 bp, Gossypium hirsutum
  Clone ID: LIB3165-026-P1-K1-E3
cacgaatcaaatccccatctctccaatcccacaaacccttctccaaatcccacttttccacagaacccaacaacgtaccattcctttttccatctaaaacccatccacagctccaccgttttaaaccaaattccatatccgaaagctcagtgtcagtgcctgaagaagcttttgatgacgctgaagaagacgacccaacttcagaattgagctaccttgactcggagaccgatccctcgagtgttacggagtgggagctggatttttgctcaaggccgattctagatattagaggcaagaagatatgggaactggtagtgtgtgacagttcgctttcacttcaatataccaagtactttcccaacaatgttatcaatagtgttactttaaaagatgctat

SEQ ID NO: 38159 - DNA, 405 bp, Gossypium hirsutum
  Clone ID: LIB3165-026-P1-K1-E5
cccacgcgtccgaatatatcatgtcctaccagcaaggggaggatttctattacatggatgaagattttgtagatgacatggatgaagacaactacggtcaagctggtggagatgtggatgctgatgaatatgacatgctgaccaaggtgaccgatacgacttctgcgcaagcgcggaaggggaaagacattcaggggattccgtgggaaagactgaacataactagagaaaaatataggttgacaaggcttgagcagtataagaactatgagaatatgccttcttccggtgaagctgttgacaaggaatttaaacatataaagaagggtgggaactactatgaattcttctacaatactagattaattaaacctacgatccttcattttcagctcagaaacttgg

SEQ ID NO: 38160 - DNA, 408 bp, Gossypium hirsutum
  Clone ID: LIB3165-026-P1-K1-E6
cttaatttatagtttcccaattgaaaagtacagaagaacaacaagatttgattgattgagagaggaaaataaggttgaagacctttcgaggatggtttctttgagtcgagtcttggcggtttcctatacgataaagccatccattccctgcaacacttgttctttaagctctagatttcctcaaaagaaacccaaactgaattcgaaatggcgatccatggcgactgaacctgactcttcttccttcgcgccttctattgattctgattcttccgctgataaagttacagccggattttgcatcatagaagggcctgaaacagtccaggattttgctaatatggaattgcaagaaattcgggataatatccgaagccggcggaacaaagtgtttctgcaaatggaaga

SEQ ID NO: 38161 - DNA, 291 bp, Gossypium hirsutum
  Clone ID: LIB3165-026-P1-K1-E7
gacccgagaacgttaaggctgctcaggatgcactccttgtccgtgccaaagccaactcactcgctcagctcgggaaagacaccggcgagggagaatcagaagaggccaagaaaggaatgttcgtaaagggctacgtctactaagctgctgcaaacaaagctttagctgagatgatggagatttcatgatatggtttctttctctttgtgttgaatgttttataggctctggagactactttttgttctggattgcaatgtactgttaaataaacttcttgctgatgagatt

SEQ ID NO: 38162 - DNA, 401 bp, Gossypium hirsutum
  Clone ID: LIB3165-026-P1-K1-F10
ctgcttcacaatggcctctacaaccatggctctttcttccccatcattcgccggtaaggcagggaagttctccccttccacccctgaaatccagggaactggccgtgtttccatgaggaaaaccaccaagcctgttccttctggtagcccatggtacggtcctgaccgagttttgtacttgggtccactttccggtgagccaccatcttacttgaccggtgagttccctggtgactatggttgggacactgctggactctcagctgatcccgagacctttgctaggaaccgtgagctcgaagtcattcactgcagatgggccatgttgggagctcttgggtgtgttttccctgagctgttggctaggaacggtgtcaagttcggtgaagctgtatggttca

SEQ ID NO: 38163 - DNA, 404 bp, Gossypium hirsutum
  Clone ID: LIB3165-026-P1-K1-F11
ctaaattccccagaatttgcttcagtaatggctgcctcagttatggcttcttcagttaccctcaagccttcattcaatgttgagaaatctggtgtaagaggggttccttcccttgctagttcccttcttctttcaaggttgaagccagtggtggcaagaagatcaagaccgacaagccttatggaatcaatggtggtatgaacttgagggatggtcttgatgcctctggaaggaagggtaagggaaagggtgtttaccaatatgttgacaaatatggtgctaacgtcgatgggtacagtcctatctacaacaccaacgactggtctcccagtggtgatgtttatgttggcggtactaccggattggcaatctgggcggttaccctagccggaattcttgccggt

SEQ ID NO: 38164 - DNA, 403 bp, Gossypium hirsutum
  Clone ID: LIB3165-026-P1-K1-F12
cccacgcgtccgctcgcttttctcttcacccttacttttctcctcttcaccttctctcaagcccgcttcatcacatctgaatcccaacatgatgtcacccccgaaaaatccgttaccgattttcccgaatccgaccccgaatccgccatccttctccccagcgagaaaccccactttgaaccccccaaattactcgacttcaagcacgatgatgatgcctccggcgtcgcctccgttcctttgaccaagatcagttttaaccctgtcaaccgccacttcccaaggcgtcccttgattccgttccgtcacaagcacaactgccgtttccataaacgcttcatgcctttgaatccacgcttccatcagaaacgcttcatttcttacggcaacgacatgatactgt

SEQ ID NO: 38165 - DNA, 385 bp, Gossypium hirsutum
  Clone ID: LIB3165-026-P1-K1-F2
tcgcccacgcgttcgcgagccaaaacgagtggttaccatttttgaacgattagatttttagatggcatctttattccatggttgttttttgttcccgagggagcaatcccctgtaccaactccagaaacacagtttctttctcacttgtcttccccccctcacccctcaatggctgcaatcactaatttcttaactaagccacctacttccgatcttcacttcaccccaaaactcacttctctttgctctcatgcttcttttctaccatcccttgcgactaggcccagatcttttttaacaaagctaggaacaagcacaagctctcgcttcattaccaaagctacagctgctcctgggaccaaaaagctccgagtgatgagcgag

SEQ ID NO: 38166 - DNA, 421 bp, Gossypium hirsutum
  Clone ID: LIB3165-026-P1-K1-F3
cttttagcttacagcttccattgtttttcagtagtgaagagctaaaaaagaagggaaaccaatggaggggaaagaagaagatgttagattgggagcgaacaagttctcagagaggcaacctattgggacagcagcccagtcccaagatgataaggattacactgagccacccccagcacccttgtttgagcccagtgagttgacttcatggtcgttttaccgagctggaatcgctgagttcgttgctactttcctattcttgtacatctcggtgttgactgtgatgggagtccttaaggacaaaaccaagtgtacaactgttgggattcaagggattgcttgggcttttggtggaatgatctttgctcttgtttactgcactgctgggatctcaggtggtcatatcaatccagcggtgaca

SEQ ID NO: 38167 - DNA, 404 bp, Gossypium hirsutum
  Clone ID: LIB3165-026-P1-K1-F4
cccacgcgtccgggaggagaaaacataacttctagcaaactgggttgttgaaatggcatcgaaggggtgtgactcgtgcaaatcagcgacggcgactcttttctgccgggctgactcggcgtttctatgctccaactgtgactccaaaatccacgcggccaacaagctcgcctcgcgtcacgctcgagtttgggtctgcgaagtctgcgagcaagcgcccgctcacgtcacttgcaaggccgatgcagccgctctctgtattacctgcgaccgtgacatccactccgccaaccctcttgctcgccgacacgagcgcctccctgtaacccccttctacgactccgtcaattcagtcccagccgtcaaacccaacggagttgttacctttctggaggagcgttact

SEQ ID NO: 38168 - DNA, 410 bp, Gossypium hirsutum
  Clone ID: LIB3165-026-P1-K1-F5
tgtatattgaagtttcctttctcgattttctatttagccaaacaagatgcagatcttcggggagacgtctaaccggcaagacgatcactctcgaggtcgagagctccgatacgatcgacaacgtgaaggccaaaatccaagataaggaaggcatccctccagaccagcagcgtctgatcttcgccggaaaacagctcgaagacggccggaccttggccgattacaacatccaaaaggagtcaactctccacctcgtcctccgtctgcgcggtgggatgcaaatcttcgtgaaaaccttgactggcaagacaatcactctcgaggtcgagagctccgacacgatcgacaacgttaaagcgaagatccaagacaaggaaggcatcctcccagaccagcaacgtcttatcttt

SEQ ID NO: 38169 - DNA, 411 bp, Gossypium hirsutum
  Clone ID: LIB3165-026-P1-K1-F6
ttcaatcactgtcaattatgaactataagaagactattgcatagtgtaattgaacaagacacattgccattgctattattagaattgaacacttgaaagggagattaagttcaaaaactgggatggcttttgtaacgtcggaggaattgctggccactttggtgccaattgctgtttattggatatactcaggtatgtatgtgatgtttgagtcaaggtttgagaagtacaagttgcactccaagaaagaagaggaggagaagaatttggtgtccagaaaggaagtcttcaaagccgttctttgccatcaagtcatgtcaattgctattaacctcttcacgtatgcggtaacaagagaaaaagatggtgaggcatcttcaaagaaatcactaaccttgcttcttctagcca

SEQ ID NO: 38170 - DNA, 400 bp, Gossypium hirsutum
  Clone ID: LIB3165-026-P1-K1-F7
cccacgcgtccgcccacgcgtccgctcgtgtcatcaattaactggtctttgtttcaagctggcttcaatttgaagtcctgtaatcaagccgccacaatggcgcctgtaagaaccacaggcgctattgttgcttccactgccgccatctccatttccatggcgatcttctcttacttcctcttcttcaaaaagaccaattcgacccttcattccaacaagaagaaaaaacccagaaatggagtcgtcgatgccattggtaacacccctttgatccgcatcaatagcctctctgaagccactggctgtgagattctcggcaagtgtgagttcctgaatcctggaggaagtgtgaaagatagggttgctttgaaagtcattgaggaggctcttgaatcaagtg

SEQ ID NO: 38171 - DNA, 401 bp, Gossypium hirsutum
  Clone ID: LIB3165-026-P1-K1-F8
gtgagactcttttgtataactgcagcatatatttctagtaagcagtaatagcaatgggctgctccatgatctcatcggcaaccattgccaccatgaactgctcctccccggcacaggccaacatggtggcccccttcaccggcctcaagtctgcctctgctttcccagtcactaggaaggccaacaacgacatcacttctcttgcaagcaatggtgggagagtgcaatgcatgcaggtgtggcctgctcttgggaagaagaagttcgagacactctcatacctccccgatcttacacccgtacagttggctaaggaagcagattaccttcttcgctctaaatggattccttgcttggaattcgaattagaggagggattcgtgcaccgtaagtactcgagc

SEQ ID NO: 38172 - DNA, 401 bp, Gossypium hirsutum
  Clone ID: LIB3165-026-P1-K1-F9
gtctttccctccctccctctcagatcaaagcttcaaaatggttggttttattttgatgacaattttagcagatccaacggctaatccctgtttttctccggttcaaattcggcttcatttttcgctacctttgtaaattgccgcgaaaaaccgtaaccctaaccctaaagctcctcaacttttctcaatgacgaaggttcatggaaccggcgtttacgacttcaagcgctgccatgtggcggagtacctggttgagttagccgacaaaccgaaaatgaaacctcctcacagttcatcccttcggagctctattactttgtctgaaatctagcgggaccagctgactagaatagcagccgcgaattggctgaggagcggtggttcgaagcctgaaaagccat

SEQ ID NO: 38173 - DNA, 407 bp, Gossypium hirsutum
  Clone ID: LIB3165-026-P1-K1-G10
agatcgcgagcggccccttttttttttttttttttttttttttaagacaagaacagggcggggattttataacacaaaaatagaggatgcaaatccacttaaaacacaaaaggaaaacaacattcaattaagacacaaaggggggatttcctttgtttgtgcccaaaatagatttttttcttcccttagagcttaatttcccatttagaaagctcctcttttgatagcatcgtcattagcatttccaagggcagcttcactcaaatatttgtcagccaattgaaccctctttacattctcttgctcagcaacaagcatgtatccatattccaacagcttttcaatggtcattttctgttgctcgaaagatggtggtccttccttgttgtacataccggggagctgaa

SEQ ID NO: 38174 - DNA, 410 bp, Gossypium hirsutum
  Clone ID: LIB3165-026-P1-K1-G12
cccttatttcctgccttagtttcattgaaggcgggactctcagactactctttcgaaccagctccaccatcacccccaaaaaacaaagcaaattgtagaagatggcaacacaagcacttgtatcatcgtctcttacctactcagtggagactgcaaggcagattcttggagctaaacgacaaattgggccttcaaggaaaggatcctttgttgttaaggcagcttcgactccacccgttaagcaaggagctgatagacctttatggtttgcatctaaacaaagcctttcatacttggatggcagccttccaggtgattatggatttgaccccttgggactctcagaccctgaaggtccaggagggttcatcgagcctaaatggctagcctacggtgagatcatcaacggg

SEQ ID NO: 38175 - DNA, 398 bp, Gossypium hirsutum
  Clone ID: LIB3165-026-P1-K1-G2
gttcatttcaatggctgctcttgcttcttcttcgtccttctctctcctcttctcatctccacctacgaagttcccttcaccttctctatgtcctcctctacacttgtctcttcccacttcttcttttctctcttcttctctttcactttctccttccttccatgcctaccccaccagctctagacgattctctgcttcttctttcactatcagggcctctgctgcagagaagaagaaggtccttatagttaatacaaacagtggcggccatgcagttatcggtttctactttgccaaagagcttctgggttctggccatgaggttaccatcttcactgttggagaagagggctctgataaaatgaagaagccccccttcaacagattctctgaaatta

SEQ ID NO: 38176 - DNA, 401 bp, Gossypium hirsutum
  Clone ID: LIB3165-026-P1-K1-G3
ggttaacattggcctatctatgctttgcttcgtttcttcaggcagccaatgctctccaaaccaaggctgctaaacaaaaggtgtggagaaatacaaagaaaccaacattttcacctttcatttcggaataaaagctgatttgcttttgaatttaaaaaaaaaaaaaattcgagatttacaagaaagggaaaaggaagttgaaattatatagtaataagaaaatggtagctttctcaatggttccatttttgggcacagttcgatctacaccttctttaacgagtttggcaccttacaagcgccaaatatcaatacgaatctctccagtttcttttccaaggaatgggttctttccgttcaggaggtttcttcaagcttgccttcaatctagttctgctact

SEQ ID NO: 38177 - DNA, 410 bp, Gossypium hirsutum
  Clone ID: LIB3165-026-P1-K1-G5
cggacgcgtgggtggtgccttacctcctcttcttcctccaccaccacctcctctttttccggtcgtcgacgacctacattgcggccttcggtcgtcgctagccttaactcttctccttctcctccgactcttatccaagaccgcccggttttcgctgcccctgttcctttgctcaccccgagagaagagatgggaaacaagtcctacgacgaagccattgaagctctcaagaaacttctcagtgagaaaggagaactgaaagctgaagcagctgcaagggtagatcaaataacagcagagttaaacacaacatcagctgacggcaaaccatctgactcttctgttgagagactgaaagaaggcttcgtttacttcaagaaagaaaaatatgaaaagaatcctgctctgta

SEQ ID NO: 38178 - DNA, 398 bp, Gossypium hirsutum
  Clone ID: LIB3165-026-P1-K1-G7
ccggtattgaagagataagattatagtgtaaatttagacataataaagcccctcataacatgcttcgacttgcttcattgattagccctctgaaagcccaagaaaaatggcttctgcttccgctactctcctcaagtcttcacctattatcgacaagtccgagtggattaagggccaaaacctccgccacccttcggtttgttttgtacggtcacaccctacatcggccgcctttaccgtccgtgctagttcatatgccgatgagcttgttaagaccgcgaaaactgttgcatctccaggtcgtggtattttggccatggatgaatcaaatgctacatgtgggaagcggcttgcctcgattggtctcgagaataccgaggcaaaccggcaagcttacc

SEQ ID NO: 38179 - DNA, 402 bp, Gossypium hirsutum
  Clone ID: LIB3165-026-P1-K1-G8
cccacgcgtccgcccacgcgtccgcccacgcgtccgcttgaattatactgaaccaaagaaagtctctgctgtaaatggcggtggcagagttatcgacttcctgtaccaaaaatcactcttcacagctctcgctctcatcttcatcttcttctcgtttctctcatcattttcgtcgttcctttcgacccctacccacaaccaggaatcctaccatctcatgctctgttgcatcagatcaagttcaaacgccaatacctgtacaagctcaggatctcaaggggaagagtgaatgctatggtgtcttctgcctcacttatgatctccaagctgaagaggagacaaaatcatggaagaaactaattaatatagctgtttctggtgctgctgggatgatatctaacc

SEQ ID NO: 38180 - DNA, 60 bp, Gossypium hirsutum
  Clone ID: LIB3165-026-P1-K1-G9
ggatagtcattttgcaactctcctaatttcttcatcatttaaagaaggaaacaaaagcat

SEQ ID NO: 38181 - DNA, 410 bp, Gossypium hirsutum
  Clone ID: LIB3165-026-P1-K1-H10
cttctctagaggtctggtctactcaacactctctcctccctcttagcaaccaaagactcagggccgctcggatttctttgtcccagaactagaatggagacctttctattcacatcagagtccgtaaacgagggacaccctgacaagctttgcgaccaggtctctgatgctgttctcgatgcctgccttgcccaggaccctgacagcaaggttgcctgtgaaacatgcacgaagactaacatggtcatggtctttggagagattaccaccaaagccaacgtagactatgagaagattgttcgtgatacatgccgctccattggatttgtttctgatgatgttggtcttgatgctgacaattgcaaggtcttggttaacattgagcagcagagccctgatattgcccaagg

SEQ ID NO: 38182 - DNA, 408 bp, Gossypium hirsutum
  Clone ID: LIB3165-026-P1-K1-H11
cgatcctcaacggtgttttgtgattaaaaaaacgaccaagattgtggcaaaacaagagggcttccctgcatgaaccatggctagtggagaacgggttgaagggatctagcaaggagattcgccatggcaggactgcacacaacatgtcgtcttcgtcattgcggaaaaaatcggacctgacgctagtttccaaggttcggtatgcaatgcttaggcagttcctcgccaatcttcaagaggtcatattagggaccaagctctccgttctcttccctgctattccattggccattgttgctgagtgttatggatttggaagaccctgggtgtttgcattaagtttacttggacttacaccattggctgaacgagtcagctttctcaccgagcaaattgcttattacactg

SEQ ID NO: 38183 - DNA, 408 bp, Gossypium hirsutum
  Clone ID: LIB3165-026-P1-K1-H2
gctaaactttaacccctttcccttttgcaacagagagtgaatacatggctacctccagcatggcatgagctgcttcagggttcttgctcacacccaatgtcgcagcgaattcaagctccacttctaagaccaccaccgtgtttttcccttcaaagaacaacaacaattccaggcttgtggtgacgagggcagctgacgaggctgctgcaccagcaccagctaccaccactgcagcatcagaaggcggtgaagcccctaaacctaagccaccaccaattggaccaaaaagaggaaccagggtcaagattcttagaagagagtcctactggtacaacagctttgggtcagttgttacagtcgaccaggaccctaagactcggtatccagtggtggttcgattcaacaaag

SEQ ID NO: 38184 - DNA, 410 bp, Gossypium hirsutum
  unsure (1)..(410): unsure at all n locations; Clone ID: LIB3165-026-P1-K1-H3
cccacgcgtncgtgaaaccctcaaaattccactaaaaaatggcctccacagcttccctctccaccgccgtagccaccacctctttcctccgcggccatccggcgccgaaaaccctaaactcccttcctttcaaccaatctcttttcgggctaaaaccccaacgaaatggccgtctcaccatggcagcatacaaggtgacactgttaacacccgaaggaccccaagaattcgtgtgccccgacgacgtatacatcgttgaccaagctgaggaagaaggcattgatcttccgttctcgtgtagggctgggtcttgttcttcgtgtgccggagtgattaagcaaggctccgtcgatcaatccgacggtaatttccttgatgatgaccagattgctgcaggttttgtcctcact

SEQ ID NO: 38185 - DNA, 414 bp, Gossypium hirsutum
  Clone ID: LIB3165-026-P1-K1-H5
cgcgccgccacctcaagtcctctcctctcatccacagcctaggcttctcctccgctgcttctggggactctctgctttccctccatgtctcctccaaagttcgatctttcaagggaaaagggtcaagaggggttgtttcaatggccaagaagagtgttggggacttgactgccgctgatttgaaagggaagaaagtgtttgtgagggctgacttgaatgttccattggatgatagccagaacatcactgatgacaccaggattcgtgctgctattcccaccatcaagcatttgattcagaatggagctaaagtcattctctctagccacttggggcggccaaagggtgttactccaaaattcagcttggctcctcttgtacccaggctttctgaattacttggcattcaggttg

SEQ ID NO: 38186 - DNA, 391 bp, Gossypium hirsutum
  Clone ID: LIB3165-026-P1-K1-H6
gctctagagactctctagtctcaccgaagttgcataaagaaaagtagctaactgccttggcttgtatctgcggtgctggaccaagtaccatgttttgtgggctactggctctcttcagtgttcacctagcctaatcaccgccctgaacccaccaaaccaccagatttgggtgctgggtttttgtctttatatttgtattttctcatttctttcaactttcaactaaacattgcagcttcttaatttgtgggggtttttttttttttttggtttgctgcttaatccatggcttctttcctgcttgatggagctgaaaccttcactctcaatcgagggggaaccccaaaaaagattgggtttttgggggcaggtttacatgggaaacagtttt

SEQ ID NO: 38187 - DNA, 406 bp, Gossypium hirsutum
  Clone ID: LIB3165-026-P1-K1-H7
ctcactatgctgtcatgagttcctatgaatacattagccaaggtcttaaaacgtacaattgggacaacaacatggatggtttctacatcgctcctgcattcatggacaagcttgttgttcacatcagcaagaacttcatgtccctccctaacattaaggttcctctaatcctgggtatttggggaggcaaaggtcaaggaaaatctttccaatgtgagcttgtgtttgccaagatgggtatcaaccccatcatgatgagtgccggagaactggaaagtggaaacgccggtgaaccagccaagttgatcaggcataggtaccgtgaagccgccgacataatcaaaaagggcaaaatgtgcgccttgttcattaatgatctcgatgctggtgccggtcgtatgggagg

SEQ ID NO: 38188 - DNA, 401 bp, Gossypium hirsutum
  Clone ID: LIB3165-026-P1-K1-H8
cccacgcgtccgcttttgcagataaccggctttctttaaacttagttttcttgattgcccgacacaccgttatcccttgttaaatgctctttgcccttttctcctgttctcttattttttctctctgaaaatggaaggagtgaaattggatagatggggttatgaagttaaaacctcttccgattcttgcatatctgtaatcaacgcttactatcaccaggtgctttcctatggaagaaataggaaagtgatcttagaagctcctgttcttgacaaagactgcgttttagccaacattttggccgcccattttctctcttcctctgacccttcaaaggctccttcactcatagaagctgccaacgctggaattgagcaagcctcgtcttatgagaaagccg

SEQ ID NO: 38189 - DNA, 289 bp, Gossypium hirsutum
  unsure (1)..(289): unsure at all n locations; Clone ID: LIB3165-026-P1-K1-H9
ttggttaatggaanaatgtaagnaagggaagttgggaaaatggattngtaantttgggaaaaggattggatttgaggggtgggtatgggggtattagttatgaaattgttgggtgttggggtaatgttagagttgattttgaggtgagagagggttgttgtgtgtagagagggggatggattgggaatggtttttttgggggtgttaattgggggatgaaaagtagatttagaattggtaaggataaggggaatttgattgtttaattaaaanaaagtattgtgatggt

SEQ ID NO: 38190 - DNA, 331 bp, Gossypium hirsutum
  Clone ID: LIB3165-027-P1-K1-A1
gagaaatggcattgacgtatccacgagaagtaaaggtcgatagggaggaatctggagccctaagggtcagaaagtcagtggagactaggagagccaaccaaacgcatggccttttcaggactcttactgacaatatggtggtgggagtatcaaagggttttgagaagagacttcaactaattggtgtcggatatcgtgcaacgttagaaggaaaagacttggtgttgagtcttgggttttcccatccagtcaggatggcaatccctgatggcattcaagtaaaggtggaagagaacacgaggatcgtcataagtggatacgacaaaagtga

SEQ ID NO: 38191 - DNA, 361 bp, Gossypium hirsutum
  Clone ID: LIB3165-027-P1-K1-A10
aaaaccacgtataggagggaacagccgcaggatctgagatacaacggctgaaagtcggcaaatactaacatataaagagtctccatgggatctctggacctaagctcaggatcagaagttgttaccattcatgttaatgaagcaaaaaacttactgcagtcaggctaccgttacatcgatgtcaggacagtggaagaattcgagaagggacatgtggaagcagcgaatattcttaacatcccatacttgttcatcacaccagaaggtagggtgaagaatcctgagttcttgaaggaggtttcatctctctgcaaggaggaagatcgtctcatagtgggctgccaaagtggggcgagatccc

SEQ ID NO: 38192 - DNA, 326 bp, Gossypium hirsutum
  Clone ID: LIB3165-027-P1-K1-A11
gcgattctgtttaaccaaaattgattctttctctcccaatttgtgagatcttgttctttggcagtgatgagtaagggaccgggactgttcgtcgatatcggcaagagagccaaagatctcttgaccaaagattatacgtcggatcagaagttcacggtttccacttatactggcgctggagtggccatcacatcaacttctctaaagaaaggaggactttctactggggatgttgctgcactatacaagtacaagaacactcaatttgatgtcaaagtcgataccgactctaatatctcgacgacgatgacattcactgatattct

SEQ ID NO: 38193 - DNA, 297 bp, Gossypium hirsutum
  Clone ID: LIB3165-027-P1-K1-A12
caaatccggcatttctttactcaatagctacccacactagatttaatgatgtgattttgacataccctctatattccttctttaaaactatcactcttatattcaaacaaagatggcaatatcatctagctgctagctaggaaatgtaccgactactcacagaacaaaaattaaagttagtaacaaattttatagtaggaatattaacttaaccccatgcatttcatctttgacttaggaatctaataacccacttttaaaagcctatttaaaacatttacaccatgaagggaaaag

SEQ ID NO: 38194 - DNA, 342 bp, Gossypium hirsutum
  Clone ID: LIB3165-027-P1-K1-A3
cccacgcgtccgaaaaaaaggaaaaaaaagagggaaaattttcgtttgagatggttttgtttttggctaaagatgaagttgatggaagaggagacggtgttcgaagaggaaaatgaaatcaaggctatgaaagaggaagaagaggttgacggtgaagatgaaagtgaagtagaaggtggcgaaccggaagaggaagacgacgatgacgacgacgaggatgaggatgatgaaagcgaagatgacgacgacgactacgacgaaagagagggggatgacgatgtgcaggttcttcactcatccgggccttctgtcccgatagctgatgaccactagggcgaggat

SEQ ID NO: 38195 - DNA, 365 bp, Gossypium hirsutum
  Clone ID: LIB3165-027-P1-K1-A4
cccacgcgtccgcccacgcgtccgtccacgcgtccgggagtttaaagaagctgctgatgagattgatggtcctttgagacaaatcttcgttgagttcttggagaggtcttgtactgctgagttctctggttttctcctctacaaagaacttggaaggaggctcaagaaaaccaatccagttgtggctgagattttctctcttatgtcaagggatgaagccaggcatgccgggtttcttaacaagggtttatccgatttcaatttggcattagaccttggcttcttgacaaaagctaggaagtacacttttttcaagccaaagttcattttctatgccacttatttatctgagaaaattgggtact

SEQ ID NO: 38196 - DNA, 330 bp, Gossypium hirsutum
  Clone ID: LIB3165-027-P1-K1-A5
cacagatatgagttctgcttccctttccttctctctcccgcccaccgcctctgcctccggcggttcccgccgcaatccccacctccggattcccaaaacccttttcacttttcaccatcctcatcatcatcatcatcaccacccttttctactcagagttacaaatgaaactagcaggactgaagtgtctactactgatcctatcaatgagagattggaaagcgataagattgttgatgggatggactttggcgagctttgcaacgagttcgaatgcattagtagtcccttagtcgaatcaacagcaagacaactcgtacgtgacattct

SEQ ID NO: 38197 - DNA, 363 bp, Gossypium hirsutum
  Clone ID: LIB3165-027-P1-K1-A6
gccattctttcaagctcctttttttggtctccatcgaccacacagtttaactcaccgcgtcgcccatggaagctctcagctctcaacccctcgcccttctctccatcttctctcctaaaccaaaagatttcccggctagaatcatccgctttcccacccattccaaaaaggacggtaacgattccgatatccaatatgatcctaacaacacaagcatcgttcctcttgtcggcaatcaaactttctcccaggatgcagcgatgggattggttctaagcgcggcgtctgtaagaggatggacaacaagatcgggcatggagggtccatctgtacccgcccgaaccgatgatgaccaatctaata

SEQ ID NO: 38198 - DNA, 340 bp, Gossypium hirsutum
  Clone ID: LIB3165-027-P1-K1-A7
acgggcattatcttcaatcggtgaatataaaagggcagaggatgcacatgtgaaatcaatccaacttgaccgaagttttgttgaggcctgggctcatcttacccagttctatcaagatctagcaaactctaaaaaggcttttgattgccttcaacaagttatacaaattgatccaaggtatgctaaagcatatcacttacgtgggttactacttcatgggatgggggagcacaggaaggctattaaggatttatcagttggattgagcattgaaaactcgaatattgagtgcttgtacttacgagcttcatgctatcatgctattggagaatatgcagat

SEQ ID NO: 38199 - DNA, 375 bp, Gossypium hirsutum
  Clone ID: LIB3165-027-P1-K1-A8
gttttgagcttgagataaaatcatcagataatcgtatcctgcaagagagaactgcaaaacaagtgttctgagaatgaagaattgcaagcaaaggtaactctcctggagcagcagttggcatctctctctggcgataaactatcatcttctgcacatggaatatcagaagaacatgctgatgagttacgaaaaaagattcaatctcaggagatcgagaatgaaaaactaaaactggaacaggtgcaactttcagaggagaacagtgggttatgtgtccaaaatcaaaaactggctgaagaagcttcatatgcgaaagaattggcatctgcagctgctgttgagttaaagaatttagctggtgaggtgaccaggctt

SEQ ID NO: 38200 - DNA, 375 bp, Gossypium hirsutum
  Clone ID: LIB3165-027-P1-K1-A9
cacactctcaaattcagttaacaatttcacagttgttttcttcagtctctctgtcagccatggctgcagccatctccaccgtcgctgccgctgccgccgccaaccgagctctgggagtgtcagtcccaacctcagctttcatggggaagaaagtgagctcaagattcaacagcaccaggcaggttccttcgggaagttttaaggtgatggcggcggagaaagagatagacgaagagacacagaccgaaaaggaccgatggaaagggttggcttacgatatttcggacgaccaacaagacattactcgagggaaagggatggtggattccttgttccaagctcccatgaatgatggaactcactatgctgtcatga

SEQ ID NO: 38201 - DNA, 257 bp, Gossypium hirsutum
  unsure (1)..(257): unsure at all n locations; Clone ID: LIB3165-027-P1-K1-B1
acgaaaaaaaaaacagtntaacaatttttttactagtcagtaaactctctcaaattgaggtgggggcttccgccgttgcttccgccgctaaaaagaaaaccgctgtctccaagaggcctaaatcagctacttcacacccttcattgattgagatgatttcagacgcactcgattcgttgaacgagaggaccggatcgagccaatatgcgattgcgtgatctatcgccgagaagcataagcccttaccggctactttc

SEQ ID NO: 38202 - DNA, 380 bp, Gossypium hirsutum
  Clone ID: LIB3165-027-P1-K1-B2
gaagaactaaattccccagaatttgcttcagtaatggctgcctcagttatgggttcttcagttaccctcaagccttcattcaatgttgagaaatctggtgtaagaggggttccttcccttgctaggtccccttcttctttcaaggttgaagccagtggtggcaagaagatcaagaccgacaagccttatggaatcaatggtggtatgaacttgagggatggtcttgatgcctctggaaggaagggtaagggaaagggtgtttaccaatatgttgacaaatatggtgctaacgtcgatgggtacagtcctatctacaacaccaacgactggtcttccagtggtgatgtttatgttggcggtactaccggattggcaatctg

SEQ ID NO: 38203 - DNA, 315 bp, Gossypium hirsutum
  unsure (1)..(315): unsure at all n locations; Clone ID: LIB3165-027-P1-K1-B3
cccacgcgtacgcccacgcgttcttccacgcgtncgcgtcgctcttagcctcggactgttttactttactccttgtaatactcgatctctacaatataaccccccccccaacctttttttttctttaattcaaagccacaaagccaactcaaaacccacaaaagccaaagcctaggtacacacaaactacaaaaagaaattgagaaagaaggtatggaagtaggggtgaagatggggatgaaaggagaaggagatgaagtgggagggtaggagaaggagaaaatggggtatgaagagacagagctgaggctaggg

SEQ ID NO: 38204 - DNA, 321 bp, Gossypium hirsutum
  Clone ID: LIB3165-027-P1-K1-B4
gtcttgctttcatcaatctggtgattgcaagagaaagaacaacccaactcactatcgcgagcccagattttacactaaggtctttaaagaatgccaagcaactgatgattctggaaattcatttgaactttctcttgttggctgcaagtgcattggagcttatgttaagaacaaaaagaatcagaatcagatttgctggatcttccaaaaagttgtttcagataatgataagggattccagcgcttcttggattctgttcagtacaaatctaatagcattctccgttatgagcgtgtctttggaccaggatatgtgagcac

SEQ ID NO: 38205 - DNA, 330 bp, Gossypium hirsutum
  unsure (1)..(330): unsure at all n locations; Clone ID: LIB3165-027-P1-K1-B6
cggagctgttcaacccggggaacgtgcctaatttatcgacaatttggtggctacagggggtaccctttctgctgcaatacgcttactagaacgagccggggctcatgtggttgaatgtgcatgcgttgttggcctgcgtgaggttaagggacaacatggactaaatggaaagccattgtatatacttgtggagccacggcagcagattaattgttctgcaccttctgttaatggagttgaaacatgcagacacgacgatctgattctgggagcaagctttggttccncactcaatcccacttcaaaaagtgattagtgttttttttttgg

SEQ ID NO: 38206 - DNA, 370 bp, Gossypium hirsutum
  Clone ID: LIB3165-027-P1-K1-B7
caccattgttccaagtttgttgttaaccaagttagaaccagcagccagcatggcctcattagcagcctccaccgctgccgcctcccttggcgtctctgaaatgcttggtaaccctctgaatttcagtggtggagctaggtcatcggctccaacaccatccaactcatccactttcaagaccgttgctcttttctccaagaagaaggccgctcctccaaagcccaaggctgctgctgtcgccccggccgatgaagagctggctaagtggtacggtccggacagaaagattttcttgcctgaaggtctgttagacagatcggagatcccagagtacttgaacggagaagttcccggagactatggatacgat

SEQ ID NO: 38207 - DNA, 338 bp, Gossypium hirsutum
  Clone ID: LIB3165-027-P1-K1-B8
ttcaattttcctattttgatttttaagcttctaattccattaattcgagatatatatactccaaagttgggattttcttttctctttttcctctttcaagtaaagaaggaaatagaaattttccgggaaaaagaatccagctaccatgtcaaccatttcgatttacagaacagaattcttgactttctctaccaatggacccagaccccgccacaaatttcaaaggctttccctttctccatttatgaaaatggattctaaatcaaccgaaaaggttccaaaggaagaatcttctataaagctgcaaacgtcttcaattcctcagcttgaaaacccga

SEQ ID NO: 38208 - DNA, 343 bp, Gossypium hirsutum
  Clone ID: LIB3165-027-P1-K1-C1
tctggtctactcaacactctctcctccctctgagcagccaaagactcagatccgctcggatttctttgtcccagaactagaatggagacctttctattcacatcagagtccgtaaacgagggacaccctgacaagctttgcgaccaggtctctgatgctgttctcgatgcctgccttgcccaggaccctgacagcaaggttgcctgtgaaacatgcacgaagactaacatggtcatggtctttggagagattaccaccaaagccaacgtagactatgagaagattgttcgtgatacatgccgctccattggatttgtttctgatgatgttggtcttgatgctg

SEQ ID NO: 38209 - DNA, 355 bp, Gossypium hirsutum
  Clone ID: LIB3165-027-P1-K1-C10
cccacgcgtccgaaatccgtaaatggctaccactgcttctccaatggcgactgagctgaagagcagctttacgtcgtctgttacaagaggactggtagtccccaggggcatttcgggatccccgttcaaagtatcttccggaaagaccaggaccccttgcttcactgtcaaagctgttcaatccgacaagtcaacatttcaagtaatccaacccatcaacggcgaccccttcattggaagcctggagactccaatcacctcaagccccttaattgcatggtacctttccaacctcccagcctataggacggcagtgaacccacttctgaggggaatcgaagtgggtctggctcac

SEQ ID NO: 38210 - DNA, 332 bp, Gossypium hirsutum
  Clone ID: LIB3165-027-P1-K1-C11
actacctcttgagtcagaccaagttcttctgaaagtcatttatgctggtgtagacgcaggtgatgtgaactttagcgcaggccgttattttcaaggaaccaagaaagaccctggatttgaggcagtgggaataattgctgccattggagattctgtaagaaatttgaaagtgggaactcctgctgcagtcatgactattggatgttatgctgaattcatgaaggttccttcaaagcatacttccaattccaagacctgacccggaagttgttgctttgcttacttcaggattaacagcatcaatcgctttggaagaagctggtcagatgaaa

SEQ ID NO: 38211 - DNA, 254 bp, Gossypium hirsutum
  unsure (1)..(254): unsure at all n locations; Clone ID: LIB3165-027-P1-K1-C12
gggaagaaagccaactttttattcattagttctcangattaaaacccggaaatcgagaaacaaaggccaataactcaaagaaaaggaaaagcaaaagtaaagaacatgattttttctgagtacaaattcaaacaaatggagagacaaagttaataaaaagcttaaaagcctggaggcttgtaggcaatgaaactaatgcactgcacttgacgcacgttgtcgaagccaatgattctaatgaatgcattggggta

SEQ ID NO: 38212 - DNA, 344 bp, Gossypium hirsutum
  unsure (1)..(344): unsure at all n locations; Clone ID: LIB3165-027-P1-K1-C2
cgctcctccaccgtcaccgncggtggcggcggcactactttcgtcatcaatggtactgaaggcgacagcctttcgtactccgaatttattgctcagttccactccctcgctcactgtctgaggaaaaactatttcctttccagaaacgacgtcgctttgatcctctccccgccctctcttcatgtccctttgctttatttcgctcttatgtcattaggaatcgttatttctcccgctaatccactcagttccgactcggagatagctcaccaggttcaactcagtaaaccggttattgcctttgccaccttaacgacctctttcaagctttcgtccctcaaaca

SEQ ID NO: 38213 - DNA, 336 bp, Gossypium hirsutum
  Clone ID: LIB3165-027-P1-K1-C3
cccacgcgtccgttagctatagcatacactactagtacccactactagcaagggcttcctcaatgatctcatcggctaccattgccactgcctctccggcacaggctaacatggtcgctcctttcaccggcctcaagtctgcctctgctttcccagtcaccaggaaggccaacaacgacattacttctctcgcaagcaatggcggcagagtgcaatgcatgcaggtgtggcctcctactggaaagaagaagttcgagactctctcatacctccccgatcttacacccgtgcagttggctaaagaagtggattaccttcttcgctcaaaatgggttc

SEQ ID NO: 38214 - DNA, 299 bp, Gossypium hirsutum
  Clone ID: LIB3165-027-P1-K1-C5
agaggttttcgattacgctgatcgtagaatttaaagggataagtaaacaagactggtagaatggctctagttgcgggtggatcgtcaacattgaaccccaatgcccctctgtttgttccggctgtttatcgccaagtggaggatttctcacccgaatggtggaaactggttacgacaacaacatggtaccgtgactattggatcagccagaaccaggatgaagatggcttttacgacaacacaaaggatgatatatttgatgtcaatgacattgttgatttgcttgcagatccccttga

SEQ ID NO: 38215 - DNA, 318 bp, Gossypium hirsutum
  unsure (1)..(318): unsure at all n locations; Clone ID: LIB3165-027-P1-K1-C6
ctcaccaccaatggcagatcatcatcatttccgccgtccctgccccaggtttgaaacaggaagcctaaccagcaggtggtgtgcaaggctcaaaagcaggaagatgatggaagccttgtgtcccgtaggttggctctcactgtactcattggtgctgccgctgttggctctaaggtttctcctgctgatgctgcctatggtgaagctgcaaatgtatntggaaagccaaaaacagacacagaattcatgccatacnaatgggatggattcaagctgtcgataccatcgaaatggaacccaagcaaagaggtggagttt

SEQ ID NO: 38216 - DNA, 332 bp, Gossypium hirsutum
  Clone ID: LIB3165-027-P1-K1-C7
ttcaaatcccagatctctttttgttttctccttgaaacccaaatttgggcaggtaagaaaagcttctgagaaaatggtgcccaaatcattgatctatgcatttgtatctcgtggaggagttatattagctgagtatactgaatacagtgggaatttcaattccatagctcttcaatgcctccaaaagcttccttcttcaaacaacaagttcacttacaactgtgatggccataccttcaattatcttgttgacaatggatacacttattgcgttgttgcagatgagtcagctggaaagcaagcgccgattgcttttttggagcgtatcaagg

SEQ ID NO: 38217 - DNA, 330 bp, Gossypium hirsutum
  Clone ID: LIB3165-027-P1-K1-C9
tctatctctagaggaattaaaattttaaatacaacgaccggtcgttgccggggtatttatgggtctgtgctcccaaacgattgagaatttcgcggctgacccaaaagctggaacagaaccaaagaaagggggtttcgactatgactatgagagcttcgttgaggtgtgaaagagagttatgcaagggaggtctcggttgcagtaccaacaagtggtcctacaggtgctcttgtccatgctctcacccggcgcaccagtttatgtttatgaattgtttgcaccaacaaagtgggctgcagagtttaattgcttcacttactggaccttttt

SEQ ID NO: 38218 - DNA, 301 bp, Gossypium hirsutum
  unsure (1)..(301): unsure at all n locations; Clone ID: LIB3165-027-P1-K1-D1
cccacgcgtnncgccacgcgttctatcaaatataacattttctcctttcttcgtatggcttcattataaaaaaagaaaagaaaagacatggctgctgttactgctgcagtctcttttccttctaccaagtccacctctctccctgctagaacctctattgtctctcctgataggatcaccttcaagaaggtgcctgtttactacagagatgtttgcagtggggggagagtggtttctgtcagggcccaggttacaactgaagctcctgccaaagttgtaaaggaatccaagaaaaatgatg

SEQ ID NO: 38219 - DNA, 361 bp, Gossypium hirsutum
  Clone ID: LIB3165-027-P1-K1-D10
tttcctctctcaaaatctcaaactcagatttgttctctctctctctgtctctgtatttccaatcaattaattcctccattggaggagcttagggtttgttggtgttctggtctttgctttgtctgaaaaataaacagaattataaacgaacaccaacgccatgggaagatttgaagagagaggattcgattcagtggtttgccctaagcctatccgaacctttagatggtctaccaacagctgttatcagactgagatggctgattcaaaaactggtgcagagcttcttgatataatcctccccgagggagggtatggggccgagaatcccaccaaccaaatggcttcatcaccaccgtat

SEQ ID NO: 38220 - DNA, 349 bp, Gossypium hirsutum
  Clone ID: LIB3165-027-P1-K1-D12
cccacgcgtccgaacattttcagtgagcctagttgaaattgtatacaggttgggggttttgtttggtgccgcatgtcaaattcagaggctgctgctaaaaacggagcaacaatggatacccagagacaacaagcgccggggaacggtgcccttgccgtcaagaaacctccctccaaagaccgtcacagtaaagtagacggtcgtggacggaggataaggatgcccatcatttgcgccgctcgtgttttccagttgactcgcgagttgggtcataagtccgacggtcagaccatcgagtggctgttacgccaggccgagccttccatcatagccgctacaagtaccggga

SEQ ID NO: 38221 - DNA, 377 bp, Gossypium hirsutum
  Clone ID: LIB3165-027-P1-K1-D2
tcaggcatcaccatggcaacctctgctatccaacaatctgctttcgctggccgaacagctttgaagcagtccaatgagctcgtctgcaagatcggtgccgtcggtggtggtcgcgtttccatgcgtagaaccgtcaaaagtgctccaaccagcatctggtatggccctgaccgcccaaagtacttgggtccattctctgaccaaatcccatcatacctgaccggtgaattccctggggactacgggtgggatactgctggattatcagctgacccagagacatttgccaagaaccgtgagcttgaggtgatccactgtaggtgggctatgcttggtgcccttggctgtgttttccctgaaattctttcaaagaatgg

SEQ ID NO: 38222 - DNA, 361 bp, Gossypium hirsutum
  Clone ID: LIB3165-027-P1-K1-D4
cccacgcgtccgaattcccataaattctctcagcttccattgttttctttcctcttaggtcagtggaggcattgagcttctctcttgatcacaatgactatcctcattgatcaacccgagcttggtgttgaagcaggggttaacaagctcgataatgcagacaatgaactggtgttggatgggggatttgtggtgccacagacaaactcttttggccaaacttttagagattatcatgttgaaagtgagaggcaacagggtgtggagaacttctaccggaccaatcatattaatcagacttctgactttgtcaagagaatgagaacagagtatggtaaactgaacaagatggagatgggca

SEQ ID NO: 38223 - DNA, 388 bp, Gossypium hirsutum
  unsure (1)..(388): unsure at all n locations; Clone ID: LIB3165-027-P1-K1-D5
cgcccacgcgntnncgtgcacctacaggtaaaacagctcaccaaagataaagctgaattcgagagagagcaaagatgtntgagcgtctcaattgctttccccagcttaccttannactctccctccaaaacccaaatnncctcaattcccaaaaccttccttcactcggcgttaggaatcccagcacttatgtcctccaacccggttgccttctcaggccaccttctttcggcaaccgtcaccttcgtcctccgtggtcatgatggctaagagagaagaagaaatgaaggaaataagagccaaaaccactgaggaaatcaacgatgaagtggttgagttaaaaggtgagcttttgatgcttcgtctncagaaatcggttcgtaatgag

SEQ ID NO: 38224 - DNA, 356 bp, Gossypium hirsutum
  Clone ID: LIB3165-027-P1-K1-D6
ataagcctgaccttaacattgtcttcaatgctagttgcaccaccaactgtcttgcccgattggctaaggtgatcaacgataaatttggcattgttgagggtcttatgaccaccgtccattctattactgctacacaaaagactgttgatggtccttccatgaaggactggagaggtggtagagctgcttccttcaatatcattcctagcagcactggagctgccaaggctgtcggcaaagttttgccagcactgaatggcaagctgactggaatggctttccgtgttcccactgttgatgtctctgtggttgacctcactgtgagacttgagaagaaggctacatatgatgaaatt

SEQ ID NO: 38225 - DNA, 367 bp, Gossypium hirsutum
  Clone ID: LIB3165-027-P1-K1-D7
aagacaatggctaccattagaattgctcttcgtaacgtccaccgcagggttgatacctacgccgttgccggccgtacaacgaccgttttcaggccacagtatggttgggtttcaacatatttttcaactaatattagtaacactcagccattaaacatcgatctttctaacgaagaaagcaaaaggcgtctttataacagattgttgtataggagcaaacaaagagggtttctggagctggatttggttttgggaaaatgggttgaagaacatatccattccatggatgaaaatggaattaaagctcttgttaatgtcctcgatttggaaaaccccgacctttggaaatggctaaccggtcaagaac

SEQ ID NO: 38226 - DNA, 374 bp, Gossypium hirsutum
  Clone ID: LIB3165-027-P1-K1-D8
ctcaccaaccaggattcaacatgttagggaggaaaatccaagtcagatgctaagagtgccaagctatccgtgaaatccaaagctggaaagaaatcggggaaggctgccaaggatccaaacaagccaaagaggcctgctagtgccttctttgttttcatggaggagttccgtgagcaatacaagaaggatcaccctaaaaacaaatccgttgcggctgtcggcaaagctggtggagataaatggaagagcttgtctgaagctgaaaaggcaccttatgtagctaaggcagaaaagcggaaggttgagtatgaaaagaacatgaaggcctacaataagagacaggctgagggtcccaaagacgaagatgttgagtc

SEQ ID NO: 38227 - DNA, 365 bp, Gossypium hirsutum
  Clone ID: LIB3165-027-P1-K1-D9
aaaatcagttgcttcacattggcctctacaaccatggctctttcttcgccatgattcgccggtaaggcagtgaagttctccccttccacccctgaaatccggggaactggccgtgtttccatgaggaaaaccaccaagcctgttccttctggtagcccatggtacggtcctgaccgagttttgtacttgggtccactttccggtgagccaccatcttacttgaccggtgagttccctggtgactatggttgggacactgctggactctcagctgatcccgagacctttgctaggaaccgtgagctcgaagtcattcactgcagatgggccatgttgggagctcttgggtgtgttttccctgagct

SEQ ID NO: 38228 - DNA, 342 bp, Gossypium hirsutum
  unsure (1)..(342): unsure at all n locations; Clone ID: LIB3165-027-P1-K1-E1
cgatcctttagaacnctnntcggaatttgggaagctangggaggtgtnncagaaaagggttaccaaacagggatnnaactggctttnggtggcagcncannagcgttcaaatagcngnnacgttgctttttttggatccctttcngnnatgtcggcttcttttcctttatcattngggtgaagnncagaattcaacncannagtgtnntggattgggttcaccncnaaccaataaggnngaacgtgaagggctgggtttaagacnncgtcgtgaagacaaaggttagttttaacccttactggatgnngccgccgtcgcaatagtaaattcaaccctagtac

SEQ ID NO: 38229 - DNA, 333 bp, Gossypium hirsutum
  Clone ID: LIB3165-027-P1-K1-E10
gctctgtatagattcttctagtttcgaccaaaaaaacaattgctcagctttcgttcagagaatatttgttttgagtgaaaaaaaaaatgttgggagtattcagcggagcgatagtgtccccgccggacgagctggtggcggccggttgcaggacgccgtcgcctaagataacggcggacgctcttgtgaaacggttcatcgaggcaaacccctccaccgtgtccttgcagatcggagatcatgtccaattcgcgtattctcaccgtaacgagtctgctttacttcccaggtcattcgcggtgaaagatgaaatattctgcatgtttgaggggg

SEQ ID NO: 38230 - DNA, 308 bp, Gossypium hirsutum
  Clone ID: LIB3165-027-P1-K1-E11
cacactctcaaattcagttaacaatttcacagttgttttcttcagggtctcggtcagccatggctgcagccatctccaccgtcgctgccgctgccgccgccaaccgagctctgggagtgtcagtcccaacctcagctttcatggggaagaaagtgagctcaagattcaacagcaccaggcaggttccttcgggaagttttaaggtgatggcggcggagaaagagatagacgaagagacacagaccgaaaaggaccgatggaaaggggtggcttacgatatttcggacgaccaaacaggacatactcga

SEQ ID NO: 38231 - DNA, 361 bp, Gossypium hirsutum
  Clone ID: LIB3165-027-P1-K1-E12
cccacgcgtccgggcgaataaagggatatatggataaagtacgaaacttgaagagcggatatggtagtggcgtgtccgcttctcattcgaagcttcttcagttatcggcataagctcaactctcgactgcccgcagtgaacttactgatggcagtctgattgattagcattcaaggaacaagggatatatgcttgaaagatgatctgaagttcatcctctaaattcataaattttgggtggtttcatttatatttctgtggtggagggattgctgtaggcagtgatgaaacagcagaatattctgtacagtaatgcctctttcattttcagaaaaaatctttatggacaattcaatcataa

SEQ ID NO: 38232 - DNA, 375 bp, Gossypium hirsutum
  unsure (1)..(375): unsure at all n locations; Clone ID: LIB3165-027-P1-K1-E2
cccacgcgtccgcccacgcgtncttatggtttctacattgctcctgcattcagggacaagcttgttgttcacatcaccaagaacttcatgtccctccctaacattaaggttcctctaatcttgggtatttggggaggcaaaggtcaaggaaaatctttccaatgtgagcttgtgtttgccaagatgggtatcaaccccatcatgatgagtgccggagaactggaaagtggaaacgccggtgaaccagccaagttgatcaggcaaaggtaccgtgaagctgccgacataatcaaaaagggcaaaatgtgcgccctcttcattaacgatctcgatgctggtgccggtcgtatgggaggaaccacccaatacaccgtc

SEQ ID NO: 38233 - DNA, 358 bp, Gossypium hirsutum
  Clone ID: LIB3165-027-P1-K1-E3
tttagctatagcatacactactagtacccactactagcaagggcttcctcagtgatctgatcggctaccattgccactgcctctccggcacaggctaacatggtcgctcctttcaccggcctcaagtctgcctctgctttcccagtcaccaggaaggccaacaacgacattacttctctcgcaagcaatggcggcagagtgcaatgcatgcaggtgtggcctcctactggaaagaagaagttcgagactctctcatacctccccgatcttacacccgtgcagttggctaaggaagtggattaccttcttcgctcaaaatgggttccttgcttggaattcgaattagaggagggattcg

SEQ ID NO: 38234 - DNA, 363 bp, Gossypium hirsutum
  Clone ID: LIB3165-027-P1-K1-E4
gaaagcactgaaaacgcaaaaccatggcctctgcttctctcctcaagacttcggcagtgttagacaagtctgagtgggttaagggtcacacccttcgccaaccttccacttctgcggtgaggtgccaccctgttgcaccctctggactaactgtgcgtgcaagctcatatgccgatgagcttgtcaagactgctaaagctattgcttctcctggccgtggaattttggccatggatgagtccaacgctacctgtgggaaacgtttggcctcaatcgggctagaaaacacagaggctaaccgccaagcctacaggacgttgcttgtttcagctcctggccttggtcagtacatctctggtgcca

SEQ ID NO: 38235 - DNA, 366 bp, Gossypium hirsutum
  Clone ID: LIB3165-027-P1-K1-E5
aaaatagtaaagtattccttcaccataacactcttctctcctctccatactttgaaaggaaaaaacgttatctcaaagcgaaaatcctcccaaaactggattaagaagagcaaataaaaaaaaatgaaccccaagagcaccttcatcttggctgttctgctacttacagcttcactaactgcagcagctaggccagactcatttgaagctttatcatctgaggaaaagggcaacaaaggcagcggcaaaccaggcaaccaaaacaacaaaggtagtggtggaaacactggtgggatgggcggcttcttcggtccaaggcctgggtttggattgccagggtttgaaaaagggtggggacatgggatc

SEQ ID NO: 38236 - DNA, 364 bp, Gossypium hirsutum
  Clone ID: LIB3165-027-P1-K1-E6
cccacgcgtccgtccacgcgtccttccactcgttcgaaaaaaaaaaccacccagacaggcaatagactaggacaggaggatctctcagggtttaggtgatggcttcgaagcggatcttgaaggagctcaaggatctccagaaagatcctcctacctcttgcagcgcaggccctgttgctgaagacatgtttcattggcaagcaactattatgggtcctcctgacagtccatatgctggtggagtgtttctagtcaccattcatttccctccggactatccatttaaaccaccaaaggttgcattcaggacaaaggtctttcacccaaatattaacagcaacggtagcattttgcttgatatttt

SEQ ID NO: 38237 - DNA, 358 bp, Gossypium hirsutum
  Clone ID: LIB3165-027-P1-K1-E8
cccacgcgtccgcccactcgtactgtaattattaaccctgggaacccgactggtcagtgtctcagtgaagctaatttaagagaaatattgaacttctgttaccaagaaaacttggtattacttggagatgaggtttaccaacagaatatataccaggatgagcgcccctttatcaggtctagaaaggtgttgatggatatggggcctccaattagcaaggaagtccagcttgtttctttccacactgtgtctaaaggatattggagtgaatgtgggcagcgagggggatactttgagatgaccaacattccttcaaagacagttgacgagatatacaagattgcatcaatattcctta

SEQ ID NO: 38238 - DNA, 374 bp, Gossypium hirsutum
  unsure (1)..(374): unsure at all n locations; Clone ID: LIB3165-027-P1-K1-F1
cgctctctctaaaggccaatcaacattttaaaagagagagaaagtgtcctttctgtctctagaactctaaagggtcaaagctttaaagccttcaaatatatacatataaatcgagagagagggagggaaacatttttttttaaattattttttgggagagattttgaatcatgggtggtgagaagaaattcggngttcttctatgcgcggaggactcggactacattaagaagaggtacggagggtattttggtgtgtttgtggaaatgctggcggaggaaggggagacgtgggacgttttcagggtggcgaacggcgagttccccgacgacgatgagatcgccgaattcgacggattcgttataaccggcagt

SEQ ID NO: 38239 - DNA, 303 bp, Gossypium hirsutum
  Clone ID: LIB3165-027-P1-K1-F10
cccacgcgtccgcattgttccagaagtagaaaagttagttgctgcacttcctgaaggtggtgttcttcttcttgaaaatgttagattttacaaggaagaggaaaagaatgaacctgaatttgcaaagaagcttgcttcgttagctgatctctttgtcaatgatgcatttgggactgcacatcgagcacatgcatcaacagagggtgttacaaaattcttgaagccatcagttgctggtttccttttacagaaggaactagactaccttgttggtgctgtttcaagccccaaaaggccttttgc

SEQ ID NO: 38240 - DNA, 345 bp, Gossypium hirsutum
  Clone ID: LIB3165-027-P1-K1-F11
ctttgccaagatgggaattaactttattatgatgagtgccggagaagtggagggtgggaacgccggagaaccagccaagttgatcaggcaaaggtaccgtgaggccgccgacattatcaagaaagggaaaatgtgttgcctctttatcaacgatctcgacgctggagccggtcgtatgggaggaaccacacaatacacagtgaacaaccaaatggtgaacgccacactcatgaacatcgctgataaccccaccaacgttcagctccccggtatgtacaacaaggaagagaaccctcgtgttccgatcattgtcaccggtaacgatttctcgacgctgtacgcgcc

SEQ ID NO: 38241 - DNA, 303 bp, Gossypium hirsutum
  Clone ID: LIB3165-027-P1-K1-F12
aaatatgctgccgatgaggatgccttctttgctgactacaccgaagctcacgtgaagctctctgagctaggatttgctgatgcataagctgatggttgcggaatagaatgaagccaacaacatttgcctccacaaaatgaatgtattgggttttgtcatctctcagtagtttatgggcagttgttgcttgatgaatatgggtatttgcagttttattttgttgaacatgttgaattgagtttgtgggagatttcgatggactaaaaagctctttcgtaataaataatatacaatttattccat

SEQ ID NO: 38242 - DNA, 373 bp, Gossypium hirsutum
  Clone ID: LIB3165-027-P1-K1-F2
ctcattcctgctttagtctagctttctcttgctgtcaaatctactgtacgaggtggcatgcatgggaacgctttcaatcatgttgcctttctacatgcaatcgcttgggcagcgaacgcggaaagtactctgtggtggatctcagtgcatgaaaggagacggagcccttcgctatttgcgacaactacctgcaaagccaattgacgattacgctcattatatgctccattgaagtttattttcactatctgatcagatgggtgagtccattgtttaatctgcttagaaactctggaagtactgagctcaaaaccattcacttcttttaaataactaagaacaaatcttgacatctgctgaccagatctgcttg

SEQ ID NO: 38243 - DNA, 358 bp, Gossypium hirsutum
  Clone ID: LIB3165-027-P1-K1-F3
ggagctttttcctttccaagactgttgggtggttcctgcaaaagtagctttcgaccaaactgcgtgggctgcagtttggaacagcatttacttcgtgattttgggatttctgcgtcttgaatctccgatcagtatttttaacgaatggaaggcaacattcttgcctatgttgacagccggatggaaactttggccatttgctcatcttatcacttatggttttattccggtagaacaaaggcttctttgggtggactgcgtagaacttatttgggtgacgattctctcaacttattcgaatgaaaaatcggaagcaagaatctccgaggcagcaccagcagaagcaagttcaattttt

SEQ ID NO: 38244 - DNA, 365 bp, Gossypium hirsutum
  Clone ID: LIB3165-027-P1-K1-F4
cccacgcgtccggttgcttcacattggcctctacaaccatggctctttcttcggcatcgttcgccggtaaggcagtgaagttctccccttccacccctgaaatccggggaactggccgtgtttccatgaggaaaaccaccaagcctgttccttctggtagcccatggtacggtcctgaccgagttttgtacttgggtccactttccggtgagccaccatcttacttgaccggtgagttccctggtgactatggttgggacactgctggactctcagctgatcccgagacctttgctaggaaccgtgagctcgaagtcattcactgcagatgggccatgttgggagctcttgggtgtgttttccct

SEQ ID NO: 38245 - DNA, 359 bp, Gossypium hirsutum
  Clone ID: LIB3165-027-P1-K1-F5
ctctttcaaaccccggaccgctgtcttctttaaacgcgtccatatccgagctggtttggtcgaaccggacggtggtaaactcgtcgacctccacgtgtcggaaccggagcgggagttgaagaagcgggaagcggcttcgttgcccaaggtgaagcttactccgatcgacgtgcaatgggttcacgttttgagtgaaggctgggctagcccgttaaccgggttcatgagggaatctgagttcctccaaactcttcattttaactcgctccggctcgacggtggttccttcgtcaatatgtcggtcccgattatattggctatcgacgatttgcaaaagcgagtatcggtgagttcgacag

SEQ ID NO: 38246 - DNA, 359 bp, Gossypium hirsutum
  Clone ID: LIB3165-027-P1-K1-F6
ctatagcatacactactagtacccactactagcaatggcttcctcaatgatctcatcggctaccattgccactgcctctccggcacaggctaacatggtcgctcctttcaccggtctcaagtctgcctctgctttcccagtcaccaggaaggccaacaacgacattacttctctcgcaagcaatggcggtagagtgcaatgcatgcaggtgtggcctcctactgggaagaagaagtttgagactctctcatacctccccgatcttacacccgtgcagttggctaaggaagtagattaccttcttcgctcaaaatgggttccttgcttggaattcgaattggaggagggattcgtgcacc

SEQ ID NO: 38247 - DNA, 370 bp, Gossypium hirsutum
  Clone ID: LIB3165-027-P1-K1-F7
cccacgcgtacaccaaatctatatactggtctcattcaatggcagtggagatggctatcctagtatcacccactgcaaggctttctattccaccaccatcaccatcaccaccttctccttgagtaccatcatccataaactcaaccaaaccttctttaaaaccccaacaacccaaacccatctctctatcactcccaacatccacagatatctctttattggctttattttcaccttcccatgaagccaaagctatcaatcttagcatagaacaaattatttcatctctcaatgaagtggagaaaaccattgatcaagttcaagaagccagttcaagtgccttggatgttgcacaacagatatttgatgt

SEQ ID NO: 38248 - DNA, 367 bp, Gossypium hirsutum
  Clone ID: LIB3165-027-P1-K1-F8
aatttttccctttccaagaatttgtgaagtgtttttttttttttttggcatgggttcaaactcattgaagaaccctcttctgttcagtgatgaagttgagcctggttatgtcaaacactcatcttttctgaaatcatcagtgaaatggggtttaaagattgtaatgtgggtgattttcattgcatgggttggtgttatttttctatatcctggagaaattggtagtcaattggttgagaaaattattaatgccaccaacggatctgttttcggcacttcaggaagtttgttcttggtattcagtgctccaattcttctcattgcaatacttgcagtagctcatctgatcatctctggtgaacatgtt

SEQ ID NO: 38249 - DNA, 368 bp, Gossypium hirsutum
  Clone ID: LIB3165-027-P1-K1-F9
cttttccagaatacatttcaacatatcaaatgcccttctaaaaacagagtatctgagctactagtaagcaagtattttccttctcttcaacaatgggtaactcaaactagtactctcagttttagcttcttcttattcttttcgtttacgcaaaacttcgaacagcttctggtcttacctcaatggctctccctcagctaataccttctcactcttcttcttcactcactcaccagccttccataaaccctaacgcagccaatccataccccatgttgaagtcctttttgaagccatcttctctctctcaatctcgcaggtttcacaggctcagctctcttcgagcttcggcctcttccttccccgat

SEQ ID NO: 38250 - DNA, 336 bp, Gossypium hirsutum
  unsure (1)..(336): unsure at all n locations; Clone ID: LIB3165-027-P1-K1-G1
gccaaagtcaagctaaacttttaaaattaatcaatggcggaaaaaagtttcaggtgcgtcatcctcggtgggtggtgtcgctgccgggtatgcggcgagggagtttgccaaacagggagttcagcctggtgagctagccattatttccaaggaagcggttgctccatatgaacgtcctgctctgagtaaggcgtatctcttccctgagggagctgcaagacttcctggtttcatgtctgtgttggaagtggtggagagagattgcttnctgagtgggacaatgaaaaaangatttcagttgatccttagcactgaaatagtgaaagcagatctttc

SEQ ID NO: 38251 - DNA, 348 bp, Gossypium hirsutum
  Clone ID: LIB3165-027-P1-K1-G11
aactgctctctgctaaaatactatttattttcagtgtttccttcctgtcttctgatatggttttttgttgttttcaaaatttgaatcacaacaacactgtgtatagattttcgatttttttttatttcgtctctctccttttgtttttttttctcgctaaaactcactcctttgtttcctcctctttttttcactcaaaagtgtacggagaatggacggaggaacactgcataacctcagaacagtagaggaagtctttaaagatttcaaaggccgccgtgcaggaatcatcaaagccttaaccgccgatgtttgagaatttttgaacagtgcgatcctgagaaggag

SEQ ID NO: 38252 - DNA, 363 bp, Gossypium hirsutum
  Clone ID: LIB3165-027-P1-K1-G12
cttttgtataactgtagcatatagtactagtaagcagtaatagcaatggcctcctccatgatctcatcggcaaccattgccaccgtgaactgctcctccccggcacaggccaacatggtggcccccttcaccggcctcaagtctgcctctgctttcccagtcactaggaaggccaacaacgacatcacttctcttgcaagcaatggtgggagagtgcaatgcatgcaggtgtggcctcctcttgggaagaagaagttcgagacactctcatacctccccgatcttacacccgtacagttggctaaagaagtagattaccttcttcgctctaaatggattccttgcttggaattcgaattagag

SEQ ID NO: 38253 - DNA, 267 bp, Gossypium hirsutum
  unsure (1)..(267): unsure at all n locations; Clone ID: LIB3165-027-P1-K1-G2
cccacgcgtccgattntattgatagtctctgctttttagtccgcaatgagctgagatgtgatgtcatgtgtcaccagacaaaatccttcaaaagagtactaaccagtgaagcatttgctattatcattacccatcaaaacacccaggtacagaagcactaacattttctctttggcttaccaaccttggatctgaaatggcaaagtcacccgaagaagaacaccctgtcaagacctttggctgggctgcaagggacccatctggtca

SEQ ID NO: 38254 - DNA, 241 bp, Gossypium hirsutum
  unsure (1)..(241): unsure at all n locations; Clone ID: LIB3165-027-P1-K1-G3
atcaggtccagcgatcgtccacaggaaatgcttctaaaatgcccataccatgaaagagagaagtactgtttcattgtttcttgatgcagcttggaactttgctttgttctaatggatttgttatccttctgtgtgttttcatgttggagtgaaacaatgaactttgagaaagccagtgatttgatttttgttccaattctttgnaaaaaaaaaaaaaaaacaccaaaaaaaaaactaaaaa

SEQ ID NO: 38255 - DNA, 356 bp, Gossypium hirsutum
  Clone ID: LIB3165-027-P1-K1-G4
ttctgatgactatgccagtggcatgaagctaaaaaaatcagtgaagaatggatgcaggcgcatctgatcggtcgaagcttggtgctgctagtttggatgttgatgatcgacaggcacaacatcgacgtagacatgactctagcgaggatgactctgaaactgatggtgggagggaaaagaatagaggtgaagttcaaaagcaaaagtttgagggtagtgaatctgattctgatgctgacagagcgagaggtcatacaaaggaattgattaaggaaggtcgtcaaaggcatgactccagtgagggtgactctgattctgatggtgggaggcaaaagaagggaggtgaagttcaaaaa

SEQ ID NO: 38256 - DNA, 339 bp, Gossypium hirsutum
  Clone ID: LIB3165-027-P1-K1-G5
atttcttctcgcctactcaacacctcctccgccgccgccgcaactgcgctactaaagtccaagtccagagttcataatagacatacctcaatccctcttcttcctctcaaacacccattctcccctctcactttgaaacaaatgagtaacaattcccagtcaacgctttcttgttcctctcttccccaaaacaacccatcttccccttcaaccgcatcaggtcggattggagaagtgaaaagggtaacgaaagagacgaatgtgtgggttaagataaacttggatggcaccggagttgctaattctagtacaagtattccctttctcgatcatatgttg

SEQ ID NO: 38257 - DNA, 348 bp, Gossypium hirsutum
  Clone ID: LIB3165-027-P1-K1-G6
gttcgagactctctcatacctcctcgatcttacacccgtgcagttggctaaggaagtagattaccttcttcgctcaaaatgggttccttgcttggaattcgaattagaggagggattcgtgcaccgtaaatactcgagcctacccacgtactacgatggacgctactggaccatgtggaagctgcctatgttcgggtgcaccgactcggctcaggtattgaaggagcttgaggaatgcaagaaggaataccccaatgcattcattagaatcattggcttcgacaacgtgcgtcaagtgcagtgcattagtttcattgcctacaagcctccaggcttctaagcttttta

SEQ ID NO: 38258 - DNA, 367 bp, Gossypium hirsutum
  Clone ID: LIB3165-027-P1-K1-G7
cccacgcgttcgcaatgacactggtggtgttaagcaggcttctcacgttctggaatatgattccacccttggcatcttcgctgccgatgtcaagcctgtcggcactgatggcatctctgttgatggcaaggttatcaaggttgtttctgaccgcaacccttccaacctgccatggggggacctaggaatagatctagtcatcgaaggaaccggtgtgttcgtcgatagagaaggtgcaggtaagcacattcaagcaggagccaagaaagtgctgattactgctccaggtaagggtgacatccccacctatgttgttggagtgaatgctgacacctacaactcaaatgagcctatcatcagcaatgct

SEQ ID NO: 38259 - DNA, 365 bp, Gossypium hirsutum
  Clone ID: LIB3165-027-P1-K1-G8
gtatttggggaggcaaaggtcaaggaaaatctttccaatgtgagcttgtgtttgccaagatgggtatcaaccccatcatgatgagtgccggagaactggaaagtggaaacgccggtgaaccagccaagttgatcaggcaaaggtaccgtgaagctgccgacataatcaaaaagggcaaaatgtgcgccctcttcattaacgatctcgatgctggtgccggtcgtatgggaggaaccacccaatacaccgtcaacaaccagatggttaatgctaccctcatgaacatcgccgataaccccaccaacgtccagctccccggtatgtacaacaaggaagagaacccccgtgtccccattatcgtcact

SEQ ID NO: 38260 - DNA, 366 bp, Gossypium hirsutum
  Clone ID: LIB3165-027-P1-K1-G9
agcaattgtcctcaaatatctcatacaaggaattaaattgaatcaatggctcaaaccatgttgctcatgtctagccatgcagtgagcttgaagagagatcaccctttactccatttccaagctcaagggctcaagcctaaacctgtctctcatctcttcttcaatccattgtctaacggtgtccatacttcatccaaagctttcaccactttagctatctttaaatcaaagaccaaagcagctcccaagagggttgagccaaagtcaaagccaaaggttgaagatgggatctttggcacctctggagggattggttttaccaagcaaaatgagctctttgtgggacgtgttgccatgcttggtttt

SEQ ID NO: 38261 - DNA, 336 bp, Gossypium hirsutum
  unsure (1)..(336): unsure at all n locations; Clone ID: LIB3165-027-P1-K1-H1
agcaattgtactcaaatatttnattcaaggaagagcacggaatcaatggatggcgcgatatcgaagatgcatgacaaagcaggaatctcaccaaatcagcaaaggttgatttttgctgggaaacaactggaagacggaaggactttggctgattacaatattcaaaaggagtccactcttcaccttgttcttcgacttcgtggtgggttctaagccttaaggtctcccttaatgagggcttttctggatttacgttgaggcactgtcaaatgcaaaggtcgaagatgggatctttggcacctgtggagggattggatttacctatggaatcttctt

SEQ ID NO: 38262 - DNA, 354 bp, Gossypium hirsutum
  Clone ID: LIB3165-027-P1-K1-H10
gctcaaggctgactatttatcttatctattgctatggctactgaacaatgtgtgcgccctgttgaaaaaaccctacacgaagggaaacatgaacaccatccgagcagtggccaaactcaggttcataaggagagtaagggtgtgaatcaatcacatgggcacaaccaactgagtcatgacacacccaaaacacatgccgagtccaagaccgtgagccatggtgtccatgctcagcaacatgtggctcaaagcacggccatgcctacaacttgccatggaaagaaggaaaagaagatgaaagacaagaaggagaaagacacggacaggaaggaaaagaaagacaagagggaaaga

SEQ ID NO: 38263 - DNA, 362 bp, Gossypium hirsutum
  Clone ID: LIB3165-027-P1-K1-H12
cggacgcgtgggcaaattttcattacccatcaagcttttcatcaatggcttcgcttcaacaagcttcaatctctcttcaacccaagcttctttcatcttctcaacaccccagatcccttccctctctcaacctctctttttcagccactttcccttccctcaaactctgcaccactcgccctcttcatggcggtgccaaaatgtcagcctccgccgcttccagctacgccaccgctttagccgatgtagccaagtccaacaacacccttgatgccaccagctccgacgttgaaaaggtcgagaaaatcttctccgacccacaagtcctccagttcttcaccaaccccaccattgatgtcctc

SEQ ID NO: 38264 - DNA, 53 bp, Gossypium hirsutum
  Clone ID: LIB3165-027-P1-K1-H2
cccacgcgtccgcccacgcgtccttccacgcgtccgcccacgcgtccgatcgc

SEQ ID NO: 38265 - DNA, 285 bp, Gossypium hirsutum
  Clone ID: LIB3165-027-P1-K1-H4
ctgagctcaaggtgaaagcgatctttaacgttaggttggctatgttctcaagggtcggggtgttcgttcaggccatcgtgaccggaaagggaccattggagaacttggctgaccaccttgctgacccagtcaacaacaatgcttgggcctatgccaccaactttgtccccggaaagtgaacttagagagtgaaaagggatttgtcttgttcatgtttttatttgttggtgtgaatgtaaatttgttgcacaatcaatgaaagcagaatgtgaattttgtgtgctc

SEQ ID NO: 38266 - DNA, 366 bp, Gossypium hirsutum
  Clone ID: LIB3165-027-P1-K1-H9
cccacgcgtccgttcatacgcaattttggggacaagaagagcacgcgtcttggagattatatctacaaatcattaagcctcgctctgcaatttccccctttttacccttccaccactactacaacaaagccgccatttcagtcgctgacccaaccacaccgacgaaaccataatcaatggctgccgcgttacaattacaaacacacccttgcttccatggcacgtgccaactctcacctccgccacgaccttccgtttccttcccttcttcctcccgctcgtttccatctagcagacgttccctgtccgcgcatgtgaaggcggcggcgtcgtctttgtccaccaccaccttgcaggaagggatag

SEQ ID NO: 38267 - DNA, 349 bp, Gossypium hirsutum
  Clone ID: LIB3165-028-P1-K1-A1
ctctctctctttgctacgccgcctttgcttccctttctctgaataaaaaatcccaaactgaccaaaaaaaacagagcatttagttttttctttcaattaagagttcaagctggcgatcgaaaatcgagaatccattgtccgtgaaatcaagcccaagaacagaagaatcatgggtgctggtgggcctgatgaagaagacaacaggtggccgccatggttaaaacctttgttaagggaacatttctttgttcaatgcaagcttcatgttgattctcacaagagtgaatgcaatatgtactgcttagattgtatgaatggcgctctctgctctttttgcttagctgatcac

SEQ ID NO: 38268 - DNA, 383 bp, Gossypium hirsutum
  Clone ID: LIB3165-028-P1-K1-A10
ccacgcgtccgcccacgcgtccgctcaaattcagttaacaatttcacagttgttttcttcagtctgtctctcagccatggctgcagccatctccaccgtcgctgccgctgccgccgccaaccgagctctgggagtgtcagtcccaacctcagctttcatggggaagaaagtgagctcaagattcaacagcaccaggcaggttccttcgggaagttttaaggtgatggcggcggagaaagagatagacgaagagacacagaccgaaaaggaccgatggaaagggttggcttacgatatttcggacgaccaacaggacattactcgagggaaagggatggtggattccttgtccaagctcccatgaatgatggaactcactatgc

SEQ ID NO: 38269 - DNA, 398 bp, Gossypium hirsutum
  Clone ID: LIB3165-028-P1-K1-A11
cccacgcgtccggtacatcttccgttcgagattagatacatagttatgctttgctcttatttgcggttccccaattgttcctggaaccctaatcctaattccagattgctcctgtctacatcgattagcaaatggcacccgaggacccggcagtcgtggcagaccccgcacccgcgacggcggacgacaagactgctgacaccaaagctacttcaaaatccggcagagcaaagaaggccaaagaacccagaaccaagaaagctgcagctcctaggaaaccacgggctgcttctactcatccttcttacgaagagatgatcaaagatgcgatcgttactttgaaagagaggacaggttcaagtcagtacgccattgctaagttcattgaagagaagcag

SEQ ID NO: 38270 - DNA, 397 bp, Gossypium hirsutum
  Clone ID: LIB3165-028-P1-K1-A12
cccacgcgtccgatcaaactgaaaagctctgaaatgtttgatatggttttttgtacctgtgaagaggaccaatcacacattttgcggcttatctttcaatctgattgcctcgggatgacaactttaccatcaattcgaacgcaaggtatgtgggaaatctttgaccactctcgtcctttatcgcttgagcactcttctttcagcaatggacaattgaaaatgtgtaaaacatcaagacagagaagcatgtctttttccggaagagatgttagcttgggacaattatcgatcatcaattcttgaagagaggcgaggtcttgaaagcccccggagaacatgaattccagattctcaaaatctgaaaggcggataaaggtgagagaaggaggcacatcat

SEQ ID NO: 38271 - DNA, 290 bp, Gossypium hirsutum
  Clone ID: LIB3165-028-P1-K1-A2
tactgtcctagtgtagcatgtgatgaaactgattatgtgaaacaattacttgaaagagttttgactgtgtataaaggtaattctacacggaagaaataagcccttgtaagcaaaaaaaaaaaaataaaaaaaataaaaaaaaaaaaaaaaaaaaataaaaaaaaataaatataatataatttaatatttattacttttaattttatatcttttttttattattaaattttattttatatttattttaattttttttatatttttttaaaattttttaattttatatttaa

SEQ ID NO: 38272 - DNA, 332 bp, Gossypium hirsutum
  Clone ID: LIB3165-028-P1-K1-A3
cgtttcttcccaacatgatcattttctatgtagaagaaaactccttcgcaagaattcgaaccttaaaccggcctaagcagctgaatgccctttcatttcagatgatttctcggttactagaactttttcttgcctacgaggaggatcctaatgtcaagctggtaatgctgaagggagaaggaagagcattttgtgctggtggagatgttgtagctgttgtacatgatatttgggcaggcggatggagagcaggtgccaacttttttatgaaggaattctccttaaactatttgatggcgacctatagcaaaccacaagtttcaattcttaat

SEQ ID NO: 38273 - DNA, 393 bp, Gossypium hirsutum
  Clone ID: LIB3165-028-P1-K1-A5
cgtcggcccacgcgtccgatcttatttttgtttttttaagttgggaaaggaaagagaaggaaggcagtgaaggtgagcattggggcactaatgggaaaaacaaagaaagagctgctaagcaaagcgccctggaggggagacgaccatgacaactccaacaaattcgcagacgccaagctcaaggttaccaaccagcctggttccacccccaaaatgcacgtccctcaccgtaagtccgccgcttcccgactcgacgacgacgactcccttgagattgaccctgaactccgttacagctttcagcgcaacttccagtttcttcaacgagtttttagcatagacactgttgtgaagcctcttccacctgcaatggcatacaatgtttcccgcaac

SEQ ID NO: 38274 - DNA, 283 bp, Gossypium hirsutum
  Clone ID: LIB3165-028-P1-K1-A7
cgcgccacgcgtccgcccacgctttctaagaagaaaaacaaaaatggccagtgcaggggcgcttcgacgactctcctcttccattgacaagcctctccgtcctttcttcaatgccccttccctctattacatgtcgtctttgccaaatgaagctgtgtacgagaaggagaaacctggcgtcacttggccaaagcaactgaatgctccacttgaaaccgtcgatcctgaaattgctcacatcatcgaacttgaaaaagcgcgccaatggaagggacttgaactt

SEQ ID NO: 38275 - DNA, 343 bp, Gossypium hirsutum
  Clone ID: LIB3165-028-P1-K1-A8
cggccgcctgcgtctctctcttcatttctctgaacctaaaagtctttagcttttggcttcgagagagaccatgttggtttaccaggatctcatctccggtgacgagcttctttctgactcattcccctacaaggaaatcgagaatgggatgctgtgggaagttgagggaaagtgggttgtgcaaggagctattgatgttgacattggtgccaatccttcagccgaagatgctgatgaggatgaaggtgttgatgaccaatctgtgaaggttgttgacaattgtgacactttcaggctttaagagcaaccccctttcgacaagaagcagtttgtcgtggtcatg

SEQ ID NO: 38276 - DNA, 397 bp, Gossypium hirsutum
  Clone ID: LIB3165-028-P1-K1-B1
agcaaaatcctatgttccgagttggtcttgatgtctttgaggatgaaccttggtgaaacctgggcttgctgagatgaagaatgctgtcatcgtaccacacattgcttctgcttccaagtggactcgtgagggaatggcaacgttagctgctctaaacgtcttgggcaagatcaaaggatatccaatttggggtgattcaaatcgcgtcgaaccattcttgaatgagagtgttccacctcctgctgcatgtccaagcatcgttaatgcgaaagcattaggtttacctgtttcaaagctataagcaccaacggtcggtctgggttgcagtccgagtagtttctcctatgaatgtgaagtttggggttgtactgagtttagtttatgctagactgacaat

SEQ ID NO: 38277 - DNA, 398 bp, Gossypium hirsutum
  Clone ID: LIB3165-028-P1-K1-B10
tctgccattgcagccgttgccatctcatcccctagttcccagaggagtggatcagtagtgaggaggacaaaggcttctttccttacagggaagaaacttcgatcagtcaaaaagtacacaaaaccagcagcagcccgaacagttccggtgtgtgcagtggctgaccccgaccgacctctttggttcccaggcagtactcctcctccatggctcgatggcagcctccctggagacttcggttttgatcctctaggccttggatcagaccctgagaccttgagatggaacgtacaggcagagctcgtccattgcagatgggcaatgttaggagccgctgggattttcatcccagagttcctaaccaaaattggcattttaaacactccatcatggtactc

SEQ ID NO: 38278 - DNA, 393 bp, Gossypium hirsutum
  Clone ID: LIB3165-028-P1-K1-B12
acccacgcgtccgcccacgcgtccggtttttcgtcatcggaatgggacccatcgctgggatttacacgtcgaagattttccctttgaagcttcttgcacaaggaattagtttaggagtggcagtgaatagggtgacgagtgggatcatttcgatgactttcctttcgttataccaagcgattaccatcggcggtgcttttttcttatttgctggcatcgccgccgttggatggttgtttttcaatatatgtttgccagagacacgtgggaaaacattggaggaaactgaacggctttttggcaatttggtaggttggagggaagtggataagaagatgaaggaagataatactaaaggagccactcatggccaataaggtagtgaaggatagt

SEQ ID NO: 38279 - DNA, 346 bp, Gossypium hirsutum
  Clone ID: LIB3165-028-P1-K1-B2
agagagcagagtccagtccaaaagctgtggtgtccgtttcctttaagtctcaaccaaagttgcagaaagccagacgctaaaatactaaaactagctagcccaaaacggtaccctttttttgctccaatctcgtttacccttaaggtgtttatcttggtaattgatattttgctcaaatctttcaacaagtaaagattgcagcttttcaaatcgtgggttttttttttttttgcttgcttaatccatggcttcttccatgctcaatggagcagaaaacttcactctcattaggggggtaaccccaaataggattgattttttagggtcaggttttcatgggaaacac

SEQ ID NO: 38280 - DNA, 399 bp, Gossypium hirsutum
  Clone ID: LIB3165-028-P1-K1-B3
cacgcgtccggaacaatgtctgtctcacttcaagctgcagctaccctgatgcagccaatcaaggttgctgcaccatcaaggaccaatgtgctgctcaggtcctcccagagcgtttctaaggccttcggtttggagcctgttggtgctaggctcacctgctctttgcaaactgacctcaaggacttggctcagacgtgtgttgatgctaccaagctcgctggtttcgctcttgctacatctgctcttgttgtctcgggagcaagcgctgaaggagttccaaagcggctaacctacgatgaaatccaaagcaagacatacatggaagtcaaaggaacaggaactgctaaccagtgcccaaccatcgatggtggtgtcgactcttttgccttcaaagcctgc

SEQ ID NO: 38281 - DNA, 398 bp, Gossypium hirsutum
  Clone ID: LIB3165-028-P1-K1-B4
cgcgtccgatggcatacactactagtccccactactagcaatggcttcctcaatgatctcatcggctaccattgccactgcctctccggcacaggctaacatggtcgctcctttcaccggcctcaagtctgcctctgctttcccagtcaccaggaaggccaacaacgacattacttctctcgcaagcaatggcggcagagtgcaatgcatgcaggtgtggcctcctactggaaagaagaagttcgagactctctcatacctccccgatcttacacccgtgcagttggctaaggaagtggattaccttcttcgctcaaaatgggttccttgcttggaattcgaattagaggagggattcgtgcaccgtaaatactcgagcctacccacgtactacgatg

SEQ ID NO: 38282 - DNA, 386 bp, Gossypium hirsutum
  Clone ID: LIB3165-028-P1-K1-B5
gtccgcccacgcttccgaaggtccccctttaataatcgaccaaaacagaaaacccagaggtaaaaggctccctaaaatgttgagtgaaacattgaagaacaagtaccaattatgtgaagagatcggaagagggcggtttggggttatctctcgagtgttttgcccttcaacccaatcctccttcgcctgtaaatccatcgacaaacgcctcctttccgaccccaccgatcgagaatgtctggagaacgaacccaaaatcatgacccttttgtctcctcactccaacatcgttcaaatctacgacatgtttgaatccgatgatacccttcaactcatcatcgatctctgccagccttttaccctctacgacaagattctggaacccg

SEQ ID NO: 38283 - DNA, 401 bp, Gossypium hirsutum
  unsure (1)..(401): unsure at all n locations; Clone ID: LIB3165-028-P1-K1-B6
acgcgtccgcccacgcgtccgcaaatttctattttttataatacaaaaaatgggctgcacttgttccgaaagcagcgtcgctaccgtggatttctaccgtccgccgccgtcaagctttgcggtattcgacatcaacgccatagatgaaccgtgggttaaggtggaccaaaccccgtcggagaaccaagagaagcccacacatgttcctgctgcgattctcgagaaactcaacgcctttgaaactgctcctcactcatgggatgaagttagcaaagcgcttgaagatcttaaacccaccattaacaacgagaacaagaaaccccaagctccaaattcgcctcaaaaaccaccaaaacaagttactcagctncagcctcgtaagaacttaagttttcatactt

SEQ ID NO: 38284 - DNA, 401 bp, Gossypium hirsutum
  Clone ID: LIB3165-028-P1-K1-B8
tccgtttttttttttttttttttttacataagcatcatagttgatttttcaagatcagctcatccatccccaatactcaaaactctagtgctcaaaaagtagaagagatgtgtgagatgatacatacaaagcacaaaggggttgaaaagataaatgtataactcagttaactgtgacttttccaaccatacctgcaccctggtgaggagaacagtagaaactgtaggttcctttctcagtcaaggtaacagcgtaagtctcgtctttggcattgagtagctcttcttcaggcatggagattttggatacgtcgacgccgcttgggatttcgtcctcatcgaacacaacattgtgtgggaatccggcattgttcttgaacacaatcttcttccctgggctta

SEQ ID NO: 38285 - DNA, 374 bp, Gossypium hirsutum
  Clone ID: LIB3165-028-P1-K1-B9
ccgcaaaatccgtaaatggctaccactgcttctccaatggcgactcagctgaagagcagctttacgtcgtctgttacaagaggactggtagtccccaggggcatttcgggatccccgttcaaagtatcttccggaaagaccaggaccccttgcttcactgtcaaagctgttcaatccgacaagtcaacatttcaagtaatccaacccatcaacggcgaccccttcattggaagcctggagactccaatcacctcaagccccttaattgcatggtacctttccaacctcccagcctataggacggcagtgaacccacttctgaggggaatcgaagtgggtctggctcacggcttcctcctggtgggtccattcgt

SEQ ID NO: 38286 - DNA, 393 bp, Gossypium hirsutum
  Clone ID: LIB3165-028-P1-K1-C1
cacgtgtgcgcacacgcgtctttttttaaaggcgagtggcgcgagcaattggacttcaaggccgacaacaaataatctaagaacctttagggaaatgaatcaaggatgtttaatcttggttgggattttggtgacactgagtttaccatattcacatgcctttgggagaaatgaaaataagatacaaactgctgtttttctatcacctaagttcgtgctcggaccaggatctgtggaaaataggttctattacaacgtcgactttccgaaaggtcatattgcggtgaaaagttttgatgcagaagtaattgacgaggccgggaatcctattccactgcacgagacgtatttgcatcattgggttggtgttagatactatgtacgtaaaggtgt

SEQ ID NO: 38287 - DNA, 400 bp, Gossypium hirsutum
  Clone ID: LIB3165-028-P1-K1-C10
acccacgcgtccggagatagcaattgtcctcaaatatttcatacaaggaattaaattgaattaatggctcaaaccatgttgctcatgtctagccatgcagtgagcttgaagagagatcaccctttactccatttccaagctcaaggactcaagcctaaacctgcctctcatctcttcttcaatccattgtctaatggtgtccatacttcacccaaagctttcaccactttagctgtctttaaatcaaagaccaaagcagctcccaagagggttgagccaaagccaaaggttgaagatgggatctttggcacctctggagggattggttttaccaagcaaaatgagctctttgtgggacgtgttgccatgcttggttttgctgcatcattgctaggcgaag

SEQ ID NO: 38288 - DNA, 402 bp, Gossypium hirsutum
  Clone ID: LIB3165-028-P1-K1-C3
gaaaaaagcagagaatcacaataatggtttcggcagtggcagcaacagcatcatctcagctactggtatcaagttcccgctctttgtcacggctgtcaccatttcagctatgcgtatttgattccaagtccctcgtgtcatgccccagcaatggcaatggcattaacaacagtatcaagagaaggcatgttaggtgcctggctgtggggacagcaccagaggcagaaaccaagaaaagtgggttcgaaatccagacactaacaggttggttgttgaagcaggaacaggcgggtactattgatgctgagctcactattgtcctttccagcatttccatggcctgtaagcaaattgcttctttggttcaaagggctagtatttcaaacttgactggtgttcaag

SEQ ID NO: 38289 - DNA, 389 bp, Gossypium hirsutum
  Clone ID: LIB3165-028-P1-K1-C4
acgcgtccggctagtcgtaaaacagacacgaaagagtcttcaagccgatgccttgatactcaacaccgccgaagagctcgatgggcctatactatctcaaatacgcaccaaatgccctcgtgtctatgccgttggacccttacatgctcaattaaacactagactcaatgcaaaacatggagagtcatatgatcacatctcgaatacactttgggaagtggataaaagctgcatcttttggctcaataagcaaccgaatcgatctgttatctatgtaagttttggtagcattacgagcacgtcaagggagcaacttttagagctttggtatggacttcttaacagtaaaacgaagttcttgcttcttgtaaggccaaattccgtgattg

SEQ ID NO: 38290 - DNA, 384 bp, Gossypium hirsutum
  Clone ID: LIB3165-028-P1-K1-C5
tgaaaaacgcgaagagaaccctgctctgtagggtgttcttgccaggggtaaaagcccaacgtgtgtgatagtggcatgctcggactcaagggtgtgcccctctcatgttctaaacatacaaccaggtgaagctttcgtggtccgcaatgtcgccaatatggtgccaccatatgatcagaataagtactctggaaccggatctgctatcgaatacgcagttttgcatctcaaggtgaaagagatcgtggtcatcggacacagtgcctgcggtggaatcaaggggctgatgtcattcccgtacgacggaaccacttcaactgatttcatagaagattgggttaaaattgggatgcctgcaaggaagaaggttaatgcagaaaatcg

SEQ ID NO: 38291 - DNA, 328 bp, Gossypium hirsutum
  Clone ID: LIB3165-028-P1-K1-C7
gtccgggacccggcagtcgtggcagtcctcgcacccgagacggaggaggacaagactggtgagaccaaagctacttcaaaatccggcagagcaaagaaagccaaagaacccaaaaccaagaaagctgcagctcctaggaaaccacgggctgctcctactcatcctccttacgaagagatgatcaaagatgcgatcgttactttgaaagagaggacaggttcaagtcagtacgccattgctaagttcattgaagagaagcagaagaatcttcctggaaatttcaagaagcttctgcttgtccatttgaagaagcttgtggctgctggga

SEQ ID NO: 38292 - DNA, 396 bp, Gossypium hirsutum
  Clone ID: LIB3165-028-P1-K1-C8
cgtccgactgtgaatgatagctagactctatacggtgacctttggcggtggtcgaagatggtcactggagtcaaagtctggaaagctttatcttcccggcagagaaagcaaagagaattgggaagctcatttggactccatcagcatcggctgcttactcactctaattttgccccaagtctccaaatttgatgtgctgactggttgaatcggctaagccaaccggaagccgagatgtcctcaactctactagaggtgactcgggctgctcacgaagatgtggaacggcttgagcggctcatagtgaaggacttgcaaaatgatccacctaccacgaaagacggattgtatcaaagccaccgcgtccgcaataatatcgacaccatcatcttcacc

SEQ ID NO: 38293 - DNA, 400 bp, Gossypium hirsutum
  Clone ID: LIB3165-028-P1-K1-C9
cgtccgggcggctgccgtctccaccatcgtgtgctgtcaaccgagcaccgttgagtgggaatggatcaggtgccggagcttctgctccaagctcagctttcatggggaacagcttgaagaaagtgagcgctaggttcaacaacaacggcaaggctccagtgggaagtttcatgattgtggctgccaaagaaatcgacgaagacacacagaccgaccaggaccgatggaagggtcttgcttatgatatctccgatgaccaacaagacattaccagagggaaaggtatggtcgactcattgttccaagctcccatgaacgatggtactcactatgctgtcatgagctcctatgagtacattagccaaggccttcgcacatacgacttggacaacaacatgga

SEQ ID NO: 38294 - DNA, 389 bp, Gossypium hirsutum
  Clone ID: LIB3165-028-P1-K1-D10
cccacgcgtccggtagcctctgtgaagaacccaatcaaggaaaaaaacaaaaaagccaactccaaatctgttcagagagagaaaacactagagacaaacaaacaagctcttatcaatgggggaggaagagaagaaacctgcagacgagaagaaaacggaagagcaagtatctgaaaaagatggaaagaaaggagatgaagaggaagtaaagcaggctgagaagccagttgaggaaaagaaagctgaagaatccaaggaagaaacgccgccgcctcctccgcaagagattatcttgaaggtttacatgcattgtgaagggtgtgcacggaaagttcgccggtgcctcaagggctttcaaggggtcgaagatgtaatgactgattacaaga

SEQ ID NO: 38295 - DNA, 380 bp, Gossypium hirsutum
  Clone ID: LIB3165-028-P1-K1-D11
cttttaactccactctcccataactctttatcctctccacaattatcaacgaagcgccatggttgtcctcttcatcaaccccatgtacctctcagaatcacctgttcttcttctgctagcaaacgtgttcccaaatccgaggaatctccctttaaggaactgaggactgtagcttgtggccttcttgctgtatgtaccgttgccactgcctcgcctgtaattgctgccaatcagaggcttcctccgttgtcaacggagccaaaccgatgcgagcgtgcattcgttggtacaccataggtcaggcaaatggtgtgtacgataagccgctcgatctacgcttctgcgattacactaacgagaaatcgaacctgaaggggaaa

SEQ ID NO: 38296 - DNA, 397 bp, Gossypium hirsutum
  Clone ID: LIB3165-028-P1-K1-D12
gacccacgcgtccgcccacgcgtccgcccacgcgtccgttggaaaaaaaaatcccgagcttcaacacggcagtcgctcactgattaatttcaataaaaagaagaaaaagacagttgctcactgatattggtgtagtggcagagcagtgaagagaatcagttgagatatgtctaagcaaggagaagtggtctgcgtaaccggtgccagcggcagcattgggtcttgggttgtcaaactcctccttgctcgcggctacaccgtccacgggaccgtcagaaatctcaaggacgagaaagaaacgaagcatctagaagctctagaaggagcagactcacgtctccgcctcttccagatcgatctcctcgattatgattcactcgccgccgcaatcaatggc

SEQ ID NO: 38297 - DNA, 328 bp, Gossypium hirsutum
  Clone ID: LIB3165-028-P1-K1-D2
cgcccacgcgtccgattttctttttatggttccttccttcgccgtctactgcactggtgacatcgatttcaagtgaatcagaatgggtaaggaaaagagtcacattaacattgtggtcattggccacgtcgattccggaaaatcgaccaccactggccacctgatctacaagcttggtggtattgacaagcgtgtgattgaaaggtttgagaaagaagctgcggagatgaacaagaggtcattcaagtatgcttgggtgcttgacaagctcaaggctgaacgtgagcgtggtatcaccattgatattgccttgtggaaatttgagacg

SEQ ID NO: 38298 - DNA, 343 bp, Gossypium hirsutum
  Clone ID: LIB3165-028-P1-K1-D3
ccgctgggagtgtcagtccaacctattttatgggaaaaagggctcggataacaacccagcaggttccttcgggaagttttaaggtgatggcggccgaaaaagagatagacgaagagacacagaccgaaaaggaccgatggaaagggttggcttacgatatttcggacgaccaacaagacattactcgagggaaagggatggtggattccttgttccaagctcccatgaatgatggaactcactatgctgtcatgagttcctatgaatacatcagccaaggtcttaaaacgtacaatttggacaacaacatggatgggttctacatcgctcctgcattcatgga

SEQ ID NO: 38299 - DNA, 398 bp, Gossypium hirsutum
  Clone ID: LIB3165-028-P1-K1-D6
acgcgtccgctgagataagcaaaattctattcaaagatgttgtgggttgataaatatcgacccaaagccctagctcaagtcgttgttcatgaagacattgcccaaaatctaacaaaactggttacagagcaagattgcccgcatttactcttctatggaccatctgggtctggcaagaaaaccctaatcatggcccttcttagacaaatatttggtcccagtgctgaaaaggtgaaagtggagaataggaattggaaaattgatgctggaagtagaaccattgatcttgagttgaccacattagcaagcacgaaccatgtggagttgagtccaagtgatgtaggcttgcaggacagatatatagttcaagagattattaaagaaatggctaaaaatag

SEQ ID NO: 38300 - DNA, 383 bp, Gossypium hirsutum
  Clone ID: LIB3165-028-P1-K1-E10
cccacgcgtccggtgctccatagttttggaacccaaggacagaagactcttttagcatttcaccgcaaagatggagataacaaatgtgaccgagtatcaagaaattgcaaagcaaaagttgccaaagatggtgtatgactactacgcatctggtgctgaggaccaatggacattgcatgagaatagatttgctttcactaagatactgtttcgtcctcgtattctcatcgatgtaagcaagatagacatgaccacaactgtgttgggtttcaatatatcaatgcctatcatgattgccccaactgcctttcaaaaaatggctcatcctgaaggggagtatgcaacagttagggctgcatctgctgctggaactatcatgacat

SEQ ID NO: 38301 - DNA, 386 bp, Gossypium hirsutum
  Clone ID: LIB3165-028-P1-K1-E11
gtccggcggaatgatataccaaagtcaacattatctacttgattccaaattagatttatgggttcacaaaccggtgagggtagttctagatctggtccaagacgaactgttgtaggggattttttgaaaccattgaattcggaatatggtaaggtagcccctggatggggaacgactcctttgatgggtgtcgcaatggctttatttgcgatattcttatctattattttggagatttataattcttccgttttactggatggaatttcaatgaattagattcacaagaatcacgaagcctcgcgtttcaatacaaaaatggaaacttttagttctcggattttttagccccattctatttcggtagttcgaccgcgaaatttatt

SEQ ID NO: 38302 - DNA, 378 bp, Gossypium hirsutum
  Clone ID: LIB3165-028-P1-K1-E12
cccgattgtttcttccatctttttagggtttaattttattttttgaatcttgaaaataattttgataattttatgaagcttttagacatttcatttcaataaaattatcaaaagattttcaaaaagaagagagacgaaaaagattcataaatatttggatcaaaaaagaagaagttgctttgttttctcgagaaaatggagtcaaattcatggagctttcgattctccaattcttcttcttcttcttcgtcttcgtcaaggcgtcgtcaatcacgatctgatctgtttctaggaggaggatatgaagaaattgacggagatgaggatttcaaggcacagtttttatgtccattttgcgctgaggatttcgacattgtt

SEQ ID NO: 38303 - DNA, 108 bp, Gossypium hirsutum
  Clone ID: LIB3165-028-P1-K1-E3
tccgaactttgaatgcattttgtgccatttagggtttaactgagctttttgttctggctggattttaattttgaaggaaagttgtttaggttatttgtcttcctttcc

SEQ ID NO: 38304 - DNA, 392 bp, Gossypium hirsutum
  Clone ID: LIB3165-028-P1-K1-E4
cacgcgtccgcagcgactaacaaacaatagcgggtcggtaggatctctcagggtttaggtgatggctgcaaagcggatattgaaggagctcaaggatctccagaaagatcctcctacctcttgcagcgctggccctgttgctgaagacatgtttcattggcaagcaactattatgggtcctccagatagcccgtatgccggtggggtgtttctagtcaccattcatttccctccggattatccatttaaaccacccaaggttgcattcaggacaaaggtatttcaccctaatattaacagcaacggtagcatttgccttgatattttaaaggaacagtggagccctgccctcaccatatccaaagtgttgctgtcaatctgctcactcctga

SEQ ID NO: 38305 - DNA, 170 bp, Gossypium hirsutum
  Clone ID: LIB3165-028-P1-K1-E5
tttttcccaaaaaaaccacaaattgttgcccgctgaatcttcggttaaggctgggggatcgacctccactaccttgccgattcaactttaaaaaatcctaaatttgtttgaattttctggcgatactatggatgaatctttcttcgatctaatggaattcttgaagaaac

SEQ ID NO: 38306 - DNA, 393 bp, Gossypium hirsutum
  Clone ID: LIB3165-028-P1-K1-E6
acgcgtccgattcagataacaatttcacagttgttttcttcactctctctctcagccatggctgcaggcatctccaccgtcgccgccgctgccgccgccaaccgagctctgggagtgtcagtcccaacctcagctttcatggggaagaaagtgagctcgagattcaacaacaccaggcaggttccttcgggaagttttaaggtgatggcggccgaaaaagagatagacgaagagacacagaccgaaaaggaccgatggaaagggttggcttacgatatttcggacgaccaacaagacattactcgagggaaagggatggtggattccttgttccaagctcccatgaatgatggaactcactatgctgtcatgagttcctatgaatacatcagc

SEQ ID NO: 38307 - DNA, 400 bp, Gossypium hirsutum
  Clone ID: LIB3165-028-P1-K1-E7
cgcgtccgcccacgcgtccggcaaaagcttattaatgatatgctcgcttctcagccaagcggcggtctctcccgcttattattatagaagctctccttccatttacaaacccaaaccatcgaatcgcttctcttggggttttctggctccaattcccagccctgctatccgagtgttttgttcgaagcccggtgaggtgggaggattaatggcttcttccgttcaaaatcagggttctatttcctacctaacccaacgagaggctgctgaggttgatgaaactctcatgggccctcttggttttagtgttgattcagctcatggaattggctggtttaagcgttgccacatcgattgctgaggattattaacccagtgaggataactgtattcttgcttt

SEQ ID NO: 38308 - DNA, 377 bp, Gossypium hirsutum
  Clone ID: LIB3165-028-P1-K1-E8
acgcgtccggcaatggcatcgatgactggtttatcgtggctcttcacaagctgtgttggaaggtggtctccaactcagcggccaaacccggttgaacgttgctagcaccaacagggtggctgtggctagacctggttttaccgttagagctcaacaggtccctgccgagcctgaaactggacgcagagctgtgctgggtcttgttgctgctggtttggctactggctcctttgttcaagctgtgcttgctgatgcacgaagcatcaaggttggcccgcctccaccaccctccggtggattgcccggaactttgaattccgatgagccaagagaccttgatctggcgtacaaagatcggtttttcctcaaccattgac

SEQ ID NO: 38309 - DNA, 362 bp, Gossypium hirsutum
  Clone ID: LIB3165-028-P1-K1-E9
acgcgtccgctcgtctcattttcctaccacccaaacaacaccattctcgaaaacaacaggggagccacttccagtattttgcttgtaacaaaatttctctaatatcaccaatgcagcacgaaatttgtgtcctcccagctttcttctccactagcattctctcaccttagccctacggtcttaaccttccttttcactccattactcttcaattactgattcaaaagctcactgtttagtcaagaaaacttcaaattagaaacttttgtagggaaattttgagaagataaaaaattttgagccctaaatgtcgggaccgccaagggtaaggtcggcttacactgcaacgtgaatggaagcga

SEQ ID NO: 38310 - DNA, 350 bp, Gossypium hirsutum
  Clone ID: LIB3165-028-P1-K1-F1
cccacccttcgggaaaaattttgtctaaccagatgcggatttcatgaattggggccaacttgacttggaaaataatcgttcggaacctacccaatcaactccttcctccggtgtaaattcggattctgtgttaaacaaatacattgcctctggtctcagccaagacgctgtcatcatcgctgttgcaaattatggagacagtccaaccaaggttcgggaatttgtcaatggttacaacctactgcgagaaatggggttctcagcaaacaacgtcgctgatgctttgctcgtgtatgacaatgatactgacaaagcattggcacatttcctgaacagctcatcacgaggat

SEQ ID NO: 38311 - DNA, 386 bp, Gossypium hirsutum
  Clone ID: LIB3165-028-P1-K1-F10
cacgaaggtagttttcgtaattaatcggagaatttcagtgaatatcgagctccgcagggataaactcatggcaactgcaactatggctaccgcagctggtgcagctgctcttctgtactatacattgaatcgtaaattgcagacagataggtctggtaacgatgacaatgaaaatggaagtgatttgtccaataatccttcttcagggcttgatcgcgtttcgcataggttagttcaagctcctgcaacgtgggtagagacgatttctactttgtctgaaactcttaggtttacatactctgagactctagggaagtggcccattggagatttggcatttgggatcaacttcttattgaagaggcagggacatttacatgttgcga

SEQ ID NO: 38312 - DNA, 385 bp, Gossypium hirsutum
  Clone ID: LIB3165-028-P1-K1-F11
cccacgcgtccgtgcttcttgattatgctttacaaacttatggcatattggtttgtggagctcttggtggttcttttctgcataggtggtgtggagggccttcaaacttgcttggttgctttattgtcaaggtggttcaagcgcattgcagaatcatacgttaaaattcctttgtttggagctgtctcataccttacattggctgtttcccccttctgcattgcgtttgctgttgtttgggctgtttaccgcaatgtttcctttgcttggataggtcaagatatactcggaattgcattgataatcacagttctgcaaattgtccatgttcctaatctcaaggtgggaacagttctactcagttgtgctttcttatatgacatct

SEQ ID NO: 38313 - DNA, 357 bp, Gossypium hirsutum
  Clone ID: LIB3165-028-P1-K1-F12
cccacgcgtccgcccacgcgtccgtataatggttcgctggaccatccatggcattgcacgagtcccatgggaaagtcgtggtcgatttgatggcacttctgaatacaaactcgacaagaagggaaaaatatatgagcaccgagtcgacaacaccgcactgaattcaccccctaagtttcacgttctagctgtggaagatctaatccgatccataggttgcccctcaaccccaaggccaacttacttcgagatttcatcggcttcacctccagaaaaaccatattaaacccaccttaggttcttaataaattttggtaaataatgggtctaatggttggtggggctatatatagcatg

SEQ ID NO: 38314 - DNA, 369 bp, Gossypium hirsutum
  unsure (1)..(369): unsure at all n locations; Clone ID: LIB3165-028-P1-K1-F2
ccgcccacccgtccaaaaatcttccttttttttaatgcatccaatgagacctgagcctgggcttcatgtctttctggtttcatttccaggccaaggccatgtaaaccctcttcttagattcggcaagcgcctcgcttccaagggtttgcttgtcacactatctacacccaaaggcttcggcaaacagatggctaaagccaacaacatcactgacgaccagcttatccctgtgggcgatggctttctccgatttgaatcgttccaggatggttgggacgacgacgacccgagacgcgcacacctngaccaatacatgcaccaactggagctcgcaggcaaaccagcgatttcagcgatgataaagagata

SEQ ID NO: 38315 - DNA, 361 bp, Gossypium hirsutum
  Clone ID: LIB3165-028-P1-K1-F3
gccgacacgatatccctctcggtgaaaaccctaaccaccaaaacgtcatcgtttcactcgtctattaccaccgtccctatcaaaccaaccattatctccgccgtggcgtcattttcgctggcgtcctcctcctcctctccgccaccatactcttcttctacccatccgatccgattctcaaactcgctcgaattcgactcaaccacgtcggagtcatctcgtcgcccaaactcaccatcgacctttcgttttcgttgactatctcggtccgtaacagggatttcttttcattggattatgaaaagcttgtcgtttcggttgggtatagggggaaggagcttggggtggtgaattcggaagg

SEQ ID NO: 38316 - DNA, 156 bp, Gossypium hirsutum
  Clone ID: LIB3165-028-P1-K1-F4
acgcgtccgtgtctgagagatgttgattgttgattgaaagagaggaaagtggagcgagtttgaggaaaaacctgatgttggatagatgatgatttgaaagagggaaatggaatggagattggtagggtagtggttggatggatgggggtggccggt

SEQ ID NO: 38317 - DNA, 386 bp, Gossypium hirsutum
  Clone ID: LIB3165-028-P1-K1-F5
ccgtgggttttacatcaccttttaagcttttcatcaatggcttcccttcaacaggcttaaatcttttttcaacccaagcttctttcatcttctcaacaccccagatcccttccctctctcaacctctctttttcagccactttcccttccctcaaactctccaccactcgccctcttcatggcggtgccaaaatgtcagcctccgccgcttccagctacgccaccgctttagccgatgtagccaagtccaacaacacccttgatgccaccagctccgacgttgaaaaagtcgagacaatcttctccgacccacaagtcctcgaattcttcaccaaccccaccattgatgtcctcaaaaaacgtcaggttttggatgagattgttag

SEQ ID NO: 38318 - DNA, 398 bp, Gossypium hirsutum
  Clone ID: LIB3165-028-P1-K1-F7
cgcgtccgcccacgcgtccggcatcagctctctctcttgctaagcaagattgctctccgatgtctcctttacagcctcccttgtcggtggatgaagctaaggctctaatgaagaaggttgttggatggaggctgttagatgaagaaggtggacttaaactgcagtgttcatggaaattacgagatttcaaatccggagttgaactcatcaatcggatttataaggctacggaagctaccgatcatttcccgagcctccatttggaaggaccgaatcaagtccgagctgaactgtggactgcttcgattggagggttgagcatgaatgatttcattgtagctgccaagatagatgaaataaaaacatcggatcttgcgcctcgtaaacggatttgggca

SEQ ID NO: 38319 - DNA, 401 bp, Gossypium hirsutum
  Clone ID: LIB3165-028-P1-K1-F8
cacgcgtccgctcatctctctcctttgttttcccttttgtctctctctctctttttccaacccgaaccctacctcaccaaccaggattcaacatgaagggaggaaaatccaagtcagatactaagagtgccaagctatccgtgaaatccaaagctggaaagaaatcggggaaggctgccaaggatccaaacaagccaaagaggcctgctagtgccttctttgttttcatggaggagttccgtgagcaatacaagaaggatcaccctaaaaacaaatccgttgcggctgtcggcaaagctggtggagataaatggaagagcttgtctgaagctgaaaaggcaccttatgtagctaaggcagaaaagcggaaggttgagtatgaaaagaacatgaaggcctac

SEQ ID NO: 38320 - DNA, 399 bp, Gossypium hirsutum
  Clone ID: LIB3165-028-P1-K1-F9
acgcgtccggcgtttgaacacttctgtatccattctggtggacgagcagtcatagatgaactgcaaaagaacctgcaactttcagcagagcacgtagaggcatcaaggatgacattgcataggtttggaaacacatcgtcttcatcgctgtggtacgagatgagctacattgaggcaaaggggaggatgaaaaaaggggacagggtttggcaaatagctttcggaagtggattcaagtgtaacagtgcagtatggaagtgcaacagaaccatcaaaacaccaaaagatggaccatgggcggattgcattcataggtacccagttcatatccctgaagttgtcaagctctaggctaaaagcaacaaacaaatatggttgattcatggctttgtcaaactc

SEQ ID NO: 38321 - DNA, 399 bp, Gossypium hirsutum
  Clone ID: LIB3165-028-P1-K1-G1
cgtccgaaggatgaaggttatgacggggcttctgcggacctctggtcgtgtggcgtgatgctctttgtgttgcttgcaggttacttgccttttgatgattccaatattatgaatctctataaaaagatttcagcagctgaattcacttgccccccttggctatcttttagtgcgatgaaattgataactcaaatcttggatccgaacccaattacccgcattaccattcccgaaattttgcaagacgaatggtttaagaaagattacaaacctcccatgtttgaggagaaagacgatacgaacttagatgacgtagaagctgtatttagggattctgaagagcaccatgttacggaaaagcgagaagagcaaccaacgcctatgaatgcattcgagtta

SEQ ID NO: 38322 - DNA, 410 bp, Gossypium hirsutum
  unsure (1)..(410): unsure at all n locations; Clone ID: LIB3165-028-P1-K1-G10
aanntaccccacgccgtccgcttttgtataanctgtagcatatagtactagtaagcagtaatagcaatggcctcgtccatgatctcatcggcaaccattgccaccgtgaactgctcctccccggcacaggccaacatggtggcccccttcaccggcctcaagtctgcctctgctttcccagtcactaggaaggccaacaacgacatcacttctcttgcaagcaatggtgggagagtgcaatgcatgcaggtgtggcctcctcttgggaagaagaagttcgagacactctcatacctccccgatcttacacccgtacagttggctaaggaagtagattaccttcttcgctctaaatggattccttgcttggaattcgaattagaggagggattcgtgcaccgtaagtactc

SEQ ID NO: 38323 - DNA, 389 bp, Gossypium hirsutum
  Clone ID: LIB3165-028-P1-K1-G11
gaaggccaacattgaagagataagattatggtgaaaaactaaacataataaagtgcctcataacattcttcgacttgcttcattgattagcccaaagataaacataaccaaaaagaaaaatggcttctgcttccgctactctcctcaagtcttcacctattatcgacaagtccgagtggattaagggccaaaacctccgccacccttcggtttgttttgtacggtcacaccctacatcggccgcctttaccgtccgtgctagttcatatgccgatgagcttgttaagaccgcgaaaactgttgcatctccaggtcgtggtattttggccatggatgaatcaaatgctacatgtgggaagcggcttgcctcgattggtctcgagaatacc

SEQ ID NO: 38324 - DNA, 409 bp, Gossypium hirsutum
  unsure (1)..(409): unsure at all n locations; Clone ID: LIB3165-028-P1-K1-G12
cgtgaatnatctcgttccccatcttacgttctctnngcttatcgcatcaaatcagccatgtgcgggggagaatatggttaggtgagccaaaggtaagaagactaccaacccttgggncctgctgtancgagacggagagcatgttnttcggtgttgcccacatttttgcatcttttaatgacactttcattcatgtgactgatttgtctggaagagagactatggttcgtattacaggtggtatgaaggtgaaagccgacagggatgaatcttcaccttatgctgctatgcttgcagcacaagatgtttcccagagatgcaaggaacttggaatcacggccctccacatcaaattacgtgccacaggaggtaacaaaaccaagacccctggtccgggtgctcagtcagc

SEQ ID NO: 38325 - DNA, 389 bp, Gossypium hirsutum
  Clone ID: LIB3165-028-P1-K1-G3
caatcctcttatcgtcctacttacaaatggctttaaccttagcttatccaccgtttctcaacgatagaaacgttgaatacatcaaatcttcatgcagcaccacaacatatcccaaattatgttaccggtccctctcagtctatgcgaccagcatcaacaccagccccaaattgttagtccacactgcactcaatgtaactcttagagccagcaaagcgacttcgaggttgatggtaaagatctcgagattccacggtttggaaccaagggtagcagccgccatggctgattgtatcgaggtgatcggggactcggtggatgagctgcaacagtcgttaggggaactcggtcacattagtcgctcgaacatttcactaacgatgagcgat

SEQ ID NO: 38326 - DNA, 400 bp, Gossypium hirsutum
  Clone ID: LIB3165-028-P1-K1-G4
ttcagggctaagaaagagaaaaaaaaaatggctttgcaaaaggcgaaggacatcgtatctaccaatgctgtcgtcgttttcagcaagtcctactgtccgttctgtgtggatgtgaagcaattgcttcaacaacttggagcttctttcaaggccattgagctcgacagagaaagtgatggatctgatattcaagcagctctggctgagtggaccggccagcggactgtgccaaacgttttcattggtgggaaacacattggtggctgtgattctacaatggccttgcacaaggaaggtaagctggttcctctgctaactgaagctggagctattacaaaatcatctgtttagaatagagttaagctgcttgtctcccctaaaattaataaacgaataccaa

SEQ ID NO: 38327 - DNA, 398 bp, Gossypium hirsutum
  Clone ID: LIB3165-028-P1-K1-G5
gcgtccgatcggttatgccgtttatcaaacgtcactaccggacattcaagcttacagatccggcgcccgagcattgccctcccggcgaattcgttagagaaatcccattgtcaactcaatccctgaagatgcccacatagaagcatatcacgatgggccaggatccgtgcttgagattatggttccgaaactacgaatggtgcccgaagaacacgaaatccgggtttgtcttcggcctaaacatgtggggaatgatctcatgttgacatgaattataaaagggtagttgctatggttggtgctgcattgtttttactgacttttgtaccatacaatgtaatctataaaaacaaaaatatgggtcctacattttatgtttttaccatttttgccccact

SEQ ID NO: 38328 - DNA, 439 bp, Gossypium hirsutum
  unsure (1)..(439): unsure at all n locations; Clone ID: LIB3165-028-P1-K1-G6
gttcaactttgaaaacctccaattcactttcttatctcttttctttttcctttcattgtgtttgtggcgttctttttaccaacacncnnaaaagcgattggtnnttcggagaccatannctggatnnaacactgcnnaaaacaaaanngtcttactgtnnatttctttattgggtcacttnntgtttttagaaagggaacaagtatatggcgnnngcaaacggaacccggattgggccaatgnngcaaggaagccgttggcgaagaattgttaccggatgataagcaggngaaaccgggatgtgtcancgatgatagtgcaaaaggcgttaaggctcagactattgatgagcttcactttttgcaaaagaagagatctgcgccaactacgcctctcgaagggaaccagggtgccttcgctagcttgcccgacgacgagc

SEQ ID NO: 38329 - DNA, 398 bp, Gossypium hirsutum
  Clone ID: LIB3165-028-P1-K1-G7
cgcgtccggaggaagtgaaagagtagtttttcttttccagaaactcttcaccatggcgggtgacgtcgataatcgacagttcaggcgccttgaaccggctttgaacggtgtttttgccccgttgaagctcggtccaagtacccaaatccaccgccctgtcaaacatgttttcatcgaccatgaatatgatgactcttccagtgatgatgaaggaaatgagatcaacgggcattacaaagagttgattatcaagtccggtaacgagcttgaaccttccatcttggaccctagagatgaagcaacggccgataactgggtcgagcgtaacgcttccatggttcgtctcaccggcaaacaccctttcaactctgaacctcccttgaaccgccttatgcacc

SEQ ID NO: 38330 - DNA, 389 bp, Gossypium hirsutum
  Clone ID: LIB3165-028-P1-K1-G8
ccacgcgtccgcccacgcgtccgcccacgcgttcgttcaattcatgcaaacccaaacctccaccatgccctccaccttcttgccctaaggacacattgaagctcggtgtctgtgctgacgtgcttggacttgtcaacgtgattgttggaacccctccttccagcaaatgctgtgctttgcttcaaggattggctgatttggaagctgccctttgcctttgcactgccattaaagccaatgtacttggaatcaacctcaacatcccagtttctcttagtctaatccttagtgcatgtcagaaggaggttcctccaggcttcaaatgtgaataaaaaagatatattatcatgttgttggctaaagtttggtctaaagtactttcatttcta

SEQ ID NO: 38331 - DNA, 367 bp, Gossypium hirsutum
  Clone ID: LIB3165-028-P1-K1-H1
tttccaaagcttccaaatggttttaaacaagactcttaggttaagccttcaggggcgtcgatccaagtcttttagctcctccaccttcacctctcctgcttcatcaccttcctctccttgtgaaagacccaaaaggcctcaccaagtggacgagatgaaacaagtgtttcgctatttcgatggcgatgatgatgggaaaatctcggctctcgaacttagggcatgcttcggctccatcggagagtacatgtcacatgaagatgctcaaatggtgatcaacgaactagattccgacggggatagcatgttggactatgaagatttcttggagctaatgaaaatagaaaagcgggatgatgatgatgat

SEQ ID NO: 38332 - DNA, 417 bp, Gossypium hirsutum
  unsure (1)..(417): unsure at all n locations; Clone ID: LIB3165-028-P1-K1-H10
antcacgccacgtctgtccgtcccacgcgtccgcaanccccttctatctcctttttcactaangctctctctccccatgggccgcctccaagagaagacagagaggtctcctcacaaccaccgtaatgggtcgtgtcattcgagctcaacgtaagggtgccggttcggtcttcaaggcccataccaaccaccggaagggtcccgcccgtttccgcagcctcgacttcggtgaacggaacggttacctcaaaggtgtcgtcaccgacgtcattcacgaccctggccgtggcgctccgttagcccgcgtcgttttccgccaccctttccgttacaagaaacagaaggaattgttcgtcgccgccgagggtatgtacaccggacagttcgtgtattgtggtaagaaagctacccttatgg

SEQ ID NO: 38333 - DNA, 394 bp, Gossypium hirsutum
  Clone ID: LIB3165-028-P1-K1-H11
cgcaaatcaaattaaagcaactcatcactgtgaatgaattgtgatggatgcctggtcttcctcctttctctccaccctaacaccttcaacaaaactcctttctcccgttatcaccaccactctcagatcaacttccccatcaccttattatgctcctctcccctacatttcctctgtcagaattgaagagaaacctccaacctccacaaccaccaccaaaacatcacatccaccaccaccccaatctcctaaagcttggcctccaccagcgccatcctatgcttctccatcagttggagccaagaaaagagtagaaccaaggctgtccaccatgatcttcaatacatttgacgatattataaacaacttcatagaccctccactcaggccttct

SEQ ID NO: 38334 - DNA, 392 bp, Gossypium hirsutum
  Clone ID: LIB3165-028-P1-K1-H12
cccacgcgtccgctcttctctcatttctcatcaatattcaagcttctgctttgggctcctttgccgtcaaaaaaaataaacaaaaatgtttggcaaagactttttcaccgaatatggcgaagcaagtcaatatgaaataaaggaagtagtaggcacaggaagttatggtgtggttgcctctgcaattgatactcacactggagagaaggtagctattaagaagatagccaatatctttgagcacacatctgaagccacacgtattcttagagagatcaaacttctacggctgctgcgtcaccctgacatagttcagataaaacacataatgcttcctccatgtcaaagagaattcaaagacatatttgttgtttttgagttgatggaatctg

SEQ ID NO: 38335 - DNA, 390 bp, Gossypium hirsutum
  Clone ID: LIB3165-028-P1-K1-H2
cgcgtccgcccacgcgtccgcccacgcgtccgtccacgcgtccgctaaaaagaagtttttacgtttgtttcaagtttcatttcttcctcgaaagtctctctttttgccctcggattcataagttcccatggcttctgaaactgaagcacctgaaatttcttctttgtttgagaggttgttgaggcacagagacctctatttctttctcccttttatcttgggtgtctctaacaacagtgtttccagagaaaacagtgaaaacccagatcaagaaacctcacaggaaacgacttcccaacgtgaaaggataatccttgtcaacccatttactcaaggtatggtggtggttgaaggagatccgaatttggaggctttgctacgtggttgggc

SEQ ID NO: 38336 - DNA, 388 bp, Gossypium hirsutum
  Clone ID: LIB3165-028-P1-K1-H3
cgcgtccgcccacgcgtccgtttggtcgtctgtagtaagaacgcctaaagattgatgctttgaagcgtgagcttcccctttgcatgcaacttctcactaatgctgtggaggcttcgaggcagcaactacatgcatgccgagcaaatcaaggatcaaggcctgttcttgaagaattcatacccctaaaaaattcaagctcagagaattcagacaaatcgcaaaacatatctgataaagcaaactggatgacgagtgcacagctatggagccaagcgggaaacgaaacgaaaccaccacaatcctcagttgcgtcccctaaagaagctgatattggtttcaatgttagtcccaagttggggttagataccaagcagagaaatggaggagc

SEQ ID NO: 38337 - DNA, 395 bp, Gossypium hirsutum
  Clone ID: LIB3165-028-P1-K1-H4
catctccctattctcaatggcaatggcaatccaagcctccctcttcactccatcaaccgtctgcaccccaaaatccggcgaccgcatcgccgccgtgttacggaaacaaccaccgttcctaaccgtccctagcttcaagtccccaaaaagcatcatcgccccacgcaccatcaaagcccaagcaaccgaagagaaagccgagacaaccgccacaaaggaagcaccagtcggtttcaccccaccagagctggacccaaacaccccatcaccgatcttcggcggcagcaccggcgggcttttacgcaaagcacaattggaagagttttacgtcatcacatgggagtcacccaaggaacaaatcttcgagatgccaacaggtggtgcagccatcatga

SEQ ID NO: 38338 - DNA, 367 bp, Gossypium hirsutum
  Clone ID: LIB3165-028-P1-K1-H7
ccacgcgtccggggatgctaaaaggtttaactttaagcattaaaatccacttcttttaggcgaagtgcagctttgtgtgtgtctatccaacgaaagcaagaagatgggtaaaggagggaaatctcacgaagaaaccaaaagtggagaagatgaaaacatggctgcttggcttgtgggtctcaacaccctcaagattcaaccattcaagctccctccactgggaccccatgatgccagagttaggatgaaggctgttggtatctgtggaagtgatgttcactacctaaagacaatgaggtgtgctgattttggggtgaaagaaccaatggtgattgggcttgagtgtgctggaatcataaaggaggtt

SEQ ID NO: 38339 - DNA, 396 bp, Gossypium hirsutum
  Clone ID: LIB3165-028-P1-K1-H8
ccacgcgtccgggaagagagacggttcaccaactgtacggcacaagagtagccatactggctggggacttcatgtttgctcagtcatcatggtaccttgcaaatcttgaaaaccttgaagtcattaagctcattagccaggttattaaggattttgcaagtggtgagattaagcaggcatcgagtttgtttgactgtgatgtcaaacttgaggactatttgctaaagagttattacaaaacagcttcattgattgcagctagtaccaagggagccgccattttcagtggagctgatcgtagtgtaacagagcaaatgtatgaatatggaaagaatcttggcctatcattccaagttgttgatgacatattggattttacacaatcagcagagcagc

SEQ ID NO: 38340 - DNA, 355 bp, Gossypium hirsutum
  Clone ID: LIB3165-030-P1-K1-A11
attgttctcaaatatctcatacaatgaattaaattgaatcaatggctcaaaccgtgttgctcatgtctagccatgcagtgagcttgaagagagatcaccctttactccatttccaagctcaagggctcaagcctaaacctgtctctcatctcttcttcaatccattgtctaacggtgtccatacttcatccaaagctttcaccactttagctatctttaaatcaaagaccaaagcagctcccaagagggttgagccaaagtcaaagccaaaggttgaagatgggatctttggcacctctggagggattggttttaccaagcaaaatgagctctttgtgggacgtgttgccatgct

SEQ ID NO: 38341 - DNA, 358 bp, Gossypium hirsutum
  Clone ID: LIB3165-030-P1-K1-A12
ggacgttaaggttgcattggccgtttatattgttgctcttgcaggtctaaaggggactattacaggtgaaactcttagcgaccctgaccatcctattgtacttgaacgaatggacttccccgatcccgtgattaaggttgctattgaacctaagactaaagctgatgtcgataaaatggctaatggtttgatcaagcttgctcaagaagacccttctttccacttctcacgggatgaagagatcaaccagaccgtaattgaaggaatgggagaattacatctcgagattatcgttgatcgtttgaagagagagttcaaggtcgaagccaatgtcggtgcaccacatgttaattaccgg

SEQ ID NO: 38342 - DNA, 242 bp, Gossypium hirsutum
  unsure (1)..(242): unsure at all n locations; Clone ID: LIB3165-030-P1-K1-A3
gttatctttaatttccctttatccttcatttatctccctagaacaatccattggggcaggttctgactttggcctctctccacctnacctctctaaatctctgcctcatcaccgatcatgcctattttaatctccctactcatgtctttagccatgactgaccattcacgttctacttatcgcttacgtcaagatgggttagggcgatcacactcttcaaaagaccctagattatgctttcg

SEQ ID NO: 38343 - DNA, 148 bp, Gossypium hirsutum
  Clone ID: LIB3165-030-P1-K1-A4
gccacacttcatgtcactaaaactttctttaaagaccacagaaccacaccaaagacgaggctctaaagagtacactgacccaacaccccctccaaaaatccaggcaccagccacaaccaaacctacattaacacacaaaatgattgcc

SEQ ID NO: 38344 - DNA, 343 bp, Gossypium hirsutum
  Clone ID: LIB3165-030-P1-K1-A8
cccacgcgtccggcttgacattgatgtcctggttcatggagagcctgagagaaatgatatggttgagtactttggtgagcaattatctggttttgctttcactgttaacggatgggttcaatcttatgggtctcgctgcgtcctccccaccacaaccattggatccttccctcaaactttggagctcaggagagttcgtcgtgaatacaaggctaacaagatctcagaggatgattacgttaaagccattaaagaggaaattaagaaagttattgctgagcttaaggctgctggtgccttatgggttcagtttgatgaaccgacccttgtcttggatctcgac

SEQ ID NO: 38345 - DNA, 308 bp, Gossypium hirsutum
  Clone ID: LIB3165-030-P1-K1-A9
tggagaaagaaccacttccatagatacctaatggagatgaaaaggctacggatgtgtaagaaaatcaagacgagagttgctctggggtttttacccttctccacgaagcaaattgctcctctgcttcttccatgaataagaattttataccagcgtcagcagcactcaaaagctcttgcacatttagggagtttgtaccttctccaaacgagaaaattcatgataatggtacaagttcggcctcaaacctggagtattcttgcacttcatatgattaaccagctcaagtccagaaaaaagatgatttg

SEQ ID NO: 38346 - DNA, 111 bp, Gossypium hirsutum
  Clone ID: LIB3165-030-P1-K1-B12
cccactcgtgctttccgaattatatccaatcgtcttagatatatcaccgggatgtggggcttatactgtgtgtagcaaaacttgcctcaacaaatagggccaccaaataaa

SEQ ID NO: 38347 - DNA, 295 bp, Gossypium hirsutum
  Clone ID: LIB3165-030-P1-K1-B4
tacaaatgaaactctcacccaccctgaccattctattgtacttgaaccaatacacttccccgatcccataataaaagttattattgaacctaatactaaaacttatgtctataaaatagctaattttttgatcaaacttgctcaataagacccttctttccacttctcactgtatgaatagatcaaccataccgtaatttaattaattgtacaattacatttcgagattatctttcatcgtttcaagagagagttcaaggtcgaagccaatgtcggtgcaccacaagttaattac

SEQ ID NO: 38348 - DNA, 358 bp, Gossypium hirsutum
  Clone ID: LIB3165-030-P1-K1-C1
aaaaaatgatgcttggagaaactcatcgttcaaatccaaccgtccacgtaccaccttggcctgatcttgacgatgatcagacggatgtagtttactctcctatccattacaatgcaaccgacaacaacttgagcagtaacggcaacccgttttacctccatgaagcgttatcagctttacaacgttatttgccatcgaacggcccggatgttgagttggattccgagtttccgggtttggatagtccggattcaccggtcgatgcttattcctgtgaccatttcaggatgtacgagttcaaaatccggaggtgtgctcgtgggcggtctcatgactggaccgagtgtccgtacgccca

SEQ ID NO: 38349 - DNA, 356 bp, Gossypium hirsutum
  unsure (1)..(356): unsure at all n locations; Clone ID: LIB3165-030-P1-K1-C11
cccacacgtccggcctttgctttattcaaggggcttatgtctttcccatgagggggaaacaactcaactgatttcatanacgattgggttaagattggaatccctgctaaggccaaggtgctagctgaacatggtggtgagcctttgggagtccaatgtacacactgcgagaaggaagcagtgaatgtatcccttggaaacctgctgagttatccatttgtgagagatggattggtgaagaaaaccctgggaatcaagggcggttactatgacttcgttaaaggaagtttcgagctatggagtcttcagttccaactttcaagctctctctctgtaaaagatgtggccaccatact

SEQ ID NO: 38350 - DNA, 358 bp, Gossypium hirsutum
  Clone ID: LIB3165-030-P1-K1-C5
cggaccgggcgggccgacgcgtccggccggccacccgttcaacaaatgtttactctatcgagacagtgtctaccccaggagagtgcgtttaggtaacgggtttccaacaaacggctccaaaaattcagactgccgagacaacctccctggagaaggcaagcgctgacactgccgatgatgtcaaatccaacatccatgacaagtgtggtatctcgactgaccaagaaggcgtgtaggaagtgactaacaaccggagggttgccgaacactgaatgactacaacatccagaatgagtataccctgcacctaggacgtgggctaaagggaggcatgcagatcttagcaacaacgctgact

SEQ ID NO: 38351 - DNA, 274 bp, Gossypium hirsutum
  unsure (1)..(274): unsure at all n locations; Clone ID: LIB3165-030-P1-K1-D1
gttttctttactttttttttatcctattttatnccgactagaactctccatcgtgtgttgtgctgtctttggtttctcttcacttatcctctctaaatctctgcatcatcatcgatcatgtctcttttaatctccctactcatgttcttagccatgactggccattcaagtgctacttattgcttatgtacagatgggctaggggatcaagctcttcaaatgaccctggattatacttgtggagctggagcttatagttctgcatttctaccaa

SEQ ID NO: 38352 - DNA, 356 bp, Gossypium hirsutum
  Clone ID: LIB3165-030-P1-K1-D10
cccacgcatccgtccacgctttcgtcctctcgttctcccacacgtccgggcgtggttgctcatcattctcgggtaagacactcaagatctaccattacacccctcaaatccagcgaactggccgcgtttccatgatgaaaaccaccaagcctctttgttgttgtagcccatggcacggtcctaaccgcgttctgtacttgcaaccactttgcggtgagccaccatcttacttgaccggtgagttacctggtgactatagttagcacactgcttgactctgagctggtcccaagacctttgctaggaaccgtgagctctaaatcatgcactgcatatgggccatgttgggagctttt

SEQ ID NO: 38353 - DNA, 343 bp, Gossypium hirsutum
  Clone ID: LIB3165-030-P1-K1-D11
cccactcgtccgcccacacttacttttacgtctctctgttttactccacaaccgctgtgactaccattatggcttcagctactgtttctgtagccaaacccaaccttcagattcaggcaaaaggaaagggtgttggttttgcagatttctcatgcctacacaactcctctactagccttacctttgccaggaaaacctctgatgacttccattcactcgttgcttttcagacatctgctctatgaagcaataatggcgggtacaggaaatggatggcagaggcaaagctaaaggtggctataaatgggttttgtaggattggcaggaactttcttaagatgct

SEQ ID NO: 38354 - DNA, 364 bp, Gossypium hirsutum
  Clone ID: LIB3165-030-P1-K1-D4
cccactcgtccgctatcactaccattattgcttcggctactgtttctgtagccggacccaaccttcagattcaggcaaaaggaaagggtgttggttttgcagatttctcaggcctacacaactcctctactagccttccctttgccaggaaaacctctgatgacttccattcactcgttgcttttcagacatctgctctaggaagcaataatggcgggtacaggaaagggatggcagaggcaaagctaaaggtggctataaatgggtttggtaggattggcaggaatttcttaagatgctggcatggccgtaaggactccccacttgatgtcattgccatcaatgacactggtggtgttaagca

SEQ ID NO: 38355 - DNA, 273 bp, Gossypium hirsutum
  Clone ID: LIB3165-030-P1-K1-D5
cacaatcgtgttgttcgaattaaatttaatcgtcttctatatataaacggaaagtggtgcagatactgtgtctagcaaaacttgcctcaataattagttccatcaaaaaaataaatgttaaaaaacctgcggattcagacaaatacttattatgatgaactgatatgtgtgggcaggaattaattactttgttcaacaaaataactagttgttgttgctactgctgctgcattataaggtattaatagaggtactgtgagtcctttttctctc

SEQ ID NO: 38356 - DNA, 323 bp, Gossypium hirsutum
  Clone ID: LIB3165-030-P1-K1-D6
cccactcatccgcaaaaccaatctctattttttcttgactgtataaaccccaagaagattgggttatgtaggtaacttccaacacaacactcttataatacatattacctagcttgtttccatagagaaaccacccaaaaaaggaactcttttttgaagaacgacagccctgaccgtgtgatatcttcttccgcacacccaagtttgacatcaattcactcgaaccgtatgattcatgtacactgtgggacaaacacatctagttcctctaaatagctcctacgagcgaagttgaaaccgggtgctattcactttttaagcaa

SEQ ID NO: 38357 - DNA, 346 bp, Gossypium hirsutum
  Clone ID: LIB3165-030-P1-K1-D7
ctctactatctttccttcttatagatactctctactacccagtataaaccgggagtcgtcatcctgaggtgaaatgggcacaaagaaccgataaggttttcattacggtgctattacctgattcaaagaatgcaaaagttaaccttgagccggaaggagtatttaatttctctgctactgctggaactgacaataacacatatgagttgaagttggatctttttgataaggtcaatgtggaggaaagcaaaattaatgtcggagttaggagcatattctgcatcttggagaaggctgaaaaagtgtggtggaaaaaattattgcgcggggatggcaaagcccccca

SEQ ID NO: 38358 - DNA, 339 bp, Gossypium hirsutum
  Clone ID: LIB3165-030-P1-K1-D8
ctctactaagtaatcttttttatatattctacactaaacacattaaacggggggtttttattcttaggtgtaatagcaacaaaaaacccatacaattttgattccatttctattacctgatctaaataatgcaaaagttaaccttgaaccgtaactaccatacaaattctttcctactgatggaacttacaataacacatatcattccaagtttgatcttttagattacatcaatgacaaccaaaacataaaaaattactctattaggaacatattctagatcgagaacaaggatgtaccagtgttgtcgaaaaaatttcttaccatttatatcaattc

SEQ ID NO: 38359 - DNA, 163 bp, Gossypium hirsutum
  unsure (1)..(163): unsure at all n locations; Clone ID: LIB3165-030-P1-K1-D9
aaacgattagaatggaaaactcatttttggtgatgacacaaatactgcgggtgagaagaacaggaaagaggcgattattgtcctgncngaggcagggagtgtcaacggagagtctgccaaaggacttggcggcggcgatccatgctgggaggatccccgggtc

SEQ ID NO: 38360 - DNA, 228 bp, Gossypium hirsutum
  Clone ID: LIB3165-030-P1-K1-E1
cttttgtataactgtagcatatagttcttgtaagcagtaatagcaatggcctgctcgatgatctcatcggcaaccattgccaccgtgaactgctcctccccggcacaggccaacatggtggcccccttcaccggcctcaagtctgcctctgctttcccagtcactaggaaggccaacaacgacatcacttctcttgcaagcaagggtgggagagtgcaatgcatgcag

SEQ ID NO: 38361 - DNA, 215 bp, Gossypium hirsutum
  Clone ID: LIB3165-030-P1-K1-E10
gctatccatctctgcctcttttttttctctaattatagaggaaatccacgcgaggcgaagttgttcaaatcgcgggtgaaagtcaaccgaaactaaaatggcgcccacattcagcggcgatgaaactgctccgctctttggctgccttgcagccgatgctgctctcgttatctcctgtatgggagcggcgtacggtacggccaaaagcggggtct

SEQ ID NO: 38362 - DNA, 356 bp, Gossypium hirsutum
  Clone ID: LIB3165-030-P1-K1-E12
cccacgcgtccgcccacgcgtccgttcgttgagcggttgtcgttcgcttaaagggatcactcgtgaccacatcgtgacagaatgggacagtcctcatcctcgtccggccccgagactgtagagtcctatatattatgggcgtgcaactttagcctagcaaatcgcaagatgaacttagttggagctcaagagatatatatagcatttgcattgcatttatggcataaaattactgtcttttttttttctttgggaacaagtttctgtttcattgagttaaaaggttatgtaatgataatgttggctaccgttgccttttctgtatattcttttcttaaaaacaaatgggtaatatg

SEQ ID NO: 38363 - DNA, 187 bp, Gossypium hirsutum
  unsure (1)..(187): unsure at all n locations; Clone ID: LIB3165-030-P1-K1-E3
atactatataactcaaacataaattttctttctgcaaaacaaacaaacnactggacgttatcttatcaacatggatcgccaccataaaccattcctactcgtcacatgccttcatctaacaaccacttaccaccctcaaatctgactatcaacaacaattcactaataaacccaacaacaaacatca

SEQ ID NO: 38364 - DNA, 262 bp, Gossypium hirsutum
  Clone ID: LIB3165-030-P1-K1-E4
gaaaaacttacatgttcactctcattttaaacccaaatatgtgttccttatgcgtcactgatcccatgaaaattggtcctctcatagagtcatatatatctgcaagagagtgacatcatttatatcctgaactagttcatatcatcatttgttcgaatggacttagctcaatcctgatatagaatactgggtgtctaacgtatgccagccccatcagaaggactgctgtgtgttcgtcttgctcatcacagacttcatccat

SEQ ID NO: 38365 - DNA, 247 bp, Gossypium hirsutum
  unsure (1)..(247): unsure at all n locations; Clone ID: LIB3165-030-P1-K1-E5
gaaaggaacggccggggcgacgccacgcgtccacgctttccatcaaataacacacttttgtttctaactaaagacgncattataggacggcgaaaagaaaagacatggctgctaaaactgctgcagactaagatccttctaccaagcccacctttgtacctggtagaacctttctcgtctttcgtgaccggagcagctctaagaatgtccccgtttacatcagcgatctttacagtccagagcagag

SEQ ID NO: 38366 - DNA, 366 bp, Gossypium hirsutum
  Clone ID: LIB3165-030-P1-K1-E6
gtaagatatgtcccacccttgctgtttatttcattcaaaaagagtctaccctccacctggtgcttcgtctcaagggtggcatgcaaatatttgtcaaaactcttactggcaagacaatcacccttgaagtggaaagctccgacacaattgataatgtcaaggccaagatccaagacaaagaaggtatccctcctgaccaacagaggcttatctttgctggaaaacaattggaggatggccgcacccttgctgactacaacatccagaaagagtctaccctccaccttgtccttcgtcttaggggtggcatgcagatctttgtaaaaacgctcactggaaaaaccatcactttagaggtggagagtt

SEQ ID NO: 38367 - DNA, 356 bp, Gossypium hirsutum
  Clone ID: LIB3165-030-P1-K1-E7
gatagccaacaagttcacagtgagtctaaccaattgggaccgcggctcagagtcaagatgacgggaaagactacactgaaccaccaccggctccatttttcgagcctggcgagttaacctcatggtctttttatagggctgggattgccgagtttgtggcgactttccttttcttgtatatcactattttgactgttatgggagttgttaaggaaaaaactaagtgcccaactgttgggattcaaggaattgcttgggcttttggtggtatgatctttgctcttgtttactgcactgctggcatttcaggtggccatatcaacccggcagtgacttttggactgttcttggcgagg

SEQ ID NO: 38368 - DNA, 357 bp, Gossypium hirsutum
  Clone ID: LIB3165-030-P1-K1-E8
ccgggatccattgttcataggtactttgagttggagaagtcgcctgtattcagctggttgcttaatttcggagggtttaaggaacggttgcttgctgatgatttgtttttgactaaggttggcatcgagtgcggcgttgggattttcaccaagagcgcagcagagttggaaaagcgcagagaaaagttcaggaaagaactggattttgtttttgctgatgtggtgatggcactagttgcagatttcatgctagtgtggcttccggctccaacggtttcgctccgaccacctatagcactcagtgccggacctatttctaagttcttttacaactgtcccgacaatgctttccaggtg

SEQ ID NO: 38369 - DNA, 359 bp, Gossypium hirsutum
  Clone ID: LIB3165-030-P1-K1-E9
cccacgcgtccgatcctcaactgttttttgtgattaaaaaaaacgaccaagagggtggcaaaacaagatggcttccctgcatgaaccatggctagtggagaacgggttgaagggatctagcaaggagattcgccatggcaggactgcacacaacatgtcgtcttcgtcattgcggaaaaaatcggacctgacgctagtttccaaggttcggtatgcaatgcttaggcagttcctcgccaatcttcaagaggtcatattagggaccaagctctccgttctcttccctgctattccattggccattgttgctgagtgttatggatttggaagaccctgggtgtttgcattaagtttacttg

SEQ ID NO: 38370 - DNA, 361 bp, Gossypium hirsutum
  Clone ID: LIB3165-030-P1-K1-F1
acaccacccaaaacagaaagaaatttattctcggagaaactcatcgttttaatgcagcagtccacgttccaccttggcccagctttgatgatgatcaaattgctgaggttcactctcctctcaactacaatgcaccctgcaaccacttcaacaacaacagtaacccgttttacttgcaggaagcgttaggaatgctacgacgttacttgccatcaaacgaactggatatcgagtcagactctgagctttcgttccacccggattctccggttgatgcttgctcttgtgatcatttccggatgtttgagttcaaagtacggagatgtggacgtggccgtgcgcatgactggactgactgtcc

SEQ ID NO: 38371 - DNA, 329 bp, Gossypium hirsutum
  Clone ID: LIB3165-030-P1-K1-F11
cccacgcgtccgctcactagttgtttgatatgcgctgacgcaaccaacgaaggtgagctgcaacatctatgaccaatgtgccactcatgtcctgacagagcgtgtgtaaagccttccgtttgtatccacgccaaggctaggtttacccggtctatgcaaactgaccacaatgactggggtctagagtgggtggatgctaccaagctcgctaagataactcttgctacataagatgatcgtagctagaacagaagcgctggaggagcatcaaagcggataaccgacgcgttaatccaaagcatgacatacctggcagtgaaaggaacagg

SEQ ID NO: 38372 - DNA, 363 bp, Gossypium hirsutum
  Clone ID: LIB3165-030-P1-K1-F12
caacagcctaagctacatgcattatgtaaatccaagggagttcatttaactgggtactcaccgctgggctctccaggcacaggtttcgtgaagaaagaagttttaaagaatccagttgtgaatatggtagcagagaaattgggcaagtcccctgctcaagttgcccttcgttgggggctgcaaaagggtcatagtgttttgcctaagagtacaaatgaagtgaggatcaaacaaaactttgatgttttcgattggtccatacccgaagacttgttggctaagtttgctgaaatagagcaggagaggctgatcaaaggctccgttttcgtacacgaaacattgggtgcatatagaagcattgac

SEQ ID NO: 38373 - DNA, 347 bp, Gossypium hirsutum
  Clone ID: LIB3165-030-P1-K1-F8
cccacacatactatccacattttctgttagagacaaaaaaaaactaccgaggaggttttttaacaaaatggctttcctacacaaaccatggctagctgagaacctatttaagacatctatcaagcttattcgccatgtcatgactttcacacaacatgccgtcatagctattttcaaaaaaatataaccttacgcaacgaaccaatgttcggtatgcattgcttaggcaattcactatccaacaaataacagttccataataatttaccaaccctcttctttttctttcgggcgagtgtaatctccattttcccttattattatttatttgttttcaactttttttt

SEQ ID NO: 38374 - DNA, 352 bp, Gossypium hirsutum
  Clone ID: LIB3165-030-P1-K1-F9
ctcaaattcacattacaattttactgttgttgacttcactcactctctgagccggggctgtagccatctgcaccgcctccaccactgccgcctccaaccgagctctgggagtgacactcccaacctcagcttccatggcgaagaaacgcagctcgagattcaacaacaccaggcatgttccttcgggaagtttcaaggtgatggcgtccgaaaaagatatagacgaagagacacagaccgaaaaggaccgatggaaagggtggccttactatatttcggtcgaccaacaagacattactcgagggaaagggatggtggattccttgttccaagctcccatgaatgatttaac

SEQ ID NO: 38375 - DNA, 362 bp, Gossypium hirsutum
  Clone ID: LIB3165-030-P1-K1-G1
aattaataaaatcttgatatagtttctcttcttttgcttctcttatactgagtgccaagcaaaacccctttttgtttttcgtctgattcagctaaggtcttctttgggtagtttgagatttgagttattcatcatactatggcttctcaaccttctaagggatcagttcatgatttcactgttaaggatgcaagagggaatgatgttgatttaagtatttacaagggcaaggttttgttgattgtcaatgttgcatcacaatgtggcttgaccaattccaactacactgagctgagtaaattgtatgagcaatataaagatcaaggttttgagattcttgcattcccatgtaaccagtttgg

SEQ ID NO: 38376 - DNA, 204 bp, Gossypium hirsutum
  Clone ID: LIB3165-030-P1-K1-G10
cataaacattaattccaaatttattttactaaaccgaacaaaatcaaatagaaagagttcttgtaatgagtgcactaaaccacccaaaattccatatttcgagcctgacaagttaactttacactctatttataacgatcagacacctatttttatgaccacataccttcacattgaatatcaataacttgactgaacaaaact

SEQ ID NO: 38377 - DNA, 319 bp, Gossypium hirsutum
  Clone ID: LIB3165-030-P1-K1-G11
cccactcgtccgttcacacttaattttattcagcggatatcaatcacctgaagagattactcatactcacatcagcacaccatgcaacagtcctcatcctcatccaacccatatactgtaaaaacctatatattatagacgtacacctataatctagcacatctatagatgaacttatttgtatctcatgagatatatatagcactagcattgcattcatggcatataagaactagctgttttaatccattgacaacaagtttccttttctattgatataaaacgtgatacgacgatacatgttatatactccaagctt

SEQ ID NO: 38378 - DNA, 331 bp, Gossypium hirsutum
  Clone ID: LIB3165-030-P1-K1-G2
tccacacatacgttatttatagctttatttatgaacaaagtggagatcttatgggacggaatttgaggatgcaaattcacttaaaacacaaaaggaaaacatcattcaattaatacacaaaggggggattcactttgatagggcccaatatagatttttttgtatcattacaggataatatttcatttggtacgctataaagttatgatcatcgaaatatggacatacacggggccctatacttaaatatttgttagtcaaattatgcctttacaaatttttatcgaccaggagcagtttcttttgataatcgattagatgatcaatgttt

SEQ ID NO: 38379 - DNA, 369 bp, Gossypium hirsutum
  unsure (1)..(369): unsure at all n locations; Clone ID: LIB3165-030-P1-K1-G6
aagggcccgcccacgcgtccgcccacgcgtccggacatggctgcttttttagctgcagnctcttttccttctacgaaggccacctctctccctgctagaacctctattgtctctcctgataggatcaccttcaagaaggtgcctgtttactacagagatgtttgcagtggggggagagtggtttctgtcagggcccaggttacaactgaagctcctgccaaagttgtaaaggaatccaagaaaaatgatgaaggtgttgtggttaacaagttcaggcctatcaacccttacattggtagatgccttctaaacactaagatcactggcgatgatgctcctggagagacttggcacatggtcttcaacacc

SEQ ID NO: 38380 - DNA, 358 bp, Gossypium hirsutum
  Clone ID: LIB3165-030-P1-K1-G8
ctcaaattcagataacaatttcactgttgttttcttcactctctctctcagccggggctgcagccatctccaccgtcgccgccgctgccgccgccaaccgagctctgggagtgtcagtcccaacctcagctttcatggggaagaaagtgagctcgagattcaacaacaccaggcaggttccttcgggaagttttaaggtgatggcggccgaaaaagagatagacgaagagacacagaccgaaaaggaccgatggaaagggttggcttacgatatttcggacgaccaacaagacattactcgagggaaagggatggtggattccttgttccaagctcccatgaatgatggaactcacta

SEQ ID NO: 38381 - DNA, 361 bp, Gossypium hirsutum
  Clone ID: LIB3165-030-P1-K1-G9
tttcagttttaatccaaaattcattttcctcaatcctgaaaatgccactctcagagcccagttccatctcaagccctttccttctcaaaatctcttgtttccccaattccccttttcctttacactaaactttcaaccctctccctccacaactcagccccaccacccaacaccataatccgcatggggggtggccccagaacttacccaggtggagtctcgaaatggcaatggaaacgcatgcaagccaagaaagccaagcagctactcaaaactcgacttgcccgtgaacgtcacatctatgaaatgcgcaaaagggccgagctcaaagccgccgtatctgaacttgaacgcccttggg

SEQ ID NO: 38382 - DNA, 363 bp, Gossypium hirsutum
  Clone ID: LIB3165-030-P1-K1-H1
cccacgcgtccgtttttttttttttttgtcaagaacaaagtggagattttatagcagaaaaatagaggatgcaaatccacttaaaacacaaaaggaaaacaacattcaattaagacacaaaggggggatttcctttgtttgtgcccaatatagatttttttcttcccttagagcttaatttcccatttagaaagctcctctcttgatagcatcgtcattagcatttccaagggcagcttcactcaaatatttgtcagccaattgaaccctcttcacattctcttgctcagcaacaagcatgtatccatattccaacagcttctcaatggtcatcttcggttgctcgaaagatggtggcccttc

SEQ ID NO: 38383 - DNA, 362 bp, Gossypium hirsutum
  Clone ID: LIB3165-030-P1-K1-H10
ctacgatcataatggtgtcgttttttgtttctgcaaatgcaaagggttttgcggaattctcaggtctgcgcaactcagctagccttacctttgccaggaaaacctcggatgactttcaatcagtcattgctttccagacatctgctttgggaatcaataatggtggataccggaaaggcgtagtagaggcaaagctaaaggtcgctattaatgggtttggtaggattggcaggaacttcttaagatgctggcatggccgtaaggactccccacttgatgtcattgcaatcaatgacactggtggtgttaagcaggcttctcaccttctcaagtatgactctacccttgggatatttgaagcc

SEQ ID NO: 38384 - DNA, 85 bp, Gossypium hirsutum
  Clone ID: LIB3165-030-P1-K1-H11
gctaatcataaattcaacctttaatgttctcagcctaacaaacgcacagagggggacttttactacttcactccctgacccactc

SEQ ID NO: 38385 - DNA, 343 bp, Gossypium hirsutum
  Clone ID: LIB3165-030-P1-K1-H12
gctcatcacaataatcacctttaatgttttatgaatatgatgcatagagagggggaggtttactacttcgcttcgaggtacgatcctgttcgccacgctgagaagcaccctattcctagcaccgcttacagtggcaaacgagtgatgtgcgttatcagtaaggagaacaactttaagcagcctgaggaacgataccggtccttttcagctgacaggcaagaacggtttattaatccctggattgatgcattgtctgatccaagggacacacaactgatccgcagcatatggatctcatacttggctcaggctgacaaatcttcgcgtcaaaagattgcttctc

SEQ ID NO: 38386 - DNA, 359 bp, Gossypium hirsutum
  Clone ID: LIB3165-030-P1-K1-H2
caaagaaaggccttaccacaagctttttttagacaaaggcggctgccactgcgagctgggatttgcctaagctttctacgttaacttactccttgaaatcttccatacccatttacaaatccaggctttccttcttcacaacccctcaaaagcccaccccttaccgctccttggacgtttcctgctctctttctcatgcaagctgtaaccccagatccgtcgacacatacggtaccccaaaaaatgctacttcccatgatttcatttccaggtatgctgatgatgagccccggcaaggcgctgatattctggtggaagccctggatcgtgaaggggtcaaggatgtgtttgcctaccca

SEQ ID NO: 38387 - DNA, 267 bp, Gossypium hirsutum
  Clone ID: LIB3165-030-P1-K1-H3
catagacaggccttaccacaagctttttatatacaagggcaggcgccactgcgagactggggttttgcccagcgtttttccttaacttacacctttaaaacttccatacccatatacaaaaaggggctttttttcttcacaaacccgtaaaaagccacccctgacccctccatggacaattcctgctctttttttcaagcgggctgttagcccagatcctccgccacatccggggcccccaaaaatggtccttcccaagatttcatt

SEQ ID NO: 38388 - DNA, 379 bp, Gossypium hirsutum
  Clone ID: LIB3165-031-P1-K1-A1
cccacgcgtccgccggtaacgagcttgaaccttccatcttggaccctagagatgaagcaacggccgataactgggtcgagcgtaacgcttccatggttcgtctcaccggcaaacaccctttcaactctgaacctcccttgaaccgcctcatgcaccatggtttcatcactcctgttcctcttcactacgttcgtaaccatggtcaagtccctaaagcttcttgggatgactggaccgttgaagtcgccggtttagttaaaagaccggtgaagttaaccatggatcaactgtttaacgagttccaaagccgtgagttcccggttaccctggtttgtgctgggaatcgacgtaaagaacaaaacatgatcaaacaaaccat

SEQ ID NO: 38389 - DNA, 382 bp, Gossypium hirsutum
  Clone ID: LIB3165-031-P1-K1-A10
caacgacattacttctctcgcaagcaatggcggcagagtgcaatgcatgcaggtgtggcctcctactggaaagaagaagttcgagactctctcatacctccccgatcttacacccgtgcagttggctaaggaagtggattaccttcttcgctcaaaatgggttccttgcttggaattcgaattagaggagggattcgtgcaccgtaaatactcgagcctacccacgtactacgatggacgctactggaccatgtggaagctgcctatgttcgggtgcaccgactcggctcaggtattgaaggagcttgaggaatgcaagaaggaataccccaatgcattcattagaatcattggcttcgacaacgtgcgtcaagtgcagtgc

SEQ ID NO: 38390 - DNA, 400 bp, Gossypium hirsutum
  Clone ID: LIB3165-031-P1-K1-A11
ctttaatcatcttattttggtataccctcttcttttttttttttttctcagttcctcttcttgcaaagatggcagcatcgtcagcatgcttgctaggaaacggtctgtctactcacagaactaaatcgaagttgagtaaagacttttatgggaggaatattgtatttacccccgccatttcatcgttgggtcggaaatcgaatgccgtacttgtaaaggcatctttaaaacttaaacaacatgaaggaagaaggggattcttgaagtcattactcggaactgctggaattggagttccggctttactaggaaatggtaaagcgtatgctgatgaacaaggggtttcttcctcgagaatgtcgtattctaggtttttggagtatttggacaaggacagggt

SEQ ID NO: 38391 - DNA, 364 bp, Gossypium hirsutum
  Clone ID: LIB3165-031-P1-K1-A12
cctgaagtaaaccctattggtgcacgagctgtgaggctttaccttcgtgaagttggtgatttgcagtcaaaggcaagacggattagttatgagaagaagaagcgtaagcgaccaccaactcaacagatcccgactctaccaatgccgccgccaccaccaccaggtgcaagtttaactataaaaagaagcgtaagcgaccaccagcttaacagatcccgactctaccattgccgccaccaccaccaccaggtgcaagttaaactatatatatgcatcaccaaaacaaaacaaaacaaaaccccatatgcaagctagcatttcactctatttaatactacatatatgggataattttctgtacttt

SEQ ID NO: 38392 - DNA, 360 bp, Gossypium hirsutum
  unsure (1)..(360): unsure at all n locations; Clone ID: LIB3165-031-P1-K1-A2
nncaaaaagatnccccnccccgactttcttgttttcaacagcacaattttaaacccaaaaagataaaaaaatggcagcaagtgtagcaacaatggcgatgctcaatgcaaaatgcctaagcatcagctcaactaagatgagcagcccaacaaagccaaccccaaagcccttctcccttctctccatgcagaacctccccaaaggcctcaccatctcaaaaccagccaacaactcaaacctaccttttttactcgctggcagcgccattgctggagctatcttctcaaccttaaggtcatgtgaccccgccttagctgcacaacagattgctgaaatagctgaaggagacaaccgtgggct

SEQ ID NO: 38393 - DNA, 61 bp, Gossypium hirsutum
  unsure (1)..(61): unsure at all n locations; Clone ID: LIB3165-031-P1-K1-A3
gtaccggaaccggaagggtccggcgccagcgcgtaccgttacaacctcanngcgtctccac

SEQ ID NO: 38394 - DNA, 329 bp, Gossypium hirsutum
  Clone ID: LIB3165-031-P1-K1-A4
catttatactataattacagtctggactctcgacacacacaaaggagaagctccataggttctctgcaattaattcatggaggtcgtcaaggaatctgaaccaaacactaccaccatgagaaaagctctgctagtaataaactgcatcatcctttctataggtaactgtgcaggtccacttatgatgcgcctttacttcatccatggtgggaaacgagtctggttctcgagctggctcgagacgggtggttggcccatcatccttttcccaatcgcttgtgctcacttttaccgttccaggacccaacccagttcagaaaacaagcttt

SEQ ID NO: 38395 - DNA, 377 bp, Gossypium hirsutum
  Clone ID: LIB3165-031-P1-K1-A5
cggacgcgtgggttgggttgcaatggcacaagcaatggcatcgatgactggtttacgtggctcttcacaagctgcgttggaaggtagtctccaactcagcggccaaactcggttgaacgttgctagcaccaacaggttggctgtggctagacccggttttaccgttagagctcaacaggtccctgccgagcctgaaactggacgcagagctgtgctgggtcttgttgctgctggtttggctactggctcctttgttcaagctgtgcttgctgatgcacgaagcatcaaggttggcccgccttcaccgccctccggtggattgcccggaactttgaattccgatgagccaagagaccttgatctgccgtacaaagatc

SEQ ID NO: 38396 - DNA, 384 bp, Gossypium hirsutum
  Clone ID: LIB3165-031-P1-K1-A6
cccacgcgtccggaaaaagcaaaaccatggcctctgcttctctcctcaagacttcaccagttttagacaagtctgagtgggttaagggtcacacccttcgccaaccttccacttctgtggtgaggtgccaccctgttgcaccctccggactaactgtgcgtgcaagctcatatgccgatgagcttgtcaagactgctaaagctattgcttctcctggccgtggaattttggccatggatgagtccaacgctacctgtgggaaacgtttggcctcaatcgggctagaaaacacggaggctaaccgccaagcctacaggacgttgcttgtttcagctcctggccttggtcagtacatctcaggtgccatcctctttgaggaaaccc

SEQ ID NO: 38397 - DNA, 204 bp, Gossypium hirsutum
  unsure (1)..(204): unsure at all n locations; Clone ID: LIB3165-031-P1-K1-A8
actttaattttttantnatttttnttttaaaannaaaantataaatgggaaaatgttaattattatatttattttaaaaacaattattaatattaattttaaaatatttattnataattttaattaaaattatattattattattaattaattattaatttaaattttttttttttatttataatataataataatttttatta

SEQ ID NO: 38398 - DNA, 374 bp, Gossypium hirsutum
  Clone ID: LIB3165-031-P1-K1-A9
cccacgcgtccgcccacgcgtccgtcacaaccactatcactaccattatggcttcggctactgtttctgtagccaaacccaaccttcagattcaggcaaaaggaaagggtgttggttttgcagatttctcaggcctacacaactcctctactagccttccctttgccaggaaaacctctgatgacttccattcactcgttgcttttcagacatctgctctaggaagcaataatggcgggtacaggaaagggatggcagaggcaaagctaaaggtggctataaatgggtttggtaggattgtcaggaacttcttaaggtgctggcatggccgtaaagactccccacttgatgtcattgccatcaatgacactggt

SEQ ID NO: 38399 - DNA, 302 bp, Gossypium hirsutum
  Clone ID: LIB3165-031-P1-K1-B11
cccacgcgtccggaaaaatgaaagccacacttcccacaccccatctccgggcttgcccttctccaaccccactttctttcaaactctccttcgcattccctgaaaccagaaggaaatcactaagcatcagctctactccgaagggaacaccatctccttctttggcttacgtgccactgagggtgagtgccagttctcaagccgctgctgcacctactgtcaatttgacggcaattcccaccgaaatgaaggcttgggtgtacggggaatatggaggtgttgatgtgttgaagttggattat

SEQ ID NO: 38400 - DNA, 374 bp, Gossypium hirsutum
  Clone ID: LIB3165-031-P1-K1-B12
cttgaactctcatggcttcaagtgctgcaacccttccatctaaaatgaaagcatggacttaccctgagtacggaaaatcatctgatgttctgaaactacaatccgatgttgttgttccccaacccagggatgatcaagttcttctccaagtcgtagctgctgggattaaccccattgatttcaaaagaatgcttggaatgttcaaaaacattgattcccctttacccatcattccagggtatgatgtagcaggcgtggtggtgaaagtggggagccaagttaagaaattcaaggaaggggatcaggtgtatggagatataaatgaaaaggccgtggatcacccaacacaatttggcactatagctgaattcact

SEQ ID NO: 38401 - DNA, 387 bp, Gossypium hirsutum
  unsure (1)..(387): unsure at all n locations; Clone ID: LIB3165-031-P1-K1-B2
nnccgcttctcttcaactnaatgggtaactcaaactatgtactctcagttttaggcttcttcgtattcgttttcgtttacgcaaaancttcgaaccagcttctggtcttacctcaatggctctccctcagctaataccttctcactcttcttcttcactcactcaccagccttccataaaccctaacgcagccaatccataccccatgttgaagtcctttttgaagccatcttctctctctcaatctcgcaggtttcacaggctcagctctcttcgagcttcggcctcttccttccccgatcatcaccaaacagatccttctaaaccagacgacgtcgtagagctccctatattccctctgcccttggttctcttccccggcgctat

SEQ ID NO: 38402 - DNA, 383 bp, Gossypium hirsutum
  Clone ID: LIB3165-031-P1-K1-B3
cgaaaacccattttcctcccatggccgccaccaacacattgatgagctgtggcgtcgcggccgctttcccttcagtgctttcctcttcaaagtccaagttctccaccgctacgccgttgcctagctttggcgccaatgttggtcaccgtgttagcatgtcggctgactggatgcctggtcagcctaggcctccttatcttgatggttcagcacctggtgactttggatttgatccacttagacttggtgaggtgccggagaaccttgagagatacaaggaatctgagttgattcactgcagatgggctatgcttgctgttcctggtatattggtgccagaggcattggggtatggaaactgggtaaaggcacaagaatgggca

SEQ ID NO: 38403 - DNA, 385 bp, Gossypium hirsutum
  unsure (1)..(385): unsure at all n locations; Clone ID: LIB3165-031-P1-K1-B4
cccacgcgtncgnccacgcgtncgatcactcccaatactttcataacatttcacgaacttcactctccagtctccaatggcggctgccgtctccaccatcggtgctgtcaaccgagcaccgttgagtttgaatggatcaggtgccggagcttctgctccaagctcagctttcatggggaacagcttgaagaaagtgagcgctaggttcaacaacaacggcaaggctccagtgggaagtttcatgattgtggctgccaaagaaatcgacgaagacacacagaccgaccaggaccgatggaagggtcttgcttatgatatctccgatgaccaacaagacattaccagagggaaaggtatggtcgactcattgttccaagctcccatg

SEQ ID NO: 38404 - DNA, 388 bp, Gossypium hirsutum
  Clone ID: LIB3165-031-P1-K1-B6
cccacgcgtccgaaagaaacgggattatgagagattatcacgattgagagaggaggaaaggaaccatttggagaatagaaagaagaaatttttctcagaaatagttaatgcattccgcgacttccaattgcagattcaagctactctaaagcgtcgaaaacaaaggaatgatggtgtccaggcatggcatggaaggcaaaggcaacgtgctacaagagcagagaaattgaggttccaggccctgaaagctgatgatcaagaagcatatatgagattagtaaaggagagcaagaatgaacgattaactatgcttctgtcggaaacaaataagctccttgttaatttaagagctgctgttcagcggcagaaagatgctaaacattcagat

SEQ ID NO: 38405 - DNA, 312 bp, Gossypium hirsutum
  Clone ID: LIB3165-031-P1-K1-B7
cggacgcgtgggaaaaaaatatatttaaaaaaaaaaaaaaaaaaaaaaaggaaagggtaaatttataaaaaaaaaaataaaaataatataaatatttaataattgggcgtcccttttattggatctcatctttctttccttttctttcgattttctttctttttttttcttgtcccttatttcaattctctggccgttgttttccaccttcttgtcttggataacccttgttttccccaatttattttcctttgcagtcattccccttttgtcgtcttgctttattatgagtttggccctttctgttcttct

SEQ ID NO: 38406 - DNA, 378 bp, Gossypium hirsutum
  Clone ID: LIB3165-031-P1-K1-B8
cccacgcgtccgcccacgcgtccgtttgaattgaaaccctcaaaattccactaaaaaatggcctccacagcttccctctccaccgccgtagccaccacctctttcctccgcggccatccggcgccgaaaaccctaaactcccttcctttcaaccaatctcttttcgggctaaaaccccaacgaaatggccgtctcaccatggcagcatacaaggtgacactgttaacacccgaaggaccccaagaattcgtgtgccccgacgacgtatacatcgttgaccaagctgaggaagaaggcattgatcttccgttctcgtgtagggctgggtcttgttcttcgtgtgccggagtgattaagcaaggctccgtcgatcaatcc

SEQ ID NO: 38407 - DNA, 380 bp, Gossypium hirsutum
  Clone ID: LIB3165-031-P1-K1-B9
gcagcaaccaatagactgctgctgacaagatttcctgatccacaacatcttctgatttccattataaccccttcctctcctccaaaccaaaatagactacaataaccatcggcaaacaaaccaagtcaacctaaagccttaggcaccatggcaacctctgctatccaacaatctgctttcgttggccagaccgctttgaagcagtccaatgagctcttacgcaaagtcggagctttcgatggtggtcgtgttaccatgcgcagaactgtgaaaagtgcccctaccagcatctggtacggccctgaccgcccaaagtacttgggtccattctcagaccaaatcccatcatacctgacaggtgaattccctggtgactatgg

SEQ ID NO: 38408 - DNA, 381 bp, Gossypium hirsutum
  Clone ID: LIB3165-031-P1-K1-C1
ttttaaagacacaaaatcccagatgggtttcggttgcaaaacactgttgtgtttgtttttcacagttgtggttgtgttattgcaagaagcaagtgcaaggcagcagcaatattattacaatgtgagtgggttaagaaaccgaaagcaagtgagtggatgtaatttgtttcaaggccaatgggtgtttgatccttcttatccttactatgattcctcgggatgtcccttcatagatgctgaatttgattgccttaaatatggcagaccagacaaacagtaccttaagtactcttggaaacctgacggctgtaacttgccaagatttgatggggcgagttttctggcaaaatggaggggaaagaaaataatgtttgtaggtga

SEQ ID NO: 38409 - DNA, 375 bp, Gossypium hirsutum
  Clone ID: LIB3165-031-P1-K1-C10
ccgctgttccggctcctgcatgaaaaccgtaaaaggacttatttcacctttgctgttcacttcgtacccatgattattccggagaagaaccgtatagaaatctgcaaatactttttccaagagggagtttgccatgcaaagaaagattacaatcttgcaaaacacccggagatcggtttgccgaatttgcaggtgattaagctgatgcaaagcttcaagtccaaggaatatgtccgcgagacatttgcttggatgcactattactggtaccttactaatgatgggattgagtttctaagaacttacctcaatcttccatcagaaattgtgcctgctactttgaagaaatcaacaaaaccccctggtaggctaggc

SEQ ID NO: 38410 - DNA, 382 bp, Gossypium hirsutum
  Clone ID: LIB3165-031-P1-K1-C11
ggaaatattattgtgaatgatcgtctttaagaccagtagttcccccttcagatcctaacccaccagacctgctgctgatttgaagtttctactatcaaacgctgcatcgaaatggatcgttattctcggacattcacggaagatatgaaggctatcttctgcccaggagcagcaacggggacatctgtcgtttgaaatgacttctctgtacctgagattagcaagattaggaataaaatcccaggaaattcgccaaatagtgattacgatttttgaaggtagctggaggctccataatttcctgtaaaattctttagtttcggtctataataaataattagtaggatccagaatagcatattgtaactgcgtattgaatact

SEQ ID NO: 38411 - DNA, 379 bp, Gossypium hirsutum
  Clone ID: LIB3165-031-P1-K1-C12
agagtttctctcatcatcctctcaaaaccgaaactcgggaatttcaactcatctgccactttgactagcggttcacttcactgagtcaactaaaagttatggcgttacctactcatcagttacagagattccttgcaatcgagttcaatttcatctccaatcccaaaatcgcttacaggaaccaactaaccgcaacaacggcagtaagatctagtccaagaagcccctgccgttgctccgcgattgcaataaacgctccttcttcgctaacggatgtttccgggatccgttgggggtcgacgagtgtgcagggcaggcgcgaagagatggaggatgatttagttatacgatcggacggtcttgatggattctcgttcgc

SEQ ID NO: 38412 - DNA, 383 bp, Gossypium hirsutum
  Clone ID: LIB3165-031-P1-K1-C2
atacactactagtacccactactagcaatggcttcctcaatgatctcatcggctaccagtgccactgcctctccggcacaggctaacatggtcacccctttcaccggcctcaagtctgcctctgctttcccagtcaccaggaaggccaacaacgacattacttctctcgcaagcaatggcggcagagtgcaatgcatgcaggtgtggcctcctactggaaagaagaagttcgagactctctcatacctccccgatcttacacccgtgcagttggctaaggaagtagattaccttcttcgctcaaaatgggttccttgcttggagttcgaattggaggagggattcgtgcaccgtaagtactcgagcttacccacgtactacga

SEQ ID NO: 38413 - DNA, 380 bp, Gossypium hirsutum
  Clone ID: LIB3165-031-P1-K1-C3
gcacaacccgccttaagaagaatagggaagacggtggtgatgatgatgatgatgatgaggattaaagcaaaagatcaacagggatggtccccttgagcttcttttgttttgttacagagttcattgcaataatatactaatggtgtgtggaatttaatgtttagattgtgacggtaacatgtactacaattatggaaaagttggtacctataattatgcatattatgtattatgtatgtatgcatgaatgggatgctgtgaccctggtttttattttgtctagcagcacccccccccccctcttagcgaacctcttgaatttgcagttgaataaactgttattttgcttttaaaaaaaaaaaaaaaaaaaaaagggcggc

SEQ ID NO: 38414 - DNA, 384 bp, Gossypium hirsutum
  Clone ID: LIB3165-031-P1-K1-C4
atttttattccaccgaatcgaacatggccatatgagttgataccatcactatgtatagaaagatatcgtgtgtgaacctataggtcaatctatttatctgtatatatagatagatgaaatgcataatctagcatgcctatttgtgaacgtgaaataaaaaaatcaccctcgaccccatgtccgaataaaagcggttggttaaagggttggaaataagtcatatagaatcaatcgattcatggtaaaatccctctaccttgcattttattaattttttttggtcaatatcatagagggatcaaatggtatagttcttttgttggtagcttggaggattagaaacatgactattgctttccaattggctgtttttgcattaattgc

SEQ ID NO: 38415 - DNA, 211 bp, Gossypium hirsutum
  Clone ID: LIB3165-031-P1-K1-C5
cgctccctggtaggcacatttaccaaacataaaaatggcagcagtgacacatggcatctatgaatgctacatagctactaatggcgcacaagcaaccaagctttcttttcagcaactccaaggctacattaaaccgcacctaacctacctttactcgtggcggcattgtgggtttttaactagtatgtgaccgctagtgacacaatgtgaa

SEQ ID NO: 38416 - DNA, 388 bp, Gossypium hirsutum
  Clone ID: LIB3165-031-P1-K1-C6
cccacgcgtccgatttttcgtccttttcaaccatggtggattctcaagaatacagtctgtctcttccttatctggtgcataaccatcctctttctccgagccatccttagcaactcacgagggaaaaaaccccatcttccacccaccccacgtgcccttccagttattggacacatgcacctccttggccccatacctcaccaagctcttaacaaactttcagaccgctttggacctttggtctacttctacatcggatcaaagccttgtctgcttgtgtcttcccaagaaaccgctaaagaagtatttaaaaaccatgaaactactttcttaaaccgcccaaaaatggccaatcttgattaccttacatatggtactgctgatatgg

SEQ ID NO: 38417 - DNA, 375 bp, Gossypium hirsutum
  Clone ID: LIB3165-031-P1-K1-C7
ctttattcctaactctctctaccacctaaacctcattctattctttttttcgtgttaatggatgagttaaacagcaagaagcgggctagggacgactccaacgagtcgggcctggactcgcccgacgtgaagagactcagagatgatttatttcttgatgattcagattccttgcctcttaatcaagaccttgcatccgtaatgaagagttttgaagaggaaatagcagctgtcccatctacttcaacgggatctatgccagttgtggatctcacttctgattctagtgactcgcaacctgatcttggttacctttttgaggcttccgatgatgaacttggtctccctccccctacggcttccacaactgatact

SEQ ID NO: 38418 - DNA, 379 bp, Gossypium hirsutum
  Clone ID: LIB3165-031-P1-K1-C8
gaaatgaaaaaaaagggaatatagatggaaaaaggggggagaggttggacttagggtaaaaaaaaatcgatatgctaaaataaaatatgaaatgaaattgaaacaaggctaatgagatagaaataaggaatcataaatagagttcgggttcgaattccatagataatatggatggtgttgcctataatgatggacaaatgaaagactctcccaaaatttttatttatccacttcctattttgaaaataggttggttgaacttaaaaattccttcattgaataaggaaacaatccaattgcatgcacttgaattggatgggaccaacgaaatcgagcgctaacccccatttcttattgaattaaccgatcaaccttctgt

SEQ ID NO: 38419 - DNA, 206 bp, Gossypium hirsutum
  Clone ID: LIB3165-031-P1-K1-C9
gttgtacctggcatattaatagagcagaatagcaatggcctcgcatgctatggaccatgcaccggaccgtctccgcacaggccaacggggccctaccggcctaaatctgcttgtttcagcaccaggaaggccaacacctacttttgagcaacgggagaggcaagcatgcaggggcgcttggaagaagaagtcggactttatcctgc

SEQ ID NO: 38420 - DNA, 382 bp, Gossypium hirsutum
  Clone ID: LIB3165-031-P1-K1-D10
cccacgcgtccgtaaatacccaagtatctataaatttaaatatataaattaatgagcaccaatctatggctcaactagggtcgtctctgtcagcagaaaccgagacactgagcaatgtcctaagcctggtggaggccttcagagcatttgattcagacaacgatggcgcaatcaatgctgcagagctagggggaatcctgagttcgctggggtacaacgctagcgagcaagacgtgagggccatgatgcgagaaggggacaccaacaaggacggattgctgagcatggaagagttcctagagatgaacaccaaggacatggagcttggggagcttgccaatttcctcaggaccgctttccaagcttttgaagtcgaagggga

SEQ ID NO: 38421 - DNA, 398 bp, Gossypium hirsutum
  Clone ID: LIB3165-031-P1-K1-D11
caaaaaccccctcaattcccccacctcattgtaggcaaaatggcctctgtttgtgcttcttctgccattgcagccgttgccatctcatcccccagttcccagaggagtggatcagtagtgaggacaacaaaggcttctttccttacagggaagaaacttcgatcagtcaaaaagtacacaaaaccagcagcagcccgaacagttccggtgtgtgcagtggctgaccccgaccgacctctttggttcccaggcagtactcctcctccatggctcgatggcagcctccctggagacttcggttttgatcctctaggccttggatcagaccctgagaccttgagatggaacgtacaggcagagctcgtccattgcagatgggcaatgttaggagccgctgg

SEQ ID NO: 38422 - DNA, 381 bp, Gossypium hirsutum
  Clone ID: LIB3165-031-P1-K1-D12
cccacgcgtccgcccacgcgtccgcccacgcgtccgacggctttggtctccggggtctgcctcacttccaactccacctctccttctaactcactccggcaacccacattgcggcggccgtctatcgtcgccaacctcaactcttccacttctcctcctactctcattcgaaatcaacccgttttcgcagcacctactcctttgctcactccttccaattggaaagaaaacatgggagaccagtcatacgaggaagccattgaagctctcaagaaactgctcaatgagaaaggagaattgaagagtgcagcgacggcaaaggtagagcaagtgacagctgagttgaagactgctgcttcttccgatgagtctgttgaccgc

SEQ ID NO: 38423 - DNA, 380 bp, Gossypium hirsutum
  Clone ID: LIB3165-031-P1-K1-D2
gaggaactggggattttcttttagctcgaggaagtggcgattttcagtagaaaaaagcttgaggagttgaaatctgatgtgggcgactttaagatcccgatatctgcatctatctgcaactacgttgccttcctcctctctcacaaatggctcgtggaagctggggttttcaggtttaaatcagacgttctcttcatccactgtggagagaataagcaatgagttgctgagcctgcaagaggtggagaaggttctaagcgacgtgagagcagacgacgtggcggtggttccggttggtaaccaatgcgattgggcagatttcatggtgattgccaccggtaggtccccgtggcacgtcaagaacatcgcccaagccctaa

SEQ ID NO: 38424 - DNA, 379 bp, Gossypium hirsutum
  Clone ID: LIB3165-031-P1-K1-D3
ctactctgctctgctctcttctacttattcaatctaaaacctctgtcatctggccgggtctctgttttactccacaaccactatcactaccattatggcttcggctactgtttctgtagccaaacccaaccttcagattcaggcaaaaggaaagggtgttggttttgcagatttctcaggcctacacaactcctctactagccttccctttgccaggaaaacctctgatgacttccattcactcgttgcttttcagacatctgctctaggaagcaataatggcgggtacaggaaagggatggcagaggcaaagctaaaggtggctataaatgggtttggtaggattggcaggaatttcttaagatgctggcatggccgt

SEQ ID NO: 38425 - DNA, 384 bp, Gossypium hirsutum
  Clone ID: LIB3165-031-P1-K1-D4
cccacgcgtccgaaaatcagttgcttaacaatggcctctacaaccatggctctttcttgcccatcattcgccggtaaggcagtgaagttctccccttccacccctgaaatccggggaactggccgtgtttccatgaggaaaaccaccaagcctgttccttctggtagcccatggtacggtcctgaccgagttttgtacttgggtccactttccggtgagccaccatcttacttgaccggtgagttccctggtgactatggttgggacactgctggactctcagctgatcccgagacctttgctaggaaccgtgagctcgaagtcattcactgcagatgggccatgttgggagctcttgggtgtgttttccctgagcctgtggct

SEQ ID NO: 38426 - DNA, 384 bp, Gossypium hirsutum
  Clone ID: LIB3165-031-P1-K1-D5
atttccataactggttaaattcctttaatgcactgggctccatagtcttggaacccagggacagaagactcttttagcatttcaccgcaaagatggagataacaaatgtgagcgagtatcaagaaattgcgaagcaaaagttgccaaagatggtgtatgactactacgcatctggtgctgaggaccaatggacattgcatgagaatagatttgctttcaccaagatactgtttcgtcctcgtattctcattgatgtaaacaagatagacatgaccacaactgtgttgggtttcaagatatcaatgcctatcatgattgccccaactgccatgcaaaaaatggctcatcctgaaggggagtatgcaacagctagggctgcatctg

SEQ ID NO: 38427 - DNA, 384 bp, Gossypium hirsutum
  Clone ID: LIB3165-031-P1-K1-D6
gaacgccacactcatgaacatcgctgataaccccaccaacgttcagctccccggtatggacaacaaggaagagaaccctcgtgttccgatcatcgtcaccggtaacgatttctcgacgctgtacgcgcctctcatccgtgacggtcgtatggagaagttttactgggcacccaccagggaagataggatcggtgtttgcacaggtattttcaggaccgacaatgttcccgttgatgaccttgttaagcttgttgacaccttcccgggccaatccattgactttttcggtgctctgagggccagagtttacgatgacgaagtgaggaaatggatcggagaggtcggagtcaatggtgtcgggaaaaagctcgtgaactcgaggga

SEQ ID NO: 38428 - DNA, 376 bp, Gossypium hirsutum
  Clone ID: LIB3165-031-P1-K1-D7
cccacgcgtccggttagctatagcatacactactagtacccactactagcaatggcttcctcaatgatctcatcggctaccattgccactgcctctccggcacaggctaacatggtcgctcctttcaccggcctcaagtctgcctctgctttcccagtcatcaggaaggccaacaacgacattacttctctcgcaagcaatggcggcagagtgcaatgcatgcaggtgtggcctcctactggaaagaagaagttcgagactctctcatacctccccgatcttacacccgtgcagttggctaaggaagtagattaccttcttcgctcaaaatgggttccttgcttggaattcgaattagaggagggattcgtgcacc

SEQ ID NO: 38429 - DNA, 382 bp, Gossypium hirsutum
  Clone ID: LIB3165-031-P1-K1-D8
caaaagttaaaaaaccttctgttttgttagcgtagcaaatagcaatacaaccatggctttggctcccaccacttatccctcctatctctgctctaacacttgctcacccttacacagagccactcaacctctcctttcttcaaccaggcatgtaggagttagatttaacagcaagtgttcagcgtctttctgcagtggcaaggagcagctaaagccatggattttggtagcgaaagcatcggaaggtgagtcccaaaccacagagcaggaagagcagcagtacgaggagtatgaggtagagattgagcagccttatgggctcaaattcagaaaaggcagagatggtgggacttacattgatgctattcagcctggtggagct

SEQ ID NO: 38430 - DNA, 385 bp, Gossypium hirsutum
  unsure (1)..(385): unsure at all n locations; Clone ID: LIB3165-031-P1-K1-E1
cccacgcgttcgcccacgcgtncgtccacgcgtncgaaatcagttgcttcacaatggccgctacaaccatggctctttcttccccatcattcgccggtaaggcagtgaagttctccccttccacccctgaaatccggggaactggccgtgtttccatgaggaaaaccaccaagcctgttccttctggtagcccatggtacggtcctgaccgagttttgtacttgggtccactttccggtgagccaccatcttacttgaccggtgagttccctggtgactatggttgggacactgctggactctcagctgatcccgagacctttgctaggaaccgtgagctcgaagtcattcactgcagatgggccatgttgggagctcttgggtg

SEQ ID NO: 38431 - DNA, 380 bp, Gossypium hirsutum
  Clone ID: LIB3165-031-P1-K1-E10
agcagccaacatggcctcattagcagcctccaccgctgccgcctcccttggcgtctctgaaatgctcggtaaccctctgaatttcagtggtggagctaggtcatcggctccaacaccatccaactcatccattttcaagaccgttgctcttttctccaagaagaaggccgctcctccaaagcccaaggctgctgctgtcgccccggccgatgaagagctggctaagtggtacggtccggacagaaggattttcttgcctgaaggtctgttagacagatcggagatcccagagtacttgaacggagaagttcccggagactatggatacgatccgtttggtctgagcaagaagccagaagactttgcaaaatatcaagcat

SEQ ID NO: 38432 - DNA, 377 bp, Gossypium hirsutum
  Clone ID: LIB3165-031-P1-K1-E11
aaattcttgaagccatcagttgctggtttccttttacagaaggaactagactaccttgttggtgctgtttcaagccccaaaaggccttttgctgccattgtgggtggctcaaaggtctcttccaagattggagtcattgaatcactccttgagaaatgtgacattctccttcttggtggtggtatgattttcacattttacaaggcacaaggcctatcagtcggttcatccctggtagaggaggataagcttgaacttgcaacatcacttcttgtaaaggccaaggcaaaaggagtgtctcttttgttacccactgatgtggttatcgctgacaagtttgcccctgacgcaaacagcaagattgtgccggcatctgc

SEQ ID NO: 38433 - DNA, 378 bp, Gossypium hirsutum
  Clone ID: LIB3165-031-P1-K1-E12
ctcaaattcagataacaatttcacagttgttttcttcactctctctctcagccatggctgcagccatctgcaccgtcgccgccgctgccgccgccaaccgagctctgggagtgtcagtcccaacctcagctttcatggggaagaaagtgagctcgagattcaacaacaccaggcaggttccttcgggaagttttaaggtgatggcggccgaaaaagagatagacgaagagacacagaccgaaaaggaccgatggaaagggttggcttacgatatttcggacgaccaacaagacattactcgagggaaagggatggtggattccttgttccaagctcccatgaatgatggaactcactatgctgtcatgagttcctatg

SEQ ID NO: 38434 - DNA, 383 bp, Gossypium hirsutum
  Clone ID: LIB3165-031-P1-K1-E2
cccacgcgtccgagagtagagcatatgcatagagcagcactgaccaacaaatgcttatgcttttaaatactccatacgctctctccctttctcgctcattagcctcttcctctttcccttctcctcccacgcgccgccttctttccatttcttccacttttgcccttcctccccctcgattcccccattcctccctcgtttcctcgagggtatccccgtcttttcgcacccaagcttcagccgccaccgcgaccatgggtgacgctcccgacgttggtatggacgctgtccaaagacgcctcatgtttgaggatgaatgtattttagtggacgagagtgataatgttgttggccatgaatcgaagtacaactgtcatttgtgg

SEQ ID NO: 38435 - DNA, 384 bp, Gossypium hirsutum
  Clone ID: LIB3165-031-P1-K1-E3
tttatctccttcaattgtttgtttttgggttagaaagctctgtttttttattaccctgttcatcaaaaagcttcaatctttcaaccatgttgcttaaagcttcccctgctttttctttgttgaagaatccccaagttgaaactcgggttcctctgttttcaagaaacggttctggggttgggtctggggctgttgttgtttgtgctaccaaaggagccaataataagccattaacaggtgtgatttttgagccttttgaggaagttaagaaggaacttaatcttgtcccaactgtgcctcaaatgtccttggctcgtcaaaagtttgctgatgagtgtgaagctgccatcaacgaacaaatcaatgtggagtacaatgtttcat

SEQ ID NO: 38436 - DNA, 72 bp, Gossypium hirsutum
  Clone ID: LIB3165-031-P1-K1-E4
atcgggtaaagccaatgattagagtcatctggggcgcaacgccctcgacctattctcgaactttaaataggt

SEQ ID NO: 38437 - DNA, 383 bp, Gossypium hirsutum
  unsure (1)..(383): unsure at all n locations; Clone ID: LIB3165-031-P1-K1-E5
cccacgcgtncggttcctggtgatggacgcacaatcacccaatcttgacattgtggcagccgtgaagctgccccgtagggttccctacggttttcatggactatttgtgagggaaagtgatctaaataagctgtagaagtagattcacttcctctcggtcgggttcaggtggatgatcattcattaaacacatataatagcagtgaataccatagcagatgaaagttacaaggcgtttacaacatattgtataaacatatagtattttgttacagatgattgaagtcccaatatcataatcattgcatgtaatccttgtatctacattttacctttataaaataaccaattatataatccagtgaattatttatcggtcaaaa

SEQ ID NO: 38438 - DNA, 441 bp, Gossypium hirsutum
  unsure (1)..(441): unsure at all n locations; Clone ID: LIB3165-031-P1-K1-E6
aacggaccgggtcgagcccgacgcgatccggagacctcattttgtataacctgtagctatatatgtacctagtannagcagtaatagcaatgggccgtcctccatgatnctcatcnggcaacccattnngccaccgttgaacctgcnntcctccccggcacaaggccaacatngtgtggcccccttcaaccggcctcaagtncttgcctctgtctttctccagtcacttaggaagggccaaccaacgacatcancttctcttgcaagcaatggtgggagagtgcaatgcatgcaggtgtggcctcctcttgggaagaagaagttcgagacactctcatacctccccgatcttacacccgtacagttggctaaggaagtagattaccttcttcgctctaaatggattccttgcttggaattcgaattagaggagggattcgt

SEQ ID NO: 38439 - DNA, 383 bp, Gossypium hirsutum
  Clone ID: LIB3165-031-P1-K1-E8
cccacgcgtccgcccacgcgtccgctcaaattcagataacaatttcacaggtgggttcttcactctctctctcagccatggctgcagccatctccaccgtcgccgccgctgccgccgccaaccgagctctgggagtgtcagtcccaacctcagctttcatggggaagaaagtgagctcgagattcaacaacaccaggcaggttccttcgggaagttttaaggtgatggcggccgaaaaagagatagacgaagagacacagaccgaaaaggaccgatggaaagggttggcttacgatatttcggacgaccaacaagacattactcgagggaaagggatggtggattccttgttccaagctcccatgaatgatggaactcactat

SEQ ID NO: 38440 - DNA, 378 bp, Gossypium hirsutum
  Clone ID: LIB3165-031-P1-K1-E9
ctgacggctgttttatatagacattttccaaatcttttccactagaaatggaagagcttgaaagccccttttaagggtattgcaaatgatgttaaaggaagagcaggttgctataaacaagattggattactggtcttcgttcaggactggggatattagccccaactacctatatcttctttgcttctgctctccccgttatcgcctttggcgagcaactgagccgagatacagatgggagcctaagcacggttgaaacgttggcatcgactgccctttgcggtattctacactcgatattcggtggccaaccacttttgattcttggagttgcagagccaactgttatcatgtatacatattttgataactttgca

SEQ ID NO: 38441 - DNA, 379 bp, Gossypium hirsutum
  Clone ID: LIB3165-031-P1-K1-F1
ctctttgctcagtttcctccaaccccaacatggcatttgcatcccaggcaatgatatcaacgaacagctgtgccttcacttccccaaacttgttgtttttgaagaaatgttccaaaattaacaacaagaccaggcaattccatttcttcactgttagagcatcttctgatgaatccgatgactgtaatgaagaggaatgtgcacccgataaagaggttgggaaggtgagtgtggaatggttagccggggataagacaaaagtggttgggacatttccgcctcgccgaaagggctggaccggctatgtcgaaaaggacactgcggggcagaccaacatttattcaatagagcctgcagtttacgtagccgaaagtgcgat

SEQ ID NO: 38442 - DNA, 366 bp, Gossypium hirsutum
  Clone ID: LIB3165-031-P1-K1-F10
cccacgcgtccggtgggaacgccggagaaccagccaagttgatcaggcaaaggtgccgtgaggccgccgacattatcaagaaagggaaaatgtgttgcctctttatcaacgatctcgacgctggagccggtcgtatgggaggaaccacacaatacacagtgaacaaccaaatggtgaacgccacactcatgaacatcgctgataaccccaccaacgttcagctccccggtatgtacaacaaggaagagaaccctcgtgttccgatcattgtcaccggtaacgatttctcgacgctgtacgcgccgctcatccgtgacggtcgtatggagaagttttactgggcacccaccagggaagataggatcg

SEQ ID NO: 38443 - DNA, 330 bp, Gossypium hirsutum
  Clone ID: LIB3165-031-P1-K1-F2
gttcgtaacaatggcggtctcacttcaagctgcagctaccctgatgcaaccaatcaaggttgctgcaccatcaaggaccaatgtgccgctcaggtcctcccagagcgtttctaaggccttcggtttggagcctgttggtgctaggcttacctgctctttgcaaactgacctcaaggacttggctctgaagtgtgttgatgctaccaagctcgctggtttcgctcttgctacatctgctcttgttgtctcgggagcaagcgctgaaggagtttcaaagcggctaacctacgctgaaatccaaagcaagacatacatggaagtcaaaggaac

SEQ ID NO: 38444 - DNA, 357 bp, Gossypium hirsutum
  Clone ID: LIB3165-031-P1-K1-F3
cccacgcgtccgcccacgcgtccgcccacgcgtccgggcttcttcatctcttgtgccggttttcttcatcacgattccattccttttttttccgtttctcctcctttctatcttctcttcttcctctccttattcctcttcttctaaccctagttgctgtcaccatgagtcgccaccatcaatggcctttccgacaaattcgaccatcaaaacacttctcttttcctcgtcttctcaaattttgccttgtattttcaagaaaatctctttaaagccaaaaaaaaatcaatgcttgatccttgagttttctaaactatactcttcgcttgttgatgaaaggcaaaggaggcttctaat

SEQ ID NO: 38445 - DNA, 264 bp, Gossypium hirsutum
  unsure (1)..(264): unsure at all n locations; Clone ID: LIB3165-031-P1-K1-F4
ggaccggnaacggaccgggtcgggtccgacccacgcgtcgcgatgcaaattcagataacaatttacacagtctgtgcttcttcactcctatgtcttagccagggcatagacatcatctgcactcggttaaagggtcacactccctctataacatgtcagttatggggagaggagccatcctcttgcacggcgaagaactgactgagcgtgccaaatcatatgcatgcgagcttttcaagactggttaaggtaatggctgtcctg

SEQ ID NO: 38446 - DNA, 370 bp, Gossypium hirsutum
  Clone ID: LIB3165-031-P1-K1-F5
cttttatgatcccaacaacaggaaccggtgcatgggagagtgcacttactaatacgtgatcccccggtgaccgaatcgtatcgttcctcattggacaattcagtcttctttggatcgatcaacaacaacgtctcaaattcaacgtcgacgttgtcgaaagtgagtggggacaaggtgctaacctcgacgttttggccgaaaaactcgcggccgatcgtacgcacaccattaaggctatttgtattgttcacaacgaaaccgcgactggagttaccaacaacttggccacagtgagaaaactactagatcattacgggcacccagcactgcttctcgtcgatggagtttcctcgatttgtgctctcgattt

SEQ ID NO: 38447 - DNA, 378 bp, Gossypium hirsutum
  Clone ID: LIB3165-031-P1-K1-F6
cgctgagtttaagcatatcaataagcggaggaaaagaaacttaccaggattcccctagtgacggcgagcgaacacgggaaaagcccagcttgagaatcggtcgccatcggcgtccgaattgtagtctggagaagcgtactcagcgacggaccgggcccaagtcccctggaaaggggcgccggagagggtgagagccccgtcctgcccggaccctgtcgcaccaagaggcgctgtctacgagtcgggttgtttgggaatgcagccctaatctggcggtaaattccgtccaaggctaaatacgggcgagagaccgatagcgaacaagtaccgcgagggaaagatgaaaaggactttgaaaagagagtcaaagagtgcttg

SEQ ID NO: 38448 - DNA, 231 bp, Gossypium hirsutum
  Clone ID: LIB3165-031-P1-K1-F7
ctttgttttccaatagttcgtaactatggcggcctcacttcaagctgcagctaccctgattcaaccaatcaaggttgctgcaccatcaatgaccaatttgccgttcatttccttccatatcgtttctaagtccttttttttcttaccttttttttttttttaattttcttttatttacttttgtttttttttatttttattatattttttctctttcttctttattttttt

SEQ ID NO: 38449 - DNA, 382 bp, Gossypium hirsutum
  Clone ID: LIB3165-031-P1-K1-F8
gacaaagaaagcggccatggagaattaaagagagcaacaagtttacttggcaaggctcgctgagcaagctgaaagatacgatgagatggttgaggccatgaagagtgttgctaagttggatgttgagctgactgtggaggagaggaatctgttatctgtgggatataagaatgtgattggagcaagaagggcatcctggcggatactgtcttcaattgaacagaaggaggaggccaaaggtaatgaacaaaatgtgaagaggataaaggattataggcaaagggttgaagatgagctctcaaaaatatgcaatgacattctctcagtcattgataagcacctcattccatcttcctccaccggggaatcaactgttttttac

SEQ ID NO: 38450 - DNA, 383 bp, Gossypium hirsutum
  unsure (1)..(383): unsure at all n locations; Clone ID: LIB3165-031-P1-K1-G1
ccacgcgtncgncacgcgtncggtagcatatagtactagtaagcagtaatagcaatggcctcctccatgatctcatcggcaaccattgccaccgtgaactgctcctccccggcacaggccaacatggtggcccccttcaccggcctcaagtctgcctctgctttcccagtcactaggaaggccaacaacgacatcacttctcttgcaagcaatggtgggagagtgcaatgcatgcaggtgtggcctcctcttgggaagaagaagttcgagacactctcataccttcccgatcttacacccgtacagttggctaaggaagtagattaccttcttcgctctaaatggattccttgcttggaattcgaattagaggagggattcgt

SEQ ID NO: 38451 - DNA, 379 bp, Gossypium hirsutum
  Clone ID: LIB3165-031-P1-K1-G10
cccacgcgtccgccaaggcaatggccgtgtttccatgaggaaaaccgctaccagaggctgctccctctggaagtccatggtacggtcctgaccgagtcttgtacttgggtccactatctggtgagcctccatcttacttgaccggagaattccctggtgactacggttgggacactgctggactctcggcggacccagagacatttgccaggaaccgtgagctcgaagtcatccactgtaggtgggctatgttgggtgctcttgggtgtgttttccctgagcttttggctaggaatggagtcaaattcggtgaggctgtgtggttcaaggccggatctcagatcttcagcgaaggtgggcttgactacttgggaaacct

SEQ ID NO: 38452 - DNA, 352 bp, Gossypium hirsutum
  Clone ID: LIB3165-031-P1-K1-G12
gactacttgggtaacccaagcttgtatccatgctcaaagcattttggccatctgggcttgccaagttatcttgatgggagccatctagggctaccgtattgccggtggaccactcggtgaagtgactgacccattgtacccaggtggcagctttgacccattgggtcttgctgatgacccagaggcattcgctgagctcaaggtgaaagagatcaagaacggtaggttggctatgttctcaatgttcgggttcttcgttcaggccatcgtgaccggaaagggaccattggagaacttggctgaccaccttgctgacccagtcaacaacaatgcttgggcctatgccaccaac

SEQ ID NO: 38453 - DNA, 379 bp, Gossypium hirsutum
  Clone ID: LIB3165-031-P1-K1-G3
cttgggttgagtgtaaagatgaggaaaatcatgggtgccaaagttctcttcttctttgctttgctttccttttcagctgtgtcggcatttgcacaggatgaggaagaccaaggtcttgttatgaacttctacaaggattcttgtcctcaggctgaagacattatcaaggagcaagttaagctactgtacaagcgacacaaaaacactgctttttcttggctgagaaacattttccatgactgtgctgtccagtcatgtgatgcttcactgctgctggactccacaagaaggagcttgtctgagaaggagacagacaggagctttggcctaagggaattcaagtacattgagaccatcaaagaagctgtagaaagggaat

SEQ ID NO: 38454 - DNA, 375 bp, Gossypium hirsutum
  Clone ID: LIB3165-031-P1-K1-G7
cttccttgtatctttattttctcgcctttgacgaggagccgacgctaccatggttcacgtcagtttctaccgcaactatgggaagacctttaagaagccacgacgtccgtatgagaaggaacgattggatgctgagttgaggcttgtaggagagtatgggctccgatgcaagagggagctgtggagggttcagtatgctttgagccgcatccgtaatgctgctagggaccttctcactcttgatgagaagaaccctcgtcgtatttttgaaggtgaagcccttcttcgtaggatgaacaggtatggacttttggatgagagccagaacaagcttgattatgtcttggctttgacttgtgaaaactttcttgagcg

SEQ ID NO: 38455 - DNA, 377 bp, Gossypium hirsutum
  Clone ID: LIB3165-031-P1-K1-G8
agataacaatttcacagttgttttcttcactctctctctcagccatggctgcaggcatctccaccgtcgccgccgctgccgccgccaaccgagctctgggagtgtcagtcccaacctcagctttcatggggaagaaagtgagctcgagattcaacaacaccaggcaggttccttcgggaagttttaaggtgatggcggccgaaaaagagatagacgaagagacacagaccgaaaaggaccgatggaaagggttggcttacgatatttcggacgaccaacaagacattactcgagggaaagggatggtggattccttgttccaagctcccatgaatgatggaactcactatgctgtcatgagttcctatgaatacatc

SEQ ID NO: 38456 - DNA, 322 bp, Gossypium hirsutum
  Clone ID: LIB3165-031-P1-K1-H10
ctctcttatcttaccatggatccttacaagtgtcgtccttcaaggccctttggggtcccgttctggaccaccaattatggtgctccagtttggaacaataactcatcacttactgagggagcaagaggttcaattctgcttgaagactatcatttggtggagaagctcgctaatttcgatcgagaacgcatacctgaacgtgttgttcatgctagaggagccagcgcgaaagggttcttgcaggacactcatgatatatctcagctgacatgtgcttatttacttcgggcccctggagttcagacccctgtcatagctagat

SEQ ID NO: 38457 - DNA, 223 bp, Gossypium hirsutum
  unsure (1)..(223): unsure at all n locations; Clone ID: LIB3165-031-P1-K1-H11
caccaaacacanaaatcgttcgtttatatataaaagatccccaataccacaaacatctttttccaccttacatttaaatcactatattctacattatagctaacttctttttcattctacattttcatttattggcttttctacttacatctttctcacttttttaaatctatttacaattttactgactctctctctccattatatattcacaaattttctc

SEQ ID NO: 38458 - DNA, 241 bp, Gossypium hirsutum
  unsure (1)..(241): unsure at all n locations; Clone ID: LIB3165-031-P1-K1-H12
ggcaggccttacgtaaaaacagttttaatttaaatgtttaatttaaattgggaaataaaaantaagggccggtaaattttttagttgggggcgatggatcaacctcttaatcgagcaagattgccgtgtcgaaatatgtactgagaagaaaacaattttgtccgttgaggattatcatttctttgattggcaataaatgcgatggggggattggacagttgacttaaaacttgggggagac

SEQ ID NO: 38459 - DNA, 414 bp, Gossypium hirsutum
  Clone ID: LIB3165-031-P1-K1-H2
gaattccggggcggccacgcgtccggttagctttagcatacactactagtacccactactagcaatggcttcctcaatgagctgatcggctaccattgccactgcctctccggcacaggctaacatggtcacccctttcaccggcctcaagtctgcctctgctttcccagtcaccaggaaggccaacaacgacattacttctctcgcaagcaatggcggcagagtgcaatgcatgcaggtgtggcctcctactggaaagaagaagttcgagactctctcatacctccccgatcttacacccgtgcagttggctaaggaagtagattaccttcttcgctcaaaatgggttccttgcttggagttcgaattggaggagggattcgtgcaccgtaagtactcgagcttacccacgtt

SEQ ID NO: 38460 - DNA, 388 bp, Gossypium hirsutum
  Clone ID: LIB3165-031-P1-K1-H3
cccacgcgtccgtgaaacgaggagatttctacagaaggtgaaaaagaaagcgttggtttgtctctgtaatttatgcaaacgggaaatctgccacaatctctctcgatgaattcgccttttggaggaccgagcgcgtcgaatccaactgctgccggagctccggcgaataaggatcggaaaatggcaacggctgagcatttagttctcgatctcagcaaccctgatctccgagaaaacgctcttctggaactatcgaagaagagagaattatttcaagatttggctccattgttgtggaattcttttggtactattgctgcacttttacaggagatagtttcaatttatcctgttctctcaccaccaaatctgactccagctcaatcaa

SEQ ID NO: 38461 - DNA, 302 bp, Gossypium hirsutum
  unsure (1)..(302): unsure at all n locations; Clone ID: LIB3165-031-P1-K1-H6
gaannncagggccgggccgagccacccgtaaaaccagtttaaattgaagtgtggatcccaaatgggaaataaagagttatgagcggcaaacctatgcctggagctcgatggatcaacctcttaatcgagcaagattgccgtgtcgaaatatgtactgagaagaaaacaattttgtccgttgaggatatcatttctttgattggcaataagtgcgatggggtgattggacagttgactgaagactggggggagactttatttgcagctttaagcagagcaggaggcaaagcatttagtaacat

SEQ ID NO: 38462 - DNA, 381 bp, Gossypium hirsutum
  Clone ID: LIB3165-031-P1-K1-H7
cccacgcgtccggtgagactcttttgtatacctgtagcatatagtaatagtaagcagtaatagcaatggcctcctccatgatctcatcggcaaccattgccaccgtgaaccgctcctccccggcacaggccaacatggtggcccccttcaccggcctcaaatctgcctctgctttcccagtcaccaggaaggccaacaacgacatcacttctcttgcaagcaacggtgggagagtgcaatgcatgcaggtgtggccgcctcttgggaagaagaagttcgagactctctcatacctgcccgatcttactcccgtacagttggctaaggaagtagattaccttcttcgctctaaatggattccttgcttggaaattcgaatag

SEQ ID NO: 38463 - DNA, 389 bp, Gossypium hirsutum
  Clone ID: LIB3165-032-P1-K1-A1
ggaataagccatcgagtcctgttcggtatcgtgttgaagagaaatggaataagccttctagccccgttcagtatgacgtcgaagagaaatggaataagccatcgagtcctgttcggtatcgtgtcgaagagaaatggaataggccctctagtcctgttcggtaccatgccgaagagaaatggacgaaccggccttcaagtccggttaaggaacatcctcaacaagttatggattttattagcaaagttcaaactcaagccagccgaccaaacaagttcggtcctctcagcgcaacatattggcgccagacaccagccacgaccaccacaaccgttggtggtccatggaacaaccagagtcatggtgggggatggtccaaaggacacgag

SEQ ID NO: 38464 - DNA, 386 bp, Gossypium hirsutum
  Clone ID: LIB3165-032-P1-K1-A10
cccacgcgtccggacggcttctattaacggttggtgccttacctcctcttcttgcaccactaccacctgctctttttccgctcgtcgacgacctacattgcggccttcagtcgtcgctagccttaactcttctccttctcctccgactcttatccaagaccgcccggtttttgctgcccctattcctttgctcaccccgagagaagagatgggaaacaagtcctacgacgaagccattgaagctctcaagaaacttctcagtgagaaaggagaactgaaagctgaagcagctgcaagggtagatcaaataacagcagagttaaacacagcatcagctgatggcaaaccatctgactcttctgttgagagactgaaagaaggcttcg

SEQ ID NO: 38465 - DNA, 390 bp, Gossypium hirsutum
  Clone ID: LIB3165-032-P1-K1-A11
tgccacttttgtagtgcctgtccatcatagcgagagaaaagtaggatgacagtggaagaagccattgatttagttgataaatgcataatggagatcagatctagactggttgtggcaccaccaaactttgtcatcaagattgtcgataaagatggagcaagagaatatgcctggcgtgaatccgtcaaggatgctgcagttccttcggcctgagattttatcacgtacttgctctcccgttctggatgttttaatttgcatttaccgataggaaacaatgtgtgacggcagtgaaaattagtatatgaaaaactatttactttgatttgattatgttctgaagtggaaatttgatgatattttatcttggaatggaaacctttttatgtg

SEQ ID NO: 38466 - DNA, 390 bp, Gossypium hirsutum
  Clone ID: LIB3165-032-P1-K1-A12
aaaagacacagatatgagttctgcttccctttcctgctctctcccgcccaccggctctgcctccgccggttcccgccgcaatccccacctccggattcccaaaacccttttcacttttcaccatcctcatcatcatcatcatcaccacccttttctactcagagttacaaatgaaactagcaggactgaagtgtctactactgatcctatcaatgagagattggaaagcgataagattgttgatgggatggactttggcgagctttgcaacgagttcgaatgcattagtagtcccttagtcgaatcaacagcaagacaactcgtacgtgacatcctagagctccgagaagggaaccgtgcactcggaacatacgctgtttctgtcaaata

SEQ ID NO: 38467 - DNA, 426 bp, Gossypium hirsutum
  unsure (1)..(426): unsure at all n locations; Clone ID: LIB3165-032-P1-K1-A2
gggaaggaatcgggtgggaccgaccgcagtccggaaaggtttcaaatggcaancccttcaaaggttctcagttcaagcgttccttctnnccttctgagggagtgctgangtcaacttgcggaaagggctttnnngaaggctgtgggtaccgaaccganngcaatnntgattattcganccatattggcttcacagnnngaatgcagcnnacagcgcaattcaaattcggaaaggtttaatgcgtgaagctnntatggggaaagatcttctcaagggtgtttggaggaaaggacactttacaaagtgatttcgaggccgggctgtgcattgctttttacccgttgggaccctgcaagagccgaggattgctcaatcttggcttaaatgaaagcttacaaaagaaagttcaacaatcaaggcaattgg

SEQ ID NO: 38468 - DNA, 363 bp, Gossypium hirsutum
  unsure (1)..(363): unsure at all n locations; Clone ID: LIB3165-032-P1-K1-A3
ggaaanaacggggtggacccacccttccgcaatgctggtaatgtcaagtaccagcgtttcaaccagccatgttgtgaacttgaagagagatcaccctttactccattttcaagctcaagggttaaagcctaaaccctcctctcatttcttattcaatccacactctaacactgttgctgcttcatcatctaaagctttcaccacttttgcactcttcaaaccaaagaccaaagcagctcctaagaaggctgcacctaaaccaaagccaaaggttgaagatggaatctttggcacctctggagggattggttttaccaagcaaaatgagctctttgttggacgtgttgccatgattggctttgc

SEQ ID NO: 38469 - DNA, 369 bp, Gossypium hirsutum
  Clone ID: LIB3165-032-P1-K1-A4
gggcggccaacccgtccgttgacccattgtacccaggtggtagttttgacccattgggtcttgctgatgacccagaggcattcgctgagctcaaggtgaaagagatcaagaacggtaggttggctatgttctcaatgttcgggttcttcgttcaggccatcgtgaccggaaagggaccattggagaacttggctgaccaccttgctgacccagtcaacaacaatgcttgggcctatgccaccaactttgtccccggaaagtgaacttagagagtgaaaagggatttgtcttgttcatgtttttatttgttggtgtgaatgtaaatttgttgcacaatcaatgaaagcagaatgtgaattttgtgtgctc

SEQ ID NO: 38470 - DNA, 391 bp, Gossypium hirsutum
  Clone ID: LIB3165-032-P1-K1-A5
cccacgcgtccgcccacgcgtccgtccacgcgtccgctcttttgtataactgtagcatatagtactagtaagcagtaatagcaatggcctcctccatgatctcatcggcaaccattgccaccgtgaactgctcctccccggcacaggccaacatggtggcccccttcaccggcctcaagtctgcctctgctttcccagtcactaggaaggccaacaacgacatcacttctcttgcaagcaatggtgggagagtgcaatgcatgcaggtgtggcctcctcttgggaagaagaagttcgagacactctcatacctccccgatcttacacccgtacagttggctaaggaagtagattaccttcttcgctctaaatggattccttgcttggaatt

SEQ ID NO: 38471 - DNA, 386 bp, Gossypium hirsutum
  Clone ID: LIB3165-032-P1-K1-A6
cccacgcgtccgtatctatttaccaacatataaaagaaagtggtattagtcctgatgtggttacttatagtacactcatgaaagcttttattcgagccaagaagtttgataaggttcctgaaatatacaaggaaatggaatcttatggatgcactcctgatagaaaagctaggcaaatgctgcaaactgccttgatggtacttgaacggagacattgagtcttagactgatgttgctaatacctggtgacctgatattatcttcactttgctgtggcttttgctaagctgactaaatttgtaaagtgcatagatttgcttttaagaattgaagaccttgttaatatttcttctactggcattattgcatggattggatttgcaaaa

SEQ ID NO: 38472 - DNA, 268 bp, Gossypium hirsutum
  Clone ID: LIB3165-032-P1-K1-A9
ccacctcggaggatcaatagagttaagggcaggccgaggggagagacggttaattattatgggcaaagaagagattagggacttctgactatcataacctacagcttcaacacacaccatcacacatagattgagcatcgagggtgtttcctaactccttggcttccacgtacctcagtcaatcgacttacgaaccgtcagccagtcacactttttgcccctatatatatacgggtattaccaaactctctgcgtgctacgttgatac

SEQ ID NO: 38473 - DNA, 388 bp, Gossypium hirsutum
  Clone ID: LIB3165-032-P1-K1-B1
actcccaatactttcataacatttcacgaacttcactctccagtctccaatggcggctgccgtctccaccatcggtgctgtcaaccgagcaccgttgagtttgaatggatcaggtgccggagcttctgctccaagctcagctttcatggggaacagcttgaagaaagtgagcgctaggttcaacaacaacggcaaggctccagtgggaagtttcatgattgtggctgccaaagaaatcgacgaagacacacagaccgaccaggaccgatggaagggtcttgcttatgatatcttccatgaccaacaagacattaccagagggaaagggatggtcgactcattgttccaagctcccatgaacgatggtacttactatgctgtcatgagc

SEQ ID NO: 38474 - DNA, 392 bp, Gossypium hirsutum
  Clone ID: LIB3165-032-P1-K1-B10
cccacgcgtccgatttgttctcttttctctctctctcttcaatggcgtcccatgaaaacatcaccgtcatcacctcccccaaaggcaacaactcggaagcagcagcatcggcggcagccaactcgccgaaaggaggccaatgtttgtgctcaccgacgactcaccaaggctctttccggtgcagatttcacagatcaagctcatcatcttggatgatgaaacgatcaaaatccatgcctaccaacaatacttccatggtttctctttctcccaagtcagttgaaactacataaaatccccaatatatatatacacacatatacataagtatatgtgtatctatatccaccatgtatgttttcataacaattccgatctgtataactctacct

SEQ ID NO: 38475 - DNA, 391 bp, Gossypium hirsutum
  Clone ID: LIB3165-032-P1-K1-B11
agccaacatggcctcattagcagcctccaccgctgccgcctcccttggcgtctctgaaatgctcggtaaccctctgaatttcagtggtggagctaggtcatcggctccaacaccatccaactcatccattttcaagaccgttgctcttttctccaagaagaaggccgctcctccaaagcccaaggctgctgctgtcgccccggccgatgaagagctggctaagtggtacggtccggacagaaggattttcttgcctgaaggtctgttagacagatcggagatcccagagtacttgaacggagaagttcccggagactatggatacgatccgtttggtctgagcaagaagccagaagactttgcaaaatatcaagcatatgagttgatacac

SEQ ID NO: 38476 - DNA, 387 bp, Gossypium hirsutum
  Clone ID: LIB3165-032-P1-K1-B12
cggacgcgtgggcttctctctttttaagctgatatgcctgtctttcattcaagtcataatcaaatcaaatctttgatgcaaatatagttctttagcgacctttcggtaagacaatcttccaaagatgctcggtgcatcggaatattattcattgggaagaggatctaccattaattactacacgcctcaagctctgcaacaactgagaagattctactctgcaattaaaaaggaatcaccacgagttctacattaggttgatttgatgattttctttgagttttggtgctaatccatgaagaatttttactggtttaagcaaatctcaaacaatgttaagtcagagaggaggctttctcttggggaatacaaaagagcagtttcttg

SEQ ID NO: 38477 - DNA, 388 bp, Gossypium hirsutum
  Clone ID: LIB3165-032-P1-K1-B2
ggagtcaccaacaacctggctactgtgagaaaattacttgatcattataggcacccagcattacttcttgttgatggagtttcctctatttgtgcccttgattttcgtatggatgagtggggagtagacgtcgcactaaccggttctcagaaggcactttctcttcccacaggactgggtattgtttgtgcaagccccaaagctttggaggcattcaaaagtgcaaaatcagttagagttttcttcgactggaatgactacctcaagttctacaaactgggaacattttggccatacaccccttcaatccagctattgtatgggctaaaagccgctcttgatcttatattcgaggaaagactcggcaatgtgattgcaaggcataccc

SEQ ID NO: 38478 - DNA, 374 bp, Gossypium hirsutum
  Clone ID: LIB3165-032-P1-K1-B3
gggttaggccttttggctttttcagagatagaaacgatccttcaacttttaggctcagctgctattgtgcagcttgtaagcaagaaattcctgtatgcagagaaccgaaagcaaacacttaaacaagttgatgaattcttaaacacgaaggtggctcctacggaacttgtcgatgatgtaaagcaaattggagcagcccttttaccaacaactaccactagcaaggctcttcctgcacctacggaggcaaaacctgaacccaaagtcgaagcagtggcagaagcccctcctcaaacaaattcagttcccgaaacagtacccaaggcagttggaatcactggattttcaagaccactttcaccctatgcttttta

SEQ ID NO: 38479 - DNA, 411 bp, Gossypium hirsutum
  Clone ID: LIB3165-032-P1-K1-B4
ggaaaaaccggggcggaccaacccgtccgaccgtaatcatctgtggatgaggttacaaagaagtatggccttgaagttgggctatggaagatattcagctcaaaggaagaagggggacaaaagaaatcgaaaggggatcaagcaaaagagcttctagcaaaatatggaggggcatacttggcaacctctattactctctccttgatatccttctccctttgttatgcactaatcagtgcaggcgttgatgttcaagcactgctgcaaaaggtgggaatctcaactgatgctactggagagaaagtcgggacctttgctttggcatatgctgcacacaaagctgcatctcctataaggtttcctccaactgtggctctcactcccattgttgcgggttggataggaaagaag

SEQ ID NO: 38480 - DNA, 394 bp, Gossypium hirsutum
  Clone ID: LIB3165-032-P1-K1-B5
gtccgtttaaggaagtcctccccaagagtgactaacgaggctgttcaaaaggctgctgctggtttgaagggctctgatcaccgtcgtgcaactaatgttagtgctagactcgatgcccagcagaaaaagcttgaccttccaatcctccccaccacaaccattggatctttccctcaaaccttggagctcaggagagttcgtcgtgaattcaaggctaacaagatctctgaggatgattacattaaagccattaaggaggaaattaagaaggttgttgaccttcaggaagagcttgacattgatgtcttggttcatggagagcctgagagaaacgatatggttgagtactttggtgagcagttgtctggttttgcattcactgttaatggatggg

SEQ ID NO: 38481 - DNA, 394 bp, Gossypium hirsutum
  Clone ID: LIB3165-032-P1-K1-B6
atcactcccaatactttcataacatttcacgaacttcactctccagtctccaatggcggctgccgtctccaccatcggtgctgtcaaccgagcaccgttgagtttgaatggatcaggtgccggagcttctgctccaagctcagctttcatggggaacagcttgaagaaagtgagcgctaggttcaacaacaacggcaaggctccagtgggaagtttcatgattgtggctgccaaagaaatcgacgaagacacacagaccgaccaggaccgatggaagggtcttgcttatgatatctccgatgaccaacaagacattaccagagggaaaggtatggtcgactcattgttccaagctcccatgaacgatggtactcactatgctgtcatgagctcc

SEQ ID NO: 38482 - DNA, 164 bp, Gossypium hirsutum
  Clone ID: LIB3165-032-P1-K1-B7
gaccggccggaacccggcgacccacgcgtcaagatctgtgatctgatcagatcgataaaaataaacatgtttgggagagcaccaaaagcatattcatactatagattgggagttcgaaccttcagatgatctaaagaaagctataaagcgtttaaatatccgat

SEQ ID NO: 38483 - DNA, 350 bp, Gossypium hirsutum
  Clone ID: LIB3165-032-P1-K1-B9
cctgtgcttgtacacaatggctatgactgtaaatgcagcagtggctcttccatcttccaagtcatctaccctgtcatttaaaaactcagtcactgtccctgaaagaatcaacttcaacaagagtgttttgtacccaaaaaatgtcagccttggtggaaatgtggtttccattagagctcaggtcactacagaagctcctgcaaaagcaccaaaaatttccaagaaagatgacgagggtattgttgtgaacaagttcaaaccaaaggaaccctacattggaaagtgcctcctcaacaccaaaattaccggagatgatgctccaggggagacttggcacatgggtttttagt

SEQ ID NO: 38484 - DNA, 297 bp, Gossypium hirsutum
  Clone ID: LIB3165-032-P1-K1-C1
cccacgcgtccgcccacgcgtccgctcgtctcatgaactcaagaatctgatgctgtaaatcataacttttttctctataaaaaaatgctcataaatcaaatatttcatatttgacggttccgccattgtaaagttggatgcttattttaactctttgcaatgtataaatcaaatatgaattgctcatttaaaaaaaaaaaaaaaaaaaaaaaaaaaaaaaaaaaaaaaaaaaaaaaaaaaaaaaaaaaaaaaaaaaaaaaaaaaaaaaaaaataaaaaaaaaaaaaaaaaataaaaa

SEQ ID NO: 38485 - DNA, 385 bp, Gossypium hirsutum
  Clone ID: LIB3165-032-P1-K1-C11
atccactttcaagaccgttgctcttttctccaagaagaaggccgctcctccaaagcccaaggctgctgctgtcgccccggccgatgaagagctggctaagtggtacggtccggacagaaggattttcttgcctgaaggtctgttagacagatcggagatcccagagtacttgaacggagaagttcccggagactatggatacgatccgtttggtctgagcaagaagccagaagactttgcaaaatatcaagcatatgagttgatacacgcaaggtgggcaatgcttggtgctgcagggttcatcatccctgaagcctttaacaaatttggtgccaactgtggccctgaagccgtttggttcaagaccggagctcttctcttggac

SEQ ID NO: 38486 - DNA, 392 bp, Gossypium hirsutum
  Clone ID: LIB3165-032-P1-K1-C12
cccacgcgtccggcatacactactagtacccactactagcaatggcttcctcaaggatctcatcggctaccattgccactgcctctccggcacaggctaacatggtcgctcctttcaccggcctcaagtctgcctctgctttcccagtcatcaggaaggccaacaacgacattacttctctcgcaagcaatggcggcagagtgcaatgcatgcaggtgtggcctcctactggaaagaagaagttcgagactctctcatacctccccgatcttacacccgtgcagttggctaaggaagtagattaccttcttcgctcaaaatgggttccttgcttggaattcgaattagaggagggattcgtgcaccgtaaatactcgagcctacccacgtac

SEQ ID NO: 38487 - DNA, 392 bp, Gossypium hirsutum
  Clone ID: LIB3165-032-P1-K1-C2
gctttagcatacactactagtacccactactagcaatggcttcctcaatgatctgatgggctaccattgccactgcctctccggcacaggctaacatggtcacccctttcaccggcctcaagtctgcctctgctttcccagtcaccaggaaggccaacaacgacattacttctctcgcaagcaatggcggcagagtgcaatgcatgcaggtgtggcctcctactggaaagaagaagttcgagactctctcatacctccccgatcttacacccgtgcagttggctaaggaagtagattaccttcttcgctcaaaatgggttccttgcttggagttcgaattggaggagggattcgtgcaccgtaagtactcgagcttacccacgtactacgat

SEQ ID NO: 38488 - DNA, 389 bp, Gossypium hirsutum
  Clone ID: LIB3165-032-P1-K1-C3
cccacgcgtccgcccacgcgtccgcggacgcgtgggaatctctctccattcaccgtggcaacttctacttcttctttgctccaatccaacactttgaacttgaaacactatttcccccttcatttgcctcttccttctcctcctcgcctatctcatttcactggaactttggctttcaacggtcaacgttcggcaaagttcactgttaaatgcttcttctcgtcggagcagaggaaacatttgacgagctcgagtttgggctccaacaaccagttgagttccagctcaaatgacaaaaacccattcgagattatttctcaaacaatgttaaaagctttgaacgcgttaaaaaagcccgctatagccgcggttttatcgcgtttgttgct

SEQ ID NO: 38489 - DNA, 392 bp, Gossypium hirsutum
  Clone ID: LIB3165-032-P1-K1-C4
aaaaaacctttaaagctttaaaacttttccatttctccttagataccagaacattgggccatttttaaaacaaaaccataaatcgccttttaaaatcctcccaggtggacctcgacggtgccaaaatatgcttccatctccgccatggcttcaaacggtccctagggatccgtctgcctttgggtcggaggagcatacaccgatcagatcgacgccaaatgatagatattgcggtggtgcgggtgtgttgacgtggaggcacgatggagcagcgcacgatgcggagaggcgcgagacgtgcggtgcttagaggctcggtgaaagggcctgctagggtttcaaaacctgctgaaactatttgaagtttatgggccaattgggccgtaagtttt

SEQ ID NO: 38490 - DNA, 392 bp, Gossypium hirsutum
  Clone ID: LIB3165-032-P1-K1-C5
gttttccatctctgtctctctttcttttctaattattgaggaaatccaccgatcaaagttgttcaaatcgtgggtgaaagtcttgagaaactaaaatggcgtccacattcagcggcgatgaaactgctccgttctttggcttccttggggccgctgctgctctcgttttctcctgtatgggagcggcgtacggaacggccaagagcggtgtcggagtggcgtcgatgggagtgatgaggccagagctggtaatgaaatcgatcgtccccgttgttatggctggtgttttaggtatttatgggttgattattgcggttattataagcaccgggattaacccaaaggccaaatcttactaccttttcgatggctatgctcatctttcctctggt

SEQ ID NO: 38491 - DNA, 435 bp, Gossypium hirsutum
  Clone ID: LIB3165-032-P1-K1-C6
gcgtcgcgcccacgcgtctcgtgagaatctaagatgatgtggttgtagagagggaacatcacgagtacgaggtgtgttcagtagctggggtgtggaaggcctaactcattgtgtatatttaatccactcaaagtactagctattgttagctgagtgaattggaaaggaagaaacaagtgacctggtttgttagtgaccaaagttgcaaggtgatttaatgggtgcaggtctggagattttcagcttttaccttacacaaggcttgctatggtattggaaaaggtggatgatctgaataagacttgtatttagcaaaacaagaagtgacgggacagtggacagaaatggaatgcaactcttatagattgtgtatggagtgaccttgctggtggaaccaactacatgtggatcaattgtcaacttcagctatggatt

SEQ ID NO: 38492 - DNA, 386 bp, Gossypium hirsutum
  Clone ID: LIB3165-032-P1-K1-C7
caaattcagttaacaatttcacagttgttttcttcagtctctctctcagccatggctgcagccatctccaccgtcgctgccgctgccgccgccaaccgagctctgggagtgtcagtcccaacctcagctttcatggggaagaaagtgagctcaagattcaacagcaccaggcaggttccttcgggaagttttaaggtgatggcggcggagaaagagatagacgaagagacacagaccgaaaaggaccgatggaaagggttggcttacgatatttcggacgaccaacaggacattactcgagggaaagggatggtggattccttgttccaagctcccatgaatgatggaactcactatgctgtcatgagttcctatgaatacctcag

SEQ ID NO: 38493 - DNA, 147 bp, Gossypium hirsutum
  Clone ID: LIB3165-032-P1-K1-C8
atcagactcactttgtaaggaacatggagttcaaagaagctgctgataagattgatggtcctttgagacaaatcttcgttgagttcttggagaggtcttgtactgctgagttctctggttttctcctctacaaagagagtctgattg

SEQ ID NO: 38494 - DNA, 392 bp, Gossypium hirsutum
  Clone ID: LIB3165-032-P1-K1-D1
cttaacgctataatcattgaagaaaaatgggtttgaaggaggaattcgaggagtgtgcggagaaagctaagacccttccccagaacactaccaacgacgacaagctcattctctatggactctacaagcaagctactgttggaccagtgaacaccagccgtcctggaatgttcaacatgaaggaaaagtacaagtgggatgcatggaaggctgttgaagggaaatcgaaggaggaagcaatgaacgattatatcactaatgtaaaacagctgcaagaggctgctgctgcatcttcttgacgtgtgtgtgagaatagaaaatggtgtaattttcaagccctttgatacctatgggtttgaaaaggtctataactatgaataagcaatgtacta

SEQ ID NO: 38495 - DNA, 393 bp, Gossypium hirsutum
  Clone ID: LIB3165-032-P1-K1-D10
gtccaatcactcccaatactttcataacatttcacgaacttcactctccagtctgcaatggcggctgccgtctccaccatcggtgctgtcaaccgagcaccgttgagtttgaatggatcaggtgccggagcttctgctccaagctcagctttcatggggaacagcttgaagaaagtgagcgctaggttcaacaacaacggcaaggctccagtgggaagtttcatgattgtggctgccaaagaaatcgacgaagacacacagaccgaccaggaccgatggaagggtcttgcttatgatatctccgatgaccaacaagacattaccagagggaaaggtatggtcgactcattgttccaagctcccatgaacgatggtactcactatgctgtcatg

SEQ ID NO: 38496 - DNA, 391 bp, Gossypium hirsutum
  Clone ID: LIB3165-032-P1-K1-D11
cggacgcgtgggcggacgcgtgggtataggatcggtgtttgcacaggtattttgaggaccgacaatgttcccgttgatgaccttgttaagcttgttgacaccttcccgggccaatccattgactttttcggtgctctgagggccagagtttacgatgacgaagtgaggaaatggatcggagaggtcggagtcaatggtgtcgggaaaaagctcgtgaactcgagggaagggccaccatctttcgagcaaccgaagatgaccattgagaagctgttggaatatggatacatgcttgttgctgagcaagagaatgtgaagagggttcaattggctgacaaatatttgagtgaagctgcccttggaaatgctaatgacgatgctatcaagagag

SEQ ID NO: 38497 - DNA, 391 bp, Gossypium hirsutum
  Clone ID: LIB3165-032-P1-K1-D2
cttctcttttgggttctaaagatcgtgattatcttctctgctccactgcagcaggtgctgaaactgatcaggtgaaaatttcggatctagagggcaaggtgatcggaatttacttctcagctaactggtacccaccatgtagaaatttcaaccgagtattgattggtgtgtatgagcagctgaagagcaatggatctaactttgagattgtatttgtgtcatctgatgaagacttggatgccttcaacagctaccgtgaaaacatgccatggctttcgattcccttttctgatttggagacaaagaaggccttgaatcgaaaatatgacgtggaaagcattccttgcttagttattttgcagcctgacaacaccaaggatgatgatactta

SEQ ID NO: 38498 - DNA, 391 bp, Gossypium hirsutum
  Clone ID: LIB3165-032-P1-K1-D3
cccacgcgtccgggtcattcgttgtttataaaatcattcatctccccaatttctggcgcttctttccttcctttcttccttaacctccaaccagtagaactcctctcacttatctccttattgtaaacattttcctctattcttttgttcctttcattttcctatctacaaatttttcttagcctaaaatttttcttctctttttgttatccatttgagtagatttttctttcttcgccttcatcggagtcttcttcagataactggagtgttaaggcaatccgaaaaaagaccactggaactggtaggatgatgtatcttcgccatgttcctcgtaggttcaagattggtttcagagaaagtactgaagcagcaccgaagaagaaggttg

SEQ ID NO: 38499 - DNA, 386 bp, Gossypium hirsutum
  Clone ID: LIB3165-032-P1-K1-D4
cgtctgtatattgcgaattttctttcttctgattttctctttagctcaaaaaagatgcagtggggtcgtcaagactctaaccggcaagacgatcactctcgaggtcgagagctccgacacgatcgacaacgtgaagaccaaaatccaagataaggaaggcatccctccagaccagcagcgtctgatcttcgccggaaaacagcttgaggacggccggaccttggccgattacaacatccaaaaggagtcaactctccacctcgtcctccgtttgcgcggtgggatgcaaatcttcgtggaaaccttgaccggcaagacaatcactctcgaggtcgagagctccgacacgatcgacaacgttaaggcgaagatccaagacaaggaag

SEQ ID NO: 38500 - DNA, 394 bp, Gossypium hirsutum
  Clone ID: LIB3165-032-P1-K1-D5
gttgccaaggagccacaaaatcctgaggcagacgaggatgatggatatgtggttgggtatgtccacaatgaaaacacaggagagtcaaggttcctggtgatggacgcacaatcacccaatcttgacattgtggcagccgtgaagctgccccgtagggttccctacggttttcatggactatttgtgagggaaagtgatctaaataagctgtagaagtagattcacttcctctcggtcgggttcaggtggatgatcattcattaaacacatataatagcagtgaataccatagcagatgaaagttacaaggcgtttacaacatattgtataaacatatagtattttgttacagatgattgaagtcccaatatcataatcattgcatgtaatcctt

SEQ ID NO: 38501 - DNA, 387 bp, Gossypium hirsutum
  Clone ID: LIB3165-032-P1-K1-D7
gcgggatgaagcttcccggaaacctcttttacctcttttttaacaacaatgcgggataccatgatgtccaccatcagctttatggtaccaaatacaacttctctgtctactttgacatatgggacagaattctaggaacctatatgccttattcacttgagaagagacctgatggcggccttgaagtacgacgtgctgatcaagaacacaagaaggattgattgattaattacttgattaatcagccaattatgataactagtgagcatggattgatgaatgttccattaggttttatatatgtatctaatgtgtatgtattatgtgtactactatgcttcactaggagtaaaggcaaatctggtgtgaaactaagtcaattatgat

SEQ ID NO: 38502 - DNA, 387 bp, Gossypium hirsutum
  Clone ID: LIB3165-032-P1-K1-D8
gttagctatagcatacactactagttcccactactagcaatggcttcctcaaggatctcatcggctaccattgccactgcctctccggcacaggctaacatggtcgctcctttcaccggcctcaagtctgcctctgctttcccagtcatcaggaaggccaacaacgacattacttctctcgcaagcaatggcggcagagtgcaatgcatgcaggtgtggcctcctactggaaagaagaagttcgagactctctcatacctccccgatcttacacccgtgcagttggctaaggaagtagattaccttcttcgctcaaaatgggttccttgcttggaattcgaattagaggagggattcgtgcaccgtaaatactcgagcctacccacg

SEQ ID NO: 38503 - DNA, 377 bp, Gossypium hirsutum
  Clone ID: LIB3165-032-P1-K1-D9
cccacgcgtccgcagacatctgctctaggaagcaataatggcgggtacaggaaagggatggcagaggcaaagctaaaggtggctataaatgggtttggtaggattggcaggaacttcttaaggtgctggcatggccgtaaagactccccacttgatgtcattgccatcaatgacactggtggtgttaagcaggcttctcaccttctcaaatatgattccacccttggcatcttcgctgccgatgtcaagcctgtcggcactgatggcatctctgttgatggcaaggttatcaaggttgtttctgaccgcaacccttccaacctcccatggggggacctaggaatagatctagtcatcgaaggaaccggtgtgttcgt

SEQ ID NO: 38504 - DNA, 392 bp, Gossypium hirsutum
  Clone ID: LIB3165-032-P1-K1-E1
gatatatttagctatagcatacactactagtacccactactagcaatggcttccgcaatgatctcatcggctaccattgccactgcctctccggcacaggctaacatggtcgctcctttcaccggcctcaagtctgcctctgctttcccagtcaccaggaaggccaacaacgacattacttctctcgcaagcaatggcggcagagtgcaatgcatgcaggtgtggcctcctactggaaagaagaagttcgagactctctcatacctccccgatcttacacccgtgcagttggctaaggaagtggattaccttcttcgctcaaaatgggttccttgcttggaattcgaattagaggagggattcgtgcaccgtaaatactcgagcctacccac

SEQ ID NO: 38505 - DNA, 392 bp, Gossypium hirsutum
  Clone ID: LIB3165-032-P1-K1-E11
gccagtttgccaccactaatggcgacatccatagcagctcgcatctccaggaaggccgcggcctctgctttctccgctcaccgtcacgtaatctcatcccgttgtttcgccacggagtcggcgaaaacgatctcgccgtcgtcggatcgagtcaagtgggactacaggggccaaaggaagataatccctctcggacagtgggtccctaaggtcgccgtcgacgcttatgtggcacctaatgtcgtcttggccggtcaagtaaccgtctacgacggagcgtcggtgtggaacggctgcgtcctacgtggagatctcaacaagatcaccgttggattctgctctaatgtccaggaacgctgcgtcattcacgccgcttggtcctcacctaccgg

SEQ ID NO: 38506 - DNA, 387 bp, Gossypium hirsutum
  Clone ID: LIB3165-032-P1-K1-E12
cttactaacaacaaaaaccctgaaatgtcggacgacgatcatcatttcgaatccaaggctgatgccggcgcctccaaaacctatcctcagcaagccggtactatccgtaagaacggctatatcgtcattaaaggccgtccctgcaaggttgtggaagtttccacctccaagacggggaagcacggtcatgctaagtgtcacttcgttgggatcgatatcttcactggcaagaagttggaagatattgttccctcctcccataactgtgatgttccgcatgtcaatcgtactgactaccaattgattgacatttctgaggatggatttgtgagcttgctgactgatagtggtgatactaaggacgatctcaggcttccaactgatgag

SEQ ID NO: 38507 - DNA, 392 bp, Gossypium hirsutum
  Clone ID: LIB3165-032-P1-K1-E2
cccacgcgtccgttttttttcttaatttcaaagaaatggccaacataactgttagcaactttgctgcagtgttgactaaggcaactttgaagggttcaaacaaagttcaatcatccaaagttcttggattgcctgtgatggcaacaaatggtagggctaggtgcagtctagagcagaagtcttcttcaaacgggctgagctcgaaccccagcatggtggcatcaatgatggcggcagcagcagcagcggtgacaacggctgctgcaccggcaacggcgttggtggatgagagactttccacggaaggaacaggacttccttttggctaaagtaacaaccttctgggatggatcctttttggagtgtttggtttgatttgggcattgtatttt

SEQ ID NO: 38508 - DNA, 408 bp, Gossypium hirsutum
  Clone ID: LIB3165-032-P1-K1-E3
ggcggaccacacccgtccgcggacccgtgggtgcgatcaaggaatttttggcatcaaagataagaaaggccaagcgtgcactccatatggctggcaagggtcaatgtccggcagtagttgacgaattattgttcgccaatcactccattctgaacgaacgtgacaaaaaggggaatacggcattgcacatcgctacgaggaaatctcgcgcgcagattgtgagcttgctgctaacttatagatctaccgatgtcaacgccataaataatcaacacgaaaccgcgatggatttggctgataaactccagtacggtgaatccgcgttcgaaattaaagaagctctaacggaggccggtgctaaacatgctaggtccgttggtcaagtagatgaagcaatggaacttaaga

SEQ ID NO: 38509 - DNA, 390 bp, Gossypium hirsutum
  Clone ID: LIB3165-032-P1-K1-E5
cttttatctcttccttccctcccctactatccatctttagacgttatggttcccatcgtgttgacccagatggctaccggtttgggtgtattggccggggccgtttttgtcaaatcggtcatggaccagaaacccatggccggaccgttccagagatgccccacttgcaacggcacagggcgtgtctcgtgtatttgttcccgctggtcggatggcgatgtcggttgtcggacttgctcggggtcgggtcgcagggcttgtagcagttgcggcggatcaggtacgggccgacccattccggtccaactcattgtgcgtcaaccaaccaatcgaagcttctaattatcgagattttgctgtccttgaatcacgacagtcgtaagaactctt

SEQ ID NO: 38510 - DNA, 388 bp, Gossypium hirsutum
  Clone ID: LIB3165-032-P1-K1-E6
cccacgcgtccgcttctattcagttttgtaagagctatggctaaggacattgaggttggtggtgagttccaggccaaggactaccatgatcctccacccgctccattggtcgacgctcaggagttagccaagtggtctttttacagggctgtcatagctgagttcattgccactctcctctttctctacatcactgtcttgactgtgatcggttacaagacccagaccgaccctgctaagggcggtgaagattgtggcggcgttggcattctcggcattgcttgggcttttggtggcatgatctttatccttgtttactgcactgccggtatctctgggggacacatcaacccagcagtaacctttggacttttcttggctaggaagg

SEQ ID NO: 38511 - DNA, 388 bp, Gossypium hirsutum
  Clone ID: LIB3165-032-P1-K1-E9
ccaaaataagaagaaaaacaaaaatggccatggcaatggcgcttcgacgactctgctcttccattgacaagcctctccgtcctttcttcaatgccccttccctctattacatgtcgtctttgccaaatgaagctgtgtacgagaaggagaaacctggcgtcacttggccaaagcaactgaatgctccacttgaaaccgttgatcctgaaattgctgacatcatcgagcttgaaaaagcgcgccaatggaagggacttgaactcattccatcggagaacttcacttcggtgtcagtgatgcaagcagttgggtctatcatgaccaacaagtacagtgaagggtatcccggtgctagatactatggagggaatgagtacatcgacatggc

SEQ ID NO: 38512 - DNA, 177 bp, Gossypium hirsutum
  Clone ID: LIB3165-032-P1-K1-F1
ctcaaaaaataatttctccacgctttttttcttcaacttctactccctctatagtggggtctacctgtatactcgcgactcccattaattttactcccactgttttcatcttaaacatcacctttcccaccattgctgatgatatcttcctgctcttatacattttctaagtggtat

SEQ ID NO: 38513 - DNA, 391 bp, Gossypium hirsutum
  Clone ID: LIB3165-032-P1-K1-F10
ccacgcgttcggaaaaaatctctttctttttttttattccttcctttttggttgcatccaatcgaccaaattcagagcttacaaaagaaaaatggccggaatcggacctttaactcaagactgggagcccgtcgttattcggaaaaagcccccaaacgctgccaccaagaaggatgagaaagtcgttaacgccgcccgtcgagccggtgccgagatcgaatccgtcaagaaatcgaatgctgggacgaacaaggcagcatcgagtagcactactttgaatacaaggaaacttgatgaggaaactgaaaatcttgctcatgaacgagtgccaactgaactgaagaaagccatcatgcatgctcgaatggagaagaaactcacccagtctcaa

SEQ ID NO: 38514 - DNA, 389 bp, Gossypium hirsutum
  Clone ID: LIB3165-032-P1-K1-F11
gtgagactcttttgtatacctgtatcatatagtaatagtaagcagtaatagcgggggcctcctccatgatctcatcggcaaccattgccaccgtgaaccgctcctccccggcacaggccaacatggtggcccccttcaccggcctcaaatctgcctctgctttcccagtcaccaggaaggccaacaacgacatcacttctcttgcaagcaacggtgggagagtgcaatgcatgcaggtgtggccgcctcttgggaagaagaagttcgagactctctcatacctgcccgatcttactcccgtacagttggctaaggaagtagattaccttcttcgctctaaatggattccttgcttggaattcgaattagaggagggattcgtgcaccgt

SEQ ID NO: 38515 - DNA, 385 bp, Gossypium hirsutum
  Clone ID: LIB3165-032-P1-K1-F12
tgctgccatgtgtctgtaccaggattctcttctcccacttgggtttttccatacagttaagaccctccctcctcacttcaatgtgctgtgctaatacactcctagttagtttgagcttttgagagctaaagtgtaagagatgttgaaagaagagattagtgatgctggtggtggaaacgattgggcgcgtgtctgcgacacatgccgctccgcagcttgcaccgtgtactgtcgagccgactcggcgtacctctgtgctggatgtgatgcccgagtgcatgctgcgaaccgggtcgcctcgcgccatgaacgcgtatgggtgtgcgaggtatgtgagcgtgcccctgctgccctgttgtgcaaggcagacgctgcatccttatgc

SEQ ID NO: 38516 - DNA, 393 bp, Gossypium hirsutum
  Clone ID: LIB3165-032-P1-K1-F2
tttcagaagaagaaggtggtagaatataacctctcaaagagtgagacacagacagaaaaagcatcgaaatgagttacgagggaggtcctcaagatcattatcctcctcccggatattcctctccttatcccccaccgggctatccatcagcccctcctcccccatcttacgaaggctatcctcctccgccaactggatatcctgcctatcctcctccgccgcctcgccagccctacgacggttaccaaggctattttgctgaagggtatccacctcctccgccccctcaacctcatcctcaatatcaacactaccaccactatgacccttaccattaccagaaccagtctgattctggctgtttctctttcttgcaaggctgtttggctgctc

SEQ ID NO: 38517 - DNA, 404 bp, Gossypium hirsutum
  Clone ID: LIB3165-032-P1-K1-F3
ccacccgtccggttccaagtttgttgtaaaccaagttttaaccagcagccaacatggcctcattagcagcctccaccgctgccgcctcccttggcgtctctgaaatgcttggtaaccctctgaatttcagtggtggagctaggtcatcggctccaacaccatccaactcatccactttcaagaccgttgctcttttctccaagaagaaggccgctcctccaaagcccaaggctgctgctgtcgccccggccgatgaagagctggctaagtggtacggtccggacagaaggattttcttgcctgaaggtctgttagacagatcggagatcccagagtacttgaacggagaagttcccggagactatggatacgatccgtttggtctgagcaagaagccagaagac

SEQ ID NO: 38518 - DNA, 247 bp, Gossypium hirsutum
  Clone ID: LIB3165-032-P1-K1-F4
gtttgaactcacttaaagggacagtattgtggcgctggctaggttaatggatgcgttgatttccatttgggcaggaatttcttcaaaaggcaaacggaaaggctcttttcaccaccattaagttgaagggagctcttcatgcaccatgtatggtcatgagcgacgtttgtacaatgccatgcacacgtgaatacgcgcattgcattcattcctggcttcgtactggtaagatgaggcctactacagt

SEQ ID NO: 38519 - DNA, 339 bp, Gossypium hirsutum
  Clone ID: LIB3165-032-P1-K1-F5
cttaaacctcttccaacagtcccctactatacatatggagacgttatgggacccgtcgacgtcacccagatgggtaccgaaaaagaatgtattactcggagccgccattgacaaaccagttatggaccacaaacccatggcacaaccgttccccagatgccccacttgtaaccgcgcatggcgaggcttacgtatctgttgcctttggtcggatggcaaaaccggttgtcggacttgctcggaagatgttcacgactacggccgcaactgctgctattaacgtaccgacacgcacattcccatgcaacagattgcgcactaatccaccaatcccaggtt

SEQ ID NO: 38520 - DNA, 393 bp, Gossypium hirsutum
  Clone ID: LIB3165-032-P1-K1-F6
gaaggttcagagattttagagagaacaaacaacaatggctgctacatctggggctgtgctaaatggattaggctcttcatttctttgtgggggaaagaggagccaagcccttttgggtgctagcattggggccaaaggctcgccctcccctgctgctggaactagaaagttgatcgttgtggcagccgccgcacctaaaaagtcttggatccctgctgttaaaggtggtggcaacttcattgacccagagtggctcgatggatcgctccctggagactacggatttgacccactaggtcttggaaaagacccagcattcctcaaatggtaccgagaagctgagctgatccatggacgttgggccatggctgctgtcgtcggcatcttcgtcgg

SEQ ID NO: 38521 - DNA, 376 bp, Gossypium hirsutum
  Clone ID: LIB3165-032-P1-K1-F7
ggaattccaaagctgaacatatgtgttaaaggcttcaattcaaagcaattgaggcggaattttcaggtttagattgaggaaaactaaaagaaccaaaaggaaattaacggatcagtagtaaatcgattgatctggctgcaaatttcaattctaaaactgaaaaattaggggttcttttttctcttcggatttctatgatttcgtttttgattccatgttataaaagaaaatgaacgatcaggctcagatgatgaatcagccaccggatatgttgatgcacacggttcaggcccatgtgccaggtcaacaacacatgattaatcaatttgatcagttgatgtcatctgatgcatactcttaggtgaataattaattg

SEQ ID NO: 38522 - DNA, 361 bp, Gossypium hirsutum
  Clone ID: LIB3165-032-P1-K1-F8
tttacaagttgctgcaggtttaaagtttaaacataggaaacaaatgattggcttgtttaacactagaacctgtttctgtataaaatttgttgataaaataatttgttaggttacttttttattttaacaaacgttaactaagaacattgatttttaagggggtgagaaatgagaagaatatgggtaggtgtaatagtttccttttgttctagatgattgtagttgtaagacaggtagacattgtatgaatgtagagcagtgttcaggtctaatttcatattgtacttttcttgtcaatatatgggtaggtgtaatagtttccttttgtttctgtttttattgaattttagtattggattct

SEQ ID NO: 38523 - DNA, 381 bp, Gossypium hirsutum
  Clone ID: LIB3165-032-P1-K1-F9
gcaaaaggcaaaaaagccatgtcaaagctggtggtgttgcagccaacaaagcagggtcccatctccctcctctcttcctctctttcccacttcaatggcaccaagctctgccaaatccagtacaaaagaaaggtatatcagccaaaaggtgcattgcatgttgcagcatccagcaccaagaagattctcataatgggtggcactaggttcattggtgtgtttttatcaagactccttgtaaaagagggtcatcaggttactttgtttactagaggtaaagcaccagttactcaacaattgcctggtgaatcagacagtgactacgctgagtttaaatccaagattttgcatttgaaaggagatagaatggacttcgatttt

SEQ ID NO: 38524 - DNA, 386 bp, Gossypium hirsutum
  Clone ID: LIB3165-032-P1-K1-G10
gaaaagagtggtggagcaacatggttagtaaaccaggcattctcagtgattggcgatggaagtcaatggggaacttcaagtatgcgcttgtggttccgggggcaatttacagcacctactcgttcataatgtgcaaagatgaaaacgagaggaactggttcatgtttttggtcttaccatttctggtgtttagattgattcactatcaactatggatttcatactctcgctatcgcactgccaaagggaacaaccggatacttgacaagagcatcgacttcgaccaagttgaccgagagagaagctgggacgatcagataatactgaacggaatattgttctacggggcggggatagtgttaaaagatcaatttaacatgcctttc

SEQ ID NO: 38525 - DNA, 389 bp, Gossypium hirsutum
  Clone ID: LIB3165-032-P1-K1-G11
ctttctcggcccattttcctgttaccagtaaaactgaagctaaaagggttgattgattgattctcttaaacttcaattcaatccaccaacatatatagataaactccataattattccatcaaaaggatcgaacatcaagagcattaatatgttggataaaactgctactgtttctgcacttccattctcctctgatcttctcagtctcactcctcttgataatggcaaaagaaaaagaaagccacccggtaccccagatccagaagcagaagtggtttctttatctccgcaaacattgcttgaatcggacaggtatgtatgtgagatctgcaaccaagggtttcaacgagaccagaaccttcaaatgcataagagaaggcacaaagtg

SEQ ID NO: 38526 - DNA, 248 bp, Gossypium hirsutum
  Clone ID: LIB3165-032-P1-K1-G12
gtggatgctgacggcaacgttagattgttctgagacgtcatcggggccctgggggggagctatatcttctgtttaacagcctccccaccctgtaaacggctcatgctgcggtagggtccactggccggaagagcaccgcacgtgctgtggtgatcgatgcgccacccccagcccttgaaatttctgaggaccgagtgccttccgagcccgggcgtactcataaccgcatcacgtctacaaggtgaaca

SEQ ID NO: 38527 - DNA, 385 bp, Gossypium hirsutum
  Clone ID: LIB3165-032-P1-K1-G2
gacggaccttttttcgccgaggtcgacatgggtggcgatgcctccgtccccaccgtgcgagctaccgtggtccaagcttctaccattttctatgacacccccgctactttagacaaagcggagaggttgttggctgaagccgccggatatgggtctcagctagtggtgttccctgaagcgtttatcggcggatatccacgcggctccaacttcggcgttaccattgggaaccgcactgctaaagggaaggaagagttccggaaatatcacgctccagccattgatgttcctggtcctgaaatcgagcgtttggcggccatggctggaaagtataaggtttacttggtgatgggtgtgatagagagagatggatacactctatatt

SEQ ID NO: 38528 - DNA, 346 bp, Gossypium hirsutum
  Clone ID: LIB3165-032-P1-K1-G3
gtgaaacaaatcttagtagttcgaaacaccctatatagctctaactatcaaacggggactgctatcaaagatggaccctgtcttatgttccatgcactatctctcactttcaaccaatctgctgatatccacactatctacactccttttgtcccgcatcaatcctactgactgcatatgctttaattcatagcagttaatgcaccgaaaggaatccaagtcgatgctcgccaatatggtcataacttgactgatttgctccaaacttattgacactattgtttctcctgctgtggctgactttgtgacagcttcgattctatgtgactagacgagaatctactca

SEQ ID NO: 38529 - DNA, 246 bp, Gossypium hirsutum
  Clone ID: LIB3165-032-P1-K1-G4
ggaaaacccggtggaccacccgtccgctttaaataggtaggacggcaccatttttcctatatctccctttataaccaaccggggatttactaaatatggtgcctaccattactgctcaaggtaatacactcccatgcaaacaacctgcttctatccattcttaagcactcctttcgccttctatccatcctacttattgccctcaccacaattcttatcatatttgcaatcctacggcatcccaaa

SEQ ID NO: 38530 - DNA, 338 bp, Gossypium hirsutum
  Clone ID: LIB3165-032-P1-K1-G5
ctcaaacttccgaccacgcgtccgttaataagcaaaaccatggcctatgcttctgtggcaagacttcaccagttgtagacaagtctgagtgggttaagggtcacacccttcgccaaccttccacttctgaggtgaggtgccaccctgttgcaccctccggactaactgtgcgtgcaagctcatatgccgatgagcttgtcaagactgctaaagctattgcttctcctggccgtggaatataggacatggatgagtccaaccctacctagtggaaacgtttgacctcaagcgggctagaaaacacggacgctcaccgccaagcctacaggacgttgatt

SEQ ID NO: 38531 - DNA, 419 bp, Gossypium hirsutum
  unsure (1)..(419): unsure at all n locations; Clone ID: LIB3165-032-P1-K1-G6
ccgggaaggaangggtcgaccacgcgtccggagaaagcactgaaaaagcaaaaccattgcctctgcttctctcctcaagacttcaccagttttagacaagtctgagtgggttaagggtcacacccttcgccaaccttccacttctgtggtgaggtgccaccctgttgcaccctccggactaactgtgcgtgcaagctcatatgccgatgagcttgtcaagactgctaaagctattgcttctcctggccgtggaattttggccatggatgagtccaacgctacctgtgggaaacgtttggcctcaatcgggctagaaaacacggaggctaaccgccaagcctacaggacgttgcttgcttcagctcctggccttggtcagtacatctcatgtgccatactttttggggcaaccctttatc

SEQ ID NO: 38532 - DNA, 341 bp, Gossypium hirsutum
  Clone ID: LIB3165-032-P1-K1-G7
cccacgcgtccgcccacgcgtccgtccacgcgtccgcggcacttgcacatgggtgagtcgatcctaagagacgggggaagcccgtccgacagcgcgtccagcgcgagcttcgaaagggaatcgggttaaaattcctgaaccgggacgcggcggctgacggcaacgttagggagtccggagacgtcggcgggggcctcgggaagagttatcttttctgtttaacggcctgcccaccctggaaacggctcagccggaggtagggtccagcggtcggaagagcaccgcacgtcgcgtggtgtccggtgcgccccccgcggcccttgaaaatccagaggaccgag

SEQ ID NO: 38533 - DNA, 390 bp, Gossypium hirsutum
  Clone ID: LIB3165-032-P1-K1-G9
cccacgcgtccgcagttaacaatttcacagttgttttcttcagtctctctctcaggcatggctgcagccatctccaccgtcgctgccgctgccgccgccaaccgagctctgggagtgtcagtcccaacctcagctttcatggggaagaaagtgagctcaagattcaacagcaccaggcaggttccttcgggaagttttaaggtgatggcggcggagaaagagatagacgaagagacacagaccgaaaaggaccgatggaaagggttggcttacgatatttcggacgaccaacaggacattactcgagggaaagggatggtggattccttgttccaagctcccatgaatgatggaactcactatgctgtcatgagttcctatgaatacctc

SEQ ID NO: 38534 - DNA, 398 bp, Gossypium hirsutum
  Clone ID: LIB3165-032-P1-K1-H1
cacgcgtccgtcaatttctacctccaaatgctttttcacttaaacttgtaatttaatataatgggtataaatatatactcgtgacttgttttaatatggatcccatttttttaatataaaaccttttttttttaaatatttttcattgccaatcagtcccttattaataagtagagtatttgcataactggtttaattcccttcatgcactgtgctccatagtcttggaacccaaggacagaagactcttttagcatttcaccgcaaagatggagataacaaatgtgagcgagtatcaagaaattgctaagcaaaagttgccaaagatggtgtatgactactacgcatctggtgctgaggaccaatggacattgcatgagaatagatttgctttcacc

SEQ ID NO: 38535 - DNA, 384 bp, Gossypium hirsutum
  Clone ID: LIB3165-032-P1-K1-H10
cccacgcgttcgcccacgcgttcgtagatcattaaagaagaagaagaagaagaagcactatctttctatttgtgtggtccttttgattttaaactttcttttttattcatcctttttgggtttctttttggctttccatttttcttatttccggtgaagctaataccgccggaatctgaaaatgtcggtgtacgacgcggcgtttgttaactcggagctatcgaaaccaacttcggttttcgggttaaagctatgggtagtgatcggaatccttttcggtactttcatagttttatctctgttccttctctccctttgtctgacagcccgccgcaaatctcggagacaccgacagcttgaccccgcgccgccaatctgcaaaga

SEQ ID NO: 38536 - DNA, 228 bp, Gossypium hirsutum
  Clone ID: LIB3165-032-P1-K1-H11
gttaaccaaacactccacaaaatttttgaaaaaaaaaaaaaatgaggaagtgtgaactatgtggaaggctctcagcactgaataatcaagcaaatttattgggactgtgatttcaaggtatggccaatttctgactagcataatcgaaccctctttgcatgtttgcaaacctactcttgctcgattggcgaatctggtcgggtttgttggattatgcgtgaaacgaca

SEQ ID NO: 38537 - DNA, 316 bp, Gossypium hirsutum
  Clone ID: LIB3165-032-P1-K1-H12
gtgcaatgcatgcacgtgagactactttactgggaagaaaaaaaaaaaatcaggggggataaactatgtggaaggctccctccaatgcacttaaaatcatatcaaacaaatttatgttgaaactgtgatttcaaggttcatggaaccaatttcctcgtatctaagcataatcgaaccctcctttgccatgtttgtcaaagtcctactccttggctcgcatttattcaaaatcacgtctccgcggttaataattgtgattcatgcgttgtaaacggcaacaataagtgtgagtcatctaatagagagtatggttaat

SEQ ID NO: 38538 - DNA, 392 bp, Gossypium hirsutum
  Clone ID: LIB3165-032-P1-K1-H2
ttttgagattagatccaaaattcccttttcatcatatttccgattccccaatttggggtgaaaccctaatcctaatcccggattcttctcgtctacatcgtctagcaaatggcaaccgaggagccggcagtcgtggcagaccccgcaccggagacggaggaggacaagactgctgagaccaaagctacttcaaaatctggcagagcaaataaaaccaaagaacccaaaaccaagaaagctgcagctcctcggaaaccacgggctgctcctactcatccaccttacgaagagatgatcaaagatgcgatcgttactttgaaagagaggacaggttcaagtcagtacgccattgctaagttcattgaagagaaacagaagaatcttcctgggaa

SEQ ID NO: 38539 - DNA, 391 bp, Gossypium hirsutum
  Clone ID: LIB3165-032-P1-K1-H3
cccacgcgtccgaaacattaaacgcataactcgaaaatctatcaccatgcggcaggggaaaaaggagtacaagcagccattcaagttcacccgagttcgagttctggatggtccgaaacccgccttttcccgaacccgacctcatctctgccgatgaactattcgttaatggcgttctccgtcctctccatctcttacccaacaaacaacccgaagagaacccacaaatagactcaaatcaacccgcatcacaacctcctatacccgaccctgaccctattataacatcggatccggttcctgtattgtcagcttcgaaacggtggagagatatctttaagaaagaaaaaggaaaaaacggtaaacaaagtaaaaaagacaaggataaaga

SEQ ID NO: 38540 - DNA, 388 bp, Gossypium hirsutum
  Clone ID: LIB3165-032-P1-K1-H4
cccacgcgtccgcccacgcgtccgaaaatttccccccaaaattctcccaatcttggtgagttttcttggcaatagatggtcagccccagtgatgaaaacaggatttcacatcaactgtaactaaggaattcgattttagtttcagccatgtgttatagcaaagccccaaaaatgaacaacagtgatgtaatgagtgatattttactgaggctaccattgaaggatttggtaggatgcaaatgtgtctgcaaatggtggaatactctcatctcggaccccattttcaagttgaattattcgctgcgaaaccctcagtacaatatctcagggttcttcctacagaaattcttgtaccttgagctgcattcgaaattgttgttctttcctt

SEQ ID NO: 38541 - DNA, 250 bp, Gossypium hirsutum
  Clone ID: LIB3165-032-P1-K1-H5
aaaaaaaaactaaaatgggtgggtttttttgttaataatgcttacccccaatcatcaaaacagaattttacatcaactgtaactaaggaatttcattttagtttcagccaccttttttctcaaatccccaaatatgaacaacattgatgtaattattgatatattacttacgctaccatttaaatatcttttatgattcaaatttttctgcataatgtgtaatactctcattttcaaccccattttcaag

SEQ ID NO: 38542 - DNA, 394 bp, Gossypium hirsutum
  Clone ID: LIB3165-032-P1-K1-H6
ctttttgcctcttagctagctcattatctttttcatacaaagtaaccgaatttggggtcttattcgtgataacgactacttccatggattaaattgcatttgttttaacttctttctcttcacctggttaaaaatcttttcaaaaatgcaaaacccttctacggttacccaagaatctggccctgctgccttcgatctcgtcacacaattgggtcacttagcattcaacaagagctttcgcagctcaaacactgatgggttttgttcatttaagccaaatcacgtgtatttttcaggcttcagagactcaatttctcagaaaaagcgcagagttgctgctgctgcttcactcagtttgggtgctcgaaacagcgtttcttcgagcgttaggagg

SEQ ID NO: 38543 - DNA, 387 bp, Gossypium hirsutum
  Clone ID: LIB3165-032-P1-K1-H7
gcagcttcctctacgatcataatggtgtcggttactgcttctgtagccaaaccggcccttcaggcaaatgcaaagggttttgcggaattctcaggtctgcgcaactcagctagccttacctttgccaggaaaacctcggatgactttcaatcagtcattgcttttcagacttctgctttgggaatcaataatggtggataccggaaaggcgtggtagaggcaaagctaaaggtcgctattaatgggtttggtaggattggcaggaactttttaaggtgctggcacggtcgtaaggacttcccacttgatgtcattgcaatcaatgacactggtggcgttaagcaggctactcaccttgtgaagtatgactatacccttgggatattt

SEQ ID NO: 38544 - DNA, 386 bp, Gossypium hirsutum
  Clone ID: LIB3165-032-P1-K1-H8
aacaaaatcaactgcttcacaatggtctctacaaccatggctctttcttccccatgcattcgccggtaaggcagtgaagttctccccttccacccctgaaatccagggaactggccgtgtttccatgaggaaaaccaccaagcctgttccttctggtagcccatggtacggtcctgaccgagttttgtacttgggtccactttccggtgagccaccatcttacttgaccggtgagttccctggtgactatggttgggacactgctggactctcagctgatcccgagacctttgctaggaaccgtgagctcgaagtcattcactgcagatgggccatgttgggagctcttgggtgtgttttccctgagctgttggctaggaacggtg

SEQ ID NO: 38545 - DNA, 390 bp, Gossypium hirsutum
  Clone ID: LIB3165-032-P1-K1-H9
accaccaccatcatcaagctaacatgtctagcattagtcccagttcccggaatggtaatccgtcgaagcccgttagcgtccgccgggtttccaacaatatgcctggtttaggacatgaagaagaagatgtcatgttgttgcatgacaagtcttatagttgcagtaacgggggtgttctacaagggtcagctttggttcctagagggcattgcagtgatggaaatgacaaggattcgggacgtgaaaggcttaaaagacaccgagaagaggttgcaggacgagttttggtaccagataaatggggtaaagaagagttgcttaaagactggatggattattcatcgtttgattcattgttagctcccactggacttgcttcagctcgtaaag

SEQ ID NO: 38546 - DNA, 302 bp, Gossypium hirsutum
  Clone ID: LIB3165-033-P1-K1-A1
cccacgcgtccgattcgctgagctcaaggtgaaagagatcaagaacggtaggttggctatgttctcaatgttcgggttcttcgttcaggccatcgtgaccggaaagggaccattggagaacttggctgaccaccttgctgacccagtcaacaacaatgcttgggcctatgccaccaactttgtccccggaaagtgaacttagagagtgagaagggatttgtcttgtttatgtttttatttgctggtgtgaatttaaatttgttgcacaatcaatgaaagtataatgtgaattttgtgtgctc

SEQ ID NO: 38547 - DNA, 335 bp, Gossypium hirsutum
  Clone ID: LIB3165-033-P1-K1-A10
ttccacttttcctcctacactcattctaaatcaaccagttttcgcagcacctacggctttgctcactccttccaattggaaagaaaccatgggagacgagtcatacgaggaagccattgaagctctcaagaaactgctcaatgagaaaggagaattgaagagtgcagcgacggcaaaggtagagcaagtgacagctgagttgaagactgctgcttcctccgatgagtctgttgaccgcttgaaacaaggcttcatttacttcaagactgaaaaatacgaaaagaatcctgctctgtatggtgagcttgccaagggtcaaagcccaacgtatatga

SEQ ID NO: 38548 - DNA, 356 bp, Gossypium hirsutum
  Clone ID: LIB3165-033-P1-K1-A12
caaatatgggttccatttccaagagtttccttctccttgctcttctagctgctggtgttcttctcatttcttcggaagtggcagctcgagatcttgctgaaactaccactgaaaacaacaatggtgaggtgcgctaccgaaacaacccagcctgagctagaagataaacgctcagcttataatggaagaggacacggaggtaaaggagggtatggaggtgggcacggagggtatggaggcgaccactgagggtatggcggcggacacagcgggtctgcgggtgccgcccgacggactgactgggaacggctcccttgggggccttacccgggcgacgaacagtcgacttagaactg

SEQ ID NO: 38549 - DNA, 371 bp, Gossypium hirsutum
  unsure (1)..(371): unsure at all n locations; Clone ID: LIB3165-033-P1-K1-A2
ggagttgggtacaaggtactggctggcgggcacaagttgtangaaggtattcgcgagacaactctcgaggcggaggggaaaaatacgacggtacctttattcggcttagtttggcttttatggaacgctttaacaatttatcgggctggttgtagcatntggcaccttcttatttgcgaatccctttgtttaaatcctataaacatgagnaattttgtatttttttttcttattttatggcttgggacttactcctcgctttttcgaattctatcaagatttcacccctacaattaattattcgttgggacaataatccatgggaaggattaatttgaggatgaggaattatcacaccgactcgctttctt

SEQ ID NO: 38550 - DNA, 308 bp, Gossypium hirsutum
  Clone ID: LIB3165-033-P1-K1-A3
gatggtttctacatcgttcctgcatttattgacaagcttgttgttcacatcagcaggagctttatgaccctccctaacattaaggatccattaatactgggtatttagagaggcaaaggtcaaggaaaatctttccaccgtgagcttgtgttagccaagaaggggattaaccccatcatgatgagtgccagggaactggaaagtgcaaacgccggtgaaccagacaagttgttcaggacaaggctccttgaagacacccacatcctcaaaaatgacaaactgagcgccatgttcaataatgatcttga

SEQ ID NO: 38551 - DNA, 327 bp, Gossypium hirsutum
  Clone ID: LIB3165-033-P1-K1-A4
ggggcccacacccttccgcccacccttcgcgaggatgtggaatttttatggtttccttttttcttatcaccagggaaagaaataagggatgtggaagctggaaagaccgttggactcgctgcatacgaagctttcatctatgctagcacgacacggttctatgcgtaacgttttctacaatcaacgatcttgcaagtcatctcaaagccgctggtgtcttttttcctgccagcacctatggaatggcaggcaaccgcttggtgccaccacaggggattatttctggtgctgttgagataaagggagcgggtatcgtatcaatagtta

SEQ ID NO: 38552 - DNA, 404 bp, Gossypium hirsutum
  Clone ID: LIB3165-033-P1-K1-A5
cggggcggaccaacgcgtccggttttctgttctgtttttcagggacaagtttcaatggcaaaaccagtttcaattgaagtgtggaacccaaatgggaaatacagagttattagcaccaaacctatgcctggaactcgatggatcaacctcttaatcgagcaagattgccgtgtcgaaatatgtactgagaagaaaacaattttgtccgttgaggatatcatttctttgattggcaataagtgcgatggggtgattggacagttgactgaagactggggggagactttatttgcagctttaagcagagcaggaggcaaagcatttagtaacatggctgttggttacaacaatgttgatgttaatgctgccaacaagtatggcgttgctgatgaatacactcctgg

SEQ ID NO: 38553 - DNA, 398 bp, Gossypium hirsutum
  Clone ID: LIB3165-033-P1-K1-A6
caacccgtccgaaaaataaactgtttaacaagggcctttacaaccatggctctttcttccccatcattcgccggtaaggcagtgaagttctccccttccacccctgaaatccagggaactggccgtgtttccatgaggaaaaccaccaagcctgttccttctggtagcccatggtacggtcctgaccgagttttgtacttgggtccactttccggtgagccaccatcttacttgaccggtgagttccctggtgactatggttgggacactgctggactctcagctgatcccgagacctttgctaggaaccgtgagctcgaagtcattcactgcagatgggccatgttgggagctcttgggtgtgttttccctgagctgttggctaggaacggtgtcaa

SEQ ID NO: 38554 - DNA, 387 bp, Gossypium hirsutum
  Clone ID: LIB3165-033-P1-K1-A8
cccacgcgtccggagagatcgactaaaccgagagctgtagccatctttgtcgtcggattttggatcctcgacgtggctaacaacatgttgcaaggtccgtgtcgagctctcctcgcggacctctcggctaatgaccacaaaaagatgagaaccgcaaacgggtggttctcgtttttcatggcggtcggcaacgtgttgggttacgccgccggttcttactcccacctttacaagatcttccctttcaccaaaaccacagcctgcgacatttactgtgcaaatctcaaatcatgcttcaccatagatatcatgatcctcttgttagtaacagtaaccgcggtcacaaccgtgaaggaagatcccttcaccaagcaaatccaagatgat

SEQ ID NO: 38555 - DNA, 377 bp, Gossypium hirsutum
  Clone ID: LIB3165-033-P1-K1-A9
cccacgcgtccgcccacgcgtccgaaaaaacactctggttgtggagatggcacaggcaatggcatcaatggctggtttacgtggctcttcacaggctgtcctggacggcagccttcaactcagtggccaaacccgcttcaacattcctagcaacaaccgagtggctgtgggtaggtctggtttcactgtcagagctcatcagacaccggccgagcctgagactggacgcagagccatgttgggtcttgttgctgctggtttggccactggctcctttgttcaagctgtgcttgccgatgccagaagcatcaaggttggcccacctccccctccctctggtggactgcctggaactctgaactctgatgagccaagag

SEQ ID NO: 38556 - DNA, 388 bp, Gossypium hirsutum
  Clone ID: LIB3165-033-P1-K1-B1
cccacgcgtccgcccacgcgttcgtccacgcgtccgaacacacaggaaacccaaagtctttctcctttttttccccctctttttttatacacaaaggtaataattttcgaaaatggcgtttgctgttacctcttccccggctgcaatttctggttccagcttttctcgttcaagtgcctcctctgacctcaaaattccgcaaattggttcatttcggctagcggatcgccatgcaacggtgaatctatctcaaaagcgttgcgcagtgaagcccgtgaatgcggagccaaagaggaacgattccatgctttctcatgctgcaaccacctctgctcctgaagtgtcggaaaaagttgaggtggaggattttgagcaattggccaaagaa

SEQ ID NO: 38557 - DNA, 264 bp, Gossypium hirsutum
  Clone ID: LIB3165-033-P1-K1-B12
ggaactgggacagacgcatgcaactatagtctgcggaagatagacacatcagtggcggggatccttggagttgcatattccaacagatcagtggccagtgactttattggatctaacatttacagattcttgtccacttatgctgggtcccgttatacaatattggatcatgcgtatgatgcacttgtggttgatgctggtcgcgcgtggatggaagcacccgatggtcactgagagcgtgtattatatactgatcgcataact

SEQ ID NO: 38558 - DNA, 356 bp, Gossypium hirsutum
  Clone ID: LIB3165-033-P1-K1-B2
acacagcaaacccacggcgtttcttttttttttcccctccctccccatacacacaaatattaatggcttaaagttcacaccctttattacctccttccactttttgcaatcacttcgtcacatttttgcacccttctaaactaactgtgcgtgcaagctcattattatatcttttatttaaacttgcttaaactatttctattcctgaacctataattaatagctcatgcataatttacaaccttacctgtgggaaacgtttggcctcaatccggctagaaaacacagaggctaacctccaagcctacaagacgttgcttgtttcagctcctggccttggtcagtacatctctggt

SEQ ID NO: 38559 - DNA, 390 bp, Gossypium hirsutum
  Clone ID: LIB3165-033-P1-K1-B3
gcgtttttaataacagagcaaccatgagctccatcattcaaagctttcaaaagaacagctccctccccgtctcccaaactgaatcaaaagaccactttccaccaccagctggcccagggcggctgcgaagaaggctttcatctctgtctctaaaactacaacccacttcttcaccggcgacgtcatggacattccccagatccaagtccttgtcttccatgggagaatatgccggtagctccatcaggaaatggtgggactggggttggtcttgggttctctccaaaaagccctcgttcgctaaagacattgaaatgaacgaagaagaaaccaggatccttgggtgccacaacaaaggcagttggaggcatgtgttttacaaagtcagat

SEQ ID NO: 38560 - DNA, 136 bp, Gossypium hirsutum
  Clone ID: LIB3165-033-P1-K1-B4
cttccggaaaggggtggcttaccatttttctggccacccaccaggccattcttcaggggaaggggttgggggtttccttgttccaggttccaatgaatgatggaactaactatgctgtaatgagttcctatgaata

SEQ ID NO: 38561 - DNA, 387 bp, Gossypium hirsutum
  Clone ID: LIB3165-033-P1-K1-B5
cccacgcgtccgcttttgcaatcctttgtagagctccgggatccattgtcaccatgtcttgctcaaatctgacaatgtgggtgtcctcaaaaccctctctttctgacacttcttcactctctttccgttctttcatcagcccttttcagctcccatctcagagctcaacccccggtaacccttccaggtcctcatctgtaaccccagttcactgtggtcttcgtgagcttagagaccgtattgattcagtaaagaacacgcagaagatcactgaagccatgaaacttgtggctgctgctaaagttaggagagcacaagaagctgttgtcaatggcagacctttctctgagtccctggttgaagttctttacaacatcaatgaacagc

SEQ ID NO: 38562 - DNA, 391 bp, Gossypium hirsutum
  Clone ID: LIB3165-033-P1-K1-B6
cttccccaaatcagcaccgatcggaaatggcttcaattgctggaatctggttaaccaaaaacctaattttctcttctccgcaaaccctaacaaaaccccttcaaatcccacaattcttatccctaaatcaacgcatacggttcccttctggaagaacccaccagaaaacagccgtaaaagcgtcgagctcgagcttcagcccaagcgcaccctccggctcgtcgtctaccggactgtactcttcaaagaaattcgagctcaccgctcaaaacgtggaccttgttcttgatgacgtgaggccttacttgattgccgatggcggaaacgtcgacgttttgtccgttgaagatggcatcatctcgcttaaactccaaggagcatgtgagagttg

SEQ ID NO: 38563 - DNA, 323 bp, Gossypium hirsutum
  Clone ID: LIB3165-033-P1-K1-B7
cccacgcgtccgatatgctacactactaccagtactgccatgtgctttcttttcttttgtttctcctccttttaagccttgattgaacattcaactactctacactttgaaacatgggggaagctccagaaatacaactgcaggtcccgtctgaggatgagaaattaaatgaagattcagttgagcagcaaacaaatggaaaccagtcaacaacaatcacgcaacaaagaacctacaaatggtggctactaatgacaatctatacattttttcttctttctggtcagtcagtggctacacttctgggaagattgtactatgac

SEQ ID NO: 38564 - DNA, 386 bp, Gossypium hirsutum
  Clone ID: LIB3165-033-P1-K1-B8
aaaaaagcttgagctgagagataagagaaagcactgaaaacgcaaaaccatggcctctgcttctctcctcaagacttcaccagttttagacaagtctgagtgggttaagggtcacacccttcgccaaccttccacttctgcggtgaggtgccaccctgttgcaccctctggactaactgtgcgtgcaagctcatatgccgatgagcttgtcaagactgctaaagctattgcttctcctggccgtggaattttggccatggatgagtccaacgctacctgtgggaaacgtttggcctcaatcgggctagaaaacacagaggctaaccgccaagcctacaggacgttgcttgtttcagctcctggccttggtcagtacatctctggtg

SEQ ID NO: 38565 - DNA, 387 bp, Gossypium hirsutum
  Clone ID: LIB3165-033-P1-K1-B9
ttcggaaataattctaaacatgtccggtggataccctcaacaccctcccggctacggttacggttccccaccagctcagccttacacagccgctccatacacagctggagcaccgccgccacctcaaccgtacggtactccatacgccgctgcaccatacggcgcaccttctgctccctactctgcccctccaggcgagaaaccaccaaaggacaagcaccaagcgcatggcgtcggtggtgctcctccagttcacagcggaagctatcctcccgcaggaggctatgcgagcccgttcgcatctctgttgccgtcggcatttccaccggggacagatcctaacgtcgttgcctgctttcaaatggctgatcaagatggaagtgggtt

SEQ ID NO: 38566 - DNA, 407 bp, Gossypium hirsutum
  Clone ID: LIB3165-033-P1-K1-C1
acccgggcggcccaacccgtccgtttttaaggaccgacggcatcccagttgaagacattgttaagctcgtcgacaccttccccggccaatccatcgatttcttcggtgccttgagggctcgggtttacgatgacgaagtgaggaaatggatcagtgatgtcggagttgcaggcgtagggaagaagttagtgaactcaagggacggacctccaacatttgagcaaccgaaaatgaccattgaaaagctattggaatatggaaacatgcttgttgctgagcaagagaatgttaagagagtccaattggctgacaaatacttgagtgaagctgcccttggtgaagctaatgaagattctatcaacagaggaactttctatggcaaagcagcacaacaagttggggttcca

SEQ ID NO: 38567 - DNA, 292 bp, Gossypium hirsutum
  Clone ID: LIB3165-033-P1-K1-C10
cccacgcgtccgacaaaatcagttgcttcacaatggcctctacaaccatggctctttcttccccatcattcgccggtaaggcagtgaagttctccccttccacccctgaaatccggggaactggccgtgtttccatgaggaaaaccaccaagcctgttccttctggtagcccatggtacggtcctgaccgagttttgtacttgggtccactttccggtgagccaccatcttacttgaccggtgagttccctggtgactatggttgggacactgctggactctcagctgatcc

SEQ ID NO: 38568 - DNA, 340 bp, Gossypium hirsutum
  Clone ID: LIB3165-033-P1-K1-C11
tttgtactttgttcggtttgttttggttttgtttcagagagaaatggctgggattgttgtgatttttgatttcgacaaaactattattgactgtgacagtgataactgggttcttgatgaattgggtttcaccgatttgttcaaccagcttcttcctaccatgccttggaatcctctcatggacaagatgatgaaggagcttcatgctcaaggaaaaaccattgatgacattgttgaggttctgaaacgagctcctatccattctaagatagtccctgccattaaagcagctcatgctttagggtgtgaactcagggtggttagtgatgcaaacatgttc

SEQ ID NO: 38569 - DNA, 388 bp, Gossypium hirsutum
  Clone ID: LIB3165-033-P1-K1-C12
gtttcattgaaggcgggactctcagactactctttcgaaccagctccaccatcacccccaaaaaacaaagcaaattgtagaagatggcaacacaagcacttgtatcatcgtctcttacctactcagtggagactgcaaggcagattcttggagctaaacgacaaattgggccttcaaggaaaggatcctttgttgttaaggcagcttcgactccacccgttaagcaaggagctgatagacctttatggtttgcatctaaacaaagcctttcatacttggatggcagccttccaggtgattatggatttgaccccttgggactctcagaccctgaaggtccaggagggttcatcgagcctaaatggctagcctacggtgagatcatcaa

SEQ ID NO: 38570 - DNA, 403 bp, Gossypium hirsutum
  Clone ID: LIB3165-033-P1-K1-C3
cttcacttaacaatggttcaaggttggtggtaacccaacctggaaccagcagccaacatggcctaattagcagcctccaccgttgccgcctcccttggcgtctctgaaatgctcggtaaccctctgaatttcagtggtggagctaggtcatcggctccaacaccatccaactcatccattttcaagaccgttgctcttttctccaagaagaaggccgctcctccaaagcccaaggctgctgctgtcgccccggccgatgaagagctggctaagtggtacggtccggacagaaggattttcttgcctgaaggtctgttagacagatcggagatcccagagtacttgaacggagaagttcccggagactatggatacgatccgtttggtctgagcaagaagccag

SEQ ID NO: 38571 - DNA, 217 bp, Gossypium hirsutum
  Clone ID: LIB3165-033-P1-K1-C4
atggcgggttgaagcttcccggaaaccccttttaccggttttttaacaacaattcggcataccatgatgtccaccatcagctttatggtaccaaatacaacttctctgtctactttgacatatgggacagaattctaggaacctatatgccttattcacttgagaagagacctgatggcggccttgaagtacgacgtgctgatcaagaacacaagaa

SEQ ID NO: 38572 - DNA, 387 bp, Gossypium hirsutum
  Clone ID: LIB3165-033-P1-K1-C5
cgagtttttataagcggttgatcctggcattccaaaatttgaattgtgtggctgaatgatctatggagactaagggagggaaaaagaagtctagtagtagtaagtcattattctacgaagctcctctcggttacagcattgaagacgttcgaccaaacggtggaatcaagaagttcagatctgctgcttactccaactgcgctcgcaaaccatcctgatattcgtaacgcaagtgcccccttctgaccactgttaaagtggtcaatttatttttatttgctttattacttagtattaatatctatcttcggccggcttcctccccctctctccttgcaactgttttctttgtatctacgatctcctcacttggcgtctgtctacttt

SEQ ID NO: 38573 - DNA, 390 bp, Gossypium hirsutum
  Clone ID: LIB3165-033-P1-K1-C6
gatttatttagctatagcatacactactagtacccactactagcaatggcttcctcaatgatctcatcggctaccattgccactgcctctccggcacaggctaacatggtcgctcctttcaccggcctcaagtctgcctctgctttcccagtcaccaggaaggccaacaacgacattacttctctcgcaagcaatggcggcagagtgcaatgcatgcaggtgtggcctcctactggaaagaagaagttcgagactctctcatacctccccgatcttacacccgtgcagttggctaaggaagtggattaccttcttcgctcaaaatgggttccttgcttggaattcgaattagaggagggattcgtgcaccgtaaatactcgagcctaccc

SEQ ID NO: 38574 - DNA, 375 bp, Gossypium hirsutum
  Clone ID: LIB3165-033-P1-K1-C7
cttacttacccaacatcagccgacttagatgctggccaaaaaaaccccagggcgaacaccacagcagaagctaccaataccaacaccatcaccggcagcttagaagacgaggatattcaggatgataaagagaaaggcatacgccatttgcttgaagcttctgatgatgagcttgggattcctaatagggaacatgggtttgatgttggagtttttgagtttgaacacggttgtgacaatggtggaaatgggctagctttatgtgataggacgcgggaatttgaagatgacgctgctgattattatactttgttgcagtctgaactttgcctggaattatgagctgagaatgggccttgtgtcaggatgattata

SEQ ID NO: 38575 - DNA, 392 bp, Gossypium hirsutum
  Clone ID: LIB3165-033-P1-K1-D1
tccgccaacgcgtccgaaaaagtagaggtaaagagaaacaacgaataaaaattcgtcttcttatccgaaaaccaacaaaagaaactgtgtcaatcacataaaaactgagaagccattcacacacacacacggagtaacgccatggctaccatactaggaccatcctccgccgcaatctcagcatcttgtgggtcactcatttacccttcctaaaagcttgtcatcccttctatctccattaacgccgggtcttgttattggaagaagttttatggagggattgggattcaaggaaagaagggaaagccgcaatttcatatcgcagttactaatgttgccactgaaattaactctgttcaacaggctcagaagcttggtgctaaagagagtca

SEQ ID NO: 38576 - DNA, 378 bp, Gossypium hirsutum
  Clone ID: LIB3165-033-P1-K1-D10
ctttagctctccttctctctctctttttgttctctcgcttaagcctgtggaagatggtggcgttagaaaggagcctagaagcagccatgaatgcgaggataatagggagtgggagtgagacgatggtgctagcacatgggtttggaggagaccaatctgtgtgggacaaagtcctcccttgcttgacaaagcattaccaggttgtcctttttgactggactttttcaggggctgtaaaagatcccaacctcttcgatcctttgaaatactcttcttatgatgcctttgctgatgacttgattgctcttttggatgagcttcacttggaatcctccctcgtctttgtcggtcactccatgtctggtatgatcggatgca

SEQ ID NO: 38577 - DNA, 355 bp, Gossypium hirsutum
  Clone ID: LIB3165-033-P1-K1-D11
tgcactcatgcctgaatatgatcctgtggcaaagatttctatcattcctcgtggtcaagctggtggccttaccttttttgctccaagtgaggagaggcttgaatctggtctctacagccgaagttacctacagaaccagatggcagttgcactcggtggaaggattgcggaagaagtaatttttggtgaggaaaatgtgacaacaggagcatcaaatgactttatgcaagtctcacgagtggcaaggcagatggttgaaagatttgggttcagcaaaaagattggacaagttgccattggtggacctggtggaaaacctttcttaggacaacagatgtcttctcaaaaagactac

SEQ ID NO: 38578 - DNA, 388 bp, Gossypium hirsutum
  Clone ID: LIB3165-033-P1-K1-D12
cccactcgtgcgtccacgcgatcgtactctatagaataactgtagcatatagggctagtaagcaggaatagcaatggcctcctccatgatctcatgggcaaccattgccaccgtgaactgctcctacccggcacaggccaacatggtggcccccttcaccggcctcaagtctgcctgtgctttcccagtcactaggaaggccaacaacgacatcacttgtcttgcaagcaatggtgcgagagtgcaatgcatgcaggtgtggactcctcttgagaagaagaagttcgagacactctcatacctgcccgatcttacacccgtacagttggctacggaagtagattaccttcttcgctctaaatggattccttgcttggaattcgaatta

SEQ ID NO: 38579 - DNA, 375 bp, Gossypium hirsutum
  Clone ID: LIB3165-033-P1-K1-D2
gcggtgggggccatggttgttggcggctgtggtagcgtaagttttgagcggtgcgagtctttaatgctctcgaatcctacatcttcaaaaccgagaacgtccaagatctttgcaacgacgccgacgccctcatctaagcccgttggcggtggcagtctccaatcattgcaaccagaacgatcatcgtcaaagaacaaacgcaaggggattccgtacgagaaaatggacggctggatgagagattcagtggctgagattgtaaaaaagttacccgaatcgccactcttgatccacgtctactctgaaaacgccacgatggaaacaacggcggtggaagaaaactgggtttcgatgaaacagaagtggcagaaaggg

SEQ ID NO: 38580 - DNA, 339 bp, Gossypium hirsutum
  Clone ID: LIB3165-033-P1-K1-D4
ccggggcggcccaacccgtccgaattcccccatggcattaattattttcatgggcttcgacaacgtgcgtcaagtgcagtgcattagtttcattgcctacaagcctccaggcttttaagtttttaataaacttggcctttcaattggttggaattggacctaaaaaaaccaaggtctttacacttggtttctctctctctgagagattgggctctgtgtctcgagatctgggggttaatcctttttggattttcattggaagaaaggctgtgaactaatgtataaaagttggttttcttcccaatttccttcctaacaaaaaaggtgttttttatgaac

SEQ ID NO: 38581 - DNA, 386 bp, Gossypium hirsutum
  Clone ID: LIB3165-033-P1-K1-D5
ttttccttccccatttctggctgctaaaaaaccctcaagaaaagtttagatatgggaggaaatggaaagcacagatggatattttcattttaccaacgttctaattcatcatcttctccaaagcaatccaaaaacctacctccacatgaattcctttgtccaatttctgggtctttgatgttcgaccctgttgtaatcccttcaggtcaatccttcgatcgaatctccatccaagtctgccgtgaccttggctttacccctactcttcaggacggctctacccctgacttttccaccatcatccctaacctcgccatcaaaaccaccatcctcgcttggtgtcgtgaccaccatgctcaggaccctgccccacctgattattcctt

SEQ ID NO: 38582 - DNA, 386 bp, Gossypium hirsutum
  Clone ID: LIB3165-033-P1-K1-D6
cccacgcgtccgcctacttaaaatttgtctttataatcacagtcgaagagtccttggagtttgtgaatgacccttattgcatacaggtaaagagtctgttatttacaaacatgtggctgtttggcagaaaagggccatctgggttttcgtcatcttccacagctgaggaagttacacaggggatcgatggcactggtctcactgccattgttacaggagcattcagtggtattggcactgaaaccgcacgtgttcttgctctgcgtggtgttcatgtaattatgggggtcaggaatgtggctgctggtagagatgttaaagaagcaattgtgaaggaaattccaacagctaaagttgatacaatggaattagatctcagatcaatt

SEQ ID NO: 38583 - DNA, 381 bp, Gossypium hirsutum
  Clone ID: LIB3165-033-P1-K1-D7
gttagctatagcatacactactagttcccactactagcaatggcttcctgagcgagctgatcggctaccattgccactgcctatacggcacaggctaacatggtcgctcctttcaccggcctgaagtctgcctctgctttcccagtcatcaggaaggccaacaacgacattacttctctcgcaagcaatggcggcagagtgcaatgcatgcaggtgtggcctcctactggaaagaagaagttcgagactctctcatacctccccgatcttacacccgtgcagttggctaaggaagtagattaccttcttcgctcaaaatgggttccttgcttggaattcgaattagaggagggattcgtgcaccggaaatactcgagccta

SEQ ID NO: 38584 - DNA, 384 bp, Gossypium hirsutum
  Clone ID: LIB3165-033-P1-K1-D8
gttagctttagcatacactactagtacccactactagcaatggcttcctcaatgatctcatcggctaccattgccactgcctctccggcacaggctaacatggtcacccctttcaccggcctcaagtctgcctctgctttcccagtcaccaggaaggccaacaacgacattacttctctcgcaagcaatggcggcagagtgcaatgcatgcaggtgtggcctcctactggaaagaagaagttcgagactctctcatacctccccgatcttacacccgtgcagttggctaaggaagtagattaccttcttcgctcaaaatgggttccttgcttggagttcgaattggaggagggattcgtgcaccgtaagtactcgagcttaccc

SEQ ID NO: 38585 - DNA, 379 bp, Gossypium hirsutum
  Clone ID: LIB3165-033-P1-K1-D9
cccacgcgtccggccgtttctggtagtggacagcaacatggcagtgtttattggaacaaaggtagttctgcattgttatcatcattggaccccaagaagccattagttgatcagctccgcgatgccttttctgttaaggaatcaccgatatggatggactgcagcacaactgctcagtgtagagaaatagagaaagctgtcggtggtgcattggagttgtctaaaattactggttctcgtgctcatgagagatatacaggaccacaaattcggaagatatttgagacacaacaagaaacttatgagaacactgagaggatctctcttgttagctctttcatggcttgtctattcttaggggcttatgcttgtattgata

SEQ ID NO: 38586 - DNA, 385 bp, Gossypium hirsutum
  Clone ID: LIB3165-033-P1-K1-E1
tttatttcctgccttagtttcattgaaggcgggactctcagactactctttcggaccagctccaccatcacccccaaaaaacaaagcaaattgtagaagatggcaacacaagcacttgtatcatcgtctcttacctactcagtggagactgcaaggcagattcttggagctaaacgacaaattgggccttcaaggaaaggatcctttgttgttaaggcagcttcgactccacccgttaagcaaggagctgatagacctttatggtttgcatctaaacaaagcctttcatacttggatggcagccttccaggtgattatggatttgaccccttgggactctcagaccctgaaggtccaggagggttcatcgagcctaaatggctag

SEQ ID NO: 38587 - DNA, 389 bp, Gossypium hirsutum
  Clone ID: LIB3165-033-P1-K1-E10
gcagccatggcaaggatcaaggtgcacgagttaaggagcaaatcaaagacagagctgttgactcagctcaaggatttaaaagccgaactttctctccttcgtgttgccaaggtcactggtggtgcccccaataagctctccaagattaaggtggtgaggctatccattgctcaagtattgacggtgatatcccaaaaacagaaggctgctttgagggaagcttatacgaagaagaagtttttgcctcttgatctccgtcccaagaagaccagagctattcgccgccgccttaccaagcaccagcaatctttgaaaaccgagcgggagaaaaagaaggagatgtactttccgatgaggaagtatgccattaaggtataagcttgaaattt

SEQ ID NO: 38588 - DNA, 385 bp, Gossypium hirsutum
  Clone ID: LIB3165-033-P1-K1-E12
agccgtaaccatgtcttccttcctagccaacggcatttccagcttctcaccacagcctactttcgattcaaccaagttccttaaaggcttcttcccaaagctcgattccgtcaaatccataaccccaaaactccaaagttcaaggcttttgaaggtcagagcagatgttggtttcgatcctcaaactctcacgtcagatcccagctcttcatcaggtaaatcctacgatgacaaaatccaggaaattcttcgaaaccgtgattatgataagaagtttggctttactatggatatcgattcttttgcgatacccaaagggctttctgcagaaacaatccgtttaatttcttctttaaaggaagaacctgattggatggtggagctt

SEQ ID NO: 38589 - DNA, 394 bp, Gossypium hirsutum
  Clone ID: LIB3165-033-P1-K1-E3
gaccaagccttccgccaacccttccgttgaagtcccgattggatctggctcccaagtcaaaactcgcttatgcaacaaatttagtggccctgaaggttgtaagtatggtgacaaatgtcattttgcacatggagagtgggaacttggcaagcctattgctccatctcaagatgatccccgttccatggcacctcttcctggtcgtatgggcagtcggatggaaccaccacccccatcaggtcctgctgctacatttggtgcttcagcaactgcaaaaattagtgtggatgcttcccttgcaggagccatcatagggaaaggtggtgtgcactcgaaacagatatgtcgtcaaacaggagcaaagctatctattcgggagcatgagtcagatcca

SEQ ID NO: 38590 - DNA, 384 bp, Gossypium hirsutum
  Clone ID: LIB3165-033-P1-K1-E4
ataattccaaatccttcattaccatttaacgaacttaactttccagtctggaatggcggctgccgtctccaccatcggtgctgtcaaccgagcaccgttgagtttgaatggatcaggtgccggagcttctgctccaagctcagctttcatggggaacagcttgaagaaagtgagcgctaggttcaacaacaacggcaaggctccagtgggaagtttcatgattgtggctgccaaagaaatcgacgaagacacacagaccgaccaggaccgatggaagggtcttgcttatgatatctccgatgaccaacaagacattaccagagggaaaggtatggtcgactcattgttccaagctcccatgaacgatggtactcactatgctgt

SEQ ID NO: 38591 - DNA, 375 bp, Gossypium hirsutum
  Clone ID: LIB3165-033-P1-K1-E5
tccgccaacccgtccgttagttcgtaccattggcggcttaacttcaagctgcagctaccctgatgcaaccaatcaaggttgctgcaccatcaaggaccaatgtgccgctcaggtcctcccagagcgtttctaaggccttcggtttggagcctgttggtgctaggcttacctgctctttgcaaactgacctcaaggacttggctctgaagtgtgttgatgctaccaagctcgctggtttcgctcttgctacatctgctcttgttgtctcgggagcaagcgctgaaggagtttcaaagcggctaacctacgctgaaatccaaagcaagacatacatggaagtcaaaggaacaggaactgctaaccagtgcccaacca

SEQ ID NO: 38592 - DNA, 389 bp, Gossypium hirsutum
  Clone ID: LIB3165-033-P1-K1-E6
accctttcttaccattaagggtcatgaagttctgggggatgtgaacaacaagctggtccatgaaagctggggcaatgtagaatccatccatgttgttgtccaagtcgtatgtgcgaaggccttggctaaggtattcataggagctcatgacagcatagtgagtaccatcgttcatgggagcttggaacaatgagtcgaccatacctttccctctggtaatgtcttgttggtcatcggagatatcataagcaagacccttccatcggtcctggtcggtctgcgtgtcttcgtcgatttctttggcagccacaatcttgaaacttcccgctggagccttgccgttgttgttgaacctagcgctcactttcttcaagctgttccccatgaaa

SEQ ID NO: 38593 - DNA, 384 bp, Gossypium hirsutum
  Clone ID: LIB3165-033-P1-K1-F1
cccacgcgtccgtaataatcacaaatatctcgcaccaaaacccaaataaccaacctgcttcctcatgccttattcatcatcatcatcatcatcaatggctagcaaattggctttcactttgatgcctcctcgtttcttcactgcgactattcaaaaacccgtggtttgtttctcttcttcttcttcttcttctatcaggtttcaacccagtgggaagcatctatgttttcgacgccgattgctcttactacccctcaaggctactgccgatcaacaaggtcaggtcgaagaagatgaagttgttgatagtaaaattctgccttactgtagcatagacaagaaagagaagaagtctttgggtgaaatggaacaagagtttcttca

SEQ ID NO: 38594 - DNA, 382 bp, Gossypium hirsutum
  Clone ID: LIB3165-033-P1-K1-F10
cccacgcgtccgcgacttttcctttccttttatatccgcatttctttctttttctcttttcttgttcttgttcttgttccccccttgttgatattctctatttactttgagggattaatataagaaggcaatgtgggatggtggggttttaggcttgatttggcgtttgaagcctgcctcactccctttgttggttttcaggtgctttcgggactaattggttgcctgcttttgacgatgatggagaagcttaattttgtaaagaacggtgtgcttagattgcctcctgggttccgcttccatcctactgatgaagagttagtggttcagtacttgagaagaaaggtgctttcttggcccttacctgcctctatcatacccg

SEQ ID NO: 38595 - DNA, 390 bp, Gossypium hirsutum
  Clone ID: LIB3165-033-P1-K1-F11
ttttgtttagatgaaattctgtttgagtttcctttggtgaatgatcagacttagagagagagcagagtaatttgggtcaagtgtttctgggttttcacaaccatggcttcttcaatgcttagtggagcagccccaacaggggtaggatttgcgaggtccaattttcattttaggagcttgccccagaagagtttattttcttatacaaagaatcagaagactagaatggtggtaacaaccagatgcagtatatcatcctcaaggccggcttctcagcctaggttcatacaacacaagaaagaagcgttttggttttacaggtttttatcaatagtgtatgatcatatcataaaccctggtcattggactgaggatatgcgggatgaggcg

SEQ ID NO: 38596 - DNA, 343 bp, Gossypium hirsutum
  Clone ID: LIB3165-033-P1-K1-F2
ggtaacgaagattggcgagtcccaatcaagtatcttctttgcggatcgttcaggacagcattatcagcaatgtctatcactggctgttgatgatcttgcagttcttgatggaaagactccggttcaagtctaccagggcttttgcgagagctttaagtccacattctcacctttcatgggttctaccatcacgggcatctcaatgggtcttggaccagatggtgaactccggtatccctcacaccacaagcctgccaagagtggcacgattactggagtcggggagttccaatgttatgacacaaacatgcttaaccttcttaagcaatatgctgaagcaaat

SEQ ID NO: 38597 - DNA, 392 bp, Gossypium hirsutum
  Clone ID: LIB3165-033-P1-K1-F3
ccttccgcggccccttgggggaaactgtggatttcaagaacatcagctttactgtctgggaggttggtggccaggacaagattcgtccattgtggaggcattacttccaaaacacacaaggactcatttttgtggttgatagcaatgatcgtgatcgtgtggtcgaagccagggatgagttgcacaggatgttgaacgaggatgagttgagggatgctgtgctactggtatttgcaaacaagcaagatcttccaaatgctatgaatgctgccgagatcactgacaagcttggccttcattctctacgtcagcgccactggtacatacagagcacatgtgccacttccggtgaaggactgtatgagggactggattggctctcaaacaacatt

SEQ ID NO: 38598 - DNA, 380 bp, Gossypium hirsutum
  Clone ID: LIB3165-033-P1-K1-F4
aaaaacagggggggtgtggtagttcgagttatcgacaacgttgggtttcaacacgaaaaaaaatggataacttttacgcaccagggaagaaccatctcttcgttccgggtccggttaacataccggaacccgttattcgagccatgaaccggaacaacgaggattaccgttccccggctattccggcgatgacaaaaacccttctcgaagatgtcaagaagatattcaagactacgaccgggactccttttatgatcccaacaacaggaaccggtgcatgggagagtgcacttactaatacgttatcccccggtgaccgaatcgtatcgttcctcattggacaattcagtcttctttggatcgatcaacaacaacgtctt

SEQ ID NO: 38599 - DNA, 426 bp, Gossypium hirsutum
  unsure (1)..(426): unsure at all n locations; Clone ID: LIB3165-033-P1-K1-F6
ccggnncggaaannccggggcggcccaacccgtccgaaggctgcagttaccctgatgcaaccaatcaaggttgctgcaccatcaaggaccaatgtgctgctcaggtcctcccagagcgtttctaaggccttcggtttggagcctgttggtgctaggctcacctgctctttgcaaactgacctcaaggacttggctcagacgtgtgttgatgctaccaagctcgctggtttcgctcttgctacatctgctcttgttgtctcgggagcaagcgctgaaggagttccaaagcggctaacctacgatgaaatccaaagcacgacatacatggaagtcaaaggaacaggaactgctaaccagtgcccaaccatcgatggtggtgtcgactcttttgccttcaagcctggcaaatactacgccaagaagttc

SEQ ID NO: 38600 - DNA, 383 bp, Gossypium hirsutum
  Clone ID: LIB3165-033-P1-K1-F7
ataaaaactaacgcccaaatccttcatctccaagggttttaatctaaatctagggctaaatcccccaacttttgaaacctaagattctaatttcaaaccctactttccccaaatacccgcttcagtttatcaaccgtcaaaaaaaaaaaaagataaatgaacatgaaatgatacgaggaagaattattgaacatgaacaatgggtgtttggagaatagaaaaaaagaacatgacaattcacaaaaacggccaaagtcttacaaattcggtagcaaaagtgacgattttgccctagcaatcgcgaaggttgcagtggcgcaactatgtgaaagcgtagggtttcagggttttcatctctctgctttagaaaccttgtctgatat

SEQ ID NO: 38601 - DNA, 355 bp, Gossypium hirsutum
  Clone ID: LIB3165-033-P1-K1-F8
aatccgacggtcgagatggctctatcacacctcgccgcttctgcttctcgctgctctagtcttcttaaacccctctcgtcggctctttccctccgacgcccgatctccggcgataactctcccttgaccgtcgagacctctgtccctttcacctctcaccagtgcgaagctccctcacgttccgtcgagaccaatccgaaggagctccttacctttttccgagacatggcgctgatgcgtcggatggagatcgctgccgattcactctacaaggctaagcttatccgtggtttctgtcatctatacgacgggcaagaagccgtcgccgttggcatggaagccgccattaccaaaa

SEQ ID NO: 38602 - DNA, 376 bp, Gossypium hirsutum
  Clone ID: LIB3165-033-P1-K1-F9
gtttcctttctcgattttctatttagccaaacaagatgcagatcttcgttaagactctaaccggcaagacgatcactctcgaggtcgagagctccgatacgatcgacaacgtgaaggccaaaatccaagataaggaaggcatccctccagaccagcagcgtctgatcttcgccggaaaacagctcgaagacggccggaccttggccgattacaacatccaaaaggagtcaactctccacctcgtcctccgtctgcgcggtgggatgcaaatcttcgtgaaaaccttgactggcaagacaatcactctcgaggtcgagagctccgacacgatcgacaacgttaaagcgaagatccaagacaaggaaagcatcccccc

SEQ ID NO: 38603 - DNA, 392 bp, Gossypium hirsutum
  Clone ID: LIB3165-033-P1-K1-G12
ggcttctgcttccgctactctcctcaagtcttcacctattatcgacaagtccgagtggattaagggccaaaacctccgccacccttcggtttgttttgtacggtcacaccctacatcggccgcctttgccgtccgtgctagttcatatgccgatgagcttgttaagaccgcgaaaactgttgcatctccaggtcgtggtattttggccatggatgaatcaaatgctacatgtgggaaacggcttgcctcgattggtctcgagaataccgaggcaaaccggcaagcttaccgtacccttctcgtgtctgcccctggcctcggtgactacatctcgggagctatccttttcgaggagactctctaccaatctaccatcgatgggaaaaagatgg

SEQ ID NO: 38604 - DNA, 362 bp, Gossypium hirsutum
  Clone ID: LIB3165-033-P1-K1-G3
cgccaacccttccgtttaaatggcattgaccctaatccccatcaccttacccaccaatctaatctgttagctatccatcatcatcatcatcatctttgagaagctcccatggctgataattctgcttgcaacccggacctcattattgctcataaattccccgatacaacttatgctcatactgagagagatgtagctgtctatgccttgggtgttggagcatgtggtcgggacgccgtcgataccgacgaacttaaatacgtttaccatgaaaacggacagcagtttatcaaggttttgccaacattttctactttattttcacttagaggtctgccacaacttagtggtgtgcctggctt

SEQ ID NO: 38605 - DNA, 421 bp, Gossypium hirsutum
  unsure (1)..(421): unsure at all n locations; Clone ID: LIB3165-033-P1-K1-G4
cggaaannccgggcggcccacgcgtccgcccacgcgtccggccgcgtcgctgttattccccgtcgcatcgtcgacgaaaacgggcgctcctccaacctactcgccacggaaaccagtaccttccggtcaccgtttcttctcattcccttccaaaaccaagcctcttctcaaaatcaccggcaattcaaacaaacatcggtctttcaccgccaaggctatcgaagaaagcaaggagagcacggaagacacgttgaccgccaaggaagtggagacggaaccggaatcgagcgaggaaagcgagctgagtgccattggagcagagataaagacggcgatgaaggagagagaagcgaataatagtgataacagtctcgccggcggagtggctgaggagataagggaaatcgagtggcctgcattt

SEQ ID NO: 38606 - DNA, 253 bp, Gossypium hirsutum
  Clone ID: LIB3165-033-P1-K1-G5
gaaaaatgaatgattgtgtagctgttctctttgtaaatgatatctttatgactggtcataccggagatgcatcatacgacggtgattcaaaacaattcaatccatcatctgcaggttgacctatacggaacgaactagactgcttcgttggacctgctataagatctaacagggacttctgctgccattgatggtggtttaaaagtgtctttcaagatggtcgtcattgtagcacgtgatgataactgtgtcg

SEQ ID NO: 38607 - DNA, 346 bp, Gossypium hirsutum
  Clone ID: LIB3165-033-P1-K1-G6
tcgctttggttttatccctttccaccgatggaccgttgatctctaatcttcctcctccggtcctccgtcgttgcttcggccgtcgtctccgacgttaatagcgacggcgatcctctcatccgtcaagttgtttccgatggtggtgtcgaggaggactccgatgaccatctccttaacgcggagcaccacttcacgctgttcaaatccaagtatgggaaaacctacgcatcccaggaggagcacgattaccgactgggagtcttaaggctaacctgcgtcgggccaagcgtcatcagcttctggaccccagtgccgtccatggcgtcacaaaagtttccgatttaac

SEQ ID NO: 38608 - DNA, 376 bp, Gossypium hirsutum
  Clone ID: LIB3165-033-P1-K1-G9
ggagagccttttttttgtgtagcgattctcagttagtcttttctttaagcttacagcttctctccagagttttataatgggtaaggagaaggttcacatcaaccttgttgtcattggccatgtcgactctggcaagtcgaccactactggtcatttgatctacaagctaggtggtattgacaagcgtgtgattgagaggttcgagaaggaggctgctgaaatgaacaaaaggtcattcaagtatgcttgggtgcttgacaagcttaaggctgagcgtgaacgtggtatcaccattgatattgccctgtggaaggttgagaccaccaaatactattgcaccgttattgatgcacctggacaccgtgactttatcaag

SEQ ID NO: 38609 - DNA, 388 bp, Gossypium hirsutum
  Clone ID: LIB3165-033-P1-K1-H1
gggaagacatatggggtgaccatatgcaccatggatattacgacccgggttccggtgtttcgggttcagatcatcgtgccgctcagattcgaatgatcgaagaatcgctccgtttcgctggaatatcggatgacccagcaaacagacccaagagaatagttgatgttgggtgtgggataggaggcagttctaggtatctagcaaggaaatatggagcaaaatgccaaggcattactttgagccctgttcaagctggaagagccaatgctcttgctaatgctcaagtactagcagaccaggtttgttttgaagttgcagatgccttgaaccaaccattccctgatgaccaatttgatcttgtttggtctatggaaagcggagaacacat

SEQ ID NO: 38610 - DNA, 291 bp, Gossypium hirsutum
  Clone ID: LIB3165-033-P1-K1-H12
ataaaacgcacgctaaattctattttgtttcaactaaggccagatcttactccaggctattttcagagcgatttgcagtgaagaatgactggaacaccgcctgtggcacgacagttcaatggtaagctcaaggttctgaaccagcacctgaatcgccagcacgagcttctgcacaagcttgacgcgaaacttggcacggaaccaagcctatctccatggctagttcaactggttgcatagcaacttacactgtggacataactgcagacattgcagatgaaaatacagatg

SEQ ID NO: 38611 - DNA, 389 bp, Gossypium hirsutum
  Clone ID: LIB3165-033-P1-K1-H2
gcacatgcttgatcatggttacctacagtaaaggcatcaacacctgatcgaagagagctcgaggcaatctataatgtcgaagcaatgatgcccaatccacaagatccagagcggttcattgtctgtctggcgactgtagttaatcggccgccttgagagagattagaactccttcgaatcagagacacagcagagaggataaggaggggtataatataccggcgagcagaatcaccacggtgtggagtacaatatgtaagttgtaattatctatcaatacatttggcacaatattctaccttattaatttaaattccattcaatattctttggggccgcataataaaagatggtgtgtggagcccttcttttttgttgtaaaatcacta

SEQ ID NO: 38612 - DNA, 55 bp, Gossypium hirsutum
  Clone ID: LIB3165-033-P1-K1-H3
caacccttccgccaacccttccgtaaagatcacctttttttaaatctccaacccc

SEQ ID NO: 38613 - DNA, 394 bp, Gossypium hirsutum
  Clone ID: LIB3165-033-P1-K1-H4
agcacccactgttcccacctactccacacactccctctttttatttttctcggcggattcttcaaagcactttctcatttcctttctagatcctttctatctctcctttttttttttttttgcttctgtaagtctccgattcagatctttcgtcaaatcaaataaacaatgcaaagcgcagcgtattctttgtcttctccctgttcgattccatctctgaagccgcgaaaattctgttcccgcgctggattccaacctattcgcgtttcatcttcttttgccgctcctgaacggcatgaacattccgtttctttgcctaatagatcgtggcggctctcttcctcctcgtccttgccgcttagggcctggaacttagttccttccgattcaaaac

SEQ ID NO: 38614 - DNA, 324 bp, Gossypium hirsutum
  unsure (1)..(324): unsure at all n locations; Clone ID: LIB3165-033-P1-K1-H5
agagagatcaccttttattcctttttaaagctaaggggtaaaggcctaacccctcctttaattttttattcaatccacattttaacactgtggctgctacatcatttaaagctttcaccacttttgcactcttcaaaccaaagaccaaagcagctcttaagaaggctgcacctaaaccaaagccaaaggttgaagatggaatctttggcacctctggagggattggttttaccaagcanaatgagctcttntgtggacgtgttgccatgattggctttgctgcatccttattaggtgaagcaataacagggaaaggaattctag

SEQ ID NO: 38615 - DNA, 392 bp, Gossypium hirsutum
  Clone ID: LIB3165-033-P1-K1-H6
gcaaaacaaaaatggccatggcaatggcgcttcgacgactctcctcttccattgacaagcctctccgtcctttcttcaatgccccttccctctattacatgtcgtctttgccaaatgaagctgtgtacgagaaggagaaacctggcgtcacttggccaaagcaactgaatgctccacttgaaaccgttgatcctgaaattgctgacatcatcgaacttgaaaaagcgcgccaatggaagggacttgaactcattccatcggagaacttcacgtcggtgtcagtgatgcaagcagttgggtctatcatgaccaacaagtacagtgaagggtatcccggtgctagatactatggagggaatgagtacatcgacatggcagagatattgtgtcag

SEQ ID NO: 38616 - DNA, 371 bp, Gossypium hirsutum
  Clone ID: LIB3165-033-P1-K1-H7
gttttaagaatactgctggaatagagcctgaagatgttgccaaacgtcttatggactatggattccatgctcctacaatgtcgtggcctgttccgggcacgctcatgattgaacctactgaaagtgaaagcaaggcggagctggaccggttctgtgatactcttatctccattagggaagaaattgctgaaatcgagaatggaaaggctgatatccacaacaatgttcttaagggagctcctcatccaccatctttgctcatggccgatgcatggacaaagccgtattctcgggaatacgctgccttccctgcttcctggcttcgaactgctaagttctggcctactacaggacgtgttgacaacgtatat

SEQ ID NO: 38617 - DNA, 383 bp, Gossypium hirsutum
  Clone ID: LIB3165-033-P1-K1-H9
cctttatccccttctattgtactaattggcttggctgccattgaaatggcttgctgcggtgagggccaggaaaaggtttttttggcttcctttgggtcaatccttattgtgacttgcctagtcaccattggcaccaccgggttcattttcaaaaagaaatccagtaatactgtagcagctcactccatcatcaaatcttcatgtagctccacgttgtacccagagttatgctactcaacaatctcttcagcaccagatgctgagaccaaggtcaagaaccccaaggatgtgattgaattgtcgctgaacttgacggtgactgctgttcagagtaactatttgtccatcaaaaagctcattagtacccaaaggaagagcctcac

SEQ ID NO: 38618 - DNA, 400 bp, Gossypium hirsutum
  Clone ID: LIB3165-034-P1-K1-A1
cttagtttcctcttagcaaagacttcagccacccacgcagcccctttaccgatccaaacaatgggacgcgtccgtacgaagactgtgaagaaatcgtctcgtcaggtaatcgagaggtactactctcgcatgacgcttgatttccacaccaacaaaaaggttatcgaagaagtagctattatcccatccaagaggctccggaacaagattgctgggttctcaacccatttgatgaaacggatccagaagggtccggttcgtggcatttctctgaagcttcaggaagaagagcgtgagcgtcgtatggattttgtccccgatgtatcggctattgctgttgattcaatagaagttgataaggaaaccattgatatgctttcacttcttggaatggccgatc

SEQ ID NO: 38619 - DNA, 304 bp, Gossypium hirsutum
  Clone ID: LIB3165-034-P1-K1-A10
gaaggattgattgattaattacttaattaatcagtcaattatgataactagtgagcacggattgatgaatgttccattaggttttatatatgtatctaatgtgtatgtattatgtgtactactatgcttcactaggagtaaaggcaaatctggtgtgaaactaagtcaattatgatgactagtgagcatggatattgatgaatgttccattagtttttatatataatatctatatgtattctatatatttctctgcttcactgggaataaaggcaaatctggtattgaacaaaatattatgaat

SEQ ID NO: 38620 - DNA, 403 bp, Gossypium hirsutum
  Clone ID: LIB3165-034-P1-K1-A11
tttagctatagcatacactactagtacccactactagcaatggcttcctcaatgatctcatcggctaccattgccactgcctctccggcacaggctaacatggtcgctcctttcaccggcctcaagtctgcctctgctttcccagtcaccaggaaggccaacaacgacattacttctctcgcaagcaatggcggcagagtgcaatgcatgcaggtgtggcctcctactggaaagaagaagttcgagactctctcatacctccccgatcttacacccgtgcagttggctaaggaagtggattaccttcttcgctcaaaatgggttccttgcttggaattcgaattagaggagggattcgtgcaccgtaaatactcgagcctacccacgtactacgatggacgct

SEQ ID NO: 38621 - DNA, 417 bp, Gossypium hirsutum
  unsure (1)..(417): unsure at all n locations; Clone ID: LIB3165-034-P1-K1-A2
ggaaaggccggggcgggcgacgcgttagttaaacggtttcaaaaactttttcctcccacacatccccttaaccaatgcggccgttggtacgcgtgcgtgctgacaccnacaagaaattgtctcgtcaggtaatcgaaaggtactactctcgcatgactctcgatttccacaccaccaaaatggttatcaaataagtagctattatcccatccaagaggcttcggaacacgatagctgggttctcaacccatttgatgaaacggatccacaagggtacggttcgtggcatttctcttaagcttcacgaagaagagcgtgtgcgctgtatgtattttgtccccaatgtatcagctattgctgttgattaatttaagttgataatgaaaccattgatatgctttcacttcttggaatggg

SEQ ID NO: 38622 - DNA, 390 bp, Gossypium hirsutum
  Clone ID: LIB3165-034-P1-K1-A3
gcctgttagtgtggcatttgaagttgtcactagtttccgtttttacaaaagtggggttgataccagtaaaacatgtggcagcacacccatggatgtgaaccacgctgttcttgcagttgggtatggagtcgaaaatggcgttccatattggctcattaagaactcatggggtgcagaatggggtgacaatggctacttcaagatggagatgggcaaaaacatgtgcggtgtggcaacttgtgcatcatacccaattgttgcttgatccaatcgatgaaccgttttggatcatgtcatttctgtgttatagaaagcttctagttatggtctacaaatgttgttgtaggtgttcggggttatggtctaggtgaaaccgatgggttcatgtac

SEQ ID NO: 38623 - DNA, 387 bp, Gossypium hirsutum
  unsure (1)..(387): unsure at all n locations; Clone ID: LIB3165-034-P1-K1-A4
agcaaaaccatggcctctgcttctctcctcaagacttcaccagttttagacaagtctgagtgggttaagggtcacacccttcgccaaccttccacttctgtggtgaggtgccaccctgttgcaccctccggactaactgtgcgtgcaagctcatatgccgatgagcttgtcaagactgctaaagctattgcttctcctggccgtggaattttggccatggatgagtccaacgctacctgtgggaaacgtttggcctcaatcgggctagaaaacacggaggctaaccgccaagcctacaggancgtgcttgtttcagctcctggccttggtcagtacatctcaagtgccatcctctttgaggaaaccctctatcaaaccacaattgat

SEQ ID NO: 38624 - DNA, 424 bp, Gossypium hirsutum
  unsure (1)..(424): unsure at all n locations; Clone ID: LIB3165-034-P1-K1-A6
cgtnctcggtcagtacattctcagngtgctcatcctcttttgagtgaaacccctcttatcaaaccacaatgtgatggcaangaagatgtgttgattgttcttgttgacgcagaacattagtccctggtatcaagcgttgacaacgggtcttgttccacttggctggttcaaacaacgagtcatggtgccaaggtcttgatggcctcgctccacgttcagctgcatactaccaacaaggagctcgttttgcaaaatggcgtactgtggtaagcattcccaatggaccaaccgaacttgctgtgaaggaagcagcctggggacttgctcgctatgccgccatctctcaagacaatggattggttccaattgttgagccagagatcttgcttgatggtgatcacggaattgacaggactttcgaagt

SEQ ID NO: 38625 - DNA, 364 bp, Gossypium hirsutum
  Clone ID: LIB3165-034-P1-K1-A7
gtcgacggcttctatcaacggttggtgccttacctcctcttcttccaccactaccacctcctctttttccgctcgtcgacgacctacattgcggccttcagtcgtcgctagccttaactcttctccttctcctccgactcttatccaagaccgcccggtttttgctgcccctattcctttgctcaccccgagagaagagatgggaaacaagtcctacgacgaagccattgaagctctcaagaaacttctcagtgagaaaggagaactgaaagctgaagcagctgcaagggtagatcaaataacagcagagttaaacacagcatcagctgatggcaaaccatctgactcttctgttgagagactg

SEQ ID NO: 38626 - DNA, 383 bp, Gossypium hirsutum
  Clone ID: LIB3165-034-P1-K1-A8
gagtacttgaacggagaagttcccggagactatggatacgatccgtttggtctgagcaagaagccagaagactttgcaaaatatcaagcatatgagttgatacacgcaaggtgggcaatgcttggtgctgcagggttcatcatccctgaagcctttaacaaatttggtgccaactgtggccccgaagccgtttggttcaagaccggagctcttctcttggacggtaacaccttgaactacttcgggaagaacatccccatcaaccttgtggtggctgtcgttgccgaagtcgtccttgttggtggtgctgaatattacagaatcatcaatggcttggatctggaggacaagcttcaccctgggggaccatttgacccactggg

SEQ ID NO: 38627 - DNA, 362 bp, Gossypium hirsutum
  Clone ID: LIB3165-034-P1-K1-A9
cccacgcgtccgacttttaacccctgccgacactctcaccattttctcagcaaacttagcctatgaaaatcaccattacaagtcccaaagaagacccccgctaattctaaaagaaagaaccagagttttctttctctttagtttacgtttattgtccttttggaatttttgatactaaaaaaaggaagcaacgaagaagggaaatggagggcaaagaagaggatgttagattgggagccaacaagttcacagagaggcaaccaattgggaccgcggctcagagtcaagatgacgggaaagactacactgaaccaccaccggctccatttttcgagcctggcgagttaacctcatgggtcttt

SEQ ID NO: 38628 - DNA, 409 bp, Gossypium hirsutum
  unsure (1)..(409): unsure at all n locations; Clone ID: LIB3165-034-P1-K1-B1
ttcgctttgagattagatccaaaattcccctttcatcatatttccgattccccaattttgcctgaaaccctaatcctaatcccggattcttctcgtctacatcgtctagcaaatggcaaccgaggagccggcagtcgtggcagaccccgcaccggagacggaggaggacaagactgctgagaccaaagctacttcaaaatctggcagagcaaagaaaaccaaagaacccaaaaccaagaaagctgcagctcctcggaaaccacgggctgctcctactcatccaccttacgaagagatgatcaaagatgcgatcgttactttgaaagagaggacaggttcaagtcagtacgccattgctaagttcattggagagaaacagangaatcttcctgggaatttcaagaagctt

SEQ ID NO: 38629 - DNA, 370 bp, Gossypium hirsutum
  Clone ID: LIB3165-034-P1-K1-B10
ggaccttcaatttttcatcggagagagcatgcacgatgatggatgtttggtatttgcttactacaaggatggtgctgttgacccgacatttttgtactttgcgtatgcattgaaggaggtcaagtgctgaggtttgaagcaaagaaaaaaaaagtggttgctgaagaatttagtcctttttattattgcttttgtctcttattttcagtactctgctaaagacataaattatttatggtttttgatgtttttgatttaattgtttgttgttttatcatggaatggtttctatttttatggggtgactaaacaagaatttaactcttttgttctataactacttaattttattggaaggaggtttttggga

SEQ ID NO: 38630 - DNA, 400 bp, Gossypium hirsutum
  Clone ID: LIB3165-034-P1-K1-B11
ctcagctcagctcaactcaactcacttaaatcttttctgctgcggtggcgatgggggcggcgatgttgtcggagttggcgacggagatcgtggtgccagtgtgcgccgtgattggaatagctttctcgttggtgcagtgggtgatggtgtcgcgcgtgaagcttacctccgagcgccatgcgtcgtcggcgaatagtagcaagaatggttacggtgattacttgattgaggaagaggaaggaatcaatgaccatagcgttgtcaccaagtgcgctgatattcaaaacgctatctctgaaggtgcaacatcctttctttttactgaatatcagtatgttggcatcttcatgattgctttcgctatcctgatttttcttttacctgggctctgttgagggct

SEQ ID NO: 38631 - DNA, 383 bp, Gossypium hirsutum
  Clone ID: LIB3165-034-P1-K1-B12
caaaaactgggatggcttttgtaacgtcggaggaattgctggccactttggtgccaattgctgtttattggatatactcaggtatgtatgtgatgtttgagtcaaggtttgagaagtacaagttgcactccaagaaagaagaggaggagaagaatttggtttccagaaaggaagtcttcaaagccgttctttgccatcaagtcatgtcaattgctattaacctcttcacgtatgcggtaacaagagaaaaagatggtgaggcatctccaaagaaatcactaaccttgcttcttctaacccaagcaattggtgatagcaatggtggtgatagataacatggtcgtttttgtgcattggtacttgcatcaaaacaagtttttata

SEQ ID NO: 38632 - DNA, 289 bp, Gossypium hirsutum
  Clone ID: LIB3165-034-P1-K1-B2
gataatggtgcaaaactaagcataatactgtccctcataacattcttcgactcgcttgatggattggcccaaagattaacataaccaaaaagataaacggcttgtgctttcgctactgttctcaagactttacctatgatcgacacgatcgagtggatgaaggggcagaacctgcgccacccttcgggttgctttgtacggtgacacgctacatcagacgcctataccgtccgcgctagctcatatgccgatgaagctgctaagaccgcggaaactgccgcatatacag

SEQ ID NO: 38633 - DNA, 405 bp, Gossypium hirsutum
  Clone ID: LIB3165-034-P1-K1-B3
cccacgcgtccgcccacgcgtccgctttgccaaacatggagactagtgtcacgtgctacgctcgtgggattgttcttcctggtgtctcttctaagcactcctcggcattagtctcccctccatccatatctccttccttcagctctaagagccttaaaacaagttcactatttggagaatcattaagggttgttccaaggtcatcattgaaggtttcaaaggcaaagaacactacttcactagtgacaaaatgtgaaattggagagtctttggaagagtttcttacaaaggcaacaacagataaggcattgattagaataatgatgtgtatgggtgaagcattaagaacaattgcttttaaagttagaacagcttcatgtggtggtactgcttgtgttaattcct

SEQ ID NO: 38634 - DNA, 386 bp, Gossypium hirsutum
  Clone ID: LIB3165-034-P1-K1-B5
tgaaaaaaaaaaataagacatgtatttggatatttcctttcaactacaacaatattctagtatttatttgatatgacatgaatagttgaagggaattccccgaagagaaaatggattatgggagtaacaaaaaaacctgacttgaacgatcctgtattaagagctaaattagctaaaggtatgggtcataattattatggggaacccgcatggcccaatgatcttttatatatttttccagtagtaattctcggtactattgcttgcaacgtgggcttagcggttctagaaccttcaatgattggtgaacccgcggatccatttgcaaactcctttggaaaatataacctgaatggaatttctttcctgtatttcaaatacttcgt

SEQ ID NO: 38635 - DNA, 406 bp, Gossypium hirsutum
  Clone ID: LIB3165-034-P1-K1-B6
ggggaatctatatgagtgccaaggttgctttttgcatccacaatatagcctatcaagggagatttgcctttgaagattactcacttctcaatttgcctgatcaattcaagagttcatttgacttcatggatgggtatgataagcctgtcaagggaaggaaaatcaattggatgaaggctggaattttggaatcacacagggtattgactgtaagtccatactatgcccaggagcttgtttccggtgaagataaaggtgttgaactcgatcacatcattcgtaaaaccggcatcactggaattgtgaatggcatggatgttcaagaatggaaccctaccactgacaaatacatcagtgtcaaaatatgatgcaacaactgtaacgtatgcaaagcgattattaaagg

SEQ ID NO: 38636 - DNA, 390 bp, Gossypium hirsutum
  Clone ID: LIB3165-034-P1-K1-B8
atcatgtacatggccatggcgacttaagcaggtctgttcacctccacaatgacgaccctaaaatctttggccccatggaaaccagcctcatcattttcctttgctacctgttccaagtccctcaacttctgcgtggctcaaagaaccattagagctgcagctgctgatgaggaagcatcatctgctgccgccacaaaggaagctccggttggtttcacccctccagaattggaccccaacaccccatcacccatcttcggaggaagcactggaggactgcttagaaaggctcaagtcgaagaattctacgtcatcacatgggattcacccaaagaacaaatatttgagatgccgactggtggggcggccatcatgaggcaaggacctaac

SEQ ID NO: 38637 - DNA, 403 bp, Gossypium hirsutum
  Clone ID: LIB3165-034-P1-K1-B9
cacgttcttgtttttttcacttctttctctttctcgaaaaccggtcacctgaaactcaaacgcctctctgaatcctcgccggaacctgtcaatctcttacatctccggcggctgtctcacggatctgttcacgatgagcaccggccaacttctcagcatcgagcctcaagagctccagttcccatttgaattgagaaagcagatctcgtgttccctaaacttgtccaacaagaccgacaattatgtggcttttaaggtcaaaacgacaaatccaaagaagtactgtgtaaggccaaatactggagttgtgctgcctaggtctacgtgcaacgttgttgttacaatgcaagctcaaaaggaagcacctactgatatgcaatgcaaagataagtttttacttcag

SEQ ID NO: 38638 - DNA, 399 bp, Gossypium hirsutum
  unsure (1)..(399): unsure at all n locations; Clone ID: LIB3165-034-P1-K1-C1
ctctaactccaagtccgacgccccaattcggtccccgaaatacccacacacactgtctactcgtcatgcaaacgctactgctcccggctactcgctccggtatatgtgcggtggcggcggnnnccctnncgccaccgctcactctctctcctccaaattttctcacttcaatcaaaactcggaaccaaaacctccgttgtcccctttcgcatcctacgaccctcttaatgttctaagatctacgcttttttcgcccaaagtctcttcgtcctcagtttcacccaggtgtacctgctgtaatgatgatactgacaaggcgaagcttgctcaagtttcgaagaggctagagaacacgtcgaggtactttaagcgattgggcaatttatggttttggggaca

SEQ ID NO: 38639 - DNA, 335 bp, Gossypium hirsutum
  Clone ID: LIB3165-034-P1-K1-C10
cttcagttcttcacttccccagtcttcagcaatgggagaaaccgattcttgcttgtcgaacaaatcagcgaagatcttcgtagcaggccatcgaggcctagttggttctgccatagttcgtaaacttcagtccctaggctttaccaacctcctactccgcacccatgccgatctggaccttactcgccaatccgacgtcgaatccttcttcgccgatgagaaacctcactatgtcgtactagctgccgctaaagttggtgggatccacgccaacaacacttaccctgccgatttcattgccatcaaccttcaaatccagaccaacgtcatcgatt

SEQ ID NO: 38640 - DNA, 336 bp, Gossypium hirsutum
  Clone ID: LIB3165-034-P1-K1-C11
cccacgcgtccgcccacgcgtccgtccacgcgtccggtccgtctctctgttttactccacaaccactatcactaccattatggcttcggctactgtttctgtagccaaacccaaccttcagattcaggcaaaaggaaagggtgttggttttgcagatttctcaagcctacacaactcctctactagccttccctttgccaggaaaacctctgatgacttccattcactcgttgcttttcagacatctgctctaggaagcaataatggcgggtacaggaaagggatggcagaggcaaaacctaaaggtggctataaatgggttttggtagggattgg

SEQ ID NO: 38641 - DNA, 400 bp, Gossypium hirsutum
  Clone ID: LIB3165-034-P1-K1-C12
cggacgcgtggggcacatatttctatttcccactctcttttttgctctcagttaacaacaaaatccgtaaatggctaccactgcttctccaatggcgactcagctgaagagcagctttacgtcgtctgttacaagaggactggtagtccccaggggcatttcgggatccccgttcaaagtatcttccggaaagaccaggaccccttgcttcactgtcaaagctgttcaatccgacaagtcaacatttcaagtaatccaacccatcaacggcgaccccttcattggaagcctggagactccaatcacctcaagccccttaattgcatggtacctttccaacctcccagcctataagacggcagtgaacccacttcttgagggaatcgaagtgggtctggct

SEQ ID NO: 38642 - DNA, 404 bp, Gossypium hirsutum
  Clone ID: LIB3165-034-P1-K1-C2
cccactccttagaaaatatccaaaccctcaaaacttgtcggtaccatcttccaaaaacaagcagccttccaaaatcaaaaccatttgatgctcattcctctctccaaagcctacctcttcctcttctgtcaatctggttccctcctcctcccccataatctatcattgatgaccatcggaacatttccaattaggcctagatggtttcccaaaagcaaggcctgaaagtaagcatatccttccgctataaatggcgaagcgatctccttgtgcagtgtctgttttgaagccaaaatctcacttggagagttacgaacaaccactccagatctagatctcaccaaattttgattacaagcggcatcaaaattaactttaacatcagaacctaatgggggacacca

SEQ ID NO: 38643 - DNA, 359 bp, Gossypium hirsutum
  Clone ID: LIB3165-034-P1-K1-C3
cttttaaccaaacactccacaaaattttctcgaaaaaaaaaaaaaaaatgaggaagtgtgaactatgtggaaggctagctcgaatgcactgtgaatcagatcaagcaaatttatgttgggactgtgatttcaaggttcatggagccaatttcctcgtagctaagcataatcgaaccctcctttgccatgtttgtcaaagtcctactccttggctcgcatctggtcggaatctcggctccgcggtttctgtttgtgattcatgcgttgtaaacggcaacaataagtgtgagtcatcggagagagagtatggtgaagaggaggaggaagaagaggaggagggagattatgataatgacgcc

SEQ ID NO: 38644 - DNA, 356 bp, Gossypium hirsutum
  Clone ID: LIB3165-034-P1-K1-C4
cccacgcgtccggcacatacaaagctaccatggctaattttcaaatgaaaaaagtgcaacaatgcacacacggcaagctgtggaactcttccagcgaagctctaaccttgaccgacaagaaagtttggcaaggctctcattatgcggatttcccagaaataattgaagatggggatgcgagtgagtttacacatgaatcagtgactgatgatgctgatattcatggttcagttgctggtcttgtgtacaggcgacgtgacggaactaagtggattgttgcctggagcaacccacaagctgagaacagcaaggtctatactgatatccagagacaacctgttcactgggggcaaatc

SEQ ID NO: 38645 - DNA, 399 bp, Gossypium hirsutum
  Clone ID: LIB3165-034-P1-K1-C5
gcggttttcatttccccttcgcaagtagccagccgtttcacacactcaagaagagcgagagctcgtaaatcatggcggaacagaccgaaaaagcttttttgaagcaacccaaagtgtttttgagctcgaagaaaggtgggaaagggaagaggccaggaaagggtgggaatcgcttctggaaaagcattggattgggcttcaagactccccgtgaagctattgaaggaacctacatcgataagaaatgccccttcactggcactgtttcaatccggggtcgtatcttagccggtacttgccacagtgccaagatggtcaggacaatcattgttcgacggaactaccttcattatatcaagaaataccaaaagtatgagaagcgccattcaaacattcccg

SEQ ID NO: 38646 - DNA, 161 bp, Gossypium hirsutum
  Clone ID: LIB3165-034-P1-K1-C6
accacacctccatttctatgtgaactaaacttgcacatggcttactccattctaatagacaggagaagcctaaaccgaaacacataacaaaacgagcttaagaagggaatcaatggaaaatttctgtacaaaaacgctaaggatgacgtcaactaaaatga

SEQ ID NO: 38647 - DNA, 401 bp, Gossypium hirsutum
  Clone ID: LIB3165-034-P1-K1-C7
cccacgcgtccggatccacggcgatgatctatggccatgttttggtttttgattgtttcaggtgccttggacactccaatgctgaagttgttccacatgaagttttcaataagttacctttacttaggtatttcatctatacccccacgtatcatagtcttcaccacacagagatggagaccaatttttgtctgttcatgccgctgtttgatgcactggggagtacacttaacaccaaatcattggagctacataagaaaattacctcaaattctggaaaaaacgggagggtaccggattttgtgttcctagcacatgtggtggacataatgtcggcaatgcatacaccgtttgcgttaagatcatttgcgtcgaccccatttcgcatgaagatgtttctg

SEQ ID NO: 38648 - DNA, 400 bp, Gossypium hirsutum
  Clone ID: LIB3165-034-P1-K1-C9
cccacgcgtccgagcatacactactagtacccactactagcaatggcttcctcaatgatctcatcggctaccattgccactgcctctccggcacaggctaacatggtcacccctttcaccggcctcaagtctgcctctgctttcccagtcaccaggaaggccaacaacgacattacttctctcgcaagcaatggcggcagagtgcaatgcatgcaggtgtggcctcctactggaaagaagaagttcgagactctctcatacctccccgatcttacacccgtgcagttggctaaggaagtagattaccttcttcgctcaaaatgggttccttgcttggagttcgaattggaggagggattcgtgcaccgtaagtactcgagcttacccacgtactacgatg

SEQ ID NO: 38649 - DNA, 380 bp, Gossypium hirsutum
  Clone ID: LIB3165-034-P1-K1-D1
cccacgcgtccgtacggagcttgtgttcatattcagattcttcttcttcttcttcttcttcttcatcaaagtgggtttatgcagtgttttggaggatactgcctcgaaattatccaccaccaaagtgggattatggagggagtgcacttgatcgttccaaaggaaacaaaagaaactggattcttgtatgggaagatgggttttgtgatttccatgaatgtgagcgtgctggaagtggttatgtaaagggaaggtttggagctgatattttcttcaaaatgtcacatgaagtttataactatggagaaagattagtagggaaaattgcagcagataacagtcacaaatgggtgcataaagaaatcccaaatgaaaatgat

SEQ ID NO: 38650 - DNA, 224 bp, Gossypium hirsutum
  Clone ID: LIB3165-034-P1-K1-D10
gctcatccattcaaaggcctatgtttttgctcaactcggaaagcacactgtcgggggatagtcagatgatgccaagcaaggaatgtaggctaagggatatgtctattatcatgcacgtatcttcaacacgtcaatgaattatctccactgaaaatttaattgaaagagcagaacactgatctttcattaagaaggattcaagcaccgaaaatacgtggcgccta

SEQ ID NO: 38651 - DNA, 399 bp, Gossypium hirsutum
  Clone ID: LIB3165-034-P1-K1-D11
cccacgcgtccgcccacgcgttcgatggcctctgcttctctcctcaagacttcaccagttttagacaagtctgagtgggttaagggtcacacccttcgccaaccttccacttctgtggtgaggtgccaccctgttgcaccctccggactaactgtgcgtgcaagctcatatgccgatgagcttgtcaagactgctaaagctattgcttctcctggccgtggaattttggccatggatgagtccaacgctacctgtgggaaacgtttggcctcaatcgggctagaaaacacggaggctaaccgccaagcctacaggacgttgcttgtttcagctcctggccttggtcagtacatctcaggtgccatcctctttgaaggaaccctctatcaaaccacaatt

SEQ ID NO: 38652 - DNA, 392 bp, Gossypium hirsutum
  Clone ID: LIB3165-034-P1-K1-D12
atcggctaccattgccactgtctctccggcacaggctaacatggtcgctcctttcaccggcctcaagtctgcctctgctttcccagtcaccaggaaggccaacaacgacattacttctctcgcaagcaatggcggcagagtgcaatgcatgcaggtgtggcctcctactggaaagaagaagttcgagactctctcatacctccccgatcttacacccgtgcagttggctaaggaagtggattaccttcttcgctcaaaatgggttccttgcttggaattcgaattagaggagggattcgtgcaccgtaaatactcgagcctacccacgtactacgatggacgctactggaccatgtggaagctgcctatgttcgggtgcaccgactcggctc

SEQ ID NO: 38653 - DNA, 347 bp, Gossypium hirsutum
  unsure (1)..(347): unsure at all n locations; Clone ID: LIB3165-034-P1-K1-D2
ggcatctcctttcccctcttcttcctccactgtcctctttcgctgcctaacctaaacaaagcaatggctttccttccgcccatcaccactttcgcagccgccctcctactnttnctccacaccccactcgccacgtgatgccccctcaaccttactggggacttccttttaaccctacgaagtcctccaaggctacaacttccccgttgggcttctcccacaaggcgtcttaaagtacgatttagatgaatccaccggtcgggtccatgcctacttagaaggttcgtgtagcttctcactggaagggtcttatcaactcaaatacaaatccacgatcagcgggatca

SEQ ID NO: 38654 - DNA, 272 bp, Gossypium hirsutum
  Clone ID: LIB3165-034-P1-K1-D3
accacgcatccgtacggagctatgtgttcatattcagatactccttcttttcattcttcttcttgatgacactgtgtctatgcagcgacaaggaggatactgactcgaaattatgcaccaccaaagggggattatagagggtgtgcacttgatcgtgccaaaggaaacaaaccaaactggattgttgtatggaacgatggcgcctgagagtttcatgaatgggagcgtgctggaagacggtatgtaacgggaagggttggggctactatttg

SEQ ID NO: 38655 - DNA, 403 bp, Gossypium hirsutum
  Clone ID: LIB3165-034-P1-K1-D4
attctctttcactgcaaactgtgagcgagtgagagagatggcttgctcagctacttcatcggccgcggctctcatctcctctaagccaagggctttctcctccaattccaagcccttctcccaatccctttctctccccaatcccttcactggtctccctgcccctctcctttctcgtcccgcctccttttccctctcccgcgcctccccttctcgcaagtctttcgtcgtcaaagccaccagtgagcttccactggtgggaaatcctgcccctgattttgaggctgaggccgtctttgaccaggagttcattaaggtcaagctctctgaatacattgggaagaaaaatgtgattctcttcttttacccgttggacttcacatttgtttgccccacagagatt

SEQ ID NO: 38656 - DNA, 373 bp, Gossypium hirsutum
  unsure (1)..(373): unsure at all n locations; Clone ID: LIB3165-034-P1-K1-D5
tcatcggcaacccaattgggccacacgtgaacctggctcnnctccccggcaacaagggcacaacatgtgttggggcccccttcacacggcccctcaagtctggcctctggctttcccacgtcacctaggaaaggccaaccaacgaccactcacttctcttgcaaggcaatggtgggaggagtgcnaatgcatgccaagtgtggccctcctcttgggaaggaagaagttcgagacactctcatacctccccgatcttacacccgtacagttggctaaagaagtagattaccttcttcgctctaaatggattccttgcttggaattcgaattagaagagggattcgtgcaccgtaagtactcgagcttacccacg

SEQ ID NO: 38657 - DNA, 400 bp, Gossypium hirsutum
  Clone ID: LIB3165-034-P1-K1-D6
cccacgcgtccgcccacgcgtccgtcttcctccccacccttaaaccatgtcggcttttgttggcaagtatgcaggtgaactcccgtttaggaatttggctttcactgtcttctcctgcatgttttattccattgtatttggggacatgcatgtaaatccttaatgaccacaacacttgatcgatccgtaccataaatgttcaaattttcattacagatatgctattttatgcataattttgttagtcctagctttgactaaaccctgtatgtatattttcccccagaggagttgatcaagaacgccaactacatcgccacgccaggcaaaggtattttggcggcggacgagagcacaagcaccatcgggaagcgtctctcgagcatcaacgtcgagaaca

SEQ ID NO: 38658 - DNA, 401 bp, Gossypium hirsutum
  Clone ID: LIB3165-034-P1-K1-D7
cccacgcgtccgctcagactactctttcgaaccagctccaccatcacccccaaaaaacaaagcaaattgtagaagatggcaacacaagcacttgtatcatcgtctcttacctactcagtggagactgcaaggcagattcttggagctaaacgacaaattgggtcttcaaggaaaggatcctttgttgttaaggcagcttcgactccacccgttaagcaaggagctgatagacctttatggtttgcatctaaacaaagcctttcatacttggatggcagccttccaggtgattatggatttgaccccttgggactctcagaccctgaaggtccaggagggttcatcgagcctaaatggctagcctacggtgagatcatcaacgggcgttatgctatgttggg

SEQ ID NO: 38659 - DNA, 396 bp, Gossypium hirsutum
  Clone ID: LIB3165-034-P1-K1-D8
cccaactccaacaaaacatcaatggcggcagctaagccattgccgtcatctcttcacactcaccaaattctctcttcatgcaaccaaattttaccttcgctcctccatttccgtcaacattacagcaacccgaaatgccaacaaccacaaaggcgaagaaaacactcaagctccttagatggcgcctacgacttggctatcaaagcttacatggaaaacccaaactccatctctggtttcgcaaacaaagtcattggctctctccctatagtcggccttgtcgctaggatttttagtgatgaaagcggtgttggtggggatatcattgattttgctgagtttagaagaagggtgggcaagaaatgtactggtactgattctagagccctttacgag

SEQ ID NO: 38660 - DNA, 400 bp, Gossypium hirsutum
  Clone ID: LIB3165-034-P1-K1-D9
caacaacgacattacttctctcgcaagcaatggcggcagagtgcaatgcatgcaggtgtggcctcctactggaaagaagaagttcgagactctctcatacctccccgatcttacacccgtgcagttggctaaggaagtagattaccttcttcgctcaaaatgggttccttgcttggaattcgaattagaggagggattcgtgcaccgtaaatactcgagcctacccacgtactacgatggacgctactggaccatgtggaagctgcctatgttcgggtgcaccgactcggctcaggtattgaaggagcttgaggaatgcaagaaggaataccccaatgcattcattagaatcattggcttcgacaacgtgcgtcaagtgcagtgcattagtttcattgcc

SEQ ID NO: 38661 - DNA, 381 bp, Gossypium hirsutum
  Clone ID: LIB3165-034-P1-K1-E1
cccacgcgtccggaccttcattcgaccaatggttgaaaatctttaaatgataacatcgtccttttgcccaccactatcaaatttccagattttccaggaaaaagaaaatcaaaacccccaggtgaagaaggtgaaaaccagcagcggcaaaggcaataaaaggtgaagccaaagagagagagatatatacataataaaaaagacttttcaaaagaacacaactatggctcctcatagagaaggatcagatgcttcagtggaagccatggttgctcaagtcgaaaaacacccaatttcatcgatccttatcatcattgctatgcaaacagaagctttgccggtggtgaataagttccagttgattgaaaaccctcattcttc

SEQ ID NO: 38662 - DNA, 381 bp, Gossypium hirsutum
  Clone ID: LIB3165-034-P1-K1-E10
gtttcctttctcgattttctatttagccaaacaagatgcagatcttcgttaagactctaaccggcaagacgatcactctcgaggtcgagagctccgatacgatcgacaacgtgaaggccaaaatccaagataaggaaggcatccctccagaccagcagcgtctgatcttcgccggaaaacagctcgaagacggccggaccttggccgattacaacatccaaaaggagtcaactctccacctcgtcctccgtctgcgcggtgggatgcaaatcttcgtgaaaaccttgactggcaagacaatcactctcgaggtcgagagctccgacacgatcgacaacgttaaagcgaagatccaagacaaggaaggcatccccccagacc

SEQ ID NO: 38663 - DNA, 384 bp, Gossypium hirsutum
  Clone ID: LIB3165-034-P1-K1-E11
caacattgaagagataagattatggtgaaaaactaaacataataaagtccctcataacattcttcgacttgcttcattgattagcccaaagataaacataaccaaaaagaaaaatggcttctgcttccgctactctcctcaagtcttcacctattatcgacaagtccgagtggattaagggccaaaacctccgccacccttcggtttgttttgtacggtcacaccctacatcggccgcctttaccgtccgtgctagttcatatgccgatgagcttgttaagaccgcgaaaactgctgcatctccaggtcgtggtattttggccatggatgaatcaaatgctacatgtgggaagcggcttgcctcgattggtctcgagaataccg

SEQ ID NO: 38664 - DNA, 400 bp, Gossypium hirsutum
  Clone ID: LIB3165-034-P1-K1-E12
ggaacccaaggacagaagactcttttaacatttcaccgcaaagatggagataacaaatgtgagcgagtatcaagaaattgcgaagcaaaagttgccaaagatggtgtatgactactacgcatctggtgctgaggaccaatggacattgcaagagaatagatttgctttcactaagatactgtttcgtcctcgtattctcatcgatgtaagcaagatagacatgaccacaactgtgttgggtttcaagatatcaatgcctatcatgattgccccaactgccatgcaaaaaatggctcatcctgaaggggagtatgcaacagctagggctgcatctgctgctggaactatcatgacattatcctcatgggcaacttctagtgttgaggaggttgcttcgaca

SEQ ID NO: 38665 - DNA, 384 bp, Gossypium hirsutum
  Clone ID: LIB3165-034-P1-K1-E2
aaggacagggctactcctcaacaagttgctgattacaccctcagcctcctccgccaaagaatccctccagctgtccctggaatcatgtttttgtctggtgggcagtctgaagttgaggctaccttgaacttgaatgcaatgaaccaagctccaaacccatggtatgtgtcattctcatatgcaagagcccttcaaaacacttgcctgaagaagtggggaggcaggcctgagaatgtgaaggatgctcaggaagcgctgctcatccgagcaaaggccaactctcttgctcaactcggaaagtacactggcgaaggagagtcagaggaggccaagcaaggaatgtttgtcaagggttatgtctattagcatgtttgtatcttcaac

SEQ ID NO: 38666 - DNA, 396 bp, Gossypium hirsutum
  Clone ID: LIB3165-034-P1-K1-E3
cccacgcgccgcttattgatgggttaaagagagtagctgtttgcaacccagtcatgctattggacgagattgacaagacaggttctgatgtgcgtggtgatccagcttcagctctactggaggttcttgatccggagcagaataattctttcaacgaccactatttgaatgtgccatatgacctttcaaaggtgatttttgtggctactgcaaatagggtgcagcctattcctcctccactcttggacaggatggaagtcattgagctgcctggatataccgctgaagaaaagctaagaatagccatgcaacatttgattccacgagttttggatcagcatggattgaattctgagtaccttcaaattccggaggccatggttaaacttgttattc

SEQ ID NO: 38667 - DNA, 381 bp, Gossypium hirsutum
  Clone ID: LIB3165-034-P1-K1-E5
cccacgcgtccgggaaaaagaagtccagtagtagtaagtctttattctacgaagctcctctcggttacagcattgaagacgttcgaccaaacggtggaatcaagaagttcagatctgctgcttactccaactgcgctcgcaagccatcctgatatactcacaagcgtgccgtctgaccactagtagtggttaataaaactgttatttgctttgttagttagttttagattatttccccgaccaacttcttcctcttctctcttcgtggctggtttctttacattgcgttctcctgatttggcgactttgtaattcggataaagtttgcagtccttggttgaatcacaatggcagtgtctgcaattggatttgagggttatg

SEQ ID NO: 38668 - DNA, 404 bp, Gossypium hirsutum
  Clone ID: LIB3165-034-P1-K1-E6
ctcatatactctctgtttatttattttttttgttttccttttgtcgtccttttctcacctgttgttcttccattttttaatcaagttccccccaccccgctcaacacctctccctctaacaagccaaaggccccaagcagattctatttgttctaacatggagaaaagccatgaacttgaactgacccagatgaggaaatcagtagagaaacttgggttttcaacagagaaatacggggatccgacactcatgagattcttgattgcaagatcaatggacacagataaagcttcaaagatgtttgtccagtggctgaaatggaggtcttctttagttcctaatgggtgcgttgtagaatctgaagtgcctgaccaattagaagccagaaagatttttttgcaag

SEQ ID NO: 38669 - DNA, 394 bp, Gossypium hirsutum
  Clone ID: LIB3165-034-P1-K1-E7
cccacacgtgcggatgtcatgaagatagacatgggaggttctgcagcagttattggtgcaacgaaagctctcgggcaaatgaaacctactggagttgaggcatattacattgatgcatattgtgaaaacatgataagtggaacgggtatgagacctggagatatcctcacaggatctaatggaaagactattgaggttaataacactgatgcagaaggcaggactacactcgcagatgctttggtatatgcttgcaaccaacgtgtctagaagatagtcgaccaggcaacactaactggggctagtattgacgatcttggaccgacgattgcaggcagtctacacacctagtgatgaacttgcaaaggaggtattcgaagcttcaaagatcagt

SEQ ID NO: 38670 - DNA, 357 bp, Gossypium hirsutum
  Clone ID: LIB3165-034-P1-K1-E8
atttgatgaaaaagggagtgaaggtgagacaaaaggacgccatctgagggggaagagatctacagaaagtgatgggaaagcggataacggtgatgataagatcgtggttcggagccagactaagaagaacagaagattgggccttgataaaaggattgaactgaaaaagaatagagaagaaaagtcggttgtttctggccagagtaaaaagggtatctcgaatgaaagtgagaagatcgataggcttgtccgggactattcggcttcaaccgatttggtcagcctggactggaagaaaatgaagatacctccggttctgccgtccaccgaacatacttggttgtttaagctaatgca

SEQ ID NO: 38671 - DNA, 401 bp, Gossypium hirsutum
  Clone ID: LIB3165-034-P1-K1-E9
cgatggaaccgtcagtgttcttgtggcaacttttttgttcgtaattcccaacaagaagcgaaagggagagaaattgatggactggaacgaatgcaagaagctgccatggaacattattttgttactaggggctggtttcgccatagccgacggagtccagtcaagcggactcgctgatcaattatccaaaactctagattttctcgaagaggctccgtatttagctattgcccccgcggtgtgtttaatctgtgccataattaccgagtttataacatcaaatgatgctactgctacccttgtgcttccacttttgattcaaatggcaaaaaccatgcatgttcacccattactccttatggtccctggagcagtgggatcacaatttgcttttattcttg

SEQ ID NO: 38672 - DNA, 300 bp, Gossypium hirsutum
  Clone ID: LIB3165-034-P1-K1-F1
cccacgcgtccgttaaaacaagggtttcttttcttcttcatgttctcgatcatggctgcttcttcttctttctttgttaggtgtttccctttacttttcttcttcttcttctcacatgtccaagcagtgaaatcaccaattcatcctcgggatgttctacctttattgccgagacaggtttcatggccgatccttaattcacttaacagtgccatcgaccttttaccagcctttgtcggttctgtttcgtcccaaaaccacatcgtgagctggaaaggtgcgtgcttttatgagaacacc

SEQ ID NO: 38673 - DNA, 395 bp, Gossypium hirsutum
  Clone ID: LIB3165-034-P1-K1-F10
cccacgcgtccgaaaacacccaggtacagaagcactaacattttctctttggcttaccaaccttggatctgaaatggcaaagtcacccgaagaagaacaccctgtcaagacctttggctgggctgcaagggacccatctggtcatctctctcctttcaccttctccagaagggtaactggtgaagaagatgtgaggtttaaggtgctgtattgtgggatttgtcattctgaccttcacagtatcaagagtgaatggggctcctccaactaccccatggttcctgggcatgaaatagtaggggaagtgacagaagtaggcagcaaagtggaaaaggttaaggtgggagataaagtgggcgtgggatgcatggtcggagcttgccacagctgcgaca

SEQ ID NO: 38674 - DNA, 403 bp, Gossypium hirsutum
  Clone ID: LIB3165-034-P1-K1-F11
aaaaaatctccaagccaaaccatttctccgctggcatttgcttacaacaaaaaaaaaattcaaattgaagaatgcctgtatttgcttcaagagttgggttcaggagacacgactacaagaatagatcaaaggaacgaaacgatgaccgtaaagacaaattgtccgaagtgttcaagagctatgctgctaatgggctgctagacaaggaagggctgaaagacgcttttctacatctagatgctgccatgccgtaccggcaagccgaagacgccctccgtgtcgtcggcaaaacctataacattaacgtcgaggaggaaaccgagcttaacgcccttatcgactatgcttacaataagggttacgggtcttcaatttgattagctaatttataagctaaatttct

SEQ ID NO: 38675 - DNA, 402 bp, Gossypium hirsutum
  unsure (1)..(402): unsure at all n locations; Clone ID: LIB3165-034-P1-K1-F12
gtttcattgaaggcgggactctcagactactctttcgaaccagctccaccatcacccccaaaaaacaaagcaaattgtagaagatggcaacacaagcacttgtatcatcgtctcttacctactcagtggagactgcaaggcagattcttggagctaaacgacaaattgggccttcaaggaaaggatcctttgttgttaaggcagcttcgactccacccgttaagcaaggagctgatagacctttatggtttgcatctaaacaaagcctnncatacttggatggcagccttccaggtgattatggatttgaccccttgggactctcagaccctgaaggtccaggagggttcatcgagcctaaatggctagcctacggtgagatcatcaacgggcgttatgcta

SEQ ID NO: 38676 - DNA, 399 bp, Gossypium hirsutum
  Clone ID: LIB3165-034-P1-K1-F2
cccacgcgtccggtgagatggcttgctcagctacttcatcggccgcggctctcatctgctctaagccaagggctttctcctccaattccaagcccttctcccaatccctttctctccccaatcccttcactggtctccctgcccctctcctttctcgtcccgcctccttttccctctcccgcacctacccttctcgcaagtctttcgtcgtcaaagccaccagtgagcttccattggtgggaaatcctgcccctgattttgaggctgaggccgtctttgaccaggagttcattaaggtcaagctctccgaatacattgggaagaaatatgtgattctcttcttttacccgctggacttcacatttgtttgccccacagagattactgctttcagtgacc

SEQ ID NO: 38677 - DNA, 404 bp, Gossypium hirsutum
  Clone ID: LIB3165-034-P1-K1-F3
ctcttttgtatacctgtagcatatagtaatagtaagcagtaatagcaatggcctgctgcatgatctcatcggcaaccattgccaccgtgaaccgctcctccccggcacaggccaacatggtggcccccttcaccggcctcaaatctgcctctgctttcccagtcaccaggaaggccaacaacgacatcacttctcttgcaagcaacggtgggagagtgcaatgcatgcaagtgtggccgcctcttgggaagaagaagttcgagactctctcatacctgcccgatcttactcccgtacagttggctaaggaagtagattaccttcttcgctctaaatggattccttgcttggaattcgaattagaggagggattcgtgcaccgtaagtactcgagcttacccacg

SEQ ID NO: 38678 - DNA, 402 bp, Gossypium hirsutum
  Clone ID: LIB3165-034-P1-K1-F4
ggtcagtaaagcttcaattcaaaggagtgttagtttccatggcgttttcttcttctgctctctctcacacctcttcttcatgcctctcttccttcccacatgccttcacaaccagaaaaacccatcttcgcttcccatcatttttactcataaaagcttcttctgaacctgacaaaggaaaccccactgctacacagaccaaaaacgctgaaggctctagcaatgctcaacctcaacctcaagccactcccgccgccgccgctaagccacctcccaaaaagcccgtttattccatgaagaaaggccagattgttagggtggataaagacaagtatctcaacagtattaattatctatctgtagggcatcccccctattacaaaggcttggactacatatacg

SEQ ID NO: 38679 - DNA, 385 bp, Gossypium hirsutum
  Clone ID: LIB3165-034-P1-K1-F5
attcaaaactaatcatgtaaaaaaaaaagttgattggaacaaataaagtgaaacatttaagacaagaacaaagtggagattttataacacaaaaatagaggatgcaaatccacttaaaacacaaaaggaaaacaacattcaattaagacacaaaggggggatttcctttgtttgtgcccaatatagatttttttcttcccttagagcttaatttcccatttagaaagctcctctcttgatagcatcgtcattagcatttccaagggcagcttcactcaaatatttgtcagccaattgaaccctcttcacattctcttgctcagcaacaagcatgtatccatattccaacagcttctcaatggtcatcttcggttgctcgaaagat

SEQ ID NO: 38680 - DNA, 405 bp, Gossypium hirsutum
  Clone ID: LIB3165-034-P1-K1-F6
ctcccatcacccgagatcatctttccccttcagaatggcggctgcaaccatggctctctcttccccatctttcgccggaaaggccgtcaagctctctccttccgcccctaaaatccaaggcaatggccgtgtttccatgaggaaaaccgctaccaaggctgctccctctggaagtccatggtacggtcctgaccgagtcttgtacttgggtccactatctggtgagcctccatcttacttgaccggagaattccctggtgactacggatgggacactgctggactctcggcggacccagagacatttgccaggaaccgtgagctcgaagtcatccactgtaggtgggctatgttgggtgctcttgggtgtgttttccctgagcttttggctaggaatggagtcaa

SEQ ID NO: 38681 - DNA, 374 bp, Gossypium hirsutum
  Clone ID: LIB3165-034-P1-K1-F7
cccacgcgtccgaaatcagttgcttcacaatggcctctacaaccatggctctttgttccccatcattcgccggtaaggcagtgaagttctccccttccacccctgaaatccggggaactggccgtgtttccatgaggaaaaccaccaagcctgttccttctggtagcccatggtacggtcctgaccgagttttgtacttgggtccactttccggtgagccaccatcttacttgaccggtgagttccctggtgactatggttgggacactgctggactctcagctgatcccgagacctttgctaggaaccgtgagctcgaagtcattcactgcagatgggccatgttgggagctcttgggtgtgttttccctgag

SEQ ID NO: 38682 - DNA, 202 bp, Gossypium hirsutum
  Clone ID: LIB3165-034-P1-K1-F8
acgatttcgaactctatttagaatcaaaccaccgtacggtattttctttaagtatcttgtaggatactgttgttccagccacatttctcttttcgctctactagtaatttaattggagcttgaacccgagtttcggtgaggttgaatccacttttttcgttctaccttccttatttattttatctaattcttatctaattct

SEQ ID NO: 38683 - DNA, 333 bp, Gossypium hirsutum
  Clone ID: LIB3165-034-P1-K1-G1
gtttcattgaaggcaggactctcagactactctttcgaaccagctccaccatcacccccaaaaaacaaagcaaattgtagaagatggcaacacaagcacttgtatcatcgtctcttacctactcagtggagactgcaaggcagattcttggagctaaacgacaaattgggtcttcaaggaaaggatcctttgttgttaaggcagcttcgactccacccgttaagcaaggagctgatagacctttatggtttgcatctaaacaaagcctttcatacttggatggcagccttccaggtgattatggatttgaccccttgggactctcagaccctg

SEQ ID NO: 38684 - DNA, 401 bp, Gossypium hirsutum
  Clone ID: LIB3165-034-P1-K1-G10
caatctttcagaaagagagaggcaaagagaaaaaagagagagggtattacatatattcatctaattatacaaataaagatggctcttcacctttcctgggtttccgtttttggcgatctcggtactgaaatatatattcatatgcccttcttgtttgcgtattttaatattcactaacattacattatattgtttttaattaggcgtcattgtttcatttatggtcgccttttctcccatgccagcattttatcaaatctataagaagaaaacatcagaaggattccaatcattaccctatgtgatatcgctattcagtgccatgctttggatttactatgcacttcttaagaagaatgaaatgcatctaattatcatcaacattttctgctgtttcattc

SEQ ID NO: 38685 - DNA, 389 bp, Gossypium hirsutum
  Clone ID: LIB3165-034-P1-K1-G12
atggcttcttctctcagtctttcaagccacacagtggcttcattattcccttctcacacttcaaagccgcagttgtcactttctaaatccatcccaattctcaccaaatcatcacagtctcaatttcatggccttaaattctctcacccttcttctcttaaaattcctcgtttttccacttttaaaacctcgatttctgctaaggtgaataaaggtacagttcctccagcatttactttgaaagatcaagatgggaaaaatgtaagcctttcaaagtttaaagggaagcctgttgtggtttatttttaccctgctgatgaaacccctggttgcaccaaacaggcatgtgcttttagagattcttatgagaagtttaagaaagctggagc

SEQ ID NO: 38686 - DNA, 398 bp, Gossypium hirsutum
  Clone ID: LIB3165-034-P1-K1-G2
ggcgagagtagtggaaatagaaaggaaaaatgagcttaaaacatcaccataactccaactccgcagcagctgctcaatctctctcttttgatgacattgccgacttcttctctcttccccttgacgacgccgcttccactcttggcgtttgcacctctgttctcaagaaaatctgccgtgaaaatggtctcgacagatggcctcaccgcaagtttttagctggaaagagcgtcgaagaaatcaaaaggcatgcagctagagaaagaagaagggaaatcgctgagctttcaaaggctcatcggcagagctctcaacctcaaccccaaaacaatgaacaacccaaattacaaggtggctcagcattaccgaacttacagcagcaagggataagaaacata

SEQ ID NO: 38687 - DNA, 350 bp, Gossypium hirsutum
  Clone ID: LIB3165-034-P1-K1-G3
cagcagctgcaccacaactacagagaagagagtaaaggggaaaaaaagcgtcgtcgcttttgcttcttcttctacttcgctctctctccttctccgaagttcctctttcgttctttcatttattcagcattgtaaaagatggccgacggtgaggatattcaacccctcgtctgtgataatggaactggaatggtgaaagctggttttgctggtgatgatgctccaagggcagtttttcccagtattgttggtcgtccccggcacactggtgttatggttgggatgggtcagaacgatgcctatgtacgagatgaagcacaatctaaacgaggtatccttactttgcaata

SEQ ID NO: 38688 - DNA, 399 bp, Gossypium hirsutum
  Clone ID: LIB3165-034-P1-K1-G4
cttggaaattccaccttactatctctcacaattcaatcgactatggaatccattggagttctcatggcttgccccatgaactcttacctcgagcaacaactcgagaaccgtttcaagctattcagattctggacagtgccggacaaatcatcctttctggcttctcacaaggactcaatccaggcggtcgtcggaaacgcctttgccggtgccgatgctatgctgatcgaggcgttgcccaagctggagattgttgccagcttcagtgtggggcttgataagatagatttggccaagtgtaaagaaaagggtatccgagttaccaacacccctgacgttttgactgaggacgtggcggatttggcgatcggtttgatgttggcggtgttgaggaagctc

SEQ ID NO: 38689 - DNA, 400 bp, Gossypium hirsutum
  Clone ID: LIB3165-034-P1-K1-G5
atacaggcagcaatgagaaggagcttagtatatactccaagacagaattccggttgggacaccacgtcccaagactaccaagctcatctttcccgaatggaaagatcagccaccatgatccctggtgcccctcagtaccccgatgtccacaaggccttcaacaacaaggttgagtttccggaagaagatcagtgcactgagcggtccccaacggcaaactcccgaaagaaggttcaggtggttgagcatgcagagaccgttgatgaagccacccttgattctcaagctgatagctacatccagcagaaacacaaagcctttgaactgtgcaaatggaagaccttcaaaatgcactagagttgagacttttggagtaagcatgtcgatcatgatttaatga

SEQ ID NO: 38690 - DNA, 407 bp, Gossypium hirsutum
  Clone ID: LIB3165-034-P1-K1-G6
cccacgcgtccgcccacgcgtccggaaaatggaaaatggaggcaaccatggaaaggatatgcttttggaccatcttggagatgacattgttgctgcttctgcaactatggagcaacacgaagaagcaccttctgcagaagaaatgcaagaaaggatggatcaattcacctacatcatgcagcagaagtttctctctggtgaagattatgagtatttagattactctaaaatagatgacgatgagaccttggatgatcactggcttagggaagctaaccatgatgcagaggagaagtattttgctgaagattaataacggaaaattacatccattgatctcccaacatttgcagatatctcttcgttatagcagtggttagtgattacctttttctacttatgtacct

SEQ ID NO: 38691 - DNA, 380 bp, Gossypium hirsutum
  Clone ID: LIB3165-034-P1-K1-G7
cccacgcgtccgatggcacccatttcattacccaacaagccccatgcagtatgcatcccctacccagcacaaggtcacgtaaatccgatgctcaaagtggccaaactcctccatttcaaaggcttccacatcacttttgtcaacaccgagtacaaccacaaacgcttgctcaaatccaggggcccccacgccctcaatggcttgcctgacttccggttcgggacaatccccgacggccttcctccgccggacatcgacgccacgcaagacatccccgcgctttgtgactccactagcaagcattgtttggctccctttcgccgactccttgttgagctaaaagctacttccggtgtcccgccggtcacttgtatcgtcgc

SEQ ID NO: 38692 - DNA, 380 bp, Gossypium hirsutum
  Clone ID: LIB3165-034-P1-K1-G8
cccacgcgtccgggaatccattggagttctcatggcttgccccatgaactcttacctcgaacaacaactcgagaaccgtttcaagctattcagattctggacagtgccggacaaatcatcctttctggcttctcacaaggactcaatccaggcggtcgtcggaaacgcctttgccggtgccgatgctaagctgatcgaggcgttgcccaagttggagattgttgccagcttcagtgtggggcttgataagatagatttggccaagtgtaaagaaaagggtatccgagttaccaacacccctgacgttttgactgaggacgtggcggatttggcgatcggtttgatgttggcggtgttgaagaagctctgtgagagtgatc

SEQ ID NO: 38693 - DNA, 278 bp, Gossypium hirsutum
  Clone ID: LIB3165-034-P1-K1-G9
gggatgaggaagagcttgccatggagaacaacaagagtgctgtatcttcatcagggaaaatcaccttgagcgtcacaaagagcaagcacgcagaccggtgaagttatcggtgtgttccagagccttgaatcatctgacactgacttgtgtgccaagactgcaaaggatgtcatgatcactggtgtatggaatgctcatctagattcatgaacatgtgttgtatgaatttgtttattttcagctgagattctgggattttttaacacgtgatggtaaac

SEQ ID NO: 38694 - DNA, 292 bp, Gossypium hirsutum
  unsure (1)..(292): unsure at all n locations; Clone ID: LIB3165-034-P1-K1-H1
cccacgcgtccgctcgagatgggtgggccagcccgatccgacccaataacctttgatttgattcgggtgcgatcgactttgccggttcaggtgtggttcacatggttggtggcattgcanggttatggggtgcattaatcgagggtccaaggattggccgattcgatcgagctggtcgatctgtggcgttacgtgggcacagtgcctcattagtagtgctcgggacgtttctattgtggttcggatggtatgggttcaacccaggttcattcttgaccatcatgaaaaggta

SEQ ID NO: 38695 - DNA, 166 bp, Gossypium hirsutum
  Clone ID: LIB3165-034-P1-K1-H10
gccactcgacagatgcgattacacacgatctgccgaccatggcatcagttgacggtgcagactttaacagcgtggatgctacattttgaagtcggcctaatggaactacacacgatatgataaccagcctgcctggtcattttaagattgcatgtctatgtgcaga

SEQ ID NO: 38696 - DNA, 350 bp, Gossypium hirsutum
  Clone ID: LIB3165-034-P1-K1-H11
cccacgcgtccggtgagactcttttgtatacctgtagcatatagtaatagtaagcagtaatagcaatggcctcctccatgatctcatcggcaaccattgccaccgtgaaccgctcctccccggcacaggccaacatggtggcccccttcaccggcctcaaatctgcctctgctttcccagtcaccaggaaggccaacaacgacatcacttctcttgcaagcaacggtgggagagtgcaatgcatgcaggtgtggccgcctcttgggaagaagaagttcgagactctctcatacctgcccgatcttactcccgtacagttggctaaggaagtagattaccttcttcgctct

SEQ ID NO: 38697 - DNA, 336 bp, Gossypium hirsutum
  Clone ID: LIB3165-034-P1-K1-H12
taccgaaccggagggtcggggtcgaccgtacgcgtacggctaccactgcttctccaatggcgactcagctgaagagcagctttacgtcgtctgttacaagaggactggtagtccccaggggcatttcgggatccccgttcaaagtatcttccggaaagaccaggaccccttgcttcactgtcaaagctgttcaatccgacaagtcaacatttcaagtaatccaacccatcaacggcgaccccttcattggaagcctggagactccaatcacctcaagccccttaattgcatggtacctttccaacctcccagcctataggacggcagtgaacccac

SEQ ID NO: 38698 - DNA, 326 bp, Gossypium hirsutum
  Clone ID: LIB3165-034-P1-K1-H2
cgaactcccctcccgtcctctttcccgatttgtcttcttcattgccccgccatggcttgtgttagcttcgctaaactcaacgcgccgtcatcctcttggatcggtggccagcagtctctccctcaacgctccggatcatccgctcggctcgccactcgcagagtctcactcccgatccgtgctggcgcttacaccgacgaactcatcaaaaccgccaaaactattgcttcacctggtcgtggaatactggcaattgatgaatcgaatgcaacatgtgggaagagattatcttctattggcttagacaatactgaacccaaccggca

SEQ ID NO: 38699 - DNA, 406 bp, Gossypium hirsutum
  Clone ID: LIB3165-034-P1-K1-H3
caaagtccaatcactcccaatactttcataacatttcacgaacttcactctccagtctgcaatggcggctgccgtctccaccatcggtgctgtcaaccgagcaccgttgagtttgaatggatcaggtgccggagcttctgctccaagctcagctttcatggggaacagcttgaagaaagtgagcgctaggttcaacaacaacggcaaggctccagtgggaagtttcatgattgtggctgccaaagaaatcgacgaagacacacagaccgaccaggaccgatggaagggtcttgcttatgatatctccgatgaccaacaagacattaccagagggaaaggtatggtcgactcattgttccacgctcccatgaacgatggtactcactatgctgtcatgagctcctat

SEQ ID NO: 38700 - DNA, 406 bp, Gossypium hirsutum
  unsure (1)..(406): unsure at all n locations; Clone ID: LIB3165-034-P1-K1-H4
ctcccatcacccgagatcatctttccccttcagaatggcggctgcaaccatggctgtctgttccccatctttcgccggaaaggccgtcaagctctctccttccgcccctaaaatccaaggcaatggccgtgtttccatgaggaaaaccgctaccaaggctgctccctctggaagtccatggtacggtcctgaccgagtcttgtacttgggtccactatctggtgagcctccatcttacttgaccggagaattccctggtgactacggttgggacactgctggactctcggcggacccagagacatttgccaggaaccgtgagctcgaagtcatccactgtaggtgggctatgttgggtgctcttcngtgtgttttccctgagcttttggctaggaatggagtcaaa

SEQ ID NO: 38701 - DNA, 192 bp, Gossypium hirsutum
  unsure (1)..(192): unsure at all n locations; Clone ID: LIB3165-034-P1-K1-H5
aaaaaaaaaaaaaaaaaaaaaaaaattttaattaaaaaaaaaaataaaaaaaaaaggggggtggtaaaaaaaaaaaaacggaaaaacaaaaaaaaaaaaatnnnttaaagggctgcctttttaaaaaatccaagcttacctaccccggcataccacaccaaaatttttttatagggccacctaaattaaatt

SEQ ID NO: 38702 - DNA, 350 bp, Gossypium hirsutum
  unsure (1)..(350): unsure at all n locations; Clone ID: LIB3165-034-P1-K1-H6
cacgcgtaccgctcgttttgtataacgtgtagcatnatagtacctagtaacgcagacaataggcagtgtgcctgcctccatggatcgtcatcggcaacccaatttgcgcaccgtgaacctgcgtccgtcctccggcaccaggcgccacccatggtggcgccgccttcacacggcactcaagatctggcctctgtctttcccacgtcacttatggaaggcccaacaaccgacccatcacttctctttgcaaggcgaatgtgtgggagggagtgcnnaatgcattgcacggtgtggccctcnnctcttgggaaagaaaagaagttcgagacanctctcatacctcgcccgat

SEQ ID NO: 38703 - DNA, 377 bp, Gossypium hirsutum
  Clone ID: LIB3165-034-P1-K1-H7
ctttctttctcttttgtcaaaccctaaatccctcactccaactgcagattcacctgcacaaacagcaaccaatacattcaagcttggagggatgactttttagccttgagatctcctttcggcttcaatttcaacgaagcaaaaagagatttatggcatattcgcaaggtaagactcctctttcttttttccttttattttcaaacgcaatgatggaagatttgaaggcaataaatcgcaaggaaatgcaaaaacttaaagaaatttaaacagaaatcaacttctaaaaattttgactgctttctttggattcaatatgcgttcgtcctcttttacactgattttctcgggctttattagcgattacaaggtaatag

SEQ ID NO: 38704 - DNA, 359 bp, Gossypium hirsutum
  Clone ID: LIB3165-034-P1-K1-H8
atttagctatagcatacactactagtacccactactagcaatggcttcctcaatgatctcatcggctaccattgccactgcctctccggcacaggctaacatggtcgctcctttcaccggcctcaagtctgcctctgctttcccagtcaccaggaaggccaacaacgacattacttctctcgcaagcaatggcggcagagtgcaatgcatgcaggtgtggcctcctactggaaagaagaagttcgagactctctcatacctccccgatcttacacccgtgcagttggctaaggaagtggattaccttcttcgctcaaaatgggtttccttgcttggaattcgaattagaggaaggattc

SEQ ID NO: 38705 - DNA, 376 bp, Gossypium hirsutum
  Clone ID: LIB3165-034-P1-K2-A1
cttagtttcctcttagcaaagacttcagccacccacgcagcccctttaccgatccaaacaatgggacgcgtccgtacgaagactgtgaagaaatcgtctcgtcaggtaatcgagaggtactactctcgcatgacgcttgatttccacaccaacaaaaaggttatcgaagaagtagctattatcccatccaagaggctccggaacaagattgctgggttctcaacccatttgatgaaacggatccagaagggtccggttcgtggcatttctctgaagcttcaggaagaagagcgtgagcgtcgtatggattttgtccccgatgtatcggctattgctgttgattcaatagaagttgataaggaaaccattgatatgc

SEQ ID NO: 38706 - DNA, 304 bp, Gossypium hirsutum
  Clone ID: LIB3165-034-P1-K2-A10
gaaggattgattgattaattacttaattaatcattcaattatgataactagtgagcacggattgatgaatgttccattaggttttatatatgtatctaatgtgtatgtattatgtgtactactatgcttcactaggagtaaaggcaaatctggtgtgaaactaagtcaattatgatgactagtgagcatggatattgatgaatgttccattagtttttatatataatatctatatgtattctatatatttctctgcttcactgggaataaaggcaaatctggtattgaacaaaatattatgaat

SEQ ID NO: 38707 - DNA, 281 bp, Gossypium hirsutum
  Clone ID: LIB3165-034-P1-K2-A11
tttagctatagcatacactactagtacccactactagcaatggcttcctcaatgatctcatcggctaccattgccactgcctctccggcacaggctaacatggtcgctcctttcaccggcctcaagtctgcctctgctttcccagtcaccaggaaggccaacaacgacattacttctctcgcaagcaatggcggcagagtgcaatgcatgcaggtgtggcctcctactggaaagaagaagttcgagactctctcatacctccccgatcttacacccgtgca

SEQ ID NO: 38708 - DNA, 254 bp, Gossypium hirsutum
  Clone ID: LIB3165-034-P1-K2-A3
gcctgttagtgtggcatttgaagttgtcactagtttccgtttttacaaaagtggggtttataccagtaaaacatgtggcagcacacccatggatgtgaaccacgctgttcttgcagttgggtatggagtcgaaaatggcgttccatattggctcattaagaactcatggggtgcagaatggggtgacaatggctacttcaagatggagatgggcaaaaacatgtgccgtgtggcaacttgtgcatcatacccaa

SEQ ID NO: 38709 - DNA, 425 bp, Gossypium hirsutum
  unsure (1)..(425): unsure at all n locations; Clone ID: LIB3165-034-P1-K2-A4
agcaaaaccatggcctctgcttctctcctcaagacttcaccagttttagacaagtctgagtgggttaagggtcacacccttcgccaaccttccacttctgtggtgaggtgccaccctgttgcaccctccggactaactgtgcgtgcaagctcatatgccgatgagcttgtcaagactgctaaagctattgcttctcctggccgtggaattttggccatggatgagtccaacgctacctgtgggaaacgtttggcctcaatcgggctagaaaacacggaggctaacctttaagcctacaggacgttgcttgtttcagctcctggccttggncagnacatntaaagtgccattctntttgaggaaaccctctatcaaaccacaattgatggcaagaagatggttgatgttcttgttgagcagaacat

SEQ ID NO: 38710 - DNA, 395 bp, Gossypium hirsutum
  unsure (1)..(395): unsure at all n locations; Clone ID: LIB3165-034-P1-K2-A6
gtcagtacatctcaggtgccatcctctttgaggaaaccctctatcaaaccacaattgatggcaagaagatggttgatgttcttgttgagcanaacatagtccctggtatcaaggttgacaagggtcttgttccactggctggttcaaacaacgagtcatggtgccaaggtcttgatggcctcgctccacgttcagctgcatactaccaacaaggagctcgtttgcaaaatggcgtactgtggtaagcattcccaatggaccaaccgaacttgctgtgaaggaagcagcctggggacttgctcgctatgccgccctctttcaggacaatggattggttccaattgttgagccagagatcttgcttgatggtgatcacggaattgacaggactttcg

SEQ ID NO: 38711 - DNA, 207 bp, Gossypium hirsutum
  Clone ID: LIB3165-034-P1-K2-A7
gtcgacggcttctatcaacggttggtgccttacctcctcttcttccaccactaccacctcctctttttccgctcgtcgacgacctacattgcggccttcagtcgtcgctagccttaactcttctccttctcctccgactcttatccaagaccgcccggtttttgctgcccctattcctttgctcaccccgagaggagagatgggaaa

SEQ ID NO: 38712 - DNA, 385 bp, Gossypium hirsutum
  Clone ID: LIB3165-034-P1-K2-A8
gagtacttgaacggagaagttcccggagactatggatacgatccgtttggtctgagcaagaagccagaagactttgcaaaatatcaagcatatgagttgatacacgcaaggtgggcaatgcttggtgctgcagggttcatcatccctgaagcctttaacaaatttggtgccaactgtggccccgaagccgtttggttcaagaccggagctcttctcttggacggtaacaccttgaactacttcgggaagaacatccccatcaaccttgtggtggctgtcgttgccgaagtcgtccttgttggtggtgctgaatattacagaatcatcaatggcttggatctggaggacaagctttaccctgggggaccatttgtcccactggggt

SEQ ID NO: 38713 - DNA, 423 bp, Gossypium hirsutum
  Clone ID: LIB3165-034-P1-K2-A9
cccacgcgtccgacttttaacccctgccgacactctcaccattttctcagcaaacttagcctatgaaaatcaccattacaagtcccaaagaagacccccgctaattctaaaagaaagaaccagagttttctttctctttagtttacgtttattgtccttttggaatttttgatactaaaaaaaggaagcaacgaagaagggaaatggagggcaaagaagaggatgttagattgggagccaacaagttcacagagaggcaaccaattgggaccgcggctcagagtcaagatgacgggaaagactacactgaaccaccaccggctccatttttcgagcctggcgagttaacctcatggtctttttatagggctgggattgccgagtttgtggcgactttccctttcttgatatcactattttgac

SEQ ID NO: 38714 - DNA, 403 bp, Gossypium hirsutum
  Clone ID: LIB3165-034-P1-K2-B1
ttcgctttgagattagatccaaaattcccctttcatcatatttccgattccccaatttttcctgaaaccctaatcctaatcccggattcttctcgtctacatcgtctagcaaatggcaaccgaggagccggcagtcgtggcagaccccgcaccggagacggaggaggacaagactgctgagaccaaagctacttcaaaatctggcagagcaaagaaaaccaaagaacccaaaaccaagaaagctgcagctcctcggaaaccacgggctgctcctactcatccaccttacgaagagatgatcaaagatgcgatcgttactttgaaagagaggacaggttcaagtcagtacgccattgctaagttcattgaagagaaacagaagaatcttcctgggaatttcaag

SEQ ID NO: 38715 - DNA, 350 bp, Gossypium hirsutum
  Clone ID: LIB3165-034-P1-K2-B10
ggaccttcaatttttcatcggagagagcatgcacgatgatggatgtttggtatttgcttactacaaggatggtgctgttgacccgacatttttgtactttgcgtatgcattgaaggaggtcaagtgctgaggtttgaagcaaagaaaaaaaaagtggttgctgaagaatttagtcctttttattattgcttttgtctcttattttcagtactctgctaaagacataaattatttatggtttttgatgtttttgattgaattgactgctgatttatcatggaatggtttctattcttatgggttgactaaacaagaatgtaacccttcgttctattactacttaattttat

SEQ ID NO: 38716 - DNA, 391 bp, Gossypium hirsutum
  Clone ID: LIB3165-034-P1-K2-B12
caaaaactgggatggcttttgtaacgtcggaggaattgctggccactttggtgccaattgctgggtattggatatactcaggtatgtatgtgatgtttgagtcaaggtttgagaagtacaagttgcactccaagaaagaagaggaggagaagaatttggtttccagaaaggaagtcttcaaagccgttctttgccatcaagtcatgtcaattgctattaacctcttcacgtatgcggtaacaagagaaaaagatggtgaggcatctccaaagaaatcactaaccttgcttcttctagccaagcaattggtgatagcaatggtggtgatagatacatggtctgtttttgtgcattggtacttgcatcagaacaagtttttatcaaacacctt

SEQ ID NO: 38717 - DNA, 301 bp, Gossypium hirsutum
  Clone ID: LIB3165-034-P1-K2-B2
gattatggtgcagaacttagcataatacagtccctcataacattcttcgactcgctttattgattggcccaaagattaacctaaccataaagataaacggcttgtgctttcgcttctgttctcaagtctttacctatgatcgacacgtccgtgtggattaaggggcggaacctgcgccaccctccgggtcgctttgtacggtgacacgctacatcggacgcctttaccgtccgcgctagctcatatgccgatgagcatgccaagaccgcggaaactgccgcatctacaggtcgaggtattt

SEQ ID NO: 38718 - DNA, 370 bp, Gossypium hirsutum
  Clone ID: LIB3165-034-P1-K2-B3
cccacgcgtccgcccacgcgtccgctttgccaaacatggagactagtgtcacgtgctacgctcgtgggattgttcttcctggtgtctcttctaagcactcctcggcattagtctcccctccatccatatctccttccttcagctctaagagccttaaaacaagttcactatttggagaatcattaagggttgttccaaggtcatcattgaaggtttcaaaggcaaagaacactacttcactagtgacaaaatgtgaaattggagagtctttggaagagtttcttacaaaggcaacaacagataaggcattgattagaataatgatgtgtatgggtgaagcattaagaacaattgcttttaaagttagaac

SEQ ID NO: 38719 - DNA, 354 bp, Gossypium hirsutum
  Clone ID: LIB3165-034-P1-K2-B5
tgaaaaaaaaaaataagacatgtatttggatatttcctttcaactacaacaatattctagtatctatgggatatgacatgaatagtggaagggaattccccgaagagaaaatggattatgggagtaacaaaaaaacctgacttgaacgatcctgtattaagagctaaattagctaaaggtatgggtcataattattatggggaacccgcatggcccaatgatcttttatatatttttccagtagtaattctcggtactattgcttgcaacgtgggcttagcggttctagaaccttcaatgattggggaacccgcggaatcattttgcaactcctttggaaatattacctgaatg

SEQ ID NO: 38720 - DNA, 403 bp, Gossypium hirsutum
  Clone ID: LIB3165-034-P1-K2-B6
ggggaatctatatgagtgccaaggttgctttttgcatccacaatatagcctatcaagggagatttgcctttgaagattactcacttctcaatttgcctgatcaattcaagagttcatttgacttcatggatgggtatgataagcctgtcaagggaaggaaaatcaattggatgaaggctggaattttggaatcacacagggtattgactgtaagtccatactatgcccaggagcttgtttccggtgaagataaaggtgttgaactcgatcacatcattcgtaaaaccggcatcactggaattgtgaatggcatggatgttcaagaatggaaccctaccactgacaaatacatcagtgtcaaatatgatgcaacaactgtaacgtatgcaaagcgatttattaa

SEQ ID NO: 38721 - DNA, 131 bp, Gossypium hirsutum
  Clone ID: LIB3165-034-P1-K2-B8
atcatgtacatggccatggcaactcaagcaggtctcttcacccccacaatgaccaccccaaaatctttggccccatggaaaccaggcttatcattttcctttggtacctttttcaaaggtcctaacttttt

SEQ ID NO: 38722 - DNA, 399 bp, Gossypium hirsutum
  Clone ID: LIB3165-034-P1-K2-B9
cacgttcttgtttttttcacttctttctctttctcgaaaaccggtcacctgaaactcaaacgcctgtctgaatcctcgccggaacctgtcaatctcttacatctccggcggctgtctcacggatctgttcacgatgagcaccggccaacttctcagcatcgagcctcaagagctccagttcccatttgaattgagaaagcagatctcgtgttccctaaacttgtccaacaagaccgacaattatgtggcttttaaggtcaaaacgacaaatccaaagaagtactgtgtaaggccaaatactggagttgtgctgcctaggtctacgtgcaacgttgttgttacaatgcaagctcaaaaggaagcacctactgatatgcaatgcaaagataagtttttact

SEQ ID NO: 38723 - DNA, 123 bp, Gossypium hirsutum
  Clone ID: LIB3165-034-P1-K2-C1
ctctaactccaagtccgacgccccaattcggtccccttaatacccacacacactatctactcgtcatgcaaacgctactgctgccggctactcgctccggtatatgtgcggcggctttacctt

SEQ ID NO: 38724 - DNA, 346 bp, Gossypium hirsutum
  Clone ID: LIB3165-034-P1-K2-C10
cttcagttcttcacttccccagtctccagcaatgggagaaaccgattctttcttctcgaacaggggagcgaagatcttcgtggcaggccatcgaggcctagttggttctgccatagttcgtaaacttcagtccctaggctttaccaacctcctactccgcacccatgccgatctggaccttactcgccaatccgacgtcgaatccttcttcgccgatgagaaacctcactatgtcgtactagctgccgcttaagttggtgggatccacgccaacaacacttaccctgccgatttcattgccatcaacctccaaatgcagaccaacgtcatcgatttccttttaccg

SEQ ID NO: 38725 - DNA, 359 bp, Gossypium hirsutum
  Clone ID: LIB3165-034-P1-K2-C11
cccacgcgtccgcccacgcgtccgcccacgcgtccggtccgtctctctgttttactccacaaccactatcactaccattatggcttcggctactgtttctgtagccaaacccaaccttcagattcaggcaaaaggaaagggtgttggttttgcagatttctcaggcctacacaactcctctactagccttccctttgccaggaaaacctctgatgacttccattcactcgttgcttttcagacatctgctctaggaagcaataatggcgggtacaggaaagggatggcagaggcaaagctaaaggtggctataaatgggttggggaggattggcaggaatttcttaagaagctggcatg

SEQ ID NO: 38726 - DNA, 396 bp, Gossypium hirsutum
  Clone ID: LIB3165-034-P1-K2-C12
cggacgcgtggggcacatatttctatttcccactctcttttttgctctcagttaacaacaaaatgcgtaaatggctaccactgcttctccaatggcgactcagctgaagagcagctttacgtcgtctgttacaagaggactggtagtccccaggggcatttcgggatccccgttcaaagtatcttccggaaagaccaggaccccttgcttcactgtcaaagctgttcaatccgacaagtcaacatttcaagtaatccaacccatcaacggcgaccccttcattggaagcctggagactccaatcacctcaagccccttaattgcatggtacctttccaacctcccagcctatatgacggcagtgaacccacttctgaggggaatcgaagtgggtct

SEQ ID NO: 38727 - DNA, 91 bp, Gossypium hirsutum
  Clone ID: LIB3165-034-P1-K2-C2
cccactccttagaaaatatccacaaccctcaaaacttgttcggtaccactcttccaataaacaaagcagcgctgtggcaaaatcataaacc

SEQ ID NO: 38728 - DNA, 278 bp, Gossypium hirsutum
  Clone ID: LIB3165-034-P1-K2-C3
cttttaaccaaacactccacaaaattttctcgaattataaaaaaaaaatgaggaagtgtgaactatgtggaaggctagctcgaatgcactgtgaatcagatcaagcaaatttatgttgggactgtgatttcaaggttcatggagccaatttcctcgtagctaagcataatcgaaccctcctttgccatgtttgtcaaagtcctactccttggctcgcatgtggtcggaatctcggctccgcggtttctgtttgtgattcatgccttgtaaacggtaac

SEQ ID NO: 38729 - DNA, 423 bp, Gossypium hirsutum
  Clone ID: LIB3165-034-P1-K2-C4
cccacgcgtccggcacatacaaagctaccatggctaattttcaaatgaaaaaagttcaacaatgcgcacacggcaagctgtggaactcttccagcgaagctctaaccttgaccgacaagaaagtttggcaaggctctcattatgcggatttcccagaaataattgaagatggggatgcgagtgagtttacacatgaatcagtgactgatgatgctgatattcatggttcagttgctggtcttgtgtacaggcgacgtgacggaactaagtggattgttgcctggagcaacccacaagctgagaacagcaaggtctatactgatatccagagacaacctgttcactgggggcaaatcaaaaccaaccttgagaaaagaggaaaaccaaaatttaaaagtacaaagtttggttacaatgcatcta

SEQ ID NO: 38730 - DNA, 285 bp, Gossypium hirsutum
  Clone ID: LIB3165-034-P1-K2-C5
gcggttttcatttccccttcgaaagtagccagccttttcacacactcaagaagagcgagagctcgtaaatcatggcggaacagaccgtaaaagcttttttgaagcaacccaaagtgtttttgagctcgaagaaaggtgataaagggaagaggccaggaaagggtgggaatcgcttctggaaaagcattggattgggcttcaagactgcccgtgatgctattgatggaacctacatcgataagaaatgccccttcactggcactgcttcaatccgttgtcgtattt

SEQ ID NO: 38731 - DNA, 318 bp, Gossypium hirsutum
  Clone ID: LIB3165-034-P1-K2-C6
accaaacctccatttccatgtgaacgaaagttgctcatggcttactccattctaataaacagcaggaatggctataccgacagcacagaacagaacgagcttatgtagggaatcaatggaaattctcagtgcagaatccctaaggatgacgtcaactataatgagcacgcgaacatagccaagccgcacagcccatgatgcatctttccatgcaaaagctctgcaaaggcttgacaatgttaaaaccagggtacagctcagacctaccttgagcactcgatcgcagcgccattgctggagctatcttctcaaccttaa

SEQ ID NO: 38732 - DNA, 381 bp, Gossypium hirsutum
  Clone ID: LIB3165-034-P1-K2-C7
cccacgcgtccggatccacggcgatgatctatttccatgttttggtttttgattttttcaggtgccttggacactccaatgctgaagttgttccacatgaagttttcaataagttacctttacttaggtatttcatctatacccccacgtatcatagtcttcaccacacagagatggagaccaatttttgtctgttcatgccgctgtttgatgcactggggagtacacttaacaccaaatcattggagctacataagaaaattacctcaaattctggaaaaaacgggagggtaccggattttgtgttcctagcacatgtggtggacataatgtcggcaatgcatacaccgtttgcgttaagatcatttgcgtcgaccccat

SEQ ID NO: 38733 - DNA, 388 bp, Gossypium hirsutum
  Clone ID: LIB3165-034-P1-K2-C9
cccacgcgtccgagcatacactactagtacccactactagcaatggcttcctcaatgatctgatgggctaccattgccactgggtctccggcacaggctaacatggtcacccctttcaccggcctcaagtctgcctctgctttcccagtcaccaggaaggccaacaacgacattacttctctcgcaagcaatggcggcagagtgcaatgcatgcaggtgtggcctcctactggaaagaagaagttcgagactctctcatacctccccgatcttacacccgtgcagttggctaaggaagtagattaccttcttcgctcaaaatgggttccttgcttggagttcgaattggaagagggattcgtgcaccgtaagtactcgagcttaccca

SEQ ID NO: 38734 - DNA, 439 bp, Gossypium hirsutum
  Clone ID: LIB3165-034-P1-K2-D1
tcccggtcgaggcaggcgtccgcccacgcgtccgtacggagcttgtgttcatattcagattcttcttcttcttcttcttcttcttcaggaaagtgggtttatgcagtgttttggaggatactgcctcgaaattatccaccaccaaagtgggattatggagggagtgcacttgatcgttccaaaggaaacaaaagaaactggattcttgtatgggaagatgggttttgtgatttccatgaatgtgagcgtgctggaagtggttatgtaaagggaaggtttggagctgatattttcttcaaaatgtcacatgaagtttataactatggagaaggattaggagggaaaattgcagcatataacaatcacaaatgggtgcataaagaaatcccaaatgaaaatgatccaggctttatctcctcctggaatatgtctattgaac

SEQ ID NO: 38735 - DNA, 275 bp, Gossypium hirsutum
  Clone ID: LIB3165-034-P1-K2-D10
cctcatccactcaaattccatctctcgtcacttatctcagaaagcacactatccaagtatagtcggaggctgccaagcaggggatggtgactatctcatacctccactatcatacacccatccacaacacttcaataaattatcaccacttaaaatctaattgaatgaccagctcacaattcttttattaagaaggatttctgcaccgtaaattacttctgcctaccctagtactccaatctaccctactcgaccatgcgaaagcttactatttt

SEQ ID NO: 38736 - DNA, 352 bp, Gossypium hirsutum
  Clone ID: LIB3165-034-P1-K2-D11
cccactcgtccgcccacgcgtccgatggcctctgcttctctcctcaagacttcaccagttttagacaagtctgagtgggttaagggtcacacccttcgccaaccttccacttctgtggtgaggtgccaccctgttgcaccctccggactaactgtgcgtgcaagctcatatgccgatgagcttgtcaagactgctaaagctattgcttctcctggccgtggaattttggccatggatgagtccaacgctacctgtgggaaacgtttggcctcaatcgggctagaaaacacggaggctaaccgccaagcctacaggacgttgcttgtttcagctcctggccttggtcagtaca

SEQ ID NO: 38737 - DNA, 418 bp, Gossypium hirsutum
  Clone ID: LIB3165-034-P1-K2-D12
atcggctaccattgccactgcctctccggcacaggctaacatggtcgctcctttcaccggcctggggtctgcctctgcttgccgagtcaccaggaaggccaacaacgacattacttctctcgcaagcaatggcggcagagtgcaatgcatgcaggtgtggcctcctactggaaagaagaagttcgagactctctcatacctccccgatcttacacccgtgcagttggctaaggaagtggattaccttcttcgctcaaaatgggttccttgcttggaattcgaattagaggagggattcgtgcaccgtaaatactcgagcctacccacgtactacgatggacgctactggaccatgtggaagctgcctatgttcgggtgcaccgactcggctcaagtattgaaggaagctgaggaatgc

SEQ ID NO: 38738 - DNA, 133 bp, Gossypium hirsutum
  Clone ID: LIB3165-034-P1-K2-D2
tctttcccttttcccactgcttttcctctcctaacaaacagggctcttcgcatgaattcaccccctctctttctcaacccatgcctatcccctaacttactggcactcctttaccctacatctcagctcaact

SEQ ID NO: 38739 - DNA, 237 bp, Gossypium hirsutum
  Clone ID: LIB3165-034-P1-K2-D3
accacgcatccgtacggagcttgtgtccatattcagatactccttcgtcacattcttcttcttgaggacactgtgtctatgcagagacacgaaggatactagactcaaattatccaccaccaaagggggattatgagagggtgcgcacaaggtcgttccaaaggcaacaaaccaaactgtattcttccatggtacgatggctcctgagaggttcatacaaaagatcgtgcatgatta

SEQ ID NO: 38740 - DNA, 401 bp, Gossypium hirsutum
  Clone ID: LIB3165-034-P1-K2-D4
attctctttcactgcaaactgtgagcgagtgtgtattatggcttgctcagctacttcatcgtccgcggctctcatctcctctaagccaagggctttctcctccatttccaagcccttctcccaatccctttctctccccaatcccttcactgttctccctgcccctctactttctcgtcccgcctccttttccctctcccgcgcctccccttctcgcaagtctttcgtcgtcaaagccaccattgagcttccactggtgggaaatcctgcccctgattttgaggctgatgccttctttgaccactagttcattaaggtgaagcgctctgaatacatttgtgaagatatatgttattcttttcttttttacccttttgacttttacattttctttccccaca

SEQ ID NO: 38741 - DNA, 373 bp, Gossypium hirsutum
  Clone ID: LIB3165-034-P1-K2-D5
cttttgtataactgtagcatatagtactagtattctagtaatagcaatggcctcctccatgatctgagcggcaaccattgccacggtgaactgctcctccccggcacaggccaacatggtggcccccttcaccggcctcaagtctgcctctgctttcccagtcactaggaaggccaacaacgacatcacttctcttgcaagcaatggtgggagagtgcaatgcatgcaggtgtggcctcctcttgggaagaagaagttcgagacactctcatacctccccgatcttacacccgtacagttggctaaggaagtaggataccttgtgcgctctaaatggattccttgcttggaattcgatatagaggagggattc

SEQ ID NO: 38742 - DNA, 375 bp, Gossypium hirsutum
  Clone ID: LIB3165-034-P1-K2-D6
cccacgcgtccgcccacgcgtccgtcttcctccccacccttaaaccatgtcggcttttgttggcaagggtgcaggtgaactcccgtttaggaatttggctttcactgtcttctcctgcatgttttattccattgtatttggggacatgcatgtaaatccttaatgaccacaacacttgatcgatccgtaccataaatgttcaaattttcattacagatatgctattttatgcataattttgttagtcctagctttgactaaaccctgtatgtatattttcccccagaggagttgatcaagaacgccaactacatcgccacgccaggcaaaggtattttgtgcggctgacgagagcacatgcaccatcgggaagcg

SEQ ID NO: 38743 - DNA, 324 bp, Gossypium hirsutum
  Clone ID: LIB3165-034-P1-K2-D7
cccacgcgtccgctcagactactctttcgaaccagctccaccatcacccccaaaaaacaaaggggggtgtagaagatggcggcacaagcacttgtatcatcgtctcttacctactcagtggagactgcaaggcagattcttggagctaaacgacaaattgggtcttcaaggaaaggatcctttgttgttaaggcagcttcgactccacccgttaagcaaggagctgatagacctttatggtttgcatctaaacaaagcctttcatacttggatggcagccttccaagtgattatggatttgaccccttgggactctcagaccct

SEQ ID NO: 38744 - DNA, 384 bp, Gossypium hirsutum
  Clone ID: LIB3165-034-P1-K2-D8
cccaactccaacaaaacatcaatggcggcagctaagccattgccgtcatctcttcacactcaccaaattctctcttcatgcaaccaaattttaccttcgctcctccatttccgtcaacattacagcaacccgaaatgccaacaaccacaaaggcgaagaaaacactcaagctccttagatggcgcctacgacttggctatcaaagcttacatggaaaacccaaactccatctctggtttcgcaaacaaagtcattggctctctccctatagtcggccttgtcgctaggatttttagtgatgaaagccgtgttggtggggatatcattgattttgctgagtttagaaagagggtgggcaagatatgtactggtactgattctaga

SEQ ID NO: 38745 - DNA, 426 bp, Gossypium hirsutum
  Clone ID: LIB3165-034-P1-K2-D9
caacaacgacattacttctctcgcaagcaatggcggcagagtgcaatgcatgcaggtgtggcctgctactggaaagaagaagggcgagactctctcatacctccccgatcttacacccgtgcagttggctaaggaagtagattaccttcttcgctcaaaatgggttccttgcttggaattcgaattagaggagggattcgtgcaccgtaaatactcgagcctacccacgtactacgatggacgctactggaccatgtggaagctgcctatgttcgggtgcaccgactcggctcaagtattgaaggagcttgaggaatgcaagaaggaataccccaatgcattcattagaatcattggcttcgacaacgtgcgtcaagtgcagggcattagtttcattgcctacaagccttcaggcttttaagcttt

SEQ ID NO: 38746 - DNA, 424 bp, Gossypium hirsutum
  Clone ID: LIB3165-034-P1-K2-E1
cccacgcgtccggaccttcattcgaccaatggttgaaaatctttaaatgataacatcgtccttttgcggaccactatcaaatttggagatgttccaggaaaaagaaaatcaaaacccccaggtgaagaaggtgaaaaccagcagcggcaaaggcaataaaaggtgaagccaaagagagagagatatatacataataaaaaagacttttcaaaagaacacaactatggctcctcatagagaaggatcagatgcttcagtggaagccatggttgctcaagtcgaaaaacacccaatttcatcgatccttatcatcattgctatgcaaacagaagctttgccggtggtgaataagttccagttgattgaaaaccctcattcttcgtttccaaaaggggtcccttggatccattatcatggtgcatac

SEQ ID NO: 38747 - DNA, 240 bp, Gossypium hirsutum
  unsure (1)..(240): unsure at all n locations; Clone ID: LIB3165-034-P1-K2-E10
gtttcctttctcgattttctatttagccaaactttatgcagatcttcgttaagactctaaccggggagacgatcactctggaggtcgagagctccnatacgatcgacaacgtgaaagccaaaatccaagataaggaaagcatccctccaaaccaacagcgtctgatcttcgcccgaaaacaacttgaaaaccggccgaccttggccgattaccacattcaaaaagaggtaacttttcaac

SEQ ID NO: 38748 - DNA, 352 bp, Gossypium hirsutum
  Clone ID: LIB3165-034-P1-K2-E11
caacattgaagagataagattatggtgaaaaactaaacataataaagtccctcataacattctgggacttgcttcattgatgtagcccaaagataaacataaccaaaaagaaaaatggcttctgcttccgctactctcctcaagtcttcacctattatcgacaagtccgagtggattaagggccaaaacctccgccacccttcggtttgttttgtacggtcacaccctacatcggccgcctttaccgtccgtgctagttcatatgccgatgagcttgttaagaccgcgaaaactgctgcatctccaggtcgtggtattttggccatggatgaatcaaatgctacatgtggga

SEQ ID NO: 38749 - DNA, 405 bp, Gossypium hirsutum
  Clone ID: LIB3165-034-P1-K2-E12
ggaacccaaggacagaagactcttttaacatttcaccgcaaagatggagataacaaatgtgagcgagtatcaagaaattgcgaagcaaaagttgccaaagatggtgtatgactactacgcatctggtgctgaggaccaatggacattgcaagagaatagatttgctttcactaagatactgtttcgtcctcgtattctcatcgatgtaagcaagatagacatgaccacaactgtgttgggtttcaagatatcaatgcctatcatgattgccccaactgccatgcaaaaaatggctcatcctgaaagggagtatgcaacagctagggctgcatctgctgctggaactatcatgacattatcctcatgggcaacttctagttgtgaggaggttgcttcgacaggacc

SEQ ID NO: 38750 - DNA, 305 bp, Gossypium hirsutum
  Clone ID: LIB3165-034-P1-K2-E2
aaggacagggctactcctcaacaagttgctgattactccctcagcctcctccgccaaagaatccctccagctgtccctggaatcatggttgtgtctggtgggcagtctgaagttgaggctaccttgaacttgaatgcaatgaaccaagctccaaacccatggtatgtgtcattctcatatgcaagagcccttcaaaacacttgcctgaagaagtggggaggcaggcctgagaatgtgaaggatgctcaggaagcgctgctcatccgagcaaaggccaactctcttgctcaactcggaaagtacac

SEQ ID NO: 38751 - DNA, 424 bp, Gossypium hirsutum
  Clone ID: LIB3165-034-P1-K2-E3
cccacgcgccgcttattgatgggttaaagagagtatctgtttgcaacccagtcatgctattggacgagattgacaagacaggttctgatgtgcgtggtgatccagcttcagctctactggaggttcttgatccggagcagaataattctttcaacgaccactatttgaatgtgccatatgacctttcaaaggtgatttttgtggctactgcaaatagggtgcagcctattcctcctccactcttggacaggatggaagtcattgagctgcctggatataccgctgaagaaaagctaagaatagccatgcaacatttgattccacgagttttggatcagcatggattgaattctgagtaccttcaaattccggaggccatggttaaacttgttattcagaggtacaccagggtagctggtgttcg

SEQ ID NO: 38752 - DNA, 407 bp, Gossypium hirsutum
  Clone ID: LIB3165-034-P1-K2-E5
cccacgcgtccgggaaaaagaagtccagtagtagtatgtctttattctacgaagctcctctcgggtggagcattgaagacgttcgagcaaacggtggaatcaagaagttcagatctgctgcttactccaactgcgctcgcaagccatcctgatatactcacaagcgtgccgtctgaccactagtagtggttaataaaactgttatttgctttgttagttagttttagattatttccccgaccaacttcttcctcttctctcttcgtggctggtttctttacattgcgttctcctgatttggcgactttgtaattcggattaagtttgcagtccctggttgaattacaatggccgtgtctgcaattggatttgaggggtatgaaaaaagggctggaaatttctttttt

SEQ ID NO: 38753 - DNA, 403 bp, Gossypium hirsutum
  Clone ID: LIB3165-034-P1-K2-E6
ctcatatctctctgtttatttatttcttttgttttccttttgtcgtccttttctcacctgttggtctggcattttttaatcaagtgccccccaccccgctcaacacctctccctctaacaagccaaaggccccaagcagattctatttgttctaacatggagaaaagccatgaacttgaactgacccagatgaggaaatcagtagagaaacttgggttttcaacagagaaatacggggatccgacactcatgagattcttgattgcaagatcaatggacacagataaagcttcaaagatgtttgtccagtggctgaaatggaggtcttctttagttcctaatgggtgcgttgtagaatctgaagtgcctgaccaattagaagccagaaagatttttttgcaag

SEQ ID NO: 38754 - DNA, 303 bp, Gossypium hirsutum
  Clone ID: LIB3165-034-P1-K2-E7
cccacacgtccggatgtcatgaagatagacatgttaggttctgcagcagttattgatgcaacgaaggctctcaggcaaatgagacctgccgcagttgaagatcattacattgatgcattttgtgaaaacatgacaagtggaacgggtatgagacctgtagatattctcacaggatctaatggaaagaccattgaagtttataacactgatgcagaaagcaagcttacactcgcagatgctttggtatatgcttgcaaccaacgtgtctagaagatagtctaccatgcaacactaactggatct

SEQ ID NO: 38755 - DNA, 416 bp, Gossypium hirsutum
  Clone ID: LIB3165-034-P1-K2-E8
atttgatgaaaaagggagtgaaggtgagacatattgacgccatctgagggggaagagatctacagagagtgatgggaaagcggataacggtgatgataagatcgtggttcggagccagactaagaagaacagaagattgggccttgataaaaggattgaactgaaaaagaatagagaagaaaagtcggttgtttctggccagagtaaaaagggtatctcgaatgaaagtgagaagatcgataggcttgtccgggactattcggcttcaaccgatttggtcagcctgtactggaagaaaatgaacatacctccggttctgccgtgcaccgaacatacttggttgtctaagctaatgcagccaatgaaggcactgcttgaggcaaaagagaacttgcaaaaggatctgggtagagatc

SEQ ID NO: 38756 - DNA, 372 bp, Gossypium hirsutum
  Clone ID: LIB3165-034-P1-K2-E9
cgatggaaccgtcagtgttcttgtggcaacttttttgttcgtaattcccaacaagaagcgaaagggagagaaattgatggactggaacgaatgcaagaagctgccatggaacattattttgttactaggggctggtttcgccatagccgacggagtccagtcaagcggactcgctgatcaattatccaaaactctagattttctcgaagaggctccgtatttagctattgcccccgcggtgtgtttaatctgtgccataattaccgagtttataacatcaaatgatgctactgctacccttgtgcttccacttttgattcaaatggcaaaaaccatgcatgttcacccattactccttatggtccctggagc

SEQ ID NO: 38757 - DNA, 409 bp, Gossypium hirsutum
  Clone ID: LIB3165-034-P1-K2-F1
cccacgcgtccgctaaaacaagtgtttctcttcttcttcatgttctcgatcatggcttcttcttcttctttctttgttaggtgtttccctttacttttcttcttcttcttctcacatgtccaagcagtgaaatcaccaattcatcctcgggatgttctacctttattgccgagacaggtttcatggccgatccttaattcacttaacagtgccatcgaccttttaccagcctttgtcggttctgtttcgtcccaaaaccacatcgtgagctggaaaggtgcgtgcttttatgagaacaccgctaggatggagttccataacaagagtggcagtgagttcggtggtggaactctccatatcaaggttagcaaagcccatagttggacgtgtctggatctttatctctttg

SEQ ID NO: 38758 - DNA, 381 bp, Gossypium hirsutum
  Clone ID: LIB3165-034-P1-K2-F10
tccacgcgtccgaaaacacccaggtacagattcttctaacattttctctttggcttaccaaccttggatctgaaatggcaaagtcacccgaagaagaacaccctgtcaagacctttggctgggctgcaagggacccatctggtcatctctctcctttcaccttctccagaagggtaactggtgaagaagatgtgaggtttaaggtgctgtattgtgggatttgtcattctgaccttcacagtatcaagagtgaatggggctcctccaactaccccatggttcctgggcatgaaatagtaggggaagtgacagaagtaggcagcaaagtggaaaaggttaaggtgggagataaagtgggcgtgggatgcattgtcggagctt

SEQ ID NO: 38759 - DNA, 412 bp, Gossypium hirsutum
  Clone ID: LIB3165-034-P1-K2-F11
aaaaaatctccaagccaaaccatttctccgttgtcatttgcttacaacaaaaaaaaaattcaaatggaagaatgcctgtatttgcttcaagagttgggttcaggagacacgactacaagaatagatcaaaggaacgaaacgatgaccgtaaagacaaattgtccgaagtgttcaagagctatgctgctaatgggctgctagacaaggaagggctgaaagacgcttttctacatctagatgctgccatgccgtaccggcaagccgaagacgccctccgtgtcgtcggcaaaacctataacattaacgtctaggaggaaaccgagcttaacgcccttatcgactatgcttacaataaggggtacgggtcttcaatttgattagctaatttataagctaaaatttccttttcttt

SEQ ID NO: 38760 - DNA, 394 bp, Gossypium hirsutum
  Clone ID: LIB3165-034-P1-K2-F12
gtttcattgaaggcgggactctcagactactctttcgaaccagctccaccatcacccccaaaaaacaaagcaaattgtagaagatggcaacacaagcacttgtatcatcgtctcttacctactcagtggagactgcaaggcagattcttggagctaaacgacaaattgggccttcaaggaaaggatcctttgttgttaaggcagcttcgactccacccgttaagcaaggagctgatagacctttatggtttgcatctaaacaaagcctttcatacttggatggcagccttccaggtgattatggatttgaccccttgggactctcagaccctgaaggtccaggagggttcatcgagcctaaatggcttgcctaccgggagatcatcaacgggcg

SEQ ID NO: 38761 - DNA, 429 bp, Gossypium hirsutum
  Clone ID: LIB3165-034-P1-K2-F2
cccacgcgtccggtgagatggcttgctcagctacttcatcggccgcggctctcatctcctctaagccaagggctttctcctccaattccaagcccttctcccaatccctttctctccccaatcccttcactggtctccctgcccctctcctttctcgtcccgcctccttttccctctcccgcacctccccttctcgcaagtctttcgtcgtcaaagccaccagtgagcttccattggtgggaaatcctgcccctgattttgaggctgaggccgtctttgaccaggagttcattaaggtcaagctctccgaatacattgggaagaaatatgtgattctcttcttttacccgctggacttcacatttgtttgccccacaaagattactgctttcagtgaccgctatgaaaaatttgagaaagctaacaccc

SEQ ID NO: 38762 - DNA, 405 bp, Gossypium hirsutum
  Clone ID: LIB3165-034-P1-K2-F3
ctcttttgtatacctgtagcatatagtaatagtaagcagtaatagcaatggcctcctccatgatctcatcggcaaccattgccaccgtgaaccgctcctccccggcacaggccaacatggtggcccccttcaccggcctcaaatctgcctctgctttcccagtcaccaggaaggccaacaacgacatcacttctcttgcaagcaacggtgggagagtgcaatgcatgcaggtgtggccgcctcttgggaagaagaagttcgagactctctcatacctgcccgatcttactcccgtacagttggctaaggaagtagattaccttcttcgctctaaatggattccttgcttggaattcgaattagaggagggattcgtgcaccgtaagtactcgagcttacccacgt

SEQ ID NO: 38763 - DNA, 400 bp, Gossypium hirsutum
  Clone ID: LIB3165-034-P1-K2-F4
ggtcagtaaagcttcaattcaaaggagtgttagtttccatggcgttttcttcttctgctctctctgacacctcttcttcatgcctctcttccttcccacatgccttcacaaccagaaaaacccatcttcgcttcccatcatttttactcataaaagcttcttctgaacctgacaaaggaaaccccactgctacacagaccaaaaacgctgaaggctctagcaatgctcaacctcaacctcaagccactcccgccgccgtcgctaagccacctcccaaaaagcccgtttattccatgaagaaaggccagattgttagggtggataaagacaagtatctcaacagtattaattatctatctgtagggcatcccccctattacaaaggcttggactacatata

SEQ ID NO: 38764 - DNA, 416 bp, Gossypium hirsutum
  Clone ID: LIB3165-034-P1-K2-F5
attcaaaactaatcatgtaaaaaaaatagttgattggaacaaataaagtgaaacatttaagacaagaacaaagtggagattttataacacaaaaatagaggatgcaaatccacttaaaacacaaaaggaaaacaacattcaattaagacacaaaggggggatttcctttgtttgtgcccaatatagatttttttcttcccttagagcttaatttcccatttagaaagctcctctcttgatagcatcgtcattagcatttccaagggcagcttcactcaaatatttgtcagccaattgaaccctcttcacattctcttgctcagcaacaagcatgtatccatattccaacagcttctcaatggtcatcttcggttgctcgaaagatggtggcccttccctcgagttcacgagctttt

SEQ ID NO: 38765 - DNA, 406 bp, Gossypium hirsutum
  Clone ID: LIB3165-034-P1-K2-F6
ctcccatcacccgagatcatctttccccttcattatggcggctgcaaccatggctctctcttccccatctttcgccggaaaggccgtcaagctctctccttccgcccctaaaatccaaggcaatggccgtgtttccatgaggaaaaccgctaccaaggctgctccctctggaagtccatggtacggtcctgaccgagtcttgtacttgggtccactatctggtgagcctccatcttacttgaccggagaattccctggtgactacggttgggacactgctggactctcggcggacccagagacatttgccaggaaccgtgagctcgaagtcatccactgtaggtgggctatgttgggtgctcttgggtgtgctttccctgagcttttggctaggaatggagtcaaa

SEQ ID NO: 38766 - DNA, 202 bp, Gossypium hirsutum; identical to SEQ ID NO: 38682
  Clone ID: LIB3165-034-P1-K2-F8

SEQ ID NO: 38767 - DNA, 334 bp, Gossypium hirsutum
  Clone ID: LIB3165-034-P1-K2-G1
gtttcattgaaggcaggactctcagactactctttctaaccagctccaccatcacccccaaaaaagagagcaaattgtagaagatggcaacacaagcacttgtatcatcgtctcttacctactcagtggagactgcaaggcagattcttggagctaaacgacaaattgggtcttcaaggaaaggatcctttgttgttaaggcagcttcgactccacccgttaagcaaggagctgatagacctttatggtttgcatctaaacaaagcctttcatacttggatggcagccttccaggtgattatggatttgaccccctgggactctcagaccctga

SEQ ID NO: 38768 - DNA, 420 bp, Gossypium hirsutum
  Clone ID: LIB3165-034-P1-K2-G10
caatctttcagaaagagagaggcaaagagaaaaaagagagagggtattacatatattcatctaaggatacaaataaagatggctcttcacctttcctgggtttccgtttttggcgatctcggtactgaaatatatattcatatgcccttcttgtttgcgtattttaatattcactaacattacattatattgtttttaattaggcgtcattgtttcatttatggtcgccttttctcccatgccagcattttatcaaatctataagaagaaaacatcagaaggattccaatcattaccctatgtgatatcgctattcagtgccatgctttggatttactatgcacttcttaagaagaatgaaatgcatctaattatcatcaacattttctgctgtttcattcaaagcttttacattgtcac

SEQ ID NO: 38769 - DNA, 415 bp, Gossypium hirsutum
  Clone ID: LIB3165-034-P1-K2-G12
atggcttcttctctcagtctttcaagccacacagtggcttcattattcccttctcacacttgagagccgcagttgtcactgggtaaatccatcccaattctcaccaaatcatcacagtctcaatttcatggccttaaattctctcacccttcttctcttaaaattcctcgtttttccacttttaaaacctcgatttctgctaaggtgaataaaggtacagttcctccagcatttactttgaaagatcaagatgggaaaaatgtaagcctttcaaagtttaaagggaagcctgttgtggtttatttttaccctgctgatgaaacccctggttgcaccaaacaggcatgtgcttttagagattcttatgagaagtttaaaaaagctggagctgaaagtattgggattagtgttgata

SEQ ID NO: 38770 - DNA, 383 bp, Gossypium hirsutum
  Clone ID: LIB3165-034-P1-K2-G2
ggcgagagtagtggaaatagaaaggaaaaatgagcttaaaacatcaccataactccaactccgcagcagctgctcaatctctgtgggttgatgacattgccgacttcttctctcttccccttgacgacgccgcttccactcttggcgtttgcacctctgttctcaagaaaatctgccgtgaaaatggtctcgacagatggcctcaccgcaagtttttagctggaaagagcgtcgaagaaatcaagaggcatgcagctagagaaagaagaagggaaatcgctgagctttcaaaggctcatctgcagagctctcaacctgaacgcggagacaatgaacatcccaaattacaaggtggctcaacattaccgaacttaccgcatcaa

SEQ ID NO: 38771 - DNA, 292 bp, Gossypium hirsutum
  Clone ID: LIB3165-034-P1-K2-G3
cagcagctgcaccacaactacagagaagagagttatggggaaaaaaagcgtcgtcgtttttgcttgtggttctacttcgctctgtgcgtcgcttctccgaagttcctctttcgttctttcatttattcagtattgtaaaagatggccgacggtgaggatattcaacccctcgtctgtgataatggaactggaatggtgaaggctggttttgctggtgatgatgctccaagggcagtttttcccagtattgttggtcgtccccggcacactggtgttatggttgggatgggtc

SEQ ID NO: 38772 - DNA, 417 bp, Gossypium hirsutum
  Clone ID: LIB3165-034-P1-K2-G4
cttggaaattccaccttactatctctcacaattcaatcgactatggaatccattggagttctcatggcttgccccatgaactcttacctcgagcaacaactcgagaaccgtttcaagctattcagattctggacagtgccggacaaatcatcctttctggcttctcacaaggactcaatccaggcggtcgtcggaaacgcctttgccggtgccgatgctatgctgatcgaggcgttgcccaagctggagattgttgccagcttcagtgtggggcttgataagatagatttggccaagtgtaaagaaaagggtatccgagttaccaacacccctgacgttttgactgaggacgtggcggatttggcgatcggtttgatgttggcggtgttgaggaagctttgtgagagtgatcgggtt

SEQ ID NO: 38773 - DNA, 399 bp, Gossypium hirsutum
  Clone ID: LIB3165-034-P1-K2-G5
atacaggcagcaatgagaaggagcttagtatatactccaagacagaattccggttgggacaccacgtgccaagactaccaagctcatctttcccgaatggaaagatcagccaccatgatccctggtgcccctcagtaccccgatgtccacaaggccttcaacaacaaggttgagtttccggaagaagatcagtgcactgagcggtccccaacggcaaactcccgaaagaaggttcaggtggttgagcatgcagagaccgttgatgaagccacccttgattctcaagctgatagctacatccagcaaaaacacaaagcctgtgaactgtgcaaatggaagaccttcaaaatgcactagagttgagactttttgagtaagcatggcgatcatgatttaatg

SEQ ID NO: 38774 - DNA, 409 bp, Gossypium hirsutum
  Clone ID: LIB3165-034-P1-K2-G6
ggcgtccgcccacgcgtccgcccacgcgtccggaaaatggaaaatggaggcaaccatggaaaggatatgctgtgggaccatcttggagatgacattgttgctgcttctgcaactatggagcaacacgaagaagcaccttctgcagaagaaatgcaagaaaggatggatcaattcacctacatcatgcagcagaagtttctctctggtgaagattatgagtatttagattactctaaaatagatgacgatgagaccttggatgatcactggcttaaggaagctaaccatgatgcagaggagaagtattttgctgaagattaataacggaaaattacatccattgatctcccaacatttgcagatatctcttcggtatagcagtggttagtgattacctttttctacttat

SEQ ID NO: 38775 - DNA, 348 bp, Gossypium hirsutum
  Clone ID: LIB3165-034-P1-K2-G7
cccacgcgtccgatggcacccatttcattacccaacaagccccatgcagtatgcatcccctaggggagcacaaggtcacgtagatccgatgctcaaagtggccaaactcctccatttcaaaggcttccacatcacttttgtcaacaccgagtacaaccacaaacgcttgctcaaatccaggggcccccacgccctcaatggcttgcctgacttccggttcgggacaatccccgacggccttcctccgccggacatcgacgccacgcaagacatccccgcgctttgtgactccactagcaagcattgtttggctccctttcgccgactccttgttgagctaaaagctac

SEQ ID NO: 38776 - DNA, 387 bp, Gossypium hirsutum
  Clone ID: LIB3165-034-P1-K2-G8
cccacgcgtccgggaatccattggagttctcatggcttgccccatgaactcttacctcgaacggcgagctcgagaaccgtgtgaggctattcagattctggacagtgccggacaaatcatcctttctggcttctcacaaggactcaatccaggcggtcgtcggaaacgcctttgccggtgccgatgctaagctgatcgaggcgttgcccaagttggagattgttgccagcttcagtgtggggcttgataagatagatttggccaagtgtaaagaaaagggtatccgagttaccaacacccctgacgttttgactgaggacgtggcggatttggcgatcggtttgatgttggcggtgttgaagaagctctgtgagagtgatcggtttg

SEQ ID NO: 38777 - DNA, 281 bp, Gossypium hirsutum
  Clone ID: LIB3165-034-P1-K2-G9
gtgatgaggaagagcttgccaaggagaacatctagagtgctgtatcttcatcatggaaaatcagggtgagcagtcacaaagagcaagccagcataccggtgaagttatcggtgtgtcccagagccttgagtcatctgacactgactagtgtgccaagactgcaaaggatgtcatgatcactggtgtacggtatgctcatcttgagtcatgaacatgtgttgtatgagtatgtttatcttcagctgagatgctaggatctgttaacaagtgttgcttaactt

SEQ ID NO: 38778 - DNA, 308 bp, Gossypium hirsutum
  Clone ID: LIB3165-034-P1-K2-H1
tttccggttagaccggcgcgtccgcccacgcgtccgttcgagatgggtgggccagccctatccgacccaataaccttttatttgattcgggtgcgatcgactttgccggttcaggtgtggttcacatggttggtggcattgcagggttatggggtgcattaatcgagggtccaaggattggccgattcgatcgagctggtcgatctgtggcgttacgtgggcacagtgccttattagtagtgctcgctacgtttctatagtggctcggatggcatgggtccaacccaagttcattcttgaccatcatg

SEQ ID NO: 38779 - DNA, 183 bp, Gossypium hirsutum
  Clone ID: LIB3165-034-P1-K2-H10
gccactcgtccaattcgattacacacaatcttctttccatcctatcattcaacgatacagacttggacagctcggatgccgcgtgctgaatcctgcctactggcactacacacattatcataaccagcctgcctggccattctaagatcgcatatctatctgcagaccttgtgctaaaatata

SEQ ID NO: 38780 - DNA, 422 bp, Gossypium hirsutum
  Clone ID: LIB3165-034-P1-K2-H11
cccacgcgtccggtgagactcttttgtatacctgtagcatatagtaatagtaagcagtaatagcgagggcctcctccatgatctcatcggcaaccattgccaccgtgaaccgctcctccccggcacaggccaacatggtggcccccttcaccggcctcaaatctgcctctgctttcccagtcaccaggaaggccaacaacgacatcacttatcttgcaagcaacggtgggagagtgcaatgcatgcaggtgtggccgcctcttgggaagaagaagttcgagactctctcatacctgcccgatcttactcccgtacagttggctaaagaagtagattaccttcttcgctctaaatggattccttgcttggaatccgaattagaggagggattcgtgcaccgttagtactcgagcttacccacg

SEQ ID NO: 38781 - DNA, 330 bp, Gossypium hirsutum
  Clone ID: LIB3165-034-P1-K2-H12
gctaccactgcttctgcaatggcgactcatctgaagagcagctttacgtcgtctgttacaagaggactggtagtccccaggggcatttcgggatccccgttcaaagtatcttccggaaagaccaggaccccttgcttcactgtcaaagctgttcaatccgacaagtcaacatttcaagtaatccaacccatcaacggcgaccccttcattggaagcctggagactccaatcacctcaagccccttaattgcatggtacctttccaacctcccagcctataggacggcagtgaacccacttctgaggggaatcgaagtgggtctggctcac

SEQ ID NO: 38782 - DNA, 423 bp, Gossypium hirsutum
  Clone ID: LIB3165-034-P1-K2-H2
cgaactcccctcccgtcctctttcccgatttgtcttcttcattgccccgccatggcttgtgttagcttggctaaactcaacgcgccgtcatcctcttggatcggtggccagcagtctctccctcaacgctccggatcatccgctcggctcgccactcgcagagtctcactcccgatccgtgctggcgcttacaccgacgaactcatcaaaaccgccaaaactattgcttcacctggtcgtggaatactggcaattgatgaatcgaatgcaacatgtgggaagagattatcttctattggcttagacaatactgaacccaaccgccaggcttacagacagcttctgctcacaactcctggcctcggagaatatatttccggtgccattcttttcgaggaaacactttaccagtcaactacagat

SEQ ID NO: 38783 - DNA, 421 bp, Gossypium hirsutum
  Clone ID: LIB3165-034-P1-K2-H3
cccggtcgaccgggcgtccgaaagtccaatcactcccaatactttcataacatttcacgaacttcactctccagtctccaatggcgggtgccgtctccaccatcggtgctgtcaaccgagcaccgttgagtttgaatggatcaagtgccggagcttctgctccaagctcagctttcatggcgaacagcttgaagaaagtgagcagctaggttcaacaacaacggcaaggctccagtgggaagtttcatgattgtggctgccaaagaaatcgacgaagacacacagaccgaccaggaccgatggaagggtcttgcttatgatatctacaatgaccaacaagacattaccagagggaaaggtattgtcgactcattgttccaagctcccatgtacgatggtactcactatgctgtcatgagct

SEQ ID NO: 38784 - DNA, 355 bp, Gossypium hirsutum
  Clone ID: LIB3165-034-P1-K2-H4
cgtccgttcccatcacccgagatcatctttccccttcaaaatgtcggctgcaaccatggctctctcttccggaggtttcgccggaaaggcgcgtcaagctctctccttccgcccctaaaatccaaggcaatggccgcgtttccatgaggaaaaccgctaccaaggctgctccctctggaagtccatggtacggtcctgaccgagtcttgtacttgggtccactatctggtgagcctccatcttacttgaccggagaattccctggtgactacggttggcacactgctggactctcggcggacccagagacatttgtcacgaaccgggagctcccagttatccactgttggtgggc

SEQ ID NO: 38785 - DNA, 292 bp, Gossypium hirsutum
  Clone ID: LIB3165-034-P1-K2-H6
cttttgtataactgtagcatatagtactagtaagcagtaatagcaatggccgcgtccatgatctcatcggcaaccattgccaccgtgaactgctcctccccggcacaggccaacatggtggcccccttcaccggcctcaagtctgcctctgctttcccagtcactaggaaggccaacaacgacatcacttctcttgcaagcaatggtgggagagtgcaatgcatgcaagtgtggcctccttttgggaagaagaagttcgagacactctcatacctccccgatcttacccccg

SEQ ID NO: 38786 - DNA, 416 bp, Gossypium hirsutum
  unsure (1)..(416): unsure at all n locations; Clone ID: LIB3165-034-P1-K2-H7
ctttctttctcttttgtcaaaccctaaatccctcactccaactgcagattcacctccacatacaggaaccaatacattcaagcttggagggatgactttttagccttgagatctcctttcggcttcaatttcaacgaagcaaaaagagatttatggcatattcgcaaggtaagactcctctttcttttttccttttattttcaaacgcaatgatggaagatttgaaggcaataaatcgcaaggaaatgcaaaaacttaaagaaatttaaacagaaatcaacttctaaaaattntgactgctttctttgtattcaatatgcgttcgtcctcttttacactgattttctcggccttttatagccgatttacaggataaatagaaaaaggaaaaaaaaactctaatttttgctgtcatc

SEQ ID NO: 38787 - DNA, 339 bp, Gossypium hirsutum
  Clone ID: LIB3165-034-P1-K2-H8
atttagctatagcatacactactagtacccactactagcaatggcttcctcaatgatctcatcggctaccattgccactgcctctccggcacaggctaacatggtcgctcctttcaccggcctcaagtctgcctctgctttcccagtcaccaggaaggccaacaacgacattacttctctcgcaagcaatggcggcagagtgcaatgcatgcaggtgtggcctcctactggaaagaagaagttcgagactctctcatacctccccgatcttacacccgtgcagttggctaaggaagtggattaccttcttcgctcaaaatgggtttccttgcttggaat

SEQ ID NO: 38788 - DNA, 401 bp, Gossypium hirsutum
  Clone ID: LIB3165-034-P1-K3-A1
cttagtttcctcttagcaaagacttcagccacccacgcatcccctttaccgatccaaacaatgggacgcgtccgtacgaagactgtgaagaaatcgtctcgtcaggtaatcgagaggtactactctcgcatgacgcttgatttccacaccaacaaaaaggttatcgaagaagtagctattatcccatccaagaggctccggaacaagattgctgggttctcaacccatttgatgaaacggatccagaagggtccggttcgtggcatttctctgaagcttcaggaagaagagcgtgagcgtcgtatggattttgtccccgatgtatcggctattgctggtgattcaatagaaggtggtaagggaaccattgatatgctttcactttttgggatgggcgatct

SEQ ID NO: 38789 - DNA, 304 bp, Gossypium hirsutum
  Clone ID: LIB3165-034-P1-K3-A10
gaaggattgattgattaattacttaattaatcagtcaattatgataactagtgagcacggattgatgaatgttccattaggttttatatatgtatctaatgtgtatgtattatgtgtactactatgcttcactaggagtaaaggcaaatctggtgtgaaactaagtcaattatgatgactagtgagcatggatattgatgaatgttccattagtttttatatataatatctatatgcattctatatatttctctgcttcactgggaataaaggcaaatctggtattgaacaaaatattatgaat

SEQ ID NO: 38790 - DNA, 451 bp, Gossypium hirsutum
  Clone ID: LIB3165-034-P1-K3-A11
tttagctatagcatacactactagtacccactactagctatggcttcctcaatgatctcatcggcgtccattgccactgcctgtccggcacaggctaacatggtcgctcctttcaccggcctcaagtctgcctctgctttcccagtcaccaggaaggccaacaacgacattacttctctcgcaagcaatggcggcagagtgcaatgcatgcaggtgtggcctcctactggaaagaagaagttcgagactctctcatacctccccgatcttacacccgtgcagttggctaaggaagtggattaccttcttcgctcaaaatgggttccttgcttggaattcgaattagaggagggattcgtgcaccgtaaatactcgagcctacccacgtactacgatggacgctactggaccatgtggaagctgcctatgttcgggtgcaccgactcggctc

SEQ ID NO: 38791 - DNA, 417 bp, Gossypium hirsutum
  unsure (1)..(417): unsure at all n locations; Clone ID: LIB3165-034-P1-K3-A3
gcctgttagtgtggcatttgaagttgtcactagtttccgtttttacaaaagtggggtttataccagtaaaacatgtggcagcacacccatggatgtgaaccacgctgttcttgcagttgggtatggagtcgaaaatggcgttccatattggctcattaagaactcatggggtgcagaatggggtgacaatggctacttcaagatggagatgggcaaaaacatgtgcggtgtggcaacttgtgcatcatacccaattgttgcttgatccaatcgatgaaccgttttggatcatgtcatttctgtgttatagaaggcttctagttatggtctacaaatgttgttgtagttgttcggggttatggtctaattgaaaccgatgggttcatgtncaattaggttccaaagacatgtaagatg

SEQ ID NO: 38792 - DNA, 447 bp, Gossypium hirsutum
  Clone ID: LIB3165-034-P1-K3-A4
agcaaaaccatggcctctgcttctctcctcaagacttcaccagttttagacaagtctgagtgggttaagggtcacacccttcgccaaccttccacttctgtggtgaggtgccaccctgttgcaccctccggactaactgtgcgtgcaagctcatatgccgatgagcttgtcaagactgctaaagctattgcttctcctggccgtggaattttggccatggatgagtccaacgctacctgtgggaaacgtttggcctcaatcgggctagaaaacacggaggctaaccgccaagcctacaggacgttgcttgtttcagctcctggccttggtcagtacatctcaggtgccatcctctttgaggaaaccctctatcaaaccacaattgatggcaagaagatggttgatgttcttgttgagcagaacatagtccctggtatcaaggttgac

SEQ ID NO: 38793 - DNA, 455 bp, Gossypium hirsutum
  Clone ID: LIB3165-034-P1-K3-A6
gtcagtacatctcaggtgccatcctctttgaggaaaccctctatcaaaccacaattgatggcaagaagatggttgatgttcttgttgagcagaacatagtccctggtatcaaggttgacaagggtcttgttccactggctggttcaaacaacgagtcatggtgccaaggtcttgatggcctcgctccacgttcagctgcatactaccaacaaggagctcgttttgcaaaatggcgtactgtggtaagcattcccaatggaccaaccgaacttgctgtgaaggaagcagcctggggacttgctcgctatgccgccatctctcaggacaatggattggttccaattgttgagccagagatcttgcttgatggtgatcacggaattgacaggactttcgaagtagccaaaaaggtatgggctgaggttttcttctatcttgcccagaacaatgtgatg

SEQ ID NO: 38794 - DNA, 404 bp, Gossypium hirsutum
  Clone ID: LIB3165-034-P1-K3-A7
gtcgacggcttctatcaacggttggtgccttacctcctcttcttccaccactaccacctcctctttttccgctcgtcgacgacctacattgcggccttcagtcgtcgctagccttaactcttctccttctcctccgactcttatccaagaccgcccggtttttgctgcccctattcctttgctcaccccgagagaagagatgggaaacaagtcctacgacgaagccattgaagctctcaagaaacttctcagtgagaaaggagaactgaaagctgaagcagctgcaagggtagatcaaataacagcagagttaaacacagcatcagctgatggcaaaccatctgactcttctgttgagagactgaaggaagcttcgttactcaaagaagaaaatatgaaagatt

SEQ ID NO: 38795 - DNA, 451 bp, Gossypium hirsutum
  Clone ID: LIB3165-034-P1-K3-A8
gagtacttgaacggagaagttcccggagactatggatacgatccgtttggtctgagcaagaagccagaagactttgcaaaatatcaagcatatgagttgatacacgcaaggtgggcaatgcttggtgctgcagggttcatcatccctgaagccctttacaaattttggtgccaactgtggccccgaaaccgtttggttcaagaacggaacttttctcttggaccggtaccacctggaactacttggggaggaacatcccaataaaccttgtggtggctgtcgttgccgaagtcgtccttgttggtggtgctgaatattacagaatcatcaatggcttggatctggaggacaagcttcaccctgggggaccatttgacccactggggttagccaaggatccagaccaggctgctttgctgaaggtgaaagagataaaaaacggtagactcgc

SEQ ID NO: 38796 - DNA, 177 bp, Gossypium hirsutum
  Clone ID: LIB3165-034-P1-K3-A9
cccacgcgtccgacttttaacccctgccgacactctcaccattttctcagcaaacttagcctatgaaaatcaccattacaagtcccaaagaagacccccgctaattctaaaagaaagaaccagagttttctttctctttagtttacgtttattgtccttttggaattttttgatact

SEQ ID NO: 38797 - DNA, 414 bp, Gossypium hirsutum
  Clone ID: LIB3165-034-P1-K3-B1
ttcgctttgagattagatccaaaattcccctttcatcatatttccgattccccaatttttcctgaaaccctaatcctaatcccggattcttctcgtctacatcgtctagcaaatggcaaccgaggagccggcagtcgtggcagaccccgcaccggagacggaggaggacaagactgctgagaccaaagctacttcaaaatctggcagagcaaagaaaaccaaagaacccaaaaccaagaaagctgcagctcctcggaaaccacgggctgctcctactcatccaccttacgaagagatgatcaaagatgcgatcgttactttgaaagagaggacaggttcaagtcagtacgccattgctaagttcattgaaaagaaacagaagaatcttcctgggaatttcaagaagcttcttct

SEQ ID NO: 38798 - DNA, 400 bp, Gossypium hirsutum
  Clone ID: LIB3165-034-P1-K3-B10
ggaccttcaatttttcatcggagagagcatgcacgatgatggatgtttggtatttgcttactacaaggatggtgctgttgacccgacatttttgtactttgcgtatgcattgaaggaggtcaagtgctgaggtttgaagcaaagaaaaaaaaagtggttgctgaagaatttagtcctttttattattgcttttgtctcttattttcagtactctgctaaagacataaattatttatggtttttgatgtttttgatttaattgtttgttgttttatcatggaatggtttctatttttatgggttgactaaacaagaatttaactctttgttctattactacttaattttattggaaggaggtttttgggacatattaaataaaaaatttattatttaatat

SEQ ID NO: 38799 - DNA, 448 bp, Gossypium hirsutum
  Clone ID: LIB3165-034-P1-K3-B11
ctcagctcagctcaactcaactcacttaaatcttttctgctgcggtggcgatgggggcggcgatgttgtcggagttggcgacggagatcgtggtgccagtgtgcgccgtgattggaatagctttctcgttggtgcagtgggtgatggtgtcgcgcgtgaagcttacctccgagcgccatgcgtagtcggcgaatagtagcaagaatggttacggcgattacttgattgaggaagaggaaggaatcaatgaccatagcgttgtcaccaagtgcgctgatattcaaaacgctatctctgaaggtgcaacatcctttctttttactgaatatcagaatgctggcatcttcaagattgctgtcgctatcctgattttcctcttcctgggctctgttgagggcttcagcacgaatagccagccttgcacctatgataaggagaagatgtgcaa

SEQ ID NO: 38800 - DNA, 448 bp, Gossypium hirsutum
  Clone ID: LIB3165-034-P1-K3-B12
caaaaactgggatggcttttgtaacgtcggaggaattgctggccactttggtgccaattgctgtttattggatatactcaggtatgtatgtgatgtttgagtcaaggtttgagaagtacaagttgcactccaagaaagaagaggaggagaagaatttggtttccagaaaggaagtcttcaaagccgttctttgccatcaagtcatgtcaattgctattaacctcttcacgtatgcggtaacaagagaaaaagatggtgaggcatctccaaagaaatcactaaccttgcttcttctagccaagcaattggtgatagcaatggtggtgatagatacatggtcgttttttgtgcattggtacttgcatcagaacaagtttttatacaaacaccttcatgttccgcatcaccggctggttgttccctattcatttggaggacagtatatgca

SEQ ID NO: 38801 - DNA, 123 bp, Gossypium hirsutum
  Clone ID: LIB3165-034-P1-K3-B2
gactatcgtgcaaaacttagcataatacagtccctcataacattcttcgactcgcttcattgattagcccaaagattaacctaaccaaaaagataaccggcttgtgcttcggttactctcctc

SEQ ID NO: 38802 - DNA, 321 bp, Gossypium hirsutum
  Clone ID: LIB3165-034-P1-K3-B3
cccactcgtccgcccacgcgttcgctttgccaaacatggagactagtgtcacgtgctacgctcgtgggattgttcttcctggtgtctcttctaagcactcctcggcattagtcttcccttcattcatattttccttccttaagtctaaaaaccttaaaacaagttcactatttggagaatcattaagggttgttccaaggtcatcattgaaggtttcaaaggcaaagaacactacttcacttgtgacaaaatgtgaaattggagagtctttggaagatttttcacaaaggccacaacatatgggggtttttataaaaataa

SEQ ID NO: 38803 - DNA, 447 bp, Gossypium hirsutum
  Clone ID: LIB3165-034-P1-K3-B5
tgaaaaaaaaaaataagacatgtatttggatatttcctttcaactacaacaatattctagtatttatttgatatgacatgaatagttgaagggaattccccgaagagaaaatggattatgggagtaacaaaaaaacctgacttgaacgatcctgtattaagagctaaattagctaaaggtatgggtcataattattatggggaacccgcatggcccaatgatcttttatatatttttccagtagtaattctcggtactattgcttgcaacgtgggcttagcggttctagaaccttcaatgattggtgaacccgcggatccatttgcaactcctttggaaatattacctgaatggtatttctttcctgtatttcaaatacttcgtacagtacctaacaagttattgggtgttcttttaatggtttcagtacccgcgggattattaaca

SEQ ID NO: 38804 - DNA, 453 bp, Gossypium hirsutum
  Clone ID: LIB3165-034-P1-K3-B6
ggggaatctatatgagtgccaaggttgctttttgcatccacaatatagcctatcaagggagatttgcctttgaagattactcacttctcaatttgcctgatcaattcaagagttcatttgacttcatggatgggtatgataagcctgtcaagggaaggaaaatcaattggatgaaggctggaattttggaatcacacagggtattgactgtaagtccatactatgcccaggagcttgtttccggtgaagataaaggtgttgaactcgatcacatcattcgtaaaaccggcatcactggaattgtgaatggcatggatgttcaagaatggaaccctaccactgacaaatacatcagtgtcaaatatgatgcaacaactgtaacgtatgcaaagcgattattaaaggtagctcttcaagcaaaacttgggttgccttgtgatgagaatgttccat

SEQ ID NO: 38805 - DNA, 270 bp, Gossypium hirsutum
  Clone ID: LIB3165-034-P1-K3-B8
atcatgtacatggccgtggcgactcaagcaggtctgttctcccccacagtgaccaccccaaaatctttggccccatggaaaccagcctcatcattttcctttgctacctgttccaagtccctcaacttctccgtggctcaaagaaccattagagctgcagctgctgatgaggaagcatcatctgctgccgccacataggaagctccggttggtttcacccctccagaattggaccccaacaccccatcacccatcttcggagggagcact

SEQ ID NO: 38806 - DNA, 112 bp, Gossypium hirsutum
  Clone ID: LIB3165-034-P1-K3-B9
cacgttcttgttttttttacttctttctctttcttgaaaaccggccacctgaaaatcaaacgcctttgttaattcttggcgggacctggtaatttttttccttttccggggg

SEQ ID NO: 38807 - DNA, 312 bp, Gossypium hirsutum
  Clone ID: LIB3165-034-P1-K3-C1
ctctaactccaagtccgacgccccaattcggtccccgaaatacccacacacactatctactcgtcatgcaaacgctactgctcccggctactcgctccggtatatgtgcggtggcggcgggtcccctccgaccaccgctcactctctctcctgcaaaatttctgacttcaatcaaaactcggaaccaaaacctccgttgacctctttcgcattctacgacccttttaatgttctaagatctacgccttttatcgtccaaagtcttttcgtccttaaattcacacagttttaccaacctctaatgatgattct

SEQ ID NO: 38808 - DNA, 452 bp, Gossypium hirsutum
  Clone ID: LIB3165-034-P1-K3-C10
cttcagttcttcacttccccagtctccagcaatgggagaaaccgattctttcttctcgaacaaatcagcgaagatcttcgtagcaggccatcgaggcctagttggttctgccatagttcgtaaacttcagtccctaggctttaccaacctcctactccgcacccatgccgatctggaccttactcgccaatccgacgtcgaatccttcttcgccgatgagaaacctcactatgtcgtactagctgccgctaaagttggtgggatccacgccaacaacacttaccctgccgatttcattgccatcaacctccaaatccagaccaacgtcatcgattcctcttaccgccacggcgttaagaaaatcctcttcctcggttcctcttgtatttatcccaaatttgcgccgcaacccatccctgaaaacgcgctcttatccggtcccctggaaccca

SEQ ID NO: 38809 - DNA, 452 bp, Gossypium hirsutum
  Clone ID: LIB3165-034-P1-K3-C11
cccacgcgtccgcccacgcgtccgcccacgcgtccggtccgtctctctgttttactccacaaccactatcactaccattatggcttcggctactgtttctgtagccaaacccaaccttcagattcaggcaaaaggaaagggtgttggttttgcagatttctcaggcctacacaactcctctactagccttccctttgccaggaaaacctctgatgacttccattcactcgttgcttttcagacatctgctctaggaagcaataatggcgggtacaggaaagggatggcagaggcaaagctaaaggtggctataaatgggtttggtaggattggcaggaatttcttaagatgctggcatggccgtaaggactccccacttgatgtcattgccatcaatgacactggtggtgttaagcaggcttctcaccttctcaaatatgattccacccttg

SEQ ID NO: 38810 - DNA, 428 bp, Gossypium hirsutum
  Clone ID: LIB3165-034-P1-K3-C12
cggacgcgtggggcacatatttctatttcccactctcttttttgctctcagttaacaacaaaatccgtaaatggctaccactgcttctccaatggcgactcagctgaagagcagctttacgtcgtctgttacaagaggactggtagtccccaggggcatttcgggatccccgttcaaagtatcttccggaaagaccaggaccccttgcttcactgtcaaagctgttcaatccgacaagtcaacatttcaagtaatccaacccatcaacggcgaccccttcattggaagcctggagactccaatcacctcaagccccttaattgcatggtacctttccaacctcccagcctataggacggcagtgaacccacttctgaggggaatcgaagtgggtctggctcacggcttcctcctggtgggtccattcg

SEQ ID NO: 38811 - DNA, 401 bp, Gossypium hirsutum
  Clone ID: LIB3165-034-P1-K3-C2
cccactccttagaaaatatccaaaccctcaaaacttgtcggtaccatcttccaaaaacaagcagccttccaaaatcaaaaccatttgatgctcattcctctctccaaagcctacctcttcctcttctgtcaatctggttccctcctcctcccccataatctatcattgatgaccatcggaacatttccaattaggcctagatggtttcccaaaagcaaggcctgaaagtaagcatatccttccgctataaatggcgaagcgatctccttgtgcagtgtctgttttgaagccaaaatctcacttggagagttacgaacaaccactccagatctagatctcaccaaattttgattacaagcgccatcaaaattaactttaacatcagaacctaatgggggaca

SEQ ID NO: 38812 - DNA, 381 bp, Gossypium hirsutum
  Clone ID: LIB3165-034-P1-K3-C3
cttttaaccaaacactccacaaaattttctcgaaaaaaaaaaaaaaaatgaggaagtgtgaactatgtggaaggctagctcgaatgcactgtgaatcagatcaagcaaatttatgttgggactgtgatttcaaggttcatggagccaatttcctcgtagctaagcataatcgaaccctcctttgccatgtttgtcaaagtcctactccttggctcgcatctggtcggaatctcggctccgcggtttctgtttgtgattcatgcgttgtaaacggcaacaataagtgtgagtcatcggagagagagtatggtgaaaaggaggaggaagaagaggaggagggagatttttataatgacgccgtggaagaatcgggtgaggaga

SEQ ID NO: 38813 - DNA, 455 bp, Gossypium hirsutum
  Clone ID: LIB3165-034-P1-K3-C4
cccacgcgtccggcacatacaaagctaccatggctaattttcaaatgaaaaaagttcaacaatgcacacacggcaagctgtggaactcttccagcgaagctctaaccttgaccgacaagaaagtttggcaaggctctcattatgcggatttcccagaaataattgaagatggggatgcgagtgagtttacacatgaatcagtgactgatgatgctgatattcatggttcagttgctggtcttgtgtacaggcgacgtgacggaactaagtggattgttgcctggagcaacccacaagctgagaacagcaaggtctatactgatatccagagacaacctgttcactgggggcaaatcaaaaccaaccttgagaaaagaggaaaaccaaaatttaaagttacaaagtttggttacaatgcatctattgaaattgatcccgtgagtcgttcacccaca

SEQ ID NO: 38814 - DNA, 456 bp, Gossypium hirsutum
  Clone ID: LIB3165-034-P1-K3-C5
gcggttttcatttccccttcgcaagtagccagccgtttcacacactcaagaagagcgagagctcgtaaatcatggcggaacagaccgaaaaagcttttttgaagcaacccaaagtgtttttgagctcgaagaaaggtgggaaagggaagaggccaggaaagggtgggaatcgcttctggaaaagcattggattgggcttcaagactccccgtgaagctattgaaggaacctacatcgataagaaatgccccttcactggcactgtttcaatccggggtcgtatcttagccggtacttgccacagtgccaagatggtcaggacaatcattgttcgacggaactaccttcattatatcaagaaataccaaaggtatgagaagcgccattcaaacatccccgcacatatttcaccatgcttccgtgtgaaggaaggggatcatgtcattattgggcaat

SEQ ID NO: 38815 - DNA, 303 bp, Gossypium hirsutum
  Clone ID: LIB3165-034-P1-K3-C6
accaaacctccatttctatgtcaacgaaacttgcacatgtcttactccattctaataaacagcggagggcctaaacccaaacacataacagagcgagcttaagtagggaatcaatgtcaaatctcagtgcagaatccctaagcatgaccgcaactattatgagcacgcaaacatagccaaccgcactagcatgatgcattctctccatgcaaaacctctgcacacgcttgacaatgttaaaaccaaggtacagctcaaacctacctagatcactcgatgtcaggtgcattgctggagctatct

SEQ ID NO: 38816 - DNA, 75 bp, Gossypium hirsutum
  Clone ID: LIB3165-034-P1-K3-C7
tcgtccacgcgtccggatccacggcgatgatctatggccatgttttggtttttgattttttaggggcctggacac

SEQ ID NO: 38817 - DNA, 449 bp, Gossypium hirsutum
  Clone ID: LIB3165-034-P1-K3-C9
cccacgcgtccgagcatacactactagtacccactactagcaatggcttcctcaatgatctcatcggctaccattgccactgcctctccggcacaggctaacatggtcacccctttcaccggcctcaagtctgcctctgctttcccagtcaccatgaaggccaacaacgacattacttctctcgcaagcaatggcggcagagtgcaatgcatgcaggtgtggcctcctactggaaagaagaagttcgagactctttcatacctccccgatcttacacccgtgcagttggctaaggaagtagattaccttcttcgctcaaaatgggttccttgcttggagttcgaattggaggagggattcgtgcaccgtaagtactcgagcttacccacgtactacgatggacgcttctggaccatgtgtgagctgcccatgtttcggtgcaccgactc

SEQ ID NO: 38818 - DNA, 443 bp, Gossypium hirsutum
  Clone ID: LIB3165-034-P1-K3-D1
cccacgcgtccgtacggagcttgtgttcatattcagattcttcttcttcttcttcttcttcttcatcaaagtgggtttatgcagtgttttggaggatactgcctcgaaattatccaccaccaaagtgggattatggagggagtgcacttgatcgttccaaaggaaacaaaagaaactggattcttgtatgggaagatgggttttgtgatttccatgaatgtgagcgtgctggaagtggttatgtaaagggaaggtttggagctgatattttcttcaaaatgtcacatgaaagttataactatggagaaggattagtagggaaaattgcagcagataacagtcacaaatgggtgcataaagaaatcccatatgaaaatgatccaggcttcatctccctctggaatatgtctattgaaccctaaccaaaggcatggacattacag

SEQ ID NO: 38819 - DNA, 220 bp, Gossypium hirsutum
  Clone ID: LIB3165-034-P1-K3-D10
gctcatccgagcaaaggccatctctcttgctcaactcttatagtacactgtccaaggagagtcagaggatgccaagcatggaatgtttgccaagggttatgtctattatcatgtttgtatcttcaacaggtcaatgaatttcctgcactgtaacatttattgattgagctgttcacttgatctttcattttaaaagattattattccttttaatttcggt

SEQ ID NO: 38820 - DNA, 447 bp, Gossypium hirsutum
  Clone ID: LIB3165-034-P1-K3-D11
cccacgcgtccgcccacgcgtccgatggcctctgcttctctcctcaagacttcaccagttttagacaagtctgagtgggttaagggtcacacccttcgccaaccttccacttctgtggtgaggtgccaccctgttgcaccctccggactaactgtgcgtgcaagctcatatgccgatgagcttgtcaagactgctaaagctattgcttctcctggccgtggaattttggccatggatgagtccaacgctacctgtgggaaacgtttggcctcaatcgggctagaaaacacggaggctaaccgccaagcctacaggacgttgcttgtttcagctcctggccttggtcagtacatctcaggtgccatcctctttgaggaaaccctctatcaaaccacaattgatggcaagaagatggttgatgttcttgttgagcagaacatattccct

SEQ ID NO: 38821 - DNA, 444 bp, Gossypium hirsutum
  unsure (1)..(444): unsure at all n locations; Clone ID: LIB3165-034-P1-K3-D12
atcggctaccattgccactgcctctccggcacaggctaacatggtcgctcctttcaccggcctcaagtctgcctctgctttcccagtcaccaggaaggccaacaacgacattacttctctcgcaagcaatggcggcagagtgcaatgcatgcaggtgtggcctcctactggaaagaagaagttcgagactctctcatacctccccgatcttacacccgtgcagttggctaaggaagtggattaccttcttcgctcaaaatgggttccttgcttggaattcgaattagaggagggattcgtgcaccgtaaatactcgagcctacccacgtactacgatggacgctactggaccatgtggaagctgcctatgttcgggtgcaccgactcggctcacgtattgaaggagnctgaggaatgcaagaaggaataccccaatgcattcat

SEQ ID NO: 38822 - DNA, 452 bp, Gossypium hirsutum
  unsure (1)..(452): unsure at all n locations; Clone ID: LIB3165-034-P1-K3-D2
ggcatctcctttcccctcttcttcctccactgtcctctttcgctgcctaacctaaacaaagcaatggctttccttccgcccatcaccactttcgcagccgccctcctcctcttcctccacaccccactcgccacgtcatcccccctcaaccttactggcgactccctntcaccctacgaagtcctccaaggctacaacttccccgttgggcttctcccacaaggcgtcttaaagtacgatttagatgaatccaccggtcggttccatgcctacttagagggttcgtgtagcttctcactggaagggtcttatcaactcaaatacaaatccacgatcagcgggatcatcttcaacaacaggctcaaaaacctgagtggaatcagtgtcaaggtcctgtttttatggctcaacatcgtggaggttgttagagatgaagatgagctggaattttc

SEQ ID NO: 38823 - DNA, 169 bp, Gossypium hirsutum
  Clone ID: LIB3165-034-P1-K3-D3
accacgcgtccgtacggtgcttgtgtccatattcacattcttcttcttttcattcttcttcttgatgacagtgtgtttatgcagtgtcacggaggatactggctccaaattatgcaccaccaaagtgggattatggagggagtgcacttgatcgttccaaaggaaacaa

SEQ ID NO: 38824 - DNA, 449 bp, Gossypium hirsutum
  Clone ID: LIB3165-034-P1-K3-D4
attctctttcactgcaaactgtgagcgagtgagagagatgtcttgctcagctacttcatcggccgcggctctcatctcctctaagccaagggctttctcctccaattccaagcccttctcccaatccctttctctccccaatcccttcactggtctccctgcccctctcctttctcgtcccgcctccttttccctctcccgcgcctccccttctcgcaagtctttcgtcgtcaaagccaccagtgagcttccactggtgggaaatcctgcccctgattttgaggctgaggccgtctttgaccaggagttcattaaggtcaagctctctgaatacattgggaagaaatatgtgattctcttcttttacccgttggacttcacatttgtttgccccacagagattactgctttcagtgaccgctatgaagaatttgagaagctaaacaccg

SEQ ID NO: 38825 - DNA, 475 bp, Gossypium hirsutum
  Clone ID: LIB3165-034-P1-K3-D5
ttttgggtggaccacgcgtccgcttttgtataactgtagcatatagtactagtaagcagtaatagcaatggcctcctccatgatctcatcggcaaccattgccaccgtgaactgctcctccccggcacaggccaacatggtggcccccttcaccggcctcaagtctgcctctgctttcccagtcactaggaaggccaacaacgacatcacttctcttgcaagcaatggtgggagagtgcaatgcatgcaggtgtggcctcctcttgggaagaagaagttcgagacactctcatacctccccgatcttacacccgtacagttggctaaggaagtagattaccttcttcgctctaaatggattccttgcttggaattcgaattagaggagggattcgtgcaccgtaagtactcgagcttacccacgtactacgatggacgctactggaccatgtggaaactgcccatgtttgggtgc

SEQ ID NO: 38826 - DNA, 454 bp, Gossypium hirsutum
  Clone ID: LIB3165-034-P1-K3-D6
cccacgcgtccgcccacgcgtccgtcttcctccccacccttaaaccatgtcggcttttgttggcaagtatgcaggtgaactcccgtttaggaatttggctttcactgtcttctcctgcatgttttattccattgtatttggggacatgcatgtaaatccttaatgaccacaacacttgatcgatccgtaccataaatgttcaaattttcattacagatatgctattttatgcataattttgttagtcctagctttgactaaaccctgtatgtatattttcccccagaggagttgatcaagaacgccaactacatcgccacgccaggcaaaggtattttggcggcggacgagagcacaggcaccatcgggaagcgtctctcgagcatcaacgtcgagaacatcgagtccaatcgccaagccctccgcgagctccttttcacctcttccaacgcat

SEQ ID NO: 38827 - DNA, 436 bp, Gossypium hirsutum
  Clone ID: LIB3165-034-P1-K3-D7
cccacgcgtccgctcagactactctttcgaaccagctccaccatcacccccaaaaaacaaagcaaattgtagaagatggcaacacaagcacttgtatcatcgtctcttacctactcagtggagactgcaaggcagattcttggagctaaacgacaaattgggtcttcaaggaaaggatcctttgttgttaaggcagcttcgactccacccgttaagcaaggagctgatagacctttatggtttgcatctaaacaaagcctttcatacttggatggcagccttccaggtgattatggatttgtacccctgggactctcagaccctgaaggtccaggagggttcatcgagcctaaatggctagcctacggtgagatcatcaacgggcgttatgctatggtgggtgcagtaggtgcgattgcccctgaaatacttggga

SEQ ID NO: 38828 - DNA, 410 bp, Gossypium hirsutum
  Clone ID: LIB3165-034-P1-K3-D8
cccaactccaacaaaacatcaatggcggcagctaagccattgccgtcatctcttcacactcaccaaattctctcttcatgcaaccaaattttaccttcgctcctccatttccgtcaacattacagcaacccgaaatgccaacaaccacaaaggcgaagaaaacactcaagctccttagatggcgcctacgacttggctatcaaagcttacatggaaaacccaaactccatctctggtttcgcaaacaaagtcattggctctctccctatagtcggccttgtcgctaggatttttagtgatgaaggcggtgttggtggggatatcattgattttgctgagtttagaagaagggtgggcaagaaatgtactgttactgattctagagccttttacgagttccaagaaaggag

SEQ ID NO: 38829 - DNA, 428 bp, Gossypium hirsutum
  Clone ID: LIB3165-034-P1-K3-D9
caacaacgacattacttctctcgcaagcaatggcggcagagtgcaatgcatgcaggtgtggcctcctactggaaagaagaagttcgagactctctcatacctccccgatcttacacccgtgcagttggctaaggaagtagattaccttcttcgctcaaaatgggttccttgcttggaattcgaattagaggagggattcgtgcaccgtaaatactcgagcctacccacgtactacgatggacgctactggaccatgtggaagctgcctatgttcgggtgcaccgactcggctcaggtattgaaggagcttgaggaatgcaagaaggaataccccaatgcattcattagaatcattggcttcgacaacgtgcgtcaagtgcagtgcattagtttcattgcctacaagccttcaggcttctaagcttttt

SEQ ID NO: 38830 - DNA, 459 bp, Gossypium hirsutum
  Clone ID: LIB3165-034-P1-K3-E1
cccacgcgtccggaccttcattcgaccaatggttgaaaatctttaaatgataacatcgtccttttgcccaccactatcaaatttccagattttccaggaaaaagaaaatcaaaacccccaggtgaagaaggtgaaaaccagcagcggcaaaggcaataaaaggtgaagccaaagagagagagatatatacataataaaaaagacttttcaaaagaacacaactatggctcctcatagagaaggatcagatgcttcagtggaagccatggttgctcaagtcgaaaaacacccaatttcatcgatccttatcatcattgctatgcaaacagaagctttgccggtggtgaataagttccagttgattgaaaaccctcattcttcgtttccaaaaggggtcccttggatccattatcatggtgcatacaaggacatcataatcaatctagtttggcctggaaa

SEQ ID NO: 38831 - DNA, 444 bp, Gossypium hirsutum
  Clone ID: LIB3165-034-P1-K3-E10
gtttcctttctcgattttctatttagccaaacaagatgcagatcttcgttaagactctaaccggcaagacgatcactctcgaggtcgagagctccgatacgatcgacaacgtgaaggccaaaatccaagataaggaaggcatccctccagaccagcagcgtctgatcttcgccggaaaacagctcgaagacggccggaccttggccgattacaacatccaaaaggagtcaactctccacctcgtcctccgtctgcgcggtgggatgcaaatcttcgtgaaaaccttgactggcaagacaatcactctcgaggtcgagagctccgacacgatcgacaacgttaaagcgaagatccaagacaaggaaggcatccccccagaccagcaacgtctcatctttgccggaaaacaactcgaagacggtcgtaccttggccgactacaaca

SEQ ID NO: 38832 - DNA, 446 bp, Gossypium hirsutum
  Clone ID: LIB3165-034-P1-K3-E11
caacattgaagagataagattatggtgaaaaactaaacataataaagtccctcataacattcttcgacttgcttcattgattagcccaaagataaacataaccaaaaagaaaaatggcttctgcttccgctactctcctcaagtcttcacctattatcgacaagtccgagtggattaagggccaaaacctccgccacccttcggtttgttttgtacggtcacaccctacatcggccgcctttaccgtccgtgctagttcatatgccgatgagcttgttaagaccgcgaaaactgctgcatctccaggtcgtggtattttggccatggatgaatcaaatgctacatgtgggaagcggcttgcctcgattggtctcgagaataccgaggcaaaccggcaagcttaccgtacccttctcgtgtctgcccctggcctcggtaactacatc

SEQ ID NO: 38833 - DNA, 449 bp, Gossypium hirsutum
  Clone ID: LIB3165-034-P1-K3-E12
ggaacccaaggacagaagactcttttaacatttcaccgcaaagatggagataacaaatgtgagcgagtatcaagaaattgcgaagcaaaagttgccaaagatggtgtatgactactacgcatctggtgctgaggaccaatggacattgcaagagaatagatttgctttcactaagatactgtttcgtcctcgtattctcatcgatgtaagcaagatagacatgaccacaactgtgttgggtttcaagatatcaatgcctatcatgattgccccaactgccatgcaaaaaatggctcatcctgaaggggagtatgcaacagctagggctgcatctgctgctggaactatcatgacattatcctcatgggcaacttctagtgttgaggaggttgcttcgacaggacccggcattcggtttttccaactctatgtatacaaggacaggaatg

SEQ ID NO: 38834 - DNA, 425 bp, Gossypium hirsutum
  Clone ID: LIB3165-034-P1-K3-E2
aaggacagggctactcctcaacaagttgctgattacaccctcagcctcctccgccaaagaatccctccagctgtccctggaatcatgtttttgtctggtgggcagtctgaagttgaggctaccttgaacttgaatgcaatgaaccaagctccaaacccatggtatgtgtcattctcatatgcaagagcccttcaaaacacttgcctgaagaagtggggaggcaggcctgagaatgtgaaggatgctcaagaagcgctgctcatccgagcaaaggccaactttcttgctcaactcggaaagtacactggccaatgagagtcagaggaggccaagcaaggaatgtttgtcaagggttatgtctattagcatgtttggatcttcaacaggtcaatgaattttctggactgaaaatttaattgaaagag

SEQ ID NO: 38835 - DNA, 452 bp, Gossypium hirsutum
  Clone ID: LIB3165-034-P1-K3-E3
cccacgcgccgcttattgatgggttaaagagagtagctgtttgcaacccagtcatgctattggacgagattgacaagacaggttctgatgtgcgtggtgatccagcttcagctctactggaggttcttgatccggagcagaataattctttcaacgaccactatttgaatgtgccatatgacctttcaaaggtgatttttgtggctactgcaaatagggtgcagcctattcctcctccactcttggacaggatggaagtcattgagctgcctggatataccgctgaagaaaagctaagaatagccatgcaacatttgattccacgagttttggatcagcatggattgaattctgagtaccttcaaattccggaggccatggttaaacttgttattcagaggtacaccagggaagctggtgttcggaatctcgaaaggaacttggctgctttg

SEQ ID NO: 38836 - DNA, 448 bp, Gossypium hirsutum
  unsure (1)..(448): unsure at all n locations; Clone ID: LIB3165-034-P1-K3-E5
cccacgcgtccgggaaaaagaagtccagtagtagtaagtctttattctacgaagctcctctcggttacagcattgaagacgttcgaccaaacggtggaatcaagaagttcagatctgctgcttactccaactgcgctcgcaagccatcctgatatactcacatgcgtgccgtctgaccactagtagtggttaataaaactgttatttgctttgttagttagttttagattatttccccgaccaacttcttcctcttctctcttcgtggctggtttctttacattgcgttctcctgatttggcgactttgtaattcggataaagtttgcagtccttggttgaatcacaatggcagtgtctgcaattggatttgagggttatgaaaaaaggcttgaaatttcctttnttgagcctggcatctttgctgatcctgaaggaaagggtcttcg

SEQ ID NO: 38837 - DNA, 452 bp, Gossypium hirsutum
  Clone ID: LIB3165-034-P1-K3-E6
ctcatatctctctgtttatttattttttttgttttccttttgtcgtccttttctcacctgttgttcttccattttttaatcaagttccccccaccccgctcaacacctctccctctaacaagccaaaggccccaagcagattctatttgttctaacatggagaaaagccatgaacttgaactgacccagatgaggaaatcagtagagaaacttgggttttcaacagagaaatacggggatccgacactcatgagattcttgattgcaagatcaatggacacagataaagcttcaaagatgtttgtccagtggctgaaatggaggtcttctttagttcctaatgggtgcgttgtagaatctgaagtgcctgaccaattagaagccagaaagatttttttgcaaggtttgtcaaagacaggatatccagtgatgattgtccaagcttgcaagca

SEQ ID NO: 38838 - DNA, 450 bp, Gossypium hirsutum
  Clone ID: LIB3165-034-P1-K3-E7
cccacgcgtccggatgtcatgaagatagacatgggtggttctggagcagttattggtgcagcgaaagctctcgggcaaatgaaacctcccgcagttgaggatcatttcattgatgcatcttgtgaaaacatgataagtggaacgggtatgagacccgctgatatcctcacaggatctaatggaaagaccattgaggttaattacactgatgccgaaggcaggcttacactcgcagatgctttggtatatgcttgctaccaatgtgtctagaagattgtctaccaggcaacactaactggggcttggattgtcgctcttggaccgtctattgcatgcgtcctcacaccccgtgatgtacttgcaaaggaggtattcgaagcttcagagatcagtggtgagaaattttggaggatgccacttgaggaaagctattgggagtctatgaaatca

SEQ ID NO: 38839 - DNA, 454 bp, Gossypium hirsutum
  Clone ID: LIB3165-034-P1-K3-E8
atttgatgaaaaagggagtgaaggtgagacaaaaggactccatctgagggggaagagatctacagaaagtgatgggaaagcggataacggtgatgataagatcgtggttcggagccagactaagaagaacagaagattgggccttgataaaaggattgaactgaaaaagaatagagaagaaaagtcggttgtttctggccagagtaaaaagggtatctcgaatgaaagtgagaagatcgataggcttgtccgggactattcggcttcaaccgatttggtcagcctggactggaagaaaatgaagataccttcggttctgccgtccaccgaacatacttggttgtttaagctaatgcagccaatgaaggcactgcttgaagcaaaagagaacttgcaaaaggatctgggtagagatcctactgaagatgaattagctgaggcaacaaattcgagt

SEQ ID NO: 38840 - DNA, 445 bp, Gossypium hirsutum
  Clone ID: LIB3165-034-P1-K3-E9
cgatggaaccgtcagtgttcttgtggcaacttttttgttcgtaattcccaacaagaagcgaaagggagagaaattgatggactggaacgaatgcaagaagctgccatggaacattattttgttactaggggctggtttcgccatagccgacggagtccagtcaagcggactcgctgatcaattatccaaaactctagattttctcgaagaggctccgtatttagctattgcccccgcggtgtgtttaatctgtgccataattaccgagtttataacatcaaatgatgctactgctacccttgtgcttccacttttgattcaaatggcaaaaaccatgcatgttcacccattactccttatggtccctggagcagtgggatcacaatttgcttttatttttgcgacggcaacaccttcgaatatcattggattcgcgacgggcata

SEQ ID NO: 38841 - DNA, 476 bp, Gossypium hirsutum
  unsure (1)..(476): unsure at all n locations; Clone ID: LIB3165-034-P1-K3-F1
tcccacgtcgtctcgcttaaaaccaagtgttnntctcttcttcttcatgtttctcagatcatagagcttcttcttcttcgtgtctttgttaggtagtttgccctttacccttttcttcttcttcttctcacatgtnccaagtcagtgaaatcacccaattcanntcctcgggatgttctaccctttattggccgagaccaggtttcatgtgccgatccttaattcacttaacagtgccatcgaccttttaccagcctttgtcggttctgtttcgtcccaaaaccacatcgtgagctggaaaggtgcgtgcttttatgagaacaccgctaggatggagttccataacaagagtggcagtgagttcggtggtggaactctccatatcaaggttagcatagcccatagttggacgtgtctggatctttatctctttgcaactccatatcgtgtaactggggattattattttctatctc

SEQ ID NO: 38842 - DNA, 272 bp, Gossypium hirsutum
  Clone ID: LIB3165-034-P1-K3-F10
tccacgcgtccgaaaacacccaggtacagaagcacttacattttctctttggcttaccaaccttggatctgaaatggcaaagtcacccgaagaagaacaccctgtcaagacctttggctgggctgcaagggacccatctggtcatctgtcttctttcaccttctccagaagggtaactggtgaagaagattgtgaggtttaaggtgctgtattgtgggatttgtcattttgaccttcacagtatcaagagtgaatggggcttcttcaactac

SEQ ID NO: 38843 - DNA, 448 bp, Gossypium hirsutum
  unsure (1)..(448): unsure at all n locations; Clone ID: LIB3165-034-P1-K3-F11
aaaaaatctccaagccaaaccatttctccgctggcatttgcttacaacaaaaaaaaaattcaaattgaagaatgcctgtatttgcttcaagagttgggttcaggagacacgactacaagaatagatcaaaggaacgaaacgatgaccgtaaagacaaattgtccgaagtgttcaagagctatgctgctaatgggctgctagacaaggaagggctgaaagacgcttttctacatctagatgctgccatgccgtaccggcaagccgaagacgccctccgtgtcgtcggcaaaacctataacattaacgtcgaggaggaaaccgagcttaacgcccttatcgactatgcttacaataagggttacgggtcttcaatttgattagctaatttataagctaaatttctttttctttttcacttttaatcatctaatatngttttttatatata

SEQ ID NO: 38844 - DNA, 425 bp, Gossypium hirsutum
  Clone ID: LIB3165-034-P1-K3-F12
gtttcattgaaggcgggactctcagactactctttctaaccagctccaccatcacccccaaaaaacaaagcaaattgtagaagatggcaacacaagcacttgtatcatcgtctcttacctactcagtggagactgcaaggcagattcttggagctaaacgacaaattgtgccttcaaggaaaggatcctttgttgttaaggcagcttcgactccacccgttaagcaaggagctgatagacctttatggtttgcatctaaacaaagcctttcatacttggatggcagccttccaggtgattatggatttgaccccttgggactctcagaccctgaaggtccaggagggttcatcgagcctaaatggctagcctacggtgagatcatcaacgggcgttatgctatgttgggtgcagtaagtgcgatt

SEQ ID NO: 38845 - DNA, 420 bp, Gossypium hirsutum
  Clone ID: LIB3165-034-P1-K3-F2
cccacgcgtccggtgagatggcttgctcagctacttcatcttccgcggctctcatctcctctaagccaagggctttctcctccaattccaagcccttctcccaatccctttctctccccaatcccttcactggtctccctgcccctctcctttctcgtcccgcctccttttccctctcccgcacctccccttctcgcaagtctttcgtcgtcaaagccaccagtgagcttccattggtgggaaatcctgcccctgattttgaggctgaggccgtctttgaccaggagttcattaaggtcaagctctccgaatacattgggaagaaatatgtgattctcttcttttacccgctggacttcacatttgtttgccccacagagattactgctttcagtgaccgctttgaagaatttgagaagc

SEQ ID NO: 38846 - DNA, 456 bp, Gossypium hirsutum
  Clone ID: LIB3165-034-P1-K3-F3
ctcttttgtatacctgtagcatatagtaatagtaagcagttatagcaatggcctcctccatgatctcatcggcaaccattgccaccgtgaaccgctcctccccggcacaggccaacatggtggcccccttcaccggcctcaaatctgcctctgctttcccagtcaccaggaaggccaacaacgacatcacttctcttgcaagcaacggtgggagagtgcaatgcatgcaggtgtggccgcctcttgggaagaagaagttcgagactctctcatacctgcccgatcttactcccgtacagttggctaaggaagtagattaccttcttcgctctaaatggattccttgcttggaattcgaattagaggagggattcgtgcaccgtaagtactcgagcttacccacgtactacgatggacgctactggaccatgtggaaactgcccatgttcgggtgca

SEQ ID NO: 38847 - DNA, 453 bp, Gossypium hirsutum
  Clone ID: LIB3165-034-P1-K3-F4
ggtcagtaaagcttcaattcaaaggagtgttagtttccatggcgttttcttcttctgctctctctcacacctcttcttcatgcctctcttccttcccacatgccttcacaaccagaaaaacccatcttcgcttcccatcatttttactcataaaagcttcttctgaacctgacaaaggaaaccccactgctacacagaccaaaaacgctgaaggctctagcaatgctcaacctcaacctcaagccactcccgccgccgccgctaagccacctcccaaaaagcccgtttattccatgaagaaaggccagattgttagggtggataaagacaagtatctcaacagtattaattatctatctgtagggcatcccccctattacaaaggcttggactacatatacgaagaccgtggtgaggttctggatgtacgcatttttgagacaggagaacatg

SEQ ID NO: 38848 - DNA, 439 bp, Gossypium hirsutum
  Clone ID: LIB3165-034-P1-K3-F5
attcaaaactaatcatgtaaaaaaaaaagttgattggaacaaataaagtgaaacatttaagacaagaacaaagtggagattttataacacaaaaatagaggatgcaaatccacttaaaacacaaaaggaaaacaacattcaattaagacacaaaggggggatttcctttgtttgtgcccaatatagatttttttcttcccttagagcttaatttcccatttagaaagctcctctcttgatagcatcgtcattagcatttccaagggcagcttcactcaaatatttgtcagccaattgaaccctcttcacattctcttgctcagcaacaagcatgtatccatattccaacagcttctcaatggtcatcttcggttgctcgaaagatggtggcccttccctcgagttcacgagctttttcccgacaccattgactccgacc

SEQ ID NO: 38849 - DNA, 453 bp, Gossypium hirsutum
  Clone ID: LIB3165-034-P1-K3-F6
ctcccatcacccgagatcatctttccccttcagaatggctgctgcaaccatggctctctcttccccatctttcgccggaaaggccgtcaagctctctccttccgcccctaaaatccaaggcaatggccgtgtttccatgaggaaaaccgctaccaaggctgctccctctggaagtccatggtacggtcctgaccgagtcttgtacttgggtccactatctggtgagcctccatcttacttgaccggagaattccctggtgactacggttgggacactgctggactctcggcggacccagagacatttgccaggaaccgtgagctcgaagtcatccactgtaggtgggctatgttgggtgctctgggtgtgttttccctgagcttttggctaggaatggagtcaaattcggtgaggctgtgtggttcaaggccggatctcaaatcttcagcgat

SEQ ID NO: 38850 - DNA, 446 bp, Gossypium hirsutum
  Clone ID: LIB3165-034-P1-K3-F7
cccacgccgtccgaaatcagttgcttcacaatggcctctacaaccatggctctttcttccccatcattcgccggtaaggcagtgaagttctccccttccacccctgaaatccggggaactggccgtgtttccatgaggaaaaccaccaagcctgttccttctggtagcccatggtacggtcctgaccgagttttgtacttgggtccactttccggtgagccaccatcttacttgaccggtgagttccctggtgactatggttgggacactgctggactctcagctgatcccgagacctttgctaggaaccgtgagctcgaagtcattcactgcagatgggccatgttgggagctcttgggtgtgttttccctgagctggtggctaggaacggtgtcaagttcggtgaaactgtatggttcaagggccggtctcaaatcttcagtga

SEQ ID NO: 38851 - DNA, 202 bp, Gossypium hirsutum
  Clone ID: LIB3165-034-P1-K3-F8
acgatttcgaactctatttagaatcaaaccaccgtacgttattttctttaagtatcttgtaggatactgttgttccagccacatttctcttttcgctctactagtaatttaattggagcttgaacccgagtttcggtgaggttgaatccacttttttcgttctaccttccttatttattttatctaattcttatctaattct

SEQ ID NO: 38852 - DNA, 423 bp, Gossypium hirsutum
  Clone ID: LIB3165-034-P1-K3-G1
gtttcattgaaggcaggactctcagactactctttcgaaccagctccaccatcacccccaaaaaacaaagcaaattgtagaagatggcaacacaagcacttgtatcatcgtctcttacctactcagtggagactgcaaggcagattcttggagctaaacgacaaattgggtcttcaaggaaaggatcctttgttgttaaggcagcttcgactccacccgttaagcaaggagctgatagacctttatggtttgcatctaaacaaagcctttcatacttggatggcagccttccaggtgattatggatttgaccccttgggactctcagaccctgaaggtccaggagggttcatcgagcctaaatggctagcctacggtgagatcatcaacgggcgttatgctatgttgggtgcagtatgtgcga

SEQ ID NO: 38853 - DNA, 449 bp, Gossypium hirsutum
  Clone ID: LIB3165-034-P1-K3-G10
caatctttcagaaagagagaggcaaagagaaaaaagagtgagggtattacatatattcatctaattatacaaataaagatggctcttcacctttcctgggtttccgtttttggcgatctcggtactgaaatatatattcatatgcccttcttgtttgcgtattttaatattcactaacattacattatattgtttttaattaggcgtcattgtttcatttatggtcgccttttctcccatgccagcattttatcaaatctataagaagaaaacatcagaaggattccaatcattaccctatgtgatatcgctattcagtgccatgctttggatttactatgcacttcttaagaagaatgaaatgcatctaattatcatcaacattttctgctgtttcattcaaagcttttacattgtcacttacgtttactacggtcgaaagaaggaaa

SEQ ID NO: 38854 - DNA, 447 bp, Gossypium hirsutum
  Clone ID: LIB3165-034-P1-K3-G12
atggcttcttctctcagtctttcaagccacacagtggcttcattattcccttctcacacttcaaagccgcagttgtcactttctaaatccatcccaattctcaccaaatcatcacagtctcaatttcatggccttaaattctctcacccttcttctcttaaaattcctcgtttttccacttttaaaacctcgatttctgctaaggtgaataaaggtacagttcctccagcatttactttgaaagatcaagatgggaaaaatgtaagcctttcaaagtttaaagggaagcctgttgtggtttatttttaccctgctgatgaaacccctggttgcaccaaacaggcatgtgcttttagagattcttatgagaagtttaagaaagctggagctgaagttattgggattagtgttgatagtgcagaatctcacaagaattttgccaagaaa

SEQ ID NO: 38855 - DNA, 440 bp, Gossypium hirsutum
  Clone ID: LIB3165-034-P1-K3-G2
ggcgagagtagtggaaatagaaaggaaaaatgagcttaaaacatcaccataactccaactccgcagcagctgctcaatctctctcttttgatgacattgccgacttcttctctcttccccttgacgacgccgcttccactcttggcgtttgcacctctgttctcaagaaaatctgccgtgaaaatggtctcgacagatggcctcaccgcaagtttttagctggaaagagcgtcgaagaaatcaagaggcatgcagctagagaaagaagaagggaaatcgctgagctttcaaaggctcatcggcagagctctcaacctcaaccccaaaacaatgaacaacccaaattacaaggtggctcagcattaccgaacttacagcagcaagggataagaaacatacaaacagcgcatgccctgaattttagccatcaaagcttgatg

SEQ ID NO: 38856 - DNA, 449 bp, Gossypium hirsutum
  Clone ID: LIB3165-034-P1-K3-G3
cagcagctgcaccacaactacagagaagagagtaaaggggaaaaaaagcgtcgtcgtttttgcttcttcttctacttcgctctctctccttctccgaagttcctctttcgttctttcatttattcagtattgtaaaagatggccgacggtgaggatattcaacccctcgtctgtgataatggaactggaatggtgaaggctggttttgctggtgatgatgctccaagggcagtttttcccagtattgttggtcgtccccggcacactggtgttatggttgggatgggtcagaaggatgcctatgtaggagatgaagcacaatctaaaagaggtatccttactttgaaatatcctattgagcatggtattgtgagcaactgggatgatatggaaaagatctggcatcatacattctacaatgaactccgtggtgctcctgaagagcaccc

SEQ ID NO: 38857 - DNA, 429 bp, Gossypium hirsutum
  Clone ID: LIB3165-034-P1-K3-G4
cttggaaattccaccttactatctctcacaattcaatcgactatggaatccattggagttctcatggcttgccccatgaactcttacctcgagcaacaactcgagaaccgtttcaagctattcagattctggacagtgccggacaaatcatcctttctggcttctcacaaggactcaatccaggcggtcgtcggaaacgcctttgccggtgccgatgctatgctgatcgaggcgttgcccaagctggagattgttgccagcttcagtgtggggcttgataagatagatttggccaagtgtaaagaaaagggtatccgagttaccaacacccctgacgttttgactgaggacgtggcggatttggcgatcggtttgatgttggcggtgttgaggaagctctgtgagagtgatcggttcgtgaggagtggc

SEQ ID NO: 38858 - DNA, 453 bp, Gossypium hirsutum
  Clone ID: LIB3165-034-P1-K3-G5
atacaggcagcaatgagaaggagcttagtatatactccaagacagaattccggttgggacaccacgtcccaagactaccaagctcatctttcccgaatggaaagatcagccaccatgatccctggtgcccctcagtaccccgatgtccacaaggccttcaacaacaaggttgagtttccggaagaagatcagtgcactgagcggtccccaacggcaaactcccgaaagaaggttcaggtggttgagcatgcagagaccgttgatgaagccacccttgattctcaagctgatagctacatccagcagaaacacaaagcctttgaactgtgcaaatggaagaccttcaaaatgcactagagttgagacttttggagtaagcatgtcgatcatgatttaatgacaggccacgtaacctaaatatatgaagtattgctgctcatacactatttaaat

SEQ ID NO: 38859 - DNA, 437 bp, Gossypium hirsutum
  Clone ID: LIB3165-034-P1-K3-G6
cccacgcgtccgcccacgcgtccggaaaatggaaaatggaggcaaccatggaaaggatatgcttttggaccatcttggagatgacattgttgctgcttctgcaactatggagcaacacgaagaagcaccttctgcagaagaaatgcaagaaaggatggatcaattcacctacatcatgcagcagaagtttctctctggtgaagattatgagtatttagaatactctaaaatagatgaccatgagaacctggatggtcaactggcttagggaagctaaccatgatgcaaaggagaagtatttggctgaagattaataacggaaaattacatccatggatctcccaacatttgcagatatctcttcgttatagcagtggttagtgattacccttttctacttatgtacctaacttctaatataaagttatggaatggca

SEQ ID NO: 38860 - DNA, 454 bp, Gossypium hirsutum
  Clone ID: LIB3165-034-P1-K3-G7
cccacgcgtccgatggcacccatttcattacccaacatgccccatgcagtatgcatcccctacccagcacaaggtcacgtaaatccgatgctcaaagtggccaaactcctccatttcaaaggcttccacatcacttttgtcaacaccgagtacaaccacaaacgcttgctcaaatccaggggcccccacgccctcaatggcttgcctgacttccggttcgggacaatccccgacggccttcctccgccggacatcgacgccacgcaagacatccccgcgctttgtgactccactagcaagcattgtttggctccctttcgccgactccttgttgagctaaaagctacttccggtgtcccgccggtcacttgtatcgtcgccgatgggtgcatgtcgttcactctcgaggcggctaaagagttagggattcccagtgtgttgttttggacaccca

SEQ ID NO: 38861 - DNA, 452 bp, Gossypium hirsutum
  Clone ID: LIB3165-034-P1-K3-G8
cccacgcgtccgggaatccattggagttctcatggcttgccccatgaactcttacctcgaacaacaactcgagaaccgtttcaagctattcagattctggacagtgccggacaaatcatcctttctggcttctcacaaggactcaatccaggcggtcgtcggaaacgcctttgccggtgccgatgctaagctgatcgaggcgttgcccaagttggagattgttgccagcttcagtgtggggcttgataagatagatttggccaagtgtaaagaaaagggtatccgagttaccaacacccctgacgttttgactgatgacgtggcggatttggcgatcggtttgatgttggcggtgttgaggaagctctgtgagagtgatcggtttgtgaggagtggcaagtggaagagagggcaatatgtgttgactactaagtttactggaaaaagagttg

SEQ ID NO: 38862 - DNA, 287 bp, Gossypium hirsutum
  Clone ID: LIB3165-034-P1-K3-G9
gtgatgaggaagagcttgccatggagaacaacaagagtgctgcatcttcatcagggaaaatcaccttgagcgtctcaaagagcaagccgcagaccggtgtagttatcggtgtgtcccagagccttgagtcatctgacactgacttgtgtgccaagactgcaaaggatgtcatgatcactggtctacggtatgctcatctagagtcaggaacatgtgttgtttgagtatgtttatcttcagctgatatgctgggatctttaaacacgtgatggttaacttttcaacaa

SEQ ID NO: 38863 - DNA, 391 bp, Gossypium hirsutum
  Clone ID: LIB3165-034-P1-K3-H1
cccacgcgtccgctcgagatgggtgggccagcccgatccgacccaataaccttttatttgattcgggtgcgatcgactttgccggttcaggtgtggttcacatggttggtggcattgcagggttatggggtgcattaatcgagggtccaaggattggccgattcgatcgagctggtcgatctgtggcgttacgtgggcacagtgcctcattagtagtgctcgggacgtttctattgtggttcggatggtatgggttcaacccaggttcattcttgaccatcatgaaagggtatggtggtggtaggaggttattattggacaatagtagttccgtagtttttttctatatttaccttcttcattttccgttctctataattttaattacata

SEQ ID NO: 38864 - DNA, 379 bp, Gossypium hirsutum
  Clone ID: LIB3165-034-P1-K3-H10
gccactcgtccgagttgtttacacacaaggtgccgtccatcgcatcagtcaacgatgcagacttgtacagctcggatgccgcctcctgatgccggcctactggcactactcacgttatgataaccggcctgcctggccattcgaagagcgcagagcactctgcagaccgagtgctgaactagatcgcactgtacgaggaacggccatgtcacccgcacagcgagtcacatgtggacaatgaagcggactctggctggaccgaaacttcatcgagaggaccgtaaaaatgcacgcctagcttgataatcactggctgcatacaacaaaattgagagctcgcgcgttcgctttgcataagctgaactcattgaacacagta

SEQ ID NO: 38865 - DNA, 436 bp, Gossypium hirsutum
  Clone ID: LIB3165-034-P1-K3-H11
cccacgcgtccggtgagactcttttgtatacctgtagcatatagtaatagtaagcagtaatagcaatggcctcctccatgatctcatcggcaaccattgccaccgtgaaccgctcctccccggcacaggccaacatggtggcccccttcaccggcctcaaatctgcctctgctttcccagtcaccaggaaggccaacaacgacatcacttctcttgcaagcaacggtgggagagtgcaatgcatgcaggtgtggccgcctcttgggaagaagaagttcgagactctctcatacctgcccgatcttactcccgtacagttggctaaggaagtagattaccttcttcgctctaaatggattccttgcttggaattcgaattagaggagggattcgtgcaccgtaagtactcgagcttacccacgtactacgatggacg

SEQ ID NO: 38866 - DNA, 132 bp, Gossypium hirsutum
  Clone ID: LIB3165-034-P1-K3-H12
gctaccactgcttctccaatggcgactcaactgaagagcagctttacctcgtctggtcacaagaggactggtagcccccaggggcatttggggatccccgttcaaagtatcttccggaaggaccagaacccc

SEQ ID NO: 38867 - DNA, 450 bp, Gossypium hirsutum
  Clone ID: LIB3165-034-P1-K3-H2
cgaactcccctcccgtcctctttcccgatttgtcttcttcattgccccgccatggcttgtgttagcttcgctaaactcaacgcgccgtcatcctcttggatcggtggccagcagtctctccctcaacgctccggatcatccgctcggctcgccactcgcagagtctcactcccgatccgtgctggcgcttacaccgacgaactcatcaaaaccgccaaaactattgcttcacctggtcgtggaatactggcaattgatgaatcgaatgcaacatgtgggaagagattatcttctattggcttagacaatactgaacccaaccgccaggcttacagacagcttctgctcacaactcctggcctcggagaatatattttcggtgccattcttttcgaggaaacactttaccagtcaactacagatgggaagaagttgttgatgtcttgcacg

SEQ ID NO: 38868 - DNA, 452 bp, Gossypium hirsutum
  Clone ID: LIB3165-034-P1-K3-H3
caaagtccaatcactcccaatactttcataacatttcacgaacttcactctccagtctccaatggcggctgccgtctccaccatcggtgctgtcaaccgagcaccgttgagtttgaatggatcaggtgccggagcttctgctccaagctcagctttcatggggaacagcttgaagaaagtgagcgctaggttcaacaacaacggcaaggctccagtgggaagtttcatgattgtggctgccaaagaaatcgacgaagacacacagaccgaccaggaccgatggaagggtcttgcttatgatatctccgatgaccaacaagacattaccagagggaaaggtatggtcgactcattgttccaagctcccatgaacgatggtactcactatgctgtcatgagctcctatgagtacattagccaaggccttcgcacatacgacttggacaacaaca

SEQ ID NO: 38869 - DNA, 254 bp, Gossypium hirsutum
  Clone ID: LIB3165-034-P1-K3-H4
ctcccatcacccgagatcatctttccccttcagaatggcggctgcaaccatggctctctcttccccatctttcgccggaaaggccgtcaagctctctccttccgcccctaaaatccaaggcaatggccgcgtttccatgaggaaaaccgctaccaaggctgcttcccttggaaagtcatgggacgggccttgcccgagtcttgtacttgggtccactatctggtgagcctccttcttacttgaccggaaaattc

SEQ ID NO: 38870 - DNA, 109 bp, Gossypium hirsutum
  Clone ID: LIB3165-034-P1-K3-H5
aaaaaaaaaaaaaaaaaaaaaaaaaataataaaaaataataatttaaacaaaaattaaattttaaaaaatgtgtaaacagaaaatatcaaaaagataaatactttatgg

SEQ ID NO: 38871 - DNA, 449 bp, Gossypium hirsutum
  Clone ID: LIB3165-034-P1-K3-H6
cccacgcgtccgctcttttgtataactgtagcatatagtactagtaagcagtaatagcaatggcctgctccatgatctcatcggcaaccattgccaccgtgaactgctcctccccggcacaggccaacatggtggcccccttcaccggcctcaagtctgcctctgctttcccagtcactaggaaggccaacaacgacatcacttctcttgcaagcaatggtgggagagtgcaatgcatgcaggtgtggcctcctcttgggaagaagaagttcgagacactctcatacctccccgatcttacacccgtacagttggctaaggaagtagattaccttcttcgctctaaatggattccttgcttggaattcgaattagaggagggattcgggcaccgtaagtactcgagcttacccacgtactacgatggacgcttctggaccatgtgggaa

SEQ ID NO: 38872 - DNA, 453 bp, Gossypium hirsutum
  Clone ID: LIB3165-034-P1-K3-H7
ctttctttctcttttgtcaaaccctaaatccctcactccaactgcagattcacctccacaaacagcaaccaatacattcaagcttggagggatgactttttagccttgagatctcctttcggcttcaatttcaacgaagcaaaaagagatttatggcatattcgcaaggtaagactcctctttcttttttccttttattttcaaacgcaatgatggaagatttgaaggcaataaatcgcaaggaaatgcaaaaacttaaagaaatttaaacagaaatcaacttctaaaaattttgactgctttctttgtattcaatatgcgttcgtcctcttttacactgattttctcggccttttatagccgatttacaggataaatagaaaaaggaaaaaaaaactcttaatttttgctgtcatctgctggtttattttctgttattggggcttgtctcgc

SEQ ID NO: 38873 - DNA, 448 bp, Gossypium hirsutum
  Clone ID: LIB3165-034-P1-K3-H8
atttagctatagcatacactactagtacccactactagcaatggcttcctcaatgatctcatcggctaccattgccactgcctctccggcacaggctaacatggtcgctcctttcaccggcctcaagtctgcctctgctttcccagtcaccaggaaggccaacaacgacattacttctctcgcaagcaatggcggcagagtgcaatgcatgcaggtgtggcctcctactggaaagaagaagttcgagactctctcatacctccccgatcttacacccgtgcagttggctaaggaagtggattaccttcttcgctcaaaatgggtttccttgcttggaattcgatatagaggagggattcgtgcaccgtaaatactcgagcctacccacgtactacgatggacgctactggaccatgtggaagctgcctatgttcgggtgcaccgactc

SEQ ID NO: 38874 - DNA, 384 bp, Gossypium hirsutum
  Clone ID: LIB3165-034-P1-K4-A1
cttagtttcctcttagcaaagacttcagtcacccacgcagcccctttaccgatccaaacaatgggacgcgtccgtacgaagactgtgaagaaatcgtctcgtcaggtaatcgagaggtactactctcgcatgacgcttgatttccacaccaacaaaaaggttatcgaagaagtagctattatcccatccaagaggctccggaacaagattgctgggttctcaacccatttgatgaaacggatccagaagggtccggttcgtggcatttctctgaagcttcaggaagaagagcgtgagcgtcgtatggattttgtccccgatgtatcggctattgctgttgattcaatagaagttgataaggaaaccattgatatgctttcactt

SEQ ID NO: 38875 - DNA, 304 bp, Gossypium hirsutum; identical to SEQ ID NO: 38619
  Clone ID: LIB3165-034-P1-K4-A10

SEQ ID NO: 38876 - DNA, 382 bp, Gossypium hirsutum
  Clone ID: LIB3165-034-P1-K4-A11
tttagctatagcatacactactagtacccactactagcaatggcttcctcaatgagctcatcggctaccattgccactgcctctccggcacaggctaacatggtcgctcctttcaccggcctcaagtctgcctctgctttcccagtcaccaggaaggccaacaacgacattacttctctcgcaagcaatggcggcagagtgcaatgcatgcaggtgtggcctcctactggaaagaagaagttcgagactctctcatacctccccgatcttacacccgtgcagttggctaaggaagtggattaccttcttcgctcaaaatgggttccttgcttggaattcgaattagaggagggattcgtgcaccgtaaatactcgagcctac

SEQ ID NO: 38877 - DNA, 279 bp, Gossypium hirsutum
  unsure (1)..(279): unsure at all n locations; Clone ID: LIB3165-034-P1-K4-A2
ccggtnaagaannnncgcggcgacccattaatccgatcgaccgcttataataaactttattcacccacacagcccctttaccaaaccggcgacttttactcaaccggacggtcacttataataaatcntctcgtcaggtaatccagaggtaactctttttctttatccctcacttttataccaacaaataccttttctatcaaccattttatatcccatccacaatgcctccagaacaagattgctggtttcttaacccatttcattaaacttatccaa

SEQ ID NO: 38878 - DNA, 411 bp, Gossypium hirsutum
  unsure (1)..(411): unsure at all n locations; Clone ID: LIB3165-034-P1-K4-A3
tccggccctgttagtggtggcattttgaaggttgttatcttagttnntccgtttttacccaaaagtggggtgttatactcacgtaaaacatgggtggcagcacaaacccatggatnngtgaaccacgctcgttcttggcagttgggtattgganngtcgaaaatggcgttccatatntggcttcattaagaactcatggggtgcagaatggggtgacaatggctacttcaagatggagatgggcaaaaacatgtgcggtgtggcaacttgtgcatcatacccaattgttgcttgatccaatcgatgaaccgttttggatcatgtcatttctgtgttatagaaggcttctagttatggtctacaaatgttgttgtagttgttcggngttatggtctagttgaaaccgatggg

SEQ ID NO: 38879 - DNA, 384 bp, Gossypium hirsutum
  Clone ID: LIB3165-034-P1-K4-A4
agcaaaaccatggcctctgcttctcttctcaagacttcaccagttttagacaagtctgagtgggttaagggtcacacccttcgccaaccttccacttctgtggtgaggtgccaccctgttgcaccctccggactaactgtgcgtgcaagctcatatgccgatgagcttgtcaagactgctaaagctattgcttctcctggccgtggaattttggccatggatgagtccaacgctacctgtgggaaacgtttggcctcaatcgggctagaaaacacggaggctaaccgccaagcctacaggacgttgcttgtttcagctcctggccttggtcagtacatctcaggtgccatcctctttgaggaaaccctctatcaaaccacaatt

SEQ ID NO: 38880 - DNA, 381 bp, Gossypium hirsutum
  Clone ID: LIB3165-034-P1-K4-A6
gtcagtacatctcaggtgccatcctctttgaggaaaccctctatcaaaccacaattgatggcaagaagatggttgatgttcttgttgagcagaacatagtccctggtatcaaggttgacaagggtcttgttccactggctggttcaaacaacgagtcatggtgccaaggtcttgatggcctcgctccacgttcagctgcatactaccaacaaggagctcgttttgcaaaatggcgtactgtggtaagcattcccaatggaccaaccgaacttgctgtgaaggaagcagcctggggacttgctcgctatgccgccatctctcaggacaatggattggttccaattgttgagccagagatcttgcttgatggtgatcacggaa

SEQ ID NO: 38881 - DNA, 377 bp, Gossypium hirsutum
  Clone ID: LIB3165-034-P1-K4-A7
gtcgacggcttctatcaacggttggtgccttacctcctcttcttccaccactaccacctcctctttttccgctcgtcgacgacctacattgcggccttcagtcgtcgctagccttaactcttctccttctcctccgactcttatccaagaccgcccggtttttgctgcccctattcctttgctcaccccgagagaagagatgggaaacaagtcctacgacgaagccattgaagctctcaagaaacttctcagtgagaaaggagaactgaaagctgaagcagctgcaagggtggatcaaataacagcagagttaaacacagcatcagctgatggcaaaccatctgactcttctgttgagagactgaaagaaggcttcg

SEQ ID NO: 38882 - DNA, 382 bp, Gossypium hirsutum
  Clone ID: LIB3165-034-P1-K4-A8
gagtacttgaacggagaagttcccggtgactatggatacgatccgtttggtctgagcaagaagccagaagactttgcaaaatatcaagcatatgagttgatacacgcaaggtgggcaatgcttggtgctgcagggttcatcatccctgaagcctttaacaaatttggtgccaactgtggccccgaagccgtttggttcaagaccggagctcttctcttggacggtaacaccttgaactacttcgggaagaacatccccatcaaccttgtggtggctgtcgttgccgaagtcgtccttgttggtggtgctgaatattacagaatcatcaatggcttggatctggaggacaagcttcaccctgggggaccatttgacccactgg

SEQ ID NO: 38883 - DNA, 375 bp, Gossypium hirsutum
  Clone ID: LIB3165-034-P1-K4-A9
cccacgcgtccgacttttaacccctgtcgacactctcaccattttctcagcaaacttagcctatgaaaatcaccattacaagtcccaaagaagacccccgctaattctaaaagaaagaaccagagttttctttctctttagtttacgtttattggccttttggaatttttgatactaaaaaaaggaggcaacgaagaaggggaatggggggcaaagaagaggatgttagattgggagccaacacgttcacagagaggcaaccaattgggaccgcggctcagagtcaagatgacgggaaagactacactgaaccaccaccggctccatttttcgagcctggcgagttaacctcatggtctttttatagggctggga

SEQ ID NO: 38884 - DNA, 382 bp, Gossypium hirsutum
  Clone ID: LIB3165-034-P1-K4-B1
ttcgctttgagattagatccaaaattcctctttcatcatatttccgattccccaatttttcctgaaaccctaatcctaatcccggattcttctcgtctacatcgtctagcaaatggcaaccgaggagccggcagtcgtggcagaccccgcaccggagacggaggaggacaagactgctgagaccaaagctacttcaaaatctggcagagcaaagaaaaccaaagaacccaaaaccaagaaagctgcagctcctcggaaaccacgggctgctcctactcatccaccttacgaagagatgatcaaagatgcgatcgttactttgaaagagaggacaggttcaagtcagtacgccattgctaagttcattgaagagaaacagaag

SEQ ID NO: 38885 - DNA, 370 bp, Gossypium hirsutum
  Clone ID: LIB3165-034-P1-K4-B10
ggaccttcaatttttcatcggagagagcatgcacgatgatggatgtttggtatttgcttactacaaggatggtgctgttgacccgacatttttgtactttgcgtatgcattgaaggaggtcaagtgctgaggtttgaagcaaagaaaaaaaaagtggttgctgaagaatttagtcctttttattattgcttttgtctcttattttcagtactctgctaaagacataaattatttatggtttttgatgtttttgatttaattgtttgttgttttatcatggaatggtttctatttttatgggttgactaaacaagaatttaactctttgttctattactacttaattttattggaaggaggtttttgggac

SEQ ID NO: 38886 - DNA, 377 bp, Gossypium hirsutum
  Clone ID: LIB3165-034-P1-K4-B11
ctcagctcagctcaactcaactcacttaaatcttttctgctgcggtggcgatgggggcggcgatgttgtcggagttggcgacggagatcgtggtgccagtgtgcgccgtgattggaatagctttctcgttggtgcagtgggtgatggtgtcgcgcgtgaagcttacctccgagcgccatgcgtcgtcggcgaatagtagcaagaatggttacggtgattacttgattgaggaagaggaaggaatcaatgaccatagcgttgtcaccaagtgcgctgatattcaaaacgctatctctgaaggtgcaacatcctttctttttactgaatatcagtatgttggcatcttcatgattgctttcgctatcctgattttcctc

SEQ ID NO: 38887 - DNA, 379 bp, Gossypium hirsutum
  Clone ID: LIB3165-034-P1-K4-B12
caaaaactgggatggcttttgtaacgtcggaggaattgctggccactttggtgccaattgctgtttattggatatactcaggtatgtatgtgatgtttgagtcaaggtttgagaagtacaagttgcactccaagaaagaagaggaggagaagaatttggtttccagaaaggaagtcttcaaagccgttctttgccatcaagtcatgtcaattgctattaacctcttcacgtatgcggtaacaagagaaaaagatggtgaggcatctccaaagaaatcactaaccttgcttcttctagccaagcaattggtgatagcaatggtggtgatagatacatggtcgttttttgtgcattggtacttgcatcagaacaagttttt

SEQ ID NO: 38888 - DNA, 370 bp, Gossypium hirsutum
  Clone ID: LIB3165-034-P1-K4-B2
gattatggtgcaaaactaagcataatactttccctcataacattcttcgactcgcttcattgattagcccaaagataaacataaccaaaaagaaaaacggcttgtgcttccgctactgttctcaagactttacctatgatcgacacgaccgagtggatgaagggccagaacctgcgccaccctccgggtcgctttgtacggtgacacgctacatcggacgccataaccgtccgcgctagctcatatgccaatgagcttgctaagaccgtggaaactgccgcatctacaggtcgaggtataggggccatggatgaatcaaatgctacatgtgggacgcggcttgcctcgattggtgtctagaataccgagg

SEQ ID NO: 38889 - DNA, 384 bp, Gossypium hirsutum
  Clone ID: LIB3165-034-P1-K4-B3
cccacgcgtccgcccacgcgtccgctttgccaaacatggagactagtgtcacgtgctacgctcgtgggattgttcttcctggtgtctcttctaagcactcctcggcattagtctcccctccatccatatctccttccttcagctctaagagccttaaaacaagttcactatttggagaatcattaagggttgttccaaggtcatcattgaaggtttcaaaggcaaagaacactacttcactagtgacaaaatgtgaaattggagagtctttggaagagtttcttacaaaggcaacaacagataaggcattgattagaataatgatgtgtatgggtgaagcattaagaacaattgcttttaaagttagaacagcttcatgtggtg

SEQ ID NO: 38890 - DNA, 382 bp, Gossypium hirsutum
  Clone ID: LIB3165-034-P1-K4-B5
tgaaaaaaaaaaataagacatgtatttggatatttcctttcaactacaacaatattgtagtatttatttgatatgacatgaatagttgaagggaattccccgaagagaaaatggattatgggagtaacaaaaaaacctgacttgaacgatcctgtattaagagctaaattagctaaaggtatgggtcataattattatggggaacccgcatggcccaatgatcttttatatatttttccagtagtaattctcggtactattgcttgcaacgtgggcttagcggttctagaaccttcaatgattggtgaacccgcggatccatttgcaactcctttggaaatattacctgaatggtatttctttcctgtatttcaaatacttc

SEQ ID NO: 38891 - DNA, 381 bp, Gossypium hirsutum
  Clone ID: LIB3165-034-P1-K4-B6
ggggaatctatatgagtgccaaggttgttttttgcatccacaatatagcctatcaagggagatttgcctttgaagattactcacttctcaatttgcctgatcaattcaagagttcatttgacttcatggatgggtatgataagcctgtcaagggaaggaaaatcaattggatgaaggctggaattttggaatcacacagggtattgactgtaagtccatactatgcccaggagcttgtttccggtgaagataaaggtgttgaactcgatcacatcattcgtaaaaccggcatcactggaattgtgaatggcatggatgttcaagaatggaaccctaccactgacaaatacatcagtgtcaaatatgatgcaacaactgtaa

SEQ ID NO: 38892 - DNA, 383 bp, Gossypium hirsutum
  Clone ID: LIB3165-034-P1-K4-B8
atcatgtacatggccgtggcgacttattcaggtctcttcacccccacaatgaccaccctaaaatctttggccccatggaaaccagcctcatcattttcctttgctacctgttccaagtccctcaacttctccgtggctcaaagaaccattagagctgcagctgctgatgaggaagcatcatctgctgccgccacaaaggaagctccggttggtttcacccctccagaattggaccccaacaccccatcacccatcttcggaggaagcactggaggactgcttagaaaggctcaagtcgaagaattctacgtcatcacatgggattcacccaaagaacaaatatttgagatgccgactggtggggcggccatcatgaggcaagg

SEQ ID NO: 38893 - DNA, 382 bp, Gossypium hirsutum
  Clone ID: LIB3165-034-P1-K4-B9
cacgttcttgtttttttcacttctttctctttctcgaaaaccggtcacctgaaacgcaaacgcctctctgaatcctcgccggaacctgtcaatctcttacatctccggcggctgtctcacggatctgttcacgatgagcaccggccaacttctcagcatcgagcctcaagagctccagttcccatttgaattgagaaagcagatctcgtgttccctaaacttgtccaacaagaccgacaattatgtggcttttaaggtcaaaacgacaaatccaaagaagtactgtgtaaggccaaatactggagttgtgctgcctaggtctacgtgcaacgttgttgttacaatgcaagctcaaaaggaagcacctactgatatgcaatgc

SEQ ID NO: 38894 - DNA, 383 bp, Gossypium hirsutum
  Clone ID: LIB3165-034-P1-K4-C1
ttttaactccaagtccgacgccccaattcggtccccgaaatacccacacacactatcgactcgtcatgcaaacgctactgctcccggctactcgctccggtatatgtgcggtggcggcgggtcccctccgaccaccgctcactctctctcctccaaattttctcacttcaatcaaaactcggaaccaaaacctccgttgtcccctttcgcatcctacgaccctcttaatgttctaagatctacgcttttttcgcccaaagtctcttcgtcctcagtttcacccagttttacctgcgggaatgatgatactgacaaggcgaagcttgctcaggtttcgaagaggctagagaacacgtcgaggtactttaagcgattgggcaatt

SEQ ID NO: 38895 - DNA, 374 bp, Gossypium hirsutum
  Clone ID: LIB3165-034-P1-K4-C10
cttcagttcttcacttccccagtctccagcaatgggagaaaccgattctttcttctcgaacaaatcagcgaagatcttcgtagcaggccatcgaggcctagttggttctgccatagttcgtaaacttcagtccctaggctttaccaacctcctactccgcacccatgccgatctggaccttactcgccaatccgacgtcgaatccttcttcgccgatgagaaacctcactatgtcgtactagctgccgctaaagttggtgggatccacgccaacaacacttaccctgccgatttcattgccatcaacctccaaatccagaccaacgtcatcgattcctcttaccgccacggcgttaagaaaatcctcttcctcg

SEQ ID NO: 38896 - DNA, 381 bp, Gossypium hirsutum
  Clone ID: LIB3165-034-P1-K4-C11
cccacgcgtccgcccacgcgtccgcccacgcgtccggtccgtctctctgttttactccacaaccactatcactaccattatggcttcggctactgtttctgtagccaaacccaaccttcagattcaggcaaaaggaaagggtgttggttttgcagatttctcaggcctacacaactcctctactagccttccctttgccaggaaaacctctgatgacttccattcactcgttgcttttcagacatctgctctaggaagcaataatggcgggtacaggaaagggatggcagaggcaaagctaaaggtggctataaatgggtttggtaggattggcaggaatttcttaagatgctggcatggccgtaaggactccccacttga

SEQ ID NO: 38897 - DNA, 381 bp, Gossypium hirsutum
  Clone ID: LIB3165-034-P1-K4-C12
cggacgcgtggggcacatatttctatttcccactctcttttttgctctcagttaacaacaaaatccgtaaatggctaccactgcttctccaatggcgactcagctgaagagcagctttacgtcgtctgttacaagaggactggtagtccccaggggcatttcgggatccccgttcaaagtatcttccggaaagaccaggaccccttgcttcactgtcaaagctgttcaatccgacaagtcaacatttcaagtaatccaacccatcaacggcgaccccttcattggaagcctggagactccaatcacctcaagccccttaattgcatggtacctttccaacctcccagcctataggacggcagtgaacccacttctgagggg

SEQ ID NO: 38898 - DNA, 384 bp, Gossypium hirsutum
  Clone ID: LIB3165-034-P1-K4-C2
cccactccttagaaaatatccaaaccctcaaaacttgtcggtaccatcttccaaaaacaagcagccttccaaaatcaaaaccatttgatgctcattcctctctccaaagcctacctcttcctcttctgtcaatctggttccctcctcctcccccataatctatcattgatgaccatcggaacatttccaattaggcctagatggtttcccaaaagcaaggcctgaaagtaagcatatccttccgctataaatggcgaagcgatctccttgtgcagtgtctgttttgaagccaaaatctcacttggagagttacgaacaaccactccagatctagatctcaccaaattttgattacaagcggcatcaaaattaactttaacatca

SEQ ID NO: 38899 - DNA, 383 bp, Gossypium hirsutum
  Clone ID: LIB3165-034-P1-K4-C3
cttttaaccaaacactccacaaaattttctcgaaaaaaaaaaaaaaaatgaggaagtgtgaactatgtggaaggctagctcgaatgcactgtgaatcagatcaagcaaatttatgttgggactgtgatttcaaggttcatggagccaatttcctcgtagctaagcataatcgaaccctcctttgccatgtttgtcaaagtcctactccttggctcgcatctggtcggaatctcggctccgcggtttctgtttgtgattcatgcgttgtaaacggcaacaataagtgtgagtcatcggagagagagtatggtgaagaggaggaggaagaagaggaggagggagattatgataatgacgccgtggaagaatcggcggaggaagag

SEQ ID NO: 38900 - DNA, 382 bp, Gossypium hirsutum
  Clone ID: LIB3165-034-P1-K4-C4
cccacgcgtccggcacatacaaagctaccatggctaattttcaaatgaaaaaagttcaacaatgcacacacggcaagctgtggaactcttccagcgaagctctaaccttgaccgacaagaaagtttggcaaggctctcattatgcggatttcccagaaataattgaagatggggatgcgagtgagtttacacatgaatcagtgactgatgatgctgatattcatggttcagttgctggtcttgtgtacaggcgacgtgacggaactaagtggattgttgcctggagcaacccacaagctgagaacagcaaggtctatactgatatccagagacaacctgttcactgggggcaaatcaaaaccaaccttgagaaaagaggaaa

SEQ ID NO: 38901 - DNA, 384 bp, Gossypium hirsutum
  Clone ID: LIB3165-034-P1-K4-C5
gcggttttcatttccccttcgcaagtagccagccgtttcacacactcaagaagagcgagagctcgtaaatcatggcggaacagaccgaaaaagcttttttgaagcaacccaaagtgtttttgagctcgaagaaaggtgggaaagggaagaggccaggaaagggtgggaatcgcttctggaaaagcattggattgggcttcaagactccccgtgaagctattgaaggaacctacatcgataagaaatgccccttcactggcactgtttcaatccggggtcgtatcttagccggtacttgccacagtgccaagatggtcaggacaatcattgttcgacggaactaccttcattatatcaagaaataccaaaggtatgagaagcgct

SEQ ID NO: 38902 - DNA, 369 bp, Gossypium hirsutum
  unsure (1)..(369): unsure at all n locations; Clone ID: LIB3165-034-P1-K4-C6
accaaacgtccgtttctatgtgaacgaaagttgcacatggcttactccatcctaataaacagcacaaagcctaaaccgacagcacataacagagcgagcttaggaagggaatcagtggaaaagctcagtgcaaaaacgctaaggatgacgtcaactaatngtgagctacgcgaacaaagggcaagccgcaaagccgaagagctatcttttcatgcaaacggtctgcaaaggcttgaaactgttaaaaccaaggaacagctcaaacgtaccttatacaatcgctcgtagcgtcatggctggagctatcttctcaaccttaaaaaaatgtgacgaccgcttacctgcacaacacattgctgctattaatca

SEQ ID NO: 38903 - DNA, 380 bp, Gossypium hirsutum
  Clone ID: LIB3165-034-P1-K4-C7
cccacgcgtccggatccacggcgatgatctatggccatgttttggtttttgatttgttcaggtgccttggacactccaatgctgaagttgttccacatgaagttttcaataagttacctttacttaggtatttcatctatacccccacgtatcatagtcttcaccacacagagatggagaccaatttttgtctgttcatgccgctgtttgatgcactggggagtacacttaacaccaaatcattggagctacataagaaaattacctcaaattctggaaaaaacgggagggtaccggattttgtgttcctagcacatgtggtggacataatgtcggcaatgcatacaccgtttgcgttaagatcatttgcgtcgacccca

SEQ ID NO: 38904 - DNA, 381 bp, Gossypium hirsutum
  Clone ID: LIB3165-034-P1-K4-C9
cccacgcgtccgagcatacactactagtacccactactagcaatggcttcctcaatgatctcatcggctaccattgccactgcctctccggcacaggctaacatggtcacccctttcaccggcctcaagtctgcctctgctttcccagtcaccaggaaggccaacaacgacattacttctctcgcaagcaatggcggcagagtgcaatgcatgcaggtgtggcctcctactggaaagaagaagttcgagactctctcatacctccccgatcttacacccgtgcagttggctaaggaagtagattaccttcttcgctcaaaatgggttccttgcttggagttcgaattggaggagggattcgtgcaccgtaagtactcgagc

SEQ ID NO: 38905 - DNA, 368 bp, Gossypium hirsutum
  Clone ID: LIB3165-034-P1-K4-D1
cggagctggggttcatattcagatccttcttcttcttcttctgtcttcttcatcaaagggggtttatgcagtgttttggaggatactgcctcgaaattatccaccaccaaagtgggattatggagggagtgcacttgatcgttccaaaggaaacaaaagaaactggattcttgtatgggaagatgggttttgtgatttccatgaatgtgagcgtgctggaagtggttatgtaaagggaaggtttggagctgatattttcttcaaaatgtcacatgaagtttataactatggagaaggattagtagggaaaattgcagcagataacagtcacaaatgggtgcataaagaaatcccaaatgaaaatgatc

SEQ ID NO: 38906 - DNA, 188 bp, Gossypium hirsutum
  Clone ID: LIB3165-034-P1-K4-D10
gctcatccgagcaaaggccaacttttttgctcaactcggaaagtacactgtcgggggagagtcagaggagggcaggcaaggaatgtttgtcaagggttatgtctattagcatgtttgtatcttcaacaggtcaatgaatttcctgcactgaaaatttaattgaaagagcagaacactgatctttcatt

SEQ ID NO: 38907 - DNA, 377 bp, Gossypium hirsutum
  Clone ID: LIB3165-034-P1-K4-D11
cccacgcgtccgcccacgcgtccgatggcctctgcttctctcctcaagacttcaccagttttagacaagtgtgagtgggttaagggtcacacccttcgccaaccttccacttctgtggtgaggtgccaccctgttgcaccctccggactaactgtgcgtgcaagctcatatgccgatgagcttgtcaagactgctaaagctattgcttctcctggccgtggaattttggccatggatgagtccaacgctacctgtgggaaacgtttggcctcaatcgggctagaaaacacggaggctaaccgccaagcctacaggacgttgcttgtttcagctcctggccttggtcagtacatctcaggtgccatcctctttgagga

SEQ ID NO: 38908 - DNA, 377 bp, Gossypium hirsutum
  Clone ID: LIB3165-034-P1-K4-D12
atcggctaccattgccactgcctctccggcacaggctaacatggtcgctcctttgaccggcctcaagtctgcctctgctttcccagtcaccaggaaggccaacaacgacattacttctctcgcaagcaatggcggcagagtgcaatgcatgcaggtgtggcctcctactggaaagaagaagttcgagactctctcatacctccccgatcttacacccgtgcagttggctaaggaagtggattaccttcttcgctcaaaatgggttccttgcttggaattcgaattagaggagggattcgtgcaccgtaaatactcgagcctacccacgtactacgatggacgctactggaccatgtggaagctgcctatgttcgggt

SEQ ID NO: 38909 - DNA, 419 bp, Gossypium hirsutum
  Clone ID: LIB3165-034-P1-K4-D2
ccgggcccgaaattccgggggggcccgacgcgtccgggcatctcctttcccctcttcttcctccactgtcctctttcgctgcctaacctaaacgaaagcaatggctttcctgccgcccatcaccactttcgcagccgccctcctcctcttcctccacaccccactcgccacgtcatcccccctcaaccttactggcgactccctttcaccctacgaagtcctccaaggctacaacttccccgttgggcttctcccacaaggcgtcttaaagtacgatttagatgaatccaccggtcggttccatgcctacttagagggttcgtgtagcttctcactggaagggtcttatcaactcaaatacaaatccacgatcagcgggatcatctccaacaacaggctcaaaaacctgagtggaatca

SEQ ID NO: 38910 - DNA, 339 bp, Gossypium hirsutum
  Clone ID: LIB3165-034-P1-K4-D3
accacgcatccgtacggagctagtgtttatattcacatactccttcttttcattctgggttcttcatgacagtgggtctatgcattgactcggaggatacgtgactcgaaattatccaccaccaaagcgggattatggagggagcgcacttgatcgttccacaggcaacaaaccaaactgtattcttccctggaacgatggctcctgagagtctcatgaatgggagcgtgctggaagacggtatgtaccgggacgggttggggctaccatttgcttactaacgatacgtgagggatattactatccagaacgattcttagagtacatcgcatgagataa

SEQ ID NO: 38911 - DNA, 381 bp, Gossypium hirsutum
  Clone ID: LIB3165-034-P1-K4-D4
attctctttcactgcaaactgtgagctagtgagagagatggcttgctcagctacttcatcggccgcggctctcatctcctctaagccaagggctttctcctccaattccaagcccttctcccaatccctttctctccccaatcccttcactggtctccctgcccctctcctttctcgtcccgcctccttttccctctcccgcgcctccccttctcgcaagtctttcgtcgtcaaagccaccagtgagcttccactggtgggaaatcctgcccctgattttgaggctgaggccgtctttgaccaggagttcattaaggtcaagctctctgaatacattgggaagaaatatgtgattctcttcttttaccccgtggacttcac

SEQ ID NO: 38912 - DNA, 362 bp, Gossypium hirsutum
  Clone ID: LIB3165-034-P1-K4-D5
atatagtcttagtaagcagtaatagcaatggcctccggcatgatctcatcggcggccattgccaccgtgaactgctcctccccggcacaggccaacatggtggcccccttcaccggcctcaagtctgcctctgctttcccagtcactaggaaggccaacaacgacatcacttctcttgcaagcaatggtgggagagtgcaatgcatgcaggtgtggcctcctcttgggaagaagaagttcgagacactctcatacctacccgatcttacacccgtacagttggctaaggaagtagattaccttcttcgctctaaatggattccttgcttggaattcgaattagaggagggattcgtgcaccg

SEQ ID NO: 38913 - DNA, 380 bp, Gossypium hirsutum
  Clone ID: LIB3165-034-P1-K4-D6
cccacgcgtccgcccacgcgtccgtctttctccccacccttaaaccatgtcggctttggttggcaagtatgcaggtgaactcccgtttaggaatttggctttcactgtcttctcctgcatgttttattccattgtatttggggacatgcatgtaaatccttaatgaccacaacacttgatcgatccgtaccataaatgttcaaattttcattacagatatgctattttatgcataattttgttagtcctagctttgactaaaccctgtatgtatattttcccccagaggagttgatcaagaacgccaactacatcgccacgccaggcaaaggtattttggcggcggacgagagcacaggcaccatcgggaagcgtctctc

SEQ ID NO: 38914 - DNA, 378 bp, Gossypium hirsutum
  Clone ID: LIB3165-034-P1-K4-D7
cccacgcgtccgctcagactactctttcgaaccagctccaccatcacccccaaaaaacaaagcaaattgtagaagatggcaacacaagcacttgtatcatcgtctcttacctactcagtggagactgcaaggcagattcttggagctaaacgacaaattgggtcttcaaggaaaggatcctttgttgttaaggcagcttcgactccacccgttaagcaaggagctgatagacctttatggtttgcatctaaacaaagcctttcatacttggatggcagccttccaggtgattatggatttgaccccttgggactctcagaccctgaaggtccaggagggttcatcgagcctaaatggctagcctacggtgagatcatc

SEQ ID NO: 38915 - DNA, 381 bp, Gossypium hirsutum
  Clone ID: LIB3165-034-P1-K4-D8
cccaactccaacaaaacatcaatggcggcagctaagccattgccgtcatctcttcgcactcaccaaattctgtgttcatgcaaccaaattttaccttcgctcctccatttccgtcaacattacagcaacccgaaatgccaacaaccacaaaggcgaagaaaacactcaagctccttagatggcgcctacgacttggctatcaaagcttacatggaaaacccaaactccatctctggtttcgcaaacaaagtcattggctctctccctatagtcggccttgtcgctaggatttttagtgatgaaggcggtgttggtggggatatcattgattttgctgagtttagaagaagggtgggcaagaaatgtactgttactgattct

SEQ ID NO: 38916 - DNA, 379 bp, Gossypium hirsutum
  Clone ID: LIB3165-034-P1-K4-D9
caacaacgacattacttctctcgcaagcaatggcggcagagtgcaatgcatgcaggtgtggcctcctactggaaagaagaagttcgagactctctcatacctccccgatcttacacccgtgcagttggctaaggaagtagattaccttcttcgctcaaaatgggttccttgcttggaattcgaattagaggagggattcgtgcaccgtaaatactcgagcctacccacgtactacgatggacgctactggaccatgtggaagctgcctatgttcgggtgcaccgactcggctcaggtattgaaggagcttgaggaatgcaagaaggaataccccaatgcattcattagaatcattggcttcgacaacgtgcgtcaagtg

SEQ ID NO: 38917 - DNA, 358 bp, Gossypium hirsutum
  Clone ID: LIB3165-034-P1-K4-E1
caatggtggaaaatctttaaatgataacatggtccttttgcccaccactatcaaatttccagattttccaggaaaaagaaaatcaaaacccccaggtgaagaaggtgaaaaccagcagcggcaaaggcaataaaaggtgaagccaaagagagagagatatatacataataaaaaagacttttcaaaagaacacaactatggctcctcatagagaaggatcagatgcttcagtggaagccatggttgctcaagtcgaaaaacacccaatttcatcgatccttatcatcattgctatgcaaacagaagctttgccggtggtgaataagttccagttgattgaaaaccctcattcttcgtt

SEQ ID NO: 38918 - DNA, 380 bp, Gossypium hirsutum
  Clone ID: LIB3165-034-P1-K4-E10
gtttcctttctcgattttctatttagccaaacaagatgcagatcttcgttaagactctaaccggcaagacgatcactctcgaggtcgagagctccgatacgatcgacaacgtgaaggccaaaatccaagataaggaaggcatccctccagaccagcagcgtctgatcttcgccggaaaacagctcgaagacggccggaccttggccgattacaacatccaaaaggagtcaactctccacctcgtcctccgtctgcgcggtgggatgcaaatcttcgtgaaaaccttgactggcaagacaatcactctcgaggtcgagagctccgacacgatcgacaacgttaaagcgaagatccaagacaaggaaggcatccccccagac

SEQ ID NO: 38919 - DNA, 381 bp, Gossypium hirsutum
  Clone ID: LIB3165-034-P1-K4-E11
caacattgaagagataagattatggtgaaaaactaaacataataaagtccctcataacattcttcgacttgcttcattgattagcccaaagataaacataaccaaaaagaaaaatggcttctgcttccgctactctcctcaagtcttcacctattatcgacaagtccgagtggattaagggccaaaacctccgccacccttcggtttgttttgtacggtcacaccctacatcggccgcctttaccgtccgtgctagttcatatgccgatgagcttgttaagaccgcgaaaactgctgcatctccaggtcgtggtattttggccatggatgaatcaaatgctacatgtgggaagcggcttgcctcgattggtctcgagaata

SEQ ID NO: 38920 - DNA, 380 bp, Gossypium hirsutum
  Clone ID: LIB3165-034-P1-K4-E12
ggaacccaaggacagaagactcttttaacatttcaccgcaaagatggagataacaaatgtgagcgagtatcaagaaattgcgaagcaaaagttgccaaagatggtgtatgactactacgcatctggtgctgaggaccaatggacattgcaagagaatagatttgctttcactaagatactgtttcgtcctcgtattctcatcgatgtaagcaagatagacatgaccacaactgtgttgggtttcaagatatcaatgcctatcatgattgccccaactgccatgcaaaaaatggctcatcctgaaggggagtatgcaacagctagggctgcatctgctgctggaactatcatgacattatcctcatgggcaacttctagtg

SEQ ID NO: 38921 - DNA, 379 bp, Gossypium hirsutum
  Clone ID: LIB3165-034-P1-K4-E2
aaggacagggctactcctcaacaagttgctgattacaccctcagcctcctccgccaaagaatccctccagctgtccctggaatcatgtttttgtctggtgggcagtctgaagttgaggctaccttgaacttgaatgcaatgaaccaagctccaaacccatggtatgtgtcattctcatatgcaagagcccttcaaaacacttgcctgaagaagtggggaggcaggcctgagaatgtgaaggatgctcaggaagcgctgctcatccgagcaaaggccaactctcttgctcaactcggaaagtacactggcgaaggagagtcagaggaggccaagcaaggaatgtttgtcaagggttatgtctattagcatgtttgtatct

SEQ ID NO: 38922 - DNA, 380 bp, Gossypium hirsutum
  Clone ID: LIB3165-034-P1-K4-E3
cccacgcgccgcttattgatgggttaaagagagtagctgtttgcaacccagtcatgctattggacgagattgacaagacaggttctgatgtgcgtggtgatccagcttcagctctactggaggttcttgatccggagcagaataattctttcaacgaccactatttgaatgtgccatatgacctttcaaaggtgatttttgtggctactgcaaatagggtgcagcctattcctcctccactcttggacaggatggaagtcattgagctgcctggatataccgctgaagaaaagctaagaatagccatgcaacatttgattccacgagttttggatcagcatggattgaattctgagtaccttcaaattccggaggccatg

SEQ ID NO: 38923 - DNA, 381 bp, Gossypium hirsutum; identical to SEQ ID NO: 38667
  Clone ID: LIB3165-034-P1-K4-E5

SEQ ID NO: 38924 - DNA, 379 bp, Gossypium hirsutum
  Clone ID: LIB3165-034-P1-K4-E6
ctcatatctctctgtttatttattttttttgttttccttttgtcgtccttttctcacctgttgttcttccattttttaatcaagttccccccaccccgctcaacacctctccctctaacaagccaaaggccccaagcagattctatttgttctaacatggagaaaagccatgaacttgaactgacccagatgaggaaatcagtagagaaacttgggttttcaacagagaaatacggggatccgacactcatgagattcttgattgcaagatcaatggacacagataaagcttcaaagatgtttgtccagtggctgaaatggaggtcttctttagttcctaatgggtgcgttgtagaatctgaagtgcctgaccaattag

SEQ ID NO: 38925 - DNA, 380 bp, Gossypium hirsutum
  Clone ID: LIB3165-034-P1-K4-E7
cccacgcgtgcggatgtcatgaagattgacatgggaggttctgcagcagttattggtgcaacgaaagctctcgggcaaatcaaacctactgcagttgaggatcattacattgatgcatattgtgaaaacatgataagtggaacgggtatgagacctgtagatatcctcacaggatctaatggaaagactattgaggttaataacactgatgcagaaggcaggcttacactcgcagatgctttggtatatgcttgcaaccaaggtgtctagaagatagtcgacctggcaacactaactggggctagtatatgacgctcttggaccgacgattgcaggcagttttcacacctagtgatgaacttgcaaaggaggtattcgaa

SEQ ID NO: 38926 - DNA, 380 bp, Gossypium hirsutum
  Clone ID: LIB3165-034-P1-K4-E8
atttgatgaaaaagggagtgaaggtgtgacaaaaggacgccatctgagggggaagagatctacagaaagtgatgggaaagcggataacggtgatgataagatcgtggttcggagccagactaagaagaacagaagattgggccttgataaaaggattgaactgaaaaagaatagagaagaaaagtcggttgtttctggccagagtaaaaagggtatctcgaatgaaagtgagaagatcgataggcttgtccgggactattcggcttcaaccgatttggtcagcctggactggaagaaaatgaagatacctccggttctgccgtccaccgaacatacttggttgtttaagctaatgcagccaatgaaggcactgcttgagg

SEQ ID NO: 38927 - DNA, 380 bp, Gossypium hirsutum
  Clone ID: LIB3165-034-P1-K4-E9
cgatggaaccgtcagtgttcttgtggcaacttttttgttcgtaattcccaacaagaagcgaaagggagagaaattgatggactggaacgaatgcaagaagctgccatggaacattattttgttactaggggctggtttcgccatagccgacggagtccagtcaagcggactcgctgatcaattatccaaaactctagattttctcgaagaggctccgtatttagctattgcccccgcggtgtgtttaatctgtgccataattaccgagtttataacatcaaatgatgctactgctacccttgtgcttccacttttgattcaaatggcaaaaaccatgcatgttcacccattactccttatggtccctggagcagtgggat

SEQ ID NO: 38928 - DNA, 385 bp, Gossypium hirsutum
  Clone ID: LIB3165-034-P1-K4-F1
cttccgcccacccgtccgttaaaccaggggttttttttcttcttcatgttctcgatcatggcttcttcttcttctttctttgttaggtgtttccctttacttttcttcttcttcttctcacatgtccaagcagtgaaatcaccaattcatcctcgggatgttctacctttattgccgagacaggtttcatggccgatccttaattcacttaacagtgccatcgaccttttaccagcctttgtcggttctgtttcgtcccaaaaccacatcgtgagctggaaaggtgcgtgcttttatgagaacaccgctaggatggagttccataacaagagtggcagtgagttcggtggtggaactctccatatcaaggttagcaaagcccata

SEQ ID NO: 38929 - DNA, 382 bp, Gossypium hirsutum
  Clone ID: LIB3165-034-P1-K4-F10
cccacgcgtccgaaaacacccaggttcagaagcactaacattttctctttggctgtaccaaccttggatctgaaatggcaaagtcacccgaagaagaacaccctgtcaagacctttggctgggctgcaagggacccatctggtcatctctctcctttcaccttctccagaagggtaactggtgaagaagatgtgaggtttaaggtgctgtattgtgggatttgtcattctgaccttcacagtatcaagagtgaatggggctcctccaactaccccatggttcctgggcatgaaatagtaggggaagtgacagaagtaggcagcaaagtggaaaaggttaaggtgggagataaagtgggcgtgggatgcatggtcggagcttg

SEQ ID NO: 38930 - DNA, 381 bp, Gossypium hirsutum
  Clone ID: LIB3165-034-P1-K4-F11
aaaaaatctccaagccaaaccattttttcgctggcatttgcttacaacaaaaaaaaaattcaaattgaagaatgcctgtatttgcttcaagagttgggttcaggagacacgactacaagaatagatcaaaggaacgaaacgatgaccgtaaagacaaattgtccgaagtgttcaagagctatgctgctaatgggctgctagacaaggaagggctgaaagacgcttttctacatctagatgctgccatgccgtaccggcaagccgaagacgccctccgtgtcgtcggcaaaacctataacattaacgtcgaggaggaaaccgagcttaacgcccttatcgactatgcttacaataagggttacgggtcttcaatttgattag

SEQ ID NO: 38931 - DNA, 381 bp, Gossypium hirsutum
  Clone ID: LIB3165-034-P1-K4-F12
gtttcattgaaggcgggactctcagactactctttcgaaccagctccaccatcacccccaaaaaacaaagcaaattgtagaagatggcaacacaagcacttgtatcatcgtctcttacctactcagtggagactgcaaggcagattcttggagctaaacgacaaattgggccttcaaggaaaggatcctttgttgttaaggcagcttcgactccacccgttaagcaaggagctgatagacctttatggtttgcatctaaacaaagcctttcatacttggatggcagccttccaggtgattatggatttgaccccttgggactctcagaccctgaaggtccaggagggttcatcgagcctaaatggctagcctacggtgaga

SEQ ID NO: 38932 - DNA, 380 bp, Gossypium hirsutum
  Clone ID: LIB3165-034-P1-K4-F2
cccacgcgtccggtgagatggcttgctcagctacttcatcggccgcggctctcatctcctctaagccaagggctttctcctccaattccaagcccttctcccaatccctttctctccccaatcccttcactggtctccctgcccctctcctttctcgtcccgcctccttttccctctcccgcacctccccttctcgcaagtctttcgtcgtcaaagccaccagtgagcttccattggtgggaaatcctgcccctgattttgaggctgaggccgtctttgaccaggagttcattaaggtcaagctctccgaatacattgggaagaaatatgtgattctcttcttttacccgctggacttcacatttgtttgccccacagag

SEQ ID NO: 38933 - DNA, 382 bp, Gossypium hirsutum
  Clone ID: LIB3165-034-P1-K4-F3
ctcttttgtatacctgtagcatatagtaatagtaagcagtaatagcaatggcctcctgcatgatctcatcggcaaccattgccaccgtgaaccgctcctccccggcacaggccaacatggtggcccccttcaccggcctcaaatctgcctctgctttcccagtcaccaggaaggccaacaacgacatcacttctcttgcaagcaacggtgggagagtgcaatgcatgcaggtgtggccgcctcttgggaagaagaagttcgagactctctcatacctgcccgatcttactcccgtacagttggctaaggaagtagattaccttcttcgctctaaatggattccttgcttggaattcgaattagaggagggattcgtgcaccg

SEQ ID NO: 38934 - DNA, 385 bp, Gossypium hirsutum
  Clone ID: LIB3165-034-P1-K4-F4
ggtcagtaaagcttcaattcaaaggagtgttagtttccatggcgttttcttcttcggctctctctcacaccgcttcttcatgcctctcttccttcccacatgccttcacaaccagaaaaacccatcttcgcttcccatcatttttactcataaaagcttcttctgaacctgacaaaggaaaccccactgctacacagaccaaaaacgctgaaggctctagcaatgctcaacctcaacctcaagccactcccgccgccgccgctaagccacctcccaaaaagcccgtttattccatgaagaaaggccagattgttagggtggataaagacaagtatctcaacagtattaattatctatctgtagggcatcccccctattacaaagg

SEQ ID NO: 38935 - DNA, 402 bp, Gossypium hirsutum
  Clone ID: LIB3165-034-P1-K4-F5
cgggggggaccaacgcgtccgattttttattcaaaactaatcatgtaaaaaaaaaagttgattggaacaaataaagtgaaacatttaagacaagaacaaagtggagattttataacacaaaaatagaggatgcaaatccacttaaaacacaaaaggaaaacaacattcaattaagacacaaaggggggatttcctttgtttgtgcccaatatagatttttttcttcccttagagcttaatttcccatttagaaagctcctctcttgatagcatcgtcattagcatttccaagggcagcttcactcaaatatttgtcagccaattgaaccctcttcacattctcttgctcagcaacaagcatgtatccatattccaacagcttctcaatggtcatcttcggtt

SEQ ID NO: 38936 - DNA, 380 bp, Gossypium hirsutum
  Clone ID: LIB3165-034-P1-K4-F6
ctcccatcacccgagatcatctttccccttcagaatggcggctgcaaccatggctctctcttccccatctttcgccggaaaggccgtcaagctctctccttccgcccctaaaatccaaggcaatggccgtgtttccatgaggaaaaccgctaccaaggctgctccctctggaagtccatggtacggtcctgaccgagtcttgtacttgggtccactatctggtgagcctccatcttacttgaccggagaattccctggtgactacggttgggacactgctggactctcggcggacccagagacatttgccaggaaccgtgagctcgaagtcatccactgtaggtgggctatgttgggtgctcttgggtgtgttttccctg

SEQ ID NO: 38937 - DNA, 376 bp, Gossypium hirsutum
  Clone ID: LIB3165-034-P1-K4-F7
cccacgcgtccgaaatcagttgcttcacaatggcctctacaaccatggctctttcttccccatcattcgccggtaaggcagtgaagttctccccttccacccctgaaatccggggaactggccgtgtttccatgaggaaaaccaccaagcctgttccttctggtagcccatggtacggtcctgaccgagttttgtacttgggtccactttccggtgagccaccatcttacttgaccggtgagttccctggtgactatggttgggacactgctggactctcagctgatcccgagacctttgctaggaaccgtgagctcgaagtcattcactgcagatgggccatgttgggagctcttgggtgtgttttccctgagct

SEQ ID NO: 38938 - DNA, 202 bp, Gossypium hirsutum; identical to SEQ ID NO: 38682
  Clone ID: LIB3165-034-P1-K4-F8

SEQ ID NO: 38939 - DNA, 380 bp, Gossypium hirsutum
  Clone ID: LIB3165-034-P1-K4-G1
gtttaattgaaggcaggactttaagattactctttcgaaccagctccaccatcacccccaaaaaacaaagcaaagtgtagaagatggcaacacaagcacttgtatcatcgtctcttacctactcagtggagactgcaaggcagattcttggagctaaacgacaaattgggtcttcaaggaaaggatcctttgttgttaaggcagcttcgactccacccgttaagcaaggagctgatagacctttatggtttgcatctaaacaaagcctttcatacttggatggcagccttccaggtgattatggatttgaccccttgggactctcagaccctgaaggtccaggagggttcatcgagcctaaatggctagcctacggtgag

SEQ ID NO: 38940 - DNA, 379 bp, Gossypium hirsutum
  Clone ID: LIB3165-034-P1-K4-G10
caatctttcagaaagagagaggcaaagagaaaaaagagagagggtattacatatattcatctaattatacaaataaagatggctcttcacctttcctgggtttccgtttttggcgatctcggtactgaaatatatattcatatgcccttcttgtttgcgtattttaatattcactaacattacattatattgtttttaattaggcgtcattgtttcatttatggtcgccttttctcccatgccagcattttatcaaatctataagaagaaaacatcagaaggattccaatcattaccctatgtgatatcgctattcagtgccatgctttggatttactatgcacttcttaagaagaatgaaatgcatctaattatcatc

SEQ ID NO: 38941 - DNA, 380 bp, Gossypium hirsutum
  Clone ID: LIB3165-034-P1-K4-G12
atggcttcttctctcagtctttcaagccacacagtggcttcattattcccttctcacacttcaaagccgcagttgtcactttctaaatccatcccaattctcaccaaatcatcacagtctcaatttcatggccttaaattctctcacccttcttctcttaaaattcctcgtttttccacttttaaaacctcgatttctgctaaggtgaataaaggtacagttcctccagcatttactttgaaagatcaagatgggaaaaatgtaagcctttcaaagtttaaagggaagcctgttgtggtttatttttaccctgctgatgaaacccctggttgcaccaaacaggcatgtgcttttagagattcttatgagaagtttaagaa

SEQ ID NO: 38942 - DNA, 390 bp, Gossypium hirsutum
  Clone ID: LIB3165-034-P1-K4-G2
ccttttgggccgaggggtgggaatatagaagggaaatgtgccctaaaaacatcacaatacttccggctccgaaacagtgggggaatctttttctttggatgacattgccgacttcttctttcttcccctggacgacgccgcttccactctgggcgtttgcacctctgttctcaagaaaatctgccgtgaaaatggtctcgacagatggccttaccgcaagtttttagctggaaagagcgtcgaagaaatcaagaggcatgcatctagagaaagaagaagggaaatcgctgagctttcaaaggctcatcggcagagctctcaacctcaaccccaaaacaatgaacaacccaaattacaaggtggctcagcattaccgaacttacagcagca

SEQ ID NO: 38943 - DNA, 382 bp, Gossypium hirsutum
  Clone ID: LIB3165-034-P1-K4-G3
cagcagctgcaccacaactacagagaagagagtaaaggggaaaaaaagcgtcgtcgtttttgcttcttcttctacttcgctctctctccttctccgaagttcctctttcgttctttcatttattcagtattgtaaaagatggccgacggtgaggatattcaacccctcgtctgtgataatggaactggaatggtgaaggctggttttgctggtgatgatgctccaagggcagtttttcccagtattgttggtcgtccccggcacactggtgttatggttgggatgggtcagaaggatgcctatgtaggagatgaagcacaatctaaaagaggtatccttactttgaaatatcctattgagcatggtattgtgagcaactggg

SEQ ID NO: 38944 - DNA, 383 bp, Gossypium hirsutum
  Clone ID: LIB3165-034-P1-K4-G4
cttggaaattccaccttactatctctcacaattcaatcgactatggaatccattggagttctcatggcttgccccatgaactcttacctcgagcaacaactcgagaaccgtttcaagctattcagattctggacagtgccggacaaatcatcctttctggcttctcacaaggactcaatccaggcggtcgtcggaaacgcctttgccggtgccgatgctatgctgatcgaggcgttgcccaagctggagattgttgccagcttcagtgtggggcttgataagatagatttggccaagtgtaaagaaaagggtatccgagttaccaacacccctgacgttttgactgaggacgtggcggatttggcgatcggtttgatgttggc

SEQ ID NO: 38945 - DNA, 385 bp, Gossypium hirsutum
  Clone ID: LIB3165-034-P1-K4-G5
atacaggcagcaatgagaaggagcttagtatatactccaagacagaattccggttgggacaccacgtcccaagactaccaagctcatctttcccgaatggaaagatcagccaccatgatccctggtgcccctcagtaccccgatgtccacaaggccttcaacaacaaggttgagtttccggaagaagatcagtgcactgagcggtccccaacggcaaactcccgaaagaaggttcaagtggttgagcatgcaaagacccgtgatgaagccacccttgattctcaagctgatagctacatccagcagaaacacaaagcctttgaactgtgcaaatggaagaccttcaaaatgcactagagttgagacttttggagtaagcatgtcg

SEQ ID NO: 38946 - DNA, 384 bp, Gossypium hirsutum
  Clone ID: LIB3165-034-P1-K4-G6
cccacgcgtccgcccacgcgtccggaaaatggaaaatggaggcaaccatggaaaggatatgcttttggaccatcttggagatgacattgttgctgcttctgcaactatggagcaacacgaagaagcaccttctgcagaagaaatgcaagaaaggatggatcaattcacctacatcatgcagcagaagtttctctctggtgaagattatgagtatttagattactctaaaatagatgacgatgagaccttggatgatcactggcttagggaagctaaccatgatgcagaggagaagtattttgctgaagattaataacggaaaattacatccattgatctcccaacatttgcagatatctcttcgttatagcagtggttagtgat

SEQ ID NO: 38947 - DNA, 380 bp, Gossypium hirsutum
  Clone ID: LIB3165-034-P1-K4-G7
cccacgcgtccgatggcacccatttcattacccaacaagccccatgcagtatgcgggccctacccagcacaaggtcacgtaaatccgatgctcaaagtggccaaactcctccatttcaaaggcttccacatcacttttgtcaacaccgagtacaaccacaaacgcttgctcaaatccaggggcccccacgccctcaatggcttgcctgacttccggttcgggacaatccccgacggccttcctccgccggacatcgacgccacgcaagacatccccgcgctttgtgactccactagcaagcattgtttggctccctttcgccgactccttgttgagctaaaagctacttccggtgtcccgccggtcacttgtatcgtcgc

SEQ ID NO: 38948 - DNA, 380 bp, Gossypium hirsutum
  Clone ID: LIB3165-034-P1-K4-G8
cccacgcgtccgggaatccattggagttctcatggcttgccccatgaactcttacctcgaacaacaactcgagaaccgtttcaagctattcagattctggacagtgccggacaaatcatcctttctggcttctcacaaggactcaatccaggcggtcgtcggaaacgcctttgccggtgccgatgctaagctgatcgaggcgttgcccaagttggagattgttgccagcttcagtgtggggcttgataagatagatttggccaagtgtaaagaaaagggtatccgagttaccaacacccctgacgttttgactgaggacgtggcggatttggcgatcggtttgatgttggcggtgttgaggaagctctgtgagagtgatc

SEQ ID NO: 38949 - DNA, 370 bp, Gossypium hirsutum
  Clone ID: LIB3165-034-P1-K4-H1
cccacgcgtccgttcgagatgggtgggccagcccgatccgacccaataaccttttatttgattcgggtgcgatcgactttgccggttcaggtgtggttcacatggttggtggcattgcagggttatggggtgcattaatcgagggtccaaggattggccgattcgatcgagctggtcgatctgtggcgttacgtgggcacagtgcctcattagtagtgctcgggacgtttctattgtggttcggatggtatgggttcaacccaggttcattcttgaccatcatgaaagggtatggtggtggtggaggttattatggacaatggagtgccgtagggaggacagctgtcacgacgacattggccgggtgcac

SEQ ID NO: 38950 - DNA, 277 bp, Gossypium hirsutum
  Clone ID: LIB3165-034-P1-K4-H10
gccacgcgaccgaggtgattacacacaatctgccgaccatggcatcagttaacggtgcagactttaacagcgtggatgctacattttgaagttggcctaatggaactacacacattatgataaccagcctgcctggtcattttaagagtgcatagctatctgcagactgtgtgttgaaatatattgcattgtatgaggaatgatcttgtcaatcacatagcgctttacatggggacaaagaatctgactctggctggacttaaatttcaagagagga

SEQ ID NO: 38951 - DNA, 381 bp, Gossypium hirsutum
  Clone ID: LIB3165-034-P1-K4-H11
cccacgcgtccggtgagactcttttgtatacctgtagcatatagtaatagtaagcagtaatagcaatggcctcctccatgatctcatcggcaaccattgccaccgtgaaccgctcctccccggcacaggccaacatggtggcccccttcaccggcctcaaatctgcctctgctttcccagtcaccaggaaggccaacaacgacatcacttctcttgcaagcaacggtgggagagtgcaatgcatgcaggtgtggccgcctcttgggaagaagaagttcgagactctctcatacctgcccgatcttactcccgtacagttggctaaggaagtagattaccttcttcgctctaaatggattccttgcttggaattcgaattag

SEQ ID NO: 38952 - DNA, 380 bp, Gossypium hirsutum
  Clone ID: LIB3165-034-P1-K4-H12
gctaccactgcttctccaatggcgactcagctgaagagcagctttacgtcgtctgttacaagaggactggtagtccccaggggcatttcgggatccccgttcaaagtatcttccggaaagaccaggaccccttgcttcactgtcaaagctgttcaatccgacaagtcaacatttcaagtaatccaacccatcaacggcgaccccttcattggaagcctggagactccaatcacctcaagccccttaattgcatggtacctttccaacctcccagcctataggacggcagtgaacccacttctgaggggaatcgaagtgggtctggctcacggcttcctcctggtgggtccattcgttaaggccggccctctaaggaacac

SEQ ID NO: 38953 - DNA, 384 bp, Gossypium hirsutum
  Clone ID: LIB3165-034-P1-K4-H2
cgaactcccctcccgtcctctttcccgatttgtcttcttcattgccccgccatggcttgtgttagcttcgctaaactcaacgcgccgtcatcctcttggatcggtggccagcagtctctccctcaacgctccggatcatccgctcggctcgccactcgcagagtctcactcccgatccgtgctggcgcttacaccgacgaactcatcaaaaccgccaaaactattgcttcacctggtcgtggaatactggcaattgatgaatcgaatgcaacatgtgggaagagattatcttctattggcttagacaatactgaacccaaccgccaggcttacagacagcttctgctcacaactcctggcctcggagaatatatttccggtgcc

SEQ ID NO: 38954 - DNA, 386 bp, Gossypium hirsutum
  Clone ID: LIB3165-034-P1-K4-H3
caaagtccaatcactcccaatactttcataacatttcacgaacttcactctccagtctccaatggcggctgccgtctccaccatcggtgctgtcaaccgagcaccgttgagtttgaatggatcaggtgccggagcttctgctccaagctcagctttcatggggaacagcttgaagaaagtgagcgctaggttcaacaacaacggcaaggctccagtgggaagtttcatgattgtggctgccaaagaaatcgacgaagacacacagaccgaccaggaccgatggaagggtcttgcttatgatatctccgatgaccaacaagacattaccagagggaaaggtatggtcgactcattgttccaagctcccatgaacgatggtactcact

SEQ ID NO: 38955 - DNA, 380 bp, Gossypium hirsutum; identical to SEQ ID NO: 38936
  Clone ID: LIB3165-034-P1-K4-H4

SEQ ID NO: 38956 - DNA, 101 bp, Gossypium hirsutum
  Clone ID: LIB3165-034-P1-K4-H5
aaaaaaaaaaaaaaaaaaaaaaaaaaatattaaaaaaaaaaaaaaaaaaaaaaaaaaaaattaaaaaaaaaaaaaaaaaaaaaaaaaaaaaaaaaaaaaaa

SEQ ID NO: 38957 - DNA, 384 bp, Gossypium hirsutum
  Clone ID: LIB3165-034-P1-K4-H6
cccacgcgtccgctcttttgtataactgttgcatatagtactagtaagcagtaataggaatggcctcctccatgatctcatcggcaaccattgccaccgtgaactgctcctccccggcacaggccaacatggtggcccccttcaccggcctcaagtctgcctctgctttcccagtcactaggaaggccaacaacgacatcacttctcttgcaagcaatggtgggagagtgcaatgcatgcaggtgtggcctcctcttgggaagaagaagttcgagacactctcatacctccccgatcttacacccgtacagttggctaaggaagtagattaccttcttcgctctaaatggattccttgcttggaattcgaattagaggagggat

SEQ ID NO: 38958 - DNA, 379 bp, Gossypium hirsutum
  Clone ID: LIB3165-034-P1-K4-H7
ctttctttctcttttgtcaaaccctaaatccctcactccaactgcagattcacctccacaaacagcaaccaatacattcaagcttggagggatgactttttagccttgagatctcctttcggcttcaatttcaacgaagcaaaaagagatttatggcatattcgcaaggtaagactcctctttcttttttccttttattttcaaacgcaatgatggaagatttgaaggcaataaatcgcaaggaaatgcaaaaacttaaagaaatttaaacagaaatcaacttctaaaaattttgactgctttctttgtattcaatatgcgttcgtcctcttttacactgattttctcggccttttatagccgatttacaggataaata

SEQ ID NO: 38959 - DNA, 381 bp, Gossypium hirsutum
  Clone ID: LIB3165-034-P1-K4-H8
atttagctatagcatacactactagtacccactactagcaatggcttcctcaatgatctcatcggctaccattgccactgcctctccggcacaggctaacatggtcgctcctttcaccggcctcaagtctgcctctgctttcccagtcaccaggaaggccaacaacgacattacttctctcgcaagcaatggcggcagagtgcaatgcatgcaggtgtggcctcctactggaaagaagaagttcgagactctctcatacctccccgatcttacacccgtgcagttggctaaggaagtggattaccttcttcgctcaaaatgggtttccttgcttggaattcgaattagaggagggattcgtgcaccgtaaatactcgagcc

SEQ ID NO: 38960 - DNA, 269 bp, Gossypium hirsutum
  Clone ID: LIB3165-034-P1-K5-A1
cttagtttcctcttagcaaagacttcagccacccacgcagcccctttaccgatccagacaatgggactcgtccgtacgaagactgtgaagaaatcgtctcgtcaggtaatcgagaggtactactctcgcatgacgcttgatttccacaccaacaaaaaggttatcgaagaagtagctattatcccatccaagaagctccggaacaagattgctgggttctcaacccatttgatgaaacggatccagaagggtccggttcgtggcatttc

SEQ ID NO: 38961 - DNA, 304 bp, Gossypium hirsutum; identical to SEQ ID NO: 38619
  Clone ID: LIB3165-034-P1-K5-A10

SEQ ID NO: 38962 - DNA, 392 bp, Gossypium hirsutum
  Clone ID: LIB3165-034-P1-K5-A11
tttagctatagcatacactactagtacccactactagcaatggcttcctcaatgatctcatcggctaccattgccactgcctctccggcacaggctaacatggtcgctcctttcaccggcctcaagtctgcctctgctttcccagtcaccaggaaggccaacaacgacattacttctctcgcaagcaatggcggcagagtgcaatgcatgcaggtgtggcctcctactggaaagaagaagttcgagactctctcatacctccccgatcttacacccgtgcagttggctaaggaagtggattaccttcttcgctcaaaatgggttccttgcttggaattcgaattagaggagggattcgtgcaccgtaaatactcgagcctacccacgtacta

SEQ ID NO: 38963 - DNA, 59 bp, Gossypium hirsutum
  Clone ID: LIB3165-034-P1-K5-A12
tgaacaatgtatggcaagaggaaggtcggcataaatgggatcccgtaaacccctcggga

SEQ ID NO: 38964 - DNA, 392 bp, Gossypium hirsutum
  Clone ID: LIB3165-034-P1-K5-A4
agcaaaaccatggcctctgcttctctcctcaagacttcaccagttttagacaagtctgagtgggttaagggtcacacccttcgccaaccttccacttctgtggtgaggtgccaccctgttgcaccctccggactaactgtgcgtgcaagctcatatgccgatgagcttgtcaagactgctaaagctattgcttctcctggccgtggaattttggccatggatgagtccaacgctacctgtgggaaacgtttggcctcaatcgggctagaaaacacggaggctaaccgccaagcctacaggacgttgcttgtttcagctcctggccttggtcagtacatctcaggtgccatcctctttgaggaaaccctctatcaaccacaattgatggcaag

SEQ ID NO: 38965 - DNA, 393 bp, Gossypium hirsutum
  Clone ID: LIB3165-034-P1-K5-A6
gtcagtacatctcatgtgccatcctgtttgaggaaaccctctatcaaaccacaatagatggcaagaagatggttgatgttcttgttgagcagaacatagtccctggtatcaaggttgacaagggtcttgttccactggctggttcaaacaacgagtcatggtgccaaggtcttgattgcctcgctccacgttcagctgcatactaccaacaaggagctcgttttgcaaaatggcgtactgtggtaagcattcccaatggaccaaccgaacttgctgtgaaggaagcagcctggggacttgctcgctatgccgccatctctcatgacaatggattggttccaattgttgagccagagatcttgcttgatggtgatcacggaattgacaggactt

SEQ ID NO: 38966 - DNA, 367 bp, Gossypium hirsutum
  Clone ID: LIB3165-034-P1-K5-A7
gtcgacggcttctatcaacggttggtgccttacctcctcttcttccaccactaccacctcctctttttccggtcgtcgacgacctacattgcggccttcagtcgtcgctagccttaactcttctccttctcctccgactcttatccaagaccgcccggtttttgctgcccctattcctttgctcaccccgagagaagagatgggaaacaagtcctacgacgaagccattgaagctctcaagaaacttctcagtgagaaaggagaactgaaagctgaagcagctgcaagggtagatcaaataacagcagagttaaacacagcatcagctgatggcaaaccatctgactcttctgttgagagactggaa

SEQ ID NO: 38967 - DNA, 273 bp, Gossypium hirsutum
  Clone ID: LIB3165-034-P1-K5-A8
gagtacttgaacggagaagtttccggagactatggatacgatccgtttggtctgagcaagaagccagaagactttgcaaaatatcaagcatatgagttgatacacgcaaggtgggcaatgcttggtgctgcagggttcatcatccctgaagcctttaacaaatttggtgccaactgtggccccgaagccgtttggttcaagaccggagctctttttttggacggtaacaccttgaactacttctggaagaacatcccaatcaaccttgtggtg

SEQ ID NO: 38968 - DNA, 378 bp, Gossypium hirsutum
  Clone ID: LIB3165-034-P1-K5-A9
cccacgcgtccgacttttaacctttgccgacactctcaccattttctcagcagacttagcctatgaaaatcaccatgacaagtcccaaagaagacccccgctaattctaaaagaaagaaccagagttttctttctctttagtttacgtttattgtccttttggaatttttgatactaaaaaaaggaagcaacgaagaagggaaatggagggcaaagaagaggatgttagattgggagccaacaagttcacagagaggcaaccaattgggaccgcggctcagagtcaagatgacgggaaagactacactgaaccaccaccggctccatttttcgagcctggcgagttaacctcatggtcttttatagggctgggattgc

SEQ ID NO: 38969 - DNA, 221 bp, Gossypium hirsutum
  Clone ID: LIB3165-034-P1-K5-B1
ttcgctttgagattagatccaaaattctccctttcatcatatttccgattccccaatttttcctgaaaccctaatcctaatcccggattcttctcgtctacatcgtctagcaaatggcaaccgaggagccggcagtcgtggcagaccccgcaccggagacggaggaggacaagactgctgagaccaaagctacttcaaaatctggcagaggcaagaaaacc

SEQ ID NO: 38970 - DNA, 370 bp, Gossypium hirsutum
  Clone ID: LIB3165-034-P1-K5-B10
ggaccttaaatttttcatcggagagagcatgcacgatgatggatgtttggtatttgcttactacaaggatggtgctgttgacccgacatttttgtactttgcgtatgcattgaaggaggtcaagtgctgaggtttgaagcaaagaaaaaaaaagtggttgctgaagaatttagtcctttttattattgcttttgtctcttattttcagtactctgctaaagacataaattatttatggtttttgatgtttttgatttaattgtttgctgttttatcatggaatgggttctatttttatgggttgactaaacaagaatgtaactctttgctctattactacttaatcttattggaaggaggcttttggaac

SEQ ID NO: 38971 - DNA, 389 bp, Gossypium hirsutum
  Clone ID: LIB3165-034-P1-K5-B11
ctcagctcagctcaactcaactcacttaaatcttttctgctgcggtggcgatgggggcggctatgttgtcggagttgacgaccgaaatcgtggttccagtgtgcgccgtgattggaatagctttctcgttggtgcaatgggtgatggtgtcacgcgtgaagcttacctccgagcgccatgcgtcgtcggcgaatagtatcaagaatggttacggtgattacttgattgaggaagaggaaggaatcaatgaccatagcgttgtcaccaagtgcgctgatattcaaaacgctatctctgaaagtgcaacatcctttctttttactgaatatcagtatgttggcatcttcatgattgctttcgctatcctgattcttctctttctgggctct

SEQ ID NO: 38972 - DNA, 367 bp, Gossypium hirsutum
  Clone ID: LIB3165-034-P1-K5-B12
caaaaactgggatggcttttgtaacgtcggaggaattgctggccactttggtgccaattgctgtttattggatatactcaggtatgtatgtgatgtttgagtcaaggtttgagaagtacaagttgcactccaagaaagaagaggaggagaagaatttggtttccagaaaggaagtcttcaaagccgttctttgccatcaagtcatgtcaattgctattaacctcttcacgtatgcggtaacaagagaaaaagatggtgaggcatctccaaagaaatcactaaccttgcttcttctagccaagcaattggtgatagcaatggtggtgatagatacatggtcgttttttgtgcattggtacttgcatca

SEQ ID NO: 38973 - DNA, 333 bp, Gossypium hirsutum
  Clone ID: LIB3165-034-P1-K5-B2
gactatcgtgcaaaacttagcataatacagtctcctcataacatccttcgactcgcttcatggattagcccaaagattaacagaaccaaaaagaaaaacggcttgtgcttccgctactgtcctcaagtctttacctatgatcgacacgaccgagtggattaagggccggaacctgcgccaccctccggttcgccttgtacggtcacacgctacatcagacgccatatccgtccgcgctagctcatatgccgatgagcttgccaagaccgctgaaactgccgcatcttcaggtcgaggtatttgggccatggttgaatccaatgctgcatgtag

SEQ ID NO: 38974 - DNA, 383 bp, Gossypium hirsutum
  Clone ID: LIB3165-034-P1-K5-B3
cccacgcgtccgcccacgcgtccgctttgccaaacatggagactagtgtcacgtgctacgctcgtgggattgttcttcctggtgtctcttctaagcactcctcggcattagtctcccctccatccatatctccttccttcagctctaagagccttaaaacaagttcactatttggagaatcattaagggttgttccaaggtcatcattgaaggtttcaaaggcaaagaacactacttcactagtgacaaaatgtgaaattggagagtctttggaagagtttcttacaaaggcaacaacagataaggcattgattagaataatgatgtgtatgggtgaagcattaagaacaattgcttttaaagttagaacagcttcatgtggt

SEQ ID NO: 38975 - DNA, 385 bp, Gossypium hirsutum
  Clone ID: LIB3165-034-P1-K5-B5
tgaaaaaaaaaaataagacatgtatttggatatttcctttcaactacaacaatattctagggtttatttgatatgacatgggtagttgaagggaattccccgaagagaaaatggattatgggagtaacaaaaaaacctgacttgaacgatcctgtattaagagctaaattagctaaaggtatgggtcataattattatggggaacccgcatggcccaatgatcttttatatatttttccagtagtaattctcggtactattgcttgcaacgtgggcttagcggttctagaaccttcaatgattggtgaacccgcggatccatttgcaactcctttggaaatattacctgaatggtatttctttcctgtatttcaaatacttcgta

SEQ ID NO: 38976 - DNA, 393 bp, Gossypium hirsutum
  Clone ID: LIB3165-034-P1-K5-B6
ggggaatctatatgagtgccaaggttgctttttgcatccacaatatagcctatcaagggagatttgcctttgaagattacgcacttctcaatttgcctgatcaattcaagagttcatttgacttcatggatgggtatgataagcctgtcaagggaaggaaaatcaattggatgaaggctggaattttggaatcacacagggtattgactgtaagtccatactatgcccaggagcttgtttccggtgaagataaaggtgttgaactcgatcacatcattcgtaaaaccggcatcactggaattgtgaatggcatggatgttcaagaatggaaccctaccactgacaaatacatcagtgtcaaatatgattgcacaactgtaacgtatgcaaagc

SEQ ID NO: 38977 - DNA, 345 bp, Gossypium hirsutum
  Clone ID: LIB3165-034-P1-K5-B8
ttcatttacattgttttggcatcttatgcagggccgaacacccccacaatgaccaggctaaattttttggccgcatggaaaccatccttatcattttcctttgctacctgttccaagtccctcaacttctccgtggctcaaagaaccattagagctgcagctgctgatgaggaagcatcatctgctgccgtcacaaatgaagctccggttggtttcacccctccagaattggaccccaacaccccatgacccatcttctgaggaagcactggaggactgcttataaaggcttaagtcgaagaattctacttcatcacatgggattcacccaaagtacaaaatttt

SEQ ID NO: 38978 - DNA, 251 bp, Gossypium hirsutum
  Clone ID: LIB3165-034-P1-K5-B9
cacgttcttgtttttttcacttctttctctttctcgaaaaccggtcacctgaaactcaaacgcctctctgaatccgggccggaacctgtcaatctcttacatctccggcggctgtctcacggatctgttcacgatgagcaccggccaacttctcagcatcgagcctcaagagctccagttcccatttgaattgagaaagcagatctcgtgttccctaaacttgtccaacaagaccgacaattatgtggctt

SEQ ID NO: 38979 - DNA, 311 bp, Gossypium hirsutum
  Clone ID: LIB3165-034-P1-K5-C1
ctctaactccaagtccgacgccccaattctgtccccgaaatacccacacacactatctacgtcgtcatgcaaacgctactggtcccggctactcgctccggtatatgtgcggtggcggcgggtccccttcgaccaccgttcactctctctcctccaaattttctcacttcaatcaaaactcggaaccaaaacctccgttgtcccctttcgcatcctacgaccctcttaatgttctaagatctacgcttttttcgcccaaagtctcttcgtcctcagttacacccagttttacctacgctaatgacgatact

SEQ ID NO: 38980 - DNA, 327 bp, Gossypium hirsutum
  Clone ID: LIB3165-034-P1-K5-C10
cttcagttcttcacttccccagtctccagcaatgggagaaaccgattctttgttcgcgaacaaatcagcgaagatggtcgtagcaggccatcgaggcctagttggttctgccatagttcgtaaacttcagtccctaggctttaccaacctcctactccgcacccatgccgatctggaccttactcgccaatccgacgtcgaatccttcttcgccgatgagaaacctcactatgtcgtactagctgccgctaaagttggtgggatccacgccaacaacacttaccctgccgatttcattgccatcaacctccaaatccagaccaacgt

SEQ ID NO: 38981 - DNA, 378 bp, Gossypium hirsutum
  Clone ID: LIB3165-034-P1-K5-C11
cccacgcgtccgcccacgcgtccgcccacgcgtccggtccgtctctctgttggactgcacaaccactatcagtgaccattatggcttcggctactgtttctgtagccaaacccaaccttcagattcaggcaaaaggaaagggtgttggttttgcagatttctcaggcctacacaactcctctactagccttccctttgccaggaaaacctctgatgacttccattcactcgttgcttttcagacatctgctctaggaagcaataatggcgggtacaggaaagggatggcagaggcaaagctaaaggtggctataaatgggtctggtaggattggcaggaatttcttaagatgctggcatggccgtaaggactccccac

SEQ ID NO: 38982 - DNA, 397 bp, Gossypium hirsutum
  Clone ID: LIB3165-034-P1-K5-C12
cggacgcgtggggcacatatttctatttcccactctcttttttgctctcaggtaacaacaaaatccgtaaatggctgccactgcttctccaatggcgactcagctgaagagcagctttacgtcgtctgttacaagaggactggtagtccccaggggcatttcgggatccccgttcaaagtatcttccggaaagaccaggaccccttgcttcactgtcaaagctgttcaatccgacaagtcaacatttcaagtaatccaacccatcaacggcgaccccttcattggaagcctggagactccaatcacctcaagccccttaattgcatggtacctttccaacctcccagcctatatgacggcagtgaacccacttctgaggggaatcgaagtgggtctg

SEQ ID NO: 38983 - DNA, 385 bp, Gossypium hirsutum
  Clone ID: LIB3165-034-P1-K5-C2
cccactccttagaaaatatccaaaccctcaaaacttgtcggtaccatcttccaaaaacaaggagccttccaaaatcaagacgatttgatgctcattcctctctccaaagcctacctcttcctcttctgtcaatctggttccctcctcctcccccataatctatcattgatgaccatcggaacatttccaattaggcctagatggtttcccaaaagcaaggcctgaaagtaagcatatccttccgctataaatggcgaagcgatctccttgtgcagtgtctgttttgaagccaaaatctcacttggagagttacgaacaaccactccagatctagatctcaccaaattttgattacaagcggcatcaaaattaactttaacatcag

SEQ ID NO: 38984 - DNA, 361 bp, Gossypium hirsutum
  Clone ID: LIB3165-034-P1-K5-C3
cttttaaccaaacactccacaaaattttctcgaaaaaaaaaaaaaaaatgaggaagggtgggctatgtggaaggctggctggaatgcactgtgaatcagatcaagcaaatttatgttgggactgtgatttcaaggttcatggagccaatttcctcgtagctaagcataatcgaaccctcctttgccatgtttgtcaaagtcctactccttggctcgcatctggtcggaatctcggctccgcggtttctgtttgtgattcatgcgttgtaaacggcaacaataagtgtgagtcatcggagagagagtatggtgaagaggaggaggaagaagaggaggagggagattatgataatgacgccgt

SEQ ID NO: 38985 - DNA, 397 bp, Gossypium hirsutum
  Clone ID: LIB3165-034-P1-K5-C4
cacgcgtccgcacgcgtacggcacatacaaagctaccatggctaattttcaaatgaaaaaagttgaacgatgcacacacggcatggtgtggaactcttccagctaagctctaaccttgaccgacaagaaagtttggcaaggctctcattatgcggatttcccagaaataattgaagatggggatgcgagtgagtttacacatgaatcactgactgatgatgctgatattcatggttcagttgctggtcttgtgtacaggcgacgtgacggaactaattggattgttgcctggagcaacccacaagctgagaacagcaaggtctatactgatatccagagacaacctgttcactgggggcaaatcaaaaccaaccttgtgaaaagaggaaaaccaaaa

SEQ ID NO: 38986 - DNA, 393 bp, Gossypium hirsutum
  Clone ID: LIB3165-034-P1-K5-C5
gcggttttcatttccccttcgcaagtatccagccgtttcacacactcaagaagagcgagagctcgtaaatcatggcggaacagaccgaaaaagcttttttgaagcaacccaaagtgtttttgagctcgaagaaaggtgggaaagggaagaggccaggaaagggtgggaatcgcttctggaaaagcattggattgggcttcaagactccccgtgaagctattgaaggaacctacatcgataagaaatgccccttcactggcactgtttcaatccggggtcgtatcttagccggtacttgccacagtgccaagatggtcaggacaatcattgttcgacggaactaccttcattatatcaagaaataccaaaggtatgagaagcgccattcaaaca

SEQ ID NO: 38987 - DNA, 349 bp, Gossypium hirsutum
  Clone ID: LIB3165-034-P1-K5-C6
acacacctccatttctatgtcaactttacttgcacatgccttactccatcctaagagacagcacaagcctagtaccgagagagataacaaaacgagcttaagaagggaatcaatgtaaaatctcagtaccaaatccctaagcatgacctcaactttaatgagcacgccaacatagccaaccgcactgccctagtgccttcttttcatgctaaacctctgcaaacgcctgaaactgttaaaaccaaggtacagctcaaacctaccttattcactcgctcgtagcgccatttccggagctatcttctcaaccctaagttaatctgacgaccgcttagctgcccaacacatt

SEQ ID NO: 38988 - DNA, 301 bp, Gossypium hirsutum
  Clone ID: LIB3165-034-P1-K5-C7
cccacgcgtccggatccacggcgatgatctatggccatgttttggtttttgattttgtcaggtgccttggacactggaatgctgaagttgttccacatgaagttttcaataagttacctttacttaggtatttcatctatacccccacgtatcatagtcttcaccacacagagatggagaccaatttttgtctgttcatgccgctgtttgatgcactggggagtacacttaacaccaaatcattggagctacataagaaaattacctcaaattctggaaaaaaccggagggtaccggattt

SEQ ID NO: 38989 - DNA, 325 bp, Gossypium hirsutum
  Clone ID: LIB3165-034-P1-K5-C9
cccacgcgtccgagcatacactactagtacccactactagcaatggcttccgcaaggatctcatcggctaccggtgccactgcctctccggcacaggctaacatggtcacccctttcaccggcctcaagtctgcctctgctttcccagtcaccaggaaggccaacaacgacattacttctctcgcaagcaatggcggcagagtgcaatgcatgcaagtgtggcctcctactggaaagaagaaagtcgagactctctcatacctccccgatcttaacacccgtgcaattggctaaaggaagtagattaaccttcttcgctcaaaat

SEQ ID NO: 38990 - DNA, 380 bp, Gossypium hirsutum
  Clone ID: LIB3165-034-P1-K5-D1
cccacgcgtccgtacggagcttgtgttcatattcagattcttcttcttcttcttcttctgcttcatcaaagtgggtgtatgcagtgttttggaggatactgcctcgaaattatccaccaccaaagtgggattatggagggagtgcacttgatcgttccaaaggaaacaaaagaaactggattcttgtatgggaagatgggttttgtgatttccatgaatgtgagcgtgctggaagtggttatgtaaagggaaggtttggagctgatattttcttcaaaatgtcacatgaagtttataactatggagaaagattagtagggaaaattgcagcagataacagtcacatatgggtgcataaagatatcccaaatgaaaatgat

SEQ ID NO: 38991 - DNA, 215 bp, Gossypium hirsutum
  Clone ID: LIB3165-034-P1-K5-D10
gctcatccgagcaaaggccatctctcttgctcaactcggaaagtacactgtcgaaggatagtcagaggaggccaagcaaggaatgtttgccaagggttatgtctattagcatgttcgcatcttcaacaggtcaatgaatttcctgcactgaaaatttaattgaaagagcagaacactgatctttcattaaaaaaaattaaaacacaaaaataact

SEQ ID NO: 38992 - DNA, 397 bp, Gossypium hirsutum
  Clone ID: LIB3165-034-P1-K5-D11
cccacgcgtccgcccacgcgtccgatggcctctgcttctctcctcaagacttgaccagttttagacaagtctgagtgggttaagggtcacacccttcgccaaccttccacttctgtggtgaggtgccaccctgttgcaccctccggactaactgtgcgtgcaagctcatatgccgatgagcttgtcaagactgctaaagctattgcttctcctggccgtggaattttggccatggatgagtccaacgctacctgtgggaaacgtttggcctcaatcgggctagaaaacacggaggctaaccgccaagcctacaggacgttgcttgtttcagctcctggccttggtcagtacatctcaggtgccatcctctttgaggaaaccctctatcaaaccacaa

SEQ ID NO: 38993 - DNA, 392 bp, Gossypium hirsutum
  Clone ID: LIB3165-034-P1-K5-D12
atcggctaccattgccactgcctctccggcacaggctaacatggtcgctcctttcaccggcctcaagtctgcctctgctttcccagtcaccaggaaggccaacaacgacattacttctctcgcaagcaatggcggcagagtgcaatgcatgcaggtgtggcctcctactggaaagaagaagttcgagactctctcatacctccccgatcttacacccgtgcagttggctaaggaagtggattaccttcttcgctcaaaatgggttccttgcttggaattcgaattagaggagggattcgtgcaccgtaaatactcgagcctacccacgtactacgatggacgctactggaccatgtggaagctgcctatgttcgggtgcaccgactcggctc

SEQ ID NO: 38994 - DNA, 389 bp, Gossypium hirsutum
  Clone ID: LIB3165-034-P1-K5-D2
ggcatctcctttcccctcttcttcctccactgtcctctttcgctgcctaacctaaacaaagcaatggctttccttccgcccatcaccactttcgcagccgccctcctcctcttcctccacaccccactcgccacgtcatcccccctcaaccttactggcgactccctttcaccctacgaagtcctccaaggctacaacttccccgttgggcttctcccacaaggcgtcttaaagtacgatttagatgaatccaccggtcggttccatgcctacttagagggttcgtgtagcttctcactggaagggtcttatcaactcaaatacaaatccacgatcagcgggatcatctccaacaacaggctcaaaaacctgagtggaatcagtgtcaa

SEQ ID NO: 38995 - DNA, 258 bp, Gossypium hirsutum
  Clone ID: LIB3165-034-P1-K5-D3
accacgcgtccgtacggagcttgtgttcatattcacattctcctttttttcattcttcttcttgatgacactgggtggatgcagtgtctcggaggatactagactcgaaattatccaccaccaaagcgggattatggagggtgtgcacttggtcgttccaaaggaaacaaaccaaactggattcttgcatgggacgatggctcctgagagtctcattaataggagcgtgctggaagtcggtttgtacagggaaggttt

SEQ ID NO: 38996 - DNA, 400 bp, Gossypium hirsutum
  Clone ID: LIB3165-034-P1-K5-D4
attctctttcactgcaaactgtgagcgagtgagagagatggcttgctcagctacttcatcggccgcggctctcatctcctgtaagccaagggctttctcctccaattccaagcccttctcccaatccctttctctccccaatcccttcactggtctccctgcccctctcctttctcgtcccgcctccttttccctctcccgcgcctccccttctcgcaagtctttcgtcgtcaaagccaccagtgagcttccactggtgggaaatcctgcccctgattttgaggctgaggccgtctttgaccaggagttcattaaggtcaagctctctgaatacattgggaagaaatatgtgattctcttcttttaccccgtggacttcacatttgtttgccccacagag

SEQ ID NO: 38997 - DNA, 401 bp, Gossypium hirsutum
  Clone ID: LIB3165-034-P1-K5-D5
cttttgtataactgtagcatatagtactagtaagcagtaatagcaatggcctcctgcatgatctcatcggcaaccattgccaccgtgaactgctcctccccggcacaggccaacatggtggcccccttcaccggcctcaagtctgcctctgctttcccagtcactaggaaggccaacaacgacatcacttctcttgcaagcaatggtgggagagtgcaatgcatgcaggtgtggcctcctcttgggaagaagaagttcgagacactctcatacctccccgatcttacacccgtacagttggctaaggaagtagattaccttcttcgctctaaatggattccttgcttggaattcgaattagaggagggattcgtgcaccgtaagtactcgagcttacccac

SEQ ID NO: 38998 - DNA, 399 bp, Gossypium hirsutum
  Clone ID: LIB3165-034-P1-K5-D6
cccacgcgtccgcccacgcgtccgtcttcctccccacccttaaaccatgtcggcttgtgttggcaagtatgcaggtgaactcccgtttaggaatttggctttcactgtcttctcctgcatgttttattccattgtatttggggacatgcatgtaaatccttaatgaccacaacacttgatcgatccgtaccataaatgttcaaattttcattacagatatgctattttatgcataattttgttagtcctagctttgactaaaccctgtatgtatattttcccccagaggagttgatcaagaacgccaactacatcgccacgccaggcaaaggtattttggcggcggacgagagcacaggcaccatcgggaagcgtctctcgagcatcaacgtcgagaac

SEQ ID NO: 38999 - DNA, 384 bp, Gossypium hirsutum
  Clone ID: LIB3165-034-P1-K5-D7
cccacgcgtccgctcagactactctttcgaaccagctccaccatcacccccaaaaaacaaagcaaattgtagaagatggcaacacaagcacttgtatcatcgtctcttacctactcagtggagactgcaaggcagattcttggagctaaacgacaaattgggtcttcaaggaaaggatcctttgttgttaaggcagcttcgactccacccgttaagcaaggagctgatagacctttatggtttgcatctaaacaaagcctttcatacttggatggcagccttccaggtgattatggatttgaccccttgggactctcagaccctgaaggtccaggagggttcatcgagcctaaatggcttgcctacggtgagatcatcaacggg

SEQ ID NO: 39000 - DNA, 332 bp, Gossypium hirsutum
  Clone ID: LIB3165-034-P1-K5-D8
cccaactccaacaaaacatcaatggcggcagctaagccattgccgtcatctcttcacactcaccaaattctctcttcatgcaaccaaattttaccttcgctcctccatttccgtcaacattacagcaacccgaaatgccaacaaccacaaaggcgaagaaaacactcaagctccttagatggcgcctacgacttggctatcaaagcttacatggaaaacccaaactccatctctggtttcgcaaacaaagtcattggctctctccctatagtcggccctgtcgctaggatttttagtgatgaaaggccgtgttggtgggggatatcaattga

SEQ ID NO: 39001 - DNA, 386 bp, Gossypium hirsutum
  Clone ID: LIB3165-034-P1-K5-D9
caacaacgacattacttctctcgcaagcaatggcggcagagtgcaatgcatgcaggtgtggcctcctactggaaagaagaagttcgagactctctcatacctccccgatcttacacccgtgcagttggctaaggaagtagattaccttcttcgctcaaaatgggttccttgcttggaattcgaattagaggagggattcgtgcaccgtaaatactcgagcctacccacgtactacgatggacgctactggaccatgtggaagctgcctatgttcgggtgcaccgactcggctcaggtattgaaggagcttgaggaatgcaagaaggaataccccaatgcattcattagaatcattggcttcgacaacgtgcgtcaagtgcagtgca

SEQ ID NO: 39002 - DNA, 396 bp, Gossypium hirsutum
  Clone ID: LIB3165-034-P1-K5-E1
cccacgcgtccggaccttcattcgaccaatggttgaaaatctttaaatgataacagggtccttttgcccaccactgtgcaaatttccagattttccaggaaaaagaaaatcaaaacccccaggtgaagaaggtgaaaaccagcagcggcaaaggcaataaaaggtgaagccaaagagagagagatatatacataataaaaaagacttttcaaaagaacacaactatggctcctcatagagaaggatcagatgcttcagtggaagccatggttgctcaagtcgaaaaacacccaatttcatcgatccttatcatcattgctatgcaaacagaagctttgccggtggtgaataagttccagttgattgaaaaccctcattcttcgtttccaaaagggg

SEQ ID NO: 39003 - DNA, 362 bp, Gossypium hirsutum
  Clone ID: LIB3165-034-P1-K5-E10
gtttcctttctcgattttctatttagccaaacaagatgcagatcttcgttaagacgctaaccggcaagacgatcacgctcgaggtcgagagctccgatacgatcgacaacgtgaaggccaaaatccaagataaggaaggcatccctccagaccagcagcgtctgatcttcgccggaaaacagctcgaagacggccggaccttggccgattacaacatccaaaaggagtcaactctccacctcgtcctccgtctgcgcggtgggatgcaaatcttcgtgaaaaccttgactggcaagacaatcactctcgaggtcgagagctccgacacgatcgacaacgttaaagcgaagatccaagacaag

SEQ ID NO: 39004 - DNA, 389 bp, Gossypium hirsutum
  Clone ID: LIB3165-034-P1-K5-E11
caacattgaagagataagattatggtgaaaaactaaacataataaagtccctcataacattcttcgacttgcttcagggattagcccaaagataaacataaccaaaaagaaaaatggcttctgcttccgctactctcctcaagtcttcacctattatcgacaagtccgagtggattaagggccaaaacctccgccacccttcggtttgttttgtacggtcacaccctacatcggccgcctttaccgtccgtgctagttcatatgccgatgagcttgttaagaccgcgaaaactgctgcatctccaggtcgtggtattttggccatggatgaatcaaatgctacatgtgggaagcggcttgcctcgattggtctcgagaataccgaggca

SEQ ID NO: 39005 - DNA, 389 bp, Gossypium hirsutum
  Clone ID: LIB3165-034-P1-K5-E12
ggaacccaaggacagaagactctttttacatttcaccgcaaagatggagataacaaatgtgagcgagtatcaagaaattgcgaagcaaaagttgccaaagatggtgtatgactactacgcatctggtgctgaggaccaatggacattgcaagagaatagatttgctttcactaagatactgtttcgtcctcgtattctcatcgatgtaagcaagatagacatgaccacaactgtgttgggtttcaagatatcaatgcctatcatgattgccccaactgccatgcaaaaaatggctcatcctgaaggggagtatgcaacagctagggctgcatctgctgctggaactatcatgacattatcctcatgggcaacttctagtgttgaggagg

SEQ ID NO: 39006 - DNA, 393 bp, Gossypium hirsutum
  Clone ID: LIB3165-034-P1-K5-E2
aaggacagggctactcctcaacaagttgctgattacaccctcagcctcctccgccaaagaatccctccagctgtccggggagtcatgtttttgtctggtgggcagtctgaagttgaggctaccttgaacttgaatgcaatgaaccaagctccaaacccatggtatgtgtcattctcatatgcaagagcccttcaaaacacttgcctgaagaagtggggaggcaggcctgagaatgtgaaggatgctcaggaagcgctgctcatccgagcaaaggccaactctcttgctcaactcggaaagtacactggcgaatgagagtcagaggaggccaagcaaggaatgtttgtcaagggttatgtctattagcatgtttgtttcttcaacaggtcaatg

SEQ ID NO: 39007 - DNA, 373 bp, Gossypium hirsutum
  Clone ID: LIB3165-034-P1-K5-E3
cccacgcgccgcttattgatgggttaaagagagtagctgtttgcaacccagtcatgctattggactagattgacaagacaggttctgatgtgcgtggtgatccagcttcagctctactggaggttcttgatccggagcagaataattctttcaacgaccactatttgaatgtgccatatgacctttcaaaggtgatttttgtggctactgcaaatagggtgcagcctattcctcctccactcttggacaggatggaagtcattgagctgcctggatataccgctgaagaaaagctaagaatagccatgcaacatttgattccacgagttttggatcagcatggattgaattctgagtaccttcaaattccgga

SEQ ID NO: 39008 - DNA, 381 bp, Gossypium hirsutum
  unsure (1)..(381): unsure at all n locations; Clone ID: LIB3165-034-P1-K5-E5
cccacgcgtccgggaaaaagaagtccagtagtagtaagtctttattctacgaagctcctctgggttacagcattgaagacggtcgaccaaacggtggaatcaagaagttcagatctgctgcttactccaactgcgctcgcaagccatcctgatatactcacaagcgtgccgtctgaccactagtagtggttaataaaactgttatttgctttgttagttagttttagattatttccccgaccaacttcttcctcttctctcttcgtggctggtttctttacattgcgttctcctgatttggcgactntgtaattcggataaagtttgcagtccttggttgaatcacaatggcagggtctgcaattggatttgagggttatg

SEQ ID NO: 39009 - DNA, 401 bp, Gossypium hirsutum
  Clone ID: LIB3165-034-P1-K5-E6
ctcatatctctctgtttatttattttttttgttttccttttgtcgtccttttctcacctgttgttcttccatttttgaatgaagttccccccaccccgctcaacacctctccctctaacaagccaaaggccccaagcagattctatttgttctaacatggagaaaagccatgaacttgaactgacccagatgaggaaatcagtagagaaacttgggttttcaacagagaaatacggggatccgacactcatgagattcttgattgcaagatcaatggacacagataaagcttcaaagatgtttgtccagtggctgaaatggaggtcttctttagttcctaatgggtgcgttgtagaatctgaagtgcctgaccaattagaagccagaaagatttttttgca

SEQ ID NO: 39010 - DNA, 383 bp, Gossypium hirsutum
  Clone ID: LIB3165-034-P1-K5-E7
cccacacgtccggatgtcatgaagattgacatgggaggttctgcaccatttgttggtgcaacgaaagctctcgggcgaatcaaacctcccgcagttgaagatcattacattgatgcatattgtgaaaacatgataagtggaacgggtatgagacctgtagatatcctcacatcatctaatggaaagactattgaggttaataacactgatgcagaaggcaggcttacactctcagatgctttggtatatgcttgcaaccaacgtgtctatgacatagtctaccaggcaacactaactggggcttgtattgttcgctctctgaccgtctattgcatgcgattttcacacctagcgatgaaccttcaaaggaggtattcgaagct

SEQ ID NO: 39011 - DNA, 372 bp, Gossypium hirsutum
  Clone ID: LIB3165-034-P1-K5-E8
atttgatgaaaaagggagtgaaggtgttacaaaaggacgccatctgagggggaagagatctacagaaagtgatggggaggcggataacggtgatgataagatcgtggttcggagccagactaagaagaacagaagattgggccttgataaaaggattgaactgaaaaagaatagagaagaaaagtcggttgtttctggccagagtaaaaagggtatctcgaatgaaagtgagaagatcgataggcttgtccgggactattcggcttcaaccgatttggtcagcctggactggaagaaaatgaagatacctcccgttctgccgtccaccgaacatacttggttgtttaagctaatgcagccaatgaaagcact

SEQ ID NO: 39012 - DNA, 386 bp, Gossypium hirsutum
  Clone ID: LIB3165-034-P1-K5-E9
cgatggaaccgtcagtgttcttgtggcaacttttttgttcgtaattcccaacaagaggcgaaagggagagaaattgagggactggaacgaatgcaagaagctgccatggaacattattttgttactaggggctggtttcgccatagccgacggagtccagtcaagcggactcgctgatcaattatccaaaactctagattttctcgaagaggctccgtatttagctattgcccccgcggtgtgtttaatctgtgccataattaccgagtttataacatcaaatgatgctactgctacccttgtgcttccacttttgattcaaatggcaaaaaccatgcatgttcacccattactccttatggtccctggagcagtgggatcacaat

SEQ ID NO: 39013 - DNA, 382 bp, Gossypium hirsutum
  Clone ID: LIB3165-034-P1-K5-F1
cccacgcgtccgctaaaacaagtgtttctcttcttcttcatgttctcgatcatggcttcttcttcttctttctttgttaggtgtttccctttacttttcttcttcttcttctcacatgtccaagcagtgaaatcaccaattcatcctcgggatgttctacctttattgccgagacaggtttcatggccgatccttaattcacttaacagtgccatcgaccttttaccagcctttgtcggttctgtttcgtcccaaaaccacatcgtgagctggaaaggtgcgtgcttttatgagaacaccgctaggatggagttccataacaagagtggcagtgagttcggtggtggaactctccatatcaaggttagcaaagcccatagtt

SEQ ID NO: 39014 - DNA, 380 bp, Gossypium hirsutum
  Clone ID: LIB3165-034-P1-K5-F10
cccacgcgtccgaaaacacccaggttcagaagcactaacattttctctttggcttaccaaccttggatctgaaatggcaaagtcacccgaagaagaacaccctgtcaagacctttggctgggctgcaagggacccatctggtcatctctctcctttcaccttctccagaagggtaactggtgaagaagatgtgaggtttaaggtgctgtattgtgggatttgtcattctgaccttcacagtatcaagagtgaatggggctcctccaactaccccatggttcctgggcatgaaatagtaggggaagtgacagaagtaggcagcaaagtggaaaaggttaaggtgggagataaagtgggcgtgggatgcatggtcggagctt

SEQ ID NO: 39015 - DNA, 398 bp, Gossypium hirsutum
  Clone ID: LIB3165-034-P1-K5-F11
aaaaaatctccaagccaaaccatttctccgctggcatttgcttacaacaaaaaaaaaattcaaattgaagaatgcctgtatttgcttcaagagttgggttcaggagacacgactacaagaatagatcaaaggaacgaaacgatgaccgtaaagacaaattgtccgaagtgttcaagagctatgctgctaatgggctgctagacaaggaagggctgaaagacgcttttctacatctagatgctgccatgccgtaccggcaagccgaagacgccctccgtgtcgtcggcaaaacctataacattaacgtcgaggaggaaaccgagcttaacgcccttatcgactatgcttacaataagggttacgggtcttcaatttgattagctaatttataagctaaa

SEQ ID NO: 39016 - DNA, 392 bp, Gossypium hirsutum
  Clone ID: LIB3165-034-P1-K5-F12
gtttcattgaaggcgggactctcagactactctttcgaaccagctccaccatcacccccaaaaaacaaagcaaattgtagaagatggcaacacaagcacttgtatcatcgtctcttacctactcagtggagactgcaaggcagattcttggagctaaacgacaaattgggccttcaaggaaaggatcctttgttgttaaggcagcttcgactccacccgttaagcaaggagctgatagacctttatggtttgcatctaaacatagccttcatacttgattggcagccttcaggtgattattgatttgaccccttgggactctcagaccctgaaggtccaggagggttcatcgagcctaaatggctagcctacggtgagatcatcaacgggcg

SEQ ID NO: 39017 - DNA, 367 bp, Gossypium hirsutum
  Clone ID: LIB3165-034-P1-K5-F2
cccacgcgtccggtgagatggcttgctcagctacttcatcggccgcggctctcatctcctgtaagccaagggctttctcctgcaattccaagcccttctcccaatccctttctctccccaatcccttcactggtctccctgcccctctcctttctcgtcccgcctccttttccctctcccgcacctccccttctcgcaagtctttcgtcgtcaaagccaccagtgagcttccattggtgggaaatcctgcccctgattttgaggctgaggccgtctttgaccaggagttcattaaggtcaagctctccgaatacattgggaagaaatatgtgattctcttcttttacccgctggacttcacatttgt

SEQ ID NO: 39018 - DNA, 396 bp, Gossypium hirsutum
  Clone ID: LIB3165-034-P1-K5-F3
ctcttttgtatacctgtagcatatagtaatagtaagcagtaatagcaatggcctcctccatgatctcatcggcaaccattggcaccgtgaaccgctcctccccggcacaggccaacatggtggcccccttcaccggcctcaaatctgcctctgctttcccagtcaccaggaaggccaacaacgacatcacttctcttgcaagcaacggtgggagagtgcaatgcatgcaggtgtggccgcctcttgggaagaagaagttcgagactctctcatacctgcccgatcttactcccgtacagttggctaaggaagtagattaccttcttcgctctaaatggattccttgcttggaaatcgaattagaggagggattcgtgcacccgaagtactcgagct

SEQ ID NO: 39019 - DNA, 455 bp, Gossypium hirsutum
  unsure (1)..(455): unsure at all n locations; Clone ID: LIB3165-034-P1-K5-F4
ggaannnnccgggnnggacccacgccgtccgggtcagtaaagacttcaanttcataaggatgtgttttgtttccatgagcgttttcttctctctgctgctctctcacatcatcttcgttcatgccctctcttcctntcccaccatgccttcacaatccagaaaaaccccatcnttcgcttcccatcatgttttacctcataaaagncttcttctgaacctgacaaatggaaatccccactgctacacatgaccaaaaacgctgaagggctctagcaatagctcatacctcatacctcaagccatctcccgccgccgccgctaagccacctcccaaaaagcccgtttattccatgaagaaaggccagattgttagggtggataaagacaagtatctcaacagtattaattatctatctgtagggcatcccccctattacaaaggcttggactacat

SEQ ID NO: 39020 - DNA, 388 bp, Gossypium hirsutum
  Clone ID: LIB3165-034-P1-K5-F5
attcaaaactaatcatgtaaaaaaaaaagttgattggaacaaataaagtgaaacatttaagacaagaacaaagtggagattttataacacaaaaatagaggatgcaaatccacttaaaacacaaaaggaaaacaacattcaattaagacacaaaggggggatttcctttgtttgtgcccaatatagatttttttcttcccttagagcttaatttcccatttagaaagctcctctcttgatagcatcgtcattagcatttccaagggcagcttcactcaaatatttgtcagccaattgaaccctcttcacattctcttgctcagcaacaagcatgtatccatattccaacagcttctcaatggtcatcttcggttgctcgaaagatggt

SEQ ID NO: 39021 - DNA, 401 bp, Gossypium hirsutum
  Clone ID: LIB3165-034-P1-K5-F6
ctcccatcacccgagatcatctttccccttcagaatggcggctgcaaccatggctctctcttccccatctttcgccggaaaggccgtcaagctctctccttccgcccctaaaatccaaggcaatggccgtgtttccatgaggaaaaccgctaccaaggctgctccctctggaagtccatggtacggtcctgaccgagtcttgtacttgggtccactatctggtgagcctccatcttacttgaccggagaattccctggtgactacggttgggacactgctggactctcggcggacccagagacatttgccaggaaccgtgagctcgaagtcatccactgtaggtgggctatgttgggtgctcttgggtgtgttttccctgagcttttggctaggaatggag

SEQ ID NO: 39022 - DNA, 376 bp, Gossypium hirsutum; identical to SEQ ID NO: 38937
  Clone ID: LIB3165-034-P1-K5-F7

SEQ ID NO: 39023 - DNA, 202 bp, Gossypium hirsutum
  Clone ID: LIB3165-034-P1-K5-F8
acgatttcgaactctatttagaatcataccaccgtacggtattttctttaagtatcttgtaggatactgttggtccagccacatttctcttttcgctctactagtaatttaattggagcttgaacccgagtttcggtgaggttgaatccacttttttcgttctaccttccttatttattttatctaattcttatctaattct

SEQ ID NO: 39024 - DNA, 394 bp, Gossypium hirsutum
  Clone ID: LIB3165-034-P1-K5-G1
gtttcattgaaggcaggactctcagactactctttcgaaccagctccaccatcacccccaaaaaacaaagcaaattggggaggatggcaacacaagcacttgtatcatcgtctcttacctactcagtggagactgcaaggcagattcttggagctaaacgacaaattgggtcttcaaggaaaggatcctttgttgttaaggcagcttcgactccacccgttaagcaaggagctgatagacctttatggtttgcatctaaacaaagcctttcatacttggatggcagccttccaggtgattatggatttgaccccttgggactctcagaccctgaaggtccaggagggttcatcgagcctaaatggctagcctacggtgagatcatcaacgggcg

SEQ ID NO: 39025 - DNA, 393 bp, Gossypium hirsutum
  Clone ID: LIB3165-034-P1-K5-G10
caatctttcagaaagagagaggcaaatagaaaaaagagagagggtattacatataggcatctaattatacagggaaggatggctcttcacctttcctgggtttccgtttttggcgatctcggtactgaaatatatattcatatgcccttcttgtttgcgtattttaatattcactaacattacattatattgtttttaattaggcgtcattgtttcatttatggtcgccttttctcccatgccagcattttatcaaatctataagaagaaaacatcagaaggattccaatcattaccctatgtgatatcgctattcagtgccatgctttggatttactatgcacttcttaagaagaatgaaatgcatctaattatcatcaacattttctgctg

SEQ ID NO: 39026 - DNA, 396 bp, Gossypium hirsutum
  Clone ID: LIB3165-034-P1-K5-G12
atggcttcttctctcagtctttcaagccacacagtggcttcattattcccttctcacacttcaaagccgcagttgggactttctaaatccatcccaattctcaccaaatcatcacagtctcaatttcatggccttaaattctctcacccttcttctcttaaaattcctcgtttttccacttttaaaacctcgatttctgctaaggtgaataaaggtacagttcctccagcatttactttgaaagatcaagatgggaaaaatgtaagcctttcaaagtttaaagggaagcctgttgtggtttatttttaccctgctgatgaaacccctggttgcaccaaacaggcatgtgcttttagagattcttatgagaagtttaagaaagctggagctgaagtt

SEQ ID NO: 39027 - DNA, 398 bp, Gossypium hirsutum
  Clone ID: LIB3165-034-P1-K5-G2
ggcgagagtagtggaaatagaaaggaaaaatgagcttaaaacatcaccataactccaactgcgcagcagctgctcaagctgggtcttttgatgacattgccgacttcttctctcttccccttgacgacgccgcttccactcttggcgtttgcacctctgttctcaagaaaatctgccgtgaaaatggtctcgacagatggcctcaccgcaagtttttagctggaaagagcgtcgaagaaatcaagaggcatgcagctagagaaagaagaagggaaatcgctgagctttcaaaggctcatcggcagagctctcaacctcaaccccaaaacaatgaacaacccaaattacaaggtggctcagcattaccgaacttacagcagcaagggataagaaacata

SEQ ID NO: 39028 - DNA, 392 bp, Gossypium hirsutum
  Clone ID: LIB3165-034-P1-K5-G3
cagcagctgcaccacaactacagagaagagagtaaaggggaaaaaaagcgtcctcggttttgcttcttcttctactgggctgtctctccttctccgaagttcctctttcgttctttcatttattcagtattgtaaaagatggccgacggtgaggatattcaacccctcgtctgtgataatggaactggaatggtgaaggctggttttgctggtgatgatgctccaagggcagtttttcccagtattgttggtcgtccccggcacactggtgttatggttgggatgggtcagaaggatgcctatgtaggagatgaagcacaatctaaaagaggtatccttactttgaaatatcctattgagcatggtattgtgagcaactgggatgatatgga

SEQ ID NO: 39029 - DNA, 380 bp, Gossypium hirsutum
  Clone ID: LIB3165-034-P1-K5-G4
cttggaaattccaccttactatctctcacaattcaatcgactatggaatccattggagttctcatggcttgccccatgaacgcttacctcgagcaacaactcgagaaccgtttcaagctattcagattctggacagtgccggacaaatcatcctttctggcttctcacaaggactcaatccaggcggtcgtcggaaacgcctttgccggtgccgatgctatgctgatcgaggcgttgcccaagctggagattgttgccagcttcagtgtggggcttgataagatagatttggccaagtgtaaagaaaagggtatccgagttaccaacacccctgacgttttgactgaggacgtggcggatttggcgatcggtttgatgtt

SEQ ID NO: 39030 - DNA, 400 bp, Gossypium hirsutum
  Clone ID: LIB3165-034-P1-K5-G5
atacaggcagcaatgagaaggagcttattatatactccaagacagaattccggttgggacaccacgtcccaagactgccaggctcatctttcccgaatggaaagatcagccaccatgatccctggtgcccctcagtaccccgatgtccacaaggccttcaacaacaaggttgagtttccggaagaagatcagtgcactgagcggtccccaacggcaaactcccgaaagaaggttcaggtggttgagcatgcatagaccgttgatgaagccacccttgattctcaagctgatagctacatccagcaaaaacacaaagcctttgaactgtgcaaatggaagaccttcaaaatgcactagagttgagacttttggagtaagcatgtcgatcatgatttaatga

SEQ ID NO: 39031 - DNA, 392 bp, Gossypium hirsutum
  Clone ID: LIB3165-034-P1-K5-G6
cccacgcgtccgcccacgcgtccggataatggaaaatggaggcaaccatggaaaggatatgcttttggaccatcttggagatgacattgttgctgcttctgcaactatggagcaacacgaagaagcaccttctgcagaagaaatgcaagaaaggatggatcaattcacctacatcatgcagcagaagtttctctctggtgaagattatgagtatttagattactctaaaatagatgacgatgagaccttggatgatcactggcttagggaagctaaccatgatgcagaggagaagtattttgctgaagattaataacggaaaattacatccattgatctcccaacatttgcagatatctcttcgttatagcagtggttagtgattacctttt

SEQ ID NO: 39032 - DNA, 368 bp, Gossypium hirsutum
  Clone ID: LIB3165-034-P1-K5-G7
cccactcgtccgatggcacccatttcattacccaacaagccccatgcattatgcatgccctacccagcacaaggtcgcgtaaatcctatgctcaaagtggccaaactcctccatttcaaaggcttccacatcacttttgtcaacaccgagtacaaccacaaacgcttgctcaaatccaggggcccccacgccctcaatggcttgcctgacttccggttcgggacaatccccgacggcctttctccgccggacatcgacgccacgcaagacatccccgcgctttgtgactccactagcaagcattgtttggctccctttcgccgactccttgttgagctaaaagctacttccggtgtcccgccggtcac

SEQ ID NO: 39033 - DNA, 382 bp, Gossypium hirsutum
  Clone ID: LIB3165-034-P1-K5-G8
cccacgcgtccgggaatccattggagttctcatggcttgccccatgaactcttacgtcgaacaacaactcgagaacgcgtttcaagctattcagattctggacagtgccggacaaatcatcctttctggcttctcacaaggactcaatccaggcggtcgtcggaaacgcctttgccggtgccgatgctaagctgatcgaggcgttgcccaagttggagattgttgccagcttcagtgtggggcttgataagatagatttggccaagtgtaaagaaaagggtatccgagttaccaacacccctgacgttttgactgaggacgtggcggatttggcgatcggtttgatgttggcggtgttgaggaagctctgtgagagtgatcg

SEQ ID NO: 39034 - DNA, 310 bp, Gossypium hirsutum
  Clone ID: LIB3165-034-P1-K5-G9
gtgatgagtaatatcttgcctttgtgttcatcaagagtgctgcatcttcatcaggggaaatcaccttgtgcgtgacagggagcaagccatcagaccggtgaagttatcggtgtgttccagagccttcagtcatcttacactgactagtgtgccaagactgcaaaggatgtcatgatcactggtgtacggtatgctcatcttgagtcataaacatgtcttgtttgaatttgtttatcctcggctgttattctgtgatcttttaacacgtgttgctaaacttttcaacaattcactgagaaacccttatctt

SEQ ID NO: 39035 - DNA, 305 bp, Gossypium hirsutum
  Clone ID: LIB3165-034-P1-K5-H1
cccacgcgtccgctcgagatgggtgggccagcccgatccgacccaataaccttttatttgattcgggtgcgatcgactttgccggttcaggtgtggttcacatggttggtggcattgcagggttatggggtgcattaatcgagggtccaaggattggccgattcgatcgagctggtcgatctgtggcgttacgtgggcacagtgcctcattagtagtgctcgggacgtttctattgtggttcggatggtatgggttcaacccaggttcattcttgaccatcatgaaagggtatggtggtggtgga

SEQ ID NO: 39036 - DNA, 378 bp, Gossypium hirsutum
  Clone ID: LIB3165-034-P1-K5-H10
gccactcgtccgatttgattacacacaatcttccgtccatggcatcattcaacgatgcagacttttacagcgcggatgccacattctgaagtctgcctaatggaactactcacgttatgataaaaagcctgcctggccattctaagatcgcatatctatctgcagaccttgttttgaaatatattgcattgtatgatgaacgagctggttaaccacatagcgctttacatgtggactaagaatctgactctggctggactgaaacttcaagagaggactttaataatgcacgcgtagctgctaatactgactgtatacaacactaattgagagctcgttcgtgtgcttgatataagctgaactcattgaacacagaaa

SEQ ID NO: 39037 - DNA, 392 bp, Gossypium hirsutum
  Clone ID: LIB3165-034-P1-K5-H11
cccacgcgtccggtgagactcttttgtatacctgtagcatatagtaatagtaagcagtaatagcaatggcctcctgcatgatctcatcggcaaccattgccaccgtgaaccgctcctccccggcacaggccaacatggtggcccccttcaccggcctcaaatctgcctctgctttcccagtcaccaggaaggccaacaacgacatcacttctcttgcaagcaacggtgggagagtgcaatgcatgcaggtgtggccgcctcttgggaagaagaagttcgagactctctcatacctgcccgatcttactcccgtacagttggctaaagaagtagattaccttcttcgctctaaatggattccttgcttggaatccgaattagaggagggattc

SEQ ID NO: 39038 - DNA, 392 bp, Gossypium hirsutum
  Clone ID: LIB3165-034-P1-K5-H12
gctaccactgcttctccaatggcgactcagctgaagagcagctttacgtcgtctgttacaagaggactggtagtccccaggggcatttcgggatccccgttcaaagtatcttccggaaagaccaggaccccttgcttcactgtcaaagctgttcaatccgacaagtcaacatttcaagtaatccaacccatcaacggcgaccccttcattggaagcctggagactccaatcacctcaagccccttaattgcatggtacctttccaacctcccagcctataggacggcagtgaacccacttctgaggggaatcgaagtgggtctggctcacggcttcctcctggtgggtccattcgttaaggccggccctctaaggaacactgcggtggcggg

SEQ ID NO: 39039 - DNA, 397 bp, Gossypium hirsutum
  Clone ID: LIB3165-034-P1-K5-H2
cgaactcccctcccgtcctctttcccgatttgtcttcttcattgccccgccatggcttgtgttagcttcgctaaactcaacgcgccgtcatcctcttggatcggtggccagcagtctctccctcaacgctccggatcatccgctcggctcgccactcgcagagtctcactcccgatccgtgctggcgcttacaccgacgaactcatcaaaaccgccaaaactattgcttcacctggtcgtggaatactggcaattgatgaatcgaatgcaacatgtgggaagagattatcttctattggcttagacaatactgaacccaaccgccaggcttacagacagcttctgctcacaactcctggcctcggagaatatatttccggtgccattcttttcgagg

SEQ ID NO: 39040 - DNA, 337 bp, Gossypium hirsutum
  unsure (1)..(337): unsure at all n locations; Clone ID: LIB3165-034-P1-K5-H3
caaagtccaatcactcccaatactttcataacatttcacgaacttcactctccagtctccaatggcggctgccgtctccaccatcggtgctgtcaaccgagcaccgttgagtttgaatggatcaggtgccggagcttctgctccaagctcagctttcatggggaacagcttgaagaaagtgagcgctaggttcaacaacaacggcaaggctccagtgggaagtttcatgattgtggctgccaaagaaatcgacgaagacacacagaccgaccaggaccgatggaagggtcttgcttatgatatctncgatgaccaacaagacattaccagagggaaa

SEQ ID NO: 39041 - DNA, 397 bp, Gossypium hirsutum
  Clone ID: LIB3165-034-P1-K5-H4
ctcccatcacccgagatcatctttccccttcagaatggcggctgcaaccatggctctctcttccccatctttcgccggaaaggccgtcaagctctctccttccgcccctaaaatccaaggcaatggccgtgtttccatgaggaaaaccgctaccaaggctgctccctctggaagtccatggtacggtcctgaccgagtcttgtacttgggtccactatctggtgagcctccatcttacttgaccggagaattccctggtgactacggttgggacactgctggactctcggcggacccagagacatttgccaggaaccgtgagctcgaagtcatccactgtaggtgggctatgttgggtgctcttgggtgtgttttccctgagcctttggctaggaat

SEQ ID NO: 39042 - DNA, 139 bp, Gossypium hirsutum
  Clone ID: LIB3165-034-P1-K5-H5
aaaaaaaaaaaaaaaaaaaaaaaaaaataaaaataaaaaaaaaaaaaaaccaaaactaaaggggtttaaaaaaaaaaacggaagggaccacaaaacttatatccttaatgggccggccccccaaaaaaaccaacactaa

SEQ ID NO: 39043 - DNA, 420 bp, Gossypium hirsutum
  Clone ID: LIB3165-034-P1-K5-H6
cagtaccgatatgcgtggcgacccagaccgacccgtcacgcgtccgctgttttgtataactgtagcatatagtactagtaagcagtaatagcagtggcctcctccatgaggtgaggggcaaccattgccaccgtgaactgctcctccccggcacaggccaacatggtggcccccttcaccggcctcaagtctgcctctgctttcccagtcactaggaaggccaacaacgacatcacttctcttgcaagcaatggtgggagagtgcaatgcatgcaggtgtggcctcctcttgggaagaagaagttcgagacactctcatacctccccgatcttacacccgtacagttggctaaggaagtagattaccttcttcgctctaaatggattccttgcttggaattcgaattaaaggagggattc

SEQ ID NO: 39044 - DNA, 390 bp, Gossypium hirsutum
  unsure (1)..(390): unsure at all n locations; Clone ID: LIB3165-034-P1-K5-H7
ctttctttctcttttgtcaaaccctaaatccctcactccaactgcagattcacctccacaaacagcaaccaatacattcaagcttggagggatgactttttagccttgagatctcctttcggcttcaatttcaacgaagcaaaaagagatttatggcatattcgcaaggtaagactcctctttcttttttccttttattttcaaacgcaatgatggaagatttgaaggcaataaatcgcaaggaaatgcaaaaacttaaagaaatttaaacagaaatcaacttctaaaaattttgactgctttctttgtattcaatatgcgttcgtcctcttttacactgantttctcggccttttatagccgatttacaggataaatagaaaaaggaaa

SEQ ID NO: 39045 - DNA, 359 bp, Gossypium hirsutum
  Clone ID: LIB3165-034-P1-K5-H8
atttagctatagcatacactactagtacccactactagcaatggcttcctcaatgatctcatcggctaccattgccactgcctctccggcacaggctaacatggtcgctcctttcaccggcctcaagtctgcctctgctttcccagtcaccaggaaggccaacaacgacattacttctctcgcaagcaatggcggcagagtgcaatgcatgcaggtgtggcctcctactggaaagaagaagttcgagactctctcatacctccccgatcttacacccgtgcagttggctaaggaagtggattaccttcttcgctcaaaatgggtttccttgcttggaattcgaattagaggagggattc

SEQ ID NO: 39046 - DNA, 415 bp, Gossypium hirsutum
  Clone ID: LIB3165-034-P1-K6-A1
gggcgccacgcgtccgcttagtttcctcttagcaaagactttagccacccacgcagcccctttaccgatgcaaacaatgggacgcgtccgtgcgaagactgtgaagaaatcgtctcgtcaggtaatcgagaggtactactctcgcatgacgcttgatttccacaccaacaaaaaggttatcgaagaagtagctattatcccatccaagaggctccggaacaagattgctgggttctcaacccatttgatgaaacggatccagaagggtccggttcgtggcatttctctgaagcttcaggaagaagagcgtgagcgtcgtatggattttgtccccgatgtatcggctattgctgttgattcaatagaagttgataaggaaaccattgatatgctttcacttcttggaatggccgat

SEQ ID NO: 39047 - DNA, 307 bp, Gossypium hirsutum
  Clone ID: LIB3165-034-P1-K6-A10
ccggaaggattgatggtttaattacttatttaatcagtcaattatgataacgagtgagcacggattgatgaatgttccattaggttttatatatgtatctaatgtgtatgtattatgtgtactactatgcttcactaggagtaaaggcaaatctggtgtgaaactaagtcaattatgatgactagtgagcatggatattgatgaatgttccattagtttttatatataatatctatatgtattctatatatttctctgcttcactgggaataaaggcaaatctggtattgaacaaaatattatgaat

SEQ ID NO: 39048 - DNA, 583 bp, Gossypium hirsutum
  unsure (1)..(583): unsure at all n locations; Clone ID: LIB3165-034-P1-K6-A11
ggaatnncccgggtgcgaccccacgccgnntccgtttanngctatagcataccccactacttagtatctccactannctagcaatgnnngcttcctgcaatganntctcattggcgtagccatgtgcgcaccctcgcctctnnccggcacccaggctaaccccatggtcnnngctccttttcaacgcggccctncnnaagtcnntgcctnctngnnctttcctnncagtcacccangnngaaggcnncaacccaacgacccattatccttctcnnntcgcaagggcaatgnnngcggcanngagtgcannnatgctatgccagngnntgtggccccctcctaccctcggaaacgannagaagnnttcgaggacctnnctctcnnatacctccnnnccgatcttaccacnnccgtgcccagttggcttaagcggaagggtggattactcnnttcttcgctttcaaannatgggttcccttcggcttggganaattcgannattagaagggagggggattccgtggccaccccgtaanatacccctcgagcnctacnctcacgtaccctacganntggacgctac

SEQ ID NO: 39049 - DNA, 404 bp, Gossypium hirsutum
  unsure (1)..(404): unsure at all n locations; Clone ID: LIB3165-034-P1-K6-A2
tagtttcctcttagcaaagactttagtttcccacgcagcccctttaccnatggaaagaattttacgcgtgcggacgaggactgtgaataaatcgtctcgtcaggtaatcgagaggtactactctcgcatgacgcttgatttccacaccaacaaaaaggttatcgaagaagtagctattatcccatccaagaggctccggaacaagattgctgggttctcaacccatttgatgaaacggatccagaagggtccggttcgtggcatttctctgaagcttcaggaagaagagcgtgagcgtcgtatggattttgtccccaacgtatcggctattgctgttgattcaatagaagttgataaggaaaccattgatatgctttcacttcttggaatggccgatcttcctg

SEQ ID NO: 39050 - DNA, 406 bp, Gossypium hirsutum
  Clone ID: LIB3165-034-P1-K6-A3
gcctgttagtgtggcatttgaagttgtcactagtttccgtttttacaaaagtggggtgtataccagtaaaacatgtggcagcacacccatggatgtgaaccacgctgttcttgcagttgggtatggagtcgaaaatggcgttccatattggctcattaagaactcatggggtgcagaatggggtgacaatggctacttcaagatggagatgggcaaaaacatgtgcggtgtggcaacttgtgcatcatacccaattgttgcttgatccaatcgatgaaccgttttggatcatgtcatttctgtgttatagaaggcttctagttatggtctacaaatgttgttgtagttgttcggggttatggtctagttgaaaccgatgggttcatgtacaataaggatccaaaga

SEQ ID NO: 39051 - DNA, 407 bp, Gossypium hirsutum
  Clone ID: LIB3165-034-P1-K6-A4
agcaaaaccatggccctctgcttctttcctcaagacttcaccagttttagacaagtctgagtgggttaagggtcacacccttcgccaaccttccacttctgtggtgaggtgccaccctgttgcaccctccggactaactgtgcgtgcaagctcatatgccgatgagcttgtcaagactgctaaagctattgcttctcctggccgtggaattttggccatggatgagtccaacgctacctgtgggaaacgtttggcctcaatcgggctagaaaacacggaggctaaccgccaagcctacaggacgttgcttgtttcagctcctggccttggtcagtacatctcaggtgccatcctctttgaggaaaccctctatcaaaccacaattgatggcaagaagatggttgatg

SEQ ID NO: 39052 - DNA, 394 bp, Gossypium hirsutum
  Clone ID: LIB3165-034-P1-K6-A6
gtcagtacattctcacagtgccatgcctcttttgaggaaaccctctatcaaaccacaattgatggcaagaagatggttgatgttcttgttgagcaaaacatagtccctggtatcaaggttgacaagggtcttgttccactggctggttcaaacaacgagtcatggtgccaaggtcttgatggcctcgctccacgttcagctgcatactaccaacaaggagctcgttttgcaaaatggcgtactgtggtaagcattcccaatggaccaaccgaacttgctgtgaacgaagcagcctggggacttgctcgctatgccgccatctctcaggacaatggattggttccaattgttgagccagagatcttgcttgatggtgatcacggaattgacagga

SEQ ID NO: 39053 - DNA, 406 bp, Gossypium hirsutum
  Clone ID: LIB3165-034-P1-K6-A7
gtcgacggcttctatcaacggttgttgccttacctcctcttcttccaccactacgacctcctctttttccgctcgtcgacgacctacattgcggccttcagtcgtcgctagccttaactcttctccttctcctccgactcttatccaagaccgcccggtttttgctgcccctattcctttgctcaccccgagagaagagatgggaaacaagtcctacgacgaagccattgaagctctcaagaaacttctcagtgagaaaggagaactgaaagctgaagcagctgcaagggtagatcaaataacagcagagttaaacacagcatcagctgatggcaaaccatctgactcttctgttgagagactgaaagaaggcttcgtttacttcaagaaagaaaaatatgaaaag

SEQ ID NO: 39054 - DNA, 384 bp, Gossypium hirsutum
  Clone ID: LIB3165-034-P1-K6-A8
gagtacttgaacggagaagttcccttagactatggatacgatccgtttggtctgagcaagaagccagaagactttgcaaaatatcaagcatatgagttgatacacgcaaggtgggcaatgcttggtgctgcagggttcatcatacctgaagcctttaacaaatttggtgccaactgtggccccgaagccgtttggttcaagaccggagctcttctcttggacggtaacaccttgaactacttcgggaagaacatccccatcaaccttgtggtggctgtcgttgccgaagtcgtacttgttggtggtgctgaatattacagaatcatcaatggcttggatctggaagacaagcttcaccctgggggaccatgtgacccactgggg

SEQ ID NO: 39055 - DNA, 396 bp, Gossypium hirsutum
  Clone ID: LIB3165-034-P1-K6-A9
cccacgcgtccgacttttaacccctgccgacactctcaccattttctcagcaagcttagcctatgaaaatcaccattacaagtcccaaagaagacccccgctaattctaaaagaaagaaccagagttttctttctctttagtttacgtttattgtccttttggaatttttgatactaaaaaaaggaagcaacgaagaagggaaatggagggcaaagaagaggatgttagattgggagccaacaagttcacagagaggcaaccaattgggaccgcggctcagagtcaagatgacgggaaagactacactgaaccaccaccggctccatttttcgagcctggcgagttaacctcatggtctttttatagggctgggattgccgagtttgtggcgactt

SEQ ID NO: 39056 - DNA, 409 bp, Gossypium hirsutum
  Clone ID: LIB3165-034-P1-K6-B1
ttcgctttgagattagatccaaaattcctttttcatcatatttccgattccccaattgttcctgaaaccctaatcctaatcccggattcttctcgtctacatcgtctagcaaatggcaaccgaggagccggcagtcgtggcagaccccgcaccggagacggaggaggacaagactgctgagaccaaagctacttcaaaatctggcagagcaaagaaaaccaaagaacccaaaaccaagaaagctgcagctcctcggaaaccacgggctgctcctactcatccaccttacgaagagatgatcaaagatgcgatcgttactttgaaagagaggacaggttcaagtcagtacgccattgctaagttcattgaagagaaacagaagaatcttcctgggaatttcaagaagctt

SEQ ID NO: 39057 - DNA, 370 bp, Gossypium hirsutum
  unsure (1)..(370): unsure at all n locations; Clone ID: LIB3165-034-P1-K6-B10
ggaccttcaatttttcatcggagagagcatgcacgatgatggatgtttggtatttgcttactacaaggatggtgctgttgacccgacatttttgtactttgcgtatgcattgaaggaggtcaagtgctgaggtttgaagcaaagaaaaaaaaagtggttgctgaagaatttagtcctttttattattgcttttgtctcttattttcagtactctgctaaagacataaattatttatggtttttgatgtttttgatttaattgtttgttgttttatcatggaatggtttctatttttatgggttgactaaacaagaatntaactctttgttctattactacttaattttattggaaggaggtttttgggac

SEQ ID NO: 39058 - DNA, 375 bp, Gossypium hirsutum
  Clone ID: LIB3165-034-P1-K6-B11
ctcagctcagctcaactcaactcacttaaatcttttctgctgcggtggcgaggggggcggcgatgttgtcggagttggcgacggagatcgtggtgccagtgtgcgccgtgattggaatagctttctcgttggtgcagtgggtgatggtgtcgcgcgtgaagcttacctccgagcgccatgcgtcgtcggcgaatagtagcaagaatggttacggtgattacttgattgaggaagaggaaggaatcaatgaccatagcgttgtcaccaagtgcgctgatattcaaaacgctatctctgaaggtgcaacatcctttctttttactgaatatcagtatgttggcatcttcatgattgctttcgctatcctgatttttc

SEQ ID NO: 39059 - DNA, 405 bp, Gossypium hirsutum
  Clone ID: LIB3165-034-P1-K6-B12
caaaaactgggatggcttttgtaacttcggaggaattgctggccactttggtgccaattgctgtttattggatatactcaggtatgtatgtgatgtttgagtcaaggtttgagaagtacaagttgcactccaagaaagaagaggaggagaagaatttggtttccagaaaggaagtcttcaaagccgttctttgccatcaagtcatgtcaattgctattaacctcttcacgtatgcggtaacaagagaaaaagatggtgaggcatctccaaagaaatcactaaccttgcttcttctagccaagcaattggtgatagcaatggtggtgatagatacatggtcgttttttgtgcattggtacttgcatcagaacaagtttttatacaaacaccttcatgttccgcatc

SEQ ID NO: 39060 - DNA, 372 bp, Gossypium hirsutum
  Clone ID: LIB3165-034-P1-K6-B2
gattatcgtgcagaacttagcataatactgtccctcataacattcttcgactcgctttattgattagcccaaagattaacataaccaaaaagaaaaatggcttgtgcttccgctactgttctcaagactttacctatgattgacacgaccgagtggatgaaggggcggaacctgcgccaccctccgggtcgtcttgtacggtgacacgctccatcagacgcctttaccgcccgcgctagtggatatgccgatgagcttgccaagaccgtggaaacggccgcatctacaggtggaggtatttgggccagggatgaatcaaatgctgcatgtggggagcggcttgcctcgattggtctctagaataccgaggcg

SEQ ID NO: 39061 - DNA, 380 bp, Gossypium hirsutum
  Clone ID: LIB3165-034-P1-K6-B3
cccacgcgtccgcccacgcgtccgctttgccaaacatggagactagtgtcacgtgctgcgctcgtgggattgtgcttcctggtgtctcttctaagcactcctcggcattagtctcccctccatccatatctccttccttcagctctaagagccttaaaacaagttcactatttggagaatcattaagggttgttccaaggtcatcattgaaggtttcaaaggcaaagaacactacttcactagtgacaaaatgtgaaattggagagtctttggaagagtttcttacaaaggcaacaacagataaggcattgattagaataatgatgtgtatgggtgaagcattaagaacaattgcttttaaagttagaacagcttcatgt

SEQ ID NO: 39062 - DNA, 396 bp, Gossypium hirsutum
  Clone ID: LIB3165-034-P1-K6-B5
tgaaaaaaaaaaataagacatgtatttggatatttcctttcaactacaacaatagtctagtatttatttgatatgacatgaatagttgaagggaattccccgaagagaaaatggattatgggagtaacaaaaaaacctgacttgaacgatcctgtattaagagctaaattagctaaaggtatgggtcataattattatggggaacccgcatggcccaatgatcttttatatatttttccagtagtaattctcggtactattgcttgcaacgtgcgcttagcggttctagaaccttcaatgattggggaacccgcggatccatttgcaactcctttggaaatattacctgaatgggatttctttcctgtatttcaaatacttagtacagtacctaac

SEQ ID NO: 39063 - DNA, 401 bp, Gossypium hirsutum
  Clone ID: LIB3165-034-P1-K6-B6
ggggaatctatatgagtgccaaggttgctttttgcatccacaatatagcctatcaagggagatttgcctttgaagattactcacttctcaatttgcctgatcaattcaagagttcatttgacttcatggatgggtatgataagcctgtcaagggaaggaaaatcaattggatgaaggctggaattttggaatcacacagggtattgactgtaagtccatactatgcccaggagcttgtttccggtgaagataaaggtgttgaactcgatcacatcattcgtaaaaccggcatcactggaattgtgaatggcatggatgttcaagaatggaaccctaccactgacaaatacatcagtgtcaaatatgatgcaacaactgttacgtatgcaaagcgattatta

SEQ ID NO: 39064 - DNA, 391 bp, Gossypium hirsutum
  Clone ID: LIB3165-034-P1-K6-B8
atcatgtatatgggcatggcatcttatagcaggtatgttcaccttcacaatgaccaccctaaaatttttggccgcatggaaaccagcctgataactttcctttgctacctgtaccaagtccctcaacttcttcgtggctcaaagaaccattagagctgcagctgctggtgaggaagcattatgtgctgccgtcacaaaggaagctccggttggtttcacccctccagaattggacctcaacaccccatcacccatcttcggaggaagcactggaggactgcttagaaaggcttaagtcgaagaattctacgtcatcacatgggattcactcaaagcacaaatatttgagatgccgactggtggggcggccatcatgaggcaaggacctaac

SEQ ID NO: 39065 - DNA, 402 bp, Gossypium hirsutum
  Clone ID: LIB3165-034-P1-K6-B9
cacgttcttgtttttttcacttctttctctttctcgaaaaccggtcacctgaggctcaaacgcctctctgaatcctcgccggaacctgtcaatctcttacatctccggcggctgtctcacggatctgttcacgatgagcaccggccaacttctcagcatcgagcctcaagagctccagttcccatttgaattgagaaagcagatctcgtgttccctaaacttgtccaacaagaccgacaattatgtggcttttaaggtcaaaacgacaaatccaaagaagtactgtgtaaggccaaatactggagttgtgctgcctaggtctacgtgcaacgttgttgttacaatgcaagctcaaaaggaagcacctactgatatgcaatgcaaagataagtttttacttca

SEQ ID NO: 39066 - DNA, 405 bp, Gossypium hirsutum
  Clone ID: LIB3165-034-P1-K6-C1
ctctaactccaagtccgacgccccaattcggtccccgaaatacccacacacactatcgactcgtcatgcaaacgctactgctcccggctactcgctccggtatatgtgcggtggcggcgggtcccctccgaccaccgctcactctctctcctccaaattttctcacttcaatcaaaactcggaaccaaaacctccgttgtcccctttcgcatcctacgaccctcttaatgttctaagatctacgcttttttcgcccaaagtctcttcgtcctcagtttcacccagttttacctcctgtaatgatgatactgacaaggcgaagcttgctcaggtttcgaagaggctagagaacacgtcgaggtactttaagcgaatgggcaatttagggttttggggacagttagt

SEQ ID NO: 39067 - DNA, 408 bp, Gossypium hirsutum
  Clone ID: LIB3165-034-P1-K6-C10
cttcagttcttcacttccccagtctccagcaatgggagaaaccgattctttcttctcgaacaaatcagcgaagatcttcgtagcaggccatcgaggcctagttggttctgccatagttcgtaaacttcagtccctaggctttaccaacctcctactccgcacccatgccgatctggaccttactcgccaatccgacgtcgaatccttcttcgccgatgagaaacctcactatgtcgtactagctgccgctaaagttggtgggatccacgccaacaacacttaccctgccgatttcattgccatcaacctccaaatccagaccaacgtcatcgattcctcttaccgccacggcgttaagaaaatcctcttcctcggttcctctcgtatttatccccaaattgcgccgca

SEQ ID NO: 39068 - DNA, 403 bp, Gossypium hirsutum
  Clone ID: LIB3165-034-P1-K6-C11
cccacgcgtccgcccacgcgtccgtccacgcgtccggtccgtctctctgttttactccacaaccactatcactaccattatggcttcggctactgtttctgtagccaaacccaaccttcagattcaggcaaaaggaaagggtgttggttttgcagatttctcaggcctacacaactcctctactagccttccctttgccaggaaaacctctgatgacttccattcactcgttgcttttcagacatctgctctaggaagcaataatggcgggtacaggaaagggatggcagaggcaaagctaaaggtggctataaatgggtttggtaggattggcaggaatttcttaagatgctggcatgggccgtaggactccccacttgatgtcattgccatcaatgacact

SEQ ID NO: 39069 - DNA, 334 bp, Gossypium hirsutum
  Clone ID: LIB3165-034-P1-K6-C12
cggacgcgtggggcacatatttctatttcccactctcttttttgctctcagttaacaacaaaatccgtaaatggctaccactgcttctccaatggcgactcagctgaagagcagctttacgtcgtctgttacaagaggactggtagtccccaggggcatttcgggatccccgttcaaagtatcttccggaaagaccaggaccccttgcttcactgtcaaagctgttcaatccgacaagtcaacatttcaagtaatccaacccatcaacggcgaccccttcattggaagcctggagactccaatcacctcaagccccttaattgcatggtacctt

SEQ ID NO: 39070 - DNA, 404 bp, Gossypium hirsutum; identical to SEQ ID NO: 38642
  Clone ID: LIB3165-034-P1-K6-C2

SEQ ID NO: 39071 - DNA, 406 bp, Gossypium hirsutum
  Clone ID: LIB3165-034-P1-K6-C3
cttttaaccaaacactccacaaaattttctcgaaaaaaaaaaaaaaaatgaggaagtgtgaactatgtggaaggctagctcgaatgcactgtgaatcagatcaagcaaatttatgttgggactgtgatttcaaggttcatggagccaatttcctcgtagctaagcataatcgaaccctcctttgccatgtttgtcaaagtcctactccttggctcgcatctggtcggaatctcggctccgcggtttctgtttgtgattcatgcgttgtaaacggcaacaataagtgtgagtcatcggagagagagtatggtgaagaggaggaggaagaagaggaggagggagattatgataatgacgccgtggaagaatcgggggaggaagaggaggccgagattgaagatgctta

SEQ ID NO: 39072 - DNA, 408 bp, Gossypium hirsutum
  Clone ID: LIB3165-034-P1-K6-C4
cccacgcgtccggcacatacaaagctaccatggctaattttcaaatgaaaaaagttcaacaatgcacacacggcaagctgtggaactcttccagcgaagctctaaccttgaccgacaagaaagtttggcaaggctctcattatgcggatttcccagaaataattgaagatggggatgcgagtgagtttacacatgaatcagtgactgatgatgctgatattcatggttcagttgctggtcttgtgtacaggcgacgtgacggaactaagtggattgttgcctggagcaacccacaagctgagaacagcaaggtctatactgatatccagagacaacctgttcactgggggcaaatcaaaaccaaccttgagaaaagaggaaaaccaaaatttaaagttacaaagtttg

SEQ ID NO: 39073 - DNA, 407 bp, Gossypium hirsutum
  Clone ID: LIB3165-034-P1-K6-C5
gcggttttcatttcccattcgcaagtagccagccgtttcacacactcaagaagagcgagagctcgtaaatcatggcggaacagaccgaaaaagcttttttgaagcaacccacagtgtttttgagctcgaagaaaggtgggaaagggaagaggccaggaaagggtgggaatcggttttcgaaaaagctttgaattgggcttaaggattcccgtggaggttttggaaggacctaccttggttaggaatgcccctttactggcactgctttaattcggggtcgtattttaaccggcacttgccacagagccaagatggttacgacaatcattggtcgacggaactaccttcattatatcaagaaatacccaaggtatgagaagcgccattcaaacatacgcgcacatatt

SEQ ID NO: 39074 - DNA, 248 bp, Gossypium hirsutum
  Clone ID: LIB3165-034-P1-K6-C6
accgcacgtacatttctatgtgaactatagttgcacatggcttactccattctaataaacggcggaagtctagtccgaagcacataacaaaacgagcttctgaagggcatcaatgtgaaatttctgtgcaagaacgctgaggatgagctcaacttaaatgagtacgcgaacaaagtcagccccactaccgaagtggcatctattcatgctaaagctctgcataggcttgaaaatgttaaaaccaaggt

SEQ ID NO: 39075 - DNA, 402 bp, Gossypium hirsutum
  Clone ID: LIB3165-034-P1-K6-C7
cccacgcgtccggatccacggcgatgatctatggccatgttttggtttttgatgtgtttcaggtgccttggacactccaatgctgaagttgttccacatgaagttttcaataagttacctttacttaggtatttcatctatacccccacgtatcatagtcttcaccacacagagatggagaccaatttttgtctgttcatgccgctgtttgatgcactggggagtacacttaacaccaaatcattggagctacataagaaaattacctcaaattctggaaaaaacgggagggtaccggattttgtgttcctagcacatgtggtggacataatgtcggcaatgcatacaccgtttgcgttaagatcatttgcgtcgaccccatttcgcatgaggatgtttctg

SEQ ID NO: 39076 - DNA, 399 bp, Gossypium hirsutum
  Clone ID: LIB3165-034-P1-K6-C9
cccacgcgtccgagcatacactactagtacccactactagcaatggcttcctcaatgatctcatcggctaccattgccactgcctctccggcacaggctaacatggtcacccctttcaccggcctcaagtctgcctctgctttcccagtcaccaggaaggccaacaacgacattacttctctcgcaagcaatggcggcagagtgcaatgcatgcaggtgtggcctcctactggaaagaagaagttcgagactctctcataccttcccgatcttacacccgtgcagttggctaaggaagtagattaccttcttcgctcaaaatgggttccttgcttggagttcgaattggaggagggattcgtgcaccgtaagtactcgagcttacccacgtactacgat

SEQ ID NO: 39077 - DNA, 406 bp, Gossypium hirsutum
  Clone ID: LIB3165-034-P1-K6-D1
cccacgcgtccgtacggagcttgtgttcatattcagattcttcttcttcttcttcttcttcttcatcaaagtgggtttatgcagtgttttggaggatactgcctcgaaattatccaccaccaaagtgggattatggagggagtgcacttgatcgttccaaaggaaacaaaagaaactggattcttgtatgggaagatgggttttgtgatttccatgaatgtgagcgtgctggaagtggttatgtaaagggaaggtttggagctgatattttcttcaaaatgtcacatgaagtttataactatggagaaggattagtagggaaaattgcagcagataacagtcacaaatgggtgcataaagaaatcccaaatgaaaatgatccaagcttcatctcctcctggaatat

SEQ ID NO: 39078 - DNA, 214 bp, Gossypium hirsutum
  Clone ID: LIB3165-034-P1-K6-D10
gctcatccgagcaaaggccatctttcttgctcaactcggaaagtacactggcgggggatagtcagaggagggcgggcaaggaatgtttgtcaagggttatgtctattagcatgtttgtatcttcaacaggtcaatgaatttcctgcactgaaaatttaattgaaagagcagaacactgatctttcattaaaaaaaattaatacacattaaatac

SEQ ID NO: 39079 - DNA, 408 bp, Gossypium hirsutum
  Clone ID: LIB3165-034-P1-K6-D11
cccacgcgtccgcccacgcgtccgatggcctctgcttctctcctcaagacttcgccagttttagacaagggtgagtgggttaagggtcacacccttcgccaaccttccacttctgtggtgaggtgccaccctgttgcaccctccggactaactgtgcgtgcaagctcatatgccgatgagcttgtcaagactgctaaagctattgcttctcctggccgtggaattttggccatggatgagtccaacgctacctgtgggaaacgtttggcctcaatcgggctagaaaacacggaggctaaccgccaagcctacaggacgttgcttgtttcagctcctggccttggtcagtacatctcaagtgccatcctctttgaggaaaccctctatcaaaccacaattgatggcaag

SEQ ID NO: 39080 - DNA, 400 bp, Gossypium hirsutum
  Clone ID: LIB3165-034-P1-K6-D12
atcggctaccattgccactgcctctccggcacaggctaacatggtcgctccttgcaccggcctcaaggctgcctgtgctttcccagtcaccaggaaggccaacaacgacattacttctctcgcaagcaatggcggcagagtgcaatgcatgcaggtgtggcctcctactggaaagaagaagttcgagactctctcatacctccccgatcttacacccgtgcagttggctaaggaagtggattaccttcttcgctcaaaatgggttccttgcttggaattcgaattagaggagggattcgtgcaccgtaaatactcgagcctacccacgtactacgatggacgctactggaccatgtggaagctgcctatgttcgggtgcaccgactcggctcaggtattg

SEQ ID NO: 39081 - DNA, 372 bp, Gossypium hirsutum
  unsure (1)..(372): unsure at all n locations; Clone ID: LIB3165-034-P1-K6-D2
ggcatctnctttcccctattctgcctccactgtcctatttcgctgcctaacctaaacgagagcaatggcttgccggccgcccatcaccactttcgcagccggcctcctactcttcctccacaccccactcgccacgtgatgccgcctcaaccttactggcgactgcctttcaccctacgaagtcctccaaggctacaacttccccggtgggcttcttccacaaggcgtcttaaagtacgatttagatgaatccaccggtcgggtccatgcctacttagagggttcgtgtagcttctcactggaagggtcttatcaactcaaatacaaatgcacgatcagcgggatcatctgcaacaacaggctcaaaaacct

SEQ ID NO: 39082 - DNA, 336 bp, Gossypium hirsutum
  Clone ID: LIB3165-034-P1-K6-D3
accacgcatccgtacggagcttgtgttcatattcacatactccttcttttcatgcttgttcttcatgacagtgggtcgatgcagtgatatggaggatactgactcgaaattatccaccaccaaagcgggattatggagggagtgcacttgatcgttccaaaggcaacaaaccaaactgtattcttctatgggacgatggctcctgagattttcatgaatgggagcgtgctggaagacggtatctaaccggacgggttggggctactatctgcttccaagcgtcacatgaaggatattactatcgagaacgattattagagtaaatttgaggagata

SEQ ID NO: 39083 - DNA, 411 bp, Gossypium hirsutum
  Clone ID: LIB3165-034-P1-K6-D4
attctctttcactgcaaactgtgagcgagtgagagagatggcttgctcagctacttcatcggccgcggctctcatctcctctaagccaagggctttctcctccaattccaagcccttctcccaatccctttctctccccaatcccttcactggtctccctgcccctctcctttctcgtcccgcctccttttccctctcccgcgcctccccttctcgcaagtctttcgtcgtcaaagccaccagtgagcttccactggtgggaaatcctgcccctgattttgaggctgaggccgtctttgaccaggagttcattaaggtcaagctctctgaatacattgggaagaaatatgtgattctcttcttttacccgttggacttcacatttgtttgccccacagagattactgcttt

SEQ ID NO: 39084 - DNA, 412 bp, Gossypium hirsutum
  Clone ID: LIB3165-034-P1-K6-D5
cttttgtataactgtagcatatagtactagtaagcagtaatagcaatggcctcgtcgatgatctcatcggcagcgcattgccaccgtgaactgctccttcccggcacaggccaacatggtggcccccttcaccggcctcaagtctgcctctgctttcccaggcactaggaaggccaacaacgacatcacttctcttgcaagcaatggtgggagagtgcaatgcatgcaggtgtggcctcctcttgggaagaagaagttcgagacactctcatacctgcccgatcttacacccgtacagttggctaaggaagtagattaccttcttcgctctaaatggattccttgcttggaattcgaattagaggagggattcgtgcaccgtaagtactcgagcttacccacgtactacgat

SEQ ID NO: 39085 - DNA, 400 bp, Gossypium hirsutum
  Clone ID: LIB3165-034-P1-K6-D6
cccacgcgtacgtccacgcgttcgtctttctccccacccttaaaccatgtctgcttgggttggcaagtatgcaggtgaactcccgtttaggaatttggctttcactgtcttctcctgcatgttttattccattgtatttggggacatgcatgtaaatccttaatgaccacaacacttgatcgatccgtaccataaatggtcaaattttcattacagatatgctattttatgcataattttgttagtcctagctttgactaaaccctgtatgtatattttcccccacaggagttgatcaagaacgccaactacatcgccacgccaggcaaaggtattttggctgcggacgagagcacaggcaccatcgggaagcgtctctcgagcatcaacgtcgagaaca

SEQ ID NO: 39086 - DNA, 402 bp, Gossypium hirsutum
  Clone ID: LIB3165-034-P1-K6-D7
cccacgcgtccgctcagactactctttcgaaccagctccaccatcacccccaaaaaacaaagcaaattgtagaagatggcaacacaagcacttgtatcatcgtctcttacctactcagtggagactgcaaggcagattcttggagctaaacgacaaattgggtcttcaaggaaaggatcctttgttgttaaggcagcttcgactccacccgttaagcaaggagctgatagacctttatggtttgcatctaaacaaagcctttcatacttggatggcagccttccaggtgattatggatttgaccccttgggactctcagaccctgaaggtccaggagggttcatcgagcctaaatggctagcctacggtgagatcatcaacgggcgttatgctatgttgggt

SEQ ID NO: 39087 - DNA, 395 bp, Gossypium hirsutum
  Clone ID: LIB3165-034-P1-K6-D8
cccaactccaacaaaacatcaatggcggcagctaagccattgccgtcatctctggacactcaccaaatgcggtggtcatgcaaccaaattttaccttcgctcctccatttccgtcaacattacagcaacccgaaatgccaacaaccacaaaggcgaagaaaacactcaagctccttagatggcgcctacgacttggctatcaaagcttacatggaaaacccaaactccatctctggtttcgcaaacaaagtcattggctctctccctatagtcggccttgtcgctaggatttttagtgatgaacgcggtgttggtggggatatcattgattttgctgagtttagaagaagggtgggcaagaaatgtactgttactgattctagagccttttacga

SEQ ID NO: 39088 - DNA, 395 bp, Gossypium hirsutum
  Clone ID: LIB3165-034-P1-K6-D9
caacaacgacattacttctctcgcatgcaatggcggcagagtgcaatgcatgcgggtgtggcctcctactgggaggaagaagttcgagactctctcatacctccccgatcttacacccgtgcagttggctaaggaagtagattaccttcttcgctcaaaatgggttccttgcttggaattcgaattagaggagggattcgtgcaccgtaaatactcgagcctacccacgtactacgatggacgctactggaccatgtggaagctgcctatgttcgggtgcaccgactcggctcaggtattgaaggagcttgaggaatgcaagaaggaataccccaatgcattcattagaatcattggcttcgacaacgtgcgtcaagtgcagtgcattagtttca

SEQ ID NO: 39089 - DNA, 410 bp, Gossypium hirsutum
  Clone ID: LIB3165-034-P1-K6-E1
cccacgcgtccggaccttcattcgaccaatggttgaaaatctttaaatgataacatcggccttttgcccaccactatcaaatttccagattttccaggaaaaagaaaatcaaaacccccaggtgaagaaggtgaaaaccagcagcggcaaaggcaataaaaggtgaagccaaagagagagagatatatacataataaaaaagacttttcaaaagaacacaactatggctcctcatagagaaggatcagatgcttcagtggaagccatggttgctcaagtcgaaaaacacccaatttcatcgatccttatcatcattgctatgcaaacagaagctttgccggtggtgaataagtttcagttgattgaaaaccctcattcttcgtttccaaaaggggtcccttggatccatt

SEQ ID NO: 39090 - DNA, 398 bp, Gossypium hirsutum
  Clone ID: LIB3165-034-P1-K6-E10
gtttcctttctcgattttctatttagccaaacaagatgcagatcttcggtaagactctaaccggcaagacgatcactctcgaggtcgagagctccgatacgatcgacaacgtgaaggccaaaatccaagataaggaaggcatccctccagaccagcagcgtctgatcttcgccggaaaacagctcgaagacggccggaccttggccgattacaacatccaaaaggagtcaactctccacctcgtcctccgtctgcgcggtgggatgcaaatcttcgtgaaaaccttgactggcaagacaatcactctcgaggtcgagagctccgacacgatcgacaacgttaaagcgaagatccaagacaaggaaggcatcctcccagaccagcaacgtctcatcttt

SEQ ID NO: 39091 - DNA, 388 bp, Gossypium hirsutum
  Clone ID: LIB3165-034-P1-K6-E11
caacattgaagagataagattatggtgaaaaactaaacataataaagtccctcataacattcttcgacttgcttcattgattagcccaaagataaacataaccaaaaagaaaaatggcttctgcttccgctactctcctcaagtcttcacctattatcgacaagtccgagtggattaagggccaaaacctccgccacccttcggtttgttttgtacggtcacaccctacatcggccgcctttaccgtccgtgctagttcatatgccgatgagcttgttaagaccgcgaaaactgctgcatctccaggtcgtggtattttggccatggatgaatcaaatgctacatgtgggaagcggcttgcctcgattggtctcgagaataccgaggc

SEQ ID NO: 39092 - DNA, 384 bp, Gossypium hirsutum
  Clone ID: LIB3165-034-P1-K6-E12
ggaacccaaggacagaagactcttttaacatttcaccgcaaagatggagataacaaatgtgagcgagtatcaagaaattgcgaagcaaaagttgccaaagatggtgtatgactactacgcatctggtgctgaggaccaatggacattgcaagagaatagatttgctttcactaagatactgtttcgtcctcgtattctcatcgatgtaagcaagatagacatgaccacaactgtgttgggtttcaagatatcaatgcctatcatgattgccccaactgccatgcaaaaaatggctcatcctgaaggggagtatgcaacagctagggctgcatctgctgcgtgaactatcatgacattatcctcatgggcaacttctagtgttga

SEQ ID NO: 39093 - DNA, 403 bp, Gossypium hirsutum
  Clone ID: LIB3165-034-P1-K6-E2
aaggacagggctactcctaaacaagttgttgattacaccctcagcctcctccgccaaagaatccctccagctgtccctggaatcatgtttttgtctggtgggcagtctgaagttgaggctaccttgaacttgaatgcaatgaaccaagctccaaacccatggtatgtgtcattctcatatgcaagagcccttcaaaacacttgcctgaagaagtggggaggcaggcctgagaatgtgaaggatgctcaggaagcgctgctcatccgagcaaaggccaactctcttgctcaactcggaaagtacactggcgaatgagagtcagaggaggccaagcaaggaatgtttgtcaagggctatgtctattagcatgtttgtatctttaacaggtcaatgaatttcctgc

SEQ ID NO: 39094 - DNA, 406 bp, Gossypium hirsutum
  Clone ID: LIB3165-034-P1-K6-E3
cccacgcgccgcttattgatgggttaaagagagtagctgtttgcaacccagtcatgctattggacgagattgacaagacaggttctgatgtgcgtggtgatccagcttcagctctactggaggttcttgatccggagcagaataattctttcaacgaccactatttgaatgtgccatatgacctttcaaaggtgatttttgtggctactgcaaatagggtgcagcctattcctcctccactcttggacaggatggaagtcattgagctgcctggatataccgctgaagaaaagctaagaatagccatgcaacatttgattccacgagttttggatcagcatggattgaattctgagtaccttcaaattccggaggccatggttaaacttgttattcagaggtacac

SEQ ID NO: 39095 - DNA, 381 bp, Gossypium hirsutum
  unsure (1)..(381): unsure at all n locations; Clone ID: LIB3165-034-P1-K6-E5
cccacgcgtccgggaaaaagaagtccagtagtagtaagtctttattctacgaagctcctctcggttacagcattgaagacgttcgaccaaacggtggaatcaagaagttcagatctgctgcttactccaactgcgctcgcaagccatcctgatatactcacaagcgtgccgtctgaccactagtagtggttaataaaactgttatttgctttgttagttagttttagattatttccccgaccaacttcttcctcttctctcttcggggctggtttctttacattgcgttctcctgatttggcgactttgtaattcggataaagtttgcagtccttggttgaatcacaatggcagtgtctgcaattgganttgagggttatg

SEQ ID NO: 39096 - DNA, 399 bp, Gossypium hirsutum
  Clone ID: LIB3165-034-P1-K6-E6
ctcatatctctctgtttatttattttttttgttttccttttgtcgtccttttctcacctgttgttcttccattttttaatcaagttccccccaccccgctcaacacctctccctctaacaagccaaaggccccaagcagattctatttgttctaacatggagaaaagccatgaacttgaactgacccagatgaggaaatcagtagagaaacttgggttttcaacagagaaatacggggatccgacactcatgagattcttgattgcaagatcaatggacacagataaagcttcaaagatgtttgtccagtggctgaaatggaggtcttctttagttcctaatgggtgcgttgtagaatctgaagtgcctgaccaattagaagccaaaaagatttttttg

SEQ ID NO: 39097 - DNA, 404 bp, Gossypium hirsutum
  Clone ID: LIB3165-034-P1-K6-E7
cccacacgtgcggatgtcatgaagatagacatgggaggttctgcaccagttcttggtgcaacgaaagctctcgggcaaatcaaacctactgcagttgaggatcattacattgatgcatattgtgaaaacatgataagtggaacgggtatgagacctgtagatattctcacagcatctaatggaaagactattgaggttaataacactgatgcagaaggcaggcttacactcgcagatgctttggtatatgcttgcaaccaacgtgtctagaagatagtcgactcaggcaacactaactggggcttgtattgacgctcttggaccgacgattgcaggcgacttcacacctagcgatggacttgcaaaggaggtattcgaagctttaaagatcagtggtgagaaat

SEQ ID NO: 39098 - DNA, 392 bp, Gossypium hirsutum
  Clone ID: LIB3165-034-P1-K6-E8
atttgatgaaaaagggagtgaaggttagacaaaaggacgccatctgagggggaagagatctacagaaagtgatgggaaagcggataacggtgatgataagatcgtggttcggagccagactaagaagaacagaagattgggccttgataaaaggattgaactgaaaaagaatagagaagaaaagtcggttgtttctggccagagtaaaaagggtatctcgaatgaaagtgagaagatcgataggcttgtccgggactattcggcttcaaccgatttggtcagcctggactggaagaaaatgaagataccttcggttctgccgtccaccgaacatacttggttgcttaagctaatgcagccaatgaaggcactgcttgaggcaaaagagaact

SEQ ID NO: 39099 - DNA, 402 bp, Gossypium hirsutum
  Clone ID: LIB3165-034-P1-K6-E9
cgatggaaccgtcagtgttcttgtggcaacttttttgttcgtaattcccaacaagaagcgaaagggagagaaattgatggactggaacgaatgcaagaagctgccatggaacattattttgttactaggggctggtttcgccatagccgacggagtccagtcaagcggactcgctgatcaattatccaaaactctagattttctcgaagaggctccgtatttagctattgcccccgcggtgtgtttaatctgtgccataattaccgagtttataacatcaaatgatgctactgctacccttgtgcttccacttttgattcaaatggcaaaaaccatgcatgttcacccattactccttatggtccctggagcagtgggatcacaatttgcttttattcttgc

SEQ ID NO: 39100 - DNA, 403 bp, Gossypium hirsutum
  Clone ID: LIB3165-034-P1-K6-F1
cccacgcgtccgctaaaacaagtgtttctcttcttcttcatgttctcgatcatggcttcttcttcttctttctttgttaggtgtttccctttacttttcttcttcttcttctcacatgtccaagcagtgaaatcaccaattcatcctcgggatgttctacctttattgccgagacaggtttcatggccgatccttaattcacttaacagtgccatcgaccttttaccagcctttgtcggttctgtttcgtcccaaaaccacatcgtgagctggaaaggtgcgtgcttttatgagaacaccgctaggatggagttccataacaagagtggcagtgagttcggtggtggaactctccatatcaaggttagcaaagcccatagttggacgtgtctggatctttatc

SEQ ID NO: 39101 - DNA, 411 bp, Gossypium hirsutum
  Clone ID: LIB3165-034-P1-K6-F10
cccacgcgtccgaaaacacccaggttcagaagcactaacattttctctggggcttaccaaccttgggtctgaaatggcaaagtcacccgaagaagaacaccctgtcaagacctttggctgggctgcaagggacccatctggtcatctctctcctttcaccttctacagaagggtaactggtgaagaagatgtgaggtttaaggtgctgtattgtgggatttggcattctgaccttcacagtatcaagagtgaatggggctcctccaactaccccatggttcctgggcatgaaatagtaggggaagtgacagaagtaggcagcaaagtggaaaaggttaaggtgggagataaagtgggcgtgggatgcatggtcggagcttgccacagctgcgacagttgtgcaaacgacct

SEQ ID NO: 39102 - DNA, 414 bp, Gossypium hirsutum
  Clone ID: LIB3165-034-P1-K6-F11
aaaaaatctccaagccaaaccatttttccgctggcatttgcttacaacaaaaaaaaaattcaaattgaagaatgcctgtatttgcttcaagagttgggttcaggagacacgactacaagaatagatcaaaggaacgaaacgatgaccgtaaagacaaattgtccgaagtgttcaagagctatgctgctaatgggctgctagacaaggaagggctgaaagacgcttttctacatctagatgctgccatgccgtaccggcaagccgaagacgccctccgtgtcgtcggcaaaacctataacattaacgtcgaggaggaaaccgagcttaacgcccttatcgactatgcttacaataagggttacgggtcttcaatttgattagctaatttataagctaaatttctttttctttttc

SEQ ID NO: 39103 - DNA, 413 bp, Gossypium hirsutum
  Clone ID: LIB3165-034-P1-K6-F12
gtttcattgaaggcgggactctcatactactctttcgaaccagctccaccatcacccccaaaaaacaaagcaaattgtataagatggcaacacaagcacttgtatcatcgtctcttacctactcagtggagactgcaaggcagattcttggagctaaacgacaaattgggccttcaaggaaaggatcctttgttgttaaggcagcttcgactccacccgttaagcaaggagctgatagacctttatggtttgcatctaaacaaagcctttcatacttggatggcagccttccaggtgattatggatttgaccccttgggactctcagaccctgaaggtccaggagggttcatcgagcctaaatggctagcctacggtgagatcatcaacgggcgttatgctattgtgggtgca

SEQ ID NO: 39104 - DNA, 386 bp, Gossypium hirsutum
  Clone ID: LIB3165-034-P1-K6-F2
cccacgcgtccggtgagacggcttgctcagctacttcatcggccgcggctctcatctgctctaagccaagggcttgctcctccaattccaagcccttctcccaatccctttctctccccaatcccttcactggtctccctgcccctctcctttctcgtcccgcctacttttccctctcccgcacctgcccttctcgcaagtctttcgtcgtcaaagccaccagtgagcttccattggtgggaaatcctgcccctgattttgaggctgaggccgtctttgaccaggagttcattaaggtcaagctctccgaatacattgggaagaaatatgtgattctcttcttttacccgctggacttcacatttgtttgccccacagagattact

SEQ ID NO: 39105 - DNA, 408 bp, Gossypium hirsutum
  Clone ID: LIB3165-034-P1-K6-F3
ctcttttgtatacctgtagcatatagtaatagtaagcagtaatagcaatggcctcctgcatgatctcatcggcaaccattgccaccgtgaaccgctcctccccggcacaggccaacatggtggcccccttcaccggcctcaaatctgcctctgctttcccagtcaccaggaaggccaacaacgacatcacttctcttgcaagcaacggtgggagagtgcaatgcatgcaggtgtggccgcctcttgggaagaagaagttcgagactctctcatacctgcccgatcttactcccgtacagttggctaaggaagtagattaccttcttcgctctaaatggattccttgcttggaattcgaattagaggagggattcgtgcaccgtaagtactcgagcttacccacgtact

SEQ ID NO: 39106 - DNA, 408 bp, Gossypium hirsutum
  Clone ID: LIB3165-034-P1-K6-F4
ggtcagtaaagcttcaattcaaaggagtgttagtttccatggcgttttcttctgctgctctctctcacacctggtcttcatgcctctcttccttcccacatgccttcacaaccagaaaaacccatcttcgcttcccatcatttttactcataaaagcttcttctgaacctgacaaaggaaaccccactgctacacagaccaaaaacgctgaaggctctagcaatgctcaacctcaacctcaagccactcccgccgccgccgctaagccacctcccaaaaagcccgtttattccatgaagaaaggccagattgttagggtggataaagacaagtatctcaacagtattaattatctatctgtagggcatcccccctattacaaaggcttggactacatatacgaagacc

SEQ ID NO: 39107 - DNA, 384 bp, Gossypium hirsutum
  Clone ID: LIB3165-034-P1-K6-F5
attcaaaactaatcatgtaaaaaaaaaagttgattggaacaaataaagtgaaacatttaagacaagaacaaagtggagattttataacacaaaaatagaggatgcaaatccacttaaaacacaaaaggaaaacaacattcaattaagacacaaaggggggatttcctttgtttgtgcccaatatagatttttttcttcccttagagcttaatttcccatttagaaagctcctctcttgatagcatcgtcattagcatttccaagggcagcttcactcaaatatttgtcagccaattgaaccctcttcacattctcttgctcagcaacaagcatgtatccatattccaacagcttctcaatggtcatcttcggttgctcgaaaga

SEQ ID NO: 39108 - DNA, 408 bp, Gossypium hirsutum
  Clone ID: LIB3165-034-P1-K6-F6
ctcccatcacccgagatcatctttccccttcagaatggcggctgcaaccatggctctctcttccccatatttcgccggaaaggccgtcaagctctctccttccgcccctaaaatccaaggcaatggccgtgtttccatgaggaaaaccgctaccaacgctgctccctctggaagtccatggtacggacctgaccgagtcttgtacttgggtccactatctggtgagcctacatcttacttgaccggagaattccctggtgactacggatgggacactgctggactcttggcggacccagagacatttgccaggaaccgtgagctcgaagtcatacactgtaggtgggctatgacgggtgctcttgggtgtgttttccctgagcttttgactaggaatggagtcaaatt

SEQ ID NO: 39109 - DNA, 401 bp, Gossypium hirsutum
  Clone ID: LIB3165-034-P1-K6-F7
cccacgcgtccgaaatcagttgcttcacaatggcctctacaaccatggctctttcttccccatcattcgccggtaaggcagtgaagttctccccttccacccctgaaatccggggaactggccgtgtttccatgaggaaaaccaccaagcctgttccttctggtagcccatggtacggtcctgaccgagttttgtacttgggtccactttccggtgagccaccatcttacttgaccggtgagttccctggtgactatggttgggacactgctggactctcagctgatcccgagacctttgctaggaaccgtgagctcgaagtcattcactgcagatgggccatgttgggagctcttgggtgtgttttccctgagctgttggctaggaacggtgtcaagttc

SEQ ID NO: 39110 - DNA, 202 bp, Gossypium hirsutum
  Clone ID: LIB3165-034-P1-K6-F8
acgatttcgaactctatttagaattaaaccaccgcacggcattttctttaagtgtcttgtaagatactgttgttccagccacatttctcttttcgctctactagtaatttaattggagcttgaacccgagtttcggtgaggttgaatccacttttttcgttctaccttccttatttattttatctaattcttatctaattct

SEQ ID NO: 39111 - DNA, 409 bp, Gossypium hirsutum
  Clone ID: LIB3165-034-P1-K6-G1
gtttcatttgaagggcaggactctcagactacttctttcgaaccagctccaccatcaccggcaaaaaacaaagcagagtggagaagatggcaacacaagcacttgtatcatcgtctcttacctactcagtggagactgcaaggcagattcttggagctaaacgacaaattgggtcttcaaggaaaggatcctttgttgttaaggcagcttcgactccacccgttaagcaaggagctgatagacctttatggtttgcatctaaacaaagcctttcatacttggatggcagccttccaggtgattatggatttgaccccttgggactctcagaccctgaaggtccaggagggttcatcgagcctaaatggctagcctacggtgagatcatcaacgggcgttatgctatgtt

SEQ ID NO: 39112 - DNA, 406 bp, Gossypium hirsutum
  Clone ID: LIB3165-034-P1-K6-G10
caatctttcagaaagagagaggcaaagagaaaaaagagagagggtattacatatattcatctaattatacaaataaagatggctcttcacctttcctgggtttccgtttttggcgatctcggtactgaaatatatattcatatgcccttcttgtttgcgtattttaatattcactaacattacattatattgtttttaattaggcgtcattgtttcatttatggtcgccttttctcccatgccagcattttatcaaatctataagaagaaaacatcagaaggattccaatcattaccctatgtgatatcgctattcagtgccatgctttggatttactatgcacttcttaagaagaatgaaatgcatctaattatcatcaacattttctgctgtttcattcaaagc

SEQ ID NO: 39113 - DNA, 408 bp, Gossypium hirsutum
  Clone ID: LIB3165-034-P1-K6-G12
atggcttcttctctcagtctttcaagccacacagtggcttcattattcccttctcacacttcaaagccgcagttgtcactttctaaatccatcccaattctcaccaaatcatcacagtctcaatttcatggccttaaattctctcacccttcttctcttaaaattcctcgtttttccacttttaaaacctcgatttctgctaaggtgaataaaggtacagttcctccagcatttactttgaaagatcaagatgggaaaaatgtaagcctttcaaagtttaaagggaagcctgttgtggtttatttttaccctgctgatgaaacccctggttgcaccaaacaggcatgtgcttttagagattcttatgagaagtttaagaaagctggagctgaagttattgggattagt

SEQ ID NO: 39114 - DNA, 407 bp, Gossypium hirsutum
  Clone ID: LIB3165-034-P1-K6-G2
ggcgagagtagtggaaatagaaaggaaaaatgagcttaaaacatcaccataactccggctccgcagcagctgctcaatctctctcttttgatgacattgccgacttcttctctcttccccttgacgacgccgcttccactcttggcgtttgcacctctgttctcaagaaaatctgccgtgaaaatggtctcgacagatggcctcaccgcaagtttttagctggaaagagcgtcgaagaaatcaagaggcatgcagctagagaaagaagaagggaaatcgctgagctttcaaaggctcatcggcagagctctcaacctcaaccccaaaacaatgaacaacccaaattacaaggtggctcatcattaccgaacttacagcagcaagggataagaaacatacaaacagcg

SEQ ID NO: 39115 - DNA, 391 bp, Gossypium hirsutum
  Clone ID: LIB3165-034-P1-K6-G3
cagcagctgcaccacaactacagagaagagagtgaaggggaaaaaaagcgtcctccatcttgcttcttcttctacttcgctctctctccttctccgaagttcctctttcgttctttcatttattcagcattgtaaaagatggccgacggtgaggatattcaacccctcgtctgtgataatggaactggaatggcgaaggctggttttgctggtgatgatgctccaagggcagtttttcccagtattgctggtcagccccggcacactggtgttatggttgggatgggtcagaacgatgcctatgtacgagatgaagcacaatctaaaagaggtatccttactttgaaatatcctatagagcatggtatcgtgcgcaactgggatgatatgg

SEQ ID NO: 39116 - DNA, 409 bp, Gossypium hirsutum
  Clone ID: LIB3165-034-P1-K6-G4
cttggaaattccaccttactatctctcacaattcaatcgactatggaatccattggagttctcatggcttgccccatgaactcttacctcgagcaacaactcgagaaccgtttcaagctattcagattctggacagtgccggacaaatcatcctttctggcttctcacaaggactcaatccaggcggtcgtcggaaacgcctttgccggtgccgatgctatgctgatcgaggcgttgcccaagctggagattgttgccagcttcagtgtggggcttgataagatagatttggccaagtgtaaagaaaagggtatccgagttaccaacacccctgacgttttgactgaggacgtggcggatttggcgatcggtttgatgttggcggtgttgaggaagctctgtgagagtg

SEQ ID NO: 39117 - DNA, 399 bp, Gossypium hirsutum
  Clone ID: LIB3165-034-P1-K6-G5
atacaggcagcaatgagaaggagcttagtatatactccaagacagaattccggttgggacaccacgtcccaagactaccaagctcatctttcccgaatggaaagatcagccaccatgatccctggtgcccctcagtaccccgatgtccacaaggccttcaacaacaaggttgagtttccggaagaagatcagtgcactgagcggtccccaacggcaaactcccgaaagaaggttcaggtggttgagcatgcagagaccgctgatgaagccacccttgattctcaagctgatagctacatccagcagaaacacaaagcctttgaactgtgcaaatggaagaccttcaaaatgcactagagttgagacttttggagtaagcatgtcgatcatgatttaatg

SEQ ID NO: 39118 - DNA, 416 bp, Gossypium hirsutum
  Clone ID: LIB3165-034-P1-K6-G6
cccacgcgtgcgcccacgcgtccggaaaatggaaaatggaggcaaccatggaaaggatatgcttttggaccatcttggagatgacattgttgctgcttctgcaactatggagcaacacgaagaagcaccttctgcagaagaaatgcaagaaaggatggatcaattcacctacatcatgcagcagaagtttctctctggtgaagattatgagtatttagattactctaaaatagatgacgatgagaccttggatgatcactggcttaaggaagctaaccatgatgcagaggagaagtattttgctgaagattaataacggaaaattacatccattgatctcccaacatttgcagatatctcttcgctatagcagtgggtagggattacctttttctacttatgtacctaacttctta

SEQ ID NO: 39119 - DNA, 404 bp, Gossypium hirsutum
  Clone ID: LIB3165-034-P1-K6-G7
cccacgcgtccgatggcacccattttattacccaacaagccccatgcagtatgggtcccctacccagcacgaggggcacgtaaatccgatgctcaaagtggccaaactcctccatttcaaaggcttccacatcacttttgtcaacaccgagtacaaccacaaacgcttgctcaaatccaggggcccccacgccctcaatggcttgcctgacttccggttcgggacaatccccgacggccttcctccgccggacatcgacgccacgcaagacatccccgcgctttgtgactccactagcaagcattgtttggctccctttcgccgactccttgttgagctaaaagctacttccggtgtcccgccggtcacttgtatcgtcgccgatgggtgcatgtcgttcactc

SEQ ID NO: 39120 - DNA, 403 bp, Gossypium hirsutum
  Clone ID: LIB3165-034-P1-K6-G8
cccacgcgtccgggaatccattggagttctcatggcttgccccatgaactcttacctcgaacaacaactcgagaaccgtttcaagctattcagattctggacagcgccggacaaatcatcctttctggcttcttacaaggactcaatccaggcggtcgtcggaaacgcctttgccggtgccgatgctaagctgatcgaggcgttgcccaagttggagattgctgccagcttcagtgtggggcttgataagatagatttggccaagtgtaaagaaaagggtatgcgagttaccaacacccctgacgttttgactgaagacgtggcggatttggcgatcggtttgatgttcgcggtgttgaggaagctttgtgagagtgatcggtttgtgaggagtggcaagtgg

SEQ ID NO: 39121 - DNA, 280 bp, Gossypium hirsutum
  Clone ID: LIB3165-034-P1-K6-G9
gggatgcggaagagcttgccttggtgaacaacaagagtgctgtatcttcattagggaaaatcacctggtgcgtcacaaagagcaagccagcagaccggtgaagatatcggtgcgttccagagccttgagtcatctgacactgactagtgtgccaagactgcaaaggatgttatgatcactggtgtatggaatgcttacctagagtcatgaacatgtgttgtttgagtttgtttattttcggctgttattttgggagttttaaacacgtgttgctaaactt

SEQ ID NO: 39122 - DNA, 403 bp, Gossypium hirsutum
  Clone ID: LIB3165-034-P1-K6-H1
cccacgcgtccgctcgagatgggtgggccagcccgatccgacccaataaccttttatttgattcgggtgcgatcgactttgccggttcaggtgtggttcacatggttggtggcattgcagggttatggggtgcattaatcgagggtccaaggattggccgattcgatcgagctggtcgatctgtggcgttacgtgggcacagtgcctcattagtagtgctcgggacgtttctattgtggttcggatggtatgggttcaacccaggttcattcttgaccatcatgaaagggtatggtggtggtggaggttattatggacattggagtgccgtagggaggacagctgttacgacgacattggccgggtgcacagctgctcttacaaccttgtttagcaagagact

SEQ ID NO: 39123 - DNA, 277 bp, Gossypium hirsutum
  Clone ID: LIB3165-034-P1-K6-H10
gccacgcgaccgaggcgattacacacaaggtgccgaccatcgtatcagttaacggtgcagactttaacagcgcggatgctacattctgaagtcggcctaatggaactacacacgtgatgataaacagcctgcctgttcattttaagagtgcagggctatctgcagactgtgggttgaaatatattgcattgtatgaggaatgagcttgtcaatcacatagcgcgttacatggggactatgaagctgactctggtttgactgtaattgcaagagagga

SEQ ID NO: 39124 - DNA, 415 bp, Gossypium hirsutum
  Clone ID: LIB3165-034-P1-K6-H11
cccacgcgtccggtgagactcttttgtatacctgtagcatatagtaatagtaagcagtaatagcaatggcctcctccatgatctcatcggcaaccattgccaccgtgaaccgctcctccccggcacaggccaacatggtggcccccttcaccggcctcaaatctgcctctgctttcccagtcaccaggaaggccaacaacgacatcacttctcttgcaagcaacggtgggagagtgcaatgcatgcaggtgtggccgcctcttgggaagaagaagttcgagactctctcatacctgcccgatcttactcccgtacagttggctaaagaagtagattaccttcttcgctctaaatggattccttgcttggaattcgaattagaggagggattcgtgcaccgtaagtactcgagctt

SEQ ID NO: 39125 - DNA, 322 bp, Gossypium hirsutum
  Clone ID: LIB3165-034-P1-K6-H12
gctaccactgcttctccaatggcgactcagctgaagagcagctttacgtcgtcggttacaagaggactggtagtccccaggggcatttcgggatccccgttcaaagtatcttccggaaagaccaggaccccttgcttcactgtcaaagctgttcaatccgacaagtcaacatttcaagtaatccaacccatcaacggcgaccccttcattggaagcctggagactccaatcacctcaagccccttaattgcatggtacctttccaacctcccagcctataggacggcagtgaacccacttctgaggggaatcgaagtgggtc

SEQ ID NO: 39126 - DNA, 403 bp, Gossypium hirsutum
  Clone ID: LIB3165-034-P1-K6-H2
cgaactcccctcccgtcctctttcccgatttgtcttcttcattgccccgccatggcttgtgttagcttcgctaaactcaacgcgccgtcatcctcttggatcggtggccagcagtctctccctcaacgctccggatcatccgctcggctcgccactcgcagagtctcactcccgatccgtgctggcgcttacaccgacgaactcatcaaaaccgccaaaactattgcttcacctggtcgtggaatactggcaattgatgaatcgaatgcaacatgtgggaagagattatcttctattggcttagacaatactgaacccaaccgccaggcttacagacagcttctgctcacaactcctggcctcggagaatatatttccggtgccattcttttcgaggaaacac

SEQ ID NO: 39127 - DNA, 410 bp, Gossypium hirsutum
  Clone ID: LIB3165-034-P1-K6-H3
caaagtccaatcactcccaatactttcataacatttcacgaacttcactctccagtctgcaatggcggctgccgtctccaccatcggtgctgtcaaccgagcaccgttgagtttgaatggatcaggtgccggagcttctgctccaagctcagctttcatggggaacagcttgaagaaagtgagcgctaggttcaacaacaacggcaaggctccagtgggaagtttcatgattgtggctgccaaagaaatcgacgaagacacacagaccgaccaggaccgatggaagggtcttgcttatgatatctccgatgaccaacaagacattaccagagggaaaggtatggtcgactcattgttccaagctcccatgaacgatggtactcactatgctgtcatgagctcctatgagt

SEQ ID NO: 39128 - DNA, 417 bp, Gossypium hirsutum
  Clone ID: LIB3165-034-P1-K6-H4
ctcccatcacccgagatcatctttccccttcagaatggcggctgcaaccatggctctctcttccccatctttcgccggaaaggccgtcaagctctctccttccgcccctaaaatccaaggcaatggccgtgtttccatgaggaaaaccgctaccaaggctgctccctctggaagtccatggtacggtcctgaccgagtcttgtacttgggtccactatctggtgagcctccatcttacttgaccggagaattccctggtgactacggttgggacactgctggactctcggcggacccagagacatttgccaggaaccgtgagctcgaagtcatccactgtaggtgggctatgttgggtgctctcgggtgtgttttccctgagcttttggctaggaatggagtcaaattcgtgaggct

SEQ ID NO: 39129 - DNA, 109 bp, Gossypium hirsutum
  Clone ID: LIB3165-034-P1-K6-H5
aaaaaaaaaaaaaaaaaaaaaaaattaaattaaaaaaaaaaaataaaaaaaaaagaaaaatttaaaaaataaaaaaaaaaaaaaaaacaaaaaaaaaaaaaactaaagg

SEQ ID NO: 39130 - DNA, 403 bp, Gossypium hirsutum
  Clone ID: LIB3165-034-P1-K6-H6
acggaccgggaatgactgggtgggccgacccatgcgtccacccacccgttcttttgtataactgtagcatatagtactagtaagcaataatagcaatggcctccttcatgatctcatcggcaaccattgccaccgtgaactgctgcttcccggcacaggccaacatggtggcccccttcaccggcctcaagtctgcctctgctttcccagtcactaggaaggccaacaacgacatcacttctcttgcaagcaatggtgggagagtgcaatgcatgcaggtgtggccttctcttgggaagaagaagttcgagacactctcataccttcccgatcttacacccgtacagttggctaaggaagtagattaccttcttcgctctaaatggattccttgcttggaatt

SEQ ID NO: 39131 - DNA, 374 bp, Gossypium hirsutum
  Clone ID: LIB3165-034-P1-K6-H7
ctttctttctcttttgtcaaaccctaaatccctcactccaactgcagattcacctccacaaacagcaaccaatacattcaagcttggagggatgactttttagccttgagatctcctttcggcttcaatttcaacgaagcaaaaagagatttatggcatattcgcaaggtaagactcctctttcttttttccttttattttcaaacgcaatgatggaagatttgaaggcaataaatcgcaaggaaatgcaaaaacttaaagaaatttaaacagaaatcaacttctaaaaattttgactgctttctttgtattcaatatgcgttcgtcctcttttacactgattttctcggccttttatagccgatttacaggat

SEQ ID NO: 39132 - DNA, 404 bp, Gossypium hirsutum
  Clone ID: LIB3165-034-P1-K6-H8
atttagctatagcatacactactagtacccactactagcaatggcttactcaatgatctcatcggctaccattgccactgcctctccggcacaggctaacatggtcgctcctttcaccggcctcaagtctgcctctgctttcccagtcaccaggaaggccaacaacgacattacttctctcgcaagcaatggcggcagagtgcaatgcatgcaggtgtggcctcctactggaaagaagaagttcgagactctctcatacctccccgatcttacacccgtgcagttggctaaggaagcggattaccttcttcgctcaaaacgggtttccttgcttggaattcgaattagaggagggattcgtgcaccgtcaatactcgagcctacccacgtactacgatggacgc

SEQ ID NO: 39133 - DNA, 364 bp, Gossypium hirsutum
  Clone ID: LIB3165-036-P1-K1-A1
aaagaggttcataaggaagttcccacccgatgttgttctttatgttgatcgtttggacgcgcatgacagagatcatactgattttctattattgaagtctctcacggattctctcggttcatcaatatggcaaaatgcctttgtgactcttactcatgctgcatctgcttccccagaggggccgatgggggaacccctaagttttgaggtctttgttgctcaacggtctcatgtgattcatcgagctatcagccaagcagttggcgatctgcgtctaatgaatccgagtatgatgcatcctgtggctctcgttgagaaccatccatcatgtcctagagacggaaatggagaaaatttgctttcc

SEQ ID NO: 39134 - DNA, 372 bp, Gossypium hirsutum
  Clone ID: LIB3165-036-P1-K1-A10
ccaatctctaccatggcagctcattatatcaatctccgggttatttgcctttatgttagtctatcattcatctttacaaagcaggtacaagccgacaactatatcattcacatggaccactctgccatgcccaaagctttcgccggccgccaaagctggtacttggctacactttcatctttatctgctaacttgagagctaacaccaattcaaccatccccaccgctgaacttctctatagttacaaccatgttattcaaggtttcagtgcgagtctcactctggctcagcttgaggccttgaaaaactctcgggggtatgtttcttctattagagacaaaactgtgaagctcgatactacttattctttc

SEQ ID NO: 39135 - DNA, 380 bp, Gossypium hirsutum
  Clone ID: LIB3165-036-P1-K1-A11
gttgagagggttgcccaaaagcagtttataaggcgtgggcagtaaaacttacaggtaaaccagatatagagatggcgactaaggttgctgtttccattattatataatttcaagatcacaatgggtctatgataagattgtttatttacagcggaatgatatacaaagtcaacagatctcactgaatacaaaataagatttatggctacacaaaccgttgagggtagttctagatctggtccaagacgaactgttgtaggggattttttgaaaccattgaattcggaatatggtaaggtagcccctggatggggaacgactcctttgatgggtgtcgcaatggctttatttgcgatattcttatctattattttggagat

SEQ ID NO: 39136 - DNA, 382 bp, Gossypium hirsutum
  Clone ID: LIB3165-036-P1-K1-A12
cttttgttggccaaatcatgaccactctcgtgaccggggtgtttctcctcctgcgatccgtcgccggcgtcgtatccgccgctagatatatcaccggtgatgttctccggttaccttcggaagcttcaaggttcttccgatggaggagcgatgatgatgaagttggtggcacaagatgggcggtcctgattgctggatctaatggatattggaattacaggcatcaggctgatgtttgtcatgcttatcaactcctaaggaacggtggtttgagagaggaaaatatcattgtctttatgtacgatgatatcgctttcaatgtagaaaaccctaggcctggtgttatcattaacaatcctcatggcgatgatgtttataaggg

SEQ ID NO: 39137 - DNA, 215 bp, Gossypium hirsutum
  unsure (1)..(215): unsure at all n locations; Clone ID: LIB3165-036-P1-K1-A2
aaaacacaagcccctctccccttttctctgtaggcctgaattcctgccaggccgtagtgtcgatcaccggcgntctgccccggccgccggccaccntttccggtgccatcgtaaaattcccctattttttgtttctttttttatgaaatatatgtaaataaaaataaaacaatagtagtaaaacgtttcaaaaaattaaaattaaaaattaaaaa

SEQ ID NO: 39138 - DNA, 393 bp, Gossypium hirsutum
  Clone ID: LIB3165-036-P1-K1-A3
cgtccgaagagggctccttttgacctctttttcacaaggaaaaagcctaacaacatcaaggtttatgtcagacgtggctttatcatggacaactgtgaagagctgatccctgaattccttggctttgtgaagggtattgttgactcagaggaccttcctctcaacatctcgagagaaatgttgcagcaaaacaagattttgaaggttattcgcaagaacttggtgaagaagtgcatcgagctcttctttgaaattgctgagaacaaagaagattacaacaagttctatgaggctttctcgaaaaacctcaagcttggtatccatgaggactctcaaaacagaaacaagattgctgaattgctccggtatcactctaccaagagtggtgattag

SEQ ID NO: 39139 - DNA, 399 bp, Gossypium hirsutum
  unsure (1)..(399): unsure at all n locations; Clone ID: LIB3165-036-P1-K1-A4
caggtgccggagcttctgttccaagtctcagctttcatggggaacagcttgaagagggtgagcgctaggtgcaacaacaacggcaaggctccagcgggaagtttcaagattgtggctgccaaagaaatcgacgaagacacgcagaccgaccaggaccgatggaagggtcttgcttatgatatctccgatgaccaacaagacattaccagagggaaaggtatggtcgactcattgttccaagctcccatgaacgatggtactcactatgctgtcatgagctcctatgaataccttagccaaggccttcgcacatacgacttggacaattttgcctctnttgtcacaggtcaaacctccaagcagcttcacccctgaagaaacggaatacctaacaaatcg

SEQ ID NO: 39140 - DNA, 385 bp, Gossypium hirsutum
  Clone ID: LIB3165-036-P1-K1-A5
cccacgcgtccggtggtgcactttgtcgctggaggagtggctactccggcggaggctgctctcatgatggagttgggttgtgatggcgtgtttgtggggtctggcgtttttaagagtggtgacccggctagacgtgcccgggctattgttcaggctgtcacccattatagtgacccggccgtgcttgctgaagttagctgtgggcttggcgaggctatggttggtcttaatttgaatgataagaaggttgagaggttcgctgctcgatctgagtagtgtatttcaaatttctgtggctacgcgaaggtgataaattccacttgtattctattttttcaacatttaagccgaagctttaatgatattccaaggtatttgatgtttt

SEQ ID NO: 39141 - DNA, 377 bp, Gossypium hirsutum
  unsure (1)..(377): unsure at all n locations; Clone ID: LIB3165-036-P1-K1-A6
ctctgacaaaagccagtgcgtgaagaaaggaaacagcttggtcattgagactgaggagagctacatcagcgctgtagtggccaagcctctggcagagaacgatggcaagtgcaagtgcggaactagctgcagctgcacaaactgcacatgtggcagtcactaagcagacatatagaatggtgaagtttgggacctaaaaagaataaaagttgggttgaataatttgtgtcttttgttgtagtttgagtgtgttttcttgtctatctgtccgatgtttgtctatgtctctcattttatacaatgatggaatggccatgtcaatggcctttgtctgattaatgaattattattagtattaaannaaaaaaannnnnntt

SEQ ID NO: 39142 - DNA, 324 bp, Gossypium hirsutum
  unsure (1)..(324): unsure at all n locations; Clone ID: LIB3165-036-P1-K1-A7
atgccacgacgttttattgatgggggaaagatagtaagtgtgttgcttccantcatgctattggattaaatttacaaaacaagttcttattttccttgtgaatccactttaacttttattggaggtttttgatcttgaccaaattaaatcttttattgatcactatttgaatgttccatttgacctatcaaaggtgatttttgtggctaccgcaaataggatgcagcctattcctcccccactcttggacaggatggaagtcattgagctgcctggatatacaacttaagaaaagctcagaatagccatgcaacatttgatccc

SEQ ID NO: 39143 - DNA, 380 bp, Gossypium hirsutum
  Clone ID: LIB3165-036-P1-K1-A8
cccacgcttccggatttctcacctttcttctgaaactggggattataatccttgcgagctgtccacttggctcgagagcatgctctattaacttaaccctccctccacttttgatccttttggcgctgctaggacggctgcagcggcagttggatgattcgttccttgtccccgctgagtcctcaactttgacgacgttggatttcgacaacatcaatcggaaacatcagaaatctggtccacaaatctttgaggaagctttctgctccgattacgatcctaaagccactcctggtaaggctatttattctcaaaaaacccaacccccaacccacgattccttattttcttccacacccaccaacgtttaatcttaaaaa

SEQ ID NO: 39144 - DNA, 323 bp, Gossypium hirsutum
  unsure (1)..(323): unsure at all n locations; Clone ID: LIB3165-036-P1-K1-A9
ctgattgttggtggcaaacccaagtattagatggtacttgagggaacatggatggccatcatctaccatatttgagacncctcctgagagtgatgaggaacgagctaagttaattgacactcttcaggattggaagactcaaaggtacaaagaaataatcaaatctggaactgtggaacctagacctggagttttaagattgatggatgaggccaaggcagctgggaaaatgctagctgtttgctctgcagcaactaaaagttcagttgtactctgtcttgagaaccttattggaatggagcgatttaaggggcttgattgct

SEQ ID NO: 39145 - DNA, 408 bp, Gossypium hirsutum
  unsure (1)..(408): unsure at all n locations; Clone ID: LIB3165-036-P1-K1-B1
gggccgacccaggcgtnccgggtacccctacgctctcactaaaacatctctctcttctttgttttccaatagggggtaacactgtccggggcacttcaagctgcatctaccctgatgcaaccaatcaaggttgctgcaccatcaaggaccaatgtgctgctcaggtcctcccagagcgtttctaaggccttcggtttggagcctgttggtgctaggctcacctgctctttgcaaactgacctcaaggactcggctcagacgtgtggtgatgctaccaagctcgctggtttcgctcttgctacatctgctcttgatgtctcgggagcaagcgctgaaggagttccaaagcggctaacctacgatggaatccaaagcatgacatacattggagtcaaaggaacaggaact

SEQ ID NO: 39146 - DNA, 380 bp, Gossypium hirsutum
  Clone ID: LIB3165-036-P1-K1-B12
gatccttgcaatggccaataccaatctccctcgaaggagaattaaggaaactgagcgtctcctcagtgaaccagcacctggaattagtgcttcaccatcagaggataacatgcgatatttcaatgtgatgatccttggtcccacacagtctccatatgaaggaggcgttttcaagttggaactatttttgcctgaagaatatcccatgactgctcccaaggtactcaattctcctgcatcgcttcttaatatttagcatgaccttgttttcgtatccacttttgtatactggattgtctttcctttgatatccgatattactcgtcttcatgacctcgtctagaaaagtttttatagggttttgatatgatttagggatg

SEQ ID NO: 39147 - DNA, 358 bp, Gossypium hirsutum
  unsure (1)..(358): unsure at all n locations; Clone ID: LIB3165-036-P1-K1-B2
cccacgcgtncgcccacgcgtncgaaaagtctctgacactttcaacacaataaagtacacataaaatctgtgcctgccctttgctctgcacacctcgggatatcagtttcaactccactcatcccacgggttactctcgtttacggagttttttttctgttctgcacttccctgtttagttttaaaggtgaactgtttggattttctggttgagtaccgagtccatatattggtaagttcaaggaaggaacttgggcatcatgggtcttaaggcattagactatgagacaatgaatgaaaacgtgaaaaaagttcaatatgcagttagaggtgagttgtatcttcgagcttctgagct

SEQ ID NO: 39148 - DNA, 394 bp, Gossypium hirsutum
  Clone ID: LIB3165-036-P1-K1-B3
cggaccactcctaaaatcaggtcaattatttattgatcaagctgattctataggggtaagatcggctaagccttattttgcgactcctggagcaactgtccatgggcattatggagaaaccctttacgaaggagataccttaggtacatctatatatgcaaaatcgagatctggtgatataacgcagggtcttacaaaagtggaacaagtgttagaagagcgttcgattgattcaatatcggtgaacctagaaaagagaattgagggttggaacgaatgtataacaagaattcttggaataccttggggattcgcgatgggagctgagctaactatagtgcaaagtcttctctctttggttaataagatccaaaaggtttatcgatctcagggg

SEQ ID NO: 39149 - DNA, 405 bp, Gossypium hirsutum
  Clone ID: LIB3165-036-P1-K1-B4
gaccacgcgtccgcccacgcgtccggttgcttcacaatttcctctacaaccatggctctttcttcccgatcattcgccggtagggcagtgaagttctccccttccacccctgaaatccggggaactggccgtgtttccatgaggaaaaccaccaagcctgttccttctggtagcccatggtacggtcctgaccgagttttgtacttgggtccactttccggtgagccaccatcttacttgaccggtgagttccctggtgactatggttgggacactgctggactctcagctgatcccgagacctttgctaggaaccgtgagctcgaagtcattcactgcagatgggccatgttgggagctcttgggtgtgttttccctgagctgttggctaggaacggtgtcaag

SEQ ID NO: 39150 - DNA, 392 bp, Gossypium hirsutum
  Clone ID: LIB3165-036-P1-K1-B6
caaaatcagttgcttcacaatggcctctacaaccatggctctttcttccccatggggcgccggtaaggcggggaagttctctttcttccacccctgaaatccggggaactggccgtgtttccatgaggaaaaccaccaagcctgttccttctggtagcccatggtacggtcctgaccgagttttgtacttgggtccactttccggtgagccaccatcttacttgaccggtgagttccctggtgactatggttgggacactgctggactctcagctgatcccgagacctttgctaggaaccgtgagctcgaagtcattcactgcagatgggccatgttgggagctcttgggtgtgttttccctgagctgttggctaggaacggtgtcaagttc

SEQ ID NO: 39151 - DNA, 386 bp, Gossypium hirsutum
  Clone ID: LIB3165-036-P1-K1-B7
cccacgcttccgaatttcacagtttttttcttcactcgggctctcagccatgggggcagccatctccaccgtcgccgcccctgccgccgccaaccgagctctgggagtgtcagtcccaacctcagctttcatggggaagaaagtgagctcgagattcaacaacaccaggcaggttccttcgggaagttttaaggtgatggcggccgaaaaagagatagacgaagagacacagaccgaaaaggaccgatggaaagggttggcttacgatatttcggacgaccaacaagacattactcgagggaaagggatggtggattccttgttccaagctcccatgaatgatggaactcactatgctgtcatgagttcctatgaatacatcatcc

SEQ ID NO: 39152 - DNA, 271 bp, Gossypium hirsutum
  unsure (1)..(271): unsure at all n locations; Clone ID: LIB3165-036-P1-K1-B9
tctcaatttagcccttccaacacttttcancttgaactgtccgcaacaatgttgcgatcagtaactcgatcggccgccccaaagcacctcctccgccgaggatatgccactgaatctgttccccaccggaaggtcgcggttttgggcgctgccggaggtattggccagcccttggctcttctcatgaagcttaaccctcttgtttctcggctggctctctatgatatcgctaacactcccggcgttgcagctgatgtcagccatgtcaaca

SEQ ID NO: 39153 - DNA, 381 bp, Gossypium hirsutum
  unsure (1)..(381): unsure at all n locations; Clone ID: LIB3165-036-P1-K1-C10
ctnggaacccaaggacagaagacttttttaacatttcagcgcaaagatggagataacaaatgtgaccgagtatcaagaaattgcaaagcaaaagttgccaaagatggtgtatgactactacgcatctggtgctgaggaccaatggacattgcatgagaatagatttgctttcactaagatactgtttcgtcctcgtattctcatcgatgtaagcaagatagacatgaccacaactgtgttgggtttcaatatatcaatgcctatcatgattgccccaactgcctttcaaaaaatggctcatcctgaaggggagtatgcaacagctagggctgcatctgctgctggaactatcatgacattatcctcatgggcaacttctag

SEQ ID NO: 39154 - DNA, 381 bp, Gossypium hirsutum
  Clone ID: LIB3165-036-P1-K1-C11
gagagattagagaaagcactgaaattgcaaaaccatgggctctgcttctctcctgaagacttcaccagttttagacaagtctgagtgggttaagggtcacacccttcgccaaccttccacttctgtggtgaggtgccaccctgttgcaccctccggactaactgtgcgtgcaagctcatatgccgatgagcttgtcaagactgctaaagctattgcttctcctggccgtggaattatggccatggatgagtccaactctacctgtgggaaacgtatggcctcaatcgggctagaaaacacggaggctaaccgccaagcctacaggacgttgcttgtttcagctcctggccttggtcagtacatctcaggtgccatcctctt

SEQ ID NO: 39155 - DNA, 250 bp, Gossypium hirsutum
  Clone ID: LIB3165-036-P1-K1-C2
gcgaccacgcgtccgagcacaccccagatgttgccttcaattttccattgctttggttcctttattaacgaagattggtttattgtgccaaaagatgaatatatatatctagtaatctactactctgagaattgctggaacgagcagcttgcttcggactttccttcaaactttttatcgttcttcatgcttgaaccttttttttctaagaaggcaggaatttcatgcaaatgggaggattaattttggc

SEQ ID NO: 39156 - DNA, 199 bp, Gossypium hirsutum
  unsure (1)..(199): unsure at all n locations; Clone ID: LIB3165-036-P1-K1-C4
gcgacccacacanccgcaaaaggtgcgccctcttcattaactatctcgatgctggtgtttttcttatgnggggaactacccaatggggccgtttcaaccatattgtgaaccctaccancacgaacacatcccatgaccccaccaacgttcagctccccggtatttacaacaccaaacagatccatattttccccattat

SEQ ID NO: 39157 - DNA, 403 bp, Gossypium hirsutum
  Clone ID: LIB3165-036-P1-K1-C6
gggcgaccacgcgtccgcccacgcgtccgcaaaaacatgtcttgaacgacaaaacctgtttctcttacactggtcctactgcttctgagttgctatcctctccatttcttcggtggagtctggccgaccgcctttcgcctgcgacccgagaaacgggttgacgaggagtttacggttttgccggacgaatttacctatccacgtgagggttagggacttgttagggaggttgacgctgccggagaagataaggttattggttaacaatgcgatagatgtgcccaggcttgggattcgagggtacgagtggtggtccgaggcgcttcatggggtgtccaatgtgggtcccgggactaagttcggtggttcgttccccggtgccaccaagcttcctcaagttatc

SEQ ID NO: 39158 - DNA, 365 bp, Gossypium hirsutum
  Clone ID: LIB3165-036-P1-K1-C7
gctctgtatattgaaattttctttttctattttctctggggccaaaaaagattgagatcttcttcaagactctaaccggcaagaccatcactctcgaggtcgagagctccgacacgatcgacaacgtgaagaccaaaatccaagataaggaaggcattcctccagaccagcagcgtctgatcttcgccggaaaacagcttgaggacggccggaccttggccgattacaacatccaaaaggagtcaactctccacctcgtcctccgtttgcgcggtgggatgcaaatcttcgtgaaaaccttgaccggcaagacaatcactctcgaggtcgagagctccgacacgatcgacaacgttaaggcgaag

SEQ ID NO: 39159 - DNA, 136 bp, Gossypium hirsutum
  unsure (1)..(136): unsure at all n locations; Clone ID: LIB3165-036-P1-K1-C8
tactcacttaacattcccatntcttttctccanctcccgagggaaatatgccggtcagaatcataacatttatccccccccaanaagctactcacccctattctcttaaagctgctttggctgagttcatttcaac

SEQ ID NO: 39160 - DNA, 359 bp, Gossypium hirsutum
  unsure (1)..(359): unsure at all n locations; Clone ID: LIB3165-036-P1-K1-C9
ctcgnacttctcactncnnncnttttatatctnnnnctcgctctacctctgtcggaattctaaaaactctcctttctcctcccctgnaaaaaaagcttaaacaaaaaaatggagaacaataacaaccaggtcacgggagagttgaagtctgggaataagaagcaggttcgattgttttactgtatggagtgtgaagagcttgcccgtaaagttgctgctcactcccaactcattacccttcaatctatcaactggaggagctttgatgatggatttccaaatcttttcataaacaatgcacatgatatccgaggtcagcatgttgcttttctcgcatccttcagctccccagctgttat

SEQ ID NO: 39161 - DNA, 237 bp, Gossypium hirsutum
  Clone ID: LIB3165-036-P1-K1-D1
tattggttcaaccatcccttcttaattcccaacacccagttccaacttaaggaccgggttcaacttccccttaatcggctttggtttcttttgcgctgtgaccgctctggtttttgggtttacttacaagaactggaagggggtggctatttgttggggagagaggggggttggattctcaattatttaggattggatttggggggggggattttattatggaggttttggtttttt

SEQ ID NO: 39162 - DNA, 378 bp, Gossypium hirsutum
  Clone ID: LIB3165-036-P1-K1-D10
cgtatggtaggaaccacccaatacttcgtcaacaaccggatggttaacgctacgctcatgaacatcgcctataaccccaccaacgtccagctccccggtatgtacaacaaggaagagaacccccgtgtccccatcatcgtcactggtaacgatttctccacactgtatgctcctctcatccgtgacggtcgtatggagaaattttactgggcaccaactagggacgaccgtatcggtgtttgcaaaggtattttcaggaccgacggcctccgagatgaagacattgttaagctcgtatacaccttcccccgccaatccatcgatttcttcggtgccttgagggctcgggtttacgatgactaaatgaggaaatggatc

SEQ ID NO: 39163 - DNA, 379 bp, Gossypium hirsutum
  Clone ID: LIB3165-036-P1-K1-D11
aaacaaatcaaattgtagaagatggtaacacaagcactggtatcatcgtctctgacctactcagtggagactgcaaggcagattcttggagctaaacgacaaattgggccttcaaggaaaggatcctttgttgttaaggcagcttcgactccacccgttaagcaaggagctgatagacctttatggtttgcatctaaacaaagcctttcatacttggatggcagccttccaggtgattatggatttgaccccttgggactctcagaccctgaaggtccaggagggttcatcgagcctaaatggctagcctacggtgagatcatcaacgggcgttatgctatgttgggtgcagtaggtgcgattgcccctgaaatacttg

SEQ ID NO: 39164 - DNA, 374 bp, Gossypium hirsutum
  unsure (1)..(374): unsure at all n locations; Clone ID: LIB3165-036-P1-K1-D12
cccacgcttccgccggnatcaaggttgacaagggtctggttccactggctggctggaacaacgagtcatggtgccaaggtcttgatggcctcgctccacgttcagctgcatactaccaacaaggagctcgttttgcaaaatggcgtactgtggtaagcattcccaatggaccaactgaacttgctgtgaaggaagcagcctggggactcgctcgctatgccgccatctcccaggacaatggattggttccaattgttgagccagagatcttgcttgatggtgatcacggaattgacaggactttcgaagtagccaaaaaggtatgggctgaggttttcttctatcttgcccagaacaatgtgatgtttgaaggt

SEQ ID NO: 39165 - DNA, 391 bp, Gossypium hirsutum
  Clone ID: LIB3165-036-P1-K1-D2
cccacgcgtccgcggcatgtctcctttgactgccatgtttttctcctcctttagggtccttaaattagtggatgatcattgcgggatgaagcttcccggaaaccccttttacctcttttttaacaacaattcggcataccatgatgtccaccatcagctttatggtaccaaatacaacttctctgtctacttcgacatatgggacagaattctaggaacctatatgccttattcacttgagaagagacctgatggcggccttgaagtacgacgtgctgatcaagaacacaagaaggattgattgattaattacttgattaatcagccaattatgataactagtgagcatggattgatgaatgttccattaggttttatatatgtatctaat

SEQ ID NO: 39166 - DNA, 389 bp, Gossypium hirsutum
  Clone ID: LIB3165-036-P1-K1-D3
agttccgacaaaagaaaactaaaaaaaagaagaagaaatacaatcgtgttctttttgaagtcgggttttagtttttggggtgaaaaaaatgttgggagtatttagcagtgcgatagtgtctccgccggacgagctggtggcggccggttgccgaactccatcacctaagataacggcggacgctctggtgaaacggttccttgagacgaactcctccggcgtgtccatgcacatcggagaccatgtccaattcgcttattctcaccataaagagtctcctttacagcccagatcatttgctgtgaaagacgaaatcttctgcttgtttgagggagcccttgataacttggggagtttaaagcagcaatatggtctggcaaagtcagcaa

SEQ ID NO: 39167 - DNA, 348 bp, Gossypium hirsutum
  unsure (1)..(348): unsure at all n locations; Clone ID: LIB3165-036-P1-K1-D4
acccacgcgnncgcccacgcgtccggaaagcactgaaaaagcaaaaccatggcctttgcttctctccggaagacttcaccagtgttagacaagtctgagtgggttaagggtcacacccttcgccaaccttccacttctgtggtgaggtgccaccctgttgcaccctccggactaactgtgcgtgcaagctcatatgccgatgagcttgtcaagactgctaaagctattgcttctcctggccgtggaattttggccatggatgagtccaacgctacctgtgggaaacgtttggcctcaatcgggctagaaaacacggaggctaaccgccaagcctacaagacgttgctt

SEQ ID NO: 39168 - DNA, 410 bp, Gossypium hirsutum
  unsure (1)..(410): unsure at all n locations; Clone ID: LIB3165-036-P1-K1-D5
cgggcngaccacgcgtncgaagcgtttgatcggtagaagattcatcaactcttcttttcttaaaagcaacaagaaattgtcgaccaaggagagttctgggcctggagacaagccaatgatcgtcgtcacatataaaggagaagagaagcaattcgctgctgaagaaatatcctctatggtcctcatgaagatgaaagagatcgccgaggcatatctcgggtccaccatcaaaaacgccgtcgtcactgtaccagcttacttcaatgattcccagcgtcaagccacgaaagacgctggtgttattgctggcctcaatgtcatgcgtataatcaacgagccaactgctgctgccattgcctacggacttgacaaaaaggctggaagttcaggagaaaagaaatgtgctattt

SEQ ID NO: 39169 - DNA, 393 bp, Gossypium hirsutum
  unsure (1)..(393): unsure at all n locations; Clone ID: LIB3165-036-P1-K1-D6
cgggcgggcgnctccaagagaagacagagaggtctcctcacaaccaccgtaatgggtcgtgttattcgagctcagcgtaagggtgccggtgcggtcttcaaggcccataccaaccaccggaagggtcccgcccgtttccgcagcctcgacttcggtgaacggaacggttacctcaaaggtgtcgtcaccgacgtcattcacgaccctggccgtggcgctccgttagcccgcgtcgttttccgccaccctttccgttacaagaaacagaaggaattgttcgtcgccgccgagggtatgtacaccggacagttcgtgtattgtggtaagaaagctacccttatggttggaaatgtgttgccccttagatctatccctgaaggagcttgtcgttgc

SEQ ID NO: 39170 - DNA, 379 bp, Gossypium hirsutum
  Clone ID: LIB3165-036-P1-K1-D7
gtcatgagttcctatgaataccttttccaaggtcttagaggcgtacaatttggaggacaacatggatggtttctacattgctcctgcattcatggacaagcttgttttcacatcaccaagaacttcatgtccctccctaacattaaggttcctctaatcttgggtatttggggaggcaaaggtcaaggaaaatctttccaatgtgagcttgtgtttgccaagatgggtatcaaccccatcatgatgagtgccggagaactggaaagtggaaacgccggtgaaccagccaagttgatcaggcaaaggtaccgtgaagctgccgacataatcaaaaagggcaaaatgtgcgccctcttcattaacgatcttgatgctggtg

SEQ ID NO: 39171 - DNA, 383 bp, Gossypium hirsutum
  Clone ID: LIB3165-036-P1-K1-D8
ctcaacggtgttttgtgattaaaaaaactaccaagatgggggcaaaacaagatggcttccctgcatgaaccatggctagtggagaacgggttgaaggggtctagcaaggagattcgccatggcaggactgcacacaacatgtcgtcttcgtcgttgcggaaaaaatcggacctgacgcttgtttccaaggttcggtatgcaatgcttaggcagttcctcgccaatcttcaagaggtcatattagggaccaagctctccgttctcttcccagctattccattggccattgttgctgagtgttatggatttggaagaccctgggtgtttgcattaagtttacttggacttacaccattggctgaacgagtcagctttctcaccga

SEQ ID NO: 39172 - DNA, 383 bp, Gossypium hirsutum
  Clone ID: LIB3165-036-P1-K1-D9
cccacgctttcgctccctccgctatcgtgcgcccatcggctgctaccccctctgggtttttccaatggcgactactctgcaactatgtcgtttctgcatccgcaccgattctgataattttggtggaagattcggctctattccttcccggcggaagccgatctccgtccgatgctccggcgattcagattcgtcctcttccgttgccgtggatcccgataacttcgatgcaaagtctttccggcgtaacttgacgaggagcaagaattataatcggaaaggtttcggacacaaagaggaaacgctcgagctcatgaatagagagtacactagtgatattataaagaaattgaaggaaaatggaaacgagtatacatggggaa

SEQ ID NO: 39173 - DNA, 373 bp, Gossypium hirsutum
  unsure (1)..(373): unsure at all n locations; Clone ID: LIB3165-036-P1-K1-E10
nnnnaatttngnnaaagcaacgntttcccggactnccggaancttcactcgatgtatctaagttacaagataatagggatgtaggacacgctattctagagagctattcaaggattctagagagcttggccttcaatgtcatgtcaagaatcgaggatgtccttcatgctgattcccttgctcaaacatcatcaccacaaaaatccgagacatcccctagctcatctgatgaagatgcattgagggtgagcagttcagacacaccaacactatcagattttatgggttggggtattgcttcaaggagaagaagctcaactgatctagaaatctactttaagggtgacaatgacaaaaaactggccaagccacc

SEQ ID NO: 39174 - DNA, 378 bp, Gossypium hirsutum
  Clone ID: LIB3165-036-P1-K1-E11
cccacgcttccggccaccggttttttcacccgttccggcggcacttccaactcgaactcacttccgaacccaagactgcaacccacatcgagggggccgaaaatgaacgccaacactaactcttccactcctactccaactcaaacccgaaatcaaccagctaccgcagcacccactcctttcaacacgaaagacaacagggaagaccacacatacgaccaggccaacgaggcagccaagaaaccgctcaaggaacaaggcaatgagaaaggagcatcgacgagtgcagcagcgccagaggcagagcaagtgacaactgatgcgaaaaccgatgcgtctgccgaccagtcggaacaccgcttgatacacggcaagact

SEQ ID NO: 39175 - DNA, 355 bp, Gossypium hirsutum
  unsure (1)..(355): unsure at all n locations; Clone ID: LIB3165-036-P1-K1-E2
ctgncataacccctcaaccataccttaaaatatggcacccatttttgcaagcccgtcaaccgccgttgggctcggtggcaccgccacctctatgtcatccccgccgatgaaaacccgcctctcttcaggtttttgaaatctgaggtgacggctaggaaccctntgaggctggctggtgcttgtgggggcaagtttacttgcttcgagagagactggctacgaagggactctaacgtgataggatatggactgattgggtggatagcaccatctagcataccggccatcgatgggaagagcttgactggcctattctttgaaagcattggaactgagctcgctcactttcctacac

SEQ ID NO: 39176 - DNA, 392 bp, Gossypium hirsutum
  Clone ID: LIB3165-036-P1-K1-E3
accattgttccaagtttgttgtaattcaagttagaaccagcatccaacatggcgcgcattagcagcctcgagcgctgccgcctcccttggcgtctctgaaatgcttggtaaccctctgaatttcagtggtggagctaggtcatcggctccaacaccatccaactcatccactttcaagaccgttgctcttttctccaagaagaaggccgctcctccaaagcccaaggctgctgctgtcgccccggccgatgaagagctggctaagtggtacggtccggacagaaggattttcttgcctgaaggtctgttagacagatcggagatcccagagtacttgaacggagaagttcccggagactatggatacgatccgtttggtctgagcaagaagc

SEQ ID NO: 39177 - DNA, 395 bp, Gossypium hirsutum
  Clone ID: LIB3165-036-P1-K1-E4
gagactcttttgtataactgtagcttatagtactagtaagcattaatagcaatggcctcctccatgatcgcatcggcaaccattgccaccgtgaactgctcctccccggcacaggccaacatggtggcccccttcaccggcctcaagtctgcctctgctttcccagtcactaggaaggccaacaacgacatcacttctcttgcaagcaatggtgggagagtgcaatgcatgcaggtgtggcctcctcttgggaagaagaagttcgagacactctcatacctccccgatcttacacccgtacagttggctaaggaagtagattaccttcttcgctctaaatggattccttgcttggaattcgaattagaagagggattcgtgcaccgtaagtactc

SEQ ID NO: 39178 - DNA, 371 bp, Gossypium hirsutum
  unsure (1)..(371): unsure at all n locations; Clone ID: LIB3165-036-P1-K1-E5
gcggacgcgngggcggacgcgnggttttacgcgngggaaaatttttaaaaactagcaaatttcgcaaggcgggcgacttccattagggttcttcaattccgattttacagaacttttatcgaatttgtgaaatttcatcttcaaaaccctagtttctgctaatatcttattgattcaacatggctactgcatcagtggcgtttaaatcaagggaggatcaccgaaaacagctggaattagaggaagctcgaaaagcggggcttgctcccgctgacgttgacgaggatggaaaagaaattaaccctcatattcctcagtatatgtcatcagcaccttggtatcttaacgcctgaagacctatgtttgaaaca

SEQ ID NO: 39179 - DNA, 291 bp, Gossypium hirsutum
  Clone ID: LIB3165-036-P1-K1-E6
cctacatttgaagacagagaggttttatgacaaccgcgagcggaagggtccggtccggataacacactcacagcttttgtcaacacaaccggtatcttacatgggtggagaaccgacgacattcacgaccctggacgtggggcatccgagagccggaagtgttatccccaaccttatctttaacaggaaacaaagggaattgttgattcaccaccacgggatgtacaccttccagaagttttatggtgttaggaacccaaccctagtggtcggaaaggccacgcccctaaa

SEQ ID NO: 39180 - DNA, 381 bp, Gossypium hirsutum
  Clone ID: LIB3165-036-P1-K1-E7
gtctctaccactgaaagcaaagaattaatggcaacggagatggcccttgtaaaggctatctccaaattcagtacaagcagtccaatttttagcaactcccgatatgggaagttcacgaccgtcagaatgtcatctacttcccaatcaacagcaaaggccgccgcgaagggtggcaagaaagctgccaaaaccgccatcaaagagacccttttgacaccaaggttttacaccaccgactttgatgaaatggaggcgcttttcaacactgagattaacaagaaccttaaccagtccgagtttgaggcactgctgcaagagttcaagactgattacaatcagactcactttgtaaggaacaaggagtttaaagaagctgctgat

SEQ ID NO: 39181 - DNA, 383 bp, Gossypium hirsutum
  Clone ID: LIB3165-036-P1-K1-E8
gagaaaattctctaacacgcaaattttccaaagtacaggggtgttatttgcgggggtaatatccacaaaggaagtcatattccaaaatggcataagaatgatacctacatttctgctgcaacttctggtgccagcttttgtggttcaaaaacggaaattggtatatatgggatagcacatcacaatgcaacggcaaatctatctgaaaagcgtatcgcaaggaaccccgtgaatgcaggaccaaacaggaacaatgccaagctcactcatgctgcaaccacctctgctcctgaagtgtcggaaaaagttgaagccgacagatttagaccaattgcacaaagaacttaacaaagcatcgccactctaaatcatggatcaagatc

SEQ ID NO: 39182 - DNA, 384 bp, Gossypium hirsutum
  Clone ID: LIB3165-036-P1-K1-E9
cccacgctttcggctttctcgagttaaaaaaaaacagcggttaaaagcaaaaaggcatggtggctttaggcctccaagccacacatttgattgcccctcaaaagttaccaatacgtaaacaaagaacctttagcaacattatcatccggtgtagtattgcagagccgtcgggagaaccagcatcattgggacaaaaaactaaatacaacgatgggttgtttgccaaggcatttatgggtcttttcgcccgcaagatggagaagttcgcggcttcaccaaaagctggaacagaaccaaagaaaggggttttcgactatgactatgagagctttgttgaggtgtcaaagagagtaatgcaagggaggtcttggttgcagcagcaac

SEQ ID NO: 39183 - DNA, 393 bp, Gossypium hirsutum
  Clone ID: LIB3165-036-P1-K1-F1
cgacaatgttcccgttgatgacctttttaagcttgttgacaccttcccgggccggtccattgactttgggggtgctctgagggccagagtttacgatgacgaagtgaggaaatggatcggagaggtcggagtcaatggtgtcgggaaaaagctcgtgaactcgagggaagggccaccatctttcgagcaaccgaagatgaccattgagaagctgttggaatatggatacatgcttgttgctgagcaagagaatgtgaagagggttcaattggctgacaaatatttgagtgaagctgcccttggaaatgctaatgacgatgctatcaagagaggagctttctaaatgggaaattaagctctaagggaagaaaaaaatctatattgggcacaaac

SEQ ID NO: 39184 - DNA, 376 bp, Gossypium hirsutum
  Clone ID: LIB3165-036-P1-K1-F11
ctggtgcacagctgactgtggttggattacagggcacaggtatgttacttatggacccatgcttaatggagctacagttcttctgtatgagggggccccaagttaccctgatcctggacgatgttgggacattgttgacaaatacaaggtgaccattttctacactgcccctaccttggtgcgctctctcatgcgtgatggtgatgagtatgttacacgctactcaaggaagtcccttcgtgtccttggaagtgttggcgagcctattaatccaagtgcttggaggtggttttttaatgtagttggagggtcaaggtgcccaatttctgacacttggtggcaaacagaaacaggtggctttatgattactcctcta

SEQ ID NO: 39185 - DNA, 381 bp, Gossypium hirsutum
  Clone ID: LIB3165-036-P1-K1-F12
aacaaattatatctctacttttcctttcgatttcccgggctaattggaagagggtggaaggtaaaaaccgaagaaacaaagcgctctctctctttgtgaatccaatcaaatcgaagatgttgagagtggcaacgaggcggctcacttcttgttcgtctgcgtggaggtcgcaccaggccacctccgctatcgcctctcgtcctttcatcgacggctccgattcttctgattgtctcagatccaatttctcctcctcctcattttccttctctttcgcttctcaattccttcttcccaccagaggttttgcttctgagtcactcaccccaaaaagtgaccacagtgtgattcctgatgttccagcaacagtggctgctatta

SEQ ID NO: 39186 - DNA, 394 bp, Gossypium hirsutum
  Clone ID: LIB3165-036-P1-K1-F2
gccacgcgtacgatttcccactcttttttttgctctcagttaacaacaaaatcgcggaatggctaccactgcttctccaatggcgactcagctgaagagcagctttacgtcgtctgttacaagaggactggtagtccccaggggcatttcgggatccccgttcaaagtatcttccggaaagaccaggaccccttgcttcactgtcaaagctgttcaatccgacaagtcaacatttcaagtaatccaacccatcaacggcgaccccttcattggaagcctggagactccaatcacctcaagccccttaattgcatggtacctttccaacctcccagcctataggacggcagtgaacccacttctgaggggaatcgaagtgggtctggctcacggc

SEQ ID NO: 39187 - DNA, 390 bp, Gossypium hirsutum
  Clone ID: LIB3165-036-P1-K1-F4
aaaaagtctctgacacttgcaacactataaactacacataaaatctgtgcctgcgctttgctctgcacacctcgggatatcagtttcaactccactcatcccacgggttactctcgtttacggagtttttttctgttctgcacttccctgtttagttttaagggtgaactgtttggattttctggttgagtaccgagtccatatattggtaagttcaaggaaggaacttgggcatcatgggtcttaaggcattagactatgagacaatgaatgaaaacgtgaagaaagttcaatatgcagttagaggtgagttgtatcttcgagcttctgagcttcagaaggaagggaagaagattattttcacaaatgttggcaatcctcatgctcttg

SEQ ID NO: 39188 - DNA, 363 bp, Gossypium hirsutum
  Clone ID: LIB3165-036-P1-K1-F6
atatgggaggggtttcatgtccttatatttgctttagaactttggatcatggacttcttctggtagggtgtggagctgctggttactccccaatccgctttaaggacaagcctttctggatcataaagaattcatggggagcaaactggggagaggacggatattacaaaatatgcagaggtcgcaatgtttgtggagtagactccatggtctcaagtgtggcggctttgcatacaaagtctcagtagcattgccctgtaaatgactgatataagtaacggtaatattagtatccgtcagtatgtcttatctctggatttatgccatctgctagaacgggtttatttcaatcctggtttatgc

SEQ ID NO: 39189 - DNA, 384 bp, Gossypium hirsutum
  Clone ID: LIB3165-036-P1-K1-F8
ataacttgttgcttacagcaaaccttatgtctgtaaagcgttgcagattttggggtggcgagggaagaatccgtgacagagatgatgactgctgagaccgggacttatcgttggatggcccctgagttgtatagcacagtgacattgcgtcgaggggaaaaaaagcattacaataacaaggttgatgtttacagctttggaattgtcttatgggaattattgaccaatcgcatgccatttgagggcatgtcgaatttgcaagcagcttatgctgctgcttttaagcaagaacgaccgagccttccgaaggatatatcccctgatctagctttcatcatacaatcgtgttgggttgaggaccctaacatgaggccaagctttagt

SEQ ID NO: 39190 - DNA, 382 bp, Gossypium hirsutum
  Clone ID: LIB3165-036-P1-K1-G10
aatcacttccaatactttcataacatttcacgaacttgactctccagtctccaggggcggctgccgtctccaccatcggtgctgtcaaccgagcaccgttgagtttgaatggatcaggtgccggagcttctgctccaagctcagctttcatggggaacagcttgaagaaagtgagcgctaggttcaacaacaacggcaaggctccagtgggaagtttcatgattgtggctgccaaagaaatcgacgaagacacacagaccgaccaggaccgatggaagggtcttgcttatgatatctccgatgaccaacaagacattaccagagggaaaggtatggtcgactcattgttccaagctcccatgaacgatggtactcactatgc

SEQ ID NO: 39191 - DNA, 346 bp, Gossypium hirsutum
  Clone ID: LIB3165-036-P1-K1-G11
cctaaatttgccgttcttttttatatataatagataggagaattgaagacaccagggataccagattcttacctcttttttttttatttcccaatttaagccaatgacggaaacgccgttctcgaagctccctgaggacgtcgttttaaatatattttcgaagctcgaagaggatctcgctagctgggcaagtcttgcttgtgtctgcaccagattctcttctctgattcgtaatacctgcttgaagcttaaatgttccaaaaccatacccgccgtttccgccgaccttctctcctcttcctccgccccacccggcggttgggcttctcttcataagctgtctgtc

SEQ ID NO: 39192 - DNA, 306 bp, Gossypium hirsutum
  unsure (1)..(306): unsure at all n locations; Clone ID: LIB3165-036-P1-K1-G2
gcacgcgnccgcccacgcgnccgttacgcgnccgcccattcgnccgctcggggaaccccttcccttggcgatgacaacattgatttggatagaagtattggtgatcggattcatcgagttccaaaggaacgccgagcttgacccggagaagaggctgtaccccggaggaaagtactttgatcctctcggcctagccgccgaccccgagaagaaagcaaccctacaattggctgagatcaagcatgctcgccttgccatggttgctttcttggggtttgctgtccaagctgctgcaacaggcaaagg

SEQ ID NO: 39193 - DNA, 397 bp, Gossypium hirsutum
  Clone ID: LIB3165-036-P1-K1-G3
cacgcgtccggccacgcgtccggttcatttcaatttctgctcttgcttctttttcgtcctcctcgctcctcttctcatctccacctaccaagttcccttcaccttctctatgtcctcctctacacttgtctcttcccacttcttcttttctctcttcttctctttcactttctccttccttccatgcctaccccaccagctctagacgattctctgcttcttctttcactatcagggcctctgctgcagagaagaagaaggtccttatagttaatacaaacagtggcggccatgcagttatcggtttctactttgccaaagagcttctgggttctggccatgaggttaccatcttcactgttggagaagagggctctgataaaatgaagaagccccc

SEQ ID NO: 39194 - DNA, 403 bp, Gossypium hirsutum
  Clone ID: LIB3165-036-P1-K1-G6
agcgtccgcccacgcgtccgcccacgcgtccgtttacgcgtccgggtattgtcgactcattgttccaagctcccatgagcgatggtactcactatgctgtcatgagctcctatgaataccttagccaaggccttcgcacatacgacttggacaacaacatggatggattctacattgccccagctttcatggacaagcttgttgttcacatcaccaagaacttcatgacccttcctaacattaaggttcctcttatcttgggtgtttggggaggcaaaggtcaaggaaaatctttccaatgtgagcttgtctttgccaagatgggaatcaaccccattatgatgagtgccggagaattggaaagtgggaacgccggagaaccagccaagttgatcaggcaaag

SEQ ID NO: 39195 - DNA, 398 bp, Gossypium hirsutum
  unsure (1)..(398): unsure at all n locations; Clone ID: LIB3165-036-P1-K1-G7
ggaannccccggctcttttgtataactgtagcatattttactagtaagcagttatagcaatggcctgctccatgatctcatgggcaaccattgccaccgtgaactgctcctccccggcacaggccaacatggtggcccccttcaccggcctcaagtctgcctctgctttcccagtcactaggaaggccaacaacgacatcacttctcttgcaagcaatggtgggagagtgcaatgcatgcaggtgtggcctcctcttgggaagaagaagttcgagacactctcataccttcccgatcttacacccgtacagttggctaaggaagtaaaataccttcttcgctctaaatggattccttgcttggaattcgaattagaggagggattcgtgcaccgtaag

SEQ ID NO: 39196 - DNA, 383 bp, Gossypium hirsutum
  Clone ID: LIB3165-036-P1-K1-G8
cccacgctttcgatttccattgctattattagaattgagcacttaaagggaggtgaagttcaaaaactgggatggcttttgtaacgtcggaggaattgctggccactttggtgccaattgctgtttattggatatactcaggtatgtatgtgatgtttgagtcaaggtttgagaagtacaagttgcactccaagaaagaagaggaggagaagaatttggtttccagaaaggaagtcttcaaagccgttctttgccatcaagtcatgtcaattgctattaacctcttcacgtatgcggtaacaagagaaaaagatggtgaggcatctccaaagaaatcactaaccttgcttcttctagccaagcaattggtgatagcaatggtg

SEQ ID NO: 39197 - DNA, 384 bp, Gossypium hirsutum
  Clone ID: LIB3165-036-P1-K1-G9
aaacatttttattttcaaaccccattccccccatggctgggctcaagcttattgggggcctagtattgttgtgcatgttggttttggaacccatggccacaactgctctcacatgtggacaagtggcaagccaaacgggtagttgtataaggtatttgcagcgtggagggaaccctccagctgcttgctgcaacggagttaggaacctaaacaggcaagctagaaccacccgtgaccgtcaaactgcatgcagatgcttgcaaactgccgctaggaccatctccggtatcaatactaaattggctgccggtcttccggccaaatgcggtgtcaaaattccttacaagatcagcccctccaccaactgcaatagagtgagatgat

SEQ ID NO: 39198 - DNA, 373 bp, Gossypium hirsutum
  Clone ID: LIB3165-036-P1-K1-H10
attgtagaagatggcaacacaagcttttgtatcatcgggtcttacctactcaggggagactgcaaggcagattcttggagctaaacgacaaattgggccttcaaggaaaggatcctttgttgttaaggcagcttcgactccacccgttaagcaaggagctgatagacctttatggtttgcatctaaacaaagcctttcatacttggatggcagccttccaggtgattatggatttgaccccttgggactctcagaccctgaaggtccaggagggttcatcgagcctaaatggctagcctacggtgagatcatcaacgggcgttatgctatgttgggtgcagtaggtgcgattgcccctgaaatacttgggaag

SEQ ID NO: 39199 - DNA, 382 bp, Gossypium hirsutum
  Clone ID: LIB3165-036-P1-K1-H11
caagataaaaagtattttgctttgtttaatttgtaagcgttgaggttaagtgaagaaactatggctgaagagggacaagtaattgcctgccacactgttgagtcatggcagcagcagctccagatgggaaacgagtccaacaaactggtggtggtggatttcacagcatcatggtgcgggccatgccgttttatatcaccaatcctggtggatcttgctaagaagctgcccaacgtcatattcttgaaggtggacgtggatgaactgaaatctgtcgctcagtcgtgggctattgaggcgatgccaacttttgtgtttctgaaaggaggcaccataattgacaagcttgtgggtgcaaggaaagatgaattgcagcagaaaa

SEQ ID NO: 39200 - DNA, 381 bp, Gossypium hirsutum
  unsure (1)..(381): unsure at all n locations; Clone ID: LIB3165-036-P1-K1-H12
cccacgcgtccgnttaagcttaaattttttgtgcagatgttccttatctttagttgaactttgtcccttttatatcagtgtctacacatagaaatagatcatggcaaaagtagatgaaccacagccacatccaccaaaggagcagctgcccaacatttcttactgcattacaagtccacctccatggcccgaggccatccttcttggtttccaacattatcttgtgatgcttggaacgacagtgatcattccaacttcacttgttccccagatgggaggtggaaatgaggagaaagcaaaggttatccagactctactctttgttgctggtttgaacacattattgcagtcacttgttgggtctagattgcctgctgtgat

SEQ ID NO: 39201 - DNA, 407 bp, Gossypium hirsutum
  unsure (1)..(407): unsure at all n locations; Clone ID: LIB3165-036-P1-K1-H3
ccgggcaccatnngngccaagtttgttgtaaaccaagttagaaccattagccaacatggccttattagcagcctccgccgctgtcgcctcgcttggcgtctctgaaatgcttggtaaccctctgaatttcagtggtggagctaggtcatcggctccaacaccatccaactcatccactttcaagaccgttgctcttttctccaagaagaaggccgctccttcaaagcccaaggctgctgctgtcgccccggccgatgaagagctggctaagtggtacggtccggacagaaggattttcttgcctgaaggtctgttagacagatcggagatcccagagtactttgacggagaagttcccggagactatggatacgatccgtttggtctgagcaagaagccagaagact

SEQ ID NO: 39202 - DNA, 397 bp, Gossypium hirsutum
  unsure (1)..(397): unsure at all n locations; Clone ID: LIB3165-036-P1-K1-H4
gaggaaaaagctctntctctngctctctttagagtaaatttcttttgcaatcctttgtagagctccgggatccattgtcaccatgtcttgctcaaatctgacaatgtgggtgtcctcaaaaccctctctttctgacacttcttcactctctttccgttctttcatcagcccttttcagctcccatctcagagctcaacccccggtaacccttccaggtcctcatctgtaaccccagttcactgtggtcttcgtgagcttagagaccgtattgattcagtaaagaacacgcagaagatcactgaagccatgaaacttgtggctgctgctaaagttaggagagcacaagaagctgttgtcaatggcagacctttctttgagtccctggttgaagttctt

SEQ ID NO: 39203 - DNA, 397 bp, Gossypium hirsutum
  unsure (1)..(397): unsure at all n locations; Clone ID: LIB3165-036-P1-K1-H6
cccacgcgnccgcttactctcaatattgaaatgaaatctctctgagagaagagtggcttaattgaattgggtttggttgtaataagcatggtttcgctggaagattcacattctagttccaaccggtttcctttgggtcgaaacttttacacccccggttcagcttccaccaccaaaatccaccgacatgtcggccgctccatgcgtacgattcgctccaatctttaccaaaacgacaatagtagctgctccttcaccagttccgtccctgagaggtccgcctttgtctccgaaaatctcaccgagtccgttatcgacatgcgtctcggcgaactggctgccaaaagcaacgctaaatctgntacgtctgagtccgaaaacgaggcccttttggagt

SEQ ID NO: 39204 - DNA, 378 bp, Gossypium hirsutum
  Clone ID: LIB3165-036-P1-K1-H7
gggatgaacaacatgggcatgaatttaggcatggggatggatatgggaatgggagaaagaccccaaatgcaaggaatgcccggcggttataaccctatgacgggttctggcagctattctcaacagccatatggtggtggttatcgatgagaatgggttcctatcccggagaagaggagtaaggaaattacatacaagcttgtgatatgagagagtaaaaaagagatgggaaaatagctaaaacattagacgttgggaatggaatcccaaagtagaagcagtagagtcgcacatttgtgttggcagatgagaacccatgtttttattcatattattgtcattcttggtaagctattgccagtgttgggccataatcac

SEQ ID NO: 39205 - DNA, 371 bp, Gossypium hirsutum
  unsure (1)..(371): unsure at all n locations; Clone ID: LIB3165-036-P1-K1-H9
anataccagaaaancaaaaagaagaagaaaagaganccggaggangncncnnacggncccaacnaancncncaaaancaannnngaagccaaagcnggagacccaagnganccccaaggcnncanccagancannganngnangccccnccagcaanccccccnccnccgacaaancggcnncaacaccccaggccnncncagcggcncncgcncnnncnnccaacccccnnncggcnccacccccngcngnngcggacanngcggggcncaccccnngcaaagagnccaagcaanncgccaagcgcgagaagcagcagancaagaagcnggaanccccgnngaagcccaacgccccccgaagcgcaccgg

SEQ ID NO: 39206 - DNA, 422 bp, Gossypium hirsutum
  Clone ID: LIB3165-037-P1-K1-A1
cgggcgacccacgcgtccgaaaaagaaaaatggcttctgcttttttttttttctcaagtcttcacctattatcgacggagtccgagtggattaagggccaaaacctccgccacccttcggtttgttttgtacggtcacaccctacatcggccgcctttaccgtccgtgctagttcatatgccgatgagcttgttaagaccgcgaaaactgttgcatctccaggtcgtggtattttggccatggatgaatcaaatgctacatgtgggaagcggcttgcctcgattggtctcgagaataccgaggcaaaccggcaagcttaccgtacccttctcgtgtctgcccctggcctcggtaactacatctcgggagctatccttttcgaggagactctctaccaatctaccatcgatgggaaaaagatg

SEQ ID NO: 39207 - DNA, 366 bp, Gossypium hirsutum
  unsure (1)..(366): unsure at all n locations; Clone ID: LIB3165-037-P1-K1-A10
gcngnatgaatcttcccggattccttatttacctcttttttaacaacaatgtgggataccatgatgtccaccatcagctttatggtaccaaatacaacttctctgtctactttgacatatgggacagaattctaggaacctatatgccttattcacttgagaagagacctgatggcggccttgaagtacgacgtgctgatcaagaacacaagaaggattgattgattaattacttgattaatcagccaattatgataactagtgagcatggattgatgaatgttccattaggttttatatatgtatctaatgtgtatgtattatgtgtactactatgcttcactaggaggtaaggcaaatctggtg

SEQ ID NO: 39208 - DNA, 403 bp, Gossypium hirsutum
  Clone ID: LIB3165-037-P1-K1-A11
aaaccaggttcgatggggaatcattttttcttggggttcgagaagtaccttggggggtctggtgagccggcataccctggaggaccactgtttaacccacttggttttgggaaagatgagaagtcattgaaggatttgaagctgaaagaagtgaagaatgggagattggcaatgttggcaatcttgggttacttcatacaagggctcgtgacaggtgtaggaccataccagaacctgttggatcacttggctgaccctttcaataacaatgtcttgactaacctcaagttccattagatgaaagtgcctatatttgttccatggaactaccctccccccccctccggctaaaagctccattgccaaatccctttctgctcctttcttgatctcagtaaaacat

SEQ ID NO: 39209 - DNA, 241 bp, Gossypium hirsutum
  unsure (1)..(241): unsure at all n locations; Clone ID: LIB3165-037-P1-K1-A12
atatgtnntgcagannagttttcaaagtagccctgggcctgggtattccggcccacccaatacatgnnattggatcnncggaaaccaacannaagacttgcgaaggagtggtnntctttgatccgannattgttagaaaagagaaaccggtgnnncaatcccaaggctcagnnggatgtcaacttacaaacatcgcccacgttttgggaccttgtcctctatgcttaccctagcttgtgag

SEQ ID NO: 39210 - DNA, 490 bp, Gossypium hirsutum
  unsure (1)..(490): unsure at all n locations; Clone ID: LIB3165-037-P1-K1-A2
taccggtaacggaacgggccggagccacgcgatgcgacaatagaatcaccatgaagggttttatgtttttttatgcatnagagatganggaggtggagctagcgttctccttcgaggtacccgatcctcgttcgccacgccctgagaagcancccnntattcctagcaccgtttaccagtggcaaaaggaagagaagtgcattatcggtaagggagaaccaactttaagcnagcctggggaaccgatancccggtccttttcaagctgacccaggcaagaaccggtttatnntaatcgctggattggatnngcattgtctgatcccaagggtcancacacgaagatccgcagcatttnggatctcatacntggtctcaaggctgacanaatctttgggtcaaaaagattgcttctcgcctcaatgttagaccaagcatttgatcgatgatattgatggaatcccaactttttcagatggagaaaagtgct

SEQ ID NO: 39211 - DNA, 407 bp, Gossypium hirsutum
  Clone ID: LIB3165-037-P1-K1-A4
gtccgttcgaccttccatcccctctccctttttgtttctgaaaagtccaagtttttctgcaggggcgaccgtctctccaactcctctgttgaaagatgagctcgacatcgtgattcccacgattaggaacttggactttttggagatgtggagaccctttttccagccttaccatctcatcattgttcaagatggtgatcctaccaagaccatcaaggtccctgaaggcttcgattatgagctttacaataggaacgacatcaacaggattttgggtcctaaggcttcttgtatctctttcaaggattctgcttgtaggtgctttgggtacatggttttcaagaagaaatacatctataccattgatgatgactgctttgttgctaaagatccatctggcaaagaca

SEQ ID NO: 39212 - DNA, 405 bp, Gossypium hirsutum
  Clone ID: LIB3165-037-P1-K1-A5
accaaggcgtccgtttgaccggtaagttccctggtgattatttttgggacactgctggactctcaggtgaggccgaaacctttgctaggaaccgtgagctcgaagtcattcactgcagatgggccatgttgggagctcttgggtgtgttttccctgagctgttggctaggaacggtgtcaagttcggtgaagctgtatggttcaaggccgggtctcaaatcttcagtgagggtggacttgactacttgggtaacccaagcttgatccatgctcaaagcattttggccatctgggcttgccaagttatcttgatgggagccgtcgagggctaccgtattgccggtggaccactcggtgaagtgactgacccattgtacccaggtggcagctttgacccattgggtc

SEQ ID NO: 39213 - DNA, 422 bp, Gossypium hirsutum
  unsure (1)..(422): unsure at all n locations; Clone ID: LIB3165-037-P1-K1-A6
gccgacccacgcgtgccgcccacgccgtccgcccacgccgtccgttttatttgcttcctatntttcatggggctgcctgcagctcggggtgtcaatcctnnacttcaatcccttctctttctacccannatctccacctacannagagcttcnnactccggtacccgctgcggcgccaacgcgacccaaccgcggaccnnntctcgttaaagggccgtatncttaagggcaccgannagccatctcaggccatctcaatctctcaaaccgccgcccagcggaacctcttcatncgacggggcgacggtcaaccccaaactcccttcccttctcccggcctcaatcaaatccgacnnctcctcgccgccctgcgcgaacctcctacnggcaaggatcaattggcgccctcgccgtccacgtac

SEQ ID NO: 39214 - DNA, 411 bp, Gossypium hirsutum
  unsure (1)..(411): unsure at all n locations; Clone ID: LIB3165-037-P1-K1-A7
gaaagattgtggaacaaatttatattcctccaccaggtgttagacaaacaatgctattcagtgccacctttccaagagagatacagagactggcctctgattttcttgcaaactatattttcttggctgtggggcgagttggatcaagtactgatttgattgtccagagagtagaatttgttcatgagtcagacaaaagaagtcaccttatggaccttcttcatgctcagagagcaaatggtgtccagggcaagcaagctcttacattagtttttgttgagacaaaaaagggagctgattcacttgaacattggctgtgcatgaatggttttcctgcaactaccattcatggtgatagaagccagcangaaagagaacaagcattacggtcatttaaaaccggtgctaccc

SEQ ID NO: 39215 - DNA, 411 bp, Gossypium hirsutum
  Clone ID: LIB3165-037-P1-K1-A8
ccacgcgtacgcccacgcgttcgtacgcttacgccttacgccatacgcatttggccgcacgttgttttgtgctctgtgtttctcaataaattccttattcctacaaaacccccaaaattaaagaaggatcaaaccgaccctttgcaattccaagacacatgaaccaagagacataccacgatggcaacaacgacggagaagcaagccatggttgttggaatcgacgacagcgagcacagtacgtacgcgctgcagtggatcctcgatcacttctttgctcctttcgcttccaatcctcctttcaagctcgtcatcgctcatgccaagcctactgcttcttctgctgttggtctcgccggacctggagctgctgatgtattgccctatgtggatgcggatttgaggaagatc

SEQ ID NO: 39216 - DNA, 410 bp, Gossypium hirsutum
  Clone ID: LIB3165-037-P1-K1-A9
cgagcaactagagcgaaagattatttatgtccactgtgccctttcacttgtggggtttttgtggcgctaatgatggcacagatcgaggtcttgagaaagaagggccactcgtactcagaaatcatcaatgagagtttgattgaagctgttgattccttgaaccccttcatgcatgctcgaggagtttctttcatggttgataactgttccacaaccgcacgattgggatcaagaaaatgggctccacgttttgattacaaccttactcaacaagcattcgtagcagtggattcaggtgctcccatcaaccaggacctgataagcaacttcttatctgatcctgttcatgaatctatcgaagtctgtgcaaagctaagacctactgttgatatatcagtgcccccagatgc

SEQ ID NO: 39217 - DNA, 394 bp, Gossypium hirsutum
  Clone ID: LIB3165-037-P1-K1-B1
cccacgcgtccggggcctctccaattcgattcctctcttctctagaaaccaccggcgaggcatggctctaatcacccgaaccaccgccaatcgcctccctcacctcctctccctacagcgtgccctcgctattcacaccaccgtcccttctctctcctcttctgccaccccaaccacatacgctcgcccttctccgccgtccacctccggcactccctccagtctgtctaagcctgctgagtacgtgatctccaaggtcgatgacctcttgaactgggcccgtcgtgggtccatatggcccatgactttcggcctcgcttgctgcgccgtcgaaatgatgcacgccggtgcttctcgctacgacttcgatcgctttggtgtcatttttaggcct

SEQ ID NO: 39218 - DNA, 349 bp, Gossypium hirsutum
  Clone ID: LIB3165-037-P1-K1-B12
gttttctcttcctccaattaatatgtatatcttcgttaagaccctgaccggcaggaccatcaccctcgaagtcgagagttccgacacgatcgacaacgttaaggcgaaaatccaagacaaggaagggatcccaccagaccaacaacgtctcatcttcgccggaaaacagctcgaagatggccggaccttggccgattacaacatccagaaggagtccaccctccatctcgtcctccgtctacgtggtggcatgcagatcttcgtcaaaaccctgaccggcaagaccataactttggaagtcgaaagctctgacaccattgacaacgtcaaggccaagatccaagacaag

SEQ ID NO: 39219 - DNA, 395 bp, Gossypium hirsutum
  Clone ID: LIB3165-037-P1-K1-B2
cccacgcgtccgtccacgcgtccgttcattcgtccggaaagaaatatttctttggtttgttcttttcgactttcggctactgagtcaccaaacgagttaaggaaaagagagacaagtttcaccaaaccatggggtcgatccccgatcctggcgagttgaccgagttaacccagccgagtttcgatgagttccagcgtcaaacgtctctgatgacgagctgtactctcctctggaaagaactgtcggatcacataaattcacttgagcagaacctgataaagcagtcggagaccttgaaacgcaaaatcgaggcactggactcggagaccaaggcttcactcgactcactcaagaagcgggaactcagtatcgaggacagtgtcaagatcgcactc

SEQ ID NO: 39220 - DNA, 362 bp, Gossypium hirsutum
  Clone ID: LIB3165-037-P1-K1-B3
ccttgctcttttatatacctaccgttaattcattaacttcacccaagactaaagcgaagcggggtttagtagtacaaaccgcttggaaccaaacggaccattttacttctgtgtccaaacgatatgatgatatagctacaagcagctaccacggacttatctgtggagggagatataccagccgaggaggtggtggagctgcccgcggagctgcgcacagagttgatgccgaagcacgtagcgcagataatggacaggaacgggcggagggctcggcagcagggattggcgacatcagcaggacacgaaggcagtgtaaaagcgatgagggagctgatcgaactatgatgccagtgggggat

SEQ ID NO: 39221 - DNA, 407 bp, Gossypium hirsutum
  Clone ID: LIB3165-037-P1-K1-B4
gtcggtttaacacaggttacaaactcaaattctttaagttctcactttcaaaaaacttcgcaggttcaccatgtctgacaggtgcggcaactgtaactgcgctgaccgcagccaatgcacgaagggaaacagcaacaccatgatcattgagactgagaagagctacatcaacactgctgtgatggatgctccagctgagaacgatggcaagtgcaagtgcggtactggctgcagctgcacagactgcacctgtggccactaagccaacatacaatggtcatgcttcaggtcatggcatatatagggatctaaataatgaatttaaggttgaataatttgtctgttgtagtttgtgtggtgacttatatctgtcagttaacctttgtatcctttactatgatgtaatg

SEQ ID NO: 39222 - DNA, 268 bp, Gossypium hirsutum
  unsure (1)..(268): unsure at all n locations; Clone ID: LIB3165-037-P1-K1-B5
cggaagggttggggcccaaagcgccaatttccttaagttcaagcccgaagaaattaaggccatcatgaatgactttaatgaaccgggtacgctcgctcccaccgggttgcccctcggtggcacgaaatacatggtgatccaaggcgaaccgggagcttgtatccgagggaagaggggacncngaggtgttactgttaagaagaccaatatggcctngatcatcggaatctatgatgaaccaatgacacccggccaatgcaacatgatc

SEQ ID NO: 39223 - DNA, 360 bp, Gossypium hirsutum
  unsure (1)..(360): unsure at all n locations; Clone ID: LIB3165-037-P1-K1-B6
gtcacctcttcagagaaagaatcttttttttcttcttcttcttcttcttcttcggcttgactttacatccatcaaggctgaagaaaaaaaattaggttattctgagtgatgggtgtgagctgccgttgttcccacacctcccatatcactgaaatcatcataaccagcttctttcgtcataagtcttaaaacaagtgaacaactntgtgttctttaaaatccaaaagccagagtagnctttctttctcttctntttcttttggtttttatgttaaatttttatatcatttgatgatatggtgaagatgatttcttgaacaagatcgatcatttagcttgaaactctcatggcgggtggga

SEQ ID NO: 39224 - DNA, 409 bp, Gossypium hirsutum
  Clone ID: LIB3165-037-P1-K1-B7
gagactcttttgtataactgtagcttatagtactagtaagcagtaatagcaatggcctcctccatgatctcatcggcaaccattgccaccgtgaactgctcctccccggcacaggccaacatggtggcccccttcaccggcctcaagtctgcctctgctttcccagtcactaggaaggccaacaacgacatcacttctcttgcaagcaatggtgggagagtgcaatgcatgcaggtgtggcctcctcttgggaagaagaagttcgagacactctcatacctccccgatcttacacccgtacagttggctaaggaagtagattaccttcttcgctctaaatggattccttgcttggaattcgaattagaggagggattcgtgcaccgtaagtactcgagcttacccacgt

SEQ ID NO: 39225 - DNA, 381 bp, Gossypium hirsutum
  Clone ID: LIB3165-037-P1-K1-B8
cccacgcgtccggtgacggttttttgtagaaattttactgggcaccaactaggggcgaccgtatcggtgtttgcaaaggtattttcaggaccgacggcgtccgagatgaagacattgttaagctcgtcgacaccttccccggccaatccatcgatttcttcggtgccttgagggctcgggtttacgatgacgaagtgaggaaatggatcagtgaggtcggagtcgcaagcgtagggaagaagttagtgaactcaagggaaggacctccaacatttgagcagccaaaaatgaccattgaaaagctattggaatatggaaacatgcttgttgctgagcaagagaatgttaagagagtccaattggctgacaaatacttgagtg

SEQ ID NO: 39226 - DNA, 492 bp, Gossypium hirsutum
  unsure (1)..(492): unsure at all n locations; Clone ID: LIB3165-037-P1-K1-B9
ccgtccgnngaggaatgcgatccaccttattatcttttggctannaggataaattanngagaagtcaantggggtggcggnnataatgaatcgnnggtgatagcccattgagaggtgannagttcgaaccccagctttctggcatggtttnncttcagaaaggctcagcgatnngaagtagttggctgatatttcgaagctannggattgggctgcatggaccctnntccttccagnntagagaatgggggagggtccatgccaaatacctanncattacgaggannatggtcaaaagggtatgagcccccacatttcgattatttttcaatgacannaggctaatcaaagagccctgggcggtcanccgtataagccattggtaccctgatgtatttgtctggattgttgagaagtgggtggggaaaacttgtgtttcccaaatgcaagagggaaaacctttctcagccaaaaggatgatagctggtcaga

SEQ ID NO: 39227 - DNA, 254 bp, Gossypium hirsutum
  Clone ID: LIB3165-037-P1-K1-C10
gttttaaagacacaaaatcccagatgggtttcggctgcaaagcactgtagtcggttgttttcacagatgtgggagcccaaccacaagaagcaagtgcaacgcagcagcaatattataacaaagagagtgggttaacaaacccaacgcaaaccagacaaacagaaccttaaggactcttggaaacctgacggccgaacgccaaacaaagatggagatagtcttccaacatattggatgagacagaaaataatgat

SEQ ID NO: 39228 - DNA, 403 bp, Gossypium hirsutum
  Clone ID: LIB3165-037-P1-K1-C11
cccacgcgtccgaatttgcttttattcttgcgacggcaacaccttcgaatgtcggtggattcgcgacggggcatataaatattccagatatggtgaagacggggataccgcttaagactgctggcattgtgattttatccttgttaatgcctacgcttggtgtttatgtttttggactaaacggaggagttcaatagctgcaaggggaagtatgatatatatatacatgtatgtatatagtgtcgtttgatagcaaaaaatggtaaaatttatcgagacaagatgtacagccatacaggtctatcacaagttgtgcaaaagcatgagaagaatgaagcttcatttattggttgcaacaaagtgatcagaagagttgtggggagaattcttgaatctactttat

SEQ ID NO: 39229 - DNA, 433 bp, Gossypium hirsutum
  unsure (1)..(433): unsure at all n locations; Clone ID: LIB3165-037-P1-K1-C12
ccggaaanccccgggngcgaccaaagaaagaattgctcatctttccttcagtgaatanttgttttgagtgaaaaaaaaaatgttgggagtattcagcggagcgatagtgtccccgccggacgagctggtggctgccggttgcaggacgccgtcgcctaagataacggcggacgctcttgtgaaacggttcatcgaggcaaacccctccaccgtgtctatgcagatcggagatcatgtccaattcgcttattctcaccgtaacgagtctgctttacttcccaggtcattcgcggtgaaagatgaaatattctgcatgtttgagggggcacttgataacttagggagtttaaagcagcaatatggacttggtaagtcagcaacagaggtggtattggtgatagaagcttacaaggctcttcgtgacagagcacct

SEQ ID NO: 39230 - DNA, 391 bp, Gossypium hirsutum
  unsure (1)..(391): unsure at all n locations; Clone ID: LIB3165-037-P1-K1-C2
cccacgcgtnccgcgggccttggcnnagaatcagcggggaattgatagtaccctgttgagcttggactctagtcgcgacgtgttgtgtaaatgggacttgagaggtgnntaggataagtggganngctctcgggcgaaattgaannataccactactttnntaacgttattttaacttaaattccgtgaatcggagggcggggcancggcnnccctcttttttgtgacccaaagggccggcttttcggcccggcccccgatccgggcggaaagacaaattgtcaggtggggagggtttggctgggggcggcaccaatctgttaaaaagaataacgcnnaggtgtcctaaagattgaagctcaacgagaaccaagaaatctctgtgtggaaa

SEQ ID NO: 39231 - DNA, 437 bp, Gossypium hirsutum
  unsure (1)..(437): unsure at all n locations; Clone ID: LIB3165-037-P1-K1-C4
cgtncggaaaaaaccgggcggaccaacgcgtccgcccacgcgtccgcccacgcgtccgtttgtttactttgtctaggtttgttgtcagagagggcaattttcataaacatcatgccgtgtgcagaacatcatcgtctttggttccttccagaacgctacggagagctcatctggatgttagagctggcatttctttgcctgagaatggaaaaggttttgcaattcaacgtaagccaagtggtccccttgtttctcttgcagctcctgcctcgataactcctgctttaaggggtccccaagttatctgcaatgctgctgccaatgtatccggagatattcctacaccaagtgggatgagcaagtatgagagaataattgaaactttgacaactcttttccctgtgtgggttattttgggaactattatcggcatatac

SEQ ID NO: 39232 - DNA, 391 bp, Gossypium hirsutum
  unsure (1)..(391): unsure at all n locations; Clone ID: LIB3165-037-P1-K1-C5
aaccgggccgacccacgcgttcggccaacccttccgttaaaaccaaattttgttttttctctctctctctctctccaaggaggggaattcctccttgggaggagctaagggttggtgggtgttctgaccttggctctgcctgaaaattaaccagatttttaacccacaaccaccgccatgggaagatttgaagagggaggattcgattcagtggtttgccctaagcctatacgaacctntagatggtctaccaacagctgttatcagactgagatggctgattcaaaagctggtgcagagcttcttgatataatcctctccgagggagggtatggggccgagaaccccaccgaccaaatgggcttcatcaccaccgtatttctgtggatca

SEQ ID NO: 39233 - DNA, 376 bp, Gossypium hirsutum
  Clone ID: LIB3165-037-P1-K1-C7
cccacgcgtccgcccacgcgttcgttcaaccactatcactaccattatggcttcggctactgtttctgtagccaaacccaaccttcagattcaggcaaaaggaaagggtgttggttttgcagatttctcaggcctacacaactcctctactagccttccctttgccaggaaaacctctgatgacttgcattcactcgttgcttttcagacatctgctctaggaagcaataatggcgggtacaggaaagggatggcagaggcaaagctaaaggtggctataaatgggtttggtaggattggcaggaatttcttaagatgctggcatggccgtaaggactccccacttgatgtcattgccatcaatgacactggtggt

SEQ ID NO: 39234 - DNA, 439 bp, Gossypium hirsutum
  unsure (1)..(439): unsure at all n locations; Clone ID: LIB3165-037-P1-K1-C8
ccgtaacggaatncccgggcaaaatcagttgcttcacaatggcctctacaaccattgctttttcttccccatcattcgccggtaaggcagggaagttctccccttccacccctgaaatccggggaactggccgtgtttccatgaggaaaaccaccaagcctgttccttctggtagcccatggtacggtcctgaccgagttttgtacttgggtccactttccggtgagccaccatcttacttgaccggtgagttccctggtgactatggttgggacactgctggactctcagctgatcccgagacctttgctaggaaccgtgagctcgaagtcattcactgcagatgggccatgttgggagctcttgggtgtgttttccctgagctggtggctaggaacggtgtcaagttcggtgaagctgtatggttcaaggccgggtc

SEQ ID NO: 39235 - DNA, 411 bp, Gossypium hirsutum
  Clone ID: LIB3165-037-P1-K1-C9
gtcactcttttcctcctatttatacttaagccaatggcctccttatccttgctcgggctctcctccgccacccgttttaccccacgcgccactcctcttaaccaccgggctcgaacccagaaatcattctccatcaggtcccaatctgccccagtcctttcccaagatgagctcaaaaagcttgcagctgacaaagcggttgagtctgtcaagtcaggtatggtcctaggcctaggaacaggctcaacagctgcctttgtggttgacaaactgggtcaactcctttccaccggtcaactttctaacatcgtcggaatcccaacctcaaaaagaacccaagagcaagctgcatcacttaatatccctttatccacccttgacttgcatccccatattgatctcgccattgat

SEQ ID NO: 39236 - DNA, 382 bp, Gossypium hirsutum
  Clone ID: LIB3165-037-P1-K1-D1
cccacgcgtccggtccgtctctctgtttttttccacaaccactatcactaccatgatgggttcggctactgtttctgtagccaaacccaaccttcagattcaggcaaaaggaaagggtgttggttttgcagatttctcaggcctacacaactcctctactagccttccctttgccaggaaaacctctgatgacttccattcactcgttgcttttcagacatctgctctaggaagcaataatggcgggtacaggaaagggatggcagaggcaaagctaaaggtggctataaatgggtttggtaggattggcaggaatttcttaagatgctggcatggccgtaaggactccccacttgatgtcattgccatcaatgacactggt

SEQ ID NO: 39237 - DNA, 404 bp, Gossypium hirsutum
  Clone ID: LIB3165-037-P1-K1-D10
agctcccccgccccgactcctttgtcatcaacagcacaattctaaacccagggggagtaaaaaaatggcagcaagtgtagcaacaatggcgatgctcaatgcaaaatgcctaagcatcagctcaactaagatgagcagcccaacaaagccaaccccaaagcccttctcccttctctccatgcagaacctccccaaaggcctcaccatctcaaaaccagccaacaactcaaacctaccttcttcactcgctggcagcgccattgctggagctatcttctcaaccttaagttcatgtgaccccgccttagctgcacaacagattgctgaaatagctgaaggagacaaccgtgggctagctctattgcttcccataatcccagcgatcgcttgggtcctcttcaaca

SEQ ID NO: 39238 - DNA, 404 bp, Gossypium hirsutum
  unsure (1)..(404): unsure at all n locations; Clone ID: LIB3165-037-P1-K1-D11
cgtcccgagcccccttaaagncctatctttttttttcttctanctactactaaacttagagggtggaaatggtcctccataccatcaaaccccatcactggaggtctcctcttctgccgctaatacaagaaagataacaccacccactccttcaacttctcgtttctctttgccctttacttttaagtctcagttcaacgccttggtagtcggtgggaggccattgcttggtgggtttaaccactcttctgttcctcgtgccgttgccactcccaattcagttctcagcgaacaagccttcgagggtctttcgcttcaccaagaagacgacgacgtttatgactccgaaggtgaggttgggagtgggttcgagtctgagtctaccctcgacgatgaactcgacc

SEQ ID NO: 39239 - DNA, 426 bp, Gossypium hirsutum
  unsure (1)..(426): unsure at all n locations; Clone ID: LIB3165-037-P1-K1-D3
cccacgcgttccggtaaagggactgtttctttttaattcagncgctgggggatgtgaaacagcgtctcatctactacannagagtacnnaatgtttggttcttaatagtaacaaactctcagnttcaaatacctcctgcnntgctgtttctgcaatctcctggccccctcagnccaaagtttcacaaattcaaatgttgtgacannagcaaaatccaagccgagtgaaaaggtatcacnagtcttttgcatttctttaaaacctgttgaaagatttgtcatcnttcagtattcaagttcctcaaactccatcattatcatcaccattttcaactatgacagcctcatcactcacatcagttaatgtctcatctactgaaactagtccaacatcggcaccaaaattttccttttcaacttcattttc

SEQ ID NO: 39240 - DNA, 356 bp, Gossypium hirsutum
  Clone ID: LIB3165-037-P1-K1-D4
accattttggatacaaagaagatggtgagtacatttctcccccaccaagtgacatggaaagggtgggaaagctaatggagacctacctagttgaaatatcatctgaccgtaatctacctatctcgaaattcatcggtcttgctgaactcattccggaacaatccagggtaacagaggatgggatgtatagagccatagatatctacctcaaggcccaccccactattactgacatggagaggaagaaagtttgcagtttaatggattgccagaaactctcgagggaggcctgcgcgcatgcggctcagaatgaccgtcttccagtgcagaccgtggttcaagtcctttaccatgag

SEQ ID NO: 39241 - DNA, 398 bp, Gossypium hirsutum
  Clone ID: LIB3165-037-P1-K1-D6
caataatttcttccgttgatctttgttagttattagctttttaatttttcattatggggagagatcaagatcggaatcaatggatttggaaggatcgggcgtttggttgcgagagttgctctccaaagcgatgatattgagctcgttgctgttaacgatcctttcatcaccactgaatacatgacctacatgtttaagtacgacagtgttcacggtcaatggaagcatcatgagcttaaggtgaaggactcaaagacccttctctttggtgaaaagcctgtcacagttttcggtatcagaaaccctgaggaaatcccatgggctgaggctggagctgagtatgttgttgagtctactggtgtttttactgacaaggacaaggctgctgctcacttgaa

SEQ ID NO: 39242 - DNA, 393 bp, Gossypium hirsutum
  Clone ID: LIB3165-037-P1-K1-D7
ttttcagacatgactcccttctcttttttaccttgtgccagcagtaccacgtcgcctgatgcattccttcttcgttatcctcatctacgtcttctgaaatgccgtcactacgaacctcaacttcccaagatagagaatcttatgttgaggcctttccaagttccaactaggccttatctccctatcttgagcttgagaaaccctaggcgcacgcacccttgtgctaatatatcttctttcgctgaggcggaaggtgggaaagagcaaaacgatgaagcaatccatcttggaactcggcaagaagatgctaaacccaatgaagagtacctgcctggaatggctcaagcctttaatatatcttccagaactgcttctgctattgctatattcata

SEQ ID NO: 39243 - DNA, 403 bp, Gossypium hirsutum
  Clone ID: LIB3165-037-P1-K1-D9
cggacgcgtgggcagcaattgttcatatggtctaatgtatatcaaacaatcatggaaaccattatcatttgtcgccccatctttgaagaagaacatggtttgtgaagctctgtccttaaccatccctttctttacaaatttagcctccaacgatgctaaactagctactaaccgctataatttatgtcgttcaactccaagaattcgatgctcaagttccagtgcagaagggcctgtaactgctgataaacttgaaaatgattatgccttgactggttctgcttatgattttgaaagaggtaccatatcgattactcgtgagtccttatcttctccaaagaaggtaattcttgtaaggcatggccttagcacttggaatgaagagggtagagttcagggcagc

SEQ ID NO: 39244 - DNA, 414 bp, Gossypium hirsutum
  Clone ID: LIB3165-037-P1-K1-E1
tttagctatagcatacactactagttccctctactagcaatggcttcctcaatgatctgatcggctaccattgccactgcctctccggcacaggctaacatggtcgctcctttcaccggcctcaagtctgcctctgctttcccagtcaccaggaaggccaacaacgacattacttctctcgcaagcaatggcggcagagtgcaatgcatgcaggtgtggcctcctactggaaagaagaagttcgagactctctcatacctccccgatcttacacccgtgcagttggctaaggaagtggattaccttcttcgctcaaaatgggttccttgcttggaattcgaattagaggagggattcgtgcaccgtaaatactcgagcctacccacgtactacgatggacgctactggaccatg

SEQ ID NO: 39245 - DNA, 378 bp, Gossypium hirsutum
  Clone ID: LIB3165-037-P1-K1-E10
aacaagttcaataggaaaggagattgacaaattattgttgggaggagaatctattctctctctttgtcataacagccgtagcatctttcgtcaacaactctttccttccgagagttcacagggatttgaagcgtaaataagatcttattaagatatagtttgggggtgtagatattgctacctgttttgtttaaacatggtgatggtagagtcgattgcaacaacttcacttcttggacaccgccctttatgtggaagattttccgctagggatgtctcctgcaaacaaaaatctttgagtaactgcctgtctcctttcaaagaatttattggcaaaacgatcgttgttcctccttcgccaagattgagagtggaaag

SEQ ID NO: 39246 - DNA, 397 bp, Gossypium hirsutum
  Clone ID: LIB3165-037-P1-K1-E12
cccacgcgtccggagaaagctttgtttgcaaaaccatggcctctgcttctctcgtcaagacttcaccagttttagacaagtctgagtgggttaagggtcacacccttcgccaaccttccacttctgtggtgaggtgccaccctgttgcaccctccggactaactgtgcgtgcaagctcatatgccgatgagcttgtcaagactgctaaagctattgcttctcctggccgtggaattttggccatggatgagtccaacgctacctgtgggaaacgtttggcctcaatcgggctagaaaacacggaggctaaccgccaagcctacaggacgttgcttgtttcagcttctggccttggtcagtacatctcaggtgccatcctctttgaggaaaccctcta

SEQ ID NO: 39247 - DNA, 399 bp, Gossypium hirsutum
  Clone ID: LIB3165-037-P1-K1-E2
ctctagccacttggggcggccaatttgtgttactccaaaattcagcttggctcctctggtacccaggctttctgaattacttggcattcaggttgtcaaggctgatgactgcattggtccagaagtagaaaagttagttgctgcacttcctgaaggtggtgttcttcttcttgaaaatgttagattttacaaggaagaggaaaagaatgaacctgaatttcaaagaagcttgcttcgttagctgatctctttgtcaatgatgcatttgggactgcacatcgagcacatgcatcaacagaaggtgttacaaaattcttgaagccatcagttgctggtttccttttacagaaggaactagactaccttgttggtgctgtttcaagccccaaaaggcctttt

SEQ ID NO: 39248 - DNA, 437 bp, Gossypium hirsutum
  unsure (1)..(437): unsure at all n locations; Clone ID: LIB3165-037-P1-K1-E3
tccggaaanacccgggccgaccaagccgtccgggctctcttcactcctcctattttttctttttcttccttgtcctcgccccttcggtgggaagctacatttccatggccccccctgaattggttcaacccagtgataaaacaaacgttttcgctaaacaagtcagtttgcgtaatcgtgcatatgttacgttcttggccggaaatggggactacgtgaaaggcgttgtagggttagccaaagggttaaggaaagtgaaatcggcgtaccctttagtggttgccgttttacccgacgtgcctgaggagcataggcggatcctggagaaccagggttgtatcgtccgagagatcgaaccagtttacccgcctgagaaccagacccagttcgccatggcctattacgtcatcaattactccaagcttcgtatttgggag

SEQ ID NO: 39249 - DNA, 233 bp, Gossypium hirsutum
  Clone ID: LIB3165-037-P1-K1-E4
gaaacgtgacccgcctcagcgcttttttttacgcagggatgatatgccaaagccgggtgaggctggtcaggctcctcgtcctggtgttgcggctcctgctcgtgcataaggcttttgaagtttaagatgaatttgtatttcgtgttttgctttgagatatggttgcttgaattttgagaacttggatcatgtagggagtttttttttattgttttaaagttcgatactttgtt

SEQ ID NO: 39250 - DNA, 232 bp, Gossypium hirsutum
  Clone ID: LIB3165-037-P1-K1-E5
gcattcaggttgtcaaggctgatgattgcattggtccagaagtagaaaagttagttgctgcactttctgaaggtggtgttcttcttctggaaaatgttagattttacaaggaagaggaaaagaatgaacctgaatttgcaaagaagcttgcttccttagctgatctctttgcaatgatgcatttgggactgcacatcgagcacatgcttcaacagagggtgtcacaaaattc

SEQ ID NO: 39251 - DNA, 411 bp, Gossypium hirsutum
  Clone ID: LIB3165-037-P1-K1-E7
cccacgcgtccggctatagcttactttactagtacccactactagcaatggctgggctcaatgatctcatcggctaccattgccactgcctctccggcacaggctaacatggtcgctcctttcaccggcctcaagtgtgcctctgctttcccagtcaccaggaaggccaacaacgacattacttctctcgcaagcaatggcggcagagcgcaatgcatgcaggagtggcctcctactggaaagaagaagttcgagactctctcatacctccccgatcttacacccgtgcagttggctaaggaagtggattaccttcttcgctcaaaatgggttccttgcttggaatacgaattagaggagggattcgtgcaccgtaaatactcgagcctacccacgtactacgatggacgc

SEQ ID NO: 39252 - DNA, 398 bp, Gossypium hirsutum
  Clone ID: LIB3165-037-P1-K1-E9
gggactctcagactactcttttttttcagctccaccatcacccccaaaaggcagagcaaattgtagaagatggcaacacaagcacttgtatcatcgtctcttacctactcagtggagactgcaaggcagattcttggagctaaacgacaaattgggccttcaaggaaaggatcctttgttgttaaggcagcttcgactccacccgttaagcaaggagctgatagacctttatggtttgcatctaaacaaagcctttcatacttggatggcagccttccaggtgattatggatttgaccccttgggactctcagaccctgaaggtccaggagggttcatcgagcctaaatggctagcctacggtgagatcatcaacgggcgttatgctatgttgggtgc

SEQ ID NO: 39253 - DNA, 397 bp, Gossypium hirsutum
  Clone ID: LIB3165-037-P1-K1-F1
accacgcgtgcgctttccctcaaacttattgatccatttccctatacacacgcggcggatggagggttcctccatcgctcagggtccagacgacgacgtccctgctcctggtcaacagtttgcacagttcggcgcgggttgcttttggggtgttgaattggccttccagagagttccaggggtgaccaaaacggaggtggggtatagccaagggtttatgcataatcctagctatgaagacgtgtgtacggggtccaccaaccataatgaagttgtgagggttcagtatgaccctaaagagtgtagctttgacactttgcttgatgtattctgggctcgccatgatcctactaccctcaaccggcaggggaatgatgtgggaacacagtatagatct

SEQ ID NO: 39254 - DNA, 398 bp, Gossypium hirsutum
  Clone ID: LIB3165-037-P1-K1-F12
cagtgagactcttttgtataactgtttcatatagtactagtaagcagtaagagcagtggcctcctccatgatctcatcggcaaccattgccaccgtgaactgctcctccccggcacaggccaacatggtggcccccttcaccggcctcaagtctgcctctgctttcccagtcactaggaaggccaacaacgacatcacttctcttgcaagcaatggtgggagagtgcaatgcatgcaggtgtggcctcctcttgggaagaagaagttcgagacactctcatacctccccgatcttacacccgtacagttggctaaagaagtagattaccttcttcgctctaaatggattccttgcttggaattcgaattagaggagggattcgtgcaccgtaagtact

SEQ ID NO: 39255 - DNA, 389 bp, Gossypium hirsutum
  unsure (1)..(389): unsure at all n locations; Clone ID: LIB3165-037-P1-K1-F3
gcggaccaagccgtccgaaaaatcanttgtttaacaatggcttctttatccatggctctttcttccccatggttcgccggtaaggaaggaaagttttccctttcaacccttgaaatccggggaactggccgtgtttccatgaggaaaaccaccaagcctgttccttctggtagcccatggtacggtcctgaccgagttttgtccttgggtccactttccggtgagccaccatcttacttgaccggtgagttccctggtgactatggttgggacactgctggactctcagctgatcccgagacctttgctaggaaccgtgagctcgaagtcattcactgcagatgggccatgttgggagctcttgngtgtgtttttcctgagctgttggc

SEQ ID NO: 39256 - DNA, 290 bp, Gossypium hirsutum
  unsure (1)..(290): unsure at all n locations; Clone ID: LIB3165-037-P1-K1-F4
tttcgtaatcttcttcaccagcgtcatcggcataactaccccggtcctcctggcccgttttttcaaggaaaacccgtgtacgacaaggcaattctaataatcaagtgcttcgctgccggagtcatcctttcaacctccttggtccacgtnctccccgacgccttcgccgccctatccgactgccaggtcgcttctcgccatccctggaaagatttccccttcgccggccttgtcactctaatcggggctctgctcgctctttttgtggacttaacggctagctcacatgt

SEQ ID NO: 39257 - DNA, 253 bp, Gossypium hirsutum
  Clone ID: LIB3165-037-P1-K1-F5
aagtgcattttcagatgctgggcttcttcctccatgcgcaagatgtctcgggagggaagcacatagaagaattctatggcaaagtggctagactacacggatccgttaagaatttgccagcgtcttgcacttcaagaatgggagccagaccagagttgtgtttcttcccacagtacgtggtgcagactatgcaaacaccaatcttcttcgtaaattcagcttatgactcctggcagattaagaacattttggc

SEQ ID NO: 39258 - DNA, 424 bp, Gossypium hirsutum
  Clone ID: LIB3165-037-P1-K1-F6
cgggccgacccacgcgtgcggcgagacaaaaatggcgacttcagttatgtttgaaaaacgggtcgtcctgctctgcggggactatgccgaggactatgaggttatggtccctttccaggctctgttggcttatggtatatcagtggacgctgtttgtcccggcaagaaggccggcgaaacttgccgcaccgctattcatcaactttccggccatcagacctataccgagatccgtggtcacaatttcacactaaatgcatcatttgaagatatagaccatactaaatatgatggtttagttatagccggaggacgagctcctgaatatcttgctatggatgcatttgtattgaacatggttcgcaattttgttaattctggaaagcctgttgcttcaatttgtcatggtcaattgatattagct

SEQ ID NO: 39259 - DNA, 142 bp, Gossypium hirsutum
  Clone ID: LIB3165-037-P1-K1-F7
cgagacgctatgtcacatccaactttttttttcatgcagataagagcgcgagggcgatggttctatgcctgtgcgaagcactagcagatgcacccgtagctactgccgttgacactgaagctgctacggaagcaactggtgc

SEQ ID NO: 39260 - DNA, 369 bp, Gossypium hirsutum
  Clone ID: LIB3165-037-P1-K1-F8
ctcaggccttctgtcgacccttatgcatgtcctgtcccacaacttcgctcctggggatgagcttcctcctacaccctgtgaagttatacaaggatccctcccgccttgccttgacggtgcatacattcgtaatggccccaaccctcagttcctccctcgtggaccttaccacctcttcgatggtgatggtatgcttcactccattcgaatctccaagggcaaggccaccttgtgtagcagatacgtaaagacgtacaagtactccattgaaaaccaaatgggttctcccgttttccccaatgttttctccggctttaacggcctaaccgccgcggccactcgcggtgctctctccgctgtcagaattct

SEQ ID NO: 39261 - DNA, 384 bp, Gossypium hirsutum
  Clone ID: LIB3165-037-P1-K1-F9
gtcaacttcatcttgtgtgcgtgcttggcgtctacggtgttgatcacaaagatggctgaggcttggagacaacaccatgggtccccactctcccatcctccatttaacattacgggctctgccttggctgtattcggtgtcttgggtattccacttgcggtaacatacagtattccattcgctttggcatccatctactgttctagtactggtggtggtcaaggtctttctctaggagtgctaaacttgtctatagttatcccacagatgttcgtatcagtaattagtggaccgttggatgatgcattcgggggtggcaacttgcctgcttttgtgctggggtccatagcggctgctgtcagtgcgttgttggctatattggca

SEQ ID NO: 39262 - DNA, 399 bp, Gossypium hirsutum
  Clone ID: LIB3165-037-P1-K1-G11
ggagtccttagctatgggaaattttttactaacatctgttctcgtaggactagtggttgcttcagctataacccaaaccgtgttggctcaaaactgtggctgtgcgccaaacttgtgttgcagtcaacatggttattgcggtcagggtaacgattactgtggcactggttgcaaagaaggcccttgtttctccaagtctcccactggtgcttcagttgcctccattgtttcacctcagttcttcaacgggataatcaaccaagctcgtgcggattgtgcaggcaagaaattctatacacgacaagctttcctgactgcacttgattcctttcccgatttcggaaaattgggttctgatgttgaatccaagcgtgagattgctgcattcttcgcccatgc

SEQ ID NO: 39263 - DNA, 330 bp, Gossypium hirsutum
  Clone ID: LIB3165-037-P1-K1-G12
cccacacttactctgaaacttattctctccttagaccaaatgaaacattagacagttttttacaacatactttactccatctaaacttacttccataatttaccaaacactctccttaaaccgtcttttaaccgtgtctatgcccaagaccatctcttgtcaatgtctcaaactcactgccttgctaaatatgtttcaactgcaccaccatcactaccactcctccacggatgcacccccaactgctatcaaccgttcttaccaaatgctaaaattgaactgcgccgactcgccactaccatttatacctgtctactataagcacccaac

SEQ ID NO: 39264 - DNA, 401 bp, Gossypium hirsutum
  Clone ID: LIB3165-037-P1-K1-G2
ctgatttctgataaaaactcttttttacttttttctttccaatcaataatagttggactgcaacagcagtaacagagtagataccaagtctaacaatggcgaatcctaagctcggtcgaagtcctagcatgagggaccgcgtggaggacacgctttctgctcatcgtaacgagctcgttgctcttctctccaggtacgtggcgcagggaaaaggaatactgcaaccgcatactttgatcgatgaactggaaaatgttgtaggcgacgacaaagctagagagaagctaagtgatggtccctttagcgaagtccttaaatctgcacaggaggccataattctgcctccatacgtggctatagcagttcgcccaagacctggtgtttgggaatacgtacgagtc

SEQ ID NO: 39265 - DNA, 399 bp, Gossypium hirsutum
  Clone ID: LIB3165-037-P1-K1-G4
ccatttccaagctcaagtttttatgcctaaacctgtctctcatctctgctgcaatccattgtctaacggggtccatacttcatccaaagctttcaccactttagctatctttaaatcaaagaccaaagcagctcccaagagggttgagccaaagtcaaagccaaaggttgaagatgggatctttggcacctctggagggattggttttaccaagcaaaatgagctctttgtgggacgtgttgccatgcttggttttgctgcatcattgctaggcgaagcaataacagggaaaggaatcctagcacagctgaatttggagactggaattcccatttatgaagctgaaccccttcttctcttcttcattctcttcacactccttggagccattggagcatt

SEQ ID NO: 39266 - DNA, 428 bp, Gossypium hirsutum
  unsure (1)..(428): unsure at all n locations; Clone ID: LIB3165-037-P1-K1-G5
aaaaaccccttccttttttttttttaaaagaaaattttttttgcaagtcggtggtaaagcttccgggaatccattgtcaaccaatgtttggctccaaatttggacaatgtggggtggtccttcaaaaaccctttcttttcttgacactttctttcacttttctttttccgttcttttcatcagcccctttttcagcttcccaatctcagaggctcaaccccccggtaaccccttccaggtccctcatcnttgtaaccccagttcaactgtggttcttcgtgaggccttagagaccgtattgattcagtaaagaacacgcagaagatcactgaagccatgaaacttgtggctgctgctaaagttaggagagcacaagaagctgttgtcaatggcagacctttctctgagtccctggttgaagttcttta

SEQ ID NO: 39267 - DNA, 395 bp, Gossypium hirsutum
  Clone ID: LIB3165-037-P1-K1-G6
gcggaaatcaaagcgttcaatatggcgtctgatatctatcactgattttttctgggcggttgtcaatttcattggagtgttcttctcgaccatgttctcgatggaaaagtccgatgcctacagaaaaggctttggttcaagcaagaaatgggatgatggtccaggaggacctggaagtggaccatatggtggaggtggtggcccacgacgaccaccacggggaatggacaatgttcggggaattgaccatagttccctttctgcctgtggctcctgctgctgtggctaaatgctgcaagcatacatcttgtgcatgtacactggtatatagctaaagtcctcttattataagtaaggatgttccacatgtttttaatgtccatagattgcctgtg

SEQ ID NO: 39268 - DNA, 361 bp, Gossypium hirsutum
  Clone ID: LIB3165-037-P1-K1-G7
ctggaatattcgcaatatggttgattccgcaactgtttgcttacgcgtttaactgcccgatggcgaagttcttacaggcgcaaagcaagatgatggcgatggcggtgatatccggggtggcgttcgttctgcactgtttgtttagttggctgttgatgctaaaactgggttggggattagttggtgcagccattgtgttgaatgcgtcgaggattgccatagacgtgggtcagtttttgtacataattagcggcacttgtggtcaggcttggaccggcttctcttggaaggcatttcaacatctatggggatttgtcagattgtcttttgcttcagctataatgctctgtttagaggtatg

SEQ ID NO: 39269 - DNA, 391 bp, Gossypium hirsutum
  Clone ID: LIB3165-037-P1-K1-G9
ccacactctcaaattcagttaacattttcacagttgttttcttcagtctctctcgcagccatggctgcagccatctccaccgtcgctgccgctgccgccgccaaccgagctctgggagtgtcagtcccaacctcagctttcatggggaagaaagtgagctcaagattcaacagcaccaggcaggttccttcgggaagttttaaggtgatggcggcggagaaagagatagacgaagagacacagaccgaaaaggaccgatggaaagggttggcttacgatatttcggacgaccaacaggacattactcgagggaaagggatggtggattccttgttccaagctcccatgaatgatggaactcactatgctgtcatgagttcctatgaatacc

SEQ ID NO: 39270 - DNA, 401 bp, Gossypium hirsutum
  Clone ID: LIB3165-037-P1-K1-H11
atcactcccaatactttcattacatttcacgaacttcactctccagtctccaatggcggctgccgtctccaccatcggtgctgtcaaccgagcaccgttgagtttgaatggatcaggtgccggagcttctgctccaagctcagctttcatggggaacagcttgaagaaagtgagcgctaggttcaacaacaacggcaaggctccagtgggaagtttcatgattgtggctgccaaagaaatcgacgaagacacacagaccgaccaggaccgatggaagggtcttgcttatgatatctccgatgaccaacaagacattaccagagggaaaggtatggtcgactcattgttccaagctcccatgaacgatggtactcactatgctgtcatgagctcctatgagt

SEQ ID NO: 39271 - DNA, 366 bp, Gossypium hirsutum
  unsure (1)..(366): unsure at all n locations; Clone ID: LIB3165-037-P1-K1-H12
gacaagtatgagaatggtattatggcaccaaggccacctcctatccattatggtagaaaccaaggtggtaggttccgtcaacaaaatagaaactctgaccaaccaagatatgatagacaaggaaataccactccgaaccagcaagggaatgtgccttacaatcagcagggttttgcgcaaggggatggaaggaactataggcctccacaaaattatccaccccaacaaaattacaggcagcagccgccaatgaataacagagattatgctcctagaggctctgatcctttgcatcagaacagttacaaccaaggaaagcatggaagttataattctaaagacgaanggacttcgttcaaggagagc

SEQ ID NO: 39272 - DNA, 399 bp, Gossypium hirsutum
  unsure (1)..(399): unsure at all n locations; Clone ID: LIB3165-037-P1-K1-H2
cttctctacattccctccaaaactttctatcanactgaaaacaaccgtaacaacgcacgacagtcgcggccattccacccttatccaccgctacatcggttaccgacctctccgttttggatagcaccactgttgctctcataggtggaggttcagtcgctgccttagcagcggttctctccttcactgacccggaacgccgacgtcgtcttcaggcggaagaagtcggtgggggcgataaagaagtcgttaggaattacttcaataattctggtttccaaaggtggaagaagatttatggagagaccgatgatgtgaataaagtccagcttgatattaggttagggcattccaaaacccgtgaaaatgtgatgaaaatgttgaccgatgatggctcac

SEQ ID NO: 39273 - DNA, 387 bp, Gossypium hirsutum
  Clone ID: LIB3165-037-P1-K1-H5
aagggacgtgatttgccaggttgctctctttatcaatgctgatgtgcttgttatgggaagccatggctatggcctgattaagagggcattcttggggagtgtaagcaatcactgtgcacaaaacgtgaagtgccctgttttgattgttaagaagcccacatgttcgtcttctgcaagtggaaccaaatgattgaaatttcggattacatagtcatactttgctttgtttatgtacaaatttcactttagtgggtatgtttctgttcttggttttcttttctcatatctttgtctgcttcattactttgttgtataaggttttatttatctctgaatgtacttttcatatttgaattaaaaagagtcccattatacattattgggaat

SEQ ID NO: 39274 - DNA, 60 bp, Gossypium hirsutum
  Clone ID: LIB3165-037-P1-K1-H6
gtaaggaacggccgaccaaccatccgtaaaagtaaaattcaaaaaaaaattttttttttt

SEQ ID NO: 39275 - DNA, 411 bp, Gossypium hirsutum
  unsure (1)..(411): unsure at all n locations; Clone ID: LIB3165-037-P1-K1-H7
ggaannncccgcggtcgacgccacgccgnntccgcaggcttnnntctgaattaccttgtgtcatttattgnnttgtcaagcggctcgatgacttgcgatgtgggtcggcagatatgtagcaaannagttacgttgctttgcacttttctctgaagggggtggtgtgtctctcttttcttgaagaatggttacgacttttaccaaggacagagtgaaaagaaatgtaacctcgaatttgcannaagaagcttggcttctcttagcatgagtactctttgtcacatgactgccattttgggacgtgcgacatcnngagcacatgtctgtcaacagagggttgtcacaagaattctctgtaagccatcagtttgctgcgtttccttttacaagaagggaaccctagactacctt

SEQ ID NO: 39276 - DNA, 64 bp, Gossypium hirsutum
  unsure (1)..(64): unsure at all n locations; Clone ID: LIB3165-037-P1-K1-H8
cggaannnccccggtcgacgccacgccgtccggaaaaatatacagaagtgatcagtattatact

SEQ ID NO: 39277 - DNA, 408 bp, Gossypium hirsutum
  Clone ID: LIB3165-037-P1-K1-H9
gagactcttttgtataactgtttcttatagtactagtaagcagtaatagcagtggcctcctccatgatctcatcggcaaccattgccaccgtgaactgctcctccccggcacaggccaacatggtggcccccttcaccggcctcaagtctgcctctgctttcccagtcactaggaaggccaacaacgacatcacttctcttgcaagcaatggtgggagagtgcaatgcatgcaggtgtggcctcctcttgggaagaagaagttcgagacactctcatacctccccgatcttacacccgtacagttggctaaggaagtagattaccttcttcgctctaaatggattccttgcttggaattcgaattagaggagggattcgtgcacccgaagtactcgagcttacccacc

SEQ ID NO: 39278 - DNA, 403 bp, Gossypium hirsutum
  Clone ID: LIB3165-038-Q1-K1-A1
caatctactgatttcaccgagttaacgaacgaacaaccatggctttcgtccaccagattagttgttaagccggatatgttgtttggtaaacgtgggaagagtggcttggttgctctcaatttggatcttgctgaagttgctgaattcgtcaaagctcgcctcggcactgaggttgaaatgggcggttgcaaagctcctataaccacattcattgttgaaccttttgtaccccatgaacaagagtattacctttcaatagtctctgaaaggcttggttttaccattagtttttcggaatgtggaggtattgatattgaagagaactgggataaggctaacaccatgttccttacaaccgagaaacctatgaccttggagacatgtgcacacgtgatagctacac

SEQ ID NO: 39279 - DNA, 376 bp, Gossypium hirsutum
  Clone ID: LIB3165-038-Q1-K1-A10
gctcaaacaatgctggtaatgtcaagtaccagcgtttcaaccagccatgttgtgaacttgaagagagatcaccctttactccattttcaagctcaagggttaaagcctaaaccctcctctcatttcttattcaatccacactctaacactgttgctgcttcatcatctaaagctttcaccacttttgcactcttcaaaccaaagaccaaagcagctcctaagaaggctgcacctaaaccaaagccaaaggttgaagatggaatctttggcaccttttgaagggattggttttaccaagcaatgagctctttgttggacgtgttgccatgattggctttgctgcatccttattaggtgaagcaataacagggaaagg

SEQ ID NO: 39280 - DNA, 415 bp, Gossypium hirsutum
  Clone ID: LIB3165-038-Q1-K1-A12
gttagctttagcatacactactagtacccactactagcaatggcttcctcaatgatctcatcggctaccattgccactgcctctccggcacaggctaacatggtcacccctttcaccggcctcaagtctgcctctgctttcccagtcaccaggaaggccaacaacgacattacttctctcgcaagcaatggcggcagagtgcaatgcatgcaggtgtggcctcctactggaaagaagaagttcgagactctctcatacctccccgatcttacacccgtgcagttggctaaggaagtagattaccttcttcgctcaaaatgggttccttgcttggagttcgaattggaagaaggattcctcccccgtaagtactcgagcttacccacgtactacgatggacgctactggaccatgt

SEQ ID NO: 39281 - DNA, 370 bp, Gossypium hirsutum
  Clone ID: LIB3165-038-Q1-K1-A2
atgtgtctgtctctctgttttactccacaaccactatcactaccattatggcttcggctactgtttctgtagccaaacccaaccttcagattcaggcaaaaggaaagggtgttggttttgcagatttctcaagcctacacaactcctctactagccttccctttgccaggaaaacctctgatgacttccattcactcgttgcttttcagacatctgctctaggaagcaataatggcgggtacaggaaagggatggcagaggcaaagctaaaggtggctataaatgggtttggtaggattggcaggaacttcttaaagtgctggcatggccgtaaagactccccacttgatgtcattgccatcaatgacac

SEQ ID NO: 39282 - DNA, 409 bp, Gossypium hirsutum
  unsure (1)..(409): unsure at all n locations; Clone ID: LIB3165-038-Q1-K1-A3
accggattaccggtcgaccacgcgtacgcccacgcgtacggcgagacgagccgtttatcattacgataagagtaatagtcataattgagggagggggnanaaaaaaagaggggaaaaaaaaaaaaaaaaaaaaaaaaaaggggggaaaaaaaaaaaaaaaaaaaaagnnggaaaannnggggggggggggnnnnngnangggaggggggggggggnnggggggngagtggggggggggngtattaaaggggggaaaggaaaaaagntttgtggggaagaaaaataaaagggggggggggggnaaataataggaaaaatgaaaaaaaaaggagaaggaagaaatggttttttttaaggagaagtaaaaaaaataaagggggaaagggaaaaaaaatggaaaaggggaaaa

SEQ ID NO: 39283 - DNA, 409 bp, Gossypium hirsutum
  Clone ID: LIB3165-038-Q1-K1-A4
cccacgcgtccgtttcgatcgtcccaaatttgacttgatttcctctttccatcgaagagtttagagggattcagaaaatgcagggaggcagaggtggaagagatcctttcttcaattttggtggtgaccccttcggtggtgacctcttcggtggtgaccccttcggtggttctgggggctttggaggatttggtggtcctagaaatttattctccaacttctttggaggaaggaacccatttgatgacccttttatcacacgcccttttggaagcatgtttgattcaagcttctttggccccggtcaaagtccttttatggatatgcatccgactgggtttattgagcgtcaggctccagagccaaagagacccaagggtctgattattgaaaactaaattctgatgat

SEQ ID NO: 39284 - DNA, 415 bp, Gossypium hirsutum
  Clone ID: LIB3165-038-Q1-K1-A5
gagactcttttgtataactgtagcatatagtactagtaagcagtaatagcaatggcctcctgcatgatctcatcggcaaccattgccaccgtgaactgctcctccccggcacaggccaacatggtggcccccttcaccggcctcaagtctgcctctgctttcccagtcactaggaaggccaacaacgacatcacttctcttgcaagcaatggtgggagagtgcaatgcatgcaggtgtggcctcctcttgggaagaagaagttcgagacactctcatacctccccgatcttacacccgtacaggtggctaaggaagtagattaccttcttcgctctaaatggattccttgcttggaattcgaattagaggagggattcgtgcaccgtaagtactcgagcttacccacgtactacg

SEQ ID NO: 39285 - DNA, 401 bp, Gossypium hirsutum
  unsure (1)..(401): unsure at all n locations; Clone ID: LIB3165-038-Q1-K1-A6
gagtcctctcctaccccaacaatgaccggcaaagaagcccaacaacccgaagagctacctgtggtcttcgttcatcgtcgaccctcattcatccttccttttggggaccatttacgttctcaattccatgtcctggacccttatgagtcgcctgagccgtacgactcctttctggcccgtcatgctccctccataagagctctcatgactatgggccccaccctagtttcccgcgagtttctcgaccgtctgcctgttttggagctgatagtggctacaagtgctggccttgatcatatagacctccctgcttgtcgaagccgaggcatcgntgttactaatgctagctctgccttcgcagaggatgcagcggattgtgcttgttgggtgttgatcgatgt

SEQ ID NO: 39286 - DNA, 354 bp, Gossypium hirsutum
  Clone ID: LIB3165-038-Q1-K1-A8
tgaattgaaaccctcaaaattccactaaaaaatggcctccacagcttccctctccagcgccgtagccaccacctctttcctccgcggccatccggcgccgaaaaccctaaactcccttcctttcaaccaatctcttttcgggctaaaaccccaacgaaatggccgtctcaccatggcagcatacaaggtgacactgttaacacccgaaggaccccaagaattcgtgtgccccgacgacgtatacatcggtgaccaagctgaggaagaaggcattgatcttccggtctcgtgtagggctgggtcttgttcttcgtgtgccggagtgattaagcaaggctccgtcgatcaatcccg

SEQ ID NO: 39287 - DNA, 220 bp, Gossypium hirsutum
  Clone ID: LIB3165-038-Q1-K1-A9
aataaatcccatagaatgtgatactactctattgctttagaaaacacataacattctggcggggttactcttaactgattactgaatcttccacttatttgatcggatgcgtaagaaattatgtatggatgaactctgaacaactgattaatagctataccctattcggtatgtatagttgataagtgcgaccacagctgatgataatgatacatcctgc

SEQ ID NO: 39288 - DNA, 411 bp, Gossypium hirsutum
  Clone ID: LIB3165-038-Q1-K1-B1
agtccaatcactcccaatactttcataacatttcacgaacttcactctccagtctccaatggcggctgccgtctccaccatcggtgctgtcaaccgagcaccgttgagtttgaatggatcaggtgccggagcttctgctccaagctcagctttcatggggaacagcttgaagaaagtgagcgctaggttcaacaacaacggcaaggctccagtgggaagtttcatgattgtggctgccaaagaaatcgacgaagacacacagaccgaccaggaccgatggaagggtcttgcttatgatatctccgatgaccaacaagacattaccagagggaaaggtatggtcgactcattgttccaagctcccatgaacgatggtactcactatgctgtcatgagctcctatgagtacat

SEQ ID NO: 39289 - DNA, 410 bp, Gossypium hirsutum
  Clone ID: LIB3165-038-Q1-K1-B10
cctgtttcaaatttcagttactaactcaaagcaaagcaaaaggcaaaaaagccatgtcaaagctggtggtgttgcagccaacaaagcagcctcccatctccctcctctcttcctctctttcccacttcaatggcaccaagctctgccaaatccagtacaaaagaaaggtatatcagccaaaaggtgcattgcatgttgcagcatccagcaccaagaagattctcataatgggtggcactaggttcattggtgtgtttttatcaagactccttgtaaaagagggtcatcaggttactttgtttactagaggtaaagcaccagttactcaacaattgcctggtgaatcagacagtgactacgctgagtttaaatcccaagatttgcatttgaaaagagatagaatggacttc

SEQ ID NO: 39290 - DNA, 254 bp, Gossypium hirsutum
  Clone ID: LIB3165-038-Q1-K1-B11
gaaagaaaaaaagtaaaagaaaaatggctttggcaagcttggtgagaagaaaggcatgcctggtgtctagaaacctgtcgaattcgcccgcagatgcgttgaaatactctttttcactcagcaatttctcgaggggtttcgcttcaggatctgaagagaacgacgtcgtcgtcatcggcgggggacccggcggctacgtggcagctatcaaggctgcacagctaggtctcaagacaacctgtatcgagaagcgt

SEQ ID NO: 39291 - DNA, 331 bp, Gossypium hirsutum
  Clone ID: LIB3165-038-Q1-K1-B12
taattttccctttcctttctctctttctattcaaccaaactatccctttctttctcctcgtaatcaccaattttctacattctttgactgagaaattttttgggttgttcatttgtttctttcctaataaaatgcaaaaataacttcaagaaaccataaatgttttcctatatttctagatttgaggatttgattaagttttgaccttctctcaccaaacccatatcggagttgaattgaattcttgaaagtgtttgaagaaagaagcagttgattttggacttctttttgttttcgtggtattttctttctgtcttcgccttcgttttct

SEQ ID NO: 39292 - DNA, 424 bp, Gossypium hirsutum
  Clone ID: LIB3165-038-Q1-K1-B3
cccacgcgtccgcccacgcgtccgcatctccccaaatttgcctgaatttccccgctttttcatttcaaagagtttagaagataaaagaaaatgcagggcggcagaggcggaagggatccattctttgaatttggtggtgatccctttggtggttttgggggtcataaaagtttactatccaatttctttaatggaagggacccttttgatgatcctttcttcacacgtccttttgatagcatgtttgaatcaagcttctttggccctggtcataatcctttccctgatatgcacccatctgggttcattgaacaacaagccccagagccaaaacgaccaagcggtcctattatccaagaattagattctgatgatgaaaaagagatgaaagaaaatcccagaaaacatggtaggtctaaggatg

SEQ ID NO: 39293 - DNA, 387 bp, Gossypium hirsutum
  Clone ID: LIB3165-038-Q1-K1-B4
ctgcttctctcgtcgagtgaaagaaataagcatggccgtggttggagtattggctttacagggatcttttaacgaacacatagcagcgctaaggaggttaggaatgaaaggagtggaaataaggaagccagagcagcttcaaagtatcagctctcttatcattcctggtggagaaagcaccaccatggctaagcttgctgagttccacaatctttttccagctctgcgggaatttgtgcaaatggggaagccggtttgggggacttgtgcaggtcttatatttttggcaaacaaagctgttggacagaaagacggaggacaggaattagttgggggtctgaattgcactgtccataaaaattactttgggagtcagatccaaagctt

SEQ ID NO: 39294 - DNA, 376 bp, Gossypium hirsutum
  Clone ID: LIB3165-038-Q1-K1-B6
cccacgcgtccgcccacgcgtccgcccgagacgcgcacacctcgaccaatacatgcaccaactggagctcgcaggcaaaccagcgatttcagcgatgataaagagatacgccgagcaaaaccgccccgtttcttgcttcatcaacaaccctttcattccttgggcatctgatgttgctgaaagtctcggcatcccttctgcaatgctttgggtgcagtcttgcgcgtgtttcgccgcctattaccattacaatcatgggttagtgacgtttcctactgaaactgatcctgaatttgatgttcagttgccgtccatgccgcttctcaagcacgatgaagttcctagctttttgcacccttcaactccttttgcttac

SEQ ID NO: 39295 - DNA, 362 bp, Gossypium hirsutum
  Clone ID: LIB3165-038-Q1-K1-B7
caagctccgatgatcaacgatcactgtttcgacatggagttcactacaccaaaagccttcccttatggctacaactacaactgtaactacaaccctcactgtcttagtcacagtgtatcatcttcttctctggatgttggggtagttccagatggcggtagtacgattacggatgtatcagtcccgtgcgcgaaagtgacggagacgacttatcagactgtgcaactctcgttggcggagagagaagcgagggtgctgaggtacagagagaagagaaagaacagaaaattcgagaaaacgatacgttacgcttctaagaaagcttacgcggaagtgcggccgaagattaaaggaagatttgc

SEQ ID NO: 39296 - DNA, 412 bp, Gossypium hirsutum
  Clone ID: LIB3165-038-Q1-K1-B8
ccacaaaaagctcccccgccccgactcccctggcatcaacagcacaattctaaacccaaaaacataaaaaaatggcagcaagtgtagcaacaatggcgatgctcaatgcaaaatgcctaagcatcagctcaactaagatgagcagcccaacaaagccaaccccaaagcccttctcccttctctccatgcagaacctccccaaaggcctcaccatctcaaaaccagccaacaactcaaacctaccttcttcactcgctggcagcgccattgctggagctatcttctcaaccttaagttcatgtgaccccgccttagctgcacaacagattgctgaaatagctgaaggagacaaccgtgggctagctctattgcttcccataatcccagcgatcgcttgggtcctcttcaacat

SEQ ID NO: 39297 - DNA, 284 bp, Gossypium hirsutum
  Clone ID: LIB3165-038-Q1-K1-B9
cccacgcgtccgaggacgcgtgggtttagctatagcatacactactagtacccactgctagcaatggcttactcaatgatctcatcagctaccattgccactgcctctccggcacaggctaacatggtccgtgctttcaccggcctcaagtctgcctctgctttcccagtcaccacgaaggccaacaacgacattacttctctctgcagcaatggcggcagagtgcaatgcatgcacgtgtgggctgctactgaaaaaacaaagtgggggactttttataccct

SEQ ID NO: 39298 - DNA, 381 bp, Gossypium hirsutum
  Clone ID: LIB3165-038-Q1-K1-C10
ctcaaattcagttaacaatttcacagttgttttcttcagtctctctctcagccatggctgcagccatctccaccgtcgctgccgctgccgccgccaaccgagctctgggagtgtcagtcccaacctcagctttcatggggaagaaagtgagctcaagattcaacagcaccaggcaggttccttcgggaagttttaaggtgatggcggcggagaaagagatagacgaagagacacagaccgaaaaggaccgatggaaagggttggcttacgatatttcggacgaccaacaggacattactcgagggaaagggatggtggattccttgttccaagctcccatgaatgaatggactcactatgctgtcatgagttcctatgaat

SEQ ID NO: 39299 - DNA, 404 bp, Gossypium hirsutum
  Clone ID: LIB3165-038-Q1-K1-C12
cccacgcgtccggttagctttagcatacactactagtacccactactagcaatggcgtcgggaatgatctcatcggctgccattgccactgcctctccggcacaggctaacatggtcacccctttcaccggcctcaagtctgcctctgctttcccagtcaccaggaaggccaacaacgacattacttctctcgcaagcaatggccgcagagtgcaatgcatgcaggtgtggcctcctactggaaagaagaagttcgagactctctcatacctccccgatcttacacccattcaaatggctaaggaagtagattaccttcttcgctcaaaatgggttccttgcttggagttcgaattggaggagggattcgtgccaccgaagtactctagcttacccacgtacta

SEQ ID NO: 39300 - DNA, 421 bp, Gossypium hirsutum
  Clone ID: LIB3165-038-Q1-K1-C3
agtcttttgatctctgccccaaagcaaaaagttgtcatcttttacaatcacaactactggttatttattttcatggctcaaggagattctaacttccagcaagacatggctaaagaggaagaagaacagaggctgaaatacttggagttcgtgcaagtagccgccgttcacgccgctttgtgcttcaccaacctttacctttacgctaaggaaagatcggggccgttgaaacctagcgtcgagaccgttgagggaacggttaagagtgtggttggaccggtttatgataaataccatgatgtccctgttgaattccttaaattcgttgattccaaggtgggtgaatcagtgaccaagcttgatcgtcgagtccctccagtcatcaaacaggtctcaaccgaagccatcttggcagcccaaa

SEQ ID NO: 39301 - DNA, 410 bp, Gossypium hirsutum
  Clone ID: LIB3165-038-Q1-K1-C4
tcacggctgacggacatgtggcctttgctgataatgttgatttgctgaaaggtgcctgtggcaaatctcttgcttctttccctcaaggctgtttcttctccacagcagttggagaactaatgagctatgaaaaccctaagaacaaaatcactgctgttcctgcagaagacgaggagatgtggggtgctacatataaggtggaagggccaacagttgcaggcaccgagtctcctatgctcagtttctaaatccatgtgagaaatggtagtaactctgtttggaacatatatatatatatatataggttttgatcttctgtacagctctaacttgtagtgtaatacaagtttgagggtcctaaatttgatatagaccttattaaataagaaactacaaaggacttcatttct

SEQ ID NO: 39302 - DNA, 401 bp, Gossypium hirsutum
  unsure (1)..(401): unsure at all n locations; Clone ID: LIB3165-038-Q1-K1-C5
ccttacttcaccttatccatcatcatctatttccatatacaaaagtaaacccccatttttgttctcttcaactttattgcataccaaaaaaacttacaacaatggcaacagcctcagttacctacactccacccatgttggctgctgccaccactaaccccaagaagaagaccaacaccaatgtgaattacataacaggcttgaattcttttggtgggttgaaagctcataacaaagtggtctcactaggccaacgtgtatgcaccgagcaatcatttgcaaacgttgttagctcactcaaagctccgacaaagggcaagacaggtaaaagcagcggcggtgcactgtcttcaacctgtaatgctgttggtgagatattcangattgcagcaatcatgaat

SEQ ID NO: 39303 - DNA, 414 bp, Gossypium hirsutum
  Clone ID: LIB3165-038-Q1-K1-C7
ctaatcctctctgcaattcaaagaagaagaaaaatggcttcttcagctctctcaacactggctctccgcttacccacttcctctaatcctacgaacccttcccatttcaaagccccttccctccaattccctctccgttccctcactcctcctaacctcacccaccgttccaccgccctccgcgccacggccgcccccgaaaaaatcgaaaaacttggcaccgaaatctccaacttaaccctcgaggaagcccgcacccttgttgactaccttcaagagaaactcggcgtctctgccgctgccttcgctcccgcagccgtttcagttgccgcccccggtggtgccgatgccgaagcggctgttgtcgaagagaagaccgagttcgatgtggtgattgaggaggttcctagcaat

SEQ ID NO: 39304 - DNA, 410 bp, Gossypium hirsutum
  Clone ID: LIB3165-038-Q1-K1-C8
cccacgcgttcgtacaactcaaattctccggcaagcccctcctgtttgcggaagtgtgcgacgtgttaccaccaccggactctcttctagttctactcttactataacctttaagacaagaaaagaaccaagttcgaagaaccaaaagttcaagtgggcacgtaagttaagcttagtggaggaaagcagcccgccaaaaccaactgttgatgttgaagggttagctactttattgtacgatgatcttacccatctgtttgatgatcaagggattgataggacggcatatgacgaacaagtcaagtttatggaccctataacaaagcatgatacaattagtggttatttgcttaacatttctttgttgaaaagactctttaggcccctgtttcaattgcattgggtcaagc

SEQ ID NO: 39305 - DNA, 420 bp, Gossypium hirsutum
  Clone ID: LIB3165-038-Q1-K1-C9
catctaccctgtcatttaaaaactcagtcactgtccctgaaagaatcaacttcaacaagagtgttttgtacccaaaaaatgtcagccttggtggaaatgtggtttccattagagctcaggtcactacagaagctcctgcaaaagcaccaaaaatttccaagaaagatgacgagggtattgttgtgaacaagttcaaaccaaaggaaccctacattggaaagtgcctcctcaacaccaaaattaccggagatgatgctccaggagagacttggcacatggtttttagtaccgaaggggaagtaccatacagagaaggacaatccattggtgtcatcccagatggtattgacaagaacggaaaaccccacaaacttagattgtactctattgctagcagtgctttgggagattttggcaatt

SEQ ID NO: 39306 - DNA, 421 bp, Gossypium hirsutum
  Clone ID: LIB3165-038-Q1-K1-D1
ctaagcgaaaatggcagcagaggaaggccaagtctatggttgccacactattgaatcatggaacgaacagcttcaaaaaggcaacgaatccgaaaaattggtggtggttgatttcactgcttcatggtgtggaccctgccgtttcattgcacctttcctggctgaactagccaagaagttcccttctgttacctttcttaaggtggatgtggatgagttgaaggaagttgctaccgattgggcagtggaggctatgccgactttcatgttcctcaaggaggggaagattgtagacaaagtggtgggagcaaagaaagaagagcttcagcagactctgtcaaagcatatggctgtccccagtactacttcagcttgattttattataattattagttcaactgtttttaatctttcatgttt

SEQ ID NO: 39307 - DNA, 368 bp, Gossypium hirsutum
  Clone ID: LIB3165-038-Q1-K1-D11
ggaatttcaatgaattagattcacaagaatcacgaagcctcgcgtttcaatacaaaaatggaaacttttagttctcggattttttagccccattctatttcggtagttcgaccgcgaaatttatttgtttctgtatttccggaatatgagtaaagtttatgattggttcgaagagcgcctcgaaattcaggcgattgcagatgatataactagtaaatatgttcctcctcatgttaacatattttattgtctaggaggaattacgcttacttgttttttggtacaagtagctacaggatttgctatgactttttactatcgtccaaccgttactgaggcttttgcttctgttcaatacataatgactg

SEQ ID NO: 39308 - DNA, 405 bp, Gossypium hirsutum
  Clone ID: LIB3165-038-Q1-K1-D12
caaccatctcggctaccaccacccctgcagctcttgttcacaagacattgcccaggattgcatccccagtccccattgggttgccaacaatgggaaagaaggggaaggtgatgatgatgtgtagcatggagaagaagagtgagaatgggtcaaacatggggatgagtgcatcattgctggcagcagcctgtgcagcaaccatgtcaagcccagccatggctctggtggacgagagaatgtccactgaaggaacaggacttccctttggattgagcaacaacctcctcgggtggatcctgtttggtgtgttcggcctgatttgggctctttacttcgtctacacttcctccctggaagaggatgaggagtctgggttgtccctctaaaacccaaaccttatttcct

SEQ ID NO: 39309 - DNA, 394 bp, Gossypium hirsutum
  Clone ID: LIB3165-038-Q1-K1-D4
aatggcttccaccgccttttctctttctttaccaacatttccttcatcttcttcaactgttaaagctaaaccttctatattcagtcaccaccttttattcattgcaaagaacgtaccatcttcttcactctttagttcttcaacgaggacaacgaagcaaattcgtactgccttcaagatcaaatgctcatcggcttctttttcgaatactcttccatctgctcttctttttgactgcgatggtgttctcgttgatactgagaaggatggtcaccgggtttcgtttaatgacactttcaatgaaaaaagaattgggtgttacttgggatgtggatttgtatggagagttgctcaaaatttggtggtggggaaagaaggatgacagcttacttta

SEQ ID NO: 39310 - DNA, 175 bp, Gossypium hirsutum
  Clone ID: LIB3165-038-Q1-K1-D6
gtctccaccagctgctgccgctcaatgattagcactctgctccctccccaatatccatccctctcctctctgtatttccattaatttgttttttttttttttttttgcttttcttttcacatcaaacacctacaataacactgcaaccaatcttttcagcttaaccccccccaac

SEQ ID NO: 39311 - DNA, 420 bp, Gossypium hirsutum
  Clone ID: LIB3165-038-Q1-K1-D7
cccacgcgtccgcactactagtacccactactagcaatggcttcctcaatgatctcggcggctaccattgccactgcctctccggcacaggctaacatggtcgctcctttcaccggcctcaagtctgcctctgctttcccagtcatcaggaaggccaacaacgacattacttctctcgcaagcaatggcggcagagtgcaatgcatgcaggtgtggcctcctactggaaagaagaagttcgagactctctcatacctccccgatcttacacccgtgcagttggctaaggaagtagattaccttcttcgctcaaaatgggttccttgcttggaattcgaattagaggagggattcgtgcaccgtaaatactcgagcctacccacgtactacgatggacgctactggaccatgtggaagctg

SEQ ID NO: 39312 - DNA, 417 bp, Gossypium hirsutum
  Clone ID: LIB3165-038-Q1-K1-D8
gttctccaccgctacgccgttgcctagctttggcgccaatgttggtcaccgtgttagcatgtcggctgactggatgcctggtcagcctaggcctccttatcttgatggttcagcacctggtgactttggatttgatccacttagacttggtgaggtgccggagaaccttgagagatacaaggaatctgagttgattcactgcagatgggctatgcttgctgttcctggtatattggtgccagaggcattggggtatggaaactgggtaaaggcacaagaatgggcagccgttcctggtgggcaagccacttacttaagcaaccctgttccatggggaactctcccaacaatcttggtcatcgagttccttgccatcgccttcgtcgagcaccaacgcagcatggaaaaagataccga

SEQ ID NO: 39313 - DNA, 408 bp, Gossypium hirsutum
  Clone ID: LIB3165-038-Q1-K1-D9
aaatggttcacgctcacaccttttatgtctaacaggtttagtaagagagttgggttgtccggcagccctggttctgttcgagcccatgtcaatggaggaggagacgacaccaacaacagtaaaaacaacgacaagaagaagaagaagaaagttgtggtggttggctcgggttgggctggtctcggtgctgctcaccatctctgcaaacagggatttgatgttactgttcttgatggtggtgatggtataggcactccagataatgtcggtatccaagggttttggtatccctataaaaatatattcagtcttgttgatgagttggctatcaagcccttcactagctggacaagatctgcacagtattcatgggaaggattagaggttgaatttccagtataccaggaa

SEQ ID NO: 39314 - DNA, 424 bp, Gossypium hirsutum
  Clone ID: LIB3165-038-Q1-K1-E1
gtgagactcttttgtataactgtagcatatagtactagtaagcagtaatagcaatggcctgctccatgatctcatcggcaaccattgccaccgtgaactgctcctccccggcacaggccaacatggtggcccccttcaccggcctcaagtctgcctctgctttcccagtcactaggaaggccaacaacgacatcacttctcttgcaagcaatggtgggagagtgcaatgcatgcaggtgtggcctcctcttgggaagaagaagttcgagacactctcatacctccccgatcttacacccgtacagttggctaaggaagtagattaccttcttcgctctaaatggattccttgcttggaattcgaattagaagagggattcgtgcaccgtaagtactcgagcttacccacgtactacgatggacg

SEQ ID NO: 39315 - DNA, 409 bp, Gossypium hirsutum
  Clone ID: LIB3165-038-Q1-K1-E10
cccacgcgtccgcccacgcgtccgcccacgcgtccgctttggttgcaggatcatatagatgagaaagatttgatggcgtcaacagctaggcttatggagaaaccaagccatgaacagcaacaacagcagcaagtcctcaagtgtcctcgttgtgattcttccaacaccaagttctgctactacaacaactacagcttgtcgcagccaagacacttttgcaaggcttgtaagcgttattggactcgaggtggaactttaaggaacgttccggtgggtggtggatgtaggaagaacaagcgtgtgaagaggccggcggcttcagctaccggtggtgcttctccaacatctggtgcaaatattgctaacactccatctcaacctcagatggatgtgtctttcaacctcaagt

SEQ ID NO: 39316 - DNA, 394 bp, Gossypium hirsutum
  Clone ID: LIB3165-038-Q1-K1-E11
gagtgatgaaggtggagatgaacttggacaacgattccaataatctggttcaagctccgacaaacggggactctgagaagctttcgccctccactttatcttctcttttgggttctaaagatcgtgattatcttctctgctccactgcagcagctgctgaaactgatcaagtgaaaatttcggatctagagggcaaggtgatcggaatttacttctcagctaactggtacccaccatgtagaaatttcaaccgagtattgattggtgtgtatgagcagctgaagagcaatggatctaactttgagattgtatttgtgtcatctgatgaagacttggatgccttcaacagctaccgtgaaaacatgccatggctttcgattcccttttctgattt

SEQ ID NO: 39317 - DNA, 371 bp, Gossypium hirsutum
  Clone ID: LIB3165-038-Q1-K1-E12
cccacgcgtccgatttgaagaatcatttgttttactatggatcgtttctgataacgggggtgtgtaaatgtgtatggaagcattccaacaaccagtggcattatgactatggacttctcgtgagtgagatagctaataagtataccttagtgaaaaaccttgataaggctgttaatctcaaagatggtaccactcagcttcagcttgagactctcctacaaggtggactgtaatatggtggtgcatatttgaaatatcttcatcctcaagatgctgcatggaagcctacagagtttgacaatgaattctcttactctatcatgtttggacccgacaaatgcggggccacaaacaaagttcacttcatcctg

SEQ ID NO: 39318 - DNA, 416 bp, Gossypium hirsutum
  Clone ID: LIB3165-038-Q1-K1-E2
gctaaaccccctttctgtcactgtaacagtgcgatgaatacgggatattcggacaatgaatttgacgtaatcgtcgtaggggcgggcgtcatggggagctccacggcgtaccaactagccaaaagagtccaaaaaacgctactcctcgagcagtttgactttctccaccatcgaggttcctctcacggcgagtcacgcaccatacgagcaacgtaccctgaagactactacttcggcttggtcgatgagtcgtatcggttgtgggagcaggctcaatctgaaatcgggttcaaggtttacttcaaggcccaacagttcgacatgggcccatccgacgccaagagtctcctttctgtgatctctacttgtagaaagaacggcatcccgtaccaagtcctcgatcacccggaagtcgc

SEQ ID NO: 39319 - DNA, 408 bp, Gossypium hirsutum
  Clone ID: LIB3165-038-Q1-K1-E3
ctgattcgaaagactggaggcgagtgggcatagttagcccagtcaaagatcaaggctcttgtggatcttgctggacattcagtaccactggagctcttgaggcagcttaccatcaggcatttgggaaagggatctccctatctgagcagcagcttgtggactgtgctggagcttttaacaacttcggttgcaacggggggttgccatcccaagcctttgagtacatcaaatataacggcggcctcgatacggaggagtcatacccttacactgcaacaaatggtctatgcaaattctcttctgaaaatgttggtgttaaagtccttgactctgtcaacattaccttgggtgctgaagatgaattaaagcatgcagttgccatggtccggcctgttagtgtggcatttg

SEQ ID NO: 39320 - DNA, 402 bp, Gossypium hirsutum
  Clone ID: LIB3165-038-Q1-K1-E4
cccacgcgtacgatctcattgtcggatttttacctcccatttcagcataccaacatcctcgcctggaaatgagtgaaatgaaaacgatgtcatcttatcaaagctgctgaaggtttcagttatgaacctaggaatggcttctctggctcgatctccttctgccatgtccattactagaattcctcagggtcattccaaaatcctacaattgttaaaagcttcaaaggtgccttatgtgctccctttccgtcgcgtgcacatcagaaggtcccctgtttgctgcacgaaatttcctcagtgggaaccttcaccggccacatatgctctaactgagaaagctggtgataagttcttggataaatcatctgaattatgtgaaactctgcgttctgagtcttctga

SEQ ID NO: 39321 - DNA, 390 bp, Gossypium hirsutum
  Clone ID: LIB3165-038-Q1-K1-E6
cccacgcgtccgacaggctattatatttgctttaatggaccgaagtgagtcagagttgggggagcccctcactcgtcttctgccacttgctcttggtcttttataccttgggaagcaggaaagagtggaggcgactgcagaggtctcaaagacgttcaatgaaaaaataagaaaatattggtgatatgacactactttcttgtgcttacgctggaaccgggaatgttctgaaggtccaaaaccttcttggtcattgtgctcagcatcttgagaagggtgaaacccaccaaggtccagctgtgcttggtatcgccatggtagcaatggctgaggaattgggtcttgatatgtcaattcgttcactagagcatcttttgcagtatggtgagc

SEQ ID NO: 39322 - DNA, 389 bp, Gossypium hirsutum
  Clone ID: LIB3165-038-Q1-K1-E7
cataaccaagaactacgtgaccctttctaacattaaggaccctattatgtcggatatggggggacgcaaaagtcaaggaaaatctctcgaatgtgagcttgtattcgccaagatgggaatcaaaccgattatgacgagtgccggataattggcaagtgggaacgccataaaaccagccaagtagatcacgctactgtaccgtgcggacgctgacattatcaataaagggaaaatgcgaaacctctttatcacactatcttcacgctcgagccaatcgtgtggcacgaaccacgccatacacagctgaacaaccaaatggtgaacaccacactcataaacatggcttgttacctcaccaacgttaatataccatgtatgtacaacaagga

SEQ ID NO: 39323 - DNA, 369 bp, Gossypium hirsutum
  Clone ID: LIB3165-038-Q1-K1-E8
aaaaaaaaaaaggttaagtgagaaccaacggcaagtgcaggaaaagtgcaaaagttttgtcaagaaaaagtggagatataaaaaggttgataccttaactcaagaaaaaaaaaatggcgttttacgtcgacgaagaagaggtctggaaatgcccgagtcatccttctaagcgtcgccgtactggtatctgtccggtttgtctccgagacaaacttgcttctctttgccccgattgcgcccacgcgcgtccttgctcatgtatcacaacctcttcttcttcctcctcttcctccttctctcgcttctcaactgcggcggccggtggcaacacaggtgtcggttctgttggtcgagtttctaatcttatcg

SEQ ID NO: 39324 - DNA, 416 bp, Gossypium hirsutum
  Clone ID: LIB3165-038-Q1-K1-E9
ctttactctatctcctttggattactcttttttcttctacttgtagttatcagaatggggacaataggcaaaactactacggccactatttttctttgtcttcttctgtttcctattgtcttttccacgcctaatgacagatttgttagaattggactcaaaaagagaaagattgaccgaaacaatcggatggctgcacaccttgaatccaaggaggaaaaggcatctgaagcttttcttagaaagtatcgtcttcatgggaacttgggggaatcagaggacattgatattgtggcactaaaagaactacatggatgctcagtactttggtgagattggtattggcactcctacacaaaaacttactgtgatatttgacactgggagttctaatttgtgggttccttcatctaaat

SEQ ID NO: 39325 - DNA, 400 bp, Gossypium hirsutum
  Clone ID: LIB3165-038-Q1-K1-F1
ctcttctcaaatcttttttcaatcaactctctccaaagatgcagatcttcgtcaaaaccctgaccggcaagaccatcaccctcgaggttgagagttctgacaccatcgacaatgtgaagtctaaaattcaagacaaggaaggcatcccaccagaccagcagcgtctcatcttcgccggaaaacagctcgaggacggccgtaccttggccgattacaacatccagaaggaatctaccctccaccttgtcctccgtcttcgtgggggtatgcagatcttcgtcaaaaccttaaccggcaagaccatcaccctcgaagtcgagagctccgacaccatcgataatgtgaaagtctaaaattcaagacaaggaaggcatcccaccagaccagcagcgtattattt

SEQ ID NO: 39326 - DNA, 383 bp, Gossypium hirsutum
  Clone ID: LIB3165-038-Q1-K1-F10
ctttttgcctcttagctagctcattatctttttcatacaaagtaaccgaatttgggttcttattcgtgataacgactacttccatggattaaattgcatttgttttaacttctttctcttcacctggttaaaaatcttttcaaaaatgcaaaacccttctacggttacccaagaatctggccctgctgccttcgatctcgtcacacaattgggtcacttagcattcaacaagagctttcgcagctcaaacactgatgggttttgttcatttaagccaaatcacgtgtatttttcaagcttcagagactcaatttctcagaaaaagcgcagagttgctgctgctgcttcactcagtttgggtgctcgaaacaacgtttcttcga

SEQ ID NO: 39327 - DNA, 386 bp, Gossypium hirsutum
  Clone ID: LIB3165-038-Q1-K1-F11
ctggtgactatggttgggacactgctggactctcagctgatcccgagacctttgctgggaaccgtgagctcgaagtcattcactgcagatgggccatgttgggagctcttgggtgtgttttccctgagctgttggctaggaacggtgtcaagttcggtgaagctgtatggttcaaggccgggtctcaaatcttcagtgagggtggacttgactacttgggtaacccaagcttgatccatgctcaaagcattttggccatctgggcttgccaagttatcttgatgggagccgtcgagggttaccgtattgccggtggaccactcggtgaagtgactgacccattgtacccaggtggtagctttgacccattgggtcttgctgatgac

SEQ ID NO: 39328 - DNA, 377 bp, Gossypium hirsutum
  Clone ID: LIB3165-038-Q1-K1-F12
atccgcttatctgaactcaattcatttcggcagccgctcaatccgccgcattaacctgcgtattcttccttttaagatttaatcctacgattcgcgctgtgggggacctctgatcgcaattcgcggctttcgagttcccaccgtcatcataatctccaggtcttctactacagctggcgtgtgattataagaaaggaaaaaataaaattaagaaaaaacaaaaatacaaacaaagatttccttttttctgttgtatgtctccatctgttttttattctccgtggttgtgaaatttggtggttacaattacggagcagaagcgcgtgaacggatatgcagaaaagtgggagtctgtcgagaagtagtaatagtccttc

SEQ ID NO: 39329 - DNA, 362 bp, Gossypium hirsutum
  unsure (1)..(362): unsure at all n locations; Clone ID: LIB3165-038-Q1-K1-F2
cccacgcgtncgaagaattcgggttattgtgtacaaccagcttgcatccagccttcctgcatgcagccatcatgtgtcgcccctacgacatgtttttcaccccgtttcttttcatcaaaatccaaaaaagatcggaaacccaagaacgatatggggaaccaagccagtccattgcccgagcttattgccgagccaacaaatgctcgctccatgtcattcgtgggaacccatgagtacttggcacctgaaattatcaaaagtgagggacatggaagtgctgttgattggtggacattcgggatcttcttatacgagctattgtttggtaaaactcctttcaaagggtctgggaaccgagcgac

SEQ ID NO: 39330 - DNA, 418 bp, Gossypium hirsutum
  Clone ID: LIB3165-038-Q1-K1-F3
cccacgcgtccggagttttgaatctagggatttgcgggtggagaagacgagagctcatctgtgtgcttcaaagctcctgtccaggtagaattctcttcttcctttgcgttgtgttctttgttgttcagtcgccatggcttcaaagcggattttgaaggaactcaaggatttgcagaaagatccacccacttcttgcagtgctggtccagtagctgaagacatgtttcattggcaagcaacaatcatgggaccctcagatagcccttatgctggaggtgtgtttttagttaccatccatttccctccagattatcctttcaagcctcctaaggtcacgtttaggaccaaggtcttccatcctaacatcaacagcaatggaagcatttgtcttgatatcctcaaagaacaatggagccct

SEQ ID NO: 39331 - DNA, 354 bp, Gossypium hirsutum
  Clone ID: LIB3165-038-Q1-K1-F4
cccacgcgtccgcccacgcgtacggaagaacagaggctgaaatacttggagttcgtgcaagtagccgccgttcacgccgctttgtgcttcaccaacctttacctttacgctaaggaaagatcgggggccgttgaaacctagcgtcgagaccgttgagggaacggttaagagtgtggttggaccggtttatgataaataccatgatgtccctgttgaattccttaaattcgttgattccaaggtgggtgaatcagtgaccaagcttgatcgtcgagtccctccagtcatcaaacaggtctcaaccgaagccatcttggcagcccaaaaagctcccgaggttgctcgtggcgtggc

SEQ ID NO: 39332 - DNA, 403 bp, Gossypium hirsutum
  Clone ID: LIB3165-038-Q1-K1-F5
atcactaccattatggcttcggctactgtttctgtagccaaacccaaccttcagattcagaaaaaggaaagggtgttggttttgcagatttctcaagcctacacaactcctctactagccttccctttgccaggaaaacctctgatgacttccattcactcgttgcttttcagacatctgctctaggaagcaataatggcgggtacaggaaagggatggcagaggcaaagctaaaggtggctataaatgggtttggtaggattggcaggaacttcttaaggtgctggcatggccgtaaagactccccacttgatgtcattgccatcaatgacactggtggtgttaagcaagcttctcaccttctcaaatatgattccacccttggcatcttcgctgccgatgt

SEQ ID NO: 39333 - DNA, 398 bp, Gossypium hirsutum
  Clone ID: LIB3165-038-Q1-K1-F8
ctttaatcctttcagccgaaccctaacattcctctaagagctgatctaccaccatgaatggccatcagcccatccgagcctcagagttattttcagccttaagaccccttatatactccgatttcgacgaagaagaagaagtttcatggtgtactttcaaggttaagtcttatttccttcttcctttcgattttttaaatgctaaacaaatgaccaacaaaaaaataattggcagaaaagaaacttgagtaaagaatcacctttaaggattttaataactttctttgtattctatgtgtgtgcgtatgcgtttgtcctttgcaggtacattcgacggctttttatttccagatttacagagtaaataaaaactaaaattacattttcttgctatcatc

SEQ ID NO: 39334 - DNA, 374 bp, Gossypium hirsutum
  Clone ID: LIB3165-038-Q1-K1-F9
aacacagagaaaaagaaaaccccataatcatggctcgattaacattggtctcctccatcatccttatgctatgctgcgttaccgcagcatcaactttcgaggattccaaccctattcggatggtatccgacggtctccgtggctacgagtcctctgttcttcgtgtcattggccatacacgtcacgctatctccttcgcccgctttgcttacaagcatggaaggaagtacgagacggtggaggaaatgaagcttcggtttcagattttcaaagagaatttggatttgatccgatccactaacaagaaaggcttatcttacactcttgctgttaatcggtttgctgattggagctgggacgagttccaaaaacac

SEQ ID NO: 39335 - DNA, 364 bp, Gossypium hirsutum
  unsure (1)..(364): unsure at all n locations; Clone ID: LIB3165-038-Q1-K1-G1
cccacgcgtncgcccacgcgtccggaatccaccaacattggattctgcaagtggggctggtcacgttgagaatcttgctggtctcaacacttatgtttctgggtctcttcaatctaagcttgctgtttttcttatctctgatattttcggatatgaggctccaaactttagaaagctcgcggacaaggttgcagccgctgggttctatgtggtggctcctgacttcttttatggagaaccctatgaccctaataaccctgatagacctctatctgtttggataaaggatcatggaccggataaaggttacgaggatgcaaagctcgtaattgacgctttgaaaaagtaaggggtttcatccatt

SEQ ID NO: 39336 - DNA, 385 bp, Gossypium hirsutum
  Clone ID: LIB3165-038-Q1-K1-G10
aaacatccacaaaaacatgttggctatgagtaaatggttcacgctcacaccttttatgtgtgagcaggtttagtaagagagttgggttttccaacagccctggttctgttcgagcccatgtcaatggaggaggagacgacaccaacaacagtaaaaacaacgacaagaagaagaagaagaaagttgtggtggttggctcgggttgggctggtctcggtgctgctcaccatctctgcaaacagggatttgatgttactgttcttgatggtggtgatggtataggcactccaaataatgtcggtatccaagggttttggtatccctataaaaatatattcagtcttgttgatgagttggctatcaagcccttcactagctggacaag

SEQ ID NO: 39337 - DNA, 284 bp, Gossypium hirsutum
  Clone ID: LIB3165-038-Q1-K1-G11
ggaagattggtaagacaggccggttcccacatgtggtcatgaggacaatcagcgggtacgttcaaatctcatgcctgagaaactctaatgcaagacagattcctgtccttgctgaaaggacctcagtttctgtctctaccggtgcaggttggtgaaaatacagtactgatttcatttattttacccctttggcttgatgtatatctacacattctttacttttgagcactaatttcagtttgggatggatgaggatatgaaatattatatctttgatcttttat

SEQ ID NO: 39338 - DNA, 397 bp, Gossypium hirsutum
  Clone ID: LIB3165-038-Q1-K1-G12
cccacgcgtccgctaatctttgatgatcatgtgttttttttaattccttttttttttcagggaatatctataacattcctctttttcatattaacttcatattgatatacatagaaaattgcactattaggaactgggatcagtttgaaaccaatcaaaagctatttggtgtaaaaagtactttcaatgaggagctttacacaacaaaacttgagagaggtcctcaaacgagagagttggagaaggaagcaatgagaatagcaagagagattgagggtgaggagacccgggacctacatttagcagaggagagaggcttaaatcttcatgataattttgatattgacgaggagatgagatattcctcggtttataagggtagagggcttgatgatag

SEQ ID NO: 39339 - DNA, 420 bp, Gossypium hirsutum
  Clone ID: LIB3165-038-Q1-K1-G2
gtcaacctcggccatgatggtgaagcttgccaaaagccaaggattgaagcctacagaggtgggcgccatgcaagattgcgtggaggaattggaggacacgatagatgagctgagaaagtcaatcagcgagatgggtcagattaaaggctccaattttggactaatgattaacgatatacagacatgggttagcgctgctttgacggatgagaacacctgcgccgacgggtttggagggaaaaacatgaacggcagtataaagactgctgtgagatccaagattgtcacaatcgctcatttgacaagtaatgccttggctttggtcaacagctatgcttcatttcatggttagctatttaatcaactgtacaggggaaatttagtcattatttacggtagcaattgtatttatgggatttt

SEQ ID NO: 39340 - DNA, 382 bp, Gossypium hirsutum
  Clone ID: LIB3165-038-Q1-K1-G3
gctgccagtattgtatcactgttgtagtgacatgttacgaatatggctaaagatcgtgtgtacagatggatacactgaggatcatgtgtggccttatctcctccatgagacaggagatgtgattacacgatctgatgttggacgcatctaccaagatcgcatacgactttgctaattactagacgaccaactcgttctaacacttaacttatttcgcactgtttacattccaagatcgatgttttcgcctacaaacacatactgggagatgaagatgaaacacactgtcatacctgagtcgttttacgcactgacaaatagatgagggaatgcatttcatgcttgggtagaaagcaatgacgacttgttggacatacttgtg

SEQ ID NO: 39341 - DNA, 408 bp, Gossypium hirsutum
  Clone ID: LIB3165-038-Q1-K1-G4
gtttcatatggtgggggttctacagctggaggcattcagtcatggcatatggatgatttgttggggctaactggcttaaaccaaagctttggttacatggataatgagttatctaaggctgatagtggcaagtgcggagactccgatggctcaccgttcttgcgacctgctgaggaagaggtctttgatgatgaatacatgggtcaggtgccggaatcccactgggcagtaccacaagtgccttcacctcctacagcctcagggttgtattggcctaaagattctcacaatcaatctgatagcgcggtatttgtccccgacatatcctggtctagtgtggaaaaccctttccactagtcgcatatcggctccaccccgtaacaatggcgacaaattcacagtcagatc

SEQ ID NO: 39342 - DNA, 407 bp, Gossypium hirsutum
  Clone ID: LIB3165-038-Q1-K1-G5
ccaaattagcctatctttgatacgcaggtgtctggattggttaaagaatggccatgacgccacaaatggcttaataaataaatcccacacccagttggccaaagctttacaccgaagaagcaaagcagcatcggcatggcagtttattgcaattccgctcccttttcttgcaaagcctcgagaaacagagaccccacacccttatccgcactcttacccacccgtctcttctcacttcttcaacccccaatcagcttccatccagatagattaaagctctcaacttgcaggtgggataaggtggcttctgctgttgtttctgaagaaagtgcagttgggtcaagctcttctgggactgatgtattcaacctcacttacctaaaggggaatagttggcttggggatat

SEQ ID NO: 39343 - DNA, 420 bp, Gossypium hirsutum
  unsure (1)..(420): unsure at all n locations; Clone ID: LIB3165-038-Q1-K1-G6
cccacgcgtccgcccacgcgtccgaagaaatgcaacaagtcatactcaagtaaagatgtatgtctggacctgactgtcactactggattgagaaactacactgaagtcaaacctgttaggacagagctattccggagtcctcttgtatcgtttctctatgaaagaggctggcgtcaaaattttaatctcagtggcttccctggagctgatgaagagttcagaatggctcangagtactttaaacccgcagaaggtggcactttagtggatgttagctgtggaagtggtttgttttcccgaaaatttgctaaatcagggacatattctggtgttattgcactcgatttttctgaaaacatgctccggcaatgtaatgatttcattgagcaagatgcatctcttttagctagcaatattgct

SEQ ID NO: 39344 - DNA, 391 bp, Gossypium hirsutum
  Clone ID: LIB3165-038-Q1-K1-G7
cggacgcgtgggtttgaattgaaaccctaaaaattccactaaaaaatggcctccacagcttgcctctccaccgccgtagccaccacctctttcctccgcggccatccggcgccgaaaaccctaaactcccttcctttcaaccaatctcttttcgggctaaaaccccaacgaaatggccgtctcaccatggcagcatacaaggtgacactgttaacacccgaaggaccccaagaattcgtgtgccccgacgacgtatacatcgttgaccaagctgaggaagaaggcattgatcttccgttctcgtgtagggctgggtcttgctcttcgtgtgccggagtgattaagcaaggctgcgtcgatcaatccgacggtgatttccttgatgatgacc

SEQ ID NO: 39345 - DNA, 422 bp, Gossypium hirsutum
  Clone ID: LIB3165-038-Q1-K1-G8
gtaacattaccaatggcaaccctgtctagcgtgaacctcgtaaccccaagaaccatagccaatggaccagacgtcccaaccctcaaggtcccatgccttaaccggccttggaaaagggtatccccaatgaagctacgtgtcgggcctgttagagctgcaccggatggaatatcggagaaggtggagaaaagtataaaagaggcacaagagatgtgttcggatgatccggcgagtggcgagtgtgtggcggcttgggacgaagtggaagagctgagtgcggcggctagccacgctagggacaagaagaaagacgatgatcctttggagaattactgtaaagacaacccggagaccgatgagtgtcgtacttatgataattgaaaatgtttgtttttttttctagtttcttagattatagttgg

SEQ ID NO: 39346 - DNA, 358 bp, Gossypium hirsutum
  Clone ID: LIB3165-038-Q1-K1-G9
aagaaatcgacgaagacacacagaccgaccaggaccgatggaagggtcttgcttatgatatctccgatgaccaacaagacattaccagagggaaaggtatggtcgactcattgttccaagctcccatgaacgatggtactcactatgctgtcatgagctcctatgagtacattagccaaggccttcgcacatacgacttggacaacaacatggatggattctacattgccccagctttcatggacaagcttgttgttcacatcaccaagaactacatgacccttcctaacattaaggttcctcttatcttgggtatttggggaggcaaaggtcaaggaaaatctttccaatgtgagct

SEQ ID NO: 39347 - DNA, 424 bp, Gossypium hirsutum
  Clone ID: LIB3165-038-Q1-K1-H1
gagactcttttgtatacctgtagcatatagtaatagtaagcagtaatagcaatggcctcctgcatgatctcatcggcaaccattgccaccgtgaaccgctcctccccggcacaggccaacatggtggcccccttcaccggcctcaaatctgcctctgctttcccagtcaccaggaaggccaacaacgacatcacttctcttgcaagcaacggtgggagagtgcaatgcatgcaggtgtggccgcctcttgggaagaagaagttcgagactctctcatacctgcccgatcttactcccgtacagttggctaaggaagtagattaccttcttcgctctaaatggattccttgcttgggaattcgaattagaggagggattcgtgcaccgtaagtactcgagcttacccacgtactacgatggacgc

SEQ ID NO: 39348 - DNA, 216 bp, Gossypium hirsutum
  unsure (1)..(216): unsure at all n locations; Clone ID: LIB3165-038-Q1-K1-H10
tcgcccacgcgttcgcggacgcgtggggcgaaattgcaaaccaaagctggtcttncttgcctacattcattcatccaaaaaaaacacctttttaattcctaaactgaagccatgaaatctcttaaattctaacttgtagaaatctttctatttctgaggttgtattattcatgtattgcaacagaaaaaaagattcagaaagcttaaaagacttat

SEQ ID NO: 39349 - DNA, 316 bp, Gossypium hirsutum
  Clone ID: LIB3165-038-Q1-K1-H11
cccacgcgtccggttcggtacaacccaagttacagatttcttcctttttcattattggatttatttattttcaatcgaaacaaggaaactaatatcgaatttcggcgcttacccataccagtttctctttaattattttttctataataccccgtccccatagaaacctcaattatctctcttcttgtaaaaaaatctggcttctttttatttatttattaaagttagcctaaaaaatgctgtgcacaatggtgttgatgccccggaagaagaaagttggatcggttccggtttatttgaatgtatatgacttgac

SEQ ID NO: 39350 - DNA, 410 bp, Gossypium hirsutum
  unsure (1)..(410): unsure at all n locations; Clone ID: LIB3165-038-Q1-K1-H2
ccacgcgncgaaaggcagtcctaaaatctgctctctcactcctctatttaaccatttctgtcttgtcctcgccccttccctagcaagctacatttccatggccccccctgaattggttcaacccagtgataaaacaaacgttttcgctaaacaagtcagtttgcgtaatcgtgcatatgttacgttcttggccggaaatggggactacgtgaaaggcgttgtagggttagccaaagggttaaggaaagtgaaatcggcgtaccctttagtggttgccgttttacccgacgtgcctgaggagcataggcggatcctggagaaccagggttgtatcgtcccgagagatcgaaccagtttacccgcctgagaaccagacccagttcgccatggcctattacgtcatcaattac

SEQ ID NO: 39351 - DNA, 440 bp, Gossypium hirsutum
  Clone ID: LIB3165-038-Q1-K1-H3
ctcttttgtatacctgtagcatatagtaatagtaagcagtaatagcaatggcctcctccatgatctcatcggcaaccattgccaccgtgaaccgctcctccccggcacaggccaacatggtggcccccttcaccggcctcaaatctgcctctgctttcccagtcaccaggaaggccaacaacgacatcacttctcttgcaagcaacggtgggagagtgcaatgcatgcaggtgtggccgcctcttgggaagaagaagttcgagactctctcatacctgcccgatcttactcccgtacagttggctaaggaagtagattaccttcttcgctctaaatggattccttgcttggaattcgaattagaggaaggattcgtgcaccgtaagtactcgagcttacccacgtactacgatggacgctactggaccatgtggaaactg

SEQ ID NO: 39352 - DNA, 359 bp, Gossypium hirsutum
  Clone ID: LIB3165-038-Q1-K1-H7
gagactcttttgtataactgtagcatatagtactagtaagcactaatagcaatggcctcctgcatgatctcatcggcaaccattgcacaccgtgaactgctccttcccggcacaggccaacatggtggcccccttcaccggcctcaagtctgcctctgctttcccagtcactatgaaggccaacaacgacatcacttctcttgcaagcaatggtgggagagtgcaatgcatgcaggcgtggcctactcttgtgaagaagaagttcgagacactctcatacctccccgatcttacacccgtacagttgggtaaggaagtagattacctgcttcactctaaatggattacttgcttggaat

SEQ ID NO: 39353 - DNA, 383 bp, Gossypium hirsutum
  unsure (1)..(383): unsure at all n locations; Clone ID: LIB3165-038-Q1-K1-H8
cccacgcgtccgcccacgcgtccgaagtagagcttctttctatctatatccttatcagctgtcaaagatggcaggaatcgcctttggtcgcttcgatgattccttcagtttggggtctgtcaaggcctaccttgctgagtttatctcaactttggtgtttgttttcgccggcgttggctctgccattgcttacaacaagttgacaactgatgcagccctagatcccgatgggctagtcgccattgctgtttgccacggatttgctctctttgttgcagtggctatcggtgccaacatctcaggtggccatgtcaaccctgcagtaacttttgggttagctcttggtggccaaatcaccatactcactggcatctnttactgga

SEQ ID NO: 39354 - DNA, 405 bp, Gossypium hirsutum
  Clone ID: LIB3165-038-Q1-K1-H9
cccacgcgtccgacaatgtctaaggaagtgagtgaagaaggacagggtcgtaaggactatgtggaccctccaccggcacctctgattgatatggctgaactcaagtcatggtctttttacagagccctcatagctgagttcatagccactctcctcttcctctatgtcactgttgctaccgtaattggtcacaagaaacaacaagatgcatgtgatggtgttggtctcttgggtattgcatgggctttcggtggcatgatctttatccttgtttactgcactgccggtatctcaagtggacacattaaccctgcggtgacttttgggttgtttttggcccgtaaagtatctctcatcagggctgtggcttacatggtgtcacagtgcttgggtgctatatgtgga

SEQ ID NO: 39355 - DNA, 422 bp, Gossypium hirsutum
  Clone ID: LIB3165-039-Q1-K1-A1
gttggagtgaatgctgacacctacaacccagatgagcctatcatcagcaatgcttcttgcaccaccaattgccttgctcctttcgtcaaggttctggaccagaagtttggtatcatcaagggcaccatgactaccactcactcgtacaccggtgaccagaggctacttgatgctagccaccgagacctcaggcgtgctagagccgcagctctcaacatcgtcccgacttcaactggtgcggcaaaggccgtggcccttgtactccctactctcaaaggcaaacttaacggcatcgcattgcgtgtaccaacaccaaatgtgtcggtggtggacctagtggtccaggtttcaaagaagacgtttgctgaagaggtgaacgctgctttcaaagagagtgcagagaaagagctacagggtatact

SEQ ID NO: 39356 - DNA, 423 bp, Gossypium hirsutum
  Clone ID: LIB3165-039-Q1-K1-A10
gcctttgaattgaaaccctcaaaattccacttaaaaaatggcctccacagcttccgtctgcaccgccgtagccaccacctctttcctccgcggccacccggccccgaaaaccctaagctcccttcctttcaaccaatctcttttcgggctaaaaccccaacgaaatggccgtctcaccatggctgcatacaaagtgacactgttaacacccgaaggaccccaagaattcgtgtgccccgacgacgtttacatcgttgaccaagctgaggaagaaggcattgatcttccgttctcgtgtagggctgggtcttgttcttcgtgtgccggaatgattaagcaaggctccgtcgatcaatccgacggtaatttccttgatgatgaccagattgctgcaggttttgtcctcacttgtgttgcttaccc

SEQ ID NO: 39357 - DNA, 420 bp, Gossypium hirsutum
  Clone ID: LIB3165-039-Q1-K1-A11
tttagctatagcatacactactagtacccactactagcaatggcttcctcaatgatctcatcggctaccattgccactgcctctccggcacaggctaacatggtcgctcctttcaccggtcaagtctgcctctgctttcccagtcaccaggaaggccaacaacgacattacttctctcgcaagcaatggcggtagagtgcaatgcatgcaggtgtggcctcctactgggaagaagaagtttgagactctctcatacctccccgatcttacacccgtgcagttggctaaggaagtagattaccttcttcgctcaaaatgggttccttgcttggaattcgaattggaggagggattcgtgcaccgtaagtactcgagcttacccacgtactacgatggacgctactggaccatgtggaagct

SEQ ID NO: 39358 - DNA, 416 bp, Gossypium hirsutum
  unsure (1)..(416): unsure at all n locations; Clone ID: LIB3165-039-Q1-K1-A3
atgtcatccaaatcccactgcaacggtgagagtgagagtgaaagagaaagcttaggttccacgctgctaaattataagcgaaaatggtgaatttcatgctgaagatctctgccgacctcgaaaacctcactaacctccagcctcagggcggctgtgacgatccttcctttccctatctcttcaagctgaagtgtgggaggtgtggagagttgagtcagaaggaaacatgtgtgagtttgggcgatactgttcctcttctacaaggcaagggaaccaccaatcttgttcagaagtgcaaattttgtatgagggaaggaactgtaacaatgatcccaggcaaaggtcgaccgctgactcangaagactgtgaaggcggaaaatttgcacctttgatgctttttgactgcaggggttat

SEQ ID NO: 39359 - DNA, 424 bp, Gossypium hirsutum
  Clone ID: LIB3165-039-Q1-K1-A4
aaaccctcctttcctctcctctcctctcctctacaaggaaatggcaatttcatcaacagcggcggccactgccgcttcttctaagcttagatacccacacgcctcccctttcccaactcactcctcaaccaccacctctgcctttttctcctcaattccctctaaactaacccctacccacctctcctcttccttcctccctcctttcctcactaccgtcgccaccacttccgtattccctcgccgtcgcggttctttcaccgtcaaagctgcccgtggcaaattcgaacgcaaaaagccccacgtcaacatcggcaccatcggccatgtcgaccacggcaaaaccaccttaactgccgctctaactatggccttagcctccatgggtaacagtgccccaaaaaaagtacgacgaaattgatgc

SEQ ID NO: 39360 - DNA, 401 bp, Gossypium hirsutum
  Clone ID: LIB3165-039-Q1-K1-A7
caacaaaatcaactgcttcacaatggcctctacaaccatggctctttcttccccatcattcgccggtaaggcagtgaagttctccccttccatccctggtgactatggttgggacactgctggactctcagctgatcccgagacctttgctaggaaccgtgagctcgaagtcattcactgcagatgggccatgttgggagctcttgggtgtgttttccctgagctgttggctaggaacggtgtcaagttcggtgaagctgtatggttcaaggccgggtctcaaatcttcagtgagggtggacttgactacttgggtaacccaagcttgatccatgctcaaagcattttggccatctgggcttgccaagttatcttgatgggagccgtcgagggctaccgta

SEQ ID NO: 39361 - DNA, 425 bp, Gossypium hirsutum
  Clone ID: LIB3165-039-Q1-K1-A8
gtgagactcttttgtataactgtagcatatagtactagtaagcagtaatagcaatggcctcctccatgatctcatcggcaaccattgccaccgtgaactgctcctccccggcacaggccaacatggtggcccccttcaccggcctcaagtctgcctctgctttcccagtcactaggaaggccaacaacgacatcacttctcttgcaagcaatggtgggagagtgcaatgcatgcaggtgtggcctcctcttgggaagaagaagttcgagacactctcatacctccccgatcttacacccgtacagttggctaaggaagtagattaccttcttcgctctaaatggattccttgcttggaattcgaattagaagagggattcgtgcaccgtaagtactcgagcttacccacgtactacgatggacgc

SEQ ID NO: 39362 - DNA, 423 bp, Gossypium hirsutum
  Clone ID: LIB3165-039-Q1-K1-A9
cccacgcgtccgggaaaatcatgggtgccaaagttctcttcttctttgctttgctggccttttcagctgtgtcggcatttgcacaggatgaggaagaccaaggtcttgttatgaacttctacaaggattcttgtcctcaggctgaagacattatcaaggagcaagttaagctactgtacaagcgacacaaaaacactgctttttcttggctgagaaacattttccatgactgtgctgtccagtcatgtgatgcttcactgctgctggactccacaagaaggagcttgtctgagaaggagacagacaggagctttggcctaaggaatttcaggtacattgagaccatcaaagaagctgtagaaagggaatgtcctggagttgtttcttgtgctgatatccttgttctgtctgctagagaaggca

SEQ ID NO: 39363 - DNA, 403 bp, Gossypium hirsutum
  Clone ID: LIB3165-039-Q1-K1-B1
ctctctcgtaccgtgatacactttgtaaacctccactatccgacaacaatgggttcaacgggtgaaaccgaaatcactcctacccaaacctcggatgaggaaaacaatttattagccatgcagatcaccaaggactcactccttgccatgggcctcaattctgacatacaaattgacctgctgactatcatgtccgaacctaagactaatgctaccctctaccaaaaagaattgtcttaccatttcctcaccataaatcgagatgtaactgtgatgcttgaccgaatgtcgctcattatgggtatctactgcatactgacttgctccttgcgcactatctctgatggcgaacgcgagagactctatggtcttggccctgtctgcaaattcttgaccaacaatg

SEQ ID NO: 39364 - DNA, 424 bp, Gossypium hirsutum
  Clone ID: LIB3165-039-Q1-K1-B10
gttcctggaatcatgttcttgtctggcggacattccgaggttgaagcaaccctcaacttgaacgcaatgaaccaatctccaaacccatggcacgtctcgttctcgtatgccagagctctccagaacacttgcttgaagacatggggaggcagacccgagaacgttaaggctgctcaggatgcactccttgtccgtgccaaagccaactcactcgctcagctcgggaaatacaccggcgagggagaatcagaagaggccaagaaaggaatgttcgtaaagggctacgtctactaagctgctgcaaacaaagctttagctgagatgatggagatttcatgatatggtttctttctctttgtgttgaatgttttataggctctggagactactttttgttctggattgcaatgtactgttaaataaa

SEQ ID NO: 39365 - DNA, 421 bp, Gossypium hirsutum
  unsure (1)..(421): unsure at all n locations; Clone ID: LIB3165-039-Q1-K1-B11
ctgcaaagatgtcacatnaccagcggccaatcaagtgagggcatctaaatactcatcaagcaccaaggctctcgtcgtaaggcttcttggaaggatccagaaggtcgcgtcatctccaccaccacccgagacgccgctgtctcacagcttaaacttctccgcgacgacatcgtttccaacaaggctaagttcgacgaggttgcctctcgctactccgattgcagctccgctaaacgtggcggtgatctcggtccttttggtcgaggccagatgcaaaagccatttgaggatgcaacatataatcttaacataggcgagataagtgacattgtggatactgatagcggtgttcacatcataatgagaactggttgatcattagtgatggagcctggatatcgtgagcaattagttcagtctt

SEQ ID NO: 39366 - DNA, 414 bp, Gossypium hirsutum
  Clone ID: LIB3165-039-Q1-K1-B12
ccgacacaaacaaaccgaacaaaaaaccggattaagaagaagagcgggcataggagcgggcgtcgaaatgctgtttgtctagttgggttaataccctgggtacagggcgaagagcagggagaagactgagaaattcacttaatattattattaataaaattatgaaaacactcaaaactgcactaatacgtgcttgactaggagcttgactcggtggatgaatatcagggtatataacaagggatataaggggttaatgtatggcaagatgtgttgcaagtcgtgcgtgaattcatttgagaattcataatagaagagttgattgtgcaatctattgaccaacctattactggttgaggtgctgttcatggcgatattcatgatctaatgaatgatctaatgactgtatgtcat

SEQ ID NO: 39367 - DNA, 426 bp, Gossypium hirsutum
  Clone ID: LIB3165-039-Q1-K1-B2
aaaaattccattaaagtccctctggtaacatccaaggcaagaactctcatttcgtttctgcacaactcaaacctctcaaatctttttcagttttcatttccccatccaaacgacgccctaaaccaaaagtcatggccaccccttccgcacgtgacgaaaacgtttacctggcgaaactcgccgagcaagccgagcgctacgaggagatggtcaagttcatggagaacgtcgtctccgccgtccctgcccccgacgaactcaccgtcgaggaacggaacctcctctctgtcgcctacaagaacgtgatcggcgctcgccgtgcctcttggcggatcgtttcctccatcgagcagaaagaggaaggcgtggcaacgccgaccacgtctctgtcatccgtgagtacagggccaagatcgaggccgaatt

SEQ ID NO: 39368 - DNA, 427 bp, Gossypium hirsutum
  Clone ID: LIB3165-039-Q1-K1-B3
ctcaaattcagataacaatttcacagttgttttcttcactctctctctcagccatggctgcggccatctccaccgtcgccgccgctgccgccgccaaccgagctctgggagtgtcagtcccaacctcagctttcatggggaagaaagtgagctcgagattcaacaacaccaggcaggttccttcgggaagttttaaggtgatggcggccgaaagagatagacgaagagacacagaccgaaaaggaccgatggaaagggttggcttacgatatttcggacgaccaacaagacattactcgagggaaagggatggtggattccttgttccaagctcccatgaatgatggaactcactatgctgtcatgagttcctatgaatacatcagccaaggtcttaaaacgtacaatttggacaacaacatggatg

SEQ ID NO: 39369 - DNA, 435 bp, Gossypium hirsutum
  Clone ID: LIB3165-039-Q1-K1-B4
gcattattcattgctactttcgcttcattaagcctttactttagattttgaaaaacaaaataatctctagggttcttccttagtttccacttccacatatctatccttaaattgaagaaaatggccgcatcatcacctgccatgcaaatgcaatccctccttttagcaagtcccatgactggccttgctagtaagagacaaatggttcagttttatatcgtgaaacgcatgcctcgttttcaaaggaaactcaatcttcaagttcgctgtttggcagaggagggtgatcaaaaggagccaatgccaacagcaagaacgccggaacctaagccgagccctccaccggtatcacccaaactgagcacgaaattctccgatgtgtttgccttcagtgggcctgcaccggagaggatcaacggcaggttggcgatggtt

SEQ ID NO: 39370 - DNA, 425 bp, Gossypium hirsutum
  Clone ID: LIB3165-039-Q1-K1-B5
tgaacaaccaaatggtgaacgccacactcatgaacatcgctgataaccccaccaacgttcagctccccggtatgtacaacaaggaagagaaccctcgtgttccgatcattgtcaccggtaacgatttctcgacgctgtacgcgccgctcatccgtgacggtcgtatggagaagttttactgggcacccaccagggaagataggatcggtgtttgcacaggtattttcaggaccgacaatgttcccgttgatgacattgttaagcttgttgacaccttcccgggccaatccattgactttttcggtgctctgagggccagagtttacgatgacgaagtgaggaaatggatcggagaggtaggagtcaatagtgtcgggaaaaagctcgtgaactcgagggaagggccaccatctttcgagcaacct

SEQ ID NO: 39371 - DNA, 426 bp, Gossypium hirsutum
  Clone ID: LIB3165-039-Q1-K1-B6
gaaacttgcttaaaggacaaacagttggtgtaattgtagctggtcgtattggatctgcatacgccagaatgatggttgaagggttcaaaatgaacttaatttactatgatctttaccaatcaacacggctagagaagtttgtcacagcttatggtgagttcttgaaaagcaatggagagcaacctgttcactggaaaagagcatcaagtatggatgaggtgctccgggaggcagatgtgataagtcttcacccggtcttggataaaaccacctatcatctgatcaacaaagaaagccttgcaacaatgaagaaggaagcaatacttgtaaactgtagcaagggcccggtgattgatgaagtagctcttgttgagcatctgaagcaaaatcctatgttccgagttggtcttgatgtctttgaggatg

SEQ ID NO: 39372 - DNA, 426 bp, Gossypium hirsutum
  Clone ID: LIB3165-039-Q1-K1-B7
tatgcaccggttaatgcaatgaagctattacattcaagtgatcagaaaagccaatggccggccaccggagcaaagggttcactgttaaggtacgcactcgcacaccagcagctcgaggccgtcattcaattggaatacaccattggattccatgatgggtacattcaagtgaacgcacgtgtcgataacttacgcttccacgtggccagactagggttcagcaaaaaaaacgacgaaatggatgatttcttgaacgagaaacacttcccgtcgaggatccgagtttgggtcggaccggaagtcgggtcaacgtacgtgtccgggttaaccttgggtcggtccacgaacaatggtgaaaacgaagtcgaaacacaaaggatccttaaagggagattcgggaaatattcaaaggattcctcccatgtt

SEQ ID NO: 39373 - DNA, 425 bp, Gossypium hirsutum
  Clone ID: LIB3165-039-Q1-K1-B8
cccacgcgtccgcccacgcgtacgtggttatttatcagccatgttttggtgtagggggggcatcaaaatctcgacagctaccaaagctaagagccccatcaccactaaccttatactaacttctttatcccatttcagcaccgccaaccaacccccagttgcggctcaaccttgaggtcttggacccaccaaagcagatgagaaaccaagggtggtggtgttaggctcaggttgggctggttccaggctaatgaaaggcttggaccctaagctgtatgacatcgtttgcgtttcccctaagaatcatatggagtatactcccctcttggcttccacttgtgttgggactctcgagttcaggtacgtcgctgaacccatttacaggattcaaccctccatttgttcagcacctggctcctattttt

SEQ ID NO: 39374 - DNA, 426 bp, Gossypium hirsutum
  Clone ID: LIB3165-039-Q1-K1-B9
cccacgcgtccggcccacactctcaaattttgtttacaatttcacagttgttttctgggggctctctctcagccatggctgcagccatctccaccgtcgctgccgctgccgccgccaaccgagctctgggagtgtcagtcccaacctcagctttcatggggaagaaagtgagctcaagattcaacagcaccaggcaggttccttcgggaagttttaaggtgatggcggcggagaaagagatagacgaagagacacagaccgaaaaggaccgatggaaagggttggcttacgatatttcggacgaccaacaggacattactcgagggaaagggatggtggattccttgttccaagctcccatgaatgatggaactcactatgctgtcatgagttcctatgaatacctcagccaaggtcttaaaacgt

SEQ ID NO: 39375 - DNA, 443 bp, Gossypium hirsutum
  Clone ID: LIB3165-039-Q1-K1-C1
ctctctcagccatggctgcagccatctccaccgtcgctgccgctgccgtcgccaaccgagctctgggagtgtcagtgccaacctcagctttcatggggaagaaagtgagctcaagattcaacagcaccaggcaggttccttcgggaagttttaaggtgatggcggcggagaaagagatagacgaagagacacagaccgaaaaggaccgatggaaagggttggcttacgatatttcggacgaccaacaggacattactcgagggaaagggatggtggattccttgttccaagctcccatgaatgatggaactcactatgctgtcatgagttcctatgaatacctcagccaaggtcttaaaacgtacaatttggacaacaacatggatggtttctacattgctcctgcattcatggacaagcttgttgttcacatcaccaagaac

SEQ ID NO: 39376 - DNA, 419 bp, Gossypium hirsutum
  Clone ID: LIB3165-039-Q1-K1-C10
gctttttccccttattttctctccataagatgtctttttctcttcattctcccaatatcttcatttgaagcagctatgtcttttagaggaggaaatgcatcatcgggcatgggagtggctgaacacagcaaaagcacgtacctggaactgcagagaaagaaggtgttccgatatgttatcttcaagattgatgagaagaaaaaggaggtcatagttgaaaagactggaggtccgacagagagctatgatgatttcgcagcctcattgccggagagtgactgccgctatgcagtttatgacttcgattttgtgacttccgagaattgtcagaagagcaagatcttttttattgcgtggtctccttctgtttcgaggatccgttccaagatgctttatgcaacatcaaaggacaggttccg

SEQ ID NO: 39377 - DNA, 254 bp, Gossypium hirsutum
  Clone ID: LIB3165-039-Q1-K1-C12
ggcagtgcagatggctatccgagtttcaccttctgcaaggctttctcttccaccaccatgaccatcaccaccttctccttcagtaccatcatccacaatctcaaccaaaccttttttaaaaccccaacaacctaaacccatctttttatcacttccaacatccacaactatttttttattaactttattttcaccttcccattaaacccaagctattaatcttaacaaaaaacaaattatttcattttttaatg

SEQ ID NO: 39378 - DNA, 427 bp, Gossypium hirsutum
  Clone ID: LIB3165-039-Q1-K1-C3
ccccattatgatgagtgccggagaattggaatgtggtaacgccggagaaccagccaagttgatcaggcaaaggtaccgtgaggccgccgacattatcaagaaagggaaaatgtgttgcctctttatcaacgatctcgacgctggagccggtcgtatgggaggaaccacacaatacacagtgaacaaccaaatggtgaacgccacactcatgaacatcgctgataaccccaccaacgttcagctccccggtatgtacaacaaggaagagaaccctcgtgttccgatcattgtcaccggtaacgatttctcgacgctgtacgcgccgctcatccgtgacggtcgtatggagaagttttactgggcacccaccagggaagataggatcggtgtttgcacaggtattttcaggaccgacaatgttcccgtt

SEQ ID NO: 39379 - DNA, 421 bp, Gossypium hirsutum
  Clone ID: LIB3165-039-Q1-K1-C5
ttaagtcagtgagtttattagtttacctagaagttaatcatggctcaaattaagaggatggagtgccaactcgagatcaagtcctcagctgataagttctttgatgcctacaagaccaaagcccagcttatgccaaaaatggccaatcaagtcgttagagatgtaaaacttgatgagggtagtggttgggattccgagggttcgactagacaatggtattttgttgccggaggtaaacttgagacttgtaaggaaatgatggaaaaggtgaatgataaagacaggactattgattacaaattggtggaaggcgaaatcatgaaagctttcaaaagctggaactacatccgtaacgtgatgccgatcggggagggaagattgctgaaatggactatggaatttgaaaagcataatgatgatg

SEQ ID NO: 39380 - DNA, 400 bp, Gossypium hirsutum
  unsure (1)..(400): unsure at all n locations; Clone ID: LIB3165-039-Q1-K1-C7
aaaacccggcgcgacccacgcgtacgcacaaaatctcctcccccaatcaatcctttaatataacaaaaaaaaaaaacaacagcccgcnctttcttatatggtgcgtgcgccccacaccaatggagatggtaacgaatttggcatccgagagaccggttgtgatcttcaccaagagttcttgttgcatgtgccatacaatcaagacccttttctacgaatttggagtcaatcctacagtctacgatctcgatgagatccctagaggatttgaactctaacaagctcttttaagatttggttgtagcccttcagttcctgtcgtgtacattggtggtgaatttgtcggtggagccaatgaactcatcagccttcaccttaacccaaccttaatccctatgct

SEQ ID NO: 39381 - DNA, 423 bp, Gossypium hirsutum
  Clone ID: LIB3165-039-Q1-K1-C8
gttctagggtttttgttagcagctccgacagatgaaatgggaaaaggaactggaagctttggaaagcgaaggaataagacccacacactttgcgttcgatgtgggcgccgtagcttccatctccagaagagccgttgcagtgcttgtggctaccctgccagccgcatccgaaaatataactggagtgtgaaggctattagaagaaagacgactgggacaggccgcatgaggtacctccgtcatctgccccgaaggttcaaaactggttttagagaaggcactcaagcaactccaaggaagaaggcagctgttgctgcatcttaagttggttttggtgttttgtttttgagatttctgaatttacacaaactaagtttttgtgatttttatcatcattttgtacttttattattacaacctaat

SEQ ID NO: 39382 - DNA, 424 bp, Gossypium hirsutum
  Clone ID: LIB3165-039-Q1-K1-C9
gcgggattacccgctgagtttaagcatatcatttagcggaggaaaagaaacttaccgggattcccctagtaacggcgagcgaaccgggaaaagcccagcttgagaatcggtcgccatcggcgtccgaattgtagtctggagaagcgtcctcagcgacggaccgggcccaagtcccctggaaaggggcgccggagagggtgagagccccgtcgtgcccggaccctgtcgcaccaagaggcgctgtctacgagtcgggttgtttgggaatgcagccctaatcgggcggtaaattccgtccaaggctaaatacgggcgagagaccgatagcgaacaagtaccgcgagggaaagatgaaaaagactttgaaaagagagtcaaagagtgcttgaaattgtcgggagggaagcggatgggggccggcgat

SEQ ID NO: 39383 - DNA, 426 bp, Gossypium hirsutum
  Clone ID: LIB3165-039-Q1-K1-D1
gtgagactcttttgtataactgtagcatatagtactagtaagcagtaatagcaatggcctcctgcatgatctcatcggcaaccattgccaccgtgaactgctcctccccggcacaggccaacatggtggcccccttcaccggcctcaagtctgcctctgctttcccagtcactaggaaggccaacaacgacatcacttctcttgcaagcaatggtgggagagtgcaatgcatgcaggtgtggcctcctcttgggaagaagaagttcgagacactctcatacctccccgatcttacacccgtacagttggctaaggaagtagattaccttcttcgctctaaatggattccttgcttggaattcgaattagaagagggattcgtgcaccgtaagtactcgagcttacccacgtactacgatggacgct

SEQ ID NO: 39384 - DNA, 372 bp, Gossypium hirsutum
  unsure (1)..(372): unsure at all n locations; Clone ID: LIB3165-039-Q1-K1-D10
aaaaaaaaaaattaaaaatttattaaaaaaaaaaaaaaaaaaaggnggaangtattaaaaaagtgtgggaaaanaaaaaaaaaaaaaaaaaaaaataaaaaaaaaaaaaaaaaaagtaaaaaataaaaaaagaataagaaaaaaaaaaaaagaaaaaaaaaggaaaaatagaaaaaannngaaaaaaaaaaaaaaaagaaaaagaaaagaaaaagaaagaaaaaagaaagaaaaagaaaaataagagaaaaaaaaaataggaaaaaaaaagagaaaaaaaaaaaagaaataaaaaaaaaagaagaaaaaaaaaaaaaaaagaaaaaagtaaaaaataaaaaaagggatataaaaaaaaaaaaaaaaatgaaa

SEQ ID NO: 39385 - DNA, 62 bp, Gossypium hirsutum
  Clone ID: LIB3165-039-Q1-K1-D11
aaaaaaaaaaaaaaaaaaaataaaaaatttaaatataaaaaaaaaaaaaaaaaaaaaggggg

SEQ ID NO: 39386 - DNA, 258 bp, Gossypium hirsutum
  Clone ID: LIB3165-039-Q1-K1-D4
cccacgcgtccgcccacgcgtccgtctagatcgcgagcgccgccctttttttttttttttgaaaagcaaaattatacaaactcattttaactcaggccaaagcagaaatccggataagtcccaggagaagttacaaatccataaacataaagaaactctaacctcccttttgctcactgctgttattgctgcagccaaagaactttgctaagcttggttcaaagtctctgcggaaacttaaggttttcgattgaagat

SEQ ID NO: 39387 - DNA, 405 bp, Gossypium hirsutum
  Clone ID: LIB3165-039-Q1-K1-D5
ccaccgccgtcgatctcgttccttatcctcgttttcaaacaagctcgaaaaagatggccaacgctgcatcgggaatggctgtgcatgatgattgcaagttgaagttcttggagctcaaggcaaaaagaacccaccgcttcattgttttcaaaattgaggagaagcaaaagcaagttattgtggagaagcttggtgaaccaaccgaaagctatgaggattttactaaatgtctccccgctgatgaatgtcgatatgctgtgtacgattttgattttctaacggccgagaacgtaccgaagagcagaatctttttcatagcatggtctcccgacacgtcaaggatcaggagcaagatgatttacgccagctccaaagatagattcaagcgagaactggatggaattc

SEQ ID NO: 39388 - DNA, 423 bp, Gossypium hirsutum
  Clone ID: LIB3165-039-Q1-K1-D6
cccacgcgtccgaaaagaaaaatggcttctgcttccgctactctcctcaagtcttcacctattatcgacaagtccgagtggattaagggtcaaaacctccgccacccttcggtttgttttgtacagtgcaaccctacatcggccgcctttaccgtccgtgctagttcatatgccgatgagcttgttaagaccgcgaaaactgttgcatctccaggtcgtggtattttggccatggatgaatcaaatgctacatgtgggaaacggcttgcctcgattggtctcgagaataccgaggcaaaccggcaagcttaccgtacccttctcgtgtctgcccctggcctcggtgactacatctcgggagctatccttttcgaggagactctctaccaatctaccatcgatgggaaaaagatggtcgatgtt

SEQ ID NO: 39389 - DNA, 423 bp, Gossypium hirsutum
  Clone ID: LIB3165-039-Q1-K1-D7
cacactctcaaattcagttaacaatttcacagttgttttcttcagtctctctctcagccatggctgcagccatctccaccgtcgctgccgctgccgccgccaaccgagctctgggagtgtcagtcccaacctcagctttcatggggaagaaagtgagctcaagattcaacagcaccaggcaggttccttcgggaagttttaaggtgatggcggcggagaaagagatagacgaagagacacagaccgaaaaggaccgatggaaagggttggcttacgatatttcggacgaccaacaggacattactcgagggaaagggatggtggattccttgttccaagctcccatgaatgatggaactcactatgctgtcatgagttcctatgaatacctcagccaaggtcttaaaacgtacaatttggaca

SEQ ID NO: 39390 - DNA, 422 bp, Gossypium hirsutum
  Clone ID: LIB3165-039-Q1-K1-D8
cccacgcgtccgcccacgcgtccgatcgctgtctccaatggccctcgctaacccactttcacctccatcatcatgtaccaaaggtccgggtcctgtaatccctgcaacacccttactaagtttccttgtacgtgtccaagaaactgctttgcaaacttatgggaaatcgaattttgatcctaaacactatgtagacttaccgttaaagtctaatctttccaccaccgtggaagcattcgataaacttcccaagacggaagatgggtcagtttctgttaaggattttgaagcgtttatcgggaagtactttactgatgcaggggatgatgttgtatatgccgagccagtggattttgtccctgagccgcatggctttttgcccaaggtggagagcccagaggtgagaggttgggcattggaag

SEQ ID NO: 39391 - DNA, 411 bp, Gossypium hirsutum
  Clone ID: LIB3165-039-Q1-K1-D9
aaaagccgttcgaaaagcattttttgtatgatttatggctgcaaccacgctttccgccgggctaaacggtctgactaacggcaccactattcgcagaccgatggtcaaactgccgaccaaaacctacacttatttttaacctacattgaccgagccctggacagccacctcaatcgcccactcactgcgaatattagcagctatagctggatcacgagctgatgattcagctgattatgagatgtctgttgagaacgctctcaagctcgttgtggtgttcgaaaatgcttcttttgatgatattcttgatgctatgaattcgaccgaggactctattgaggatgaccaaaaagctgtcgatcaagctgtggctgagtatgacatgttgcttatgctgagcttaatgcaacg

SEQ ID NO: 39392 - DNA, 423 bp, Gossypium hirsutum
  Clone ID: LIB3165-039-Q1-K1-E1
aaaagatttagtcaatttcctcaaagtttcctcccatgtcgaagaagaagtcctaataatttaggactgttggggtggttttcgtttccgttttgtttccttcatttctgcttctgatcccccgtttgtaggagggaaaagaagagagattgaatggagagtgtagtatggcaagggttggctttatctggaattttctcttggattgtaattacttgttatttcgatgtaaccaaaaagattagatctttgctgcaaccttgggtgtctcaccatgttgtctctggcacttctatcatccttaagatccagaaacatcagcataaattcttggatgctctcttttctgggttgtcttgtatagtttctgtgcccttttacactgcgtttcttcctttgcttttctggagtgggcatgggaaa

SEQ ID NO: 39393 - DNA, 419 bp, Gossypium hirsutum
  Clone ID: LIB3165-039-Q1-K1-E10
cttcattttcctccaaccataatcattatatttatatttcttcctctctcttctttatttcttcaagtttaaggcctcaaaatggaggcagccactgtggttggatcttctatgtctctacatcgaacttcatgctccgctgccagatccgcccttttagctgccaatggcccgctctttccacgtttcgctgctaaccctcgctcctccttctcgatcaagctttattcttcagtttcatattcaaaatcacggaataggagaatgggtttggggggtaggagaggcatggtggtaaaggcgtcttcatctcctgactcagctgaacccaatgctcaaattgcgtcacttcggatggaatctccaattggtcagtttttgtctcaaatcttgataagtcatcctcatcttgttcctgc

SEQ ID NO: 39394 - DNA, 417 bp, Gossypium hirsutum
  Clone ID: LIB3165-039-Q1-K1-E11
aacttaatcatggctcggttgacgttggtgttctccatcatccttctgctatgctccgtcgccgccggatcaactttcgaggactccaaccccatccagatggtatccgatggcctcagcggcttcgaatcctccgttcttcgtgtcatcggtcacactcgtcatgctctctccttcgcccgttttgcatacaagcatgggaagaggtatgaaaacgtggaggagatgaagctacggtttcagattttcaaaggcaacttggatttaatcagatccactaacaagaagggactgccttacactcttgctgtcaatcagtttgctgattggagctgggaagagttccagaaacacagattgggggctgctcaaaactgctctgctaccacaaagggcaatcaccagctcactgatgtc

SEQ ID NO: 39395 - DNA, 420 bp, Gossypium hirsutum
  Clone ID: LIB3165-039-Q1-K1-E12
cccacgcgtccgggaacccaaggacagaagactcttttaacatttcaccgcaaagatggagataacaaatgtgagcgagtatcaagaaattgcgaagcaaaagttgccaaagatggtgtatgactactacgcatctggtgctgaggaccaatggacattgcaagagaatagatttgctttcactaagatactgtttcgtcctcgtattctcatcgatgtaagcaagatagacatgaccacaactgtgttgggtttcaagatatcaatgcctatcatgattgccccaactgccatgcaaaaaatggctcatcctgaaggggagtatgcaacagctagggctgcatctgctgctggaactatcatgacattatcctcatgggcaacttctagtgttgaggaggttgcttcgacaggacccgg

SEQ ID NO: 39396 - DNA, 422 bp, Gossypium hirsutum
  Clone ID: LIB3165-039-Q1-K1-E2
ctctctctctctctctctcatggattctctttctctcttctgtaccggggctcttttagccggcggtctgtactggttcgtttgcgttttaggccccgcagagcagaagggcaagcgagctgtcgatctctccggcggttccatttccgctgaaaaggttcgagacaactacaagcagtattggtctttcttccgccgcccaaaggagatcgaaaccgccgagaaagtcccggacttcgtcgacactttttacaatctagtcaccgatatatacgaatggggctggggtcaatcctttcatttctctccttccatccccgggaaatctcaccgtgacgcgacgcgtctccacgaagagatggccgtcgatctcatcgacgtcaaacccggagaccgaatcctcgacgtaggatgcggggtag

SEQ ID NO: 39397 - DNA, 427 bp, Gossypium hirsutum
  Clone ID: LIB3165-039-Q1-K1-E3
ggcatcagcctcagctttgttaacccccatcttcaccaccaccctccaaaacaaacatggcagccgccacaacatcgccaccccatcgttccatggcctcaggcccctacgcaaggtcccctcctccaagctcacccccatgtcttgtggtagaaaggttggtggtgtgaaggcggagctaagcgccccagtggtgataagcctaagcacagggctctcccttttcttgggtcggttcgtgttcttcaacttccaaagagagaacgtggcgaagcaagtgcctgagcaaaacgggttgacccatttcgaagcgggtgacactcgagccaaggagtatgttagcctcctgaaatccaacgatccggtgggattcaacctggtggatgttctggcttggggatccctgggtcatattggtgcttactat

SEQ ID NO: 39398 - DNA, 412 bp, Gossypium hirsutum
  Clone ID: LIB3165-039-Q1-K1-E4
cttaaagtgtttaaggaacaaggtctggttttgaccgctcttttaggtctttcagctttcttctcgatggcagagactgcaataactacattatggccttggaaggtgcgtgaactggctgataaagactctgaagatggtgtttttaaaatgctttccagtgatgtaacacgctttctcacaaccattcttattggcaccacggtggtcaatattggagccactgctttagtcacagatgctgccacagctatatttggggaagctggtgttactgcagcaactggagtaatgaccgttgccatattgcttctcactgagattactccaaagagtatagctgttcacaatcccacagaagttgccagatttgtggtcaggccagtggcatggctttctgtaatactatatc

SEQ ID NO: 39399 - DNA, 403 bp, Gossypium hirsutum
  unsure (1)..(403): unsure at all n locations; Clone ID: LIB3165-039-Q1-K1-E5
cttctacgcttacacgccatttgaaccggagaagttctcgtgtntggaatggagttctgtcccgtggagatttgacacnctaggcagaagcaaccaggaaacattttccggacaagcagtaaagttttatgtagcagaggtcttgctagtactagaatatcttcacatgctcgggattatctatcgtgaccttaaacccgaaaatgttcttgtaagagaagatggtcatataatgctttctgatttcgatctttccccttcgttgtactgttaagtccgactcttgtcaaaacgtcctctctcgaatcagagccgntaaggaaagaaccctgtttattgtgttcagcctgcttgcatcgaaccttcgtgcattcaaccagcttgtgttgtcccaacaacatgc

SEQ ID NO: 39400 - DNA, 422 bp, Gossypium hirsutum
  Clone ID: LIB3165-039-Q1-K1-E6
ggtggccactaggtgtttggtaatagaactcatagagtttggatatttggtcaaggtagtttgaaggttggttatttgaatttcgggggtaacacccaaggttacacattgtggacatcacggctatatacaaagtttctcggtctctttttcatgtccgagctggacgacgtaagggttgtgtgatcgagagcaacccttcgccgcacggcgggcgtggagctttgccttccgaaggcggcaatccttccgatctcctcttccttgctggtggtgggattgtcttttagagtttgggtaccctatttttagctagcttattagtctgtaaaatattactatcgaagaagcttgtttttcgttgtttttttggggttttctttatttgatctcttattggataaataaagaagagaagtagt

SEQ ID NO: 39401 - DNA, 423 bp, Gossypium hirsutum
  Clone ID: LIB3165-039-Q1-K1-E7
cccacgcgtccgcccacgcgtccggggaaaggtatggtcgactcattgttccaagctcccatgaacgatggtactcactatgctgtcatgagctcctatgagtacattagccaaggccttcgcacatacgacttggacaacaacatggatggattctacattgccccagctttcatggacaagcttgttgttcacatcaccaagaactacatgacccttcctaacattaaggttcctcttatcttgggtatttggggaggcaaaggtcaaggaaaatctttccaatgtgagcttgtctttgccaagatgggaatcaaccccattatgatgagtgccggagaattggaaagtgggaacgccggagaaccagccaagttgatcaggcaaaggtaccgtgaggccgccgacattatcaagaaaggg

SEQ ID NO: 39402 - DNA, 424 bp, Gossypium hirsutum
  Clone ID: LIB3165-039-Q1-K1-E9
gaaaccctcaaaattccactaaaaaatggccttcacagcttccctctccaccgccggagccaccacctctttcctccgcggccatccggcgccgaaaaccctaaactcccttcctttcaaccaatctcttttcgggctaaaaccccaacgaaatggccgtctcaccatggcagcatacaaggtgacactgttaacacccgaaggaccccaagaattcgtgtgccccgacgacgtatacatcgttgaccaagctgaggaagaaggcattgatcttccgttctcgtgtagggctgggtcttgttcttcgtgtgccggagtgattaagcaaggctccgtcgatcaatccgacggtaatttccttgatgatgaccagattgctgcaggttttgtcctcacttgtgttgcttaccctcagagtgatgtt

SEQ ID NO: 39403 - DNA, 425 bp, Gossypium hirsutum
  unsure (1)..(425): unsure at all n locations; Clone ID: LIB3165-039-Q1-K1-F1
gaaaaagaagagcctacactatgtctatctactcaagaatttgatgctatataatttcagggcctcaccctctttcttcagtcattgtctctaaacaaagcgttcttcatatggttttcctgtttgtttccatggaaaacctgtaccattaccttgtaatcatcttattcattcttctcaccatcaaacttttgactcataaaaccaaaaatttgcctcccagtcccttttctctgccaattattggccaccttcacctcatcaaaaacccactttaccaatcactgaccacgttattatccaaatatggccctgttttatatctcaaattcggttgcagacatgtccttgttctttcttctccttctgctgntgaagaatgcttgaacaagaatgatataatatttgcaaaccggcctcggact

SEQ ID NO: 39404 - DNA, 418 bp, Gossypium hirsutum
  Clone ID: LIB3165-039-Q1-K1-F11
ataagagaaagcactgaaaacgcaaaaccattttctctgcttctctcctcaagacttcaccagttttagacaagtctgagtgggttaagggtcacacccttcgccaaccttccacttctgcggtgaggtgccaccctgttgcaccctctggactaactgtgcgtgcaagctcatatgccgatgagcttgtcaagactgctaaagctattgcttctcctggccgtggaattttggccatggatgagtccaacgctacctgtgggaaacgtttggcctcaatcgggctagaaaacacagaggctaaccgccaagcctacaggacgttgcttgtttcagctcctggccttggtcagtacatctctggtgccatcctctttgaagaaaccctctatcaaaccacaattgatggcaagaagat

SEQ ID NO: 39405 - DNA, 421 bp, Gossypium hirsutum
  Clone ID: LIB3165-039-Q1-K1-F12
cgacggcttccatcaacggttggtgccttattttctcttcttcctccaccaccaccggcggtttttccgctcgtcgacgacctacattgcggccttcggtcgtcgctagccttaactcttctccttctcctccgactcttatccaagaccgcccggttttcgctgcccctgttcctttgctcaccccgagagaagagatgggaaacaagtcctacgacgaagccattgaagctctcaagaaacttctcagtgagaaaggagaactgaaagctgaagcagctgcaagggtagatcaaataacagcagagttaaacacaacatcagctgacggcaaaccatctgactcttctgttgagagactgaaagaaggcttcgtttacttcaagaaagaaaaatatgaaaagaatcctgctctgtatgg

SEQ ID NO: 39406 - DNA, 425 bp, Gossypium hirsutum
  Clone ID: LIB3165-039-Q1-K1-F2
cttggaggcataggctcaacaatagctcagggcatggcttttggaactggaagtgctgtagcccacagggctgtcgatgctgttatgggtcctcgtactattcaacatgaaactgttgtttccgaggctgcagcagcccctgccaatagttttaccggctctgatgcatgcagcatatactctaaggcattccaagactgcctgaatagctatgggaacgaaatcagcaagtgtcagttctacatggatatgttgtcagagtgcaggaagaactctggatcaatgttgggtgcctaaatttatgcctcatttgttgcttctacaatgcaatgtcagctttggccttcacttctgtttctcttttattgatgatgatgatgaagctgaactcccttcaatgattcaataatatttatctttactgg

SEQ ID NO: 39407 - DNA, 422 bp, Gossypium hirsutum
  Clone ID: LIB3165-039-Q1-K1-F3
cccacgcgtccgggaaaatccaaatttccctttcacaatttttctgccacactatcccttggttacagacacagaaaagatcagagcgtggagacatggttagctgctgcaacatggcatcggctgcttcaggtttcttgctaacacccaatgtttctgcagggacttctaagaccaacaacaacaacatggtgtttttcccatccaagaccaacaacacctcaaggcttgttgtgagggcagctgatgaggaggcttcaccaccaccaccctctccaaccccagcaaccaccactgcaccacctgaagggggtgaagctcctaagcctaagccaccaccaataggaccaaaaagaggcaccaaggtgaagattcttaggagggagtcctactggtacaacagctatggatcagttgttaca

SEQ ID NO: 39408 - DNA, 422 bp, Gossypium hirsutum
  Clone ID: LIB3165-039-Q1-K1-F4
cccacgcgtccgggatccttacaagtttcgtccttatgttcctttgattccccgttctggaccaccaattctggtgctccagtttggaacaataactcatcacttactgtgggagcaagaggtccaattctccttgaagactatcatttggtggagaagctagctaatttcgatagagaacgcatacctgaacgtgttgttcatgctagaggagccagtgcgaaagggttcttcgaggtcactcatgatatatctcagctcacatgtgctgatttccttcgtgcccctggagtccagacccctctcattgttagattctccacggttattcatgaacgcggtagtcctgaaactttgagagacccccgaggtttcgctgtgaaattttacacgcgagagggaaattttgatctagtggggaa

SEQ ID NO: 39409 - DNA, 311 bp, Gossypium hirsutum
  unsure (1)..(311): unsure at all n locations; Clone ID: LIB3165-039-Q1-K1-F5
cccacgcgtncgaaaaaacaaagggctgaaaacgcacaaccgtgtcctctgcttttctcctcaagactttagcagtggtcgacaagcctacctcggaaaacgcggagagtctttgtctaccaaccaaaactgcagaaagcacccaccctggtacccggcggggtcttagtgaacgtgcaagaaaataggcctaagagcgggacaagaccgctggagctattgattgtgggggcggaaaaattggcgccatggattaatccaacgctgcgtgcggcaaacacttggcgtccatgggtctaaaaaacacagag

SEQ ID NO: 39410 - DNA, 423 bp, Gossypium hirsutum
  Clone ID: LIB3165-039-Q1-K1-F6
cccacgcgtccgcccacgcgtacgcggacgcttgttttgacgcgtgggtagctacagcgtgcgctactagtacccactactagcaatggcttcctcaatgatctcatcggctaccattgccactgcctctccggcacaggctaacatggtcgctcctttcaccggcctcaagtctgcctctgctttcccagtcaccaggaaggccaacaacgacattacttctctcgcaagcaatggcggcagagtgcaatgcatgcaggtgtggcctcctaccggaaagaagaagttcgagactctctcatacctccccgatcttacacccgtgcagttggctaaggaagtggattaccttcttcgctcaaaatgggttccttgcttggaattcgaattagaggagggattcgtgcaccgtaaatactcgag

SEQ ID NO: 39411 - DNA, 422 bp, Gossypium hirsutum
  Clone ID: LIB3165-039-Q1-K1-F7
cccacgcgtccgctttggtctccggcttctgcctcacttccaactccacctctccggctgactcactccggcaacccacattgcggcggccgtctatcgtcgccaacctcaactcttccacttctcctcctactctcattcgaaatcaacccgttttcgcagcacctactcctttgctcactccttccaattggaaagaaaacatgggagaccagtcatacgaggaagccattgaagctctcaagaaactgctcaatgagaaaggagaattgaagagtgcagcgacggcaaaggtagagcaagtgacagctgagttgaagactgctgcttcttccgatgagtctgttgaccgcttgaaacaaggcttcatttacttcaagactgaaaaatacgaaaagaatcctgctctgtatggtgagctt

SEQ ID NO: 39412 - DNA, 422 bp, Gossypium hirsutum
  Clone ID: LIB3165-039-Q1-K1-F8
cccacgcgtccggatcagtgagactcttttgtttacctgtagcatatagtaatagtaagcagtaatagcaatggcctcctccatgatctcatcggcaaccattgccaccgtgaaccgctcctccccggcacaggccaacatggtggcccccttcaccggcctcaaatctgcctctgctttcccagtcaccaggaaggccaacaacgacatcacttctcttgcaagcaacggtgggagagtgcaatgcatgcaggtgtggccgcctcttgggaagaagaagttcgagactctctcatacctgcccgatcttactcccgtacagttggctaaggaagtagattaccttcttcgctctaaatggattccttgcttggaattcgaattagaggagggattcgtgcaccgtaagtactcgagcttac

SEQ ID NO: 39413 - DNA, 424 bp, Gossypium hirsutum
  Clone ID: LIB3165-039-Q1-K1-G1
atccgcctgttctcacagtatctcctcccctttgttcctcgaaatggccgccgctatctgctccgcctcctcctcccctacttcccattgcaacgtcttcctcggcatcgacgtcggcaccggtagtgcacgcgccggtctctttgatgaggaagggaagcttctaggatctgctagtagcccaatacaaatatggaaagaaggcgattgtattgagcaatcttcaactgatatctggcatgcagtctgttcagctgtgaaagcagcatgttcacttgcaaatattgatggggaacaggtgaagggcattggatttgcagctacttgttcacttgtggctgtggatgcagatggctctccagttactggttcttggagtggtgattcaagaagaaatatcatagtctggatggaccatcgggct

SEQ ID NO: 39414 - DNA, 295 bp, Gossypium hirsutum
  unsure (1)..(295): unsure at all n locations; Clone ID: LIB3165-039-Q1-K1-G10
aaaaaaaaaaaaaaaaaattaattttaaaaaaaaaaaaaaaaaaaagggtggggtatttaaaaaaaagggggggaaaaaaaaaaaanggaaaaatnaagagaaagaaagaatgagaaatataaagataaagaagagggataaagaaatgaaaaaagataaaatgatgagggaaaaaaaaaaaaaaaaaaaaaaaaaaaaagggtgagtggaaaaaaggagaaaaaaaaagaaggagaaaaggaaaagagatagagaataaataaagaaaaagaaaagaaaaaaaaagaaaagggg

SEQ ID NO: 39415 - DNA, 421 bp, Gossypium hirsutum
  unsure (1)..(421): unsure at all n locations; Clone ID: LIB3165-039-Q1-K1-G11
gaatcttngggtaattccaggggtgaattatttatagatacagagtacgaaccatgggggccaaaagaagagaaatcaaaactgcaaatactgtgtttcaatctaaggtggaaaaggcttttggtactggctacagtttgggtacttttcacagttattcaagtcatcaagaatgatgtggttccctgtaccactttgtattgggtattgttttgcttacagttccccatagcaacactggtttttggatatgaagcaactaaattatacatagaacataagaagagaatgagcactgggaacgctgaaacagtttgtggagcttcaattcaatggagtccattgaacattgcattttgtgcactttgtggcatcttgggaggcactgttggtggattgcttggttctggtggtggattca

SEQ ID NO: 39416 - DNA, 414 bp, Gossypium hirsutum
  Clone ID: LIB3165-039-Q1-K1-G12
cccacgcgtccggtggtggtggtggtgtttttcgtagtcgacgttgttgttctttgtgggttttcattttatttgaatttttattggacaaagaaagaagttgtagcaagatgatgctcaggattaagagggttccgactgttgtttcgaattaccagaaggatgagacggaagagactgctcgccgcagcagtgggtgtggaaagaattgccttagaagctgctgcatcccaggagcaaagcttcctttatatgctttcaggaaactgaacaatattgagagtgaaaaagttgtgcttggaattgagaataaagatccccctgttgcttttcttgactcgctcattcttggggagtgggaagatcggatgcaaagagggctctttcgctatgatgttactgcctgtgaaacca

SEQ ID NO: 39417 - DNA, 423 bp, Gossypium hirsutum
  unsure (1)..(423): unsure at all n locations; Clone ID: LIB3165-039-Q1-K1-G3
cccacgcgtncgcccacgcgtncgcccacgcgttcgtccacgcgtncgcccacgcgtncgcccacgcgtncgcccacgcgtccggcccccccagtactgccagagcagaaatggcgctaactctcccaaacacatttctccaaatcaagccttctcctcccccttcactccctctcagaaaggtggtgactgcaaggggagggggctataggccacaagttacttgccggaagaaggacatccacccggaattccacgaggatgctaaagtttactgcaatggagaattggtgatgacaacaggtgggacgcagaaggagtatgtggtggatgtttggtcggggaaccatcctttttacctcgggaacaggtcggccgtccttgttgacgctgaccaggtcgagaagttccgtaagaagttcg

SEQ ID NO: 39418 - DNA, 426 bp, Gossypium hirsutum
  Clone ID: LIB3165-039-Q1-K1-G5
gcgggattacccgctgagtttaagcatatcaataagcggaggaaaagaaacttaccaggattcccctagtaacggcgagcgaaccgggaaaagcccagcttgagaatcggtcgccatcggcgtccgaattgtagtctggagaagcgtcctcagcgacggaccgggcccaagtcccctggaaaggggcgccggagagggtgagagccccgtcgtgcccggaccctgtcgcaccaagaggcgctgtctacgagtcgggttgtttgggaatgcagccctaatcgggcggtaaattccgtccaaggctaaatacgggcgagagaccgatagcgaacaagtaccgcgagggaaagatgaaaaagactttgaaaagagagtcaaagagtgcttgaaattgtcgggagggaagcggatgggggccggcgatgc

SEQ ID NO: 39419 - DNA, 424 bp, Gossypium hirsutum
  Clone ID: LIB3165-039-Q1-K1-G6
cgtttagctatagcatacactactagtacccacttctttcaatggcttcctcaatgatctcatcggctaccattgccactgcctctccggcacaggctaacatggtcgctcctttcaccggcctcaagtctgcctctgctttcccagtcaccaggaaggccaacaacgacattacttctctcgcaagcaatggcggcagagtgcaatgcatgcaggtgtggcctcctactggaaagaagaagttcgagactctctcatacctccccgatcttacacccgtgcagttggctaaggaagtggattaccttcttcgctcaaaatgggttccttgcttggaattcgaattagaggagggattcgtgcaccgtaaatactcgagcctacccacgtactacgatggacgctactggaccatgtggaagct

SEQ ID NO: 39420 - DNA, 424 bp, Gossypium hirsutum
  Clone ID: LIB3165-039-Q1-K1-G7
atcatctacatggccatggcaactcaagcaggtctcttcacccccacaatccccaccccaaaatctttggccccatggaaaccagcctcatcattttcctttgctacctcttccaagtccctcaacttctccatggctcaaagaaccattagagctgcagctgctgatgaggaagcatcatctgctgctgctacaaaggaagctccggtcggtttcacccctccggaattggaccccaacaccccatcacccatcttcggaggaagcactggaggactgcttagaaaggctcaagtcgaagaattctacgtcatcacatgggattcacccaaagaacaaatctttgagatgccgactggtggggcggccatcatgaggcaaggacctaacttgctcaagttggcgaggaaagagcagtgtttgg

SEQ ID NO: 39421 - DNA, 423 bp, Gossypium hirsutum
  Clone ID: LIB3165-039-Q1-K1-G8
caccaccatagtccaacattttcataacattgtttgccatcacaaacgccgctgctacatgctccttcatggggacactcttccccgacgtctacacaagttcagggagattcgtcgccaggtttggctttggcggcaaaaaagcagctcccaagaaagtctcgaaacgaaccccagaccgccctctatggtacccaggagcagtggcgcctgattggctcgatggaagtttggtgggtgattacgggttcgacccgttcgggttagggaaaccggcggagtacttgcaatatgatttggattctttggaccagaacctggctaagaattcggctggtgagataattggaactaggaccgaggttgccgacgtgaaggcgacgccgtttcagccttacagcgaggtttttggtctacagaggt

SEQ ID NO: 39422 - DNA, 176 bp, Gossypium hirsutum
  Clone ID: LIB3165-039-Q1-K1-G9
gtatgttacgtccctaataacataagagccaatttttgttgaatctatctatgattttgcatcattggcttgttatatttgtaatacttgttgagggagatctctgggatcccattactgttttcatccttgtttgctgagggctatatatatgcaatttcttctatgtttttttc

SEQ ID NO: 39423 - DNA, 426 bp, Gossypium hirsutum
  Clone ID: LIB3165-039-Q1-K1-H1
cttttacttcttctgcaacaacaacccccatcagaaataacatattctcctttcttcttatttcttcattataaaaaaagaaaagaaaagacatggctgctgttactgctgcagtctctgttccttctaccaagtccacctctctccctgctagaacctctcttgtctttcctgataggatcaccttcaagaaggtgcccgtttactacagagatgtttgcagtggggggagagtggtttctgtcagggcccaggttacaactgaagctcctgccaaagttgtaaaggaatccaagaaaaacgatgaaggtgttgtggttaacaagttcaggcctatcaacccttacattggtagatgccttctaaacactaagatcactggcgatgatgctcctggagagacttggcacatggtcttcagcaccg

SEQ ID NO: 39424 - DNA, 421 bp, Gossypium hirsutum
  Clone ID: LIB3165-039-Q1-K1-H10
gcatcccaccagaccagcagcgtcttatcttttccggaaaacagctcgaggacggccgtaccttggccgattacaacatccagaaggaatccaccctccaccttgtcttacgtcttcgtgggggtatgcagatcttcgtcaaaactttaaccggcaagaccatcaccctcgaagtcgagagctctgacaccatcgataatgtaaagtctaaaattcaagacaaggaaggcatcccaccagaccagcagcgtctcatcttcgccggcaaacagctcgaagatggccgtaccctggccgattataatccagaaggaatccaccctccacctcgtcctccgtcttcgcgggggaatgcagaccttcgtgaaaaccttgaccggcaagaccatcaccttggaggtggagagttcggacaccatcg

SEQ ID NO: 39425 - DNA, 298 bp, Gossypium hirsutum
  unsure (1)..(298): unsure at all n locations; Clone ID: LIB3165-039-Q1-K1-H11
tggagaagttttagtgggaaaaaaaaaaggaagataggatnggtgtttgaataggtattttaaggaaagaaaatgttaaagttgatgatgttgttaagattgttgaaaaattnnagggataataaattgaatttttnggtgatntgagggnaagagtttatgatgaagaagtgaggaaatggattggagaggttggagtaaatggtgttgggaaaaagnttgtgaantggagggaagggggaaaatattttgagaaatngaagatgataattgagaaggtgttggaatatggataaat

SEQ ID NO: 39426 - DNA, 415 bp, Gossypium hirsutum
  Clone ID: LIB3165-039-Q1-K1-H2
gaatctcctcttttcttggaaaaatattgcaatttttctcaaaacccaaaacaaaagagcaaagcccaatgtcacttgtctttcagaattagagagccaagtttataagcatggaagtcatctcatacaattcccctcgatgctgtaatttaaatcggagattagtggtaaagaaaagttcaagtagacagcaagtaaagatccctttgtgtagaaaacacagaattttatgtactagagttcaatttagaagtgggtcactggttttacctaataaacatcacctgtttttgaagaatgtttatcatgggaaaggttcaaggccattcaaggctcttgaagggtttaacaatgttgatccaaaggtcttgagtgggaattataatggttatgtgggtggtagtgaagatgagat

SEQ ID NO: 39427 - DNA, 292 bp, Gossypium hirsutum
  Clone ID: LIB3165-039-Q1-K1-H3
cggacgcgtgggcggacgcgtggggttcaaggtcgggtctcaaatcttcagtgagggtggacttgactacttgggtaacccaagcttgatccatgctcaaagcattttggccatctgggcttgccaagttatcttgatgggagccgtcgaaggttaccgtattgccggtggaccactcggtgaaaggactgacccattggacccaagtggtagctttgacccattgggtcttggtgatgacccaaaagcattcgctgaacttaaagggaaagaaatcaaaaacgggagggtg

SEQ ID NO: 39428 - DNA, 426 bp, Gossypium hirsutum
  Clone ID: LIB3165-039-Q1-K1-H4
gaaaaaagcaaagctaagccctgatcaggttgtgagttgaggaagaaagatggtgggggctttatcggtggtggactctcacactggtccatgtttgtgctccaccagcatgaacttgaaaactggaggggaattggtttcgcaaatgaagaggaaacaaggggtgggaagggcagggtggttggaattaggcagctcatttgtagattcatgccatgattggaggttgtcttccaagatgattcctggagttgtgaataagaagagttcaaggaaggcccgcacacttgtggttgtgaatgaattaggagggcagtatgaagaaactttcggggatgttaaaacgcaattagtaaattacttcacatacaaagcagtgaggactgttcttactcagctctatgaaatgaacccaccaaaatatac

SEQ ID NO: 39429 - DNA, 423 bp, Gossypium hirsutum
  unsure (1)..(423): unsure at all n locations; Clone ID: LIB3165-039-Q1-K1-H5
ttttnttttttttttttttcaagaaatatggtaagaaactaccttttattcattagttctcagccggccattggaaatccaaaacaaaccaaagagaaagaccccaagccaaatacctcaattaaaaaagaaaaagaaaaagggggggggggtttgaggggcttaatttaagtacaactttgaaacaaatggaattcctaggagggaagtaaacaacttagtagcctttaggcttgtaggcaatgaaactaatgcactgcacttgacgaacgttgtcgaacccaatgattctaatgaatgcattggggtattccttcttgcaattctcaagctcctccaacacctgagccgagtcagtgcacccaaacatgggcagtttccacatggtccagtagcgtccatcgtagtacgtgggtaagctcg

SEQ ID NO: 39430 - DNA, 424 bp, Gossypium hirsutum
  Clone ID: LIB3165-039-Q1-K1-H6
gagactcttttgtatacctgtagcatatagttttagttagcagtaatagcaatggcctggtccatgatctcatcggcaaccattgccaccgtgaaccgctcctccccggcacaggccaacatggtggcccccttcaccggcctcaaatctgcctctgctttcccagtcaccaggaaggccaacaacgacatcacttctcttgcaagcaacggtgggagagtgcaatgcatgcaggtgtggccgcctcttgggaagaagaagttcgagactctctcatacctgcccgatcttactcccgtacagttggctaaggaagtagattaccttcttcgctctaaatggattccttgcttggaattcgaattagaagagggattcgtgcaccgtaagtactcgagcttacccacgtactacgatggacgct

SEQ ID NO: 39431 - DNA, 424 bp, Gossypium hirsutum
  Clone ID: LIB3165-039-Q1-K1-H7
agaaaaatggcttctgcttccgctactctccttatagtcttcacctattatcgacaagtccgagtggattaagggccaaaacctccgccacccttcggtttgttttgtacggtcacaccctacatcggccgcctttaccgtccgtgctagttcatatgccgatgagcttgttaagaccgcgaaaactgttgcatctccaggtcgtggtattttggccatggatgaatcaaatgctacatgtgggaagcggcttgcctcgattggtctcgagaataccgaggcaaaccggcaagcttaccgtacccttctcgtgtctgcccctggcctcggtaactacatctcgggagctatccttttcgaggagactctctaccaatctaccatcgatgggaaaaagatggtcgatgttcttgttgagcaaaat

SEQ ID NO: 39432 - DNA, 424 bp, Gossypium hirsutum
  Clone ID: LIB3165-039-Q1-K1-H8
cccacgcgtccgcccacgcgtccgagagaaagttctgaaaaagcaaaaccatggccggtgcttctctcctcaagacttcaccagttttagacaagtctgagtgggttaagggtcacacccttcgccaaccttccacttctgtggtgaggtgccaccctgttgcaccctccggactaactgtgcgtgcaagctcatatgccgatgagcttgtcaagactgctaaagctattgcttctcctggccgtggaattttggccatggatgagtccaacgctacctgtgggaaacgtttggcctcaatcgggctagaaaacacggaggctaaccgccaagcctacaggacgttgcttgtttcagctcctggccttggtcagtacatctcaagtgccatcctctttgaggaaaccctctatcaaaccacaat

SEQ ID NO: 39433 - DNA, 422 bp, Gossypium hirsutum
  Clone ID: LIB3165-039-Q1-K1-H9
gaaccagcagccaacatggcctcattagcagtctccaccgctgccgcctcccttggcgtgtctgaaatgcttggtaaccctctgaatttcagtggtggagctaggtcatcggctccaacaccatccaactcatccactttcaagaccgttgctcttttctccaagaagaaggccgctcctccaaagcccaaggctgctgctgtcgccccggccgatgaagagctggctaagtggtacggtccggacagaaggattttcttgcctgaaggtctgttagacagatcggagatcccagagtacttgaacggagaagttcccggagactatggatacgatccgtttggtctgagcaagaagccagaagactttgcaaaatatcaagcatatgagttgatacacgcaaggtgggcaatgcttggtgc

SEQ ID NO: 39434 - DNA, 412 bp, Gossypium hirsutum
  Clone ID: LIB3165-040-Q1-K1-A1
cggacgcgtgggcggacgcgtgggcggacgcgtgggctcgcaagcaatggcggcagagtgcaatgcatgcaggtgtggcctcctactggaaagaagaagttcgagactctctcatacctccccgatcttacacccgtgcagttggctaaggaagtggattaccttcttcgctcaaaatgggttccttgcttggaattcgaattagaggagggattcgtgcaccgtaaatactcgagcctacccacgtactacgatggacgctactggaccatgtggaagctgcctatgttcgggtgcaccgactcggctcacgtattgaaggagcttgaggaatgcaagaaggaataccccaatgcattcattagaatcattggcttcgacaacgtgcgtcaagtgcagtgcattagtttca

SEQ ID NO: 39435 - DNA, 392 bp, Gossypium hirsutum
  Clone ID: LIB3165-040-Q1-K1-A10
atttagtgcaaaaaccatcttcttttttctgctttctcgtatagcagcctgttgggagaaactttttttttgaggaaattagaaaatgtcatcggagaacgggaaaaggttgctggaaactgatgccggcggcttgaattttgaggctaccgagctgactttagggttacctggagagcctagagtaacatcggacggtggagctaagttgggcagtaaacgtggattttcggaaaccgttgatcttaagttgggtgacaacaatcaagaggttaagctgggtcactccctccaagaagctgccaagtctcccgtttcaaagacacaagtggtgggttggccgcccgtgagaggctttgcaaagagaggaaagaagagtgcaaatatgtaaa

SEQ ID NO: 39436 - DNA, 421 bp, Gossypium hirsutum
  Clone ID: LIB3165-040-Q1-K1-A11
cccacgcgtccgcccacgcgtccgcacaaaatggcgtcgccatctgattgtaaagcgaccattatcgacggcaaagctatcgctcagacgatcagatctgaaattgccgacgaggtccgtcatctctcccagaaatacggcaaggtgccaggcctagctgttgtaattgttgggaacaggaaagattctcaaagctatgtgggaatgaagagaaaagcctgtgctgaagttgggattagatcttttgatgtgaatctccctgaagaagtacctgaatccgatttgatcagcaaagttcacgagctcaatgcaaatcctgatgtacatggcatattgggttcagcttcctttaccaaagcacataaatgaagagaaagttttgggtgaaatcagtcttgaaaaagatgtagatggttttcac

SEQ ID NO: 39437 - DNA, 374 bp, Gossypium hirsutum
  Clone ID: LIB3165-040-Q1-K1-A12
gactgctgttagagaaacaatgggagaccaaatgccatgtgcagctatggctagtggatggaacaaagtgaaaccattcttggcaatcatctccctgcaatttgaatatgcagggatgtatatcatctacttggtttctgtaaagcatggaatgagtaatttcatcctttgcacctatcgtcatgttgttgccaccattatcattgctcccttcgcctttgatctccaaaggaaaatccggccaaagatgacccttcctatcttcctcaggattgtggctcttggtttgctcgaaccaggacttgaccagaacttatactatgtgggaatgatgaagacaactgcaacatattcatcggatttcgtcaacatgc

SEQ ID NO: 39438 - DNA, 200 bp, Gossypium hirsutum
  Clone ID: LIB3165-040-Q1-K1-A3
tttctttttctcagacaagatgggttctcagggatcggttatggcgatgcttttgctgaggatgttcactttatcatcagcttccgacatgtccattatatcctacgatgaaacacatcccgcaagtcaacgtctattggagacagacgacgaagtatggcatgtcgagagtggctgtaacatgaaaacatcacgttggt

SEQ ID NO: 39439 - DNA, 412 bp, Gossypium hirsutum
  Clone ID: LIB3165-040-Q1-K1-A5
gagataagagaaagcactgaaaacgcaaaaccatggcctctgcttctctcctcaagacgttgaccagttttagacaagtctgagtgggttaagggtcacacccttcgccaaccttccacttctgcggtgaggtgccaccctgttgcaccctctggactaactgtgcgtgcaagctcatatgccgatgagcttgtcaagactgctaaagctattgcttctcctggccgtggaattttggccatggatgagtccaacgctacctgtgggaaacgtttggcctcaatcgggctagaaaacacagaggctaaccgccaagcctacaggacgttgcttgtttcagctcctggccttggtcagtacatctctggtgccatcctctttgaggaaaccctctatcaaaccacaattgatg

SEQ ID NO: 39440 - DNA, 417 bp, Gossypium hirsutum
  Clone ID: LIB3165-040-Q1-K1-A6
cccacgcgtccgaaaggcttgaaatttccttttttgagcctggcatctttgctgatcgtgaaggaaagggtcttcgggcacttaccaaagcccagttggatgagattctaggtccagctgaatgcaccattgtttcttcattatctaacaagcaagtggactcctatgtcctttctgagtctagcctctttgtctatccatacaagattataatcaaaacctgtgggacaactaagttgcttcttgctatcccacccatcttgaaattggctggcagtctatcccttgctgtaaaatctgttaggtatactcgtgggagttttatattccctggtgctcagccatttcctcaccgaaacttctctgaagaggttgctgttcttgataactatttcgggaagcttggcgctggtagca

SEQ ID NO: 39441 - DNA, 403 bp, Gossypium hirsutum
  Clone ID: LIB3165-040-Q1-K1-A7
agagcactagcattagcactagcactagtagcaaccatggcctccgccgcatggttggggcaccaccacgcactcacaaccaatggcagatcatcatcattatcgccgtcgctgcgccaggtttcaaacatgaagcctacccagcaggtggtgtgcaaggctcaaaagcaggaagatgatggaagccttgtgtcccgtaagttggctctcactgtactcattggtgctgccgctgttggctctaaggtttctcctgctgatgctgcctatggtgaagctgcaaatgtatttggaaagccaaaaacagacacagacttcatgccatacagtggggatggattcaagctctcgataccatcgaaatggaacccaagcaaagaggtggagttcccaagtcaagtgc

SEQ ID NO: 39442 - DNA, 324 bp, Gossypium hirsutum
  Clone ID: LIB3165-040-Q1-K1-B1
cacgtccccaacccccactatctgtccatctttcagtaatagaaaggaaatggagtttagttcagaggctaaccagcgcattgccaggctcgcagcccatctccaacctcagatggaggaaagttctattttgaggcgagctgactgtaaaaccaaagggaggtcaacaagggtcaaaagtgctatcttaagaacaactggaggcattggccaccctcttgcaatggtaatgaagaagaatcctctcgtctcggttcttcatctttacgatgttgtgaactctcctggtgtcacagctgacctcagacacatggatactggtgc

SEQ ID NO: 39443 - DNA, 420 bp, Gossypium hirsutum
  Clone ID: LIB3165-040-Q1-K1-B10
ccaatcccaggctcagggatgcaacttacatacatcgcccacgtttgggacttgtcgtctatgcttaccctagctgttgagaagccagaagctgcatgttgtaatatcttcaattgtgtgagtgaccgggcagtgactctggatggaatggccaaattgtgtgctgcagctgctggcttaccagttgaaattgttcattatgatccgaaagctattggaatcgatgcaaagaaagcttttcctttccgtaatatgcacttttacgccgaaccaagggctgcaaaggacatactggggtggaagagcaccacaaatctgccagaagacttgaaggagcgattcgaggagtatgtgaagatagggcgtgacaagaagcctatgcagtttgagatggatgataagatactagggtcccttaaa

SEQ ID NO: 39444 - DNA, 419 bp, Gossypium hirsutum
  Clone ID: LIB3165-040-Q1-K1-B11
caaaaatggcgacttcagccatgtcggaaaaacgggtcgtcctgctctgcggcgacgatgccgaggactatgaggttatggtccctttccaggctctgttggcttatggtatatcagtggacgctgtttgtcccggcaagaaggccggcgaaacttgccgcaccgctattcatcaactttccggccatcagacctataccgagatccgtggtcacaatttcacactaaatgcatcatttgaagatatagaccatactaaatatgatggtttagttatagccggaggacgagctcctgaatatcttgctatggatgcatttgtattgaacatggttcgcaattttgttaattctggaaagcctgttgcttcaatttgtcatggtcaattgatattagctgctgccggggcagttggtggt

SEQ ID NO: 39445 - DNA, 244 bp, Gossypium hirsutum
  Clone ID: LIB3165-040-Q1-K1-B2
cccacgcgtccggtttgtttgaatcctgaagaatttcttcagctccttttggttttgaaggtattatttatagttccaagaaatctcaacagcgacgatgaccatgaatctggtggaatccgatggcgtttggggttcttcctaggggcccggctttgttttccttccttaaagggaccgtgaaaccgcgggggaggtttcggtttggttttttgcaaacgagttttttggcaaaaaaacccaa

SEQ ID NO: 39446 - DNA, 420 bp, Gossypium hirsutum
  unsure (1)..(420): unsure at all n locations; Clone ID: LIB3165-040-Q1-K1-B3
cccacgcgtccgcgaaaccgaccctaggagttgtgccaaggaaaggtgccatttcgggggtgtcagcctcgattttaatccctcaattcatacttggtggactgacggaagcgtttgcatccattggcctcattgaattctactacaagcagttccctgaaaacatgaaaagcatcggagggtctctattctactgtgggttggcaggttcaaattatttcagtagcttgctgatctttataattcatcgaacaacaaaccgcacagccaccggaaactggttaaaggaggatctgaataagggaagattggattactactattacataattgctggcctaggaatcttaaacttgggctactnntttgtatgcgcaagttggtataagtacaaaggaaacagncgacacacccctgagc

SEQ ID NO: 39447 - DNA, 423 bp, Gossypium hirsutum
  Clone ID: LIB3165-040-Q1-K1-B4
gtttaataacagaaagtagcagaataaaaattcatgtacgaaaatggctatgctgggagcgggtccaattaggttctcaagctttccaccgtcttcttcatatctcacttccaccttcaaacccacctcctcttccacactatcattagttgtggtggggaaatcaattatctatcgtcgatgtgtcgcctgctccgctgttcaggaatcttctactcctacagccactgctgaaaccaagggaaccactccaccatcagccggcgttgctggtggtgaggaggaagtgaaggctgccccaaaagcagctgcagcaaagcctaaacctgctgcaaaggctcctgccaaatctttgccggagttgatgtcggaggatgtcatcccttcattgaaaacaatacttgaagctcaagatgatatatc

SEQ ID NO: 39448 - DNA, 425 bp, Gossypium hirsutum
  Clone ID: LIB3165-040-Q1-K1-B5
cccacgcgtccgcaatttgaagccttcttcttatttcctcattcaagatgcaaatggggggcaagaccctcaccggaaagaccatcacattggaggtggagagttctgatactattgacaatgtaaaggccaagattcatgacaaggaaggcatccccccagaccagcaaaggttgatcttcgctggtaagcaacttgaggatggccgcacgttggctgattacaacatccagaaggagtccacactccacttagtgcttcgcctccgtggaggaatgcaaatttttgttaagactttgactgggaagaccattacattggaggtagagagttcagataccattgataatgttaaggcaaaaattcaggacaaggaaggaattcctccagaccaacagaggctgatttttgctggtaagcaactg

SEQ ID NO: 39449 - DNA, 414 bp, Gossypium hirsutum
  Clone ID: LIB3165-040-Q1-K1-B7
gcgcctcgaaattcacgcgattgcagatgatataactagtaaatatgttcctggggatgttaacatattttattgtctaggaggaattacgcttacttgttttttggtacaagtagctacaggatttgctatgactttttactatcgtccaaccgttactgaggcttttgcttctgttcaatacataatgactgaagctaactttggttggttaatccgatcagttcatcgatggtcggcaagtatgatggtcttaatgatgatcctgcacgtatttcgtgtctatctcactggtggttttaaaaaacctcgcgaattaacttgggttacaggcgtggttctgggtgtgttgaccgcatcttttggcgtaacaggttattccttaccttgggaccaaattggttattgggcagt

SEQ ID NO: 39450 - DNA, 414 bp, Gossypium hirsutum
  Clone ID: LIB3165-040-Q1-K1-B8
ttttgtttagatgaaattctgtttgagttttctttggtgaatgatcagacttagagagagagcagagtaatttgggtcaagtgtttctgggttttcacaaccatggcttcttcaatgcttagtggagcagccccaacaggggtaggatttgcgaggtccaattttcattttaggagcttgccccagaagagtttattttcttatacaaagaatcagaagactagaatggtggtaacaaccagatgcagtatatcatcctcaaggccggcttctcagcctaggttcatacaacacaagaaagaagcgttttggttttacaggtttttatcaatagtgtatgatcatatcataaaccctggtcattggactgaagatatgcgggatgaggcgcttgagcctgctgatctttattct

SEQ ID NO: 39451 - DNA, 416 bp, Gossypium hirsutum
  Clone ID: LIB3165-040-Q1-K1-B9
cccacgcgtccgcgttctggtcgattctgtttaaagggtgttgctattaatttcgcgaaaagcgacgacatcaagattcttagagacatagaacaatactaccgtacccaaattggccaaatggccatgaatggcgcaaatctgatattaaaaatgctttcattagtgcttggaccggaacttggaaggtaccggtggacatttttcattggggtggggtaattcaattaatctatctggtggaatgttgggggggaatggggttggattgctacccgaaggtcaattaactgattgtttttcgtaccaaattaaccttttaactatcaaaacacagtgattttcgtgcttttgttcactgttgtatgtatgtgtagttggattgctcaaatttctatagttttatttattattac

SEQ ID NO: 39452 - DNA, 424 bp, Gossypium hirsutum
  Clone ID: LIB3165-040-Q1-K1-C1
cccacgcgtccgcccacgcgtccgcccacgcgttcgacggctttggtctccggcttggtggctcacttccaactccacctctccttctaactcactccggcaacccacattgcggcggccgtctatcgtcgccaacctcaactcttccacttctcctcctactctcattcgaaatcaacccgttttcgcagcacctactcctttgctcactccttccaattggaaagaaaacatgggagaccagtcatacgaggaagccattgaagctctcaagaaactgctcaatgagaaaggagaattgaagagtgcagcgacggcaaaggtagagcaagtgacagctgagttgaagactgctgcttcttccgatgagtctgttgaccgcttgaaacaaggcttcatttacttcaagactgaaaaatacgaa

SEQ ID NO: 39453 - DNA, 415 bp, Gossypium hirsutum
  Clone ID: LIB3165-040-Q1-K1-C10
cccacgcgtccggagaggaggaagaagccgttgttgaaagaagaatagagattatgacgttggctctctcttcggcaacgtctgcttcttatttcatcactcgtcgtaatgcaaagccttctccggttatcaaaacgaccttcatgactttgaaaccagcgtcgtttccttcccctttaaccgccgtcattgtgtctgccggggcgcggttaatcgtttcttgccaagctgtctccaccgcttccctcgacaaggacgagaaaaacgcgtcggtttcggggtccgccgaagccgatgaggaagctaaagtaggggccaaggttaaggtgaaggtaccggtcaaagtgtatcacgtcgttcgcgtgccggagttggatctgatcggtatggaaggagtgattaagcagtacgtcgg

SEQ ID NO: 39454 - DNA, 372 bp, Gossypium hirsutum
  Clone ID: LIB3165-040-Q1-K1-C11
cccacgcgtccgcccacgcgtccgatttgcgaaggcaaaataatgaatctttattctgaattgaatcaagagattccaacttgaaatttaagaaatggaaaagtggtcaaaacggctcgttttcatgtttttttgcttatcagtttgtatccaaatcccatatgtttcttcgtctactgccccccttcaaggaaatcagggtaacaaagaatcttcagctgcaagaacctttaagctagaggatgctcatgtagtacgttgttcaagagaaaggagtagagcagcatggaaagtaattgaagagtatctaatgccgtttgtggagcaagagcaatacaagatttcaagtggatgtaggcttcaccctgacaa

SEQ ID NO: 39455 - DNA, 418 bp, Gossypium hirsutum
  Clone ID: LIB3165-040-Q1-K1-C12
gaaaaaaaaagaggaggaaatttaaaaattaaaatactttttaaaatataaatattcggtccctcgagtatttttttttaatttcttttttctgcgacgataaaagagccacggttactttacatccacagtcgacgggctgactttgcggcggcccatggcgatcgtcgaccggcatcagcggagctccgaaaggaagatgtttagtctttgtcccttttggcacacttcgaccacgatgaacaactcttcctcttctttttccactaaaaatctcaaccacaatggcagccgacactcggagacggttgccgccaagcgctctaaaaccgtctcatccattgctagatcgcttctccctccacggcgccgggctgcgcctgaatccttctaataaactctatttcccttatgagcc

SEQ ID NO: 39456 - DNA, 422 bp, Gossypium hirsutum
  unsure (1)..(422): unsure at all n locations; Clone ID: LIB3165-040-Q1-K1-C2
gatctcaggtcatccatctggaaacagatgtctgatgctgggatcaagtacatcccgagcaatgctttctcttactatgaccaggtgctcgatgccacatccatgctcggagctgttccacctagatacggctggagtggtggtgagatcggatttgacacttacttctccatggccagaggaaatgcctctgtccctgcaatggaaatgactaagtggtttgacaccaactaccacttcattgttcctgaattgggacctgatgttaacttctcttatgcatctcacaaggcagtggatgagtacaaggaagctaaggcgcttggagttaacacagtcccggtccttatcggccctgtctcatacttgttgctctctaaacctgcaaagggtgttgagaagaccttntctcttctctccct

SEQ ID NO: 39457 - DNA, 416 bp, Gossypium hirsutum
  Clone ID: LIB3165-040-Q1-K1-C4
cccacgcgtccgcccacgcgtccgggagaaccgatctgcgagtctcatgaaaacaagttgctggagcggatggcaataagcgtggaatacttgaacaaaaaggttaaggaatgtttcttggatttgggatcatttccagaagataaaaaaattccccttgatgttctcattaacatgtgggttgagatacatgacattgatgaggaggaagcatttgccattcttgtcgagctttctgataagaatctactcacttttggtgaaagacccaacggttggagatgcgtacagtagttattatgaaatttgtgttactcaacatgatgtgttgagagaccttgctcttcatctcagcaatcaaggggatgtgaaccagccaaagcggttgcttatgcctagaagagatacttgaactc

SEQ ID NO: 39458 - DNA, 420 bp, Gossypium hirsutum
  Clone ID: LIB3165-040-Q1-K1-C5
atttagctatagcatacactactagtacccactactagcaatggcttcctcaatgagcgggcggctaccattgccactgcctctccggcacaggctaacatggtcgctcctttcaccggcctcaagtctgcctctgctttcccagtcaccaggaaggccaacaacgacattacttctctcgcaagcaatggcggcagagtgcaatgcatgcaggtgtggcctcctactggaaagaagaagttcgagactctctcatacctccccgatcttacacccgtgcagttggctaaggaagtggattaccttcttcgctcaaaatgggtttccttgcttggaattcgaattaaaggagggattcgtgcaccgtaaatactcgagcctacccacgtactacgatggacgctactggaccatgtggaa

SEQ ID NO: 39459 - DNA, 418 bp, Gossypium hirsutum
  Clone ID: LIB3165-040-Q1-K1-C6
cccacgcgtccgatcactaccattatggcttcggctactgtttctgtagccaaacccaacgcttcagattcaggcaaaaggaaagggtgttggttttgcagatttctcaggcctacacaactcctctactagccttccctttgccaggaaaacctctgatgacttccattcactcgttgcttttcagacatctgctctaggaagcaataatggccgggtacaggaaagggatggcagaggcaaagctaaaggtggctataaatgggtttggtaggattggcaggaatttcttaagatgctggcatggccgtaaggactccccacttgatgtcattgccatcaatgacactggtggtgttaacaggcttctcaccttctcaaatatgattccacccttggcatcttcgctgccgatgtc

SEQ ID NO: 39460 - DNA, 418 bp, Gossypium hirsutum
  Clone ID: LIB3165-040-Q1-K1-C7
aacatgatggacatttggtcttggatatgttagcctcctaacaatgacgattggggggaatcagacccacatccaccgctcgcctttacaatggcgagttctgaggaaggcgactcaagctcaactcgttcgatccaactcaaagccgagcgtaccatggggtccgattcagaggtctgtataaccttcacaataagcttccaagggttccaatcttcacctctttgggtctctgacccctgttctctatcttcagagcaacctttcctccctttagtacttcagcttctccaagaaaccatcagccgttcaccagcaatgcccaacaccatttgcccgaggtctcagcttcaaaaactcaaacccgaacccatttcttggatcattgagtctcactcacccgaatcattctcgagtt

SEQ ID NO: 39461 - DNA, 418 bp, Gossypium hirsutum
  Clone ID: LIB3165-040-Q1-K1-C8
cccacgcgtccgattatggcttcggctactgtttctgtagccaaacccaacctggagattcaggcaaaaggaaagggtgttggttttgcagatttctcaggcctacacaactcctctactagccttccctttgccaggaaaacctctgatgacttccattcactcgttgcttttcagacatctgctctaggaagcaataatggcgggtacaggaaagggatggcagaggcaaagctaaaggtggctataaatgggtttggtaggattggcaggaacttcttaaggtgctggcatggccgtaaagactccccacttgatgtcattgccatcaatgacactggtggtgttaagcaggcttctcaccttctcaaatatgattccacccttggcatcttcgctgccgatgtcaagcctgtcg

SEQ ID NO: 39462 - DNA, 419 bp, Gossypium hirsutum
  Clone ID: LIB3165-040-Q1-K1-C9
caaccttatgtttcttcctctcaaacttcctctctcttctttttttcttcaagggcgagccctcaaaatggacgcagccactgtggttggatcttctatgtctctacatcgaacttcatgctccgctgctagatccgccctattagctgccaatggcccactttttccacgtttcgctgccaaccctcgcccctccttccctatcaagctttattcttcagtttcgtattcaaaatcacggaataggagagtgggtttggggggtaggagaggcatggtggtaaaggcgtcttcatctcctgactcagctgaacccaatgctcaaattgcgccacttcggatggaatctccaattggtcagtttttgtcccaaatcttgataagtcatcctcatcttgttcctgctgcagttgagcagc

SEQ ID NO: 39463 - DNA, 416 bp, Gossypium hirsutum
  Clone ID: LIB3165-040-Q1-K1-D1
gccgtctccaccatcggtgctgtcaaccgagcaccgttgagtttgaatggatcaggtgcgggagcttctgctccaagctcagctttcatggggaacagcttgaagaaagtgagcgctaggttcaacaacaacggcaaggctccagtgggaagtttcatgattgtggctgccaaagaaatcgacgaagacacacagaccgaccaggaccgatggaagggtcttgcttatgatatctccgatgaccaacaagacattaccagagggaaaggtatggtcgactcattgttccaagctcccatgaacgatggtactcactatgctgtcatgagctcctatgagtacattagccaaggccttcgcacatacgacttggacaacaacatggatggattctacattgccccagctttcatgga

SEQ ID NO: 39464 - DNA, 405 bp, Gossypium hirsutum
  Clone ID: LIB3165-040-Q1-K1-D10
cgcccccaaacccttttgcaccacccccacttcgacaagatccttttgcaccaccacgaccccccttatatggtgcacccccaccacctccgccttactatgctgcacctcctcctcccgcaccccctcatcaccaccatccaccaggtccaccgccaccgcctcatgctttttcaccacctcctggacctcctccaccaccttattttgatccatataggccaccaccgccttggaatcgccctcctccaccatactagctagctatgaataattgccttgggagttttatatttcagcagtttacgagctttatctccccatgacgcaattagaggtcatgtagatttctttacccttcttccttttccccgctccggtctgtaattttcctggtttttaata

SEQ ID NO: 39465 - DNA, 374 bp, Gossypium hirsutum
  Clone ID: LIB3165-040-Q1-K1-D11
cccacgcgtccgcccacgcgtccgcccacgcgtccgaaagcttcaaatctcctctgcgtattggagattacagcaaaaggcttttctgtttttgtttttgttttattttttatttattttataattttacaagtgtaaaaatccccttggggaatgcagagagatgagacgttcatcgttggcaaggcctgagctttcttaccaccgtaagcgctccattggcggccgaaattgtcaccgaaaacaccttgaaaaacggttgattcagtttgaagggtttcagttttaaatatacatatatttctcacttcttattgtaaatagacagtaattcagatcaaagggtattccgttcttttccttattttttcgtt

SEQ ID NO: 39466 - DNA, 305 bp, Gossypium hirsutum
  Clone ID: LIB3165-040-Q1-K1-D12
aaaaaatgaagcatccaggctccgtttagaataaaacccaattggtaatacatttgggagtaccacctatatcataatcataaatcttttttatttacaaattcgaaatagaaataagaacgatttcaaactattaatcaatcgaataatatgagaaatacgttgaatatttggcggaaaacatgaaagaaaaaggaattaaaataaaaaaggaaatgaaatcatagcaaaaagatgtggtattgggtcatttgtcctatatgcgcaaatcaaaatcgggcggatctttactcggagtagagcat

SEQ ID NO: 39467 - DNA, 424 bp, Gossypium hirsutum
  Clone ID: LIB3165-040-Q1-K1-D2
gccttcatcacctggagagacactatgtgcagcggtctcagcctctgcctgggtggaaccccatggaaaatgtactattgcattttctcttgcttggtcttctccaaaaataaaatttttaaaagggagctcataccataggagatacacaaaattctatggcacttctgaaagagcagctttgaacttggcgcatgatgcactgacaaattacaagcggtgggaagacgagattgaaaaatggcaaagtcctatcctcaatgatcaaaggctgccagaatggtataaatttacactgtttaacgagctctactttttggttgctggcggaactgtttggatagattcttccttgccatctacaaatgtgaaaaatgatcaagattcaccagaagatgcacaaagggtagatgtaaaagtaact

SEQ ID NO: 39468 - DNA, 421 bp, Gossypium hirsutum
  Clone ID: LIB3165-040-Q1-K1-D3
gttttcttttaatttggtcactgttgaaattgtatggtcatacttgcatatatcgatctgccctgttttcttctctgtaaattttataacttggaacctagacacccatggctactgtttctcaattgaataactttccatgcaagaccttcttaataaccccacaaaacagtaactttacctcaaaacttccggttctgcctctaaactctacaaaaccaactcagaattcgatcaagaaatctcaatttttgacccagaaatcagtccagccaaggcctgttttccaggtccgtgcttcggacgccgacgacgaatggggcccggacaaggaggagccagttgtaatcgagagtcctggagtggccgtggcggaagagaagaagcctgacgatgcgggggaaatagagagcttgaagaa

SEQ ID NO: 39469 - DNA, 415 bp, Gossypium hirsutum
  Clone ID: LIB3165-040-Q1-K1-D4
atcagttgcttcacaatggcctctacaaccatggctctttcttccccatcattcgccggggaggcagtgaagttctcccctaccacccctgaaatccggggaactggccgcgtttccatgaggaaaaccaccaagcctgttccttctggtagcccatggtacggtcctgaccgagttttgtacttgggtccactttccggtgagccaccatcttacttgaccggtgagttccctggtgactatggttgggacactgctggactctcagctgatcccgagacctttgctaggaaccgtgagctcgaagtcattcactgcagatgggccatgttgggagctctcgggtgtgtattccctgagctgttggctaggaacggtgtcaagttcggtgaagctgtatggttcaagggccggg

SEQ ID NO: 39470 - DNA, 218 bp, Gossypium hirsutum
  Clone ID: LIB3165-040-Q1-K1-D5
cccacgcgtccgtgacagtggaaaagaagctttgcgttccgacttccgcatgggaaaggtacgaatacgtgtatctactttggaaacgggtaaagtgtacaaaaatacatatccgttggtgatgttgggtaatagccgggtacaaaaaatgggtgaagctggaggtggctgtaaggtttgttcgtgcagcttcaaacactagaattttcttacaacgt

SEQ ID NO: 39471 - DNA, 418 bp, Gossypium hirsutum
  Clone ID: LIB3165-040-Q1-K1-D6
cccacgcgtccgaaaaaaaaaaaacagaaagaatgcttttgagaagttcttcaacaccagggcttggatctctggtatcctctatagctgctgatagtcccagcaacaacaatcattactatgaaaccagcagcccctttaggcattacccgtcgagctcttttcatggtcacacccaccataacaggctctcgtttcatccttctccaggctccgtccacctctctactgtagtttattgtggctcatccccggtatctccttctgttgttgatcagttttctgattttgagcttaaagggtttcgtcgggctcaatctgaagggaacttggaaaggctcgcccatgctgcttgcgatggcaatgatgaattctacgagcggaaccaacctaagaaagtttctgcgaggcacaacaa

SEQ ID NO: 39472 - DNA, 422 bp, Gossypium hirsutum
  Clone ID: LIB3165-040-Q1-K1-D7
cagtgagactcttttgtataactgtagcatatagtactagtaagcagtaatagcgggggcctcctccatgatctcatcggcaaccattgccaccgtgaactgctcctccccggcacaggccaacatggtggcccccttcaccggcctcaagtctgcctctgctttcccagtcactaggaaggccaacaacgacatcacttctcttgcaagcaatggtgggagagtgcaatgcatgcaggtgtggcctcctcttgggaagaagaagttcgagacactctcatacctccccgatcttacacccgtacagttggctaaggaagtagattaccttcttcgctctaaatggattccttgcttggaattcgaattagaggagggattcgtgcaccgtaagtactcgagcttacccacgtactacgatg

SEQ ID NO: 39473 - DNA, 317 bp, Gossypium hirsutum
  unsure (1)..(317): unsure at all n locations; Clone ID: LIB3165-040-Q1-K1-D8
gtctcctaatccacnttttctccggcttctacttctctagtccctctttcaacccgcagatttttgaatggctgcgacgccaaaaattaacacgattagcaggacactctttcgtcttaaagatggcttccgtgggcatggtgcctgcttctggttcaagagaatctaagaccgccagaggtgaaaagttacctgaggagattaacgacatgaaaatcccaaatgacatacatacggaagcaacattcttggacgaaaacgaaactcaaacaaggcatataattgcgacaaccatcggtggtacaaatggccaacca

SEQ ID NO: 39474 - DNA, 419 bp, Gossypium hirsutum
  Clone ID: LIB3165-040-Q1-K1-D9
cccacgcgtccgccagattctgtggttcctgtactgatggctgctggagaggcagcctgtgcatcagttcatggtgctaatcggttgggtgcaaattcccttcttgacattgtcgtctttggtcgggcttgtgcaaaccgagttgcagagatccaaaggccagggcagaagcagaaacctttggaaaaggatgctggtgagagaacaattgcatggttagacaaaataagaaattctaatggttctcttccaacttcaaacattcgattaaatatgcaacgagtaatgcaaaacaatgctgctgttttccgcacacaggaaacactagaggaaggttgtcagttaattgataagacatgggaaagcttccatgatgttaagttgaaggatcgcagtttaatatggaactctgatttgat

SEQ ID NO: 39475 - DNA, 406 bp, Gossypium hirsutum
  Clone ID: LIB3165-040-Q1-K1-E1
tttcctttctccttttctcttctaagcaaattttcttccacatcttcatctccgtggtgacctcccctcaccatctccgtccgtcatctccgtcgaccgttggccttacttctattttgaagaaaccgtcatctctgtcatcaacgggtttttttttctgttaattttcactgatttgatttctagatcgggtctggttcttgcttttttcttgctagatggtagatcgggtctggttctattttttcttgatttttagatcagttcatctgtttctaaaagagaacttgaagacatgagatgggaaatactgcttgaaaattgcccaaacaaacatttacgtggcaaatatggagcctagcctgcaatattgtatattgtaccgactgttattggattcttggct

SEQ ID NO: 39476 - DNA, 323 bp, Gossypium hirsutum
  Clone ID: LIB3165-040-Q1-K1-E10
cccacgcgtccgacgacggtggtcattgatttcctaatcccctaaggagtgcggaccaacttaattgccgaatcaactacccccaaaaatggacggcgcttaagcgcgccacctatacaccgccgtcggtgcaagggccaagcccccattagtaagagggcacggcagtcgccgcaaaacccgggcgcgagcccggtcatgaccggacgaatgagcatatcttgatgttggtcacacatattcaaatgacaactttgaccgccttaaaggggaaaggttgcatgtgaactgcacttgcacatagtttagacgatcctaaaaga

SEQ ID NO: 39477 - DNA, 409 bp, Gossypium hirsutum
  Clone ID: LIB3165-040-Q1-K1-E11
cttttctgttgctaaggctcttaatatgatttgtagtggctatgtttggattgctgcagattggcttccttcatacttagattcaaaggacgcagttgattccaacacaatgaatatcttgcaaggggttattgctctccgccattacacccctgatactgatctcaagaagagttttatgtctaagtggaacaccctaaaatataagggaagtgcaggtcatgcaggtttcaattcatatgcgctttatgcttatgattcggcttggttggctgcacatgcccttgatggttttctcaacgaaggtgggaatttatctttctcttatgacccgaaattgcatgatacaaatggcagcatgctgcatctagcatcccttcgtgtgtttaatggcggggaacaacttctc

SEQ ID NO: 39478 - DNA, 201 bp, Gossypium hirsutum
  Clone ID: LIB3165-040-Q1-K1-E12
tccaacacaacaaatatctatcatggggttattgcactgcgtcatcacacccctgatactgatctcaggaagagttggatgactacctggatctccataatctattaccaggacgagcttgtctcgcaggtttcaatcttatataccctcaattctttcaatacctttaaaggtgtttgcacatggcgggggggggggggg

SEQ ID NO: 39479 - DNA, 424 bp, Gossypium hirsutum
  Clone ID: LIB3165-040-Q1-K1-E2
gcgactctggatacattcagcaagccttgcacaatggccaccatcacctctgccgctgtcgctatcccatctttcaccggccttaaagccggtgcaaccgcagctaaagttagcgccacagccaaggttgcagcctctccagtcccaagggtcagcatcaaggcctccctcaaagacgtcggtgttgctgttgcggcaactgctgcaagcgcaatccttgccaacaatgccatggccattgaagtcttgctcggcagtgacgatgggggtctggctttcattcccaaagaattcagcgtaagcccaggggagaagattgtgttcaagaacaatgccggattcccacacaatgttgtgttcgatgaggacgaaatcccaagcggcgtcgacgtatccaaaatctccatgcctgaagaagagctac

SEQ ID NO: 39480 - DNA, 422 bp, Gossypium hirsutum
  Clone ID: LIB3165-040-Q1-K1-E3
cccacgcgtccgaaaggaacaggaactgctaaccagtgcccaaccatcgatggtggtgtcgactcttttgccttcaagcctggcaaatactacgccaagaagttctgcttggagcccacttccttcactgtcaaggctgagggtgttaacaagaatgcccctcctgagttccaaaacaccaagctcatgacccgtttaacctacacccttgacgaaatcgagggccctttcgaggtatccaccgatggcaccgtcaaattcgaggagaaagatgggattgattatgctgccgtcacagttcagcttcctggtggtgagcgtgtgcctttcctgttcaccatcaagcaattggttgcatcaggcaaacctgatagctttggaggagacttccttgtaccatcctaccgtggctcatctttctt

SEQ ID NO: 39481 - DNA, 405 bp, Gossypium hirsutum
  Clone ID: LIB3165-040-Q1-K1-E4
cgtttttattctctagagtcttcccttgtccctgttaaaatctgtcactgtgatcagtaatggccaccgctgaacctgaagttccagtcactgagcagcagcccgcggcagcagaggagccaaagccggcggaaaagcctgtgaaggagaagagacccagagctccaaaggagaaaaagcctaagcaacccaaatccgcagcacatcctccttatttttagatgatcaaggaggcgcttttggctttgaaagagaagagtggatcaagtccgtacgctatagcgaaatacatggaagagaagcacaaggcggtgcttccagcgaatttcaggaaaatcttaggtcttcagcttaaaaactcagctgccagaggcaagctgataaagatcaaggcctcttacaagc

SEQ ID NO: 39482 - DNA, 390 bp, Gossypium hirsutum
  Clone ID: LIB3165-040-Q1-K1-E5
agaactcattccacctcaccaccatttcattattcataagtgcaccttccaaagctaagcgcctctgtgccttgttgtcatccaatcaattccaacaaaaatcctccattgttgatggttcaagcctttccatcatacatttgacacccatctctttgcataaaaattatgcaaatgaggaccctcaatgcagcaactccaagtttgacacctctctcggttctttctgagacaagaaccgaggccagaaaagcaccattgctccccattgcttcaccactcacactacccaactgcccagctattattaagacccaaaccagctttgcaccagtgtttgtcaagaaccttgcatggtgggttactgcttttgtcatcacttcttcccat

SEQ ID NO: 39483 - DNA, 414 bp, Gossypium hirsutum
  Clone ID: LIB3165-040-Q1-K1-E6
atttttcatcagcaaagctgggggatggagagtttgtgaagggcatggccatggctggactagctactcaatctttgctctgccaaacccattgctgggctcttccaagaccaacacccttcaattccaaccctcctccactgcccagccgctacccctgcaaacatcacggcgaaacatggcccacaacctccttttctaccctccattccatgcccattgtttgccgcgcgtcccgtcgcaagtccaccgccttgagctccatctcggaaggaagcgatcaggatggtcctcttcggcgagtccttcagctgagtctgtgggccgctgaggctgtttacatcttgtggctctttttgcttccctatgctcctggagaccctgtatgggccatcagttccaacacaataaacg

SEQ ID NO: 39484 - DNA, 422 bp, Gossypium hirsutum
  Clone ID: LIB3165-040-Q1-K1-E8
cccacgcgtccgcccacgcgtccggctgatttccttcgtgcccctggagtgcagacgcccgctcattgttagattctccacggttattcatgaacgtggtagtcctgaaactttgagagacccccgaggtttcgctgtgaaattttacactcgagagggaaattttgatctcgtggggaacaatttccctgtgtttttcatccgtgacggaatgaagttccctgatatggtccatgctcttaaaccaaacccgaagtcccacattcaggaaaactggaggattctggacttcttttcgcaccatcccgaaagcttgcacatgttcaccttcctgtttgatgacatcggtgttccacaggattataggcacatggatggctctggtgttcatacctacacactaatcaacaaggctgggaagt

SEQ ID NO: 39485 - DNA, 421 bp, Gossypium hirsutum
  Clone ID: LIB3165-040-Q1-K1-E9
cccacgcgtccgcccacgcgtccgcccacttttccgggagttaataagctctagggcgagaggttttgctgtatcttttggttctttaattggatttttgccttaccgaaacctggctgctaaatggaagttcttagctttcgaatcatggttgagacagaggggtttagacccatctgcttataagcagaacttaggagtcattggaagttctgatgtaatgagcaagaactcttctctagattcaacctcagattcagaaaacaagcaacagtttgagggaaaattttcaccggatatgaaattggaagatcttttgaggatttatgatcaagagaagcttaaattcttgacctcatttgtcggtcagagagtcaaagtaaatgttctaatggctgacagaaagttcagaaaacttata

SEQ ID NO: 39486 - DNA, 461 bp, Gossypium hirsutum
  unsure (1)..(461): unsure at all n locations; Clone ID: LIB3165-040-Q1-K1-F1
tccggnnttgaaaaaccggcgcggccccacccgtccgggaagaatcaatgtcgactgtaccttctttttttctttgggcctccattttcagctggggtacacctactgttttctttgtctttcttaatattactattggtactatctttttcacttccaccttctcttccaacaattctggcgccgccgcttctggcggtgtcggcgacggcccatcactccacgaaggagatgaaacaaacgagcctagactccttccatctccatctgttttacaaaggctcaaatccatctactggtactcttacggatcccaacaaccttttactaccaccaccgccgccgccgaaatcccagattccggcgccgatttccatatctcttttcaacaacaaaccagtgaaactgaaaccacacctgaaccagtcccaacccacctcgatagatctccttctgttttg

SEQ ID NO: 39487 - DNA, 411 bp, Gossypium hirsutum
  Clone ID: LIB3165-040-Q1-K1-F10
attacctgtgaaattctgttctcatttttctttcaagaactaagcgaaaatggcagcagaggaaggccaagtctatggttgccacactattgaatcatggaacgaacagcttcaaaaaggcaacgaatccgaaaaattggtggtggttgatttcactgcttcatggtgtggaccctgccgtttcattgcacctttcctggctgaactagccaagaagttcccttctgttacctttcttaaggtggatgtggatgagttgaaggaagttgctaccgattgggcagtggaggctatgccgactttcatgttcctcaaggaggggaagattgtagacaaagtggtgggagcaaagaaagaagagcttcagcagactctgtcaaagcatatggctgtccccagtactacttcagc

SEQ ID NO: 39488 - DNA, 325 bp, Gossypium hirsutum
  Clone ID: LIB3165-040-Q1-K1-F11
atttagctatagcatacactactagtaccctttactagcaatggcttcctcaatgatgtcatcggctaccattgccactgcctctacggcacaggctaacatggtcgctcctttcaccggcctcaagtctgccctttgatttcccaggccaccaggaaggccaactacgacattacttatctcgcaagcaatggcagcagactgcaatgcatgcaggtgtggacccctactggaaagacgaagttcgagactctatcatacctgcccgatcttacacccgtgcacatggctaaggaagtggattacctatttagttcaaaatggg

SEQ ID NO: 39489 - DNA, 424 bp, Gossypium hirsutum
  Clone ID: LIB3165-040-Q1-K1-F2
ggcgccgcaattcgtcgagcttccatcgtttggttccgcaacgatttacgggtccacgacaacgagtgtctcaacaccgccaacaatgagtccatgtcggttttgccggtttactgttttgaccctcgagattacgggaaatcctcatctgggttcgacaaaaccggtccttacagagccacattcttgattgaatcggtttcggatctccggaagaatctgcaagcacgagggtcggatcttgtagttcggattgggaagccggagagtgttttggttgatttagctaaagctatcggggctgacgctgtctatgctcatagagaagtttctcatgatgaggttaaggctgaggaaaagattgagtcggccatgaaagaagagggtgttgaagttaagtacttttggggaagtactttgttcc

SEQ ID NO: 39490 - DNA, 426 bp, Gossypium hirsutum
  Clone ID: LIB3165-040-Q1-K1-F3
caggattgaagagataagattatagtgaaaaactaaacataataaagccccttcgacgggcttcattgatttgccctctcaaagcccaagaaaaatggcttctgcttccgctactctcctcaagtcttcacctattatcgacaagtccgagtggattaagggccaaaacctccgccacccttcggtttgttttgtacggtcacaccctacatcgggccgcctttgccgtccgtgctagttcatatgccgatgagcttgttaagaccgcgaaaactgttgcatctccaggtcgtggtattttggccatggatgaatcaaatgctacatgtgggaaacggcttgcctcgattggtctcgagaataccgaggcaaaccggcaagcttaccgtacccttctcgtgtctgcccctggcctcggtgactaca

SEQ ID NO: 39491 - DNA, 416 bp, Gossypium hirsutum
  Clone ID: LIB3165-040-Q1-K1-F5
cccacgcgtccggtttggtcaatggaatccatagtcatggcgttgagaaaaggagcagtgtaagtagaaaggcgattgttcacagatacattacaatttacaaccatagccatttcctctcgccatttctcttaatctcagtctcttttgaggttcaaagttcaaacaacacataagaatgtcgcctttggcttttgttttgactttgagctgttatagacgttggccatcccgcttcagcaccccctattctcacaaccttctcgttttattctcttcaaccgccaccaccattaccccacctaacggaaacgagtcgccgtcgagtggacccgctccgcctcctatccgagtcgcactaaccgagtcaacaggtcgagccgtgttcgccactcggagaattggtgctggagaca

SEQ ID NO: 39492 - DNA, 421 bp, Gossypium hirsutum
  Clone ID: LIB3165-040-Q1-K1-F7
aaaactcaaagaagggcttcaattagatccttttgcttgctatcattccaaactgggggataagagaaagctgacccctggtttgcttatctgtaggatcccctggggaagctgctggtggtggtttttacaggcatttcaaataccattttctatggttctttggctgttctgattctaattgatgttggaggggttcactgaggattaagctcctcaatcatggaaggtctttgtgaaacaccagaaaatggtaaagtagcagatcccgaccttcggaatattcagtacttgccatcctctaccggattatcattactttggtttgatatgagagtcttctatgttagagtcagcaaatttcaggttgatgattcaacccccgagtttctgactctcaatcatatccccttagaccctg

SEQ ID NO: 39493 - DNA, 418 bp, Gossypium hirsutum
  Clone ID: LIB3165-040-Q1-K1-F8
ggcggtctcacttcaagctgcagctacccttatgcaaccaatcaaggttgctgcggcgatcaaggaccaatgtgccgctcaggtcctcccagagcgtttctaaggccttcggtttggagcctgttggtgctaggcttacctgctctttgcaaactgacctcaaggacttggctctgaagtgtgttgatgctaccaagctcgctggtttcgctcttgctacatctgctcttgttgtctcgggagcaagcgctgaaggagtttcaaagcggctaacctacgctgaaatccaaagcaagacatacatggaagtcaaaggaacaggaactgctaaccagtgcccaaccatcgatggtggtgtcgactcttttgccttcaagcctggcaaatactacgccaagaagttctgcttggagcccac

SEQ ID NO: 39494 - DNA, 267 bp, Gossypium hirsutum
  Clone ID: LIB3165-040-Q1-K1-F9
accacacatgcgatcaaagtccaatcactttcaatactttcataacatttcacggagttgactctacagtctccaatggcggctgccgtctcacaccatcggtgctgtcaaccgagcacacgtgagtgtgaatggatcaggtgccggagcttctgctccaagctcagctttcatggggaacagctcgaagaaagtgagcgctcggtacaacaacaacggcgaggctccagtgggaagtctcatgattgtggctgcgaaagaaatcga

SEQ ID NO: 39495 - DNA, 432 bp, Gossypium hirsutum
  Clone ID: LIB3165-040-Q1-K1-G1
agccttccgttggtccccattactagcaatggcttcctcattgatctcatcggctaccattgccactggctctccggcacaggctaacatggtcacccctttcaccggcctcaagtctgcctctgctttcccagtcaccaggaaggccaacaacgacattacttctctcgcaagcaatggcggcagagtgcaatgcatgcaggtgtggcctcctactggaaagaagaagttcgagactctctcatacctccccgatcttacacccgtgcagttggctaaggaagtagattaccttcttcgctcaaaatgggttccttgcttggagttcgaattggaggagggattcgtgcaccgtaagtactcgagcttacccacgtactacgatggacgctactggaccatgtggaagctgcccatgttcgggtgcaccga

SEQ ID NO: 39496 - DNA, 409 bp, Gossypium hirsutum
  Clone ID: LIB3165-040-Q1-K1-G10
cccacgcgtccgcccacgcgtccgtttttttttccttttcgattctttgatttgagaaaggaaacaggaaaaaatgggttctttcttttcatccaattcaacgccagaaaagtcatcatcttcatcttagcattcaggcatccaaacctttcattcatcacccagatggcaacttcacttcaactctgtcaaagacagctcacagcttatggttatagatttctcagcttcttggtgtgggccatgtaaattcatggaacctgttttgaatgccacggctgctaagttcactgatgttcagtttgtaaaacttgatgttgatgaactgcctgatgtggcacaggaatttggggttcaaggaatgccaactttcgtgttgctaaagaaagggaaggaagtggatagggtg

SEQ ID NO: 39497 - DNA, 146 bp, Gossypium hirsutum
  Clone ID: LIB3165-040-Q1-K1-G11
ctcaaacttcctgaaccgctacgcgtttttttacttcaacgatcggaactccggagggcgcagttgaggccatcggccgagacatcatctcaggttaacggactgccaacgctgaaaacggctcacccggacagtcggaccagcgg

SEQ ID NO: 39498 - DNA, 423 bp, Gossypium hirsutum
  Clone ID: LIB3165-040-Q1-K1-G2
acaaaatcagttgcttcacaatggcctctacaaccatggctctttcttccccatcagtcgccggtaaggcagtgaagttctccccttccacccctgaaatccggggaactggccgtgtttccatgaggaaaaccaccaagcctgttccttctggtagcccatggtacggtcctgaccgagttttgtacttgggtccactttccggtgagccaccatcttacttgaccggtgagttccctggtgactatggttgggacactgctggactctcagctgatcccgagacctttgctaggaaccgtgagctcgaagtcattcactgcagatgggccatgttgggagctcttgggtgtgttttccctgagctgttggctaggaacggtgtcaagttcggtgaagctgtatggttcaaggccgggtctc

SEQ ID NO: 39499 - DNA, 419 bp, Gossypium hirsutum
  Clone ID: LIB3165-040-Q1-K1-G3
cctgaatttccctacgttcttcatgccccttaccataaccagctcgcctatctatggctgcgtccactaaggagcaacagcaggctgtccactgccatggagaggaccggccagtgggttttctcccaagagattcctactgatgttattgtcgaagttggtgaagccaatttcaatctacacaagttcatgctggtggcaaagagcaattacataaggaagttgataatggaaacaaatgaagcggatttgacaagaatcaacctgtctgaaatccacggaggccctgagatcttcgagaaagcagccaagttctgctacggcgttaatttcgagattacagtgcataacgtggcggctatgcgatgtgctgccgagtatcttcaaatgacggataaatactgcgacaacaacctggc

SEQ ID NO: 39500 - DNA, 415 bp, Gossypium hirsutum
  Clone ID: LIB3165-040-Q1-K1-G4
gttgggtataagaaggccttcacctatacaaatggtggctattcctttggggttgcaacagagggatgtaattgggattgcagagacaggatcaggtaagactgctgcttttggtttggcctatgttagcttatatatctagattacctcctatgagtgaagagaatgaagctgaggggccttatgctgttgtaatggctccgactcgtgaacttgctcaacaaattgaggatgaaactatgaagtttgcacattatttaggtattaaggttgtttcaattgttggtggtcagtcaatagaggaacaagggtttaggattagacaaggttgtgaggttgttattgcgacccctggtcgtttgctcgattgtttagagaggcggtatgcggtgttgaatcagtgtaattatgtggg

SEQ ID NO: 39501 - DNA, 406 bp, Gossypium hirsutum
  Clone ID: LIB3165-040-Q1-K1-G5
cccacgcgtccgcggacgcgtgggttcccccttctccaatcacacaacttagtgttggcgggttgtttgcagcggagccatggaagtgacgccaggcagaaaagcagttctatagcaattatatgctattgaaccctaagaaagcctctttctttgatctaactgccctcttgttttctaaaaatttaaagaagagaaaatttatagaaaccagtatcgaaactgaggacagtttctggtatagacttgttatattcctctctactctgttacagaagtttctgctttccataaagacgccaatggctttggccggccaaacttttgaggatatgctcaaccttttcactaacaatggtggcttgtttggtctcattaaaaaggtcatgacagggaaggtggtgat

SEQ ID NO: 39502 - DNA, 423 bp, Gossypium hirsutum
  Clone ID: LIB3165-040-Q1-K1-G7
cttaacgctataatcattgaagaaaaatgggtttgaaggaggaattcgaggagtgtgcggagaaagctaagacccttccccagaacactaccaacgacgacaagctcattctctatggactctacaagcaagctactgttggaccagtgaacaccagccgtcctggaatgttcaacatgaaggaaaagtacaagtgggatgcatggaaggctgttgaagggaaatcgaaggaggaagcaatgaacgattatatcactaatgtaaaacagctgcaagaggctgctgctgcatcttcttgacgtgtgtgtgagaatagaaaatggtgtaattttcaagccctttgatacctatgggtttgaaaaggtctataactatgaataagcaatgtactatgttttattgctattaagttatattaatgaa

SEQ ID NO: 39503 - DNA, 422 bp, Gossypium hirsutum
  Clone ID: LIB3165-040-Q1-K1-G8
ctcatggtatagttcatcgtgctatgatgggggaaagctggactgggcaattcgctgttaaaaacaaaatgggggaaagattttcagctgttgcaaccaatactccattttatgatgatgatggttctttggttggaatcatttgtgtttcgaccgatactcggccttttcaagacatgaaagttgcattgtcagctgaaaagcaagccgatggtgattcggcttttagctggtctaaaaacgcagtctcggctaaactcggtcttgatcctcagcagccgttacaagctgcaatcgcgtcgaaaataacgaatttggcgtccaaggtgagcaacaaagtgaaatcgaagattaggacgggagagaattgttccgatcgtgaagggggaagtggagatagtcattattctgatcatggtttg

SEQ ID NO: 39504 - DNA, 260 bp, Gossypium hirsutum
  Clone ID: LIB3165-040-Q1-K1-G9
atcgatatcattcccccgtttagttgtataatgtccaatttagaagtggcaaattaaggaatatagagcatggcatgttgcggttgggtgtaaacataggacaaatgcgagcaatcaatagcagcctccgctaaacagggttgtttttattacatctaattgatgtcatgtttatgtttatgttttttttttttatgatatcattgtactgaaactgttaaatatttatataaaactttgacaggttaatagtgcttggc

SEQ ID NO: 39505 - DNA, 428 bp, Gossypium hirsutum
  Clone ID: LIB3165-040-Q1-K1-H1
gtccgtttagctatagcatacactactagtacccactattagcaatggcttcctcaatgatctcggcggctaccattgccactgcctctccggcacaggctaacatggtcgctcctttcaccggcctcaagtctgcctctgctttcccagtcaccaggaaggccaacaacgacattacttctctcgcaagcaatggcggcagagtgcaatgcatgcaggtgtggcctcctactggaaagaagaagttcgagactctctcatacctccccgatcttacacccgtgcagttggctaaggaagtggattaccttcttcgctcaaaatgggttcccttgcttggaattcgaattagaggagggattcgtgcaccgtaaatactcgagcctacccacgtactacgatggacgctactggaccatgtggaagct

SEQ ID NO: 39506 - DNA, 366 bp, Gossypium hirsutum
  Clone ID: LIB3165-040-Q1-K1-H10
acggaagccatgggcttccgtaacggttgctttctctccgattaccaccgctgcttcggccccttattcttcggtttccgatcggagaatatccgttagattaccgggatttcgtggtctcaagagtaaatcgacgtcggcgtcggtggttccgttgttccgatcggtgatccgggagccgcttatacgcggtcgaggtggccgtgtagtatgtgaagcccaggagaccgctgttgatgtgtcagcagtgaaggaagatgcatggcaatcacttgttcttgattgtgaattgcctgtgctggttgagttttgggctccatggtgtggaccttgccgtatgatacaccccgtagttgacgagctgtc

SEQ ID NO: 39507 - DNA, 408 bp, Gossypium hirsutum
  unsure (1)..(408): unsure at all n locations; Clone ID: LIB3165-040-Q1-K1-H12
atctacaccatgattgtaggtcaaggatattacaccttgatgttaaaccagaaaatggattgcttgatgagagttatagagcaattgtggctgattttggtttatcaaagttaataggaaaagatgaaagtggggttattacaacactaagagggactagaggttatttagcaccagaatggctattacaacatggagtttcagagaaatctgatatttacagctatggaatggttctttntgaaatgatcggtggtcaaagaaatgttagtttgattgaaaatgggattgacagatctcaaaggaaatggaatttctttcctaaaattctgaggaaaaaactgaaagaagggaaattaatagaagctattgatcaaagactggttgaagcangtggcggtggtggtg

SEQ ID NO: 39508 - DNA, 395 bp, Gossypium hirsutum
  Clone ID: LIB3165-040-Q1-K1-H2
cttgcaatcctttgtagagatccgggatccattgtcaccatgtcttgctcaaatctgacaatgtgggtgtcctcaaaaccctctctttctgacacttcttcactctctttccgttctttcatcagcccttttcagctcccgtctcagagctcaacccccggtaacccttccaggtcctcatctgtaaccccagttcactgtggtcttcgtgagcttagagaccgtattgattcagtaaagaacacgcagaagatcactgaagctatgaaacttgtggctgctgctaaagttaggagagcacaagaagctgttgtcaatggcagacctttctctgagtccctggttgaagttctttacaacatcaatgaacagctccagactgaagacatagatgc

SEQ ID NO: 39509 - DNA, 420 bp, Gossypium hirsutum
  unsure (1)..(420): unsure at all n locations; Clone ID: LIB3165-040-Q1-K1-H3
ggagagccttttttgtgtagcgattctcagttagtcttttctttaagcttacagctgcggtccagagttttataatgggtaaggagaaggttcacatcaaccttgttgtcattggccatgtcgactctggcaagtcgaccactaccggtcatttgatctacaagcttggtggtattgacaagcgtgtgattgagaggttcgagaaggaggctgctgaaatgaacaaaaggtcattcaagtatgcttgggtgcttgacaagcttaaggctgagcgtgaacgtggtatcaccattgatattgccctgtggaagtttgagaccaccaaatactattgcaccgttattgatgcacctggacaccgtgactntatcaagaacatgattaccggtacctcacaggctgactgtngctgtctcatta

SEQ ID NO: 39510 - DNA, 276 bp, Gossypium hirsutum
  unsure (1)..(276): unsure at all n locations; Clone ID: LIB3165-040-Q1-K1-H4
tttttatttttttttttttttaatcttacagttggcggtgtgttttttattttggttttttttaatttttatttttctttttttttttttttttttttggaaagaaaaaaacaccaccaccggaattttgatttagggggtgttttccccaacaaaaaaaacaaanttttccacaaaagggggaaaaaagggggggggggaaaaaaaaaaaaaaaagcttccaaacatgactcccccaaaaaaaagcgcgtgcgaaatttgggggaagagaacccc

SEQ ID NO: 39511 - DNA, 400 bp, Gossypium hirsutum
  Clone ID: LIB3165-040-Q1-K1-H5
cccacgcgtccgagccggcgagggaaggaaaacctgagagggtgaaaaatgccagctggggacggtctccgatctcggaccagggatctgttttccagacccttcagaaagaagggttacatcccattgtccacttatctcaggacctacaagattggtgactatgtggacgtcaaggtaaatggcgccgttcacaagggcatgccccacaaattctaccatggccgcactggtcgtgtctggaacgtcaccaagcgcgccatcggcgttgaggtcaacaagcaggtgggtaaccggattatcaggaagaggattcatgtcagagtggagcatgttcagccttcaaggtgcactgaggaattcaaactgaggaagataaagaatgatcagctcaaggcag

SEQ ID NO: 39512 - DNA, 402 bp, Gossypium hirsutum
  Clone ID: LIB3165-040-Q1-K1-H8
gtcactttttttctttcgttcaatatttggctctttgtttttgttttttggtttagagagatggatcatgcagcagatgctcataggactgatttgatgacaataacacgtttcgtgttgaacgagcaatccaagtatcctgagtctcgtggggatttcaccatcttgcttaatcacatcgttcttggttgcaagtttgtttgctctgctgttaacaaggctggtcttgccaaactcatcggactcgctggggagactaatgttcagggtgaagaacaaaagaaattggatgtgctttcaaatgaagtctttgtcaaggctttagtaagcagtggcagaacatgcatccttgtctcagaagaagatgaagaagcgacttttgtagatccctcaaagcgtggg

SEQ ID NO: 39513 - DNA, 284 bp, Gossypium hirsutum
  Clone ID: LIB3165-040-Q1-K1-H9
caaatggctttagcggtggaaactaccatttttttagatctgatgggcctgcgctcggtgcttctactgagatcgcaccagacgaaggcttgcttcttcgagcgtggccgcatccacatgccattcaactggtacagaacgagaggatggaaacggtattgtagcaccaagttattaaagaagctgtgcagcaccagcaagcgttctatgagaagcctgataatactatcgtgaccaacaatactcacaactgagattgtgaacagctgtacgtacctcaccaa

SEQ ID NO: 39514 - DNA, 184 bp, Gossypium hirsutum
  Clone ID: LIB3165-041-Q1-K1-A1
aaaaaaaaaaaccatacctttccactatatattattttcccattcacccaatttctccaaaattttgttgtgattgctcaggattcgttagtttgaaaaaaaggcttccattggtaatagatggtcttcaccacttattatttgaagaaatggggaaaggtaagcttttgttttttttactttt

SEQ ID NO: 39515 - DNA, 432 bp, Gossypium hirsutum
  Clone ID: LIB3165-041-Q1-K1-A10
cgtttacgaaaaatataatattctcactttcccggggatcaaaggccatatattttgcgaattcaattaatgggttttagaagaatgggttggcatgagctactatgggtcggaaggctgcttgttcttatgcaactgcttcatggggtgtttggttggggaaaggacggtcattttgctgtttgcaagatagctgaggaatatcttactaaagatgctctggctacagtaaaggaactgctccccgattccgctagaggtgagcttgcatctgtatgctcctgggctgatgatgtaaggtggcactatcactggtctagtcccttacactatgttgacactccagatttcaagtgtaattataaatactgccgggactgccatgatactgctggacataaggatcgctgcgtaactggagccattttcaac

SEQ ID NO: 39516 - DNA, 209 bp, Gossypium hirsutum
  unsure (1)..(209): unsure at all n locations; Clone ID: LIB3165-041-Q1-K1-A12
gcgtggcctatcaatcctttataccttcttatttttaagctcgaggagtcaaaaaggttggcgcatgtataactggcttgtcacanccaatcgttcatagcaactttgctttttgaaccttcgatgttggctcttgctatcattgtgaagcccaatacaccaagtgtttgattgcccacccaccaatgttgatcatgagctgggtttac

SEQ ID NO: 39517 - DNA, 431 bp, Gossypium hirsutum
  unsure (1)..(431): unsure at all n locations; Clone ID: LIB3165-041-Q1-K1-A3
atcactgattctttggacctgccattttgaacttccccccttttttccatctccttccggcttaagcctagtcctttttggctgccgtttttcctctggttttgggcttccatgggaccgctttcaataaggttgcctttctacatgcaatccttttgccagcgaaggcggaaagtcctctgtggtggatctcagtgcatgaaaggagaaggaccctttcgctatttttgacaactacctcgaaagccaattgacgattacgctcattatatgctccatngaagtttattttcactatctgatcagatgggtgtttccatttttaatctccttagaaactctggaagtactgttctcaaaccattcacttcttttaaataactaagaacaaatcttgacatctnctgaccagatctgcttgtttatcatgt

SEQ ID NO: 39518 - DNA, 349 bp, Gossypium hirsutum
  Clone ID: LIB3165-041-Q1-K1-A4
atagtaatctcatcagcaagaaggttatttaacagtacattggaatccagaacaaaaagtagtctccaaaagctataaaacattcaacacaaagaggaaggaacccttatcatgaaatctccatcatctcagctaaagctttggttgcagcagcttaatagacgtaaccctttaccaacattcctttcttggcctcttctgaatctccctcgccggtgtatttcccgagctgagcgagtgagttggctttggcacggacaaagagtgcattctgagcagccttaacgttctcgggtctgccgtcccatgtcttcaagcaagtgttctggagagctctggcatacgagaa

SEQ ID NO: 39519 - DNA, 197 bp, Gossypium hirsutum
  Clone ID: LIB3165-041-Q1-K1-A5
ctgaaagataaacaggtgagccttaaagaagttgaaccatggcaggttggttaacatacaccacccaatcccttaattcaacttggtcaatctccacaccagcgaaaacccatttaaggtttcaccaaaaggaagtagttttctataggagaagcaacaagagaagtggcagcggcagcggcagcaacaacgggcca

SEQ ID NO: 39520 - DNA, 231 bp, Gossypium hirsutum
  Clone ID: LIB3165-041-Q1-K1-A6
cccacgcgtccggtgaagtgtcttttttttttgccatgggttcaaactcattgaagaaccctcttctgttcagtgatgaagttgagcctggttatgtcaaaaactcatcttttctgaaatcatcagtgaaatggggtttaaagattgtaatgtgggtgattttcattgcatgggttggggttatttttctatatcctggagaaattggtagtcagttggttgagaaaatta

SEQ ID NO: 39521 - DNA, 261 bp, Gossypium hirsutum
  Clone ID: LIB3165-041-Q1-K1-A7
cccacgcgtccgccgatattttgcagaattcgaagtttgaggaacacagaattagtagggaaagggatgtgattctaagggaaatggaagaggttgagggtcaaacggaggaggttatttttgaccatttgcattcaactgctttccagtacactcctcttggtagaactattctcggacctgctgataatattaggacgatcaccaaagagcatctgcaaaactatattcagacacactatactgctcctagaatggtca

SEQ ID NO: 39522 - DNA, 432 bp, Gossypium hirsutum
  Clone ID: LIB3165-041-Q1-K1-A8
cccacgcgtccgcccacgcgtccggttttacgtcatcacatgggagtcacccaaggaacaaatcttcgagatgccaacaggtggtgcagccatcatgagacaaggtccgaacctgctgaaattggctcgtaaagagcagtgcttggctcttgggactaggcttaggtctaagtacaagatcaagtatcagttttatagggtgttccctaatggtgaggttcaatatttgcaccctaaagatggggtgtaccctgagaaggtgaaccctggtcgacaaggtgtgggacagaactttaggagcattgggaagaatgttagccctatcgaggttaagttcactggcaaacaagtctatgatctgtaataaatttatgttcatgttttgagatgttttattttaatggtgattgttgcaatttaaatacacttttt

SEQ ID NO: 39523 - DNA, 422 bp, Gossypium hirsutum
  Clone ID: LIB3165-041-Q1-K1-A9
cccacgcgtccgccagtctcaagcaaccaaaccaaacaaccccttatccttttccatctctctcaaagaaatggctacatctcagctaacagcgtcgtcagtgacagcatcagctaggaacttggcttcattacaagggcttaggctgtccactgtcaaattctcttcctttggaacattaaagcctggggctttgaccagcaggtccttcaaacgtttggttgttaaagcggctaccgttgttgcccctaagtacacttcagttaagcccttgggtgacagggtgttggtgaagattaaagaaacagaggagaagactgagggtggcattttgcttccaacaactgctcaatcaaagcctcaaggaggtgaggtggttgcttgtggtgaagggaagacaattgggaataccaaattggaaa

SEQ ID NO: 39524 - DNA, 79 bp, Gossypium hirsutum
  Clone ID: LIB3165-041-Q1-K1-B1
aaccgaagcatttgggattaaatatttctttttttttccaaggttccttaccacttgggaaaattttaagataacaatt

SEQ ID NO: 39525 - DNA, 422 bp, Gossypium hirsutum
  Clone ID: LIB3165-041-Q1-K1-B10
gacggtcgatttgtttaaccccagcaactcgttgaaatggcgtccaagttgtgtgactcatgcaaatcagcgacggccactctgttctgccgtcctgactcggcttttctttgccccaactgctactccaaaatccatgccgccaacaagctagcctcccgtcacgctcgggtcttggtctgcgaagtttgcgaacaagcaccggctcacgtcacctgcaaggctgacgcagccgctctttgcgtcacttgtgaccgtgacatccactccgctaaccctctcgctcgccggcacgagcgggttcctttggctcccttttacgattccgtcaagcccaacacagcgtttaacttcctggacgaccgttacttatccgacgttgatggagacgctgacagcagcagggaagaagcggaggcagc

SEQ ID NO: 39526 - DNA, 417 bp, Gossypium hirsutum
  Clone ID: LIB3165-041-Q1-K1-B2
gccgaccagaaggcctacgctgcggcgaagtagggggaagtgtggctaaggtgcagcccacgaagtcacgcagctcggtttgttgcgtggagttcaaccccttcggagatgcattgatagctgccggatgcgccgaccagaaggcctacgcctatgatgtacggaaaatggtggaacctgtacacattttcgatggacatacgaaaaccataacatacgttagatttctgaatgcccaaacactggtttccgctggaaccgacgggtgtttaaaactatggaatatcgttgattctcgtttacttagaacatacaaagggcacgtaaacagtcggagttttgtggggttgtcagtgtggaggcatggagggttgcttggatgcggatcagaaaataaccaggtgttcgtttatgata

SEQ ID NO: 39527 - DNA, 172 bp, Gossypium hirsutum
  Clone ID: LIB3165-041-Q1-K1-B4
aaccaaagcagcagtttcaatttcagtggccggttctattacgggtggcttatcttcattttcgaaggttgggatccatacacctcatcgggtcttggggctcaaaagggtggcttctttcaacttcttttctggttctggcttggccctcaaatgcccgagttttaacaat

SEQ ID NO: 39528 - DNA, 105 bp, Gossypium hirsutum
  Clone ID: LIB3165-041-Q1-K1-B5
gattttctttggcaactgggaccaacaatcaaaaattagaaatggtaaaggcttttgtgagggaaagaacttcaacttcaacttttgggaatgccaattcaaccc

SEQ ID NO: 39529 - DNA, 406 bp, Gossypium hirsutum
  unsure (1)..(406): unsure at all n locations; Clone ID: LIB3165-041-Q1-K1-B6
cccacgcgtccgtctctctctctcttcaacaagccggcgagggaaggaaaaccagagagggtgaaaaatgccagctggtcacggtctccgatctcggaccagggatctgttttccagacccttcagaaagaagggttacatcccattgtccacttatctcaggacctacaagattggtgactatgtggacgtcaaggtaaatggcgccgttcacaagggcatgccccacaaattctaccatggccgcactggtcgtgtctggaacgtcaccaagcgcgccatcggcgttgaggtcaacaagcaggtgggtaacccgattatcaggaagaggattcatgtcagagtggagcatgttcagcctttcaagtgcactgaggaattcaactgangaagataagatgatcac

SEQ ID NO: 39530 - DNA, 438 bp, Gossypium hirsutum
  Clone ID: LIB3165-041-Q1-K1-B7
gaaaaagtctctgacacttgcaacacaataaactacacataaaatctgtgcctgcccttttctctgcacacctcgggatatcagtttcaactccactcatcccacgggttgagtaccgagtccatatatcgttaagttcaaggaaggaacttgggcatcatgggtcttaaggcattagactatgagacaatgaatgaaaacgtgaagaaagttcaatatgcagttagaggtgagttgtatcttcgagcttctgagcttcagaaggaagggaagaagattattttcacaaatgttggcaatccctaagctcttggacagaagccactgactttccctcgtcaggtggttgctttgtgccaagctccatttctgctagatgatcctaatgtaggacttatatttcctgctgatgccattgcaagagcaaaacattatctt

SEQ ID NO: 39531 - DNA, 440 bp, Gossypium hirsutum
  Clone ID: LIB3165-041-Q1-K1-B8
cccacgcgtccggcaaaagatggcccttttcaaaccggccttcctcaatcacctcaaaatgctcgcccatccccgccaccgttctccgccctctttcattgctctccgctgcctctcatttagcaccccagaagaagccgccgccgaacgccgccgccgcaagcgtcgactgcgagtcgaaccgacactctcgtttgcccagcgctctcaacaacaggctcagcaggtggctccaccgaaaccgatccaaaacccgaacgcccctaaaggtcccgaacccgtcactgcgctaaccggcaaccgtctcaacctccacaacaagatcttgaagctcattcgtgaaaacgacctcgatgaggccgctctatacacgcgccactccgtttattgcaattgccgccccacgatttacactgtcaacgccgtattaaacgcccagc

SEQ ID NO: 39532 - DNA, 296 bp, Gossypium hirsutum
  Clone ID: LIB3165-041-Q1-K1-B9
ccaaagttcaagcaaggacttaaaggaactggtgagaaacaaggaaggtggtgaggggaaattgtcttcttgcaaggaaagggtagtccatgaagctttgatggaggtaaagagtgttgggttatgggtatttggggttgttttggctaccttgtctggagagaccaaaccatacttggagatcaaacaagtgattgtcaggttcaattctgctttgttaattgatgtagattcatgtgtttttaaggttatggtggagaaaggtgagacattaaaagaggttaaggagctgaaca

SEQ ID NO: 39533 - DNA, 291 bp, Gossypium hirsutum
  Clone ID: LIB3165-041-Q1-K1-C10
caaaaatggcggacaaagctaaaaccgaaaacccatctttactccatggaaaatacgagcttggccgtatgttgggtcatggaaccttcgccaaagtctaccatgcgaagaaccttcaaacagggaagaatgtcgccatgaaagtggtgggcaaagagaaagtgatccaagtcgggatgatggagcagatcaagcgagagatctccgtcatgaaaatggtgaaacaccccaacatcgtcgagctgcacgaagtgatggcgagcaagtccaagatttacttcgccatggagc

SEQ ID NO: 39534 - DNA, 435 bp, Gossypium hirsutum
  Clone ID: LIB3165-041-Q1-K1-C11
cggacgcgtgggcggacgcgtgggcggacgcgtgggcggacgcgtgggcgagaccattgctcaactatttataatttggtcatttcttttgtgtggtggttctctcagtttttgagtttgctgcgcttgtctgtagtccatgtgactctctttcctttgctttcgtttcccagtctcttactttttgaatctcagatcaggaaattatcaaatccgagccgccatggaggttaacgacaagcttttgaacacgggtattctcatagtagccaccctagtagtggccaagctcatatctttcctcataatgcctagatctaagaaacgggttccaccagcagtcaaagcctggccggtaatcggtgggctccttcgattcgtgaaagggcctatggtgatgctccgggaggagtacccgaagcttggcagtgtttt

SEQ ID NO: 39535 - DNA, 434 bp, Gossypium hirsutum
  Clone ID: LIB3165-041-Q1-K1-C12
ctgacgcgtgggcggacgcgtgggcggtctcttttgcggacgcgtgggcgagaccggggcgcaactatttataatttggtcatttcttttgtgtggtggttctctcactttttgagtttgctgcgcttgtctgtagtccatgtgactctctttcctttgctttcgtttcccagtctcttactttttgaatctcagatcaggaaattatcaaatccgagccgccatggaggttaacgacaagcttttgaacacgggtattctcatagtagccaccctagtagtggccaagctcatatctttcctcataatgcctagatctaagaaacgggttccaccagcagtcaaagcctggccggttatctgtgggctccttctattcgtgaaagggcctatggtgttgctccgggaggagtacccgaagcttggcagtgttt

SEQ ID NO: 39536 - DNA, 316 bp, Gossypium hirsutum
  Clone ID: LIB3165-041-Q1-K1-C2
gaaaaatgctcaccctcacctccgccagctccgctctaacattattcccggaatgcaaaacccaacggcgccgatttacaatttcggcggcggcggatgataagttcccttcctttctaccaaagcaaatggaagaaatcaaagacccatttgcccggaaactcgccacccgaatcgaaagactgcccgttaatgctagcttctcagaaaaaagcattatgagtagttgcgtgaagccattgattcagagcagccaaaatccagtggttctccttcatggctttgacagttcttgtttagaatggagatacacatt

SEQ ID NO: 39537 - DNA, 89 bp, Gossypium hirsutum
  Clone ID: LIB3165-041-Q1-K1-C3
ccagtcaccaggaaagccaacaacgacattacttctcttgcaaggcatggccgcagaatgcaatgcatgccagtgtggccctctactgg

SEQ ID NO: 39538 - DNA, 134 bp, Gossypium hirsutum
  Clone ID: LIB3165-041-Q1-K1-C4
ttcctctcttccaatttatgattgccatgatttctgtggtttggatgttaacatttggcagggcaattaacaccagatgaccaggctgccgaaattaacccctggaaggaggaaaatgaccagttcttcctcca

SEQ ID NO: 39539 - DNA, 430 bp, Gossypium hirsutum
  unsure (1)..(430): unsure at all n locations; Clone ID: LIB3165-041-Q1-K1-C5
catcaccaaagaaaaaagaaagagagaatgcttttgagaagttcttcaacaccagttcttggatctctggtatcttccatagctgctgatagtcctagcaacaacaatcattactatgaaaccagcagcccctttaggcattacccatcgagctcttttcatggtcacacccaccataacaggctctcgtttcattcttctncaggctccgtccacctatctactgtagtttcttgtggctcttccccggtatctccttctgttgatcagttttctgattttgagcttacagggtttcgtcgggctcaatctgaanggaacttgtaagggctcgcccatgctgcttgcgatggcaatgatgaattctacaagcggaaccaacctaagaagttttctgcaaagcacaacaagaagtgctcgatgttgcaaa

SEQ ID NO: 39540 - DNA, 399 bp, Gossypium hirsutum
  Clone ID: LIB3165-041-Q1-K1-C8
agttgatcaggcaaaggtaccgtgaagccgccgacataatcaaaaagggcaaaatgtgcgccttgttcattaatgatctcgattctggtgccggtcgtatgggaggaaccacccaatacaccgtcaacaaccagatggttaacgctaccctcatgaacatcgccgataaccccaccaacgtccagctccccggtatgtacaacaaggaagagaacccccgtgtccccatcatcgtcactggtaacgatttctccacactgtatgctcctctcatccgtgacggtcgtatggagaaattttactgggcaccaactagggacgaccgtatcggtgtttgcaaaggtattttcaggaccgacggcgtccgagatgaagacattgttaagctcgtcgacacct

SEQ ID NO: 39541 - DNA, 432 bp, Gossypium hirsutum
  Clone ID: LIB3165-041-Q1-K1-D10
agttgcttcacaatggcctctacaaccatggctctttcttccccatcattcgccggtaaggcagtgaagttctccccttccacccctgaaatccggggaactggccgtgtttccatgaggaaaaccaccaagcctgttccttctggtagcccatggtacggtcctgaccgagttttgtacttgggtccactttccggtgagccaccatcttacttgaccggtgagttccctggtgactatggttgggacactgctggactctcagctgatcccgagacctttgctaggaaccgtgagctcgaagtcattcactgcagatgggccatgttgggagctcttgggtgttttttccctgagctgttggctaggaacggtgtcaagttcggtgaagctgtatggttcaaggccgggtctcaaatcttcagtgagggt

SEQ ID NO: 39542 - DNA, 435 bp, Gossypium hirsutum
  Clone ID: LIB3165-041-Q1-K1-D11
cccacgcgtccgagctgattctcacatccgatctttcctttttttttaaataattttttatctcccccagttcatggcataagaattgtcttcattcagattcgggcacctgctctctttcccccttccttcagctctggttctctggaggatggatcatgaaagggcccccattttgagatctaaggatcaaaagaaaattgagatgccgttggcgttggtgtctgaagaaagtaatatcattttaattccagcagagttgaaatgcttctctgtttctacttccaggcaagaaaacataactttggaatcaaaggaacgacagaagtcggcatcccaactttctgggcttatcattttctatcttgtggttatgttagtagagattgtcggtggaatgaaagccaatagccttgcagttttgacagatgcggc

SEQ ID NO: 39543 - DNA, 260 bp, Gossypium hirsutum
  Clone ID: LIB3165-041-Q1-K1-D2
caaaatcaactggttaacaatggcctctacaaccatggatgtctcttgcccatcattcaccggtaaggcagggaatttctcaccatatcacccctgaaatacagggaactggccgagttttcatgatgaaaaccaccgagcctgttacttctggtagcccatgggacagtcctgaccgagttaaggacttgggtccactttccggagagccaccatcttacttgaccagcgagtttcctgcagactatggatgtgacact

SEQ ID NO: 39544 - DNA, 422 bp, Gossypium hirsutum
  unsure (1)..(422): unsure at all n locations; Clone ID: LIB3165-041-Q1-K1-D4
ctagcctacggtgagatcatcaacgggcgttatgctatgttgggtgcagtaggtgcgattgcccctgaaatacttgggaaagccggtcttatcccagcagaaacagcccctccttggtttaaaactggtgtgatcccaccagcaggggcatacaactattgggcagacccttacacttttgttgtgttcgagatggcactcatgggatttgagatcacactatgttccaagactgggccaaaccatgttcgatggagaaacaatatttcttggggttcgagaagtacctaggagggtctggtgagccggcataccctggaggaccactngttaacccacttggttttgtgaaagatgacaagtcattgaaggatttgaagctgaaagaagtgaagaatgggagattggcaatgttggcaatc

SEQ ID NO: 39545 - DNA, 167 bp, Gossypium hirsutum
  Clone ID: LIB3165-041-Q1-K1-D5
tttatcatggcttcctcaactctctcccctgcagctccttggcagctattctcccgcaagagggggatgttcttgccatcacaagcgttttttgggaaaacaaccaggacccattttgtcaaaaaccaaaaggggattagggtcacattccaagccccttacattcc

SEQ ID NO: 39546 - DNA, 310 bp, Gossypium hirsutum
  Clone ID: LIB3165-041-Q1-K1-D7
cccacgcgtccgttcagccttctttggatcgatcaacaacaacgcgtcaaattcaacgagggcgttgtcgaacgtgagtgtggacaaggcgctaacctcgacgttctggccgacaaactcacggacgatcgtacgcacaccattaaggctatctgcattgctgacaacgaaaccgcgactggagttaccaacaacttgaacacagtgagaaatctactacaccattacctgcacccagcactggttgttgtctatggaggtgcctccatttgcgctctcgattaacggatggatgaatggggagtagacg

SEQ ID NO: 39547 - DNA, 436 bp, Gossypium hirsutum
  Clone ID: LIB3165-041-Q1-K1-D8
caaagtccaatcactcccaatactttcataacatttcacgaacttcactctccagtctccaatggcggctgccgtctccaccatcggtgctgtcaaccgagcaccgttgagtttgaatggatcaggtgccggagcttctgctccaagctcagctttcatggggaacagcttgaagaaagtgagcgctaggttcaacaacaacggcaaggctccagtgggaagtttcatgattgtggctgccaaagaaatcgacgaagacacacagaccgaccaggaccgatggaagggtcttgcttatgatatctccgatgaccaacaagacattaccagaaggaaaggtatggtcgactcattgttccaagctcccatgaacgatggtactcactatgctgtcatgagctcctatgagtacattagccaaggccttcgcacatac

SEQ ID NO: 39548 - DNA, 393 bp, Gossypium hirsutum
  Clone ID: LIB3165-041-Q1-K1-D9
aagccaaccaccagcgccatggactggtattcctggttatctaaagcctcccttgacccgtcacttgtctataagtatggccttgccttttctgggaatgagctccaaaaggaggacttatcatacttcaaccatgagtttcttcagagtatgggtatttcagttgccaagcataggctggagattctcaagcttgctaggaaggaagttagagaagcccctaatagcctgtccaagctcattttgtcaatcaacaaaaccagaaagtgcttcaataagtatgtcaacaagttggttcaccatgagaataatgcgacgaagccactgccggagccggtttcttatagcgataagtggagagaagcattgtcaaggaggtgcaagagtgatcac

SEQ ID NO: 39549 - DNA, 417 bp, Gossypium hirsutum
  Clone ID: LIB3165-041-Q1-K1-E1
gagttgattatggtgaacaacatagcaagacttgtggccactctcggtttggtcgaatttatgaacaagggcattacccacaatgggatgaaaatcaccctattcactttgttggccattcaactggtgctcaagttgtgcgtgtcttgcagcaaatgcttgctgataaggcattcgagggatatgagaatacttctgagaattgggtgttaagcataacagccttatctggggctttcaatgggactacaagaacgtatttagatggcatgctctatgccgcttaggagttataatatatgattggttggacatccccttgctaaaggcctattacaatttcgggttcgatcactttaacttgtcatggagaaaagtaggtctttggggtcttggtgattgccttttggggaatgc

SEQ ID NO: 39550 - DNA, 433 bp, Gossypium hirsutum
  Clone ID: LIB3165-041-Q1-K1-E10
ggcactctagtcccgatcattcaactactccccattcagagagatggacaagtttccggcgtttcttcttcttccatttctttgttttttccactctttatttctttccgacgccgatgttactggaaattcgtccgatcccggcctaactctctccgccgactctctctgcgcccagcttatcgagcccaatggttatttctgcactgaacacactattcaaactaaggatggctatttattagctctacaacgcgtctcatctcgttctggggatcttaaagttcagcaaggtcatcctgttctgcttcagcatggattattcatggcaggtgatgcatggtttttggattccactgaacagtcgttgggcttcatccttgcagaccagggttttgatgtgtgggttggaaatgctcgtggaacacgttgg

SEQ ID NO: 39551 - DNA, 450 bp, Gossypium hirsutum
  Clone ID: LIB3165-041-Q1-K1-E12
attggtgccaatatactccatcaattttcattttattttcagatctcttcctcaaaagcggtgtgttgcaccaaaacaacccccatttcatttatttcttcaccatttctccacccccccccataaaaaaaacaaaaaattttaaacatatattaattatgtaatgtaatttaatttctcttttgatctaatttattcacagagaattcttaatttttaaatctccattcactcttaaacaaatattttcattgtaggttttgcttcctaagaacttaccacaatttgcttcatatccactgtttcttttctttattcttttatttccacccattgtctttcattcttcatcaattgttctgtgcccaaaaataggaccctttttcttaccctttttattcttcttcatttagagacaatttttcttttaaaatccactttttttttttt

SEQ ID NO: 39552 - DNA, 374 bp, Gossypium hirsutum
  Clone ID: LIB3165-041-Q1-K1-E2
cccacgcgtccgcccacgcgtccgagtggatcatacgtatgatgcagttgtggttggtgctggtggtgcggggctgagagcagccattggtctttcagagcatggatttaatactgcttgcataactaagcttttcccaactcgttcacatactgttgcggctcagggtggcataaatgctgctttgggaaatatgactgaagatgactggcgatggcacatgtatgacacagttaaaggaagtgattggttaggtgatcaggatgcaattcaatatatgtgcagggaggcaccaaaagccgtgattgaactcgagaattatgggctgcctttttctcgaacagaagatgggaaaatatatcagagagcatttg

SEQ ID NO: 39553 - DNA, 86 bp, Gossypium hirsutum
  Clone ID: LIB3165-041-Q1-K1-E5
ccagtttcctcattcatttccatttctcaacacaaattttcatcacccatcaagcttttcatcaaggcttcccttcacaagcttaa

SEQ ID NO: 39554 - DNA, 433 bp, Gossypium hirsutum
  Clone ID: LIB3165-041-Q1-K1-E6
attggtgcgaatagactccatcaattttcatttcattgtcagatctcttcctcaaaagcttcagctgacaccaaaacaacccccatttcatttatttcttcaccatttctccacccccccccaaaaaaaaaacaaaaaatgtaaaacatatatcaatgatgtaatgtagtttaagtgctctttggatctaatctagtcacagagaatcctgaattcttaaatctccattcactctgaaacaaaagtgttcatggagggttttggcgccgaagatctgtccacaataggcggcatagccactgtttctcttcttcattctttcattcccacccattggcttccattctccatcgtcggccgtgcccaaaattggaccctttctcgtaccctttttgtcaccgcatttggagcagttttgcacgtaatatccact

SEQ ID NO: 39555 - DNA, 431 bp, Gossypium hirsutum
  Clone ID: LIB3165-041-Q1-K1-E7
cccacgcgtccgtttagctatagcatacactactagtacccactactagcaatggcttcctcaatgatctcatcggctaccattgccactgcctctccggcacaggctaacatggtcgctcctttcaccggcctcaagtctgcctctgctttcccagtcaccaggaaggccaacaacgacattacttctctcgcaagcaatggcggcagagtgcaatgcatgcaggtgtggcctcctactggaaagaagaagttcgagactctctcatacctccccgatcttacacccgtgcagttggctaaggaagtggattaccttcttcgctcaaaatgggttccttgcttggaattcgaattagaggagggattcgtgcaccgtaaatactcgagcctacccacgtactacgatggacgctactggaccatgtggaa

SEQ ID NO: 39556 - DNA, 386 bp, Gossypium hirsutum
  Clone ID: LIB3165-041-Q1-K1-E8
ggaaaaaggaaaaagggaactgaattctttgacggagagaagagttaggcgttatggacggcaatactacggaggctgagcggtggttgacgattgcggagaagctgttggcggcgcgtgatttgcacgggaccagaaccttcgcgatccgagctcgtgaatcggcccctatcctcgccgaccaaatcctagccgtgacggacactctcataacggctcaatctaactctcaagactggtacgggatcctccaactcgtgccgttaactcagtccatggaagttgtggcgagtcagtataggaaactcgcccttcttttgaatcctgggaggaacaggctctctttcgcagatcaggcgtttcgatttgtttccgaagcttggaat

SEQ ID NO: 39557 - DNA, 413 bp, Gossypium hirsutum
  Clone ID: LIB3165-041-Q1-K1-F1
gcttctgcttctgatatttctttaggttgtgtttggtatcgtcattttagatttatcatcaatggcggagactgaaacgtttgcctttcaagctgagatcaatcagcttctcagcttgattataaacactttctacagtaacaaggagatctttcttcgtgaactcatcagcaattcttccgatgccttagacaagatcagatttgagtctttgacagacaagagcaagcttgatgctcagccagagttgttcattcatattgtgccagacaagactaataacaccctatcaatcattgatagtggtgttggcatgaccaaggctgatttggtgaacaatttgggtaccatcgcaaggtctggcaccaaggagttcatggaggcattggctgctggtgcagatgttagtatga

SEQ ID NO: 39558 - DNA, 440 bp, Gossypium hirsutum
  Clone ID: LIB3165-041-Q1-K1-F10
cccacgcgtccgcccacgcgtccgatcaagctctgtttcttcacgcctcaaacccgccaacttcaactcaacacctcgccaattgcaccccttaaaaccactcaacagaccgcgtcacctccctccaccgtcaccccaacgtccccttctcttctccaccaccaaaccaaccactatctccacctctttcacccacaaaaacctcaccgctcctcctatcttcccccaccgcacctcacttctcccttcatcatcccttcatgtccatcgaacccccgccaccggctacgccgcagctctattagacacagctcaatccaccggttcacttcacgaagtccgacgagacgtacgaaagctctcgagactactccaaaacagtcaaattcaagcttttttgaatgacccgtttttgggtgatcaagagaagggaaaagcaa

SEQ ID NO: 39559 - DNA, 426 bp, Gossypium hirsutum
  Clone ID: LIB3165-041-Q1-K1-F11
cccacgcgtccgcgatggagaaatcaaccaccttcctcattagaagatctatctacactggccttcaatactatcactacttcactgcaactgctgcaatccttgctttgccatactccctttcggttcttgtttcgcagttctgtgtcccctcttctcctctgttaccatcaatccacaatcatctgaaagccattttcatggcggccgagtttactccctcctcggacttcttcagggttctcagtttcaagatttcccagaccatttcttcatcaatctttgctcttcctttcaccctttctttcttcctcgtagccaaagcttccatcattcacctcgtcaaccaccaccataccccaacctgcccaccttcattatcttcggttttatccctttacaagcctctcttatccactttcatat

SEQ ID NO: 39560 - DNA, 286 bp, Gossypium hirsutum
  Clone ID: LIB3165-041-Q1-K1-F12
cccactcgtccgcgatggaaaaatcaaccactttcctcattacaagatctatctacgacggtgcttcattactatcactactacactgcaactgcttcaatccttgctttgccatactccctttcagatctcgtttcgcagtactttgtcctctcttctcctctgttaccatcaatatcacaatcatctgaatgccattttcattgcggccgcttttactccctcctcgtactttatgtggacagtcagttttaatatttcccattccatttcttcatcaatcttt

SEQ ID NO: 39561 - DNA, 222 bp, Gossypium hirsutum
  Clone ID: LIB3165-041-Q1-K1-F2
gttaccataacgggcaagtcccacaggcggaatcttaatactgagcatcaggcatagcaggagggctggccaccgatagtaccgccttgcacatcgaccgagcatctgacatgtcatatcgaaactgaactgtcatggggtagggagactactacacactttagactaactcacgggttgcgtcatggagcttgaaggtgataccagattgtatcgctattc

SEQ ID NO: 39562 - DNA, 438 bp, Gossypium hirsutum
  unsure (1)..(438): unsure at all n locations; Clone ID: LIB3165-041-Q1-K1-F5
ctttcaggcacgcataagcctctgctgcaaaaggtgaggggacatctctgtggataaccgtctgtaacaccattaaggttcccctcaaatcccaccctaccaaacctgtcgctgaactgaaagttctactgtcgaacgctgcattaaaatagattctcgtactcggtatgccttcttgtgttttataacttctgtttatactttcgctctttttcaagttttttaaaccttcaaattctgccagatgtctttgaatattatgtgctaaatctctacctggtgtatttcttctctcgtgtactaattgatttctggagtaccataacatccatagagcgtagcagaaaagtagacattgaccgttgtcgcttctcttgaagacccagagggcattcgcgataaacatggacactttcttcaaccgncgaatagcatcga

SEQ ID NO: 39563 - DNA, 435 bp, Gossypium hirsutum
  Clone ID: LIB3165-041-Q1-K1-F7
cttttgtataactgtagcatatagtactagtaagcagtaatagcaatggcctcctccatgatctcatcggcaaccattgccaccgtgaactgctcctccccggcacaggccaacatggtggcccccttcaccggcctcaagtctgcctctgctttcccagtcactaggaaggccaacaacgacatcacttctcttgcaagcaatggtgggagagtgcaatgcatgcaggtgtggcctcctcttgggaagaagaagttcgagacactctcatacctccccgatcttacacccgtacagttggctaaggaagtagattaccttcttcgctctaaatggattccttgcttggaattcgaattagaggagggattcgtgcaccgtaagtactcgagcttacccacgtactacgatggacgctactggaccatgtggaaa

SEQ ID NO: 39564 - DNA, 414 bp, Gossypium hirsutum
  unsure (1)..(414): unsure at all n locations; Clone ID: LIB3165-041-Q1-K1-F8
gagactcttttgtataactgtagcatatagtactagtaagcagtaatagcaatggcctcctccatgatctcatcggcaaccattgccaccgtgaactgctcctccccggcacaggccaacatggtggcccccttcaccggcctcaagtctgcctctgctttcccagtcactaggaaggccaacaacgacatcacttctcttgcaagcaatggtgggagagtgcaatgcatgcaggtgtggcctcctcttgggaagaagaagttcgagacactctcatancctcccgatcttacacccgtacagttggctaaagaagtagattaccttcttcgctctaaatggattccttgcttggaattcgaattagaagagggattcgtgcaccgtaagtactcgagcttacccacgtactac

SEQ ID NO: 39565 - DNA, 325 bp, Gossypium hirsutum
  Clone ID: LIB3165-041-Q1-K1-G1
gaaagcactgaaaacgcaaaaccatggcctctgcttctctcctcaagacttcaccagttttaaacaatctgatgggtaaaggtacaccttcgcaccttcaatctgcgggagggcacctgtgcaccttgactactggctcagctaatccatgagctgcagatgtagctatgtttctgccgggaattgcctgatgatcaacctccgggaacttgcctaacgctaaaacaaagctaccgcagctcagagtgctgttactctgcctggcagacatttgtgccatctcttgagaaccttataacacatgatgcagagatgtgatgtctgt

SEQ ID NO: 39566 - DNA, 411 bp, Gossypium hirsutum
  Clone ID: LIB3165-041-Q1-K1-G2
gttttatggaaagagaatcctcttactttctttctagggagcataataacaggagcatgcttgtcaaggcaaatgttgaaaatttacctgtagctggggctgagacagtgtctgaagttgcttgtatggggaatgaagttggcaggttgtcatcattttctggaaatgctaatgcaatcattgaagagtcatgtcagcagatacccagaacatcaacccgtgttacagttggagaagatgattgtgactcaatagaagaaagttgtaatgaaattgaatctgcaagtgagtctgtgcctgaaattttagacaatgatttacagttttttgaatcgattgggataaaaatggatgggagatgttcatcctcggtaattggatcggcagaaccaaatggacaatcaaataact

SEQ ID NO: 39567 - DNA, 72 bp, Gossypium hirsutum
  unsure (1)..(72): unsure at all n locations; Clone ID: LIB3165-041-Q1-K1-G3
ntccgtatagcatacaactactatgtacnnccactactagcaaatgggcttccctcaaatggatcctcaatc

SEQ ID NO: 39568 - DNA, 413 bp, Gossypium hirsutum
  unsure (1)..(413): unsure at all n locations; Clone ID: LIB3165-041-Q1-K1-G4
ctcaaattccatcatcaaaattagggtttctgtaaagctaaaaaaataaaaattgaaatcaaaatcgtttcgaaatcttagggaatcgggccgattggtggtcatgtttcgttgcctttggttctgaagtctttgaatttccttcaagctttccttgaagtggcaattttactctactcgttatggatgtgggatcaatggaatcatcccgtccccatttttcctccgccgtcagctccgtcgccggattcttctctcccggttctcttcaattcgagaccgggggttggaggagctcgagcagctaagtattcgatgattagctgcccgcttggtctcggntngataatggagtcggcttgaattgagtcgtcagctacctgctcatggtcattactctntatggagtggca

SEQ ID NO: 39569 - DNA, 425 bp, Gossypium hirsutum
  unsure (1)..(425): unsure at all n locations; Clone ID: LIB3165-041-Q1-K1-G5
ttttgttagaaagacgttagtagcggaaaattttgaacgttactattaaggaaggataatgctatccttgcgcttcgctattcctaccgcgaatacattaactccgcccaagattaaaccaaaaccgggtttagtagtacataccgcttggaaccaaacggacctttttccttctcttcccaaacgaaatgattataagctacaagcagctaccacggacttatctgtggcgggagatataccggcggaggaggtggtggagcttccggcggagctgagcagagagttgatgccgaaacacgtagcggtgataatggacgggaacgggcggtgggctcngcagcggggattggcgacatcagcgggacacgaagccngtgtaaaggcgttgagggagctggtcgaactatgttgccagtggggga

SEQ ID NO: 39570 - DNA, 58 bp, Gossypium hirsutum
  unsure (1)..(58): unsure at all n locations; Clone ID: LIB3165-041-Q1-K1-G6
ntccggggggctcttccccgggcgacgnaacagtcgacttcagaactggtaccggaca

SEQ ID NO: 39571 - DNA, 359 bp, Gossypium hirsutum
  Clone ID: LIB3165-041-Q1-K1-G7
tgaaacttcatttctctgacacaaaaagctctcacgacccgactcccctggcatcaacaggacagttctaaacccaaaaacataaaaaaatggccgcacgtgtactaacactggcgaagctcaatgcaaaacgcctaatcatcaactcaactaagatgagcagcccaacaaagcacaaccccaaagacctattactttctttacatgcacaacctcctcaaaggcctaaccatgtcaaaaccagccgacaactcaaacactaccttcttcactcgcttacatcgcaatagatggagctatcttctcaacctcaaggtcatgtgaccccggcttaactacacaacagatcgctgatatag

SEQ ID NO: 39572 - DNA, 424 bp, Gossypium hirsutum
  Clone ID: LIB3165-041-Q1-K1-G8
gtctatttagtccaaggattccttttttgttattattttattttcctagtacttgaaatttctttgctcaagtatttctcctgtcttctacgcttatatcaaacgcaaatgaacagaaaagattgtttctttttcactgtttctgggattttcttcatttggaatgaactgaattttgattgaaagatggtggcttttgggaagaagttgaaagagtcacaaattcaagaatggcaagggtattacataaactacaaattattgaagaagaaagttaatagatatgctcagcaacttgaaattggagcacaagatcaccattatgttcttaaagatttctcaagaatgttagatagtcaaattgaaaagattgtattatttctgctggaacaacaaggacaactagcaaacagattatgtgatc

SEQ ID NO: 39573 - DNA, 359 bp, Gossypium hirsutum
  Clone ID: LIB3165-041-Q1-K1-G9
aacaaaatcaactgcttcacaatggcctctacaaccatggctctttcttccccatcattcgccggtaaggcagtgaagttctccccttccacccctgaaatccagggaactggccgtgtttccatgaggaaaaccaccaagcctgttccttctggtagcccatggtacggtcctgaccgagttttgtacttgggtccactttccggtgagccaccatcttacttgaccggtgagttccctggtgactatggttgggacactgctggactctcagctgatcccgagacctttgctaggaaccgtgagctcgaagtcattcactgcagatgggccatgttgggagctcttgggtgtgtttt

SEQ ID NO: 39574 - DNA, 333 bp, Gossypium hirsutum
  Clone ID: LIB3165-041-Q1-K1-H1
cccggccgaattccggtcgccacgcgtcgccaccgtcggagacggcacaatatattcagcaaagctcattctttctcaattcaactttttatattagcactagtttacccttaaagaaagcttcaatatattaattgttggcaactacaaagcaccatacaaaagaggagaaacccactgataacataagaagtgtgagcgacacctcttaccacaatagcgagcaggattttggctttatgatcttatctgaactgtctgaagaatatcagcagtaaggtttgcaaattattttatggatgtggctgttattcttacatggagggggtatat

SEQ ID NO: 39575 - DNA, 433 bp, Gossypium hirsutum
  Clone ID: LIB3165-041-Q1-K1-H10
gatgcataatgatgaacaagaaaagctctacttgatagactttgagtatgggtcttacaagtacagaggctttgacattggaaatcacttcaatgaatatgctggatatgactgtgactatagcttgtatccgagtaaagatgaacaatatcattttttcaggcattatttagaacctgaaaaaccatgcgaggtatcagaaaaagaccttgaagctctgtatgtggagactaatacgttcatgttagcttcacatttatattgggcgttatgggccttaatccaggcaaggatgtcacccatcgattttgattatctggggtatttcttcttgcggtacaatgagtataagaagcagaagagaatgtgtttctcccttgcaaaatctcacatatctggttctggaaaagcataagactctgatggcgttctc

SEQ ID NO: 39576 - DNA, 230 bp, Gossypium hirsutum
  Clone ID: LIB3165-041-Q1-K1-H12
aaaaactgaacctatcctctccctttcaaggtttcttttttccaaacattgcccacgccggcgagcggctttttcaaattccaaaactccttcaccaaccgtgatctgaacaagaaaaagaagtctttttaacccccttctctacctccaccttaaagtcctggcctccataccaaacaagcctaaacaatgagagacctttcctctccttttctttccgattccaacac

SEQ ID NO: 39577 - DNA, 440 bp, Gossypium hirsutum
  unsure (1)..(440): unsure at all n locations; Clone ID: LIB3165-041-Q1-K1-H3
ctcttcttccctctaaaaccatagcagtccagagttgcaacgttgcgagcctcatcggctttcagtcaaccccctggtggttactaatcttctatctgggaaaacaaaaagaattactgtggagaatgccttctcttctggatgtacatccaaataagcccattccttttctgggaatttcggcttttcctttattgctaccttcaactaaatcaactactgcttctttcatacggggtactgcagaccctcagatcttgcatagaaaaagaagcttctctctttctgcaaaatgagttgaacaacacanggtcaaagaaactggtctcctttgctcccaggtgtagcgggtccacaaactccagtgacagtaaagatcaaactaagacaccttttggatacacaaggaagggatgtctattgattggccttgagtcact

SEQ ID NO: 39578 - DNA, 186 bp, Gossypium hirsutum
  Clone ID: LIB3165-041-Q1-K1-H4
aacagcagcaattgcaacacaactccaacgcctttgttgttggcggatatgccgataaggcacggggttttgttccaactttgccgactaaacacagggggcaacaaggttaatacgaagaccgactgaacaaacttatccaagaatccaagttcccatcattttatttgggtgataaccggttat

SEQ ID NO: 39579 - DNA, 173 bp, Gossypium hirsutum
  Clone ID: LIB3165-041-Q1-K1-H5
tctcaagtcatttcacaaagtcggactagagaggtgtaggataagtgggagctctcgggcgaaatggaaataccactacttttaacgttattttacttattccgggaatcggaggcggggcacggcccctctttttggacccaaagccggcttcggccggccgatccgggcgg

SEQ ID NO: 39580 - DNA, 216 bp, Gossypium hirsutum
  Clone ID: LIB3165-041-Q1-K1-H6
aaaaaaactgaacctatcctctccctttcaaggttcccagcaaccaaacatggcccacgccggcgagcggcggttccaaaggccaaagctccttcacgagcggtggtcggagcgagaaaaggagggctttttaaccccgttctcgacctccaccttaaggcccggtcctccagaccaaacaagccgaaacaaggagagacctttcgtctccttctc

SEQ ID NO: 39581 - DNA, 417 bp, Gossypium hirsutum
  Clone ID: LIB3165-041-Q1-K1-H7
ggcgatgtccccgattgtgtcaaacagtttttcactttcgacaagacacttagttactcaggccacttcaagcccttagctgcagttcaagttaccgagttggccgacggggtttttattgggtgtatagtgaatcacgctgtgaccgatgggacttcattctggcactttttcaacactttcgctgagatcaccaaaggggctttaaaaatatcgaaatctcccgattttggtcggaacaccgtgtttaattcccaagccgtgcttaaattccctcccggaggacccaccgttactttcgccggcgacgagccgttgagggaaaggattcttcatttcagcagagaagcgattttaaaacttaaatacagagctaattacggttgtttattaactaaacaaacgaattctcgagtc

SEQ ID NO: 39582 - DNA, 425 bp, Gossypium hirsutum
  Clone ID: LIB3165-041-Q1-K1-H8
tttttgtattaagagtcgccctttggtgtttttctaattcaatcagtgaggtgaagaaagagaggtcttgctgtggtggaaactgcggttgcggctccggttgcaagtgcggcggcggcggcggctgcggctgcggcggttgcaagatgtaccctgagatgaactttgctgagcaaaccacaactgagacacttgttcttggcgtggcaccccggaaagtgaactttgatggagctgaaatggaaactggggctgaaaatggctgcaaatgtggagataactgcacttgcaacccttgcaattgtaaatgaggggaaaaaaaaaaccgaagcatattatggaagctgatctaaataatatatgatgtatttgggtttttattattagaataaagcagccatggttcattaggtgttttgcttctt

SEQ ID NO: 39583 - DNA, 434 bp, Gossypium hirsutum
  Clone ID: LIB3165-041-Q1-K1-H9
tgaaattcaaagggaagggatggcgatccccgaagtaaaccgccaacaagccagagggagacctacggcgtcttcaacacgaccgccggttcgagctagaattcggctccggcagctgcttcgagtcacttccgtggcatgcgggatacagttcggatgggctttacagctctcgcttttgacaccttacgttcaagagctaggtatacctcaccagtgggccagcatcatatggctttgcgggccgctttcgggcctcctcgtacaacctctggtgggacacatgagcgaccgatgcaccagccgcttgggtcgtcgccgaccttttatcgtggctggtgcagtttcgattatcgttgccgttttgatcatcggtcactccgccgatatcggatggttgttcggcgatacagaggcgtcccggccgagagcta

SEQ ID NO: 39584 - DNA, 385 bp, Gossypium hirsutum
  Clone ID: LIB3165-042-Q1-K1-A1
ctttctctaagaaacaagctctcagagaagacaatggtgggttttgaacaatgaagaagaagagaaagtgtgggttatgcttgttccatggcctgccattatgcttactatgcttccttttcaccttcagtaacattgagaggctttggtgccaagaacagagaacccaggccttttcaagtacatctttcttccattagcagtcctgttagagcctcctacaatacccttgtctctgaggctgcaaggcttttggttcctacagcaattttcgaagcttcaaaactcaaagttgtcttcatgggagaggcgctaaaaagttattctgcaataatcccaagaacctacatcctcttccactgtgacttcactgcttacttaaaca

SEQ ID NO: 39585 - DNA, 342 bp, Gossypium hirsutum
  Clone ID: LIB3165-042-Q1-K1-A10
cccacgcgtccgcccacgcgtccgcccacgcgtccgctatagcatacactactagtacccactactagcaatggcttcctcaatgatctcatcggctaccattgccactgcctctccggcacaggctaacatggtcgctcctttcaccggcctcaagtctgcctctgctttcccagtcaccaggaaggccaacaacgacattacttctctcgcaagcaatggcggcagagtgcaatgcatgcaggtgtggcctcctactggaaagaagaagttcgagactctctcatacctccccgatcttacacccgtgcagttggctaaaggaagtggattaccttcttc

SEQ ID NO: 39586 - DNA, 398 bp, Gossypium hirsutum
  Clone ID: LIB3165-042-Q1-K1-A11
gtatcgacatctaaaactcaaaagagtctgtcatttcccttacttcctcaaaccagaagccatggccagcatgataatggcttcctcaaagcctgtaatctccattgctgcttcatcatccttcttttccaaacccaaactcaaacaaatcccacaactttccctcccaaaactccccaccccaaagttcttgaaaacccaacaaatcccctcactctcctccaccactctcaaatctatctccctcttcacagtcaccactttatcctttgccccaccttctcttgctgcagaaatagaaaaggccgctcttttcgatttcaacttaaccctccccatcatgatggtccagttcttgtcctcatgtttgctcttgacaaggtctactttaccccact

SEQ ID NO: 39587 - DNA, 417 bp, Gossypium hirsutum
  Clone ID: LIB3165-042-Q1-K1-A12
cggacgcgtgggggggaggcaaaggtcaaggaaaatctttccaatgtgagcttgtctttgccaagatgggaatcaaccccattatgatgagtgccggagaattggaaagtgggaacgccggagaaccagccaagttgatcaggcaaaggtaccgtgaggccgccgacattatcaagaaagggaaaatgtgttgcctctttatcaacgatctcgacgctggagccggtcgtatgggaggaaccacacaatacacagtgaacaaccaaatggtgaacgccacactcatgaacatcgctgataaccccaccaacgttcagctccccggtatgtacaacaaggaagagaaccctcgtgttccgatcattgtcaccggtaacgatttctcgacgctgtacgcgccgctcatccgtgacggtc

SEQ ID NO: 39588 - DNA, 337 bp, Gossypium hirsutum
  Clone ID: LIB3165-042-Q1-K1-A2
attttggtgcatccttaacctcagagccactcttattactcttcttcttattctcttttttcatcgttccaagaaactttactctaaattctttcctcctccttccgttcttcatcttccttctccttcttcatccacttcccttcctgaatctcaatcaagaatcccagagattgtatctgattcagacttgaagtttttgattgataatctggatgagaagctcgatgaggacgagaaatgggagactgtaattgataagaaaaccaactctttatcctacaaggcaaaatgctgcagacctaagaataaaccactaaaatacctgagcacgact

SEQ ID NO: 39589 - DNA, 227 bp, Gossypium hirsutum
  Clone ID: LIB3165-042-Q1-K1-A3
ctcactcgttcgttccatatctgctagatgaacctaatgtaggactcatatccaccgccggagccattgcaagagcaaaacattctctttcattgacttgtgcaggtctaggtgcatatagtgattccagaggtattacaggcgttaggaaagacgttgctaaattcaatgagaggcctaatggccatcctattgacccagagattatatttgtcactgacggtgcc

SEQ ID NO: 39590 - DNA, 426 bp, Gossypium hirsutum
  Clone ID: LIB3165-042-Q1-K1-A4
ctccaccatcacccccaaaaaacaaagcaaattgtagaagatggcaacacaagcacttgtatcatcgtctcttacctactcagtggagactgcaaggcagattcttggagctaaacgacaaattgggccttcaaggaaaggatcctttgttgttaaggcagcttcgactccacccgttaagcaaggagctgatagacctttatggtttgcatctaaacaaagcctttcatacttggatggcagccttccaggtgattatggatttgaccccttgggactctcagaccctgaaagtccatgagggttcatcgagcctaaatggctagcctacggtgagatcatcaacgggcgttatgctatgttgggtgcagtacgtgcgatcgcccctgaaatacttgggaaggccggtcttatcccagcaaaaac

SEQ ID NO: 39591 - DNA, 381 bp, Gossypium hirsutum
  unsure (1)..(381): unsure at all n locations; Clone ID: LIB3165-042-Q1-K1-A5
gaagactggttattccaagagggacccggcctcataaaaaagggggtcttaatgccccccctttaggaaatggcccaagcaaggaggcttcttctaatttaatcatatgctaatgcccagttcaacccggaaggggggccccccttttccatattacaccatctgatgtattattcctttgccatcatgggactctgtgtgtgtttttgttgttgaactcgtgattctgcagtgcttttaatgggggctagcaagttatatatgtatgatgatgatgatgtgagcagccatggttggcatggaacttgatgtatgttattgtttggttttggggtgtaatgtaaatggtaatgttttgtcntctnnnnnaaaaaaannnna

SEQ ID NO: 39592 - DNA, 350 bp, Gossypium hirsutum
  Clone ID: LIB3165-042-Q1-K1-A6
ttcaagctgcagctaccctgatgcaaccaatcaaggttgctgcaccatcaaggaccaatgtgctgctcaggtcctcccagagcgtttctaaggccttcggtttggagcctgttggtgctaggctcacctgctctttgcaaactgacctcaaggacttggctcagacgtgtgttgatgctaccaagctcgctggtttcgctcttgctacatctgctcttgttgtctcgggagcaagcgctgaaggagttccaaagcggctaacctacgatgaaatccaaagcaagacatacatggaagtcaaaggaacaggaactgctaaccagtgcccaaccatcgattggcgtgtcgac

SEQ ID NO: 39593 - DNA, 255 bp, Gossypium hirsutum
  Clone ID: LIB3165-042-Q1-K1-A7
cggacgcgtgggttttgttagaaagacgttagcagcggcaaaatttgaacgttactcttaaggaaggataatgctatccttgcgcttcgctattcctaccgcaaatacattaactccacccaagactaaaccgaaaccgggtttagtagtacaaaccgattggaaccaaacggacctttttccttctcttcccaaacgatatgattataagctacaagcagctaccacggacttatctgtggagggagatatacc

SEQ ID NO: 39594 - DNA, 284 bp, Gossypium hirsutum
  Clone ID: LIB3165-042-Q1-K1-A8
cccacgcgtccgcccacgcgtccgattttgcgtggcaatgtcgacggcttctatcaacggttggtgccttacctcctcttcttccaccactaccacctcctctttttccgctcgtcgacgacctacattgcggccttcagtcgtcgctagccttaactcttctccttctcctccgactcttatccaagaccgcccgggttttgctgcccctattcctttgctcaccccgagagaagagatgggaaacaagtcctacgacgaaaccattgaagctctcaagaaac

SEQ ID NO: 39595 - DNA, 335 bp, Gossypium hirsutum
  Clone ID: LIB3165-042-Q1-K1-A9
cccacgcgtccggattttcttgtttaaggttttttttaagacgcgcaatttgcggagtctactttaacggcttttcttccacgtttacaccttccctttctttcttgtccccaagtatgattcaattattacaatgctgcttaaaaactgggattcaattttgaatattcctatccaattcctgattcagggttttgagggtctcactgttaattaactcataaaagtttccatcttgagaaatgcagaaacgattatgaaggcttcgaagatgaggaattaagagaaagttgattcatcccctgcgcgatttcactgaaactagagttaaacaa

SEQ ID NO: 39596 - DNA, 235 bp, Gossypium hirsutum
  Clone ID: LIB3165-042-Q1-K1-B1
cccacgcgtccgcccacgcgtccggcccttggaaatgctaatgacgatgctatcaagagaggagctttctaaatgggaaattaagctccaagggaagaaaaaaaaatctatattggacacaaacaaaggaaatcccccctttgtgtcttaatagaatgttgttttccttttctgttttaagtggatttgtgtcctctatttttgtgttataaaatctccacttcgttcttgtctt

SEQ ID NO: 39597 - DNA, 395 bp, Gossypium hirsutum
  Clone ID: LIB3165-042-Q1-K1-B10
ggagaaccgaaggggaggaagaggaggaagaagaacaccaacaaaagttaaaaataagaggtgcttcaacttttgtttctcttttccttctttgttttacaatatcaatgcttaaaaaactctagcttttctctttctctctctatgcatcgatcggaatcaaaatcctcttggttttttggaacttcttggtggaaatctcgagcttggtggaatcgaagtgctttttcttggaattttaggttttggagattgtagattggaatttggatcttaaagtggttcaattcgagtttatttaaggcaatttgtgagattatttggtggattttcagctgtggatattggaaaaagattggaaattgaataaatttttattttattttttgaaattt

SEQ ID NO: 39598 - DNA, 393 bp, Gossypium hirsutum
  Clone ID: LIB3165-042-Q1-K1-B11
cccacgcgtccgcccacgcgtccgaaacctcagatttccactatgatttaacacccaattccaaaaacccaacctttcccaaaaaatttccccctttttctgtacatttatacagagtcaacaatacccgtactgatagattcaaaacccaatggcggccgtcagttccctgtctttcccggcaatcggccaaacttccggcgacagaaaacttaatgtcccatcggctcgttacttggcttccaatttcgaaggattccgtttccgtacaagccttttatatcagtccgtaggacttcgagcttccactactgcttctccttccgttttttactgcatgtctactgctactgataccccgactgtttctgaaacgaagtcgagcttttttaa

SEQ ID NO: 39599 - DNA, 423 bp, Gossypium hirsutum
  Clone ID: LIB3165-042-Q1-K1-B12
gcagaaggagttaataatcggaatggagatcggttcccgcattacaatctatgacatggaaaacataaaagtgctgattagccggttggaaattgagatggaatctttattgcataatgctgattttgcagttagagaagaagatgcagtgaagcttgcaatcaatgagatcaagggaaaattagaagcatttatgaaaaccattgaggaattgggtcgacaggccgaaaattgtagccgtgatattaggatggcgaggacggtagttttgcagaagatgatgaaacgttctgggaattcatcaacgggtgacagcccgtgggaagtgtagcaatgaggtaaatttcagtgtgttaatgttgtaataattttatgctgtattcaaagtaatgaagttgctccactggatttgatcttatacgt

SEQ ID NO: 39600 - DNA, 413 bp, Gossypium hirsutum
  Clone ID: LIB3165-042-Q1-K1-B2
gttgaccaagattgacagacgatctggcaaggaactcgagaaggaacccaagttcttgaagaacggtgatgcaggtatggtaaagatgattcccaccaaacccatggtggttgagactttctccgaatacccaccactcggacgttttgctgtccgtgacatgcgccagaccgttgctgtcggtgtcatcaagagtgttgagaagaaggacccaactggtgctaaggtcaccaaatctgctgccaagaagaaatgagagattattgcagagataattatatcagttttcattacagctttggacaattatcttaaatttggactttaaatttactttttgtgagacttgttgatttgctttttaaacaaattctagttttatgtttaatgttttaattctgagcgttctatat

SEQ ID NO: 39601 - DNA, 411 bp, Gossypium hirsutum
  Clone ID: LIB3165-042-Q1-K1-B3
aggatgagtacactggatgcaactagagcagaacttgctcttgtagttttgtatttgaataaggctgaagcaagggataagatatgcagggctatacaatatggctcgaaattcttaagtgatgggcagcctggcacagcacaaaatgttgacaaatcaaccagcttggcacggaaagttttccgcctttttaagtttgtgaacgatttgcatggtcttattagcccagttcctcaaggaactcccgttccacttgttctgctaggaaagtcaaagaatgcactgttgtcaactttcttatttctcgatcaaattgtgtggcttggcagaacaggcatctataagaacaaagaacgtgctgagttgattggacgaatatcccctttctgttggaatggatcaataatatgt

SEQ ID NO: 39602 - DNA, 400 bp, Gossypium hirsutum
  Clone ID: LIB3165-042-Q1-K1-B4
actactagtacccactactagcaatggcttcctcaatgatctcatcggctaccattgccactgcctctccggcacaggctaacatggtcacccctttcaccggcctcaagtctgcctctgctttcccagtcaccaggaaggccaacaacgacattacttctctcgcaagcaatggcggcagagtgcaatgcatgcaggtgtggcctcctactggaaagaagaagttcgagactctctcatacctccccgatcttacacccgtgcagttggctaaggaagtagattaccttcttcgctcaaaatgggttccttgcttggagttcgaattggaggagggattcgtgcaccgtaagtactcgagcttacccacgtactacgatggacgctactggaccatgtg

SEQ ID NO: 39603 - DNA, 397 bp, Gossypium hirsutum
  Clone ID: LIB3165-042-Q1-K1-B5
cccacgcgtccgcatggcggtgccaaaatgtcagcctccgccgcttccagctacgccaccgctttagccgatgtagccaagtccaacaacacccttgatgccaccagctccgacgttgaaaaagtcgagacaatcttctccgacccacaagtcctcgaattcttcaccaaccccaccattgatgtcctcaaaaaacgtcaggttttggatgagattgttagctcctccgagcttcagccgcacacggcgaattttttgaacatcctggttgatgccaagaggattgatcttatcaaagaaatcgtgaaagagttcgagttggtttacaatcagctgacggatacagagctggcgggggggagttcagtggtgaaatggagtctcaacatttgcacag

SEQ ID NO: 39604 - DNA, 366 bp, Gossypium hirsutum
  Clone ID: LIB3165-042-Q1-K1-B6
acaaaatcaactgcttcacaatggcctctacaaccatggctctttcttccccatcattcgccgggaaggcagtgaagttctccccttccacccctgaaatccagggaactggccgtgtttccatgaggaaaaccaccaagcctgttccttctggtagcccatggtacggtcctgaccgagttttgtacttgggtccactttccggtgagccaccatcttacttgaccggtgagttccctggtgactatggttgggacactgctggactctcagctgatcccgagacctttgctaggaaccgtgagctcgaagtcattcactgcagatgggccatgttgggaagctcttgggtgtgttttccctgag

SEQ ID NO: 39605 - DNA, 317 bp, Gossypium hirsutum
  Clone ID: LIB3165-042-Q1-K1-B7
agctatagcatacactactagtacccactactagcaatggcttcctcaatgatctcatcggctaccattgccactgcctctccggcacaggctaacatggtcgctcctttcaccggtctcaagtctgcctctgctttcccagtcaccaggaaggccaacaacgacattacttctctcgcaagcaatggcggtagagtgcaatgcatgcaggtgtggcctcctactgggaaagagaagtttgagactctctcataccttcccgatcttacacccgtgcagttggctaaagaaagtagattaccttcttcgctcaaaat

SEQ ID NO: 39606 - DNA, 387 bp, Gossypium hirsutum
  Clone ID: LIB3165-042-Q1-K1-B8
gagataagagaaagcactgaaaaagcaaaaccatggcctctgcttctctcctcaagacttcaccagttttagacaagtctgagtgggttaagggtcacacccttcgccaaccttccacttctgtggtgaggtgccaccctgttgcaccctccggactaactgtgcgtgcaagctcatatgccgatgagcttgtcaagactgctaaagctattgcttctcctggccgtggaattttggccatggatgaatccaacgctacctgtgggaaaacacggaggctaaccgccaagcctacaagacgttgcttgtttcagctcctggccttggtcagtacatctcaggtgccattctttttgaagaaaccctctatcaaaccacaattgatgg

SEQ ID NO: 39607 - DNA, 418 bp, Gossypium hirsutum
  Clone ID: LIB3165-042-Q1-K1-C1
cccacgcgtccgttttattgttccttccttcgccgtctactgctcttgtgacctcgatttcaagtgaaacagaatgggtaaggaaaagactcacattaacattgtggtcattggccatgtcgattccggaaaatcgaccaccactggccacctgatctacaagcttggtggtattgacaagcgtgtgattgaaaggtttgagaaagaagctgctgagatgaacaagaggtcattcaagtatgcttgggtgcttgacaagctcaaggctgaacgtgagcgtggtatcaccattgatattgccttgtggaaatttgagaccaccaaatactactgcactgtgattgatgcgcctggacaccgtgactttatcaagaacatgattactggtacctcgcaggctgactgtgctgttttgatt

SEQ ID NO: 39608 - DNA, 369 bp, Gossypium hirsutum
  unsure (1)..(369): unsure at all n locations; Clone ID: LIB3165-042-Q1-K1-C12
aacaaaatcagttgcttcacaatggcctctacaaccatggctctttcttccccatcattcgccggtaaggcagtgaagttctccccttccacccctgaaatccggggaactggccgtgtttccatgaggaaaaccaccaagcctgttccttctggtagcccatggtacggtcctgaccgagttttgtacttgggtccactttccggtgagccaccatcttacttgaccggtgagttccctggtgactatggttgggacactgctggactctcagctgatcccgagacctttgctaggaaccgtgagctcgaagtcattcactgcagatgggccatgttgngagcttttggtgtgttttccctgagctgt

SEQ ID NO: 39609 - DNA, 443 bp, Gossypium hirsutum
  Clone ID: LIB3165-042-Q1-K1-C2
atagtggcgggtttttcaagcaaaataacaactggagttaagctctctcactgagaaaaaactgataagagtgaagaattggcaatcaacatggagaacggatatatcaacccggcaccaagtccacttaggaaaatcatcacggttgcatccattgctgccggcatccagtttgggtgggctctgcagctgtctctcctgacaccctacgtccagacccttggtgtaccccacgcttgggctgctttcatttggctttgcggtcccatttctggccttctggttcaacccatcgtgggatacaacagtgaccgttgcacctctcggttcggccgacgccgaccctttattgtcattggagctctctctgtctccatagctgtcttcctcatcggtttcgccaaagacattggccaccatgcgggagattccttgaagagaac

SEQ ID NO: 39610 - DNA, 413 bp, Gossypium hirsutum
  Clone ID: LIB3165-042-Q1-K1-C3
agcagccaacatggcctcattagcagcctccaccgctgccgcctcccttggcgtctctgaaatgcttggtaaccctctgaatttcagtggtggagctaggtcatcggctccaacaccatccaactcatccactttcaagaccgttgctcttttctccaagaagaaggccgctcctccaaagcccaaggctgctgctgtcgccccggccgatgaagagctggctaagtggtacggtccggacagaaggattttcttgcctgaaggtctgttagacagatcggagatcccagagtacttgaacggagaagttcccggagactatggatacgatccgtttggtctgagcaagaagccagaagactttgcaaaatatcaagcatatgagttgatacacgcaaggtgggcaatgcttg

SEQ ID NO: 39611 - DNA, 438 bp, Gossypium hirsutum
  unsure (1)..(438): unsure at all n locations; Clone ID: LIB3165-042-Q1-K1-C4
gaagtttttctcttcttctctgaaattcccttgctatcgttctctggaagaaatttttttgagatggcccgtacgaagcaaactgctcgtaaatccaccggcggcaaggctccaaggaagcagcttgccactaaggctgctcgcaagtcggcaccgacaaccggaggcgtgaaaaagcctcaccgatatcgccctggaactgtagctctgcgtgaaatccggaagtaccagaaaagtactgaactcctcatcaggaaactgcctttccaaaggctcgttcgtgaaattgcccaagactttaagaccgatctgcgtttccagagccatgctgttttggcgttgcaagaggcggcagaggcataccttgttggattgttcgaagataccaacctgtgcgccattcatgctaagcgtgttacaatcatgcncaaggacatt

SEQ ID NO: 39612 - DNA, 353 bp, Gossypium hirsutum
  Clone ID: LIB3165-042-Q1-K1-C6
cccacgcgtccgatagttcgtaacaatggcggtctcacttcaagctgcagctaccctgatgcaacgcaatcaaggttgctgcaccatcaaggaccaatgtgccgctcaggtcctcccagagcgtttctaaggccttcggtttggagcctgttggtgctaggcttacctgctctttgcaaactgacctcaaggacttggctctgaagtgtgttgatgctaccaagctcgctggtttcgctcttgctacatctgctcttgttgtctcgggagcaagcgctgaaggagtttcaaagcggctaacctacgctgaaatccaaagcaagacatacatggaagtcaaaggaacaggaact

SEQ ID NO: 39613 - DNA, 442 bp, Gossypium hirsutum
  Clone ID: LIB3165-042-Q1-K1-C7
cccacgcgtccgcccacgcgtccgcccacgcgtccgcggacgcgtgggtttagctatagcatacactactagtacccactactagcaatggcttcctcaatgatctcatcggctaccattgccactgcctctccggcacaggctaacatggtcgctcctttcaccggcctcaagtctgcctctgctttcccagtcaccaggaaggccaacaacgacattacttctctcgcaagcaatggcggcagagtgcaatgcatgcaggtgtggcctcctactggaaagaagaagttcgagactctctcatacctccccgatcttacacccgtgcagttggctaaagaagtggattaccttcttcgctcaaaatgggttccttgcttggaattcgaattagaggagggattcgtgcaccgtaaatactcgagcctacccacgtactacg

SEQ ID NO: 39614 - DNA, 384 bp, Gossypium hirsutum
  Clone ID: LIB3165-042-Q1-K1-C8
cccgccccgactcccctggcatcaacagcacaattctaaacccaaaaacataaaaaaatggcagcaagtgtagcaacaatggcgatgctcaatgcaaaatgcctaagcatcagctcaactaagatgagcagcccaacaaagccaaccccaaagcccttctcccttctctccatgcagaacctccccaaaggcctcaccatctcaaaaccagccaacaactcaaacctaccttcttcactcgctggcagcgccattgctggagctatcttctcaaccttaagttcatgtgaccccgccttagctgcacaacagattgctgaaatagctgaaggagacacaccggggctaactctattgcttcccataatcccagcgatcgcttgg

SEQ ID NO: 39615 - DNA, 250 bp, Gossypium hirsutum
  Clone ID: LIB3165-042-Q1-K1-D1
gtatatgatgctagaagagtcagaaaagctaccacagggatgactggctacgtggcagtcaaccgtacatacaaacgacggttactcatacttggacgtcgggtatccctattattgggtaccaccaataactacgtgtactacatgttcacgccacagtggggaacgagaagctctgattacaccgtgatgagacgggtttataggaccatactgatcgccttatagaaaatgtaattcaacctattac

SEQ ID NO: 39616 - DNA, 388 bp, Gossypium hirsutum
  Clone ID: LIB3165-042-Q1-K1-D10
ctcaatcgactatccgagtctataaaatttgtccatgaaatgggagcagcagctgaaaaactcaatgaaggaacagtaacttctactaggttgaacagcctggtgcaacaggcatgggcgtcgattgttaagacataggtgatgatccaactccaaagaactgcatcgtttttccaaaagctagattagggttttgaagaaatataagcatggcaagtgtagaaccagcagttttgctatagttgcatattttgaaatctcatgtaaaacaagaactataaaaaggtaacagagaaattaaaattatcccgagtcagaatctgtataacagattatatggtatatgaacaatagtttacatatgaaatgaaccctttcttctagaacc

SEQ ID NO: 39617 - DNA, 442 bp, Gossypium hirsutum
  Clone ID: LIB3165-042-Q1-K1-D2
aggggagtagatacaggcagcaatgagaaggagcttagtatatactccaagacagaattccggttgggacaccacgtcccaagactaccaagctcatctttcccgaatggaaagatcagccaccatgatccctggtgcccctcagtaccccgatgtccacaaggccttcaacaacaaggttgagtttccggaagaagatcagtgcactgagcggtccccaacggcaaactcccgaaagaaggttcaggtggttgagcatgcagagaccgttgatgaagccacccttgattctcaagctgatagctacatccagcagaaacacaaagcctttgaactgtgcaaatggaagaccttcaaaatgcactagagtttgagacttttggagtaagcatgtcgatcatgatttaatgacaggccacgtaacctaaatatatgaagtatt

SEQ ID NO: 39618 - DNA, 344 bp, Gossypium hirsutum
  Clone ID: LIB3165-042-Q1-K1-D3
ggtcaggtaactgagtagataggatcacaaaacactgctgcaaagggatgaacacagtggaaggtttagtgaatcaaatccagggactatcaaccactgcctccgatgttttatcgctgcaaaatttgcttaaacaagctgatgactcgctccatgccgagtccactcggttgtttccttttctcgaccaactcgacccttccaagcactctctgggttacctctatttcctggaggcatgcactgctggtccagttacaaaagagcaagctggttcatatgtgttaatgattgccagatttattacttcatgcattgctgagcaaattcgattggcgcctgat

SEQ ID NO: 39619 - DNA, 421 bp, Gossypium hirsutum
  Clone ID: LIB3165-042-Q1-K1-D5
cccacgcgtccgcattgttccaagtttgttgtaaaccaagctagaaccagcagccaacatggcctcattagcagcctccaccgctgccgcctcccttggcgtctctgaaatgctcggtaaccctctgaatttcagtggtggagctaggtcatcggctccaacaccatccaactcatccattttcaagaccgttgctcttttctccaagaagaaggccgctcctccaaagcccaaggctgctgctgtcgccccggccgatgaagagctggctaagtggtacggtccggacagaaggattttcttgcctgaaggtctgttagacagatcggagatcccagagtacttgaaacggagaagttcccggagactatggatacgatccgtttggtctgagcaagaagccagaagacttgcaaaatat

SEQ ID NO: 39620 - DNA, 393 bp, Gossypium hirsutum
  unsure (1)..(393): unsure at all n locations; Clone ID: LIB3165-042-Q1-K1-D6
aaaaaaaccctagcaaaaaacactatacgatctatgaacagaagctgaaaaaataagcatcaaataagaaattaacccacagttctaaagaacccccatcaaatgatttccgatcctaagctgatactatatgcttgcattgcaaaaggacccacacttgtagctgaattcactcgcaaagaagctgtggggatcgagccattagcaagggcatgcatcgagaaagcccctccttaccattcaatgttctctcatacagtttcccaaaggtcctataccttcttaatcgatgacccttttgtttatttcatcatatcccatgaagatctcgacaaatctgagtcgttttggttcttgaatcgctttgaaagttgcttntggacgattttctac

SEQ ID NO: 39621 - DNA, 279 bp, Gossypium hirsutum
  Clone ID: LIB3165-042-Q1-K1-D7
cccacgcgtccggtcgcccaacaaaaagcccaataacatcgcctaacgttgatcaatgcccactcattcatatcatcaatttccaccaactttcctcaaccaatcgccgccagctgacaaattaatcaacacccaatcccatgttggccattcaatgaccatcatcaaacacccaacatcgaccacccttagattcctttcctccatcaacagccgtagatttcaatacccacggcggcgatttcttctcgtcaacggttccgttcgattcaaacccat

SEQ ID NO: 39622 - DNA, 414 bp, Gossypium hirsutum
  unsure (1)..(414): unsure at all n locations; Clone ID: LIB3165-042-Q1-K1-D8
attttcatcacccatcaagcttttcatcaatggcttcccttcaacaagcttcaatctctctgtcaacccaagcttctttcatcttctcaacaccccagatcccttccctctctcaacctctctttttcagccactttcccttccctcaaactctgcaccactcgccctcttcatggcggtgccaaaatgtcagcctccgccgcttccagctacgccaccgctttagccgatgtagccaagtccaacaacacccttgatgccaccagctccgacgttgaaaaggtcgagaaaatcttctccgacccacaagtcctccagttcttcaccaaccccaccattgatgtcctcaaaaaacgtcaggttttggatgagatttagctcctncgagcttcagccgcacacggcgaatttttt

SEQ ID NO: 39623 - DNA, 365 bp, Gossypium hirsutum
  Clone ID: LIB3165-042-Q1-K1-D9
tatctctctaagctcccaatatggccaattcccaccaaccgtttgttgcactcatcgtcggcgtcaccggcatggcggggttgagcctagctgaagccttgaagagccccaatgccctcggcggtccttggaaagtttatggctctgcttcacgtcccataccaacttggttcccttcctcgcttctcgataaatacatcgcttttgatgccaccgacgccggaaacaccgctgatacgctcactccaatctccagcgaagtcacccatgttttctgggtggcaatccaagttcgtgaaagtgaacaagtaactgttacagttaacgcaactatgttatccaacgttctcgatgttttgaagagc

SEQ ID NO: 39624 - DNA, 372 bp, Gossypium hirsutum
  Clone ID: LIB3165-042-Q1-K1-E1
gtgaaagagttggtgtcgatggatccaaagcaactggtgcctttattttgacagctagtcataaccctggcggtcctcatgaggattttggaattaaatacaacatggaaaatggtggacctgctccagaggctatcactgataagatctttgagaacacaaaaacaataacagaatacttgattgctgaagatctaccaaatatagacattagtacaattggtgttgcaaacttctcggggcctgaaggacagtttgatgttgaggtttttgattcagcaagtgactatgtgaaactgatgaagtcaatttttgactttgagcttattcgcaagctgctttcctttttcgaagtttacattctgctatgat

SEQ ID NO: 39625 - DNA, 432 bp, Gossypium hirsutum
  Clone ID: LIB3165-042-Q1-K1-E10
attgacccttatttcctgccttagtttcattgaaggcgggactctcagactactctttcggaccagctccaccatcacccccaaaaaacaaagcaaattgtagaagatggcaacacaagcacttgtatcatcgtctcttacctactcagtggagactgcaaggcagattcttggagctaaacgacaaattgggccttcaaggaaaggatcctttgttgttaaggcagcttcgactccacccgttaagcaaggagctgatagacctttatggtttgcatctaaacaaagcctttcatacttggatggcagccttccaggtgattatggatttgaccccttgggactctcagaccctgaaggtccaggagggttcatcgagcctaaatggctagcctacggtgagatcatcaacgggcgttatgctatgttggg

SEQ ID NO: 39626 - DNA, 433 bp, Gossypium hirsutum
  Clone ID: LIB3165-042-Q1-K1-E12
tgagttcaactattgaatcctttgtttatgcctcctgggtgcagcttactttgttgcaggcgccgatataggaaaattcaccatgaaaactgttgatgacattaggaccttgaataagtcagttcattttaggcctgcctgcaatttctataacatgaacgagcttgcagctttgtgggaaaggaaaatccggcgaacactccctcgagttaccgtcactgaggaagaccttctctcggctgcggcagagaatattatcccacagagtgttgttgcatcattcacccatgacatcttcataaagggttgtcaaatcaacttcccaatagaaggcccgaatgaaaccgaagcctgcagtctgtacccgaatgagccattccgaacattggatgactgcttcaacgacttcttagcaaagatgaaggatgaaaac

SEQ ID NO: 39627 - DNA, 429 bp, Gossypium hirsutum
  Clone ID: LIB3165-042-Q1-K1-E2
cttttgtataactgtagcatatagtactagtaagcagtaatagcaatggcctcctccatgatctcatcggcaaccattgccaccgtgaactgctcctccccggcacaggccaacatggtggcccccttcaccggcctcaagtctgcctctgctttcccagtcactaggaaggccaacaacgacatcacttctcttgcaagcaatggtgggagagtgcaatgcatgcaggtgtggcctcctcttgggaagaagaagttcgagacactctcatacctccccgatcttacacccgtacagttggctaaggaagtagattaccttcttcgctctaaatggattccttgcttggaattcgaattagaggagggattcgtgcaccgtaagtactcgagcttacccacgtactacgatggacgctactggaccatg

SEQ ID NO: 39628 - DNA, 388 bp, Gossypium hirsutum
  Clone ID: LIB3165-042-Q1-K1-E3
cccacgcgtccgcccacgcgtccgttttaagacaagaacaaagtggagattttataacacaaaaatagaggatgcaaatccacttaaaacacaaaaggaaaacaacattcaattaagacacaaaggggggatttcctttgtttgtgcccaatatagatttttttcttcccttagagcttaatttcccatttagaaagctcctctcttgatagcatcgtcattagcatttccaaaggcagcttcactcaaatatttgtcagccaattgaaccctcttcacattctcttgctcagcaacaagcatgtatccatattccaacagcttctcaatggtcatcttcggttgctcgaaaagatggtggccccttccctcgagttcacgagctttt

SEQ ID NO: 39629 - DNA, 297 bp, Gossypium hirsutum
  Clone ID: LIB3165-042-Q1-K1-E4
gtttccttcaaaggcctctctgttttcatctctgtttcaattacccatcttcgccaaacaaacaaaaaaaagcaaaaatggcaggtgcaaggagggaaatgatcaacggcgggaatatctcacggaggatcgcgggccggccgataccgaggaggggacaagtgaaagttgctatagtggcggggattgcccattcttttgcttctattttcactgcaagcagtcgcagagcatcttcttctcgtttgtcttaatttataataatgtaaatcgattttttgatgattttgtaagggg

SEQ ID NO: 39630 - DNA, 392 bp, Gossypium hirsutum
  unsure (1)..(392): unsure at all n locations; Clone ID: LIB3165-042-Q1-K1-E6
cccacgcgtccgcccacgcgtccgctcgttacaaacaaaccattactcctcactctgacttagtcgctttgacaatatccttaaaaaaaaaaatagactatagctntatcactcttatatatatgtatatgtaatattaaaacaataacaaaaacctccattaaacccatctctctcttctctttatataatatttctcttggtttttcgttccattttcacttctattatggacccattttcttttttgtcctttcttttccatgctctgtgaaaggtagcagctttgacattagaatcaacttgaagaaccattttttttaactcgggggttttttttggtgtgttttttgggtaaaaaaaatgggtagtaaatggagggagagtaagtt

SEQ ID NO: 39631 - DNA, 349 bp, Gossypium hirsutum
  Clone ID: LIB3165-042-Q1-K1-E7
ccgaaacagaattggtgacttgctatcctcttgcctagcgggcaaggatttacctccgtggaaaagatgatgcattcggatccgcatgaaagcccaactccattgcattgccagaatccatgttgtgtatttggaagaggatgaccttcttgcttctgatcatggtacaatcctcttcccgctgagccccctttctcctaggtccacagagacaaaatggaatgttggactaggactggcgccaacagttaatcacggcagaaaggactcactgagccgggatcactaactaatactaatctaatctaactgatactaatctaatactaatagaatactaatctaatac

SEQ ID NO: 39632 - DNA, 375 bp, Gossypium hirsutum
  Clone ID: LIB3165-042-Q1-K1-E8
cccacgcgtccggtgagactcttttgtataactgtagcatatagtactagtaagcagtaatagcaatggcctcctccatgatctcatcggcaaccattgccaccgtgaactgctcctccccggcacaggccaacatggtggcccccttcaccggcctcaagtctgcctctgctttcccagtcactaggaaggccaacaacgacatcacttctcttgcaagcaatggtgggagagtgcaatgcatgcaggtgtggcctcctcttgggaagaagaagttcgagacactctcatacctccccgatcttacacccgtacagttggctaaggaagtagattaccttcttcgctctaaatggattccttgcttggaattcg

SEQ ID NO: 39633 - DNA, 399 bp, Gossypium hirsutum
  Clone ID: LIB3165-042-Q1-K1-E9
cccacgcgtccgcccacgcgtccgcttcttcaaattacttaccactgacgacgccatttgatcatgaatgggtataaggatgacagttacagctgctatttccatcctaaacaacaggttatcggggtttgccctttgtgcttaaatgataggcttcttctcctagcttcaaagcaaccccgacactcttcttcttcatcctcatcttctaccagaggcggccatggatttattcaaggtttttcactaaagaaaccacccatcaacaagctccctaagatctttgctttaggctcattgctcaatcgtcttgagttcaagcattggaaacctggaaattctgatgatgatgttcttgatgtttcaaccagtcaagaagactcctttatctcgatcaag

SEQ ID NO: 39634 - DNA, 434 bp, Gossypium hirsutum
  Clone ID: LIB3165-042-Q1-K1-F10
cccacgcgtccgcccacgcgtccggagactcttttgtatacctttagcatatagtaatagtaagcagtaatagcaatggcctcctccatgatctcatcggcaaccattgccaccgtgaaccgctcctccccggcacaggccaacatggtggcccccttcaccggcctcaaatctgcctctgctttcccagtcaccaggaaggccaacaacgacatcacttctcttgcaagcaacggtgggagagtgcaatgcatgcaggtgtggccgcctcttgggaagaagaagttcgagactctctcatacctgcccgatcttactcccgtacagttggctaaggaagtagattaccttcttcgctctaaatggattccttgcttggaattcgaattagaggagggattcgtgcaccgtaagtactcgagcttacccacgta

SEQ ID NO: 39635 - DNA, 376 bp, Gossypium hirsutum
  Clone ID: LIB3165-042-Q1-K1-F11
attggcatctctgctctccgctctaatgtccccgccattgacgtcgttgaacttgttgtgagagaactggaaacagacccgctgttcaactccgggcgtgggtctgctcttacggagaaaggaacagtggaaatggaagccagcattatggacgcattcttatttgaccaccccgggagccgaagagtttgccaagaaacagggcgtggagatggtggacaatgattacttcatcacagaagataacgtggggatgcttaagttggctaaagaagcaaactcaatcctgtttgattaccgtatcccgacagttggcacctgcggtgcagctgtggacagccatttgcagatgaacgggcttccgatcagcgtctac

SEQ ID NO: 39636 - DNA, 404 bp, Gossypium hirsutum
  Clone ID: LIB3165-042-Q1-K1-F12
gtcccgaaggcagagataaaagaaatggcggaaacatgcgacttcctcgcaacaaagagatatgcagtggtgagtggaggaaacaagggaattggattggaaatatgtaagcagttggcttccaaaggagtcatggtggtgttaactgctagagatgagaaaagggggtttcaagctcttgacaagctcaaggaatctggcctttctcataatctggttttccaccagctcgatgtcgcaaaccctattagcgttgcttctcttgctattttcctcaacacccaattcgggaaacttgatatcttaccactaggggaagaagtgtggaatgagattattacaagtgaaacttatgatatggtccaagattgcctaaaaaccaattactatggtatgaaaagcat

SEQ ID NO: 39637 - DNA, 439 bp, Gossypium hirsutum
  Clone ID: LIB3165-042-Q1-K1-F4
gcccggatttcccgggtctagctatagcatacactactagtacccactactagcaatggcttcctcaatgatctcatcggctaccattgccactgcctctccggcacaggctaacatggtcgctcctttcaccggtctcaagtctgcctctgctttcccagtcaccaggaaggccaacaacgacattacttctctcgcaagcaatggcggtagagtgcaatgcatgcaggtgtggcctcctactgggaagaagaagtttgagactctctcatacctccccgatcttacacccgtgcagttggctaaggaagtagattaccttcttcgctcaaaatgggttccttgcttggaattcgaattggaggagggattcgtgcaccgtaagtactcgagcttacccacgtactacgatggacgctactggaccatgtggaagctg

SEQ ID NO: 39638 - DNA, 434 bp, Gossypium hirsutum
  Clone ID: LIB3165-042-Q1-K1-F5
atttctgggaatgctgacgataactttgacggcttggatcccacagctccagcctccacaatgcccagctgagcagcaattacatggtcactgcattagtccaagcaaggctcaactgggagtactgctaacagggttaggcctcttatcaattggaactggtgggataagaccctgcagcattccctttgggattgatcagtttgatccaaccactgaagaaggggcgaaagggatcaacagcttcttcaattggtactacaccacattcacattggtcatactgctcactttaacccttgtggtttatattcaagactcagtgagctgggttctaggccttggaatccccactctcctcatggctgcttcaattgttttgtttctcatcggaaccagaattatgtgcatgtgaagccccaaagaagcatttt

SEQ ID NO: 39639 - DNA, 428 bp, Gossypium hirsutum
  unsure (1)..(428): unsure at all n locations; Clone ID: LIB3165-042-Q1-K1-F6
cttcacctctttcttctccagatctccaccacaagtctcttgtcttcaggggcatgtttccagttgctgtaaacccgcagacatgttcaacagctgttgtccgcagaaagttgagcttctgtacaaaggcagttcttggaggaaatgtgcatgtaacaggagttcctacttctgtccctgtaagagtagcacacgagcttcatcaagctgggcatcgatatttggatgttaggactcctgaagagttcagtgcagggcatgtccctggggccattaacatcccttacatgtacaaagttggatcaggaatggcaaaaaaccccagttttgtagctgaagtatcatcacatttaggaaaatatgatgaaattattgttggatgtcaacttnggaaaacgtctctgatggcagncaccgagcttttagct

SEQ ID NO: 39640 - DNA, 383 bp, Gossypium hirsutum
  Clone ID: LIB3165-042-Q1-K1-F8
aacccagaaccttcttccgtgtttttctcctctcccataaatgaagttcttctctgaattaggttcctgttatcgcccatccacatcccatcgagatgaggataaggcttctctccgcaccacccgccatgcagaacgtactattaccaagtcaggcggtggctctgcctcctcaccaagtcgacattggagaccggttcttcaagctatcagggaagacggcaaggttacggaaaagagaattcccaataaaaacaaatccaaagggaaatatacgtctaagccttacagagttagccatgatgagaattcctactactccaggaataataacagtgagccgatggttatacctgcgttctctccgacacccttcatgtttt

SEQ ID NO: 39641 - DNA, 410 bp, Gossypium hirsutum
  Clone ID: LIB3165-042-Q1-K1-F9
gttgagactttgaactgagcttcgctgaattttcgtgatcgtcgagaaagaaaatgatgggaaggaaattcttcgtcggcggaaattggaaatgcaatggaaccactgaggaagtgaataagattgtgagtactttgaatgctggagaggtgccttctccggatgttgttgaggttgtggttagccctccatttttgttccttcctttggtaaaaacttcactgagacctgagttccaagtcgctgcacaaaattgttgggtcaagaaaggaggtgctttcactggtgaagttagtgcggagatgcttgtcaatttgagcattccttgggttattattggtcattctgagaggagacttattttgatggagtcaaatgagttcgttgccgataaggttgcttatgcactt

SEQ ID NO: 39642 - DNA, 392 bp, Gossypium hirsutum
  Clone ID: LIB3165-042-Q1-K1-G1
cccacgcgtccgcccacgcgtccgctcaaattcagataacagtttcacagctgttttcttcactctctctctcagccatggctgcagccatctccaccgtcgccgacgctgccgccgccaaccgagctctgggagtgtcagacccaacctcagctttcatggggaagaaagtgagctcgagattcaacaacaccaggcaggttccttcgggaagctttaaggtgatggcggccgaaaaagagatagacgaagagacacagaccgaaaaggaccgatggaaagggttggcttacgatatttcggacgaccaacacgacattactcgagggaaagggatggtggattccttgttccaagctgccatgaatgatggaactcactatgctgtcatg

SEQ ID NO: 39643 - DNA, 386 bp, Gossypium hirsutum
  Clone ID: LIB3165-042-Q1-K1-G10
cccacgcgtccgcccacgcgtccgcccacgcgtccgcccacgcgtccgcccacgcgtccgcaacaacgcttgggctctcttccacatcttcgtctttcatcaatggcggagctggagacccacgctccctctcatccattttctctttcagaccccttactaaactcacgaccgcaaagtcttcttcttttactagtagcagagcttcatggcaagagctggtgggagtgctgctgttttcagcagttcctttcacggcggtcaaagccatcgctaatagccctctaggcgaggccctgcagaggcaattgttaaagaggaagaaggaagctcttgcaaattcttccaagttccaggctttagctcagaaggcaagaaatgagagc

SEQ ID NO: 39644 - DNA, 431 bp, Gossypium hirsutum
  Clone ID: LIB3165-042-Q1-K1-G11
cccacgcgtccgcgattcccttcgttgtttcctcaactttcagtgtttatttattattattggttatttttttggtttagtgtgttgcaatggccgaggagccgacaccaaagcgccaaagagaagaaacccagagctcaaacgaagaacatgttgaagaaacaaaacgccataagtcttacaatcacatactctctttgcttgaagtcgaagaggatgagcccagccaagacttgtcccccctaatcaccactttacagcaacagctctcctcggactccgttttggatgcccctttccctctttgtgaaccagcaacaccatcgccctcgaacccagacaaggaaaccgccaccaccgtcctcagcttagaagactgcacatcagcaacttgtccttgaaagaagatgatgatgatgatgataaagtgc

SEQ ID NO: 39645 - DNA, 416 bp, Gossypium hirsutum
  unsure (1)..(416): unsure at all n locations; Clone ID: LIB3165-042-Q1-K1-G2
cccacgcgtccgcccacgcgtccgcccacgcgtacgaattatcagttgttattgtagttgatgttggcaagcaggaaatagtttcttgcacacatatgcctaactgcatttatttattcacttctttaacataaagatgagcaggcagcaggatttagttcttcttcttggcaaggaaaaggccccatctctgctcccctgatgagctgtttatcagctttgccttccatcctccaactatttcatcatagtcttccttagagaagtcagagatgaatgcatccttctctttctccactgggctcaattcacgctgcatagacttgctagaactgatcggttcgatcctctgcaagaatcacatcaaaaccagcatcctcaagcatctgtncatatgatttacatcatgaagatca

SEQ ID NO: 39646 - DNA, 430 bp, Gossypium hirsutum
  Clone ID: LIB3165-042-Q1-K1-G3
cccacgcgtccgcccacgcgtccggttagctttagcatacactactagtacccactactagcaatggcttcctcaatgatctcatcggctaccattgccactgcctctccggcacaggctaacatggtcacccctttcaccggcctcaagtctgcctctgctttcccagtcaccaggaaggccaacaacgacattacttctctcgcaagcaatggcggcagactgcaatgcatgcaggtgtggcctcctactggaaagaagaagttcgagactctctcatacctccccgatcttacacccgtgcagttggctaaggaagtagattaccttcttcgctcaaaatgggttccttgcttggagttcgaattggaggagggattcgtgcaccgtaagtactcgagcttacccacgtactacgatggacgctact

SEQ ID NO: 39647 - DNA, 395 bp, Gossypium hirsutum
  Clone ID: LIB3165-042-Q1-K1-G4
gcctatataaatagatatgttgattccttctttcatgcattctcaaacccagttgaaagcctagagcttagtagcaacccttaggcttcttcttcttcttcttgttcttattattatttttactctctatctcataaaacctaaaaaaaaaaaattaagctttttttgcagcttggaggatagaatagtggcgggtttttcaagcaaaataacaactggagttaagctctctcactgagaaaaaactgataagagtgaagaattggcaatcaacatggagaacggatatatcaacccggcaccaagtccacttaggaaaatcatcacggttgcatccattgctgccggcatccagtttgggtgggctctgcagctgtctctcctgacaccctacg

SEQ ID NO: 39648 - DNA, 425 bp, Gossypium hirsutum
  Clone ID: LIB3165-042-Q1-K1-G6
gggaaacaagtcctacgacgaagccattgaagctctcaagaaacttctcagtgagaaaggagaactgaaagctgaagcagctgcaagggtagatcaaataacagcagagttaaacacagcatcagctgatggcaaaccatctgactcttctgttgagagactgaaagaaggcttcgtttacttcaagaaagaaaaatatgaaaagaatcctgctctgtatggtgagcttgccaagggtcaaagccctaagtatatgattgttgcctgctcggactctagggtctgcccatctcatgtgctggacatgcaacctggtgaagcttttgtggtccgtaatgttgctaacatggtgccaccatatgaccagattaaatatgctggcattggatctgctattgaatatgcagttttgcatctcaaggtac

SEQ ID NO: 39649 - DNA, 403 bp, Gossypium hirsutum
  Clone ID: LIB3165-042-Q1-K1-G7
aaataagcggaggcgctgcccgttctccgcctctaacttctttatacgtctaactcttgttttccgttaaccgaatatgacctgtcgtcctcaacacccatatgtgtaaaaagcactctcattggttggtgtgtatgtaatgaaacaaaagctgtcacattttgtcttgttttcttcccccttccatctttatttcgctgtagaaaaaaaaaatctttcaaaaccttttttcttttttgtccctcgaagcatctctcagctgccaagtacttgcatttcagcttcaattgagaatttccatcaataatcctttaattttcagttaaagcaacatcttttttttgttgaacacagagatggatgtagttcggtttcagttggaatgaagaactttacagacaca

SEQ ID NO: 39650 - DNA, 403 bp, Gossypium hirsutum
  Clone ID: LIB3165-042-Q1-K1-G8
attgacccccctccaaaacgacgccgctctagccaatcggaggccgcatactcgccgtcaatgagctttgatactttcttgattggagctccgatatccgcttttcacaagataatggagcaaaaagcttggctaattttggtgatttttacatgtttaattgcatcttcttgtgggagagaattgaaggtcgaccacaagcataaactccccgtctacaatcatactcttgccaccattttagtagaatacgcttccgcggtgtacatttcggatttgacggaactttttacttggacttgtgaaagatgtaatggtttgaccaagggatttgaagttattgagcttgttgatgatattgagaactgtttacaggcatttgtcggagtggcgaagaatctta

SEQ ID NO: 39651 - DNA, 433 bp, Gossypium hirsutum
  Clone ID: LIB3165-042-Q1-K1-H1
caccattctgtcattagccctcaaccatacgccaaaatatggcagccacttttgcaagcccagcaaccgtcgttggcctcggtggcaccgccacctctatgtcatccccgccgatgaaaacccgcctctcttcagggtttttgaaatctggggtgacggctaggaaccctttgaggctggctggtgcttgtgggggcaagtttacttgcttcgagagagactggctacgaagggactttaacgtgataggatttggactgattgggtggatagcaccatctagcataccggccatcgatgggaagagcttgactggccttttctttgaaagcattggaactgagctcgctcacttccctacacctccgcctcttacctctcaattcttgttggggttggtattatggcacctaggactgttcatcactcttac

SEQ ID NO: 39652 - DNA, 255 bp, Gossypium hirsutum
  Clone ID: LIB3165-042-Q1-K1-H10
cccacgcgtccgtaatgagtggggttatagttctcgagtgatcgacttggttcgacacatggcttcttgctaagtgagtgaagttttagcttctaacttcagctttggcaagcaatttagaaactagaagagatattcctgtcttttgggtgttggtcatgcagataatagaaattgtatgcaacatttttttttcgtgtgaacactcttcctttgagtggattggaagggtttctattttgactcccttcatcc

SEQ ID NO: 39653 - DNA, 304 bp, Gossypium hirsutum
  Clone ID: LIB3165-042-Q1-K1-H11
cccacgcgtccgcccacgcgtccgcccacgcgtccggttacgagtccctccaccctagattgttataattgtgcttcccccctgcaaaggctttattcttcattcgcttcgttgaatttttatcttctttttatctgaacggagtttggtaatccagttttcgtcttcggttgattcaggaaatcttagtttttgaattgcgtgactgaatgatctaatggagtctaaaggtgggaaaaagaagtctagtagtagtaagtctttattctacgaagctcctctcggttacagcattgaagacgtg

SEQ ID NO: 39654 - DNA, 325 bp, Gossypium hirsutum
  Clone ID: LIB3165-042-Q1-K1-H12
aagagctatggctaaggacattgaggttggtggtgagttccaggccaagggctgcgcatgatcctccacccgctccattggtcgacgctcaggagttagccaagtggtctttttacagggctgtcatagctgagttcattgccactctcctctttctctacatcactgtcttgactgtgatcggttacaagacccagaccgaccctgctaagggcggtgaagattgtggcggcgttggcattctcggcattgcttgggcttttggtggcatgatctttatccttggttactgcactgccggtatctctgggggacacatcaaccc

SEQ ID NO: 39655 - DNA, 412 bp, Gossypium hirsutum
  Clone ID: LIB3165-042-Q1-K1-H2
ctcttttgtataactgtagcatatagtactagtaagcagtaatagcaatggcctcctccatgatctcatcggcaaccattgccaccgtgaactgctcctccccggcacaggccaacatggtggcccccttcaccggcctcaagtctgcctctgctttcccagtcactaggaaggccaacaacgacatcacttctcttgcaagcaatggtgggagagtgcaatgcatgcaggtgtggcctcctcttgggaagaagaagttcgagacactctcatacctccccgatcttacacccgtacagttggctaaggaagtagattaccttcttcgctctaaatggattccttgcttggaattcgaattagaagagggattcgtgcaccgtaagtactcgagcttacccacgtactacga

SEQ ID NO: 39656 - DNA, 375 bp, Gossypium hirsutum
  Clone ID: LIB3165-042-Q1-K1-H3
gttttggccaggcctgggattatgtcattgcagaagcagggcaccaaggaattaggctgcgtgtgagcttggtaaataacttgcaaccatatggcggaaagacccagtatgtcaactgggcatggcaagaaggcgttggtttgagctcttctaatgattccttcttctttgatccatctatccgcaaatatttcaagaattatgtcctgactgtccttaccaggaagaacactatcactggaattcaatatcggaatgatcccaccatctttgcttgggagttgataaatgaaccccgtgcatgactgatccttctgggatactcttcaagattggtagaagagatgtcggctttcataaaatcaatcgacaaaa

SEQ ID NO: 39657 - DNA, 426 bp, Gossypium hirsutum
  unsure (1)..(426): unsure at all n locations; Clone ID: LIB3165-042-Q1-K1-H4
cccacgcgtncgagaaaatggcatttaattcacttcctttcttttaatcccaccttctctactccgaattttctctagaaccatacttcgagatggcttttctcatgccttcacctgaaatttccaccgcctctgcaaaatttttctctaaccctaccccccgccctaaatttctcaagagctgcgcgatttcgaagaacgacgacgagaaagtttggtcaaggaccaacgctagggtcggtgttaaagatgccggcagtacggtttcgtgtttgagccaaaacttgaggttgtacgtacaattttcggctccggtgaagcgaggatcgaagcccagcaaagaggaagaggagaagcaggattattacgtgaatatgggttacgctattcggaccttgggagaggagtttccggacatcttttaca

SEQ ID NO: 39658 - DNA, 352 bp, Gossypium hirsutum
  Clone ID: LIB3165-042-Q1-K1-H6
atgtggttctccatgctgatgctatccacagaggtggtggtcaaatcattccgactggcaggagggttttctatgcttctcagcttacggccaaaccaaggcttctggagcctgtttacttggttgagattcaagcccctgagcaggcacttggtggtatttacagtgttcttaaccagaagcgtggacatgtgtttgaggagatgcagaggcctggtactccactttacaacatcaaggcctaccttccagttattgagtcttttggattctccagcactctgagggctgcaacctccggacaggctttcccacaatgtgtgtttgatcactgggatatgatgtcatcaga

SEQ ID NO: 39659 - DNA, 367 bp, Gossypium hirsutum
  Clone ID: LIB3165-042-Q1-K1-H7
gtctgtctctctgttttactccacaaccactattactaccattatggcttcggctactggttgtgtagccaaacccaaccttcagattcaagcaaaaggaaagggtgttggttttgcagatttctcaagcctacacaacttctctactagcctttcctttgccaggaaaacctctgatgacttccattcactcgttgcttttcagacatctgctctaggaagcaataatggcgggtacacgaaagggatggcagaggcaaagcttaaggtggctataaatgggtttggtaggattggcaggaacttcttaaggtgctggcatggccgcaaagactccccacttgatgtcattggcatcaatgacact

SEQ ID NO: 39660 - DNA, 276 bp, Gossypium hirsutum
  Clone ID: LIB3165-042-Q1-K1-H8
atacacacactactatatcccactactagcaatggctgactaacagatctcatcggcggcgcagggacactgcctttacggaacaggctaacatggacgctcattccaccgaccttaagtctgactatgctcatccagccaccatgaaggccaacaacgacattactactatcgtaagccctggcgatagaatgcaaagcatgcccgagtagcctcctactggaaagaagaagacccagactctctcatactatactggatcttacacccatgcag

SEQ ID NO: 39661 - DNA, 367 bp, Gossypium hirsutum
  Clone ID: LIB3165-042-Q1-K1-H9
atctactcaacgtgagccacttgttgtgggaaagccctcaacttttatgatggactacctcgcaaacaaatttggcatcctcaagtcacagatatgcatggttggggacagattagatactgacattctgtttgggcaaaacggtggctgcaaaactcttcttgttctctcaggcgtgacaagtttgtcaatgcttcaaagccccagcaattccattcaacctgatttctacaccaataagatctcagattttctttctatcaaggctgcaacactgtgatgatgcaaggactttgttttctcttgcattactagtttgccaactactaccatcagatatagaagccctttgcaaattctattcttt

SEQ ID NO: 39662 - DNA, 433 bp, Gossypium hirsutum
  Clone ID: LIB3165-043-Q1-K1-A10
cccacgcgtccgaaaaaaaaaacatgtctgggtttgaagcagacaaccatggcgtctccatttcagttgcagtcgacaataaaactcttgcagattttgaggttttgaagaaacctaaaaggaacaagttcgcttttgcttgtgccattcttgcttctttagcttctatcttgcttggatatgatattggggtgatgagtggggctattctttacataaaagacgacctgaaaattagcgacgttcaagttgaaatcctcgttggaattctaaacttgtattgtctcatcggagcatacgtcgccggtaggacttccgactggataggtcgccgttacaccatcgtcgtggccgcctccatcttcttcgtgggagctttgctcatggggttcgcaacgaactacactttcctcatggtcggccgcttcgtcac

SEQ ID NO: 39663 - DNA, 425 bp, Gossypium hirsutum
  Clone ID: LIB3165-043-Q1-K1-A11
gaaaaatggcttctgcttccgctactctcctcaagtcttcacctattatcgacaagtccgagtggattaagggccaaaacctccgccacccttcggtttgttttgtacggtcacaccctacatcggtcgcctttaccgtccgtgctagttcatatgccgatgagcttgttaagaccgcgaaaactgttgcatctccaggtcgtggtattttggccatggatgaatcaaatgctacatgtgggaagcggcttgcctcgattggtctcgagaataccgaggcaaaccggcaagcttaccgtacccttctcgtgtctgcccctggcctcggtaactacatctcgggagctatccttttcgaggagactctctaccaatctaccatcgatgggaaaaagatggtcgatgttcttgttgagcaaaatatt

SEQ ID NO: 39664 - DNA, 295 bp, Gossypium hirsutum
  Clone ID: LIB3165-043-Q1-K1-A12
aagacaagaacaaagtggagattttataacacaaaaatagaggatgcaaatccacttaaaacacaaaaggaaaacaacattcaattaagacacaaaggggggatttcctttgtttgtgcccaatatagatttttttcttcccttagagcttaatttcccatttagaaagctcctctcttgatagcatcgtcattagcatttccaagggcagcttcactcaaatatttgtcagccaattgaacccttttcacattctcttgctcagcaacaagcatgtatccatattccaacagct

SEQ ID NO: 39665 - DNA, 236 bp, Gossypium hirsutum
  Clone ID: LIB3165-043-Q1-K1-A2
agtcacatgagtacttccgagaaatactagtcttgcaatcatgttcttagtcctgccctgttgttcttccttttgtctttgcatgattgagctttttgcacgcgagttaatggttcattagataaaagatctgtagtcatctcttgttgctcggaatctgtatttttactgatcaacccatttgtatgttggtaatgtataagaccattttaggcatttaaagcttgtttacaacc

SEQ ID NO: 39666 - DNA, 435 bp, Gossypium hirsutum
  Clone ID: LIB3165-043-Q1-K1-A3
cccacgcgtccgcccacgcgtccgctcgaggatcttccctgatatgcttgtcctcaagaactcaaaagtctgaaaccgattgctcggatgcatctagtgcacagattgccgaaggcgaagttggtcattcaagcatgcatgggagaactatacattcaagtcccggcttggctgaagcttgtagattcgcttgtaatgatgcaaaatttgtaaatgaaagggctcgtaacgacattgttttgctttctcgtggaataatgaggctggatgctcgtgctcgtcaggatgtcgctattctcgggtcaggatttcttaaactcgatgctagggcaagagaagatacagaaaaaatcgaccgaggtgtgaagaaaaaggccgaacgtcttcaccatattgccactatcttaaaagccaaggccgaatctagattgaaaa

SEQ ID NO: 39667 - DNA, 329 bp, Gossypium hirsutum
  unsure (1)..(329): unsure at all n locations; Clone ID: LIB3165-043-Q1-K1-A6
cccacgcgtccgttcaaaactaactgtctcggatatctttcgtctcgtttatgaaacagtgtaacagacccactaaggtttcagtatcttgaagtaaagtgaagcttttggatttgtttgattagaaggagctcaattttaattaggtgcctttaattngattagcatcgtgtcaatgggaacttcggaggctgttctgcacgttttatcgggggctgtcccctcagttttaagtagtgatatgtgttctagcaattcggattagtttctattctaaatgcacattaagctgtaagaaaaaaggtcaagggtttgcgccttgagtgtct

SEQ ID NO: 39668 - DNA, 434 bp, Gossypium hirsutum
  Clone ID: LIB3165-043-Q1-K1-A7
cccacgcgtccgcatttttgttctcttcaactttattgcataccaaaaaaacttacaacaatggcaacagcctcagttacctacactccacccatgttggctgctgccaccactaaccccaagaagaagaccaacaccaatgtgaattacataacaggcttgaattcttttggtgggttgaaagctcataacaaagtggtctcactaggccaacgtgtatgcaccgagcaatcatttgcaaacgttgttagctcactcaaagctccgacaaagggcaagacaggtaaaagcagcggcggtgcactgtcttcaacctgtaatgctgttggtgagatattcaggattgcagcaatcatgaatggccttgttcttgttggtgttgctgtcggatttgtgctgcttcgaatcgaagcttctgtggaagaggctgagta

SEQ ID NO: 39669 - DNA, 436 bp, Gossypium hirsutum
  Clone ID: LIB3165-043-Q1-K1-A8
gaaaaacgggaagttgaggatgaagaacaagaagaggctttgtcactctgtgatttgcctgtgaatttgattgaagaaaaggaattgaaaaatgaagaaaatggtgaaccatcacaagaagaagatttcaacttcggttcatggcctggccatggtggttcgtttaggtccgagccagaaatgtgtgtagctgatgaagtgttcttcaaaggccaaatcttacctttgcgtcactcagtgagttccgacaccgggttccgttctcatgacagccacaacatgtcccggtccttgtcgaggtcagaatccatggaccatggttcattaagtaggttcacaagtgttagtagcagtagcactagaagcagtagccattactcaacgagtagtactaactcgaaatccggtatgaaaatccgaaacaacttcaacacac

SEQ ID NO: 39670 - DNA, 433 bp, Gossypium hirsutum
  Clone ID: LIB3165-043-Q1-K1-A9
gtgctatctgaattgctatcttttgagttttgaagaagaataacgcagagaaaggttctttattactgttcatcagatttttcaactttagaagatgaggggaagtctttggcatcttggacaatcaattacacgccgtgtagctcaggctgacaagaaggctgcagcacgtcgattctttgcttcagaagctgatctgaaaaagactgttctttataacttccacattgctcatggtgggaagatggtcccattcgccggatggagcatgccgatccagtacaaggactcaattatggactctacggtgaattgcaggcagaatggttcactctttgacgtttctcatatgtgtgggttaagccttaagggaaaggactgtgttccattccttgaaaagctcgtcattgccgatgttgctggactcgcccct

SEQ ID NO: 39671 - DNA, 349 bp, Gossypium hirsutum
  Clone ID: LIB3165-043-Q1-K1-B10
cccacgcatccgctcacccgttcgcttcggtgccagacatacctatcttcggctcgggccgatggaatgcaaaagcgactctgattgcctgtcgagcacgataaaaatgatctcacttactccctatctttatttccccaccacaagcgcctttacttttatagccaagaagctctcaatctgtcccaaaccggcgacgatgccaggttgttgctcttattccagatatggatagcagctgagtgggatgaacggttactgtgatattactacaaagtactacaggagggtcgatggaatacgactgatcgacgacgccgtacgcccggagagttgggtcgcggtgact

SEQ ID NO: 39672 - DNA, 438 bp, Gossypium hirsutum
  Clone ID: LIB3165-043-Q1-K1-B11
attcaggacgccttgcacaatggccaccattacctctgccgatgtcgctatcgcagctgtcaccggccttaaagccggagcaaccgcaggtaaagatagcgccacagacgagggagcagcctctccagtcgcaaggggcagcatcaaggccctcctaaaagacgttggtgacgatgttggggccaactgatgcaagcgtgatccttgtcagcaaagccatggccatgagaagtgtagctcggcagagacaatgggggtctggctctaattaccaaagaattcagcgcacgcccaggggagaagattgagtacaagaacaaggccagattcccacacaatgctgtgttcgatgaggacgaaatcccaagcggagtcgacgtatgcaaaatctacatgcctgaagaagagctactcaatgccaaagacgagacttacgct

SEQ ID NO: 39673 - DNA, 425 bp, Gossypium hirsutum
  Clone ID: LIB3165-043-Q1-K1-B12
atcttcctctccacccttgaaccatgtcggcttttgttggcaagtatgcagaggagttgatcaagaacgccaagtacatcgccacgccaggcaaaggtattttggcggcggacgagagcacaggcaccatcgggaagcgtctctcgagcatcaacgtcgagaacatcgagtccaatcgccaagccctccgcgagctccttttcacctctccaaacgcattatcctgcctctccggtgtcattcttttcgaggaaacactttaccagaaaacctctgacgggaaacccttcgttgaaatcctcgaagagaacaatgtcattccaggtatcaaggtcgataagggcaccgttgagatagccggcaccaatggcgagaccactactcaagggttcgactccctgggtgcgcgttgtcagcaatactat

SEQ ID NO: 39674 - DNA, 431 bp, Gossypium hirsutum
  Clone ID: LIB3165-043-Q1-K1-B2
gaaaaatgttctcccctggaaatttgagagctacatttgataaccccgaatatgacaagttgatcaactattatgtaagagagaaatacacattgaggtacactggtggaatggtacctgatgtcaaccagatcattgttaaagagaaaggaatatttacaaatgtggcctcgccatctgccaaggccaagctgagattgttatttgaggtagcaccattggggttcttgattgagaaagctggtggttacagcagcgatgggcaaaaatcggtgctcgacaaagtgatcgagaacctcgacgataggactcaagtcgcgtacggttcgaagaatgagattatacggttcgaagaaacattatacggatcctcgaggcttaatgcaggggtccctgttggagctactgcttaagcaacaatgtttttactt

SEQ ID NO: 39675 - DNA, 292 bp, Gossypium hirsutum
  unsure (1)..(292): unsure at all n locations; Clone ID: LIB3165-043-Q1-K1-B3
cccacgcgtccgcccacgcgtncgcggttgtggtgcgccctcgttcgttgttccttccgctcccctaccattcggttgggtgggctgttgggcggtgtgcgtgggcgctactactagtacgcaataggcatatgagtggtgttttggttgtgtgtattggcaggctccatgctactcgcatcgaactgtcgagccgcactcctcttcattaattccccttgttgtaatcgaactcaaggggtgcgatcgggatcctgtgctgcgtacctaagccagatggaattatggatgt

SEQ ID NO: 39676 - DNA, 217 bp, Gossypium hirsutum
  Clone ID: LIB3165-043-Q1-K1-B4
cccacgcgtccgaaattatcttctttctcttctcttaccatggatccttacaagtttcgggcttgtaggtcctttgattccccgttctggactaccaattctggggctccagtttggaacaataactcatcacttactgggggagcaagaagtccaattctccttggagactatcatttggtggagaagctagctaatttcgacagagaacgcatac

SEQ ID NO: 39677 - DNA, 263 bp, Gossypium hirsutum
  Clone ID: LIB3165-043-Q1-K1-B7
gcttacggcggatacctactctcaaactaacaactaaagacggtttctgaaacgaatgagctgcccttgagaccaaaatgcactcaaagacttggacatgctattagggaagaacttgcaactgttgctgcttccgtggacacacgttaaacgaccggacaaactgtaacatattatttgccagagtgaaagaacgcaggatctattcctaatgtatcagctagcgatacctgagctaactacaccaaggtcgaacatgatga

SEQ ID NO: 39678 - DNA, 432 bp, Gossypium hirsutum
  Clone ID: LIB3165-043-Q1-K1-B8
aaaacagtgagggagtagtagttcgagttatcgacgacgttttttttcaacacgaaaaaaaatggataacttttacgcaccagggaagaaccatctcttcgttccgggtccggttaacataccggaacccgttattcgagccatgaaccggaacaacgaggattaccgttccccggctattccggcgatgacaaaaacccttctcgaagatgtcaagaagatattcaagactacgaccgggactccttttatgatcccaacaacaggaaccggtgcatgggagagtgcacttactaatacgttatcccccggtgaccgaatcgtatcgttcctcattggacaattcagtcttctttggatcgatcaacaacaacgtctcaaattcaacgtcgacgttgtcgaaagtgagtggggacaaggtgctaacctcga

SEQ ID NO: 39679 - DNA, 428 bp, Gossypium hirsutum
  Clone ID: LIB3165-043-Q1-K1-B9
cccacgcgtccgctcttctcttattcactcctcttccaatggccaccgctttccaccaccactacaatttcacgcccactcccatcctccgccgtcgccggtctcccccgtcgccatcccccattaccctccacctcaacgcccctctttctactaccttcaacttccccactaaacaatgcagcagcagcagcagcagtaggatcacttgcaaagcgacggaaatgtcttctgtgagcgaagaatcagcggcgtcgggcggcggcgctggtgataattgggtgccggtggtgccgcttgcggcgcttccgaaaggagaacggcgtgtgatcatacaagacggggagaccatactgttgctttggtataaggatgaggttttcgcaatcgagaatcgttcgcccgctgaaggcgcttacaccgagggc

SEQ ID NO: 39680 - DNA, 297 bp, Gossypium hirsutum
  Clone ID: LIB3165-043-Q1-K1-C1
aaaaccctaaccctagaattttctttggaactcatcgctggtgctatttgacctcattcacaatgcctcgccgtagctctggaaggtctgcttctcgtcctgcttctgctcgcagccctccacctcaaccagctcataatgctcctcctccagctcctgctcagagtggaagtgggggatccttgctcggaggcatatgctctaccatatctcaaggcatggcttttggtactggaagtgctgtagctcacacggctgtggatgctgtgatgggtcctcgtactattcaacatgaaa

SEQ ID NO: 39681 - DNA, 415 bp, Gossypium hirsutum
  unsure (1)..(415): unsure at all n locations; Clone ID: LIB3165-043-Q1-K1-C11
cccacgcgtccgcccacgcgtccgcttcctttcagggttgctgcatatgataaaacccaaggtaaaatggcgttcttcgatccctcgagggctcaagacttcctcttcatatcaggcaccaagatgaggacattagcaaagaacaaagagaaccctcctccgggatttatgtgccctggcggctgggaagtgttggtcgagtattacgccagcttaacaccatcggacaatgacagaataccgcaacccgttgctgcttagatgaattgaatttggaagcaaacctcgaaacactatttatctncatcgcgtaatctggaccttgtgaagtctcttgtgtccaganttttgttcaataaaaaccatgtggagaccctgtttcatagtcatgaaacttgcctcctgttactaggat

SEQ ID NO: 39682 - DNA, 437 bp, Gossypium hirsutum
  Clone ID: LIB3165-043-Q1-K1-C12
ctccggcacaggctaacatggtcgctcctttcaccggcctcaagtctgcctctgctttcccagtcatcaggaaggccaacaacgacattacttctctcgcaagcaatggcggcagagtgcaatgcatgcaggtgtggcctcctactggaaagaaaaagttcgagactctctcatacctccccgatcttacacccgtgcagttggctaaggaagtagattaccttcttcgctcaaaatgggttccttgcttggaattcgaattagaggagggattcgtgcaccgtaaatactcgagcctacccacgtactacgatggacgctactggaccatgtggaagctgcctatgttcgggtgcaccgactcggctcaggtattgaaggagcttgaggaatgcaagaaggaataccccaatgcattcattagaatcattggcttc

SEQ ID NO: 39683 - DNA, 210 bp, Gossypium hirsutum
  Clone ID: LIB3165-043-Q1-K1-C2
cgaaagggaatcgggttaaaattcctgaaccgggacgcggcggctgacggcaacgttagggggtccggagacatctgggggggcctcgggaaaagttatcttttctgtttaacggcctgtccaccctggaaaccgctcaaccggaggtagggtccaccggccggaaaagcaccgcacgttgcgtggtgttcggtgcgccccccgcgggcc

SEQ ID NO: 39684 - DNA, 117 bp, Gossypium hirsutum
  Clone ID: LIB3165-043-Q1-K1-C3
cccacgcgtccgaaaaaaaaaaaaaaaaaaaattaaaaaaaaaaaaaaaaaaaaaaaaaagggaaagaaaaaaaaaaaaaaaaaaaaaaaaaaaaaaaaaaaaaaaaaaggaagggg

SEQ ID NO: 39685 - DNA, 261 bp, Gossypium hirsutum
  unsure (1)..(261): unsure at all n locations; Clone ID: LIB3165-043-Q1-K1-C4
cccacgcgtncgctttttttttaaatatttttcattggcaaacaatcccttattaataaggagaggattttcacaactgggttaattcccttcattccctgggcttcataatcttgggacccaaaggcaaaaaaattttttaacattttaccccaaagatggggattacaaatgggagcgagtattaagaaattgggaaacaaaaagtggccaaaatgggggattacttccacccatttggggcttaggacccatgggcat

SEQ ID NO: 39686 - DNA, 71 bp, Gossypium hirsutum
  Clone ID: LIB3165-043-Q1-K1-C5
aaaatctgtgcctgccctttgctctgcacacctcgggatatcagtttcaactccactcatcccacgggttg

SEQ ID NO: 39687 - DNA, 435 bp, Gossypium hirsutum
  Clone ID: LIB3165-043-Q1-K1-C7
tttcatttcaaagattctctcaaaacagtgagggagtagtagttcgagttatcgacgacgttttttttcaacacgaaaaaaaatggataacttttacgcaccagggaagaaccatctcttcgttccgggtccggttaacataccggaacccgttattcgagccatgaaccggaacaacgaggattaccgttccccggctattccggcgatgacaaaaacccttctcgaagatgtcaagaagatattcaagactacgaccgggactccttttatgatcccaacaacaggaaccggtgcatgggagagtgcacttactaatacgttatcccccggtgaccgaatcgtatcgttcctcattggacaattcagtcttctttggatcgatcaacaacaacgtctcaaattcaacgtcgacgttgtcgaaagtgagtgggg

SEQ ID NO: 39688 - DNA, 429 bp, Gossypium hirsutum
  Clone ID: LIB3165-043-Q1-K1-C9
cccacgcgtccgcccacgcgtccgcccacgcgtccgcccacgcgtccgctccgccatcttcaataatttcttccgttgatctttgttagagattagctttttaatttttcattatgggaaagatcaagatcggaatcaatggatttggaaggatcgggcgtttggttgcgagagttgctctccaaagcgatgatattgagctcgttgctgttaacgatcctttcatcaccactgaatacatgacctacatgtttaagtacgacagtgttcacggtcaatggaagcatcatgagcttaaggtgaaggactcaaagacccttctctttggtgaaaagcctgtcacagttttcggtatcagaaaccctgaggaaatcccatgggctgaggctggagctgagtatgttggtgagtctactggtgtttttactg

SEQ ID NO: 39689 - DNA, 153 bp, Gossypium hirsutum
  Clone ID: LIB3165-043-Q1-K1-D1
gaagcaaaccaattggtctcttcataagggggtccattatcttccgatctgattctaatggggaaaatctaaaaaggtattccggggctggcccttatgacagggtgcccatgggtaaaaaagaaaaaggggggggtgattactcatcggacc

SEQ ID NO: 39690 - DNA, 317 bp, Gossypium hirsutum
  Clone ID: LIB3165-043-Q1-K1-D11
catgcctgtggcttgtgagcaagggatgcggtttgctatcagagaaggagggaagacggttggagccggggttattcagtctattattgagtgatcttaggatactttggcgttgcaggatatgttatttgctgttgcagtgatgtcaaagaaccttcatatgccaaatgtcaaggtcatgcaattagtttcgtcaccatttatagatcctctttgattccaatgtcatattttggagttttgtatttcttttgcttcagactcatgtctaatctagttggattggtaatattcatgtcacaattcgatatgaattt

SEQ ID NO: 39691 - DNA, 427 bp, Gossypium hirsutum
  Clone ID: LIB3165-043-Q1-K1-D12
cccacgcgtccgcccacgcgtccgaagaaaaccaatttttccctttccaagaatttgtgaagtgttttttttttttttgccatgggttcaaactcattgaagaaccctcttctgttcagtgatgaagttgagcctggttatgtcaaacactcatcttttctgaaatcatcagtgaaatggggtttaaagattgtaatgtgggtgattttcattgcatgggttggtgttattcttctatatcctggagaaattggtagtcaattggttgagaaaattattaatgccaccaacggatctgttttcggcacttcaggaagtttgttcttggtattcagtgctccaattcttctcattgcaatacttgcagtagctcatctgatcatctctggtgaacatgttttcgagaagagtaagtcctcaaagaaac

SEQ ID NO: 39692 - DNA, 264 bp, Gossypium hirsutum
  Clone ID: LIB3165-043-Q1-K1-D2
aaaacccttaaatctctcttcctcttcctcttgttcttatctaacaaatactaccctttctttgtttctttggttcggtttgcttttgttccttttcaccacttggccagtctttctgtcatggaacaaccaagggctcattatggtgaaataattgcaccatgtgctatatacaacggggcctctgtcttgctatgcatgtggaagggtctcatcttttctcctctcattcttctttctatctgacataaattgctgattact

SEQ ID NO: 39693 - DNA, 356 bp, Gossypium hirsutum
  Clone ID: LIB3165-043-Q1-K1-D3
ctacccaaagctctttctccatttctttcaagggcagtgttcacttccttctgctcacttaacagctaagccaccatgtttaaggccactagaccactctccatgcaccaaaactaagccaagtgttcgaacccatgctaagaaaaagaacccatggctggatcctttcgaagatgatgtggaagaccccttctcggaatatggttcattgttcactgatggcaagcaagaagaagatcctaggccccctgaagaccctgataatccttacggtttcttgaaattcccaaaggggttcaccgtggagttggcttcactgcctttgaaaatcagaagtgatgtcaggagatgttgct

SEQ ID NO: 39694 - DNA, 255 bp, Gossypium hirsutum
  Clone ID: LIB3165-043-Q1-K1-D4
caaaactaatcatgtaaaaaaaaaagttgattggaacaaataaagggaaacatttaagacaagaacaaagtggggattttataacacaaaaatagagggtgcaaatccacttaaaacacaaaaggaaaacaacattcaattaagacacaaaggggggatttcctttgtttgggcccaaaatagatttttttcttcccttaaagcttaatttcccatttaaaaagctcctcttttgatagcatcggcattagcatt

SEQ ID NO: 39695 - DNA, 338 bp, Gossypium hirsutum
  unsure (1)..(338): unsure at all n locations; Clone ID: LIB3165-043-Q1-K1-D5
ttcaataccaacaattacaaagcaaaattcagcatcccttgggcatacggcatctctgcaaactttaatcgcagatcccaattaaatactctttttacattaacgaaaagcttcatggattacacatctaaaaagccaagtcaaaggggcctttttgaaagtctctatagagtcaatatgcgaagaaactcgtctacgttaccttatcatcgccgggcttcctcgggaacggctggatatggagtatagcttggaaacaacatgtcgaacgttacaaacattcatgctagacaagcatcaagaagaacaagatctgggattntgagtgtatgagatgg

SEQ ID NO: 39696 - DNA, 441 bp, Gossypium hirsutum
  unsure (1)..(441): unsure at all n locations; Clone ID: LIB3165-043-Q1-K1-D6
ttttgcttgaacccgacatccatggctacacacgcaagtctagctccttcaaggatccctgcaacaaccaggcttccttctaagaccacacactctttcccctctcaaattcaatgctcttccacgagattacaagttactgaattctctggactgcgctccttctcatgcgtcacattcgtcaacaatgctagagatgcgtcctttttcgatgtggtggctgctcaacttactccaaagactgcaggtggagcaacacctgtttaggggcgaaacagttgccaaattgaaggttgctatcaacggatttggacgcatcggcaggaactttctccgatgttggcatggcaggaagaactctcccctcgacgtgattgttgtaaatgacagtggtggtgtcaagaatgcttcacacttgctgaagtatgnatcaatgctggg

SEQ ID NO: 39697 - DNA, 424 bp, Gossypium hirsutum
  Clone ID: LIB3165-043-Q1-K1-D8
gtgaagtgtaagttcaccagttgttgctagggagaaatcaaaatggggccaggtggaccaggaggacctccgggatggggcggtcctcctcccggaccgggtttttccggtggcatttgtgacttcattggttcttgtttgagctttctgtgttgctgctggctgcttggagactgttttggtggtccaatgggtccaccagggccacctggaccacctggatttggacctccaccaccctagttatatgtctaccatcttcatattccaacacaaaaattggaggcttttctagcttctatctgggtttcaacttagctatctaaaatacatatttatgtaataattgtttgcatttttagtagaatttatgtttattgaaattaatctcaataaaatgatcttttcatcttttttctttgct

SEQ ID NO: 39698 - DNA, 429 bp, Gossypium hirsutum
  Clone ID: LIB3165-043-Q1-K1-D9
gtgagactcttttgtataactgtagcatatagtactagtaagcagtaatagcaatggcctcctccatgatctcatcggcaaccattgccaccgtgaactgctcctccccggcacaggccaacatggtggcccccttcaccggcctcaagtctgcctctgctttcccagtcactaggaaggccaacaacgacatcacttctcttgcaagcaatggtgggagagtgcaatgcatgcaggtgtggcctcctcttgggaagaagaagttcgagacactctcatacctccccgatcttacacccgtacagttggctaaggaagtagattaccttcttcgctctaaatggattccttgcttggaattcgaattagaggagggattcgtgcaccgtaagtactcgagcttacccacgtactacgatggacgctact

SEQ ID NO: 39699 - DNA, 286 bp, Gossypium hirsutum
  Clone ID: LIB3165-043-Q1-K1-E1
caatggcttccacttcagcagtttcaatggctctgccactaactcgtgctacccaaaacagggtgcctggctctgaagctttctttaaaccattgccactcaagccatcgggggcaatcccaactacaacatccaatggaaggcttcaaagtaaggctgctgcttcttcactcaaggacaagggcaatcacaaggattgacagcttctgcaattcacaacatccatggtgatccctgaggtggctcaagctgctgatggagtttccccttctctcaaaaacttttt

SEQ ID NO: 39700 - DNA, 435 bp, Gossypium hirsutum
  Clone ID: LIB3165-043-Q1-K1-E10
atatttagctatagcatacactactagtacccactactagcaatggcttcctcaatgatctcatcggctaccattgccactgcctctccggcacaggctaacatggtcgctcctttcaccggcctcaagtctgcctctgctttcccagtcaccaggaaggccaacaacgacattacttctctcgcaagcaatggcggcagagtgcaatgcatgcaggtgtggcctcctactggaaagaagaagttcgagactctctcatacctccccgatcttacacccgtgcagttggctaaggaagtggattaccttcttcgctcaaaatgggttccttgcttggaattcgaattagaggagggattcgtgcaccgtaaatactcgagcctacccacgtactacgatggacgctactggaccatgtggaagctgcctatgttc

SEQ ID NO: 39701 - DNA, 436 bp, Gossypium hirsutum
  Clone ID: LIB3165-043-Q1-K1-E11
gttttagagagagaaagagaaggccggaatctgaaagacaagacacagagaaaaagagagagagagagagagatgtcgggaggaatagcgcgtggtcgactcgccgaggaacgtaaggcatggaggaagaaccatccccatggttttgttgcgaaaccagagacgttgcctgatggaacggtcaatttgatggtgtggcattgcacgatccctggtaaagcaggaactgattgggagggtggctacttcccgctcacgctccatttcagtgaagattatcccagcaagcctccaaagtgtaaatttccccagggctttttccacccaaatgtttatccatctggtactgtttgcctttcaatcctaaatgaggatagtggttggagaccagccataactgtgaagcagattcttattggaatccaagatcttctgg

SEQ ID NO: 39702 - DNA, 432 bp, Gossypium hirsutum
  Clone ID: LIB3165-043-Q1-K1-E12
cccacgcgtccgtgtggctatggcggcagcactcagctactgcaagccttccccattcattggccaatttccttccaactttgggaagccagtatctctgcgaagcatcgaaatctcgacgcaggcatctagaatcactgcactgttttggggatctaagaagtctgtgaagcatcaacctgtggattcttctttgggggatttcactttgacagggtcagaaacagaggaacttaaagagaacccgacaaagggcaagaaggtatcggtatcgattatttcctcaattctggacgtttcttcacatgaatgggattcttgcgctctggatgctaccggtcctgaaaagttcaatccatttctttctcatggtttcctttcaagcttggaagagacgggttgcgcagtgaaggaaacaggatggatgccgag

SEQ ID NO: 39703 - DNA, 328 bp, Gossypium hirsutum
  Clone ID: LIB3165-043-Q1-K1-E3
cccacgcgtccgcgatgactcccctccacttcttcctcctcctcctcgtcctcctcctttcgtcagctgctttaatctccgccgccgccgccaccaccgcatatccttccatcccgggcaccgattccacaactgattgtggcctatccggaggagacgagaaatccagttcccatccgtcgcgaagtctacggtaacggcaagatattcgacatcagccataggtacaccgtcgacatgccgtcttgggaatccaaggacggcgtaggacagttcctatggttgcctaaaagcatgaagaacggttccctcgctaataattcggaga

SEQ ID NO: 39704 - DNA, 417 bp, Gossypium hirsutum
  Clone ID: LIB3165-043-Q1-K1-E4
aggaaacagagaacgaaactatggcttccatgtctttctctgcaactattccgtctcctcttcttgatttttcccaaaccaaaaagaacccagttttttcttcatcatggccttccatgtctttctcaattccttccatcaaatcctcgcttgggtcttcaaaatcagcctttttccaaaatgggttctccttgccatcgcttactgcttctgggtttgtctttaactctagatcttcaggcatttatgcaagagcagctacggataaaaccctatacgactacacagtaaaggatattgatgggaaggatacccctcttggcaaatttaagggaaaaggtctttttgattgttaatgttgcttcaagatgtggtttgacaacatcaaattactctgagctttcccacatatatgac

SEQ ID NO: 39705 - DNA, 438 bp, Gossypium hirsutum
  Clone ID: LIB3165-043-Q1-K1-E6
ctcaacggcaacacccgaccagacccgaaaaaatggtccagacaaaccagtctggttccggcaatgatttcaagctcgtcggattctcgaatttcgtccggtcaaatccaaaatccgatcggttcaccgtcaaacgtttccaccacatcgagttttggtgtaccgacgccactaacgtcgctcgccgtttttcatggggtctcggtatgcaatttgtagctaaatcggatttatccaccggaaatttgacccatgcttcttatctcctccgttcccgtgacctgaacttccttttcactgccccctattccccttctattgccgttgctcaaaacctctcccctcaatccaccgcttcgatcccttcttttgatcattcactctgccgctccttcgctgccacccacggcttaggcgttcgcgccatcgccatcgaag

SEQ ID NO: 39706 - DNA, 414 bp, Gossypium hirsutum
  Clone ID: LIB3165-043-Q1-K1-E7
ggaggcacgtgctggtgtccgagagattcacttcctaccattcaaccctgtagacaagagaactgctctaacctacattgattctgatggaaactggcatcgtgctagcaaaggtgcacctgagcagattatagatctttgcaaatgcaaagatgatgtcaggaaaaaagttcattcagttattgataaatttgctgaacgtgggacttcgatctttagctgttgcaagacaggaaatacctgagaaaacaaaagagagtcctggatccccgtggcagtttattggcttgttgccactatttgatccaccgaggcatgatagtgctgaaacaatcagaagagctctaaaccttggagtgaatgttaagatgattactggggatcagctggccattgccaaagaaactggcagga

SEQ ID NO: 39707 - DNA, 433 bp, Gossypium hirsutum
  Clone ID: LIB3165-043-Q1-K1-E8
cccacgcgtccgagtgaggagttcaatggtaccgaaattgatagggccataaaaaagaagatatccgggaaaaatgctgccagccaaaggttgagtcttgatttgttggaagtttgtaccgggaattgtgagaaggttgcttacgaggtggcttcggagaaagtgttggaagagatggctaagatgatccagaatccgcataacatatcaccagaatagagaaaaggctttggacttgattcttgcttggggacagtctgatgatcttgcatacctacttgtgtttcaccaaacttatatgatcttgaaagacagaagcgcacaactgccagtgagatgatgatgatgagaactcgtctgccttgtaccagacattggaatcttatatgggagagccattgtctacccctgaaaattatcctgctgattacac

SEQ ID NO: 39708 - DNA, 424 bp, Gossypium hirsutum
  unsure (1)..(424): unsure at all n locations; Clone ID: LIB3165-043-Q1-K1-E9
ctctcttcctgtcttcgtctacttcgcctctttctctatggatccctacaagcaccgtccatcaagtgctttcaattcaccattctggactaccaattctggcgctccagtttggaataacaattcatctctcactgttggacccagaggtccaattctccttgaggactatcatctggtggaaaagcttgccaacttgacagggagcggattccagaacgtgttgtccatgctaggggagcaagcgcaaagggtttcttcgaggttacccatgacatttctcaccttacatgtgctgattttctgcgagcacctggagttcaaacccctgttatcgtgcgattttcaaccgtcatccatgagcgtggaagccctgaaaccctcagggatcctcgtggttntgcagtgaagttctacacccgag

SEQ ID NO: 39709 - DNA, 412 bp, Gossypium hirsutum
  unsure (1)..(412): unsure at all n locations; Clone ID: LIB3165-043-Q1-K1-F10
cccacgcgtccgcggattggacccaagggtcaagatttacgggagctacgaccaactgctggatgacccgtcggtggatgcggtgtacatgccattgccgactaccttgcacgtccattgggctgtcatggctgcccaaaaaggcaagcatgtgctgatcgagaaaccgacggctcttgatgtgggtgagcttgatacaatacttgaagcatgtcaatctaatggcctgcagtttatggatgggtcgatgtggttacaccatcctaggactgttaaaatgaaggagatgctttttgattccaagcttttaggagacgtcaattatatatacagcacatcaacaacttcagcatcccctgaattctttgagaatgacataagagtnaaaaggaaacctggatagtctcggagc

SEQ ID NO: 39710 - DNA, 418 bp, Gossypium hirsutum
  Clone ID: LIB3165-043-Q1-K1-F11
aacatggatggattctacattgccccagctttcatggacaagcttgttgttcacatcacgaagaacttcatgacccttcctaacattaaggttcctcttatcttgggtgtttggggaggcaaaggtcaaggaaaatctttccaatgtgagcttgtctttgccaagatgggaatcaaccccattatgatgagtgccggagaattggaaagtgggaacgccggagaaccagccaagttgatcaggcaaaggtaccgtgaggccgccgacattatcaagaaagggaaaatgtgttgcctcttcatcaacgatctcgacgctggagccggtcgtatgggaggaaccacacaatacacagtgaacaaccaaatggtgaacgccacactcatgaacatcgctgataaccccaccaacgttcagc

SEQ ID NO: 39711 - DNA, 432 bp, Gossypium hirsutum
  Clone ID: LIB3165-043-Q1-K1-F12
gaagaatcttgctatcccttgcttttctctcgcaaaaaattctcaaacttgtttttaacgttcgctgaatactatcgctcatttcttccctcagaaccctaatcgataactgaagccatttaatcatgtttgggcgtgttccaaaaaaatctgataacactaagttttacgaagtacttggggttcccaaaagtgcaagtcaggatgaattaaagaaggcttataagaaagctgcaattaagaatcatccggataaaggtggagaccccgagaagtttaaggaactggctcatgcttatgaagtacttagtgacccagagaagagagaaatatatgatcaatatggtgaagatgctcttaaagagggaatgggaggaggcggttcttctcacaacccatttgacatatttgagtcatttttcggtgggggag

SEQ ID NO: 39712 - DNA, 345 bp, Gossypium hirsutum
  Clone ID: LIB3165-043-Q1-K1-F2
gagatggttcttgctttcaaaccgccattgacatacttctccccattttcttcgcctcatctacctccacgctcaactccttcttggcccctccatcactctaactctacctataaccccaacacttgtctttctccacttccaatctatgcacattccaagtggcctacaaacacacactccttcgccatctggtatcgctactccagcagtgaagaagaagacgacaaccatagctttgacgaggcagtttcccttttcaaccaaagggaatactataagtgccatgacttgcttgaagccttatggaacaaagccgaggatcccactagaactctcattcat

SEQ ID NO: 39713 - DNA, 353 bp, Gossypium hirsutum
  Clone ID: LIB3165-043-Q1-K1-F3
caaacaatggcttccatgcttagctctggaactgttcttaggccaaccccatttcttggccaaaccaaaaatgctaaccctcttagagatgttgtctctttgggcactcccaaatatgcaatgggaaatgaactatggtatgggccagacagagtgaagtacttgggaccattttcagctcagactccatcttacttgaactggagaattccctggagactatggttgggacactgctggtttgtcagccgaccctgaggcctttgccaggaatagggctcttgaggtcatccatggaagatgggcaatgttgggagcactaggctgcatcacaccagaagtacttgagaaat

SEQ ID NO: 39714 - DNA, 435 bp, Gossypium hirsutum
  Clone ID: LIB3165-043-Q1-K1-F4
ttcaccttttatttctttttttctcctatatcttggaatgctactttacctcttcatcagttgtttctccatcatcttctttataaagtccttaactttgaaaccactcccaccatgggcaactgagatgagactattgtctccctggtttaggaaagacgtttccttttttctcagttccagattgatcaaaaacattcttggtcttggttattttaccacagtcgtttccaaaatgtctctcaaaaagatgtctttcacttcaaaagttgataactttgaggaggttgaagaaagtgccatgtcaattttggacctaccagatttggtcttggaatgcattcttgaaaggctaccacctgctgctctttggtagtatggctggtgtttgcagctctttgaggagtaggtgtattagtgaccatttctgggaaa

SEQ ID NO: 39715 - DNA, 175 bp, Gossypium hirsutum
  Clone ID: LIB3165-043-Q1-K1-F5
ggccggcccacgccttcgttcaatttggggattaaggtttgtggagtgcttccttttttgttttgttcgccctttaacaagggaaaaaaaacatcaatcaattcccttccattgaaagagacttaccttattgggaggtgctccacaacttggattctgactcttattctattct

SEQ ID NO: 39716 - DNA, 429 bp, Gossypium hirsutum
  Clone ID: LIB3165-043-Q1-K1-F6
cttcctccccacccttaaaccatgtcggcttttgttggcaagtatgcagaggagttgatcaagaacgccaactacatcgccacgccaggcaaaggtattttggcggcggacgagagcacaggcaccatcgggaagcgtctctcgagcatcaacgtcgagaacatcgagtccaatcgccaagccctccgcgagctccttttcacctctcccaacgcattatcctgcctctccggtgtcattcttttcgaggaaacactttaccagaaaacatctgacgggaaacccttcgttgaaatcctcgaagagaacaatgtcattccaggtatcaaggtcgataagggcaccgttgagatagccggcaccaatggcgaaaccaccactcaagggttcgactccttgggtgcgcgttgtcagcaatactataaagct

SEQ ID NO: 39717 - DNA, 431 bp, Gossypium hirsutum
  Clone ID: LIB3165-043-Q1-K1-F7
cccacgcgtccgtagctatagcatacactactagtacccactactagcaatggcttcctcaatgatctcatcggctaccattgccactgcctctccggcacaggctaacatggtcgctcctttcaccggcctcaagtctgcctctgctttcccagtcaccaggaaggccaacaacgacattacttctctcgcaagcaatggcggcagagtgcaatgcatgcaggtgtggcctcctactggaaagaagaagttcgagactctctcatacctccccgatcttacacccgtgcagttggctaaggaagtggattaccttcttcgctcaaaatgggttccttgcttggaattcgaattagaggagggattcgtgcaccgtaaatactcgagcctacccacgtactacgatggacgctactggaccatgtggaagc

SEQ ID NO: 39718 - DNA, 434 bp, Gossypium hirsutum
  Clone ID: LIB3165-043-Q1-K1-F8
ccctaatgccccatgttttcccctcatttaaccgacaaaagaaccaaaaccttagatccttttgattctcattaggtttaaccggaaaaaaactcattaatcgccatgacaccactgtatttgatgattggcgacgagtatatgcccctcttttaccccgtttaaaaccacaacttgtggactactgattttaattctgaaatcccatctcaagctccgattgcgacgaaggagatagggaccccgacggtgtacttacgaagaggagaagacctggtggccatgcgtgggaaccactcgtgggagtcctgatctgctattgttctagcgttttccagaaacctttagggtttctggtatcctctgttattgggcctttttcgggttatttttgggtctcgagtttaggcctgaaattttgtaaatgggtttgg

SEQ ID NO: 39719 - DNA, 225 bp, Gossypium hirsutum
  Clone ID: LIB3165-043-Q1-K1-G1
ggaaggtagattaccttcttcgctcaaaatgggttccttgcttggaattcgaattagaggagggattcgtgcaccgtaaatacttgagcctacccacgtactacgatggacgcttctggaccatgtggaaactggctattttcgggtgcaccgacttcgctcaagtattgaaagggcttgggggatgccaaaaagaataccccaatgcattcattaaaatcattg

SEQ ID NO: 39720 - DNA, 435 bp, Gossypium hirsutum
  Clone ID: LIB3165-043-Q1-K1-G10
aaaaaaataataagtaaaggttaaaattaaaatgaattagtaattagtaaaacaaggcattttgattgacgatctccacgaagctctctctctctctctcttttttcttctctttaaaaatttaatactcgcattctcttcttcacccttttcaaacttatttctttcgcctcttctttcttttttcggatcttctctctctctccaaagatcttcgattctttccgtctccttttcgttcgctctctgagtttggagaaatcgaagtttggagtgtgatggcttcgatagcgtgttcttcagctgcatttactggaacttcagcttcggatcttcttcgaagctccagtaacggcgtgagcggcatcccttctaaaaaccctagggaaagcaccattttccgtgaaaaaaaaggatgcaactgtagctgcaaag

SEQ ID NO: 39721 - DNA, 367 bp, Gossypium hirsutum
  Clone ID: LIB3165-043-Q1-K1-G11
agaaactaaaaaaaaaaaaaaattataaagaaagacgaataaggaaaaaagggtgttaaagaccaaaggccaaagccattttttctttcttttggtttctggggagagaccagtttgggcaaagatggtgaagaagtggaaaaaggctttgattttggtgctgtttacagtctgcattctggggtttaagccaagatgtgtcaatggcgaaacagatcaagcagatgcttctgctctaggggttatgtataccagcttaaattcaccacagcaacttaacaggttggactgctagcaatggtgatccatgtgggcagtcctggaaaggtgttacttgctcgaacaaacgcgtcactgaaattaaact

SEQ ID NO: 39722 - DNA, 427 bp, Gossypium hirsutum
  Clone ID: LIB3165-043-Q1-K1-G12
cccacgcgtccggtgctccatagtcttggaacccaaggacagaagactcttttaacatttcaccgcaaagatggagataacaaatgtgaccgagtatcaagaaattgcaaagcaaaagttgccaaagatggtgtatgactactacgcatctggtgctgaggaccaatggacattgcatgagaatagatttgctttcactaagatactgtttcgtcctcgtattctcatcgatgtaagcaagatagacatgaccacaactgtgttgggtttcaatatatcaatgcctatcatgattgccccaactgcctttcaaaaaatggctcatcctgaaggggagtatgcaacagctagggctgcatctgctgctggaactatcatgacattatcctcatgggcaacttctagtgttgaggaggttgcttcgaca

SEQ ID NO: 39723 - DNA, 147 bp, Gossypium hirsutum
  Clone ID: LIB3165-043-Q1-K1-G2
cccgtccgaattccggtcgacccagcgtccggatctggtcagataacctgccgctgcttaacacatcaatcggcggcaagggtgtttccagtggcgacgggtgataacgcgtagaacctgccttgggaggggaacacagctggaacg

SEQ ID NO: 39724 - DNA, 369 bp, Gossypium hirsutum
  unsure (1)..(369): unsure at all n locations; Clone ID: LIB3165-043-Q1-K1-G3
cccggtccgaattcccggctagttcttgattaatagccaatcacagcagccatgtctctcctcaatgatctcatcaacctcaacctcggcgacgccactgaaaagatcatagccgaatacatatggatcggtggatctggaatggatctgagaagcaaagcaaggactntgcctggaccagtggcggacccttcaaaactcccgaagtggaactacgatggttccagtaccaatcaagcacctggagatgacagtgaggtcattctttatcctcaagctatattcaaggatccatttagaaaaggaaacaaacatcttggtgatgtgcgatgcttacacaccagccggcgaacnccattctaccaacaa

SEQ ID NO: 39725 - DNA, 198 bp, Gossypium hirsutum
  Clone ID: LIB3165-043-Q1-K1-G4
ttccttttccttttccaaaaacctccggtacttcctctctccctttcctccgattctatatctctctctttctgctaggggttgggagttagtgaaaaaagggttgttatttcaggggcaacaatgtgactacgcctgggacgggacgggctagcgcttcggtacgactcgtattagtcactcttaccgatcagagct

SEQ ID NO: 39726 - DNA, 367 bp, Gossypium hirsutum
  Clone ID: LIB3165-043-Q1-K1-G5
cccacgcgtccggaaattcacccttgacagtaatatatgttgtatatgtaaatcctagatgtgaaaacaggcgtaattcggccctgaaatgaaaaaaaagggaatatagatggaaaaaggggggagaggttggacgtaaagtaaaaaaaaatcgatatgctaaaataaaatatgaaatgaaattgaaacaaggctaatgagatagaaataaggaatcataaatagagttcgggttcgaattccatagataatatggatggtgttgcctataatgatggacaaatgaaagactctcccaaaatttttatttatccacttcctattttgaaaataggttgggttgaacttaaaaattccttcattgaat

SEQ ID NO: 39727 - DNA, 430 bp, Gossypium hirsutum
  Clone ID: LIB3165-043-Q1-K1-G7
cccacgcgtccgcccacgcgtccgctgtgactccaaaatccacgcggccaacaagctcgcctcgcgtcacgctcgagtttgggtctgcgaagtctgcgagcaagcgcccgctcacgtcacttgcaaggccgatgcagccgctctctgtattacctgcgaccgtgacatccactccgccaaccctcttgctcgccgacacgagcgcctccctgtaacccccttctacgactccgtcaattcagtcccagccgtcaaacccaacggagttgttaactttctggaggagcgttacttctccgacgtggacggagacgctgatgtcagccgggaggaagcggaggcggcgtcgtggctgcttccgaaccctaaccataaggctgtggacagcccggacgtgaactcggggcagtacgtgttctcggagatggac

SEQ ID NO: 39728 - DNA, 419 bp, Gossypium hirsutum
  Clone ID: LIB3165-043-Q1-K1-G8
cccacgcgtccgcccacgcgtccgctccaatggcgactcagctgaagagcagctttacgtcgtctgttacaagaggactggtagtccccaggggcatttcgggatccccgttcaaagtatcttccggaaagaccaggaccccttgcttcactgtcaaagctgttcaatccgacaagtcaacatttcaagtaatccaacccatcaacggcgaccccttcattggaagcctggagactccaatcacctcaagccccttaattgcatggtacctttccaaccctccaagcctataggacggcagtgaacccacttctgaggggaatcgaagtgggtctggctcacggcttcctcctggtgggtccattcgttaaggccggccctctaaggaacactgcggtggcgggtcaagctgggtcctt

SEQ ID NO: 39729 - DNA, 339 bp, Gossypium hirsutum
  Clone ID: LIB3165-043-Q1-K1-G9
aacgccattcctcaccacgtccaccactttgtccctttctctttcaacccatctccaccgtctttccagttccttatcctctacttgtttcccttttaagccaaacctccacagagtccgtagaagcccatcacttcttgcttcctatggaaacccacacttatttaaccacgaagatcatcattccacctataaatcattgctatccaccagaattcttggacccaaatccaatttcttgcaaatgggtccttcagaaactagctgtagcagagaaattttagtcaaatcctctgcatcagacagtagtaacactgtcttctccactctatcttaaaa

SEQ ID NO: 39730 - DNA, 98 bp, Gossypium hirsutum
  Clone ID: LIB3165-043-Q1-K1-H1
attcgttgcttatcttatttactcgtctttcttgactggatttgtttaccccccgttgtttcgccattgggtttttggggccgggcttgaatgggttt

SEQ ID NO: 39731 - DNA, 425 bp, Gossypium hirsutum
  Clone ID: LIB3165-043-Q1-K1-H10
cttttgtttaacgggttgtgggaattcatttaatttaagatgcatttctcaatgggatcaaataatgttgggatatcaaatatttttctttataatcactgctcttctcaagttcgataaagtcactgactttgcaggaagcacgaattttgttataattgctgtgttgactctgataattaaaggatcatggcattttcgtcaggtagtattgacttcgcttgtagtaatatgggggctacgcttggcaatttttctattgatgagaattttgcaatggggcgaggatcgacgttttgatgagatgcgcagtaatttggggaaattagcagttttctggatatttcaggctgtctgggtctggaccgtgtctttaccttgtaaccgggttaatgctagtgatagagatcccatcggttcggctg

SEQ ID NO: 39732 - DNA, 378 bp, Gossypium hirsutum
  Clone ID: LIB3165-043-Q1-K1-H11
gggaatcggaaaaggaaatgaagggtcgattattccctacaaaatgccactcacaaacaagacgaggaggttcatgtcaactttggccaaaacaaatttgcttttgatttgaaggaatatgaagctcaagagaggttgaagcggcagatgactattgaaaagatatctcttccaccaaatattaggtatggacttgttcgctcttacttgctacattatggctatgaagatacactcaattgatttgattttgctcgtatagcactatcccccctgtctatatagctcaagaaaatggctctgacgagcaggatatcggatatgcactaaatcagagaaagattctacgacagctcatcacgaatggtgagattgatg

SEQ ID NO: 39733 - DNA, 299 bp, Gossypium hirsutum
  Clone ID: LIB3165-043-Q1-K1-H2
cacaattcattcttttttttttcctgtgcttgtacacaatggctatgactgtaaatgcagcagtatctcttccatcttccaagtcatctaccctgtcatttaaaaactcagtcactgtccctgaaagaatcaacttcaacaagagtgttttgtacccaaaaaatgtcagccttggtggaaatgtggtttccattagagcctcaggtcactacagaagctcctgcaaaagcaccaaaaatttccaagaaagatgaccagggtattgttgtgaacaagttcaaaccaaaagaaccctacat

SEQ ID NO: 39734 - DNA, 390 bp, Gossypium hirsutum
  Clone ID: LIB3165-043-Q1-K1-H3
ctttttattgtggtctccagagcttctctgttacatcgtttattttctctcaagaactgaagaaaaaatccgaatagattaaaacttaagaaagatcaaaagatgtttggaagagcacctaagaagagtaataacaccaggtactatgagattctgggtgtttcgaataacgcttcccaggatgatttgaagaaaagcttataaaaaaagccggccattaaaaaccatccagacaaaggcggtgatcctgaaaaatttaaagagttggcgcaagcttatgaggtattgagcgatcctgagaaacgtgagatatatgatcagtatggtgaggatgcactcaaggaaggaatgtggtggggtgccggtgctcatgacccgtttgacatcttc

SEQ ID NO: 39735 - DNA, 279 bp, Gossypium hirsutum
  Clone ID: LIB3165-043-Q1-K1-H4
aatattactagttttgcttgaacccgatatccatggctacacacgcaagtctagctccttgaaggatccctgcaacaaccaggcttccttctaaggccacacactctttcccctctcaaattcaatgctcttccacgagattacaagttactgaattctctggactgcgatccgcctcatgcgtcacattcgtcaacaatgctagagatgcgtcctttttcgatgtagtggctgctcaacttactccaaagactgcaggtggagcaacacctgttaggg

SEQ ID NO: 39736 - DNA, 343 bp, Gossypium hirsutum
  unsure (1)..(343): unsure at all n locations; Clone ID: LIB3165-043-Q1-K1-H5
gaaaactcgtacaacgtgttattgtaaggttagatgggtgctgttgatgtttctaaaaagatagcttgtttggctgaaggctgctaatctttgcaatagtggagaagttgtaaattgtcagtacctcatttgtttctgtaaagcagaccatttctgtgttgactccttattggagaatatttttactcgatatccctttcttcgagaagaaaaagaagtgcagaattacataagcaatgatagttgctgggacaggatttangtacacttgattcataattacttgtagttccttttgcgggtgaatttattgctaagatagtgtaaaacctcgtgccttgag

SEQ ID NO: 39737 - DNA, 255 bp, Gossypium hirsutum
  Clone ID: LIB3165-043-Q1-K1-H6
accggaacggcagggccggcccaggcgtccggtaacagcacgcgtgcgaaacgcgtgcgctgtgaattgaaaccctcaaaattccacttaaaaacaggactacacagcttatgtctacaccggcggaaacacaacttttttcttcgggggcaccccggcccgaaaaccctaagcttccttcctttcaaccaatcttttttcgggcttaaaccccaacgaaatgggcggctcaccatgggtggatacaaagggaca

SEQ ID NO: 39738 - DNA, 435 bp, Gossypium hirsutum
  Clone ID: LIB3165-043-Q1-K1-H7
ctatagcatacactactagtacccactactagcaatggcttcctcaatgatctcatcggctaccattgccactgcctctccggcacaggctaacatggtcgctcctttcaccggcctcaagtctgcctctgctttcccagtcaccaggaaggccaacaacgacattacttctctcgcaagcaatggcggcagagtgcaatgcatgcaggtgtggcctcctactggaaagaagaagttcgagactctctcatacctccccgatcttacacccgtgcagttggctaaggaagtggattaccttcttcgctcaaaatgggttccttgcttggaattcgaattagaggagggattcgtgcaccgtaaatactcgagcctacccacgtactacgatggacgctactggaccatgtggaagctgcctatgttcgggtgcac

SEQ ID NO: 39739 - DNA, 436 bp, Gossypium hirsutum
  Clone ID: LIB3165-043-Q1-K1-H8
gaaaagaaggggaaaaaaaacttgttcgtcactgaaaaacagttgattttcttttttttcttctttaaaaaagaattagtaatcaaatcgaatggcgggaatttgctgtgaagttgttggagaaagtgaagcagcggctccggttgagccaacttcaagagcttctcgtcgccggagattggagcttctaccgtttaagttagtggccgaagctgctgttctaccgccgttagagaacggccggaaacgtcagaagctcgatctcgttcgcccgacttctcgtgattgtgataacgctgttcaaaactcggatactgataagcttgagaaagatcaagaacttaatggaagtctaaattttaatggagcagtaaaatcagaagccgtagaagaagaaaaggaatcgccgaagttcggcctgacatctgtttgcgga

SEQ ID NO: 39740 - DNA, 436 bp, Gossypium hirsutum
  Clone ID: LIB3165-043-Q1-K1-H9
aaaccaagtcaacctaaagccttaggcaccatggcaacctctgctatccaacaatctgctttcgttggccagaccgttttgaagcagtccaatgagctcttacgcaaagtcggagctttcgatggtggtcgggttaccatgcgcagaactgtgaaaagtgcccctaccagcatctggtacggccctgaccgcccaaagtacttgggtccattctgagaccaaatcccatcatacctgacaggtgaattccctggtgactatgggtgggacactgctggggtatcagctgacccagagacatttgctaagaaccgtgagcttgaagtgatccactgcatatgggcaatgcttggtgcccttggttgtgccttccctgaaattctttcaaagaatggagttaagttcggagaggcagattggttcaaagctggatctc

SEQ ID NO: 39741 - DNA, 406 bp, Gossypium hirsutum
  unsure (1)..(406): unsure at all n locations; Clone ID: LIB3165-044-Q1-K1-A1
cccacgcgtccgggaaaaggtggtgggattggcaaaggaggaggtgttggtggtggaatcggaaagggtggaggatacggaggtggcatcggaaagggtggtgggattggcaaaggaggaggatatggaggtggaattggtaagggaggaggccatggaattggtggtgggattggcaagggtggtggagtcggtggaggaattggaaagggtggcgggattggaaaaggtggtggatttggcggtggtgccggaggtggatatggcaagggtggtggttttggaggtggagttaagtgtggagctggaggtggaaagggtggtggttttggtggaagtggtggtggtgagaatggacaccattgatattacaagcnttgcgatgcatgcatgcattgatcaaaat

SEQ ID NO: 39742 - DNA, 429 bp, Gossypium hirsutum
  unsure (1)..(429): unsure at all n locations; Clone ID: LIB3165-044-Q1-K1-A10
gcgaaatttatttgtttctgtatttccggaatatgagtaaagtttatgattggttcgaagagcgcctcgaaattcaggcgattgcagatgatataactagtaaatatgttcctcctcatgttaacatattttattgtctaggaggaattacgcttacttgttttttggtacaagtagctacaggatttgctatgactttttactatcgtccaaccgttactgaggcttttgcttctgttcaatacataatgactgaagctaactttggttggttaatccgatcagttcatcgatggtcggcaagtatgatggtcttaatgatgatcctacacgtatttcgtgtctatctcactggtggttttaaaaaaccctcgcgaattaaccttgngttaccaggcgtggtttctgggtgtgttgaccgcatctttt

SEQ ID NO: 39743 - DNA, 395 bp, Gossypium hirsutum
  Clone ID: LIB3165-044-Q1-K1-A11
ctttcataacatttcacgaacttcactctccagtctccaatggcggctgccgtctccaccatcggtgctgtcaaccgagcaccgttgagtttgaatggatcaggtgccggagcttctgctccaagctcagctttcatggggaacagcttgaagaaagtgagcgctaggttcaacaacaacggcaaggctccagtgggaagtttcatgattgtggctgccaaagaaatcgacgaagacacacagaccgaccaggaccgatggaagggtcttgcttatgatatctccgatgaccaacaagacattaccaggagggaaggtatggtcgactcattgttccaagctcccatgaacgatggtactcactatgctgtcatgagctcctatgagtacattag

SEQ ID NO: 39744 - DNA, 210 bp, Gossypium hirsutum
  Clone ID: LIB3165-044-Q1-K1-A12
ctcaaaatctcaaacccagatttgttctctctctctctctctctctccaatcaattaattcctccattggaggagcttaaggtttgttggtgttctgatctttgctctgtctgaaaaataaacagaattattaaccaacaccaacgccatgggaagatttggagagggaggattcgattcagtggtttggccttaacctatacgaacctt

SEQ ID NO: 39745 - DNA, 390 bp, Gossypium hirsutum
  Clone ID: LIB3165-044-Q1-K1-A2
atcggagctacttgtaagcaagtattttccttctcttcaacaatggggaactcaaactagtactctcagttttagtttcttcttattcttttcgtttacgcaaaacttcaaacagcttctggtcttacctcaatggctctccctcagctaatcccttctcactcttcttcttcactcactcaccagccttccataaaccctaacgcagccaatccataccccatgttgaagtcctttttgaagccatcttctctctctcaatctcgcaggtttcacaggctcagctctcttcgagcttcggcctcttccttccccgataatcaccaaaccgatccttctaaaccagacgacgtcgtagagctccctatatttcctctccccttggttctc

SEQ ID NO: 39746 - DNA, 348 bp, Gossypium hirsutum
  Clone ID: LIB3165-044-Q1-K1-A4
gcccattggttggttttggccaaaagacagctaaagaccccactttgaaaaccggaattgtcggccgaggagcttcatttcgagtccaaggccgacgccggcgcttccaaaacctaccctcagcaggccggcaccatccgcaagaacggttacatcgtcatcaaaaatcgcccctgcaaggttgttgaagtttccacctccaagaccgggaagcatggtcatgcaaagtgtcactttgttggaatcgatatcttcactgccaagaagctcgaagatattgttccttcttcccacaattgtgatgttccccatgtcaatcgtactgactaccagttgattgacatttct

SEQ ID NO: 39747 - DNA, 319 bp, Gossypium hirsutum
  Clone ID: LIB3165-044-Q1-K1-A5
gccaacccttccggaaaaccccaaaaattacctccaaatggggtttggcagaaaacactaccggattggaggagggaccactggagattggcttggaatataaaactgtttctggagttgctgggcctttagtaatccttgataaagtgaagggacccaaatatcaagaaattgttaatattcgattaggggatgggacaaccagacgtggtcaagtccttgaagtgatggagaaaaaagctgtagtcaatttttgaaggaccatccgaatgacaacaatatacactgtcaatttacaagcgagtgttgaaactcctgt

SEQ ID NO: 39748 - DNA, 278 bp, Gossypium hirsutum
  Clone ID: LIB3165-044-Q1-K1-A6
gaaagctcatttttcatgcgtttaaccttctcccaatttcttctgccctgttttaccctcccaactgctcctttggatttcttctgattccataactttttccttcctttcagccgccacaactgcttcttcttcatcactcatcaacggactgcttcttcttcttcatccgctcgccggctgccaatcatctgtgttcaattttggacaacagtgtttttgacagttcgtattccgtaggacaccagttcgaggaggggaagatccgtgtcgatgct

SEQ ID NO: 39749 - DNA, 397 bp, Gossypium hirsutum
  unsure (1)..(397): unsure at all n locations; Clone ID: LIB3165-044-Q1-K1-A8
gtncgcccacgcgtccgtgaatagaaaccctcaaaattccactaaaaaatggcctccacagcttccctctccaccgccgtagccaccacctctttcctccgcggccatccggcgccgaaaaccctaaactcccttcctttcaaccaatctcttttcgggctaaaaccccaacgaaatggccgtctcaccatggcagcatacaaggtgacactgttaacacccgaaggaccccaagaattcgtgtgccccgacgacgtatacatcgttgaccaagctgaggaagaaggcattgatcttccgttctcgtgtagggctgggtcttgttcttcgtgtgccggagtgattaagcaaggctccgtcgatcaatccgacggtaatttccttgatgatgaccaga

SEQ ID NO: 39750 - DNA, 302 bp, Gossypium hirsutum
  Clone ID: LIB3165-044-Q1-K1-A9
ctttcgtataactgtagcacatagtactagcaagcagtaatagcaagggcctactgcatgatctcatcagtgaccattgccaccaggaactgatgctccccggtacaagccaacatggtggcccccttgaccggcctgaagtctgcctgtgctttaccagccactatgaaggccaacaacgacatcacttatctcgcaagctacggtgggagagtgctacgcatgcaagtatggcctactctcgggaagaagaagctcgagacactctcatacctccccgatctgacacccgtacagttggc

SEQ ID NO: 39751 - DNA, 431 bp, Gossypium hirsutum
  Clone ID: LIB3165-044-Q1-K1-B10
cccacgcgtccgaaccggcatcactggaattgtgaatggcatggatgttcaagaatggaaccctaccactgacaaatacatcagtgtgaaatatgatgcaacaactgtaacgtatgcaaagcgattattaaaggtagctcttcaagcagaacttgggttgccttgcgatgagaatgttccattgattgggttcatcggtaggctggaagagcagaaaggttcagacatcttgacagcagctattccaaaattcattggacagaattgtcagattgttgtccttggaactggtaaaacggccatggagaagcagattcaacagctggagaccctatatcctggaaaagctataggagtagccaaattcaatgtcccattggcccatatgatttttgcgggtgctgattaccttttggttcctagtagatttg

SEQ ID NO: 39752 - DNA, 415 bp, Gossypium hirsutum
  Clone ID: LIB3165-044-Q1-K1-B11
ggcacccaccagggaagataggatcggtgtttgcacaggtattttcaggaccgacaatgttcccgttgatgaccttgttaagcttgttgacaccttcccgggccaatccattgactttttcggtgctctgagggccagagtttacgatgacgaagtgaggaaatggatcggagaggtcggagtcaatggtgtcgggaaaaagctcgtgaactcgagggaagggaagacgatcagataccgtcctagtctcaaccgaagatgaccattgagaagctgttggaatatggatacatgcttgttgctgagcaagagaatgtgaagagggttcaattggctgacaaatatttgagtgaagctgcccttggaaatgctaatgacgatgctatcaagagaggagctttctaaatgggaaatt

SEQ ID NO: 39753 - DNA, 415 bp, Gossypium hirsutum
  Clone ID: LIB3165-044-Q1-K1-B12
cttccacttcactctgggtcacttagtttctttgttttttgctcttggagtgaggaaatccataggaaacaagtacgtttcgtctctttttaattttcataatggctgggactggagtgttttcagacatattggatggagatgtttacaagtactatgctgatggtgaatggaagaagtcttcttctggaaaaactgttgcaattatcaaccccaccaccagaaaaactcagtataaggttcaagcttgtacacaagaagaggtgaacaaggttatggaatcagcaaaaactgcacaaaaatcatgggcttagactccactttggaagagagctgagctccttcataaagctgctgctatcctaaaggagcataaagcaccaattgctgaatgcctggtaaaaaaattgcaaaa

SEQ ID NO: 39754 - DNA, 125 bp, Gossypium hirsutum
  unsure (1)..(125): unsure at all n locations; Clone ID: LIB3165-044-Q1-K1-B2
gccacgcgtncgcaacaacggcctctacttcatctggcaccgtatctgaagccctcctttgtgaagctatgtctgtccatgcctacgcccaatcctacgaccaccggccctgcctgtgcaatata

SEQ ID NO: 39755 - DNA, 432 bp, Gossypium hirsutum
  Clone ID: LIB3165-044-Q1-K1-B3
cccacgcgtccgcccacgcgtccgaaacaaaaacaaaaccatctgctcatcgcagattcagatcgaaaattggggccaaaaaatacgaagaaaaatgacgatgtttcacttcttcaactgtgcgatcctcactttcggtcctcacgccgtctactactccgccactcccttatcggagtatgatactcttggtacttctgttaaagctgcccttgtttatcttggaactgctttggtaaagcttgtttgtctcgcaacgtttttgaaggtttctgagaatgacggcttcgatccgtaccaggaacttttgaaggcagagattggttttatagatgttgctggcctttattttgccttaacacagttgactcataggaacatctctcaaaatcataaatttcaagctgttggacttggatgggcatttgctga

SEQ ID NO: 39756 - DNA, 421 bp, Gossypium hirsutum
  Clone ID: LIB3165-044-Q1-K1-B4
cccacgcgtccgtacagaccatccaaactcgaaacttgaacgtcgcttcttttgttagaaagacgttagtagcggaaaattttgaacgttactattaaggaaggataatgctatccttgcgcttcgctattcctaccgcgaatacattaactccgcccaagattaaaccaaaaccgggtttagtagtacaaaccgcttggaaccaaacggacctttttccttctcttcccaaacgaaatgattataagctacaagcagctaccacggacttatctgtggcgggagatataccggcggaaggaggtggtggagcttccggcggagctgagcagagagttgatgccgaaacacgtagcggtgattatggacgggaaccggcggtgggctcggcagcggggattggcgacatcagcgggacacg

SEQ ID NO: 39757 - DNA, 420 bp, Gossypium hirsutum
  Clone ID: LIB3165-044-Q1-K1-B5
gccggcgccgctggttccttcttctctttctttattttttttccatcttttccggtggttttctctttattggccaccacgacttcttcttcagaagccaatagcagtgtcgggaggattagacgcatatccacgggtgtggccgccgttcagaatatagccttgtagctgacactccttgcgcttgtgttttgcccttgcaatttatcatctcctctaccccttgaggatgaagataaaagaagctaatgccggcgcacttaccaatttcgaagtactcggttttctacgatctcgaggggcatcgaaagatccgacaagagttattgttccaatagcaccatctgagttcaaggtttatgattatttggtagagagtgccgcttgcaatcaaacgaaagaacatgtcaaggagttctt

SEQ ID NO: 39758 - DNA, 376 bp, Gossypium hirsutum
  Clone ID: LIB3165-044-Q1-K1-B6
ctcactcaacattcccatttccaatctccagctcccaaggtaaatatgccgatcagaaacatagcggttggccggcccgaagaggctactcaccccgatgctctcaaggctgctttggctgagttcatctcaaccttgatcttcgttttcgctggatcgggctcaggaatggcctttaacaagttgactgacaacggagcaaccaccccggctggtctcgtagccgccgctctagctcatggcttcggtcttttcgtcgctgtctccgttggcgccaacatctcaggtggccacgtcaaccctgccgtcaccttcggtgcttttgttggcgggaacatcactctcttgcgcggcattctttaactgatcgcccaac

SEQ ID NO: 39759 - DNA, 422 bp, Gossypium hirsutum
  Clone ID: LIB3165-044-Q1-K1-B8
gcaaagtttcgacaatggctgtcgggaagaacaagaggatttccaagggaaagaagggaggaaagaagaaggcggctgatccatttgctaagaaggattggtatgatatcaaggctccatcagtttttactaccagaaatgttgggaagactcttgttacccgtactcagggtaccaagattgcttcagaaggactcaagcaccgtgtgtttgaggtctcactggctgatcttcaaggaggtgatgaggatcatgcttacagaaagattcgtttgagagctgaagatgttcaaggaaaaaatgttttgaccaacttttggggaatgaattttacaactgacaaactgaggtcattggtgcgtaaatggcaaactttgattgaagctcatgtggacgtaaagacaactgacagttacactttg

SEQ ID NO: 39760 - DNA, 452 bp, Gossypium hirsutum
  Clone ID: LIB3165-044-Q1-K1-C1
ctctttagtataactgtagcatatagtactagtaagcagtaatagcaatggcctcctccatgatctcatcggcaaccattgccaccgtgaactgctcctccccggcacaggccaacatggtggcccccttcaccggcctcaagtctgcctctgctttcccagtcactaggaaggccaacaacgacatcacttctcttgcaagcaatggtgggagagtgcaatgcatgcaggtgtggcctcctcttgggaagaagaagttcgagacactctcatacctccccgatcttacacccgtacagttggctaaggaagtagattaccttcttcgctctaaatggattccttgcttggaattcgaattagaggagggattcgtgcaccgtaagtactcgagcttacccacgtactacgatggacgctactggaacatgtggaaacttgccatgtttggg

SEQ ID NO: 39761 - DNA, 408 bp, Gossypium hirsutum
  Clone ID: LIB3165-044-Q1-K1-C10
gacattaccagagggaaaggtatggtcgactcattgttccaagctcccatgaacgatggtactcactatgctgtcatgagctcctatgagtacattagccaaggccttcgcacatacgacttggacaacaacatggatggattctacattgccccagctttcatggacaagcttgttgttcacatcaccaagaactacatgacccttcctaacattaaggttcctcttatcttgggtatttggggaggcaaaggtcaaaaaatctttccaatgtgagcttgtctttgccaagatgggaatcaaccccattatgatgagtgccggagaattggaaagtgggaacgccggagaaccagccaagttgatcaggcaaaggtaccgtgaggccgccgacattatcaagaaagg

SEQ ID NO: 39762 - DNA, 413 bp, Gossypium hirsutum
  Clone ID: LIB3165-044-Q1-K1-C11
cccacgcgtccgaagagaaccctcgtgttccgatcatcgtcaccggtaacgatttctcgacgctgtacgcgcctctcatccgtgacggtcgtatggagaagttttactgggcacccaccagggaagataggatcggtgtttgcacaggtattttcaggaccgacaatgttcccgttgatgaccttgttaagcttgttgacaccttcccgggccaatccattgactttttcggtgctctgagggccagagtttacgatgacgaagtgaggaaatggatcggagaggtcggagtcaatggtgtcgggaaaaagctcgtgaactcgagggaagggccaccatctttcgagcaaccgaagatgaccattgagaagctgttggaatatggatacatgcttgttgctgagcaagaaaat

SEQ ID NO: 39763 - DNA, 433 bp, Gossypium hirsutum
  Clone ID: LIB3165-044-Q1-K1-C12
gcgaaaattgatctccaacgttgaaacctcatctacaaagtgttttctatatatgaatgtgatcccttggcggcaataatgtccacggcttcggtctccggcttctgcctctcttccaataccacctctccttctaactcactccggcaacccacattgcggcggccctctatcatcgccaacctcaactcttccacttctcctcctacactcatccgaaatcaaccagttttcgcagcacctactcttttgctcactccttccaattggaaagaaaccatgggagacgagtcatacgaggaagccattgaagctctcaagaaactgctcaatgagaaaggagaattgaagagtgcagcgacggcaaaggtagagcaagtgacagctgagttgaagactgctgcttcctccgatgagtctgttgaccgcttga

SEQ ID NO: 39764 - DNA, 416 bp, Gossypium hirsutum
  Clone ID: LIB3165-044-Q1-K1-C3
cacactctccgtccggcctgaccgtctaactcccggctcccctattcccagaccgccggtgcgcctccctaaccaaacccacccttctttaaaacccgctaaaatcgagccctggagagccgccgcaatcctccatacgcgacgaccattagccgctcgtgccggttcacgagctgatgactccgctccgttcgagatgtctgttgagaacgcgctcaatctccttggagtctccgaaagagcttcttttgatgatattcttcgcgccaagaattcgattgttgcctctattaaggataaccaagaagctatcgcccaggttgaggctgcatatgacatgttgcttatgaggagcttaacacaacgacgagctggaaaagttgtagacagaagcattagatttgcagatgttaaac

SEQ ID NO: 39765 - DNA, 423 bp, Gossypium hirsutum
  Clone ID: LIB3165-044-Q1-K1-C4
cacccatcaagcttttcatcaatggcttcccttcaacaagcttcaatctctcttcaacccaagcttctttcatcttctcaacaccccagatcccttccctctctcaacctctctttttcagccactttcccttccctcaaactctccaccactcgccctcttcatggcggtgccaaaatgtcagcctccgccgcttccagctacgccaccgctttagccgatgtagccaagtccaacaacacccttgatgccaccagctccgacgttgaaaaagtcgagacaatcttctccgacccacaagtcctcgaattcttcaccaaccccaccattgatgtcctcaaaaaacgtcaagttttggatgaaaatgttagctcctccgagcttcagccgcacacggcgaattttctgaacatcctgggtgat

SEQ ID NO: 39766 - DNA, 426 bp, Gossypium hirsutum
  Clone ID: LIB3165-044-Q1-K1-C5
acactctaaaattcagttaacaattccacagttgttttcttaagcctctctctcagccatggctgcagccatctccaccgtcgctgccgctgccgccgccaaccgagctctgggagtgtcagtcccaacctcagctttcatggggaagaaagtgagctcaagattcaacagcaccaggcaggttccttcgggaagttttaaggtgatggcggcggagaaagagatagacgaagagacacagaccgaaaaggaccgatggaaagggttggcttacgatatttcggacgaccaacaggacattactcgagggaaaggggttggtggattccttgttccaagctcccatgaatgatggaactcactatgctgtcatgagttcctatgaatacctcagccaaggtctttaaacgtacaatttggacaaca

SEQ ID NO: 39767 - DNA, 437 bp, Gossypium hirsutum
  Clone ID: LIB3165-044-Q1-K1-C6
gggagactctttggtttacctgtagcatatagtaatagtaagcagtaatagcaatggcctcctccatgatctcatcggcaaccattgccaccgtgaaccgctcctccccggcacaggccaacatggtggcccccttcaccggcctcaaatctgcctctgctttcccagtcaccaggaaggccaacaacgacatcacttctcttgcaagcaacggtgggagagtgcaatgcatgcaggtgtggccgcctcttgggaagaagaagttcgagactctctcatacctgcccgatcttactcccgtacagttggctaaggaagtagattaccttcttcgctctaaatggattccttgcttggaattcgaattagaggagggattcgtgcacccgaagtactcgagcttacccacgtactacgatggacgctactggaccatg

SEQ ID NO: 39768 - DNA, 427 bp, Gossypium hirsutum
  Clone ID: LIB3165-044-Q1-K1-C7
cagaaaagccagagattccccgacaactccggcgataactgtaccccataccctatctctgcccttctcgactaccgcaccctcgttcctaagccctttctttgatctgagtaagaaatggcgatgtatatcgtatctcggcgactctccgctggatccaccacctcccagctggtcacctctctccgttatgccacctgctggagatccttctccacgtcttttagggaggaacgagacactttcggccccattaacgttccctccgataaattgtggggagcgcagactcagagatcgttacagaattttgaaattgggggagagcgtgaacggatgcctgaacctattattcgggcctttggtgttctcaagaaatgtgctgccaaggttaacatggaatatggtcttgatccaaccattggga

SEQ ID NO: 39769 - DNA, 427 bp, Gossypium hirsutum
  Clone ID: LIB3165-044-Q1-K1-D10
cttacaagtttcgtccttcaagttcctttgattccccgttctggaccaccaattctggtgctccagtttggaacaataactcatcacttactgtgggagcaagaggtccaattctccttgaagactatcatttggtggagaagctagctaatttcgatagagaacgcatacctgaacgtgttgttcatgctagaggagccagtgcgaaagggttcttcgaggtcactcatgatatatctcagctcacatgtgctgatttccttcgtgcccctggagtccagacccctctcattgttagattctccacggttattcatgaacgcggtagtcctgaaactttgagagacccccgaggtttcgctgtgaaattttacacgcgagagggaaattttgatctagtgggggaacaatttccctgtgtttttca

SEQ ID NO: 39770 - DNA, 427 bp, Gossypium hirsutum
  Clone ID: LIB3165-044-Q1-K1-D11
cccacgcgtccggcccggttttcgctgcccctgttcctttgctcaccccgagagaagagatgggaaacaagtcctacgacgaagccattgaagctctcaagaaacttctcagtgagaaaggagaactgaaagctgaagcagctgcaagggtagatcaaataacagcagagttaaacacaacatcagctgacggcaaaccatctgactcttctgttgagagactgaaagaaggcttcgtttacttcaagaaagaaaaatatgaaaagaatcctgctctgtatggtgagcttgccaagggtcaaagccctaagtatatgattgttgcctgctcggactctagggtctgcccatctaatgtgctggacatgcaacctggtgaagcttttgtggtccgtaatgttgctaacatggtgccaccatatgacca

SEQ ID NO: 39771 - DNA, 307 bp, Gossypium hirsutum
  Clone ID: LIB3165-044-Q1-K1-D12
gaagagcatccctccagaccatcagtgtctgattttcgccggaaaacagctagaggacagagagacctttaccgattccaccaacccataggagcccacactacacttcttacttagtatggacaatctgtatgctttagcatcttcatgtttatatcaatttacatcacactcaaacacaacttcatcattctgcataccatattactcttctgttattagacttaattaattcttttttttcttttttttatataaaaatataatttatttatccctttctgtataatcttcttttccttatttc

SEQ ID NO: 39772 - DNA, 423 bp, Gossypium hirsutum
  Clone ID: LIB3165-044-Q1-K1-D2
gagatctgttaccaggttttgaatcccaataatgggtgtttgtttcttcatggccggagttccctgagaatatagtcgctgctgggttccggattttagggaatcttttcttccttcctcgtaaaggttttagtctgctgggtttctggtgtttttgctgagcaatgttcatttctgcttgagctaagctttttgttatttgttactgtctttcgtccatcatagttggttttaccgagtctcccacgtttttgaactcaaatgttctacacgtgatggttgggtctttttcttttcttacagtggcggattgaagatctcgagtcattgtagttatggttcgcttttggcagttcaaagtgtgggtctagctttcacgggctttggccatggcagcagtttatgtagtctgccatgacaact

SEQ ID NO: 39773 - DNA, 378 bp, Gossypium hirsutum
  unsure (1)..(378): unsure at all n locations; Clone ID: LIB3165-044-Q1-K1-D3
cccacgcgtccgcccacgcgtccgcgcgtgcttagatcccgttggttgcaagacggnnntcgtcgataacattgatttccttnnngnnttgnaccgcgttcccgccgaactcanattcttatccttcagacaatgaaattcgaatccaagctgaaaggatttgtcgaagaaagcctccatagagaatggcagccaattccgttttgtagataaatgtttttgcggtgacaatcgggtagcccgttagattcgttagcgaagaaatctttagatataaagtggatgttcagagatcttcctgtttttatttcaatgaagccattatgtatatttttcgatacatatttggatatggatattgaaaaaatatgatctttt

SEQ ID NO: 39774 - DNA, 412 bp, Gossypium hirsutum
  Clone ID: LIB3165-044-Q1-K1-D4
acggctttggtctccggcttctgcctcacttccaactccacctctccttctaactcactccggcaacccacattgcggcggccgtctatcgtcgccaacctcaactcttccacttctcctcctactctcattcgaaatcaacccgttttcgcagcacctactcctttgctcactccttccaattggaaagaaaacatgggagaccagtcatacgaggaagccattgaagctctcaagaaactgctcaatgagaaaggagaattgaagagtgcagcgacggcaaaggtagagcaagtgacagctgagttgaagactgctgcttcttccgatgagtctgttgaccgcttgaaacaaggcttcatttacttcaagactgaaaaatacgaaaagaatcctgctctgtatggtgagc

SEQ ID NO: 39775 - DNA, 369 bp, Gossypium hirsutum
  Clone ID: LIB3165-044-Q1-K1-D5
cccacgcgtccgcccacgcttccgcccacgcgtccgcccttgcgtccggttcgatttcatggggaagaaagaagaggagaagcctcaagaggaggtgatcgtaaccgagtttgaaaaggttaatatcgaagagacaaatgcagaggaagaaggtgaggagaagaataagcatggtctcctggagaagcttcaccgatcagatagcagcagctccagctcttcaagcgacgaggaagaaggtgaaggagaagtgacgtagacgaagtaaatgaaggagaagaagggactggaagaaaagattgaagagaaattagaaggggaaaagaaagaagaggacacctcagttccagtagagaagtgcgatgagcc

SEQ ID NO: 39776 - DNA, 427 bp, Gossypium hirsutum
  Clone ID: LIB3165-044-Q1-K1-D6
attacttcatctgggtatgggagtttccttcatctgaggaagcgtgggtttcgtgggagtgtcgtcttaaccatggctgcttctggttcggtccagaagtctgaggaagagtggagtgctattctttccccagagcagtttcgaattttgagacaaaagggcaccgagtatccaggcaccggagaatatgataagttcttcgaagaaggtatctataaatgtgcaggatgtgggacttctctttacaagtccactacaaaatttaattcaggttgtgggtggccagctttctatgagggtctccctggagccataaatcgccatccggacccggatgggatgaggactgaaatcacttgtgcaggcttgtggtggccatttgggccatgtattttaaaggtgaagggtttccaacacccaccgatga

SEQ ID NO: 39777 - DNA, 415 bp, Gossypium hirsutum
  Clone ID: LIB3165-044-Q1-K1-D8
gggctctattgatcgacccatgaggcttgctgaaatttttgttgctgctgaacatgctctgaagcaaacaatttcaaatcctgatctgctgaaaactttgtcatccatacaggatattgagcaaaaatatatggatctcactaaaggtgctgctgacaattaccatcgttcttggtggaaaaggcatggtgttgtccttgatggtgaaattgcagccgtttgctttaagcgtgggaactttgacctagctgcaaagtcatatgagaaggtttgcgctctttatgctggtgaagggtggcaagatttattggctgaagtactgccgaatttagctgaatgtcaaaagatactcaatgaccaagctggctacctaacatctattgtacgattgctttcactagataaaggtttattc

SEQ ID NO: 39778 - DNA, 427 bp, Gossypium hirsutum
  Clone ID: LIB3165-044-Q1-K1-D9
cccacgcgtccgctctctcagatcagaactagagtgtttacatcctggtaagaggttgagttgccatgtttcagcttcctccaattcactatcaatctcaccctcatccaccctcgtggatgccaaagctcctcgtcaaccaactgctgcatccccacaatgtgtcactcttcctactcttcctcccccacccgttcagtcccagagtcgtccctggaagaccactgcctactgtcgcaagattgctcgaaatgtgatggctatggccactggtgagactttggccacgcgtgaagctccaaccgaagttaccccaactgagctgacagagtttatcaacaaaatacaagaaacatgggataaagttgaggacaagtacgcaatgagttcacttgctgtagcaagtcttgttttggtctagggtact

SEQ ID NO: 39779 - DNA, 409 bp, Gossypium hirsutum
  Clone ID: LIB3165-044-Q1-K1-E1
cccacgcgtccgcccacgcgtccggcatactcgtgaagttgtctacgaacatctaattgttgatggctttattcaggggtataaaaaatggatttttcatggggagtgtacatctagtggaacttcttcaacgattaatccgacttatcctgatactgattaccatcagtatgttagacaagatgacatggaaggtatgttgcgggatgcatttaatttgcacagtcatggtgagcaatcgtttccacctgattttattgcatccgatgattgtaatattggtggaaatgtttttggcgaaacgggaacaagtgcaccttatgaggagccaaatgaagaagccggcaagttctacaatttacttaatgaaatgaacgaagaactttaccgaggatcaaaatattcaaaa

SEQ ID NO: 39780 - DNA, 429 bp, Gossypium hirsutum
  Clone ID: LIB3165-044-Q1-K1-E10
cccacgcgtccgtttagctatagcatacactactagtacccactactagcaatggcttcctcaatgatctcatcggctaccattgccactgcctctccggcacaggctaacatggtcgctcctttcaccggcctcaagtctgcctctgctttcccagtcaccaggaaggccaacaacgacattacttctctcgcaagcaatggcggcagagtgcaatgcatgcaggtgtggcctcctactggaaagaagaagttcgagactctctcatacctccccgatcttacacccgtgcagttggctaaggaagtggattaccttcttcgctcaaaatgggttccttgcttggaattcgaattagaggagggattcgtgcaccgtaaatactcgagcctacccacgtactacgatggacgctactggaccatgtgg

SEQ ID NO: 39781 - DNA, 428 bp, Gossypium hirsutum
  Clone ID: LIB3165-044-Q1-K1-E11
cccacgcgtccgcccacgcgtccgaattcatattctatttaagaaggtcccaatttctcgatgtctttaacagcactcccgacgagactgctttctttcgactgatgctgaatcgtgaaggagttacagattctattgtcatgatccaacccacactcctacaatattctttcgatggacctccggttccggttctcttagacattcgttctatatccccggatgttattttactctttgactcgtacttttgcgtggttattcattatggatccaagattgctcaatggagaaagctcggttacgataaagacccaaatcatgggaatctaagaaagttgtttgaagcaccggagctggatgcaggtcagttggtggcaggacgagttccaccaccgaagcttattaaatgcgaccagcatagcagt

SEQ ID NO: 39782 - DNA, 396 bp, Gossypium hirsutum
  Clone ID: LIB3165-044-Q1-K1-E12
cccacgcgtccggttcgtaacaatgtcgactcttttgccttcaagcctggcaaatactacgccaagaagttctgcttggagcccacttccttcactgtcaaggctgagggtgttaacaagaatgcccctcctgagttccaaaacaccaagctcatgacccgtttaacctacacccttgacgaaatcgagggccctttcgaggtatccaccgatggcaccgtcaaattcgaggagaaagatgggattgattatgctgccgtcacagttcagcttcctggtggtgagcgtgtgcctttcctgttcaccatcaagcaattggttgcatcaggcaaaccctgatagctttggaggagacttccttgtaccatcctacccgggctcatctttcttggaccc

SEQ ID NO: 39783 - DNA, 421 bp, Gossypium hirsutum
  Clone ID: LIB3165-044-Q1-K1-E2
gaaaaacttaatcatggctcggttgacgttggtgtcctccatcatccttctgctatgctccgtcgccgccggatcaactttcgaggactccaaccccatccagatggtatccgatggcctcagcggcttcgaatcctccgttcttcgtgtcatcggtcacactcgtcatgctctctccttcgcccgttttgcatacaagcatgggaagaggtatgaaaacgtggaggagatgaagctacggtttcagattttcaaaggcaacttggatttaatcagatccactaacaagaagggactgccttacactcttgctgtcaatcagtttgctgattggagctgggaagagttccagaaacacagattgggggctgctcaaaactgctctgctaccacaaagggcaatcaccagctcactgatgtc

SEQ ID NO: 39784 - DNA, 294 bp, Gossypium hirsutum
  Clone ID: LIB3165-044-Q1-K1-E3
gcggttggttcacggtatgtaacatttccattgaaattccttaccaactaacaccatgaaagagatctctatgtaacatttcctccaaatccctaattctagtaaaaccgggagatggcttggttaacacgattcttgacggcggtggctttctttgccgtcggagtaatattctcgccggagacctttggatcaaaatccgacgacacaatttcacccattctctctacttctattaaactagctcatctcctctgcttcgcaaccggctggggcaccgcccctttgggtcac

SEQ ID NO: 39785 - DNA, 381 bp, Gossypium hirsutum
  Clone ID: LIB3165-044-Q1-K1-E5
cccacccgtccggaaaaacaaaaatggccatggcattggcgcttcgacgactctcctcttccattgacaagcctctccgtcctttcttcaatgccccttccctctattacatgtcgtctttgccaaatgaagctgtgtacgagaaggagaaacctggcgtcacttggccaaagcaactgaatgctccacttgaaaccagtgatcctgaaattgctgacatcatcgagcttgaaaaagcgcgccaatggaagggacttgaactcattccatcggagaacttcacttcggtgtcagtgatgcaagcagttgggtctatcatgaccaacaagtacagtgaagggtatcccggtgctagatactatggagggaatgagtacatcg

SEQ ID NO: 39786 - DNA, 147 bp, Gossypium hirsutum
  Clone ID: LIB3165-044-Q1-K1-E7
gaaaacccaaaaaacccgaagctcgaaaatgggaagctctagattctcgttcagtttcatcgcgatttgcgcgatcctggccatccacgtggcggcttccgcttcgtctcccatgctcgattttggcggcgaccattttcttccgat

SEQ ID NO: 39787 - DNA, 410 bp, Gossypium hirsutum
  Clone ID: LIB3165-044-Q1-K1-E8
caaaaagaaggcttggaggaagaagagaaagtatgagcttggaaggcaaccagcaaacacaaagttgtcaagcaacaagacagtcaggaggattagggttcgtggtggaaatgtgaagtggcgcgctctgaggctcgacactggaaactactcatggggaagtgaagctgtgactcgtaaaaccagaatattggatgtggtctacaatgcatctaacaatgagcttgttcgtactcaaactttggtgaagagtgctattgttcaagttgatgctgctccattcaagcaatggtatctccagcactatggtgtcgaccttggtcgcaagaagaaaacacttgcagcagctaccaagaaagatggagaggaaggtgaaactgttgctgaggaggcgaagaagagcaaacatg

SEQ ID NO: 39788 - DNA, 425 bp, Gossypium hirsutum
  Clone ID: LIB3165-044-Q1-K1-E9
cccacgcgtccgcccacgcgtccgcccacgcgtccggaaattacgggtaagaaacggaaaacacaaaaaatcttgaagccctcaactctgagatggcatcgacgacagccaccgctcgagccgtcgtcttctcccgcatcaccaccttgtccgcaaaacctctcacaccttctctatctcgtttcttccgtaaccgtcacaaccgcgcattttccgccctaactgtcagctgcttaaacagtggcggagtctgcgacgatgactacttcgtatcaacgcagaaatcgaatttagatcgtggattgctagtaattgctaatatgttgaagaacattgagcctctcgacaattccgtagttccaagagggtttctgattccgccaaggaatccatgaagcggactatctccactatgctagggattc

SEQ ID NO: 39789 - DNA, 391 bp, Gossypium hirsutum
  Clone ID: LIB3165-044-Q1-K1-F1
ctttctgcagaactaaaactgaaaagccttcccaaactcagctcacacccacagaaagagagaggaggagaaaacataacttctagcaaactgggttgttgaaatggcatcgaagttgtgtgactcgtgcaaatcagcgacggcgactcttttctgccgggctgactcggcgtttctatgctccaactgtgactccaaaatccacgcggccaacaagctcgcctcgcgtcacgctcgagtttgggtctgcgaagtctgcgagcaagcgcccgctcacgtcacttgcaaggccgatgcagccgctctctgtattacctgcgaccgtgacatccactccgccaaccctcttgctcgccgacacgagcgccttcctgtaacccccttctacgac

SEQ ID NO: 39790 - DNA, 431 bp, Gossypium hirsutum
  unsure (1)..(431): unsure at all n locations; Clone ID: LIB3165-044-Q1-K1-F11
cccacgcgtccgctaagccatgaaaccccaatcgctttgcatcttttttcttctccatttcttcgctttactatgcacggcggcgtcggagtatgaagatccgagcaacggcggaaccatcgtttttactacacttggccgatcaaattatgcttgggacatctatactcttccaacttccgacccaccaagtccttccaatgaacttcgggttaccgacggcgaatctgtcaacttcaacggccagttcccttcgacctcaccgtcctctgttctctctctgctacataaccgaagcctaattcgaaccccaggtccacaagctccgccgccccttcagctcgtttacgtgacggaacgcaatgggatgccgaatatttactacgacgcgctntattacagtgcgcccgggaagtactagatcgagatcg

SEQ ID NO: 39791 - DNA, 419 bp, Gossypium hirsutum
  Clone ID: LIB3165-044-Q1-K1-F12
cccacgcgtccggcaggctatctcaggatggcaaggaatgtggccaataccgtaactggcaaatgtgggatcgcgatggaagcctcttatccgatcaaaacaggtgaaaatccccccaatcccggaccgtctccaccatctcctataaaacctccgaccgtgtgcgatagttattattcctgtcccgagagcaatacctgctgctatatacgagtactataactactgctttgcttggggatgctgcccactcgaggctgccacttgctgcgaagatcgctacagctgctgccctcatgactaccctgtgtgcaacatacatgaaggcacctgcttgatgagcaagggcaatcctttggcagtgaaagcactgaagcgcactccggctaaaccgttctgggcacattgaaagcctggga

SEQ ID NO: 39792 - DNA, 413 bp, Gossypium hirsutum
  unsure (1)..(413): unsure at all n locations; Clone ID: LIB3165-044-Q1-K1-F2
cccacgcgtccgattgcccgtagatacacagggctcgaccggggcatcagcttcctgcaccggatgggaataggattcatgatatcagtattagccactctggtagcaagcttcacggaagtgaagcgtaaagaagcggctttagcacatgggcttcaagacaaggctcatgcaatcatccccatctcagtgttctggcttgtgcctcagtacagtcttcatggaatagcggaggcattcatgtcgattggacacttggaattcttttatgatcaggcacctgaaagcatgaggagtacagctaccgcactgttttggaccgcaatctcagtcggaaattacatgagcancgctgctggtttcttagtacacanattcagcgcaagagctggtggatcaaaattgcttcctga

SEQ ID NO: 39793 - DNA, 240 bp, Gossypium hirsutum
  Clone ID: LIB3165-044-Q1-K1-F3
tttttgtctaaattccttgcccttggttcctagaaccagacccaaaccccaactcaaagaccccgcggctataccaactggataatgtcgtggtattggccgacttatatccactcacctggccggactcggcgctaaacgtcgcagtgactacacttccagagcagaccaagccgatctcagagctacccagatcaatactctgagtcctgacgactacgcgtgagctgcgactgtcaa

SEQ ID NO: 39794 - DNA, 422 bp, Gossypium hirsutum
  Clone ID: LIB3165-044-Q1-K1-F4
cccacgcgtccgcccacgcgtccggaataaggttcctaccctttttaatcgccatttaattcctgctaccactactacctgttccactactacacttgccactctttccctccacccaaaccccacttctttcaaaatcgccactaaaaaccccgctcctctccaaaacatcgtgaaatcctcgtcaccagttcctgggattgttgggttttcaatgatggcgtctgcacctgctgaagagaatggcctttcaaggtggccgaaacctgtgtgcgctaaatcaacaagggtgatattactaagtggtttattgatggctcctctgatgctattgttaatccagcaaacccgagaatgctcggaggtggggcgctgatggagccatacatagagctgctggcccagaacttaaagaagcatgc

SEQ ID NO: 39795 - DNA, 403 bp, Gossypium hirsutum
  Clone ID: LIB3165-044-Q1-K1-F6
ttcctcccgcctcctcctccacaaccgtcaccagcaccactcctctcctcccccaaaaccacccatggtggcgtcgtcatttccacatgaataattccctctcctccgaactatcaggagcagtgggagacttgggcactttcatcccaattgtcctaactctcaccttggtttcccacttagacctctccacaactctaatcttcactgccctttacaacataaccactggcctacccttccacatccccatgcctgtccaacccatgaaatccatagctgccgttgccgtctccgaaacccctcaccttaccacctcccaaatcgccaccgctggtgcctctactgccgccgtcctcttctttctcggagctaccggtctgatgtcgaaccctttaccgtc

SEQ ID NO: 39796 - DNA, 428 bp, Gossypium hirsutum
  Clone ID: LIB3165-044-Q1-K1-F7
ctcatttccttttcattctctaattaatttaacatatttctctttgccattttccattcatggagacaaccaatgggacatccatcaataaccacaagttcaccatccctgctgtgaacgatgtcgagcaacaacaagcaagcatggaactcgaacccaccgacgatttcaactactcgaaacgatcacaatggctacgagccgcggtcctaggtgccaacgatgggctcgtctccaccgcagccctgatgatgggtgttggtgcagtaaaacaagacattaaagccatgatattaactggttttgctggtctagttgcaggggcttgcagcatggcaataagtgagttcgtttcggtgtattcacagttagatatagaggtggcccagcttaagagagacaagctaagagacgaaaattcagaaaca

SEQ ID NO: 39797 - DNA, 358 bp, Gossypium hirsutum
  Clone ID: LIB3165-044-Q1-K1-F8
aaaaggaaagggtgttggttttgcagatttctcaggcctacacaactcctctactagccttccctttgccaggaaaacctctgatgacttccattcactcgttgcttttcagacatctgctctaggaagcaataatggcgggtacaggaaagggatggcagaggcaaagctaaaggtggctataaatgggtttggtaggattggcaggaacttcttaaggtgctggcatggccgtaaagactccccacttgatgtcattgccatcaatgacactggtggtgttaagcaggcttctcaccttctcaaatatgattccacccttagcatcttcgctgccgatgtcaagcctgtcggcact

SEQ ID NO: 39798 - DNA, 290 bp, Gossypium hirsutum
  Clone ID: LIB3165-044-Q1-K1-F9
cccacgcgtccggaggggcataaaagaattcttgcggccacagatttggttggaaggggaattgacattgaacgagttaacattgtcatcaactatgacaagcctgattctgctgatacatacctgcacagggttggcagatctggtacgtttggcaccaagggtcttgcaattacgttagtttcttctgcttcagattcatgatgtgctcaaccaggtccaagagaggtttgaggtggatataaaggagcttcctgagcagattgatacatctacatacatgccgtcat

SEQ ID NO: 39799 - DNA, 380 bp, Gossypium hirsutum
  Clone ID: LIB3165-044-Q1-K1-G1
ctctaacagcgacgatcgatttttattaattttctttgccgtcggatctttggttttccattttgattcaatcaggattgcttcgttttgaacccaggcgacgatgaagaaggctatcggtcaaactgttagagagcttaagagagaggttaataagaaagttctcaaagttcctggaatagagcagaaggttcttgatgctaccagtaatgagccatggggtcctcatggatcacttcttgcagatattgcaatggctacaagaaactatcatgagtatcagatgatcatgacagtgatctgggaacgtctaagtgacactggaaagaatttggcgtcatgtctacaaaggctctgactgttcctagagtaccttgttg

SEQ ID NO: 39800 - DNA, 428 bp, Gossypium hirsutum
  Clone ID: LIB3165-044-Q1-K1-G10
gcaggagtttgcctgatagtcaagctgggttttttgatttgatcaagatatatttccccatggtatacgacatcaagcacatgatgaagttttgcaacagccttcatggtggtttgaacaagctcgccgagttgttggaagtggaaagagtcggtgtgtgccatcaagctggttccgatagtttgctcacctcatgcacctttaggaagttgagagataactttttcaacggctccacagagaaatatgcaggtgtattgtatggcctaggtgtccagaatggacagaatactaattagaagaaaataattgaaaaaaaatgttgatggatgtagactacttagagtttgagcctgaattttctttgtatacattgtcaaaaaaaaagtattgttgatttagctgtgacttttctccttttgcttgca

SEQ ID NO: 39801 - DNA, 429 bp, Gossypium hirsutum
  unsure (1)..(429): unsure at all n locations; Clone ID: LIB3165-044-Q1-K1-G2
ctacctttcccccttttcctttaagccctcaatcaacttccaatccctttgtattttcttctttgctttagagaaaacaacactggagagcccatccatggctgcctgtggaagcattaaacacatctttgaaaacccattacctgaaaaccctactttgcttgaatccctttcttcttcttcttcttcttcatggaagcctgggattaaaccccttgaccaacaaccttctttcactgaattctttggtgaacttcatttccaggaaaatttaagtatttcccaactcttcttctactacctcttcctttcctacattgaacgtctccgggagtattgggtttattcccatggaaatggtgaaaacagttctaattgccataaggagagtgatagnctttcgttgaaccctgagatgcctcagctgtg

SEQ ID NO: 39802 - DNA, 408 bp, Gossypium hirsutum
  unsure (1)..(408): unsure at all n locations; Clone ID: LIB3165-044-Q1-K1-G3
ctctgtcactagggtttcgaactttccttgatttttttccttgaaatcgctgctttcgaaggcaatatgagacccattttctgtggaaactttgagtatgatgcacggcagtctgatttggaacgactcttcagaaaatttgggagaatcgaaagagtagatatgaagtctggatttgctttcatatatatggaagatgagagagatgctgaagatgccatccgagcacttgatcgaacagaatttggtcagaaaggacgtaggcttcgtgttgaatggacaaagcatgagcgtggcattagaaggcccgagggtggggggcggtggatcaaagaagatctgcagcaaatacaaagaccttcaaagactttatttgtcatcaattntgatccttaccacactcgaact

SEQ ID NO: 39803 - DNA, 277 bp, Gossypium hirsutum
  Clone ID: LIB3165-044-Q1-K1-G4
tggggtggggggaaaaatttttgaggagggtttcctttgttgccttgtgtgtggtggcactcgcggtggtgctgttttcgggtgaaagtcgcacggcggaggcagtgacatgtaatcccgtggagcttgccccctgctcgccggcgcttacgtcgtcctcgcctccatcaagcgcttgttgcagcaagctgaaagcgcagcagccatgcctctgtggatacattaagaacccatctcttaaacagtatgtcaacagtcctaacgctaaaaaggtggc

SEQ ID NO: 39804 - DNA, 398 bp, Gossypium hirsutum
  Clone ID: LIB3165-044-Q1-K1-G5
cacgcttggaaccaaacgccatctgatgatcagagtcgagtagaaaccaagctaacataacaaaaaggccatcttctttcatttcatttcttttcccagttccctatttgtcacaaaacagataccatcccttccccaagaacctaaaatatggcggatgcagctccacccagtaaatcaagagacctcgataagctgctcctccgaccgggaaacctcgttggcccaaccttcgaccctggcgttcaattacgggatgatttacaagaatatgcgagagttttggtggtgggagctggaagattgggtgtgagctgcttaaagatttgctctctcgggtttaaaaatcttgaagcatcgacatgatcggattgagcaccaatctaaccgtcattctc

SEQ ID NO: 39805 - DNA, 249 bp, Gossypium hirsutum
  Clone ID: LIB3165-044-Q1-K1-G7
cccacgcgtccggtgagactctcacgtatacctgcaacatatagtagtagccagcgataatagcactggcctcctccaagatctaatagcattgcattgccaccgcgaaccgatgattccatggacaggacaacatggtggaccacttcacgggtcttaaatatgtctctgtttttccagcatccttgtatgacaacaaccaccctgacttatcttgcatgcgacggcgtgagagagccatgcatgcca

SEQ ID NO: 39806 - DNA, 417 bp, Gossypium hirsutum
  Clone ID: LIB3165-044-Q1-K1-G9
tttagctatagcatacactactagtacccactactagcaatggcttcctcaatgatctcatcggctaccattgccactgcctctccggcacaggctaacatggtcgctcctttcaccggcctcaagtctgcctctgctttcccagtcaccaggaaggccaacaacgacattacttctctcgcaagcaatggcggcagagtgcaatgcatgcaggtgtggcctcctactggaaagaagaagttcgagactctctcatacctccccgatcttacacccgtgcagttggctaaggaagtggattaccttcttcgctcaaaatgggttccttgcttggaattcgaattagaggagggattcgtgcaccgtaaatactcgagcctacccacgtactacgatggacgctactggaccatgtgg

SEQ ID NO: 39807 - DNA, 399 bp, Gossypium hirsutum
  Clone ID: LIB3165-044-Q1-K1-H1
cccacgcgtccgagaaaatggaaggttcatctttacgccattggaaggtaatcccaattctgcttattacccttcaattcactactaacatggtcttgagcttagctgatgcaccatttgacaaacaaagaaacattgagtacatcaaatcttcatgcagctccacaacttatcccagactgtgctatcgctcactctcaatctatgcaaacaaaatcaaaactagccccagattgttagtggatactgccctcaatgttaccctcaaggccagcaaatcaactccaaggttgatggtgaagatctctagaatccacggtttgaggcctagggtagctgctgccatggcagattgcatagaggtgacggtgactctgttgatgagcttcaacagtctat

SEQ ID NO: 39808 - DNA, 340 bp, Gossypium hirsutum
  Clone ID: LIB3165-044-Q1-K1-H12
tccacgcgtacgcccacacgtacggcagggtgtgcatctataaagaagaaatagattgggaaagcctcacatttcgcccccttcctattttcactcttttcagtcctaacaaaaggcggcccctcaactctcttctctctttccccttcactgtttcaactcaaagaaatggcggaggagaagaaggctcaatctgctggggtttggcctacggttaaaccttttgtcaatggtggtgcctctggtatgcttgctacctgtgtcatccaacccatcgatatgatcaaggtaagaatccaactgggtcaaggatcggcagcaactgttaccaagaacatgc

SEQ ID NO: 39809 - DNA, 366 bp, Gossypium hirsutum
  Clone ID: LIB3165-044-Q1-K1-H2
cgcgtaatttctacataattaacaacattataatgccaaattcaaaccaaccaacttggtactagataagagttcaacctatgtatataccaaacctataggagacaacacttaaagaatttgtacttactcttcaaactttgataaggtgatgaaatctcctgaagtgggcatgggttctattggaacatcgatatgcctcctggcacagcgaaaaaataatttcggtgatcacaacccatggtataagcaagtgacatattaagaatatgagcaccaccattatgtaatactaaacccacaatcaagccttcatcccaacaagaaccatcaacactcaatagctcactgaactccatatctttc

SEQ ID NO: 39810 - DNA, 372 bp, Gossypium hirsutum
  Clone ID: LIB3165-044-Q1-K1-H3
cggttctttggtttcttcaaacccccaaaacaatggcaatctcacttaatacaaatcttcatcacccgtctctgagttgtgggactaaggtttactctggtttgaagcttcaatctccctgtttgtttgcaactggtagaccaaacttgactgcggacttctataccagagttaataagagtctccaatgcggaacgcgaagctgcaaagcaacaaggtcacgagtagggatgatgccaataggaactccaagagttccctatagagttccaggtgaaggaacttggcaatgggttgatttatggaatgcactatatcgagaagccgttatcttcattggacaacatatagatgaggaatttagcaaccaaa

SEQ ID NO: 39811 - DNA, 326 bp, Gossypium hirsutum
  Clone ID: LIB3165-044-Q1-K1-H4
gaccgactcgtccgaccactcctccgctactagtacccactactagcaatggcttcctcaatgatctcatcggctaccattgccactgcctctccggcacaggctaacatggtcacccctttcaccggcctcaagtctgcctctgctttcccagtcaccaggaaggccaacaacgacattacttctctcgcaagcaatggcggcagagtgcaatgcatgcaggtgtggcctcctactggaaagaagaagttcgagactctctcatacctccccgatcttacacccgtgcagttggctaaggaaagagattaccttcttcgctcaaa

SEQ ID NO: 39812 - DNA, 321 bp, Gossypium hirsutum
  Clone ID: LIB3165-044-Q1-K1-H5
tccgacacgggcaagggaaagggtgtttaccattttgttgacaaatatggggctaacgtcgatgggtacagtgctatctacaacaccaacgactggtctcccagtggtgatgtttatgttggcggtactaccggattggcaatctgggcggttaccctagccggaattcttgccggtggtgcacttcttgtttacaatacaagtgctttggcgcagtagatgtctctaaagagatccctgcactcggttgcattatatgctgtccgatgtaattgttgtgatcaacagaaccatcccacaactactgtgcatatctttatc

SEQ ID NO: 39813 - DNA, 381 bp, Gossypium hirsutum
  Clone ID: LIB3165-044-Q1-K1-H7
gttgtctctaattctttgtaggaaagcatcaagaatggaggcattgaggatggaagtattttgggtgatgttgattgtgttggttgccgtatttaaagtccaaaatgtggcggcagctgaagctccggcccctagtcccacctccgatgccacaatcttcgtgccgtcggtgcttgcttcccttgttgctcttgcatttgagcttgttttttaaaatgctggtgttttatgagacctataatattttttaaaattcttttctattttctacttatgactacagttcagtgtattcatatttttgttattgttgtagtttcaatatgtaattgttgtgatttgtttcctagtgacctaataaattatttgttttctttttat

SEQ ID NO: 39814 - DNA, 411 bp, Gossypium hirsutum
  Clone ID: LIB3165-044-Q1-K1-H8
cccacgcgtccgggacatttggtcttggatatgtgagcttcctaacaatgacgattggggtgaatcagacccacacccaccactcgcctttacaatggcgagttccgaggaaggcgactcaagctcaactcgttcgatccaactcaaagctgagcgtaccatggggtccgattcagaggtctgtataaccttcacaataagcttcgaagggttccaatcttcacctctttgggtctctgacccctgtcctctatcttcagagcaacctttcctcgctttagtacttcagcttctccaagaaaccatcagccgttcaccagcaatgcccaacaccatttgcccgaggtctcagcttcaaaaactcaaacccgaaccgatttcttggatcaatgagtctcactcacccgagtc

SEQ ID NO: 39815 - DNA, 429 bp, Gossypium hirsutum
  Clone ID: LIB3165-044-Q1-K1-H9
taatgtttcagcttcagctattaaaggatttaaagctacaatacaggtatactgatacaaactacaaagcaactcattgtacttcatttagcaccttttgagggttcctaagctttcaagcaacaaaatttcgttaggataagaggtgagttagaagaagtctgtcatcaatgaatccagcggctgctgctaaccagaaagaagagttcaaattgaaggacacaaaaccgcagctcggggaacgatggcctcatggaggaacacgccgcgggagtggttggattagcagtgaacgagcaacaagcacatatgaccttgttgagcagatgttttatctttatgtcagggttgttaaagccaaagatttgcccactaatcctgttaccggaaccaatgatccttatgtcgaagtgaagctggggaattata

SEQ ID NO: 39816 - DNA, 397 bp, Gossypium hirsutum
  Clone ID: LIB3165-045-Q1-K1-A10
gcttcttttgttagaaagacgttagtagcggaaaattttgaacgttactattaaggaaggataatgctatccttgcgcttcgctattcctaccgcgaatacattaactccgcccaagattaaaccaaaaccgggtttagtagtacaaaccgcttggaaccaaacggacctttttccttctcttcccaaacgaaatgattataagctacaagcagctaccacggacttatctgtggcgggagatataccggcggaggaggtggtggagcttccggcggagctgagcagagagttgatgccgaagcacgtagcggtgataatgggacgggaacgggcggtgggctcggcagcggggattggcgacatcagcgggacacgaagccggtgtaaaggcgttg

SEQ ID NO: 39817 - DNA, 391 bp, Gossypium hirsutum
  Clone ID: LIB3165-045-Q1-K1-A11
cccacgcgtccggcctgctggaggaagaggggatgaggaagagctagccaaggagaacaacaagagtgctgcatcttcatcagggaaaatcaccttgagcgtcacaaagagcaagccggagaccggtgaagttatcggtgtgttcgagagccttcagccatctgacactgacttgggtgccaagactccaaaggatgtcaagatcactggtgtctggtatgctcagcttgattcataaacaagtcttgtatgaatttgtttattctcggctgagattttgtaatttttaaacaagtgttgctaaactttgcagtaatccactgagaaacccttatcttctttggatgttactatgctggctttttataataattttctaagcttctagtac

SEQ ID NO: 39818 - DNA, 438 bp, Gossypium hirsutum
  Clone ID: LIB3165-045-Q1-K1-A12
ctgtctgtctctctgttttactccacaaccactatcactaccattatggcttcggctactgtttctgtagccaaacccaaccttcagattcaggcaaaaggaaagggtgttggttttgcagatttctcaggcctacacaactcctctactagccttccctttgccaggaaaacctctgatgacttccattcactcgttgcttttcagacatctgctctaggaagcaataatggcgggtacaggaaagggatggcagaggcaaagctaaaggtggctataaatgggtttggtaggattggcaggaacttcttaaggtgctggcatggccgtaaagactccccacttgatgtcattgccatcaatgacactggtgggtgtaagcaggcttctcaccttctcaaatatgattccacccttggcatcttcgctgccgatgtc

SEQ ID NO: 39819 - DNA, 337 bp, Gossypium hirsutum
  unsure (1)..(337): unsure at all n locations; Clone ID: LIB3165-045-Q1-K1-A2
cacgcgtncggcagccaccacaaggactgctccaccttctcctctgttttcaagccaaactccgcccttccaacttcgatttggacgaaaagaagcaaagatgtcgacggcgcgcctcttttggtgaaaaacgtgcatggtgggtgggggggtttgctgaacgtgggtggaaacggttgccgcgacatgggcagttgctgcagcgccgaaaaaactgctgctagggttcagtttttttctgctgaaatagttcaatagcttgggcttgaatttggactaacagatgggcttgtaacttgggccacgttttattaaatttgtaattgtgtttggattt

SEQ ID NO: 39820 - DNA, 290 bp, Gossypium hirsutum
  unsure (1)..(290): unsure at all n locations; Clone ID: LIB3165-045-Q1-K1-A4
gccgttggggctttcccctctttcctttccgccacccgtaacttctttgtacgaaatcatcggcgattgccgncgttgccgtgtatccttctttttcttttcctttctctggttttctttctttgatcttcacgcggcatttttgaagtggttccgagatgaactgaaggagcttgagattggaagtattgacacctgtttttcttattcattcagactccctcactcgaccactcaaaacaatctctcgaccctatgcttatggtctaagaaccaattatttacgacct

SEQ ID NO: 39821 - DNA, 390 bp, Gossypium hirsutum
  unsure (1)..(390): unsure at all n locations; Clone ID: LIB3165-045-Q1-K1-A5
cggacgcgtgggctttgaattgaaaccctcaaaattccacttaaaaaatggcctncacaggcttggctctccaccgccgtagccaccacctctttcctccgcggccacccggccccgaaaaccctaagctcccttgctttcaaccaatctcttttcgggctaaaaccccaacgaaatgggcggctcaccatggctgcatacaaagggacactggtaacacccgaaggaccccaagaattcgtgtgccccgacgacgtttacatcgttgaccaagctgaggaaagaaggcattgatcttccgttctcgtgtagggctgggtctnggtcttcgtgtgccggaatgattaagcagggctccgtcgatcaatccgacgggtatttcttgatgat

SEQ ID NO: 39822 - DNA, 196 bp, Gossypium hirsutum
  Clone ID: LIB3165-045-Q1-K1-A6
tttcttttaaaccgaaaaagtaacggtcatttcaatgggtggtcttgcttcttcttcggcctcctctcttctcttctcatcttcacctaccaaggtgccttcaccttctctatggcctcctctacacttggctcttcccacttcttcttttctctcttcttctctttcactttctccttcctttcatgcctacccc

SEQ ID NO: 39823 - DNA, 379 bp, Gossypium hirsutum
  Clone ID: LIB3165-045-Q1-K1-A7
ctcaagtcttcacctattatcgacaagtccgagtggattaagggtcaaaacctccgccacgcttcggtttgttttgtacagtgcaaccctacatcggccgcctttaccgtccgtgctagttcatatgccgatgagctggttaagaccgcgaaaactgttgcatctccaggtcgtggtattttggccatggatgaatcaaatgctacatgtgggaaacggcttgcctcgattggtctcgagaataccgaggcaaaccggcaagcttaccgtacccttctcgtgtctgcccctggcctcggtgactacatctcgggagctatccttttcgaggagactctctaccaatctaccatcgatgggaaaaagatggtcgatgttc

SEQ ID NO: 39824 - DNA, 451 bp, Gossypium hirsutum
  Clone ID: LIB3165-045-Q1-K1-A8
gtttgtaactgaaaaaacaaaacccaatttgaaaccctaacaaagaaccagggaacaccgaaggaagaatctcgggaaccatggacagagactggggctccaaacccggttctggaggtgctgcctccgcccaaactgaagccatggaccgccgcgagcggctccgtcggcttgctcttgaaaccatcgatctcgccaaagatccctatttcatgcgcaaccacctcggcagttatgagtgtaagctttgtctgacgctacacaacaatgaagggaactatttggcacatacgcaagggaagcggcaccagaccaacttagcaaagagagcggcgcgtgaagctaaggaagctccggctcagcctcagcctcacaagcgtaaagtttctgttcgtaaaacagtcaaaattggtaggccaggatatcgtgtgacaaagcaatatgatccgga

SEQ ID NO: 39825 - DNA, 353 bp, Gossypium hirsutum
  Clone ID: LIB3165-045-Q1-K1-B10
aaaataatcgaaactgacgttagctacacgttcttaaagacaaccctggcagatgattattcggaagagagctcttacaatgttgtggtgtcagctgaaggaagcattggtacaaacgactacaaagttgcgaaatcccagatagcatctttagtggcagatgttttctccaacacagcagtggcagaaaacaaggttgtggaagtttttactagcccatcagctccatcgaagagtgtagacgagcttttcagtgctattcctgaggatggaagaaggaaggcgtatgcagaagccaccgcaagggctaaagctgaagaagaggcagtattagcagctgaaaaagctcgtga

SEQ ID NO: 39826 - DNA, 330 bp, Gossypium hirsutum
  unsure (1)..(330): unsure at all n locations; Clone ID: LIB3165-045-Q1-K1-B11
gggaagaaaaccaacttgttattcattagttctcaggattaaaacccggaaatcgagaaacaaaggccaataactcaaagaaaaggaaaagcaaaagtaaagaacatgattttttctgagtacaaattcaaacaaatggagagacaaagttaataaaaagcttanaagcctggaggcttgtaggcaatgaaactaatgcactgcacttgacgcacgttgtcgaagccaatgattctaatgaatgcattggggtatgccttcttgcattcctcaagctcctccaacaacctgagccgagtcggtgcacccgaacatgggcagcttccacat

SEQ ID NO: 39827 - DNA, 378 bp, Gossypium hirsutum
  Clone ID: LIB3165-045-Q1-K1-B12
cccacgcgtccggtgagactcttttgtataactgtagcatatagtactagtaagcagtagtagcaatggcctcctccatgatctcatcggcaaccattgccaccgtgaactgctcctccccggcacaggccaacatggtggcccccttcaccggcctcaagtctgcctctgctttcccagtcactaggaaggccaacaacgacatcacttctcttgcaagcaatggtgggagagtgcaatgcatgcaggtgtggcctcctcttgggaagaagaagttcgagacactctcatacctccccgatcttacacccgtacagttggctaaggaaagtaaataccttcttcgctctaaatggattccttgcttggaattcgaat

SEQ ID NO: 39828 - DNA, 368 bp, Gossypium hirsutum
  Clone ID: LIB3165-045-Q1-K1-B2
tctcaaaagactccccttttaactcacaactctttcgaggtctgtaatgggtaaagggaaaggtcacatcaacattgggggcatcggccatgtccacttttggaaggctacaaccactggtcatttgatctaccaacttggtggtattgaccagcgtgtgattgaaaaggttgaaaaaggagctgctgaaaataacaaaaagtcatttaaatatgcatgggtgcttgacaagcttaaaggcccgacgtgaacgtggtattaccatcgatattgcccttctggagtttgaaactaccaaatactactgcactgtcattgatgcccctggacaccgtgacttcatcaagaacatgattactgtacctcac

SEQ ID NO: 39829 - DNA, 176 bp, Gossypium hirsutum
  Clone ID: LIB3165-045-Q1-K1-B4
cccacgcgtccgcccacgcgtccgctcttctcccctcctctacaaggaaatggcaatttcatcaacagcagcagccactgccgcttcttctaagcttaatacccaccgcctccgtttcaactactctaccacacttgctttttctaattcttactacctacacttctttttctctc

SEQ ID NO: 39830 - DNA, 373 bp, Gossypium hirsutum
  Clone ID: LIB3165-045-Q1-K1-B7
cacaggttccattgtttttcagtagtaaagagcaaaaaacagaagggaaatcaatggaagggaaagaagaagatgttagattgggagctaacaagttctcagagaggcagcctattgggacagcagctcagtcccaagatgataaagattacactgagccaccaccagcacccttgtttgagcctagtgagttgacctcatggtctttttaccgagctggaatcgctgagttcgttgctactttccttttcttgtatatctcggtgttgaccgtgatgggagttgttaaggacaaaaccaagtgtacaactgttgggattcaagggattgcttgggcttttggtggtatgatctttgctcttgttactgcact

SEQ ID NO: 39831 - DNA, 412 bp, Gossypium hirsutum
  Clone ID: LIB3165-045-Q1-K1-B9
cccacgcgtccgcccacgcgtccgcccacgcgtccgcccacgcgtccgcttttttttcttttcggttttcggctactgagtcaccaaacgagttaaggaaaagagagacgagtttcaccaaaccatggggtcgatccccaatcctggcgagttgaccgagttaacccatccgagtttcgatgagttccagcgtcaaacgtctctgatgaccagctgtactctcctctggaaagaactgtcggatcacataaattcacttgagcagaacctgatgaagcagtcggagaccttgaaacgcaaaatcgaggcactggactcggagaccaaggcttcactcgactcactcaagaagcgggaactcagtatcgaggacagtgtcaagatcgcactcagccgagtcgagttcaacacc

SEQ ID NO: 39832 - DNA, 387 bp, Gossypium hirsutum
  unsure (1)..(387): unsure at all n locations; Clone ID: LIB3165-045-Q1-K1-C4
aatagttcgtaacaatggcggtctcacttcaagctgcagctaccctgatgcaaccaatcaaggttgctgcaccatcaaggaccaatgtgccgctcangtcctcccagagcgtttctaaggccttcggtttggagcctgttggtgctaggcttacctgctctttgcaaactgacctcaaggacttggctctgaagtgtgttgatgctaccaagctcgctggtttcgctcttgctacatctgctcttgttgtctcgggagcaagcgctgaaggagtttcaaagcggctaacctacgctgaaatccaaagcaagacattacatggaagtcaaaggaacagggactgctaaccagtgccccaaccatcgatggtggtgtcgactcttttgc

SEQ ID NO: 39833 - DNA, 220 bp, Gossypium hirsutum
  Clone ID: LIB3165-045-Q1-K1-C5
attcattgctactttcgcttcattaagcctttactttagattttgaaaaacaaaataatctctagggttcttccttagtttccacttccacatatctatccttaaattgaagaaaatggccgcatcatcacctgccatgcaaatgcaatccctccttttagcatgtgccatgactcgccttgctagtaagagacaaatgggtcacttttatatcgtgaaa

SEQ ID NO: 39834 - DNA, 372 bp, Gossypium hirsutum
  Clone ID: LIB3165-045-Q1-K1-C7
cccacgcgtccgcccacgcgtccgcccacgcgttcgaaaacaataaaaaatgccgatttctcgcattgcagtaggatctgcagctgaggctggccaagctgatgccctcaaagcagctttagctgagtttatttcaatgctcatttttgtttttgctggtgaaggctcgggcatggcttttaacaagctcactgacaatggctctacaacaccggctggtcttgtagctgcatcggtggcccatgctttcgctctgtttgtggccgtttctgtcggtgctaacatctcgggtgggcacgtaaaccctgccgtcaccttcggtgcctttgttggtggccacattaccttggtccgaagtattttgtattggat

SEQ ID NO: 39835 - DNA, 425 bp, Gossypium hirsutum
  Clone ID: LIB3165-045-Q1-K1-C8
accgcccctccctctccactatctcttttcccggtttctccggcctcaaatcttctatcggtcgcgcttcctcatcccgtcgacgccttccctcccgctccaaccaaaagcgccaggtccgtgctgctgccgtcgaaacaattggcaccgccgccgagacttccttggtcgagaaatccgtcaacaccatcagattcttgtctattgatgcggtcgagaaggcgaattcagggcatcctgggttgcccatgggatgtgctcccatgggtcacattttgtacgatgaagtcatgaggtataaccccaagaacccttactggttcaaccgtgaccgtttcattctgtccgctggtcacggttgtatgttgcagtatgctctgcttcacctcgctggttacgacagtgtcctggaagaagatttgaag

SEQ ID NO: 39836 - DNA, 385 bp, Gossypium hirsutum
  Clone ID: LIB3165-045-Q1-K1-D10
cccacgcgtccgcccacgcgtccgaaataatattactagttttgcttgaacccgacatccatggctacacacgcaagtctagctccttcaaggatccctgcaacaaccaggcttccttctaagaccacacactctttcccctctcaaattcaatgctcttccacgagattacaagttactgaattctctggactgcgctccgcctcatgcgtcacattcgtcaacaatgctagagatgcgtcctttttcgatgtggtggctgctcaacttactccaaagactgcaggtggagcaacacctgttaggggcgaaacagttgccaaattgaaggttgctatcaacgggttttggacgcatcggcaggaactttctccgatgttggcat

SEQ ID NO: 39837 - DNA, 425 bp, Gossypium hirsutum
  Clone ID: LIB3165-045-Q1-K1-D12
gtcccgactgttaccatgtgggcttcatgttattggtgagcctccatctgctatggaagcagttgctacattggtgaatattgctgctttagaccgacctgaagatgggatttcatcactgccatctatattagctgagactgttggaagaaacatagaggatgtgtacagaggaagtgacaaaggcatcttgaaggatgtagagcttctgcggcaaattactgaggcctcacgtggggcaatttctgcctttgtgcagaaaacaaccaacaagaatggtcaagttgttgatgtggctgataagttaagctcgatccttgggtttggtatcaacgagccgtggattcagtatttatcgaacacaaaattttaccgtgcagatagggaaaagcttagagtattatttgagttcctaagtgagtgtt

SEQ ID NO: 39838 - DNA, 356 bp, Gossypium hirsutum
  Clone ID: LIB3165-045-Q1-K1-D2
attccaaaatagaattaatggttccccaacccgttgagggtggttttaaatttggtccaggacaacttgtggaagggattttttggaaccattggattccgaattttgtgaaggaggcccttgattgggaaccaattctttggttgggggtggaatgggtttatttgggaaattcttatttattattttggaaaattattaatttttccgtttacctgatgggattttcattgatttaaattaccagaattaccgaagcctggggtttaattccaaaatgggaacctttaagttttcgattttttaaccccattcttttttcggtagtcgaccgcaaaattaatttgttctgtatt

SEQ ID NO: 39839 - DNA, 118 bp, Gossypium hirsutum
  Clone ID: LIB3165-045-Q1-K1-D4
ctccgcctcccgctcttctgcatccctcatccgccttccctccactcgccgacacctcaaatcctcttctctcatccacagcctaggcttctcctccgctgcttctggggactctctg

SEQ ID NO: 39840 - DNA, 77 bp, Gossypium hirsutum
  Clone ID: LIB3165-045-Q1-K1-D5
tccgttcccccaaagttccaggtggctgtctggccatggtttccatggcacaatttggtaacataatgggcccttaa

SEQ ID NO: 39841 - DNA, 97 bp, Gossypium hirsutum
  Clone ID: LIB3165-045-Q1-K1-D6
ccaacgcgtccgccaacccgtccgcccacgcgtccgattaaaacagcccccccaaatctttttgctaagtttcttccaccccccgattggatttgga

SEQ ID NO: 39842 - DNA, 409 bp, Gossypium hirsutum
  Clone ID: LIB3165-045-Q1-K1-D7
gcaatggcttcctcaatgatctcatcggctaccattgccactgcctctccggcacaggctaacatggtcacccctttcaccggcctcaagtctgcctctgctttcccagtcaccaggaaggccaacaacgacattacttctctcgcaagcaatggcggcagagtgcaatgcatgcaggtgtggcctcctactggaaagaagaagttcgagactctctcatacctccccgatcttacacccgtgcagttggctaaggaagtagattaccttcttcgctcaaaatgggttccttgcttggagttcgaattggaggagggattcgtgcaccgtaagtactcgagcttacccacgtactacgatggacgctactggaccatgtggaagctgcccatgttcgggtgcaccgact

SEQ ID NO: 39843 - DNA, 421 bp, Gossypium hirsutum
  Clone ID: LIB3165-045-Q1-K1-D8
cccacgcgtccgcggtgaagctgtatggttcatggccgggtctcaaatcttcagtgagggtggacttgactacttgggtaacccaagcttgatccatgctcaaagcattttggccatctgggcttgccaagttatcttgatgggagccgtcgagggctaccgtattgccggtggaccactcggtgaagtgactgacccattgtacccaggtggcagctttgacccattgggtcttgctgatgacccagaggcattcgctgagctcaaggtgaaagagatcaagaacggtaggttggctatgttctcaatgttcgggttcttcgttcaagccatcgtgaccggaaagggaccattggagaacttggctgaccaccttgctgacccagtcaacaacaatgcttgggcctatgccaccaacttt

SEQ ID NO: 39844 - DNA, 418 bp, Gossypium hirsutum
  Clone ID: LIB3165-045-Q1-K1-E10
cccacgcgtccgccaacgaccatcaagggccttggtggcagctctctcagtggaaccaagctcttggtgaagtcaactcgccagagtttcaaacccaaaaactacagggctggtgctgtggtagccaagtatggtgataagagtgtatactttgatttggaggatattggcaacacaactgggcaatgggacttgtatggatccgatgcaccttcaccgtacaacccactccagagcaagttctttgagacatttgcagctccatttaccaagagaggattgttgctcaagttcctgatcttgggaggcggttccctcggtctttacctcagtgccactgcttccgatgaccttctaccgatcaagaaaggtccgcaactcccacccaagcctgggccgcgtggcaagatctaattta

SEQ ID NO: 39845 - DNA, 382 bp, Gossypium hirsutum
  Clone ID: LIB3165-045-Q1-K1-E11
ccaagatgtctcttacaatcccaactaatctctcaaaatcaattttgaagccaaagctggagacccaagtgatccccaaggcttcatccagatcattgattgtatgctcctccagcaatccttcctccgacaaatcggcttcaccactccaggccttctcagcggctctggctctttcttccatccttctttcagctccactccctgctgttgccgacattgcggggctcactccttgcaaagagtccaagcaattcgccaagcgcgagaagcagcagatcaagaagctggaatcctcgttgaagctttacggccccgatagcgcaccggctctcgccatcaaagccaccatcgagaaaaccaagagacggttcgacaacta

SEQ ID NO: 39846 - DNA, 441 bp, Gossypium hirsutum
  Clone ID: LIB3165-045-Q1-K1-E12
ccgaacccggagagaaaacccatctttctctttcactctccttgattctatctaccgttcgattgatgaaccaggcggcagtaaaggagaggaaaagctgattttctgcaaagaggctaccatggcaaagaagcacaccagtaaccgttcgtccaaggaagaagaaatggcgagccttcaacgtgcctgcatgatcgaaaaatggatggagaagaaggccgttgatgataaggttgtctttaataggcgaaatcccatggcgggttctcaaagaaactctcgaaacgactttgatcccatgctgttgaactccagctccacctcttctgattctagtggtgggttctcatcctcggagtcggattccttttacggtgcaaaatcaaggtcgtcgtcttcatcatcaagccgttacaccactcataggcctaaacctattcg

SEQ ID NO: 39847 - DNA, 421 bp, Gossypium hirsutum
  unsure (1)..(421): unsure at all n locations; Clone ID: LIB3165-045-Q1-K1-E2
cccacgcgtccgttcttttgtataactgtagcatataatactaggtaaccaatataaccatgggcttcttcattaatttatcgggaaccattggcaacgggaactggttcttcccgggacaaggcaacatggggggcccctttaaccgccttaaagcttgcttttgttttccaagcactaagaaaggcaacaaccaccatactttttttggaagccatggtgggagaaggcaatggatggcagtggggccttcttttgggaaaaagaaagtcgagacaactttataccctcccgatcttacacccgtacagtggcttaagaaagagattaccttcttcgctctaaatggattccttgcttgaattcgaattaaanggagggattcgtgcacccgaagtactcgagcttacccacgtactac

SEQ ID NO: 39848 - DNA, 179 bp, Gossypium hirsutum
  unsure (1)..(179): unsure at all n locations; Clone ID: LIB3165-045-Q1-K1-E3
ccccggggaaggccttggtttcaattgcgggcttgttgcttgttgaagcttaaagttcggtttgggtattttggggctaaagtcggggttaggtatttgaatgggtattaaataaaaaacgatttngccatgttggcccatgtatttggactttgnnnactttaatgtttatttggttt

SEQ ID NO: 39849 - DNA, 279 bp, Gossypium hirsutum
  Clone ID: LIB3165-045-Q1-K1-E4
cgccaatacatacaatgggaaaggtcgaaggcggatcaatgggcgggaaaaactcggactcagggaggccccattttcgagcaaccgagatgaccatgaaactgtgaatatggatacatgctgtgtgacagaaatggaaggtcaatgctgcaaattgaggactgcctgaaagctatgacatgcttaagagactttaagggaataacttaaggagaaaaattatatggcacaaacaaagaatcccctttggctaatgatgtgtttctttgtgtttagtga

SEQ ID NO: 39850 - DNA, 405 bp, Gossypium hirsutum
  unsure (1)..(405): unsure at all n locations; Clone ID: LIB3165-045-Q1-K1-E8
cccacgcgtccgcccacgcgtccggattgctctgctcacatgctttgggttggtgagaggactcggcaattagatggagcacatgtcgaatttctccggggtatttccaatcctctcggcataaaggttagtgataaaatggacccgaaggaccttgtgaagttgtgtgaaattctcaaccctcggaacaaacctggaagactgacaataatcacacgaatgggtgccgataacatgcgaataaagcttccacatcttataagggcagtgcgccaggctgggcttattgtcacttgggtgagtgatcccatgcatgggaacacaattaaagctccatgtggtctcaaaactcgtccatttgatgcaatcagatctgagtngagggcgttcttcgatgttcatgaa

SEQ ID NO: 39851 - DNA, 542 bp, Gossypium hirsutum
  unsure (1)..(542): unsure at all n locations; Clone ID: LIB3165-045-Q1-K1-E9
cacgcccgatccggttttctttttttatttcatgacttttcctcggtatttggtttggtaattcattaacaacccttagatgtcgaggatgacacggnttttttccccactttanttagaacgttgaaaggcttttcttcacgaatcttanttgaaggaaacattcgccacctgggattttcttcnnctttatttnntctttgcttcnntgttaaacctggtgagcgtaagggttattatttnncttttgggtttttgggaagaaatgatcccttgggaaaagaatcgcattgtttgctcccttcattgttcacctcgcgaaaaatatctgctggtttttctttcgagaagaaatacccgagttcnncttttcacctttctctttcnnacttgggttcttcgagagaacgatttcgaaaccattttgaaaagaaaaaaaagcttccctctttttttttttgtgaatcgtcctccaccccacttatgggtgcttaagttaaaatactttagatctggncttcattcttctaagtttttcttat

SEQ ID NO: 39852 - DNA, 93 bp, Gossypium hirsutum
  Clone ID: LIB3165-045-Q1-K1-F10
gtcccactaccaaccgataaagcgagtactatcgatcctttagaccttatggatttgaagctagtattgtcagaaaatgcaccacaggtataa

SEQ ID NO: 39853 - DNA, 276 bp, Gossypium hirsutum
  Clone ID: LIB3165-045-Q1-K1-F11
gttctttttttctttttttttttccaatattagccctcccagagcctccctctctttttgttgattttggggtaaaaatttgatccttttcttctatgatatgaagtggatgatgccttgaattgcaacgatatctcaccgtcctccactctcagatcgtcgcagttttctagctcgatccgtttgattttccggagacccgaaatccgacccggaggttgaaacgatgtttctcttggattggatctacggcgttcttgcttccctcggtctatg

SEQ ID NO: 39854 - DNA, 398 bp, Gossypium hirsutum
  unsure (1)..(398): unsure at all n locations; Clone ID: LIB3165-045-Q1-K1-F12
aactcccattcatctcctcatttcatcccctttggaaacagcccccccagtactgccagagcagaaatggcgctaactctcccaaacacatttctccaaatcaagccttctcctcccccttcactccctctcagaaaggtggtgactgcaaggggagggggctataggccacaagttacttgccggaagaaggacatccacccggaattccacgaggatgctaaagtttactgcaatggagaattggtgatgacaacaggtgggacgcagaaggagtatgtggtggatgtttggtcggggaaccatcctttttacctcgggaacagggtcgccgtccttgntgacgctgaccangtcgagaagttccgtaagaaagtcggcagntatctgagatttgg

SEQ ID NO: 39855 - DNA, 116 bp, Gossypium hirsutum
  Clone ID: LIB3165-045-Q1-K1-F4
ggaaataccggggccaaccaacccgtccggttaatttgtaatggcatttaatgctttattttttaaggctttttcttcatttgtagtggtaataaatcaacattgttgttaaccct

SEQ ID NO: 39856 - DNA, 54 bp, Gossypium hirsutum
  Clone ID: LIB3165-045-Q1-K1-F6
cgtccgcccacgcgtccggggccgaaaatcaacattgggcactacctgaggcca

SEQ ID NO: 39857 - DNA, 398 bp, Gossypium hirsutum
  Clone ID: LIB3165-045-Q1-K1-G10
cccacgcgtccgctcaccattgttccaagtttgttgtaaaccaagttagaaccagcagccaacatggcctcattagcagcctccaccgctgccgcctcccttggcgtctctgaaatgcttggtaaccctctgaatttcagtggtggagctaggtcatcggctccaacaccatccaactcatccactttcaagaccgttgctcttttctccaagaagaaggccgctcctccaaagcccaaggctgctgctgtcgccccggccgatgaagagctggctaagtggtacggtccggacagaaggattttcttgcctgaaggtctgttagacagatcggagatcccagagtacttgaacggagaagttcccggagactatggatacgatccgtttggtctgag

SEQ ID NO: 39858 - DNA, 427 bp, Gossypium hirsutum
  Clone ID: LIB3165-045-Q1-K1-G11
tagaattgaacacttaaagggagatcaagttcaaaaactgggatggcttttgtaacgtcggaggaattgctggccactttggtgccaattgctgtttattggatatactcaggtatgtatgtgatgtttgagtcaaggtttgagaagtacaagttgcactccaagaaagaagaggaggagaagaatttggtttccagaaaggaagtcttcaaagccgttctttgccatcaagtcatgtcaattgctattaacctcttcacgtatgcggtaacaagagaaaaagatggtgaggcatctccaaagaaatcactaaccttgcttcttctagccaagcaattggtgatagcaatggtggtgatagatacatggtcgttttttgtgcattggtacttgcatcagaacaagtttttatacaaacaccttcatg

SEQ ID NO: 39859 - DNA, 399 bp, Gossypium hirsutum
  Clone ID: LIB3165-045-Q1-K1-G12
ctccggttggccgcttcttccctgttcccgtaaccccctcatccgactgacgcccaatcgtagaatcagttttagtcccattcgttgcgccgcacccgaagccgatgccgacagaaaagtctccgctcgtctctcgcaaatgcagcagctccttcaggaagcggaagagcgagccagctccgccgggaatgagcccactcctcaaatcactttggatcatgttacggtgagttttgcaaggagtggtggccctggtggtcaaaatgtaaacaaggttaacaccaaggtggacatgcggttcaatgtaaaacaggcttattggcttagtgacaggattagagagaggattatgcaaatggaaaagaaccgtataaacaaggatggagaagtcgtgatatc

SEQ ID NO: 39860 - DNA, 162 bp, Gossypium hirsutum
  Clone ID: LIB3165-045-Q1-K1-G2
gtccgataagaaggcctggcccatgggcaacattaactttggcggtggcggttatccattttttaacggccttaaaggcggggccaccggaggttaaggtaggggcaccagccaaggtggaagcttttcaatcccaaaggttaacattaaaggcttccttaa

SEQ ID NO: 39861 - DNA, 390 bp, Gossypium hirsutum
  unsure (1)..(390): unsure at all n locations; Clone ID: LIB3165-045-Q1-K1-G3
aaaaagaagttctttttttcttaacctccattatttaatcttccaaaaaactctgctgatgccatccactaaaatcattcttggaagggcttcttccttcgcccatcttcattcaaagcttctttcacaccaaaaggggacatattctggaaattaagtggcttcttcttcttgaaacccttcttaaccattaaaataaccactttggttgcttcttttggtaccaaatggaaaacaccaggcttcaaatcggaaactcaattgtttgaatcttggataaaaaacttcatttccgatctgtcatcgacttgctcatgcattttcgaatcactgnntcggagtcgccttcacttctacctttcgcagccctagaagtagccaaaacgatcg

SEQ ID NO: 39862 - DNA, 409 bp, Gossypium hirsutum
  unsure (1)..(409): unsure at all n locations; Clone ID: LIB3165-045-Q1-K1-G6
gaagcctacgatgttgtgtacgacataaatggacgataggcggccgaagttgaaccgatactggatgcactcccgaacttagaacagttcatatattgctcctcagcaggtgtttaccttaagtctgatatgttaccacattgtgagatcgatgctgttgatccgaagagtaggcacaagggaaaacttaataccgagagcttactggagtcgagagatgttaactggacatctgtgagaccagtctacatatatggacctttgaattataaccctgttgaagaatggttcttccaccgattgaaagccggtcgccctattccaattcccaactctggagtgcaaataacccaacttggtcatgtcaaggacttggcaacggctttcattgcggntcttggtaatgaaa

SEQ ID NO: 39863 - DNA, 368 bp, Gossypium hirsutum
  unsure (1)..(368): unsure at all n locations; Clone ID: LIB3165-045-Q1-K1-G7
caaagccatggggagttgagtctgcaaggagtgcttacgccaagctaggtgacgatgccactgctcagttgctggacataaggcctctcaaggagtctagagatgttggtagccctgacattaagggatttgggaagaaaccggtgtcaattgcctacaatggtgaagataaaccagggttcttgacaaaactgtctttgaaattcaaggaacctgaaaatactaccttattcattatagacaaatttgatgggaattccgaactggttgcggagttggtcactgcaaatggattcaaagctgcttatgcagtcaaagatggtgctgaaggaccacggggatgggtgaacagtggtcttncctggata

SEQ ID NO: 39864 - DNA, 256 bp, Gossypium hirsutum
  Clone ID: LIB3165-045-Q1-K1-G8
cggtagactcgcgatgttcgccatgctcggtttcttcttacaagcttatgtgaccggagaaggtccggtggagaacctttcgaagcacctgagcgatccttttggcaacaacttgctcacggtcattgctggaactgctgaaagagctcccaccctctgattttaatatctttgtcttctgattttcgccgctacttgttattgcgtttatgcattttgttgtacatcaaatcaaacttatcggataattcccgcg

SEQ ID NO: 39865 - DNA, 407 bp, Gossypium hirsutum
  unsure (1)..(407): unsure at all n locations; Clone ID: LIB3165-045-Q1-K1-G9
gtcaccttggcagttcatacttatggtcgctgcaagctcagttggagaggagcttttctatagggcagctgttcagggagcattggctgatatattccttagaggcactgaattggtttcggatgctcgaggaatggcagctttgactggtgtgctacctccctttgttccatttgctcaagcatttgcagcagtaataactgctgctcttaccggttctctatattatgtggctgcctctccgaaagatcctacttacgtagttgcaccagttcaacgatcccgttctgctcgtgaagatctgaaaaaactattcgcagccttgtatgagacgagacaaatgaaaaagatctactctncgcttttggaaggaatattggcccttttaccttggatttgaatggatc

SEQ ID NO: 39866 - DNA, 409 bp, Gossypium hirsutum
  Clone ID: LIB3165-045-Q1-K1-H10
gtaagtccaagatttactttgccatggaacttgttcgaggcggtgaactcttctcgaaaatcgccaagggtcggctcaaggaagacttggcaagagtctatttccaacagttggtttccgttatcgatttctgtcatagccgtggggtttaccaccgtgatttgaagccggagaatttgctcttggatgaagatggctgcttgaaggttacagattttggtctcagcgctttctctgagcacttgaaacaagacgggttattgcacacaacatgtggaacaccggcttatgtggctcctgaagttattggtaaaaacggatacgacggagctaaagcagatctttggtcttgtggggtaatcctttacgtgcttctcgctgggttcttaccatttcaagatgataatat

SEQ ID NO: 39867 - DNA, 331 bp, Gossypium hirsutum
  Clone ID: LIB3165-045-Q1-K1-H12
gcactcccttgctctcccccacatttcatttcatcttttttctcttatcttttaagcttaaggcttttgtgcagatttccttatctttagttcaactttgtcccttttatatcagtgtctacacatagaaatagatcatggcaaaagtagatgaaccacagccacatccaccaaaggagcagctgcccaacatttcttactgcattacaagtccacctccatggcccgaggccatccttcttggtttccaacattatcttgtgatgcttggaacgacagtgatcattccaacttcacttgttccccagatgggaggtggaaatgaggagaa

SEQ ID NO: 39868 - DNA, 182 bp, Gossypium hirsutum
  Clone ID: LIB3165-045-Q1-K1-H2
gcttgggaaaactgttttaattggacctcagtttgcacaattagagctggggtgagccaaagctcccgcctcaatttttatctggtgggaaaattcatttggccgcctttcgagggttcaaccaaaccaatctggcattctcttcatcttttggtcattcattcaaagggcggtggccaaaa

SEQ ID NO: 39869 - DNA, 386 bp, Gossypium hirsutum
  unsure (1)..(386): unsure at all n locations; Clone ID: LIB3165-045-Q1-K1-H4
cccacgcgtccgatccatctcaccactaaaccccaaccatcgtttatcatggcttcctcaactctctcccctgcagctccttggcagctatgctccagcaagagtggcatgttctgcccatcacgagcgtttcttgtgaaaccagcgaggacccatatggtcaaaaacgaaaagggaatgaggatcacatgccaggccactagcatccctgctgatagagtgccagacatgggcaagaggcagctcatgaatctgcttctgttgggggctatttcactcccctcangtttcatgttggttccttatgcagccttctttgtgccatctgggggacggggtaccggtggtggcaccgttgccaaggacgcaatcgggaatgatgtaat

SEQ ID NO: 39870 - DNA, 242 bp, Gossypium hirsutum
  Clone ID: LIB3165-045-Q1-K1-H5
cccacgcgtccgccgaatcatacgaggctctcttctttttatatctcaacctctctttccgttgcccgatttctccgagtctacttcccgtccaaattcggcacctcgctccgcgtacttaccttcgaacacagaaggatcgcgaacggtacctagcgcaagatgggacggccgcgtgacgaagttaggttccgcgggcttgacgagaataaacgggaccgcgatggtaagttgcatcaacg

SEQ ID NO: 39871 - DNA, 363 bp, Gossypium hirsutum
  Clone ID: LIB3165-045-Q1-K1-H6
cggaatggactggccggaccgacccacgcgatcgcactaccttgctctcccccacatttcatttgatttgttttctgttatcgagtagaaattggctggcaaaaggcaaaggtccggcgattggtattgatctcggcaccacgtactcgtgcgttggtgtttgcaacatgatcgtgggagatcatagctaacggatcaggaacaagaccacgccgtcttacgtgggtttacagacactgagcgtttgatcggtgacgctgctaagaatcaggttgctatgaaccctaccaatactgttttcgatgctaagcgtttgatcggtagaagattcagcgactcttctgtccaaagcgacatgaaatt

SEQ ID NO: 39872 - DNA, 365 bp, Gossypium hirsutum
  Clone ID: LIB3165-045-Q1-K1-H7
caagcttctattcagttttgtaagagctatggctaaggacattgaggttggtggtgagttccaggccaaggactaccatgatcctccacccgctccattggtcgacgctcaggagttagccaagtggtctttttacagggctgtcatagctgagttcattgccactctcctctttctctacatcactgtcttgactgtgatcggttacaagacccagaccgaccctgctaagggcggtgaagattgtggcggcgttggcattctcggcattgcttgggcttttggtggcatgatctttatccttgtttactgcactgccggtatctctgggggacacatcaacccagcagtaacctttggacttt

SEQ ID NO: 39873 - DNA, 340 bp, Gossypium hirsutum
  Clone ID: LIB3165-045-Q1-K1-H8
cagggagactcttttgtataactgtagcatatagtactagtaagcagtaatagcaatggcctcctccatgatctcatcggcaaccattgccaccgtgaactgctgctccccggcacaggccaacatggtggcccccttcaccggcctcaagtctgcctctgctttcccagtcactaggaaggccaacaacgacatcacttctcttgcaagcaaaggtgggagagtgcaatgcatgcaagtgtggcctcctcttgggaagaagaagatcgagacactctcatacctccccgatcttacacccgtacagttggctaaagaagtaaattaccttcttcgctct

SEQ ID NO: 39874 - DNA, 412 bp, Gossypium hirsutum
  Clone ID: LIB3165-045-Q1-K1-H9
cccacgcgtccgccggtatgtacaacaaggaagagaacccccgtgtccccattatcggcactggtaacgatttctccacactgtatgctcctctcatccgtgacggtcgtatggagaaattttactgggcaccaactagggacgaccgtgtcggtgtttgcaaaggtattttcaggaccgacggcatcccagatgaagacattgttaagctcgtcgacaccttccccggccaatccatcgatttcttcggtgccttgagggctcgggtttacgatgacgaagtgaggaaatggatcagtgatgtcggagttgcaggcgtaaggaaagaagttagtgaactcaaaggacggacctccaacatttgagcaaccgaaaatgaccattgaaaagctattggaatatggaaacatgc

SEQ ID NO: 39875 - DNA, 424 bp, Gossypium hirsutum
  Clone ID: LIB3165-046-Q1-K1-A1
cccacgcgtccgcccacgcgtccgcaggaccgacggcgtccgagatgaagacattgttaagctcgtcgacaccttccccggccaatccatcgatttcttcggtgccttgagggctcgggtttacgatgacgaagtgaggaaatggatcagtgaggtcggagtcgcaagcgtagggaagaagttagtgaactcaagggaaggacctccaacatttgagcagccaaaaatgaccattgaaaagctattggaatatggaaacatgcttgttgctgagcaagagaatgttaagagagtccaattggctgacaaatacttgagtgaagctgccctcggtgaagctaatgaagattccatcaatagaggaactttctatggcaaagcagcacaacaagttggggttccagttcccgaagggtgcactgat

SEQ ID NO: 39876 - DNA, 243 bp, Gossypium hirsutum
  Clone ID: LIB3165-046-Q1-K1-A10
gttatctataacatacactactactacttacttctagcattgactaccccaatgatgtggattttttccattgccactgctctacccgcacaagctaacatggtccttcctttcatcatcctcaaaccacccatttcttttccaaacatcaagaatgccaccaacaacatctctcttctcacaagcaattacttcacatttcaattatatacaatgtctaccctcccactttaaataacaaaa

SEQ ID NO: 39877 - DNA, 402 bp, Gossypium hirsutum
  Clone ID: LIB3165-046-Q1-K1-A11
cccacgcgtccgtctttctagctatatccttatcagctttcaaagatggcaggaatcgcctttggtcgctttgatgattccttcagtttggggactgtcaaggcctaccttgctgagtttatctcaactttggtgtttgttttcgccggcgttggctctgccattgcttacaacaagttgacaactgatgcagccctagatcccgatgggctagtcgccattgctgtttgccatggatttgctctctttgttgcagtggctatcggtgccaacatctcatgtggccatgtcaaccctgcagtcacttttgggttagctcttggtggccaaatcaccatactaactggcatcttttactggattgcccaacttcttggatccattgttgcttgcttcttgctc

SEQ ID NO: 39878 - DNA, 329 bp, Gossypium hirsutum
  Clone ID: LIB3165-046-Q1-K1-A12
gagcacacaaaattcacattctgctttcattgattgtgcaacaaatttacattcacaccaacaaaatcagttgcttcacaatggcctctacaaccatggctctttcttccccatcattcgccggtaaggcagtgaagttctccccttccacccctgaaatccggggaactggccgtgtttccatgaggaaaaccaccaagcctgttccttctggtagcccatggtacggtcctgaccgagttttgtacttgggtccactttccggtgagccaccatcttacttgaccggtgagttccctggtgactatggttgggacactgctggactc

SEQ ID NO: 39879 - DNA, 412 bp, Gossypium hirsutum
  Clone ID: LIB3165-046-Q1-K1-A3
aaaaataaggttttccatggaaggggaagctggttcatacgaggacgttaagccaaacgtcgtcgctaaacaaagtaatggcgatgttgtcggggataatggtgttggaaatctgggatccgttgaagcccctgattttctttccaagaaaaatttccagaactgttccgtggcaactcctgcatctggactgaattccactggccctgctccatctcaactaaccatcttctatgatggacacgtttgtgtgtttgatgcaattcctgtggaaaaggtgcgggagattatgcttattgctgcaactggtgctgctaactctgttgacatgaagaaagttgcaactgattgtgccaccacctcacctgttcttacgaggtctccttcgcttcaaagtactgctactgcaact

SEQ ID NO: 39880 - DNA, 361 bp, Gossypium hirsutum
  unsure (1)..(361): unsure at all n locations; Clone ID: LIB3165-046-Q1-K1-A4
gaaaacaagaataaagccacatttcatacaaagaacaaatcaaagcaaagaaaaagaaatgggtgggtaaatagaagattcaagaggcctgtaacgatcaacataaagacgactgcgccgacttgattttttggcattataattacaactacaaaaaagagctttcggattttcactcttttgtgtcttcagataaaattgaatgaaaagattaagaagtttcaaactttctattccatatccgtttcagctaatacttgggtgtttttgtttgagctgtacgagatgaaattctcatatacggttctcggngggggggtcctcttggtttacctatctcaataaagtctatgattggttc

SEQ ID NO: 39881 - DNA, 377 bp, Gossypium hirsutum
  Clone ID: LIB3165-046-Q1-K1-A5
cccacgcgtccgcccacgcgtccgcgcgtgcttagatcccgatggttggaagacggttttcgtcgataacattgatttcctcaaggaattggagtgagtttcggttgaactcgtgttcttatccttcagacaatgaaattcgaatccaagctgaaaggatttgtcgaagaaagcctccatagagaatggcagccaattccgttttgtagataaatgtttttgcggtgacaatcgggtagcccgttagattcgttagcgaagaaatctttagatataaagtgtatgttcagtgatcttcctgtttttatttcaatgaagcatttatgtatatttttcgatacatatttggatatggatattgaaaaatatgatctttt

SEQ ID NO: 39882 - DNA, 424 bp, Gossypium hirsutum
  Clone ID: LIB3165-046-Q1-K1-A6
cccacgcgtccgctcaaattcagataacaatttcacagttgttttcttcactctctctctcagccatggctgcagccatctccaccgtcgccgccgctgccgccgccaaccgagctctgggagtgtcagtcccaacctcagctttcatggggaagaaagtgagctcgagattcaacaacaccaggcaggttccttcgggaagttttaaggtgatggcggccgaaaaagagatagacgaagagacacagaccgaaaaggaccgatggaaagggttggcttacgatatttcggacgaccaacaagacattactcgagggaaagggatggtggattccttgttccaagctcccatgaatgatggaactcactatgctgtcatgagttcctatgaatacatcagccaaggtcttaaaacgtacaattt

SEQ ID NO: 39883 - DNA, 437 bp, Gossypium hirsutum
  Clone ID: LIB3165-046-Q1-K1-A7
ggggggcccacgcttgcggctataccatacactactagtacccactatcttttatggctttctcaatgatctggtgggctaccattgccactgcctctccggcacaggctaacatggtcgctcctttcaccggcctcaagtctgcctctgttttcccagtcaccatgaaggccaacaacgacattacttctctcgcaagcaatggcggtagagtgcaatgcatgcaggtgtggcctcctactggaaagaagaagttcgagactctctcatacctccccgatcttacacccgtgcagttggctaaggaagtggattaccttcttcgctcaaaatgggttccttgcttggaattcgaattagaggagggattcgtgcaccgtaaatactcgagcctacccacgtactacgatggacgctactggaccatgtgggagctg

SEQ ID NO: 39884 - DNA, 409 bp, Gossypium hirsutum
  Clone ID: LIB3165-046-Q1-K1-A8
gaaagggagattaagttcaaaaactgtgtttgtttttgtaacgtcagaggaattgcggggcactttggtgccaattgctgtttatcggatatactcatgtatgtatgtaatgtttgagtcaaggtttgagaagtacaagttgcactccaagaaagaagaggaggagaagaatttggtgtccagaaaggaagtcttcaaagccgttctttgccatcaagtcatgttaattgctattaaccttttcacgtatgcggtaacaagagaaaaagatggtgaggcatctccaaagaaatcactaaccttgcttcttctagccaaacaattggtgatatgtaatggtggagatagatacatgggcgcttattgaacattggtacttgcatcacaacaagtttttattcaaacacct

SEQ ID NO: 39885 - DNA, 416 bp, Gossypium hirsutum
  Clone ID: LIB3165-046-Q1-K1-B1
ctatttttggccttctcttggccactgtgtcttctttcaacaacaaacaacatatataaccatattatatacatacatacacaaggtctttccttctaaggaagccatgactggcaaagaaatcctccacaagatgaaggagaaagttcaagaaaaagtaggcttaaacccttctaataatgctgaatctggaaaagggaagagtaagatgtcgaagaatataacacatggttatcatttagtgaaggggaaagcgaatcatccaatggaagactacgttttcgcggagtttaagcaagtcaatggcagtgagctcggtttatttgccatattcgatggccatttgagccatgttattcccgattatttgaaggcgaacttgtttaacaatatcttgaatgaacccgacttttgga

SEQ ID NO: 39886 - DNA, 376 bp, Gossypium hirsutum
  Clone ID: LIB3165-046-Q1-K1-B10
tcgtttgaaaccctcaaaattccactaaaaattggtcttcacagtttccctctccaccggcgtggccaccacctctttcctgcgcggccatccggcgcctaaaaccctaaactccctttctttcaaccaatctctttttgggctaaaaccccaacgaaatggccgtctcaccatggcagcatacaaggtgacactgttaacacccgaaggaccccaagaattcgtgtgccccgactacgtatacatcgatgaccaagctgaggaagaaggcactgatcttcctttctcttgtatggctggttcttgttcttcgcgagccggatagattaatcaaggtttctgcgatcaatccgacagtaatttccttgatgatgac

SEQ ID NO: 39887 - DNA, 412 bp, Gossypium hirsutum
  Clone ID: LIB3165-046-Q1-K1-B11
gcttcggctactgtttctgtagccaaacccaaccttcagattcaggcaaaaggaaagggtgttggttttgcagatttctcaggcctacacaactcctctactagccttccctttgccaggaaaacctctgatgacttccattcactcgttgcttttcagacatctgctctaggaagcaataatggcgggtacaggaaagggatggcagaggcaaagctaaaggtggctataaatgggtttggtaggattggcaggaacttcttaaggtgctggcatggccgtaaagactccccacttgatgtcattgccatcaatgacactggtggtgttaagcaggcttctcaccttctcaaatatgattccacccttggcatcttcgctgccgatgtcaagcctgtcggcactgatggca

SEQ ID NO: 39888 - DNA, 409 bp, Gossypium hirsutum
  unsure (1)..(409): unsure at all n locations; Clone ID: LIB3165-046-Q1-K1-B12
aaccccattatgatgagtgccggagaattggaaagtgggaacgccggagaaccagccaagttgatcaggcaaaggtaccgtgaggccgccgacattatcaagaaagggaaaatgtgttgcctctttatcaacgatctcgacgctggagccggtcgtatgggaggaaccacacaatacacagtgaacaaccaaatggtgaacgccacactcatgaacatcgctgataaccccaccaacgttcagctccccggtatgtacaacaaggaagagaaccctcgtgttccgatcattgtcaccggtaacgatttctcgacgctgtacgcgccgctcatccgtgacggtcgtatggagaagttntactgggcacccaccagggaagataggatcggtgtttgcacaggtattttca

SEQ ID NO: 39889 - DNA, 398 bp, Gossypium hirsutum
  Clone ID: LIB3165-046-Q1-K1-B4
gcttattaagccagggtctaagaatttctttaatggtgggttttgaagaaaattagtattaggtgaactgggtttttgtttttgtatttgccttcttcttttttctattatcttttttggatctgggatatgataaaagtttggattttagtggtattttccgggaaaattctggggttgagttctaggatggaattgtagtgaattttatgaagatctggaaggtaaaatattaggcaaaacatggagcctcccaagggatttttagctactttgtggaactttatatgctttcttccttacttcattggcttgcttcttttaagcacaattaaaggaatcattttctgctctccgatatgccttatcatgacaattggaaactcgtccgtcatatt

SEQ ID NO: 39890 - DNA, 419 bp, Gossypium hirsutum
  Clone ID: LIB3165-046-Q1-K1-B5
ggaaaagaaaaaagaccctagctaagcctcctgtgatccttcttcaacatgggagattacaacgatgccttcatgcgcaaccaaaacgccgccgccgccgttcaggctcgcgttaaaccccctcagaatcgcgccaatattcagcagctcaagctgattggccaaagccatcctactggtttaacagctaaccttttgaagctctttgaaccacgacctccgttggagtttaaaccgcctcctgagaagagaaaatgtcctccgtatacaggaatggcacaatttgtgagtcactttgctgagccaggagatcctgagtattccccgcctgttcaggaagcagaaacacctgcacaacggagagcaagaattcataagttgcgactagagaagggcttggagaatgctgctgaggagct

SEQ ID NO: 39891 - DNA, 419 bp, Gossypium hirsutum
  Clone ID: LIB3165-046-Q1-K1-B6
cttgctgggttggagctagtttcatcgctgcaaaacttggctattctctggcctggaaggttgtgcttgtatctcaattgctttgttggacaggacagtttcttggccatggaattttcgagaaacgagcacccgcgctgttggacaatcttgttcaagctttactaatggctcctttctttgttttgctcgaggttcttcaatcattatttggatacgaaccatatcctggttttcagatgcgcgtaaatgcaaagatcaaagccgaaatcaaggagtggcaggacaagaaacagaaaaaggtttcttaggttacattgttgtaagttgtatgtttggtaacgagtaaatttaggtttaagtataatgtactgttgtggtataagtgttgtaaggcaacattgcatggattttaatta

SEQ ID NO: 39892 - DNA, 211 bp, Gossypium hirsutum
  Clone ID: LIB3165-046-Q1-K1-B7
gcgcccctttcaacgatggaccgcttctctttttttttcctgctcctttcctccgggggaggtgttgtcgtggactccgactttaatagcgactgcgatcctctcatccgtcaagttgtttccgatggtgtgttccaggaggactccgatgaccatctacttaacgtgtatcaccactttacgctggtcaaatccaagtattggtaaaacc

SEQ ID NO: 39893 - DNA, 414 bp, Gossypium hirsutum
  Clone ID: LIB3165-046-Q1-K1-B8
tttttccttttctgtttacttctctgggtcataattttttttgggatttttgtttgggctttgtggggggaggggggttgcccttttaactatggcttcaacgttgttactggctctggtttttgtgattgatcttattgcttttggacttgctgttgctgctgagcaaaggagaagcactgccactgttggcaataatgggaaagaaagttattgtgtttatgataaggatattgcaactggcttagctgtaggttcattccttttccttctactcggtcagatactaatcatggtggcgagccgatgcttatgctgtggtaaagccatgaaacctattggttctagagcatgggcagttgtactctttatcacttgctgggtgttctttctcatcgcggaggtatgcttgct

SEQ ID NO: 39894 - DNA, 418 bp, Gossypium hirsutum
  Clone ID: LIB3165-046-Q1-K1-B9
cggacgcgtgggcggacgcgtgggcggtcgcttggggtcgacggcttccatcagcggggggtgccttacctcctcttcttcctccaccaccacctcctctttttccgctcgtcgacgacctacattgcggccttcggtcgtcgctagccttaactcttctccttctcctccgactcttatccaagaccggccggttttcgctgcccctgttcctttgctcaccccgagagaagagatgggaaacaagtcctacgacgaagccattgaagctctcaagaaacttctcagcgagaaaggagaactgaaagctgaagcatctgcaagggtagatcaaataacagcagagttaaacacaacatcagctgacggcaaaccatcttactcttctggtgagagactgaaagaaggcttcgtttac

SEQ ID NO: 39895 - DNA, 421 bp, Gossypium hirsutum
  Clone ID: LIB3165-046-Q1-K1-C1
gcaggtgttaataggaaaatatcagccgcttccgcaagagctcacactagaagagccaagcaaaacgcttctttcaagcttccttcagggatttgcacaaagatactattggtcttgtttgctgggatattggcatgggcttatcaggctattcagccgccaatacctaagacatgtggctctcctgatggtccaccggtcacggcatcgagaataaagctcaaggatggaaggtatttggcctacaaagagcatggtgttccccgagatgcagcaaagtataaaattgtctatgtccatggctttgattcttgtagacatgatgcggttgttgccaataccttgtcaccggaaattgttgaagctctcggggtctatatcgtgtcttttgacagaccaggttatggagagagtgacccta

SEQ ID NO: 39896 - DNA, 400 bp, Gossypium hirsutum
  Clone ID: LIB3165-046-Q1-K1-C10
agctgaaaagtttctatgattccggacttggaccagtaccatcacgctggaaaggcgagtgccaggtggggaaaaacttcagtgcatcgagctgcaacaggaaactaattggagccaagttcttttcaaaagggtatgaagttgcgttcgggcctattgatgaaacgatggagtcaaggtccccgagagatgatgatggacatggaactcacacagcaactacagctgcagggtcagttgtgccctctgctaacttgctagggtatgcttctgggacagcgcgggggatggcttcacatgcccgagtggccgtctacaaggtgtgttggcttggtgggtgttttggctctgatattgtagcagccatggatgcagcttgtgcagatggagtggatgtttt

SEQ ID NO: 39897 - DNA, 378 bp, Gossypium hirsutum
  Clone ID: LIB3165-046-Q1-K1-C11
ctattctatcatatttatattattctaattattctaattctatgtatttcttttttgttttaataaattattaaattttttataaaattattcataaataatgaattttcatttacctatgtctaaacggagtcaaaaatatattctatttatctagttagctagaaatgtatttttttttcaattgaaaattcccaataataataattcttattagaattagggggcaggtttcatgtcaatggcaaaatacctcattcgttgcaatactcctttaaacaataaatgagaaataaggggttctcttgaactaaaaaggggaaggaagaaagcgagtcggtgtgataattcctcatcctcaaattaatccttcccatg

SEQ ID NO: 39898 - DNA, 418 bp, Gossypium hirsutum
  Clone ID: LIB3165-046-Q1-K1-C12
gttagctttagcatacactactagtacccactactagcaatggcttcctcaatgatctcatcggctaccattgccactgcctctccggcacaggctaacatggtcacccctttcaccggcctcaagtctgcctctgctttcccagtcaccaggaaggccaacaacgacattacttctctcgcaagcaatggcggcagagtgcaatgcatgcaggtgtggcctcctactggaaagaagaagttcgagactctctcatacctccccgatcttacacccgtgcagttggctaaggaagtagattaccttcttcgctcaaaatgggttccttgcttggagttcgaattggaggagggattcgtgcaccgtaagtactcgagcttacccacgtactacgatggacgctactggaccatgtgga

SEQ ID NO: 39899 - DNA, 417 bp, Gossypium hirsutum
  Clone ID: LIB3165-046-Q1-K1-C2
caacgccaaacacaagccaccattagacccatttttaaaccccagctcctcctttgttacagaagtagaacgaaaatgtcgcctttatccaaggttgttgcttcatggtgcaagaagcatgcagatggagatgatgatgacaatgattttgactatgctcccgcagcatgcatggaaggcaatggcgacgatgatgatggagactatgacgttgctccagcagcttctctcgagggcgatgatgatgacgatggcagctatgattatgctccagctgcatgattggagtgaggtttatgagtgccccttaccgtggggtttctaacccaaaactttttgcaattctactatggagtgaggtttatgagtgcaccccccccccggtgcggctttaaagcaccttgtgattttgggttt

SEQ ID NO: 39900 - DNA, 371 bp, Gossypium hirsutum
  Clone ID: LIB3165-046-Q1-K1-C3
ggcaaaggtcaacgaaaatctttccaacgcgtgcttgtgcctgacaagatgggtttcaaccgaagcatgacgagtgcgggcgaactatgacaagggtgaacgcctgatgagaccagcgaagcttgctcaagcgaaggtaccgtgacactgacgacgtctttaataagggcacatggttcgcccgcttcattaacgatcttgatgctgacgccgaccgtattgcaggaacctactctatacagcgcgatgacaaccacagagggaatgttacacttatcaacatctgcgttaaccgcaccaaggttcagatcgcccgtatgtacaacatggatgacaacccacttgttgccattatactctctggtgacgat

SEQ ID NO: 39901 - DNA, 419 bp, Gossypium hirsutum
  Clone ID: LIB3165-046-Q1-K1-C4
cccacgcgtccgcggacgcgtgggcgaaaatcctcaaatatcttgttcaaaaagaaaccctaaatcatgggtcagggaacaccgggtggtctgaaccgacaaggctttccaggggatcggaaacaggatggttccgataagaaggagaagaaatttgagccggcggcaccaccggccagggtgggccgtaagcaacgaaaacaaaaaggacccgaagcggcggcccggcttcctactgtgacgccgcatactaagtgtaagctccggctgttgaagctggagcgggtcaaggattatttactgatggaagaagaattcgttgctaatcaggaacggctcaaaccgcaggaagagaaagccgaggaagatcgatctaaagtcgatgatttgagagggtcgccaatgagtgtgggtaattt

SEQ ID NO: 39902 - DNA, 405 bp, Gossypium hirsutum
  Clone ID: LIB3165-046-Q1-K1-C5
atccctccagctgtacctggaatcatgtttttgtctggtgggcagtctgaagctgaggctacctgtgaacttgaatgcaatgacaccaagctccaaacccatggcatgtgtcattctcatatgcaagagcccttcaaaacacttgcctgaataagtggggaggcaggcctgataatgtgaaggatgctcaggaagcgctgttcatcctagcaaaggccaactctctagctcaactctgaaagtacactggcaaatgagagtcagaggaggccaagcaaggaaggtttgtcaagggatatgtctattagcatgtttttgtctggtgggcagcctgaacatgaagctaccttgaacttgaatgcaatgaaccaagctccaaacccatggcatgggtcattctcatat

SEQ ID NO: 39903 - DNA, 392 bp, Gossypium hirsutum
  Clone ID: LIB3165-046-Q1-K1-C8
tttagctatagcatacactactagtacccactactagcaatggcttcctcaatgatctcatcggctaccattgccactgcctctccggcacaggctaacatggtcgctcctttcaccggtctcaagtctgcctctgctttcccagtcaccaggaaggccaacaacgacattacttctctcgcaagcaatggcggtagagtgcaatgcatgcaggtgtggcctcctactgggaagaagaagtttgagactctctcatacctccccgatcttacacccgtgcagttggctaaggaagtagattaccttcttcgctcaaaatgggttccttgcttggaattcgaattggaggagggattcgtgcaccgtaagtactcgagcttacccacgtacta

SEQ ID NO: 39904 - DNA, 421 bp, Gossypium hirsutum
  Clone ID: LIB3165-046-Q1-K1-C9
aattttcatttttttcttctttaaattctctctcgacgcgccaccgtgtactccggcactatcgccgccgctcacgcctaggcgtctcttctataaggattagctctttattagcatttaagagccatgccgacgttcactgcaatagctttggacaggttgatagaacctggaccttccagatctgtcaacaactctggtcctaattcgaaaccacctatcccgaacccaaagcctatccccagcacaaaaatgaagaggagcagcagtacatcagtaacaagtaaggtaaatcgcccccaaatatcaccagccctatatgctactcctgaggcaaccccactgcctgattcaccatcttctttccctccttctccttacatcatcaatcacaagcgtcgtggtcctcgccttttgaaga

SEQ ID NO: 39905 - DNA, 348 bp, Gossypium hirsutum
  Clone ID: LIB3165-046-Q1-K1-D10
gaagaactaattccccaaaatttgtttcagttttggctgcctcagttatggcttcttcaggtaccctcaagccttcattcaatgttgagaaacctggtgtaagaggggttccttcccttgctaggtccccttcttctttcaaggttgaagccagtggtggcaagaagatcaagaccgacaagccttacggaatcaatggtggtatgagcttgagggatggtgttgatgcctctggaaggaagggtaagggaaagggtgtttaccaatatgttgacaaatatggtgctaacgttgatgggtacagtcctatctacaacaccaactactggtctcccagtggtgatgttt

SEQ ID NO: 39906 - DNA, 379 bp, Gossypium hirsutum
  Clone ID: LIB3165-046-Q1-K1-D11
cccacgcgtccgagcaaatacaacatcctttcccttctcttttaatctttcttgtcttctctttcacctcgctttgttgtccatcagttgaggattcttgtcaacaaataacgcatggcagaggaagaacccaagaaggttgaaaccgtaaccccctcggagcaaccacctcccgaagcccccaaagacgttgcggaggaaaaatcggtaatcccacctcctacctctgaagaaaaacctgctgagtccgccgcactccaaaaggcggtggaaccgactgaggaaaagagcacggagagtactgtggaccgagatgctgtgcttgctagagttgcgacagagaagcgaatttcactgatcaaagcttgggaagagagtg

SEQ ID NO: 39907 - DNA, 417 bp, Gossypium hirsutum
  unsure (1)..(417): unsure at all n locations; Clone ID: LIB3165-046-Q1-K1-D12
gggaggggtggctcaaccgggtacgataatgcagtggccttgcctgctggaggaagaggggatgaggaagagctagccaaggagaacaacaagagtgctgcatcttcatcagggaaaatcaccttgagcgtcacaaagagcaagccggagaccggtgaagttatcggtgtgttcgagagccttcagccatctgacactgacttgggtgccaagactccaaaggatgtcaagatcactggtgtctggtatgctcagcttgattcataaacaagtcttgtatgaatttgtttattctcggctgaggttttgtaatttttaaacaagtgttgctaaactttgcagtaatccactgagaaacccttatcttctntgtatgttactatgttggcttcttataataattttctaagcttctac

SEQ ID NO: 39908 - DNA, 376 bp, Gossypium hirsutum
  unsure (1)..(376): unsure at all n locations; Clone ID: LIB3165-046-Q1-K1-D2
ccagcntttcgtatagtaagacttattatttccccactcaatgctttttcaatagactggaagtgactgaattctctggacttttatccaactcattcgttacctttgccaaaaattttttatatgcttccttttttcacttgactactacccaacttattcccaaggattgttttataccatcaatattttttatttaagaaacatttgccaaactgaaagattcaatctatataattagactcattatcattaaacttctccaatacttatattttttttaatatactcacctctttcaagtttatttgttttaaaattaccaatgggttttgttaaataatgctttaaaactttcataaaaaaaaaactttca

SEQ ID NO: 39909 - DNA, 408 bp, Gossypium hirsutum
  Clone ID: LIB3165-046-Q1-K1-D3
cccacgcgttcgcgccgtcttctctatgcccaattctttccaatgactggcatttccatgtatctgatcagcttatatttcctcacaatctaaacccaaatctattttggagagcaagcagaaagattaagggatgccgactcaaggctagcttttgggagtccatcagatctgggattttgaagaacaacacaacacaaatcgttgaaccaccctctacacttgaagaagaggaagaacccttacctgatgaatttgtgcttgttgaaaagtctcaaccagatggtgaagttgaacaaataatattctcttctggaggagatgtggatgtctacgagcttcaagccctatgtgataaggttggctggccgaggagaccattgtcaaaactagcagcggctttaaaaa

SEQ ID NO: 39910 - DNA, 408 bp, Gossypium hirsutum
  Clone ID: LIB3165-046-Q1-K1-D4
gaaaactttgcatatcagtcagtatggctgtagcagctattgcagtctacgactggccagaaagttggccagacttgttgccgttcctcctaaagttgattggtgatcaaactagaatgaatggagttaagaaatatggcatttgtgctctaattaatactattgctttttgtttcctgatcttgaacattttctcttcataagagcaagttagcaatggggtgaagtttagaatgctgttggcaaataatctcctcttgtaggaattctatatacagtcccctgttagagcatggtaattgttgtataacgattttaattaatttgatcactagttgtgcaacactacgggattcttagaaacgtgggctcactttgtgtgtcatttgagttaagccttacccacac

SEQ ID NO: 39911 - DNA, 405 bp, Gossypium hirsutum
  Clone ID: LIB3165-046-Q1-K1-D5
cttgcaccaccacgcactcacaaccaatggcagatcatcatcattatcgccgtcgctgcgccaggtttcaaacatgaagcctacccagcaggtggtgtgcaaggctcaaaagcaggaagatgatggaagccttgtgtcccgtaggttggctctcactgtactcattggtgctgccgctgttggctctaaggtttctcctgctgatgctgcctatggtgaagctgcaaatgtatttggaaagccaaaaacagacacagacttcatgccatacagtggggatggattcaagctctcgataccatcgaaatggaacccaagcaaagaggtggagttcccaggtcaagtgctgatgtacgaggacaacttcgacaccaccaacaatttgagcgtcatgatcactcccac

SEQ ID NO: 39912 - DNA, 415 bp, Gossypium hirsutum
  Clone ID: LIB3165-046-Q1-K1-D6
cttctttctcttctcttaccatggatccttacaagtttcgtccttctagttcctttgattccgggttctggactaccaattctggtgctccagtttggaacaataactcatcacttactgtgggagcaagaggtccaattctccttgaagactatcatttggtggagaagctagctaatttcgacagagaacgcatacctgaacgtgttgttcatgctagaggagccagtgcgaaagggttctttgaggtcactcatgatatatctcagctcacatgtgctgatttccttcgtgcccctggagtgcagaccccgctcattgttagattctccacggttattcatgaacgtggtagtcctgaaactttgagagacccccgaagtttcgctgtgaaattttacactcgaaagggaaa

SEQ ID NO: 39913 - DNA, 398 bp, Gossypium hirsutum
  Clone ID: LIB3165-046-Q1-K1-D8
cccacgcgtccgcccacgcgtccgcatcactcaccattgttccaagtttgttgtagaccaagttagaaccagcagccaacatggcctcattagcagcctccaccgctgccgcctcccttggcgtctctgaaatgcttggtaaccctctgaatttcagtggtggagctaggtcatcggctccaacaccatccaactcatccactttcaagaccgttgctcttttctccaagaagaaggccgctcctccaaagcccaaggctgctgctgtcgccccggccgatgaagagctggctaagtggtacggtccggacagaaggattttcttgcctgaaagtctgttagacagatcggagatcccagagtacttgaacggagaagttcccggagactatggatac

SEQ ID NO: 39914 - DNA, 359 bp, Gossypium hirsutum
  Clone ID: LIB3165-046-Q1-K1-E1
cttctctgtaactcttttaaatcctctttctcatttcctttcaagttcttctctcttacaaatccaatctcatttcttattctctctgtcgattgaaaaataaatggcctcttcactctcaacaacaccctccgctgccttcgcttccgttgctaaaacaaccactgccttgcctaattccactaaccttcagctctccaccgtctcctttcgcttttcttcgaggctaaaccttcgattcttctccaagagtttgcaacatggtcagaactctaaagcagtggtgaaagcccaacttaatgaggttgccatagatggatcatcaaatgcttctgctgcacctacaatcaaatcagggg

SEQ ID NO: 39915 - DNA, 415 bp, Gossypium hirsutum
  Clone ID: LIB3165-046-Q1-K1-E11
gtttcttgagaaccatggctggctatggttatgcatacagaggtggctacacgacctacaatggcggcgttgctccacgaggtggcaccgaggggtggaacaaaacaagctatagctcagatcatacgtgtcagcctgtgttcattgatgcagaagggaggaggaagccgatcacgtcttacactggtccgcacggtagcaccgagtattacgttacaaaaaccgagatcgtcgaggttccatatatggccgaattcaagcaaagggctcctgtaagagttgaggtggtgagggaccatggtgagggtaagctgatgactaggcccttaagtcccggggaatggcgggagagttcaagtcctgttcggtatcatactgaagagaaatggaataagccttctagacccgttcagta

SEQ ID NO: 39916 - DNA, 411 bp, Gossypium hirsutum
  Clone ID: LIB3165-046-Q1-K1-E12
gttcacttctgcttctgcctgcctgcctgcctgcctgcaatggcttcctacaaactctgtgccctctttctgctcttcactcttcttttccactcaacattcaccactgcttgcaattcatgcaaacccaaacctccaccatgccctccaccttcttgccctaaggacacattgaagctcggtgtctgtgctgacgtgcttggacttgtcaacgtgattgttggaacccctccttccagcaaatgctgtgctttgcttcaaggattggctgatttggaagctgccctttgcctttgcactgccattaaagccaatgtacttggaatcaacctcaacatcccagtttctcttagtctaatccttagtgcatgtcagaaggaggttccttcaggcttcaaatgggaataaaaa

SEQ ID NO: 39917 - DNA, 341 bp, Gossypium hirsutum
  Clone ID: LIB3165-046-Q1-K1-E2
cccacgcgtccgataaatcacgtgttaaggaatatcttcccattgttggaatagctgagtttaataaattaagtgctaaacttatttttggtgctgacagccctgctattcgagagaatcgggttactacagttcagtgtttatctgggacgggttcattgagagttggagctgaatttttggctaggcattatcatcaaaaaactatatacattccacagccaacatggggaaatcaccccaaggtttttactttggcaggattatctgtgaaaacttaccgctattatgatccaacaacacgcggaatgaatttccaggggttattggaggaccttggc

SEQ ID NO: 39918 - DNA, 407 bp, Gossypium hirsutum
  Clone ID: LIB3165-046-Q1-K1-E3
tgaatctggttggaaggagggcggttgcagtgttagtatagattttttacttcctacttttaaggtctcgccgtcattgggtgccacatagttcttcttttctttatttatgattgcatcagatagaaccatggtggctgcattaaagtaagaatctttttctacgcctaaagtcttgactgactaagaggaggcaagcagacccagagctggatttttagaggcaaatatttttgccaattcttgaaactctctatccccatttatacaagtctgagctacacatattctgcctgaaagattctttggctgtacctttttcattcaaaacatagatatttgggggtcattcccacatacttgcttgattttccaaaaattttttacacgaaacagacaacttaaaa

SEQ ID NO: 39919 - DNA, 419 bp, Gossypium hirsutum
  Clone ID: LIB3165-046-Q1-K1-E6
ggtatccgcagcacagaaggttcccgaggatggttggacaatgcaggatggaactccatggcctggaaactgtgttcgtgaccatcctggcatgattcaggttttcctaggtcatagtggtgtgcgcgatgtggaaggaaatgagttacctcatctagtttatgtttctcgtgagaagaggccagggtttgaacaccataaaaaggcgggggccatgaatgctttgatacgagtctcagcagtcctctcaaatgctccttatcttctgaacgttgattgcgatcattatattaataatagcaaagcactaagagaagcaatgtgcttcatgatggaccccacttcagggaagaaagtctgttatgtgcagtttcctcaaagatttgatggaattgatcggcatgatagatactcaaacc

SEQ ID NO: 39920 - DNA, 417 bp, Gossypium hirsutum
  Clone ID: LIB3165-046-Q1-K1-E7
gccctcttttttgcactcaacattctcttcttttcacttgtcagtgctaattgttcttgcccttcccccaagccaaaaccaaaccccactccctccccaactcctgctgcggaaggaaagtgccccataaatacccttaaactaggtgtatgtgctgaggtgcttggtttagtcaatgtaactgttgggtcacccccagttcaaccttgctgcacccttatcaaaggccttgctgatcttgaagctgctgtttgcctttgcacagcgatcaaaggcaacattttgggtatcaatcttaatatcccagtttccctcagcttgcttctaaatgtctgctcaaaaaaagttccatccggcttccaatgtccctgatcactcttccaaaatcttttttttctcagtgtttttcatgcttag

SEQ ID NO: 39921 - DNA, 418 bp, Gossypium hirsutum
  Clone ID: LIB3165-046-Q1-K1-E9
caatggcagtttgcccagtatacaccacccaatctctcaactcaacatgttcaatctccacaccatcaaaaacccacttcagttctcaccacaatcacttagttttctacagaactagcaagagaactagcaagagaggtggcagcagctcatgtgtgataacctgctcagctggtgattcacaaacagttgtgattggtttagctgctgactcaggatgtgggaagagtacctttatgaggaggctaacaagtgtgttcggtggtgcagctgagccaccaaagggaggcaaccctgattccaacacactgatcagcgacatgaccactgtgatatgtttagatgattatcattcacttgacagaactggaaggaaagagaagggagtgacagcacttgacccaagagccaatgactt

SEQ ID NO: 39922 - DNA, 422 bp, Gossypium hirsutum
  Clone ID: LIB3165-046-Q1-K1-F1
cttgaacgagtccccgccgacatccgagcccaaggtggcgtggcgcggatgagtgacccacaactcatcaaagaaattaagcaagctgtcaccattcccgtcatggccaaggctcgtattggccatttcgttgaggcccagatccttgaagccattggcatcgactatgttgacgagagcgaagtccttaccctcgccgacgaagaaaaccacattaacaaacataattttcggattcctttcgtctgtgggtgccggaatttgggggaagcgctccggagaatccgagaaggagccgcgatgatccgaaccaaaggagaagcggggaccgggaatgttatcgaagctgttaggcatgtcagatccgtgatgggggatattagggcccttaggaacatggatgatgatgaggttttcagctt

SEQ ID NO: 39923 - DNA, 308 bp, Gossypium hirsutum
  unsure (1)..(308): unsure at all n locations; Clone ID: LIB3165-046-Q1-K1-F10
cggnnccggaaacccggggcgacccacgcgnccggcgagacgcnccngaaaaccaggagcaacacgcaacagcaagcaagaagagcaggggccggccccaagagcggagcggcagccaaagccaccgggaaccgccccgccccggcgcaggccaacaaggaggcccccgccaccgggcacaaagccgccacagcgagcccaggcaccaggaaggccaacaacgacagcacgggcgcagcaagcaacggagggagagcgcaaagcaagcagggggggccgccaccagggaagaagaaggccgagacgcg

SEQ ID NO: 39924 - DNA, 395 bp, Gossypium hirsutum
  Clone ID: LIB3165-046-Q1-K1-F11
acagtgaacaaccaaatggtgaacgccacacttatgaacatcgctgataaccccaccaacgttcagctccccggtatgtacaacaaggaagagaaccctcgtgttccgatcatcgtcaccggtaacgatttctcgacgctgtacgcgcctctcatccgtgacggtcgtatggagaagttttactgggcacccaccagggaagattggatcggtgtttgcacaggtattttcaggaccgacaatgttcccgttgatgaccttgttaagcttgttgacaccttcccgggccaatccattgactttttcggtgctctgagggccagagttttcgatgactaagtgaggaaatggatcggagagggcggagtcaatggtgttcggaaaaagctcgtgaa

SEQ ID NO: 39925 - DNA, 418 bp, Gossypium hirsutum
  Clone ID: LIB3165-046-Q1-K1-F12
cttttgtataactgtagcatatagtactagttagcagtaatagcaatggcctcctccatgatctcatcggcaaccattgccaccgtgaactgctcctccccggcacaggccaacatggtggcccccttcaccggcctcaagtctgcctctgctttcccagtcactaggaaggccaacaacgacatcacttctcttgcaagcaatggtgggagagtgcaatgcatgcaggtgtggcctcctcttgggaagaagaagttcgagacactctcatacctccccgatcttacacccgtacagttggctaaggaagtagattaccttcttcgctctaaatggattccttgcttggaattcgaattagaggagggattcgtgcaccgtaagtactcgagcttacccacgtactacgatggacgct

SEQ ID NO: 39926 - DNA, 64 bp, Gossypium hirsutum
  Clone ID: LIB3165-046-Q1-K1-F2
gcccagcgtccgccgcgctgcgccggtttaaacatgaagcctaaccacagtggtggcaggctca

SEQ ID NO: 39927 - DNA, 130 bp, Gossypium hirsutum
  unsure (1)..(130): unsure at all n locations; Clone ID: LIB3165-046-Q1-K1-F3
ctacattgccccagctntcatggacaagcttgttgttcacattcaccaagaactacatgacccttcctaacattaaggttcctcttatctttgagtattttggggaggcaaaggtcaaggaaaatctttc

SEQ ID NO: 39928 - DNA, 421 bp, Gossypium hirsutum
  Clone ID: LIB3165-046-Q1-K1-F4
ggcaggttccttcgggaagttttaaggtgatggcggccgaaaaagagatagacgaagagacacagaccgaaaaggaccgatggaaagggttggcttacgatatttcggacgaccaacaagacattactcgagggaaagggatggtggattccttgttccaagctcccatgaatgatggaactcactatgctgtcatgagttcctatgaatacatcagccaaggtcttaaaacgtacaatttggacaacaacatggatggtttctacatcgctcctgcattcatggacaagcttgttgttcacatcagcaagaacttcatgtccctccctaacattaaggtttctctaatcctgggtatttggggaggcaaaggtcaaggaaaatctttccaatgtgagcttgtgtttgccaagatgggtat

SEQ ID NO: 39929 - DNA, 411 bp, Gossypium hirsutum
  Clone ID: LIB3165-046-Q1-K1-F5
cttaaaccaaacccgaagtcccacattcaggaaaactggaggattctggacttcttttcgcaccatcccgaaagcttgcacatgttcaccttcctgtttgatgacatcggtgttccacaggattataggcacatggatggctctggtgttcatacctacacactaatcaacaaagctgggaagtcacactatgtgaaattccattggaaacccacttgtggtgtaaaatctttgttggaggatgaagccataagagtaggtggcgcgaatcacagtcatgccacacaagatctttatgactcgattgcagccggaaactaccctgaatggaagctgttcattcaaataatggatcctcttcatgaggacaggtttgattttgacccacttgatgtaaccaagacatggcca

SEQ ID NO: 39930 - DNA, 351 bp, Gossypium hirsutum
  Clone ID: LIB3165-046-Q1-K1-F6
gaagtacaagagctcacttgatgcattctctcagatcttgaaaaatgagggtgccaagtctctatttaagggtgctggagctaacattcttcgtgctattgccggtgctggtgtgcttgctggatatgacaagttgcagctcattgtgttcggaaagaaatatggatcgggtggtgcttaaacttttgggtatatttccctttttggttccgtttataggtttagatggtgatgaaaaactcttggtccggagaagtttattttggcaaagatttcgttaaaaataattcagatttagtggggagttgctctccaaacaatttttctattttaccatgaaagttttgcttt

SEQ ID NO: 39931 - DNA, 349 bp, Gossypium hirsutum
  Clone ID: LIB3165-046-Q1-K1-F7
cccgacttctttgcattttccctcttctcttccttcacattggaggaactgaaccagaaggcaagaaacagttggattgaacaaaagaatttaaaacatgcgctctttcgggcacagattaaatggggtcttaacccttccgtgacgatactggcaataatgtgtgctatcgcgtctctcttggacaaccttaatactccttctcccacggcagaaattaagattatgaacataaactggttccagaaacagccgcaggggaatgacgaggtcagccctgacaatgaatatatctgctgattagcagtcattgttcacatggaacacaaaacagctttttatatttttt

SEQ ID NO: 39932 - DNA, 392 bp, Gossypium hirsutum
  Clone ID: LIB3165-046-Q1-K1-F9
cccacgcgtccgtctctcctcctctctacaccctccaacctctcctttaaaacccagactgaactctcttagcactccacttcagaacgctgtcgttaccaagagacaacttatcattaatacaactacttccttctccatcatttttggggtccaacaaaacccagttccacaatgtttagctcaaccttctaatccttccaaaccgtcggttttgaacatcgcaaacaccaaagcttggttccagttctatggtgatggttttgccatcagggttcctcctgagtttgaagacatcatggagcctgaggatttcaatgctggagcttccctgtatggggacaaggcatagccgaggccttttgcggcacgatttgcttcaaccgatggat

SEQ ID NO: 39933 - DNA, 383 bp, Gossypium hirsutum
  unsure (1)..(383): unsure at all n locations; Clone ID: LIB3165-046-Q1-K1-G10
gctatcaagactgctggtttaacttcgttccccgattatttggtattgcacatgaggaagtttgtcatggaggccggctgggtgcctaaaaagcttgatgtctacatagatgtccctgacgtcatagatataagccacattcgcagcaagggccttcaacctggggaagaactgttgccagaggctgctcctgagggtgcggcggaatcaagtcagcctgtggctgatgaagcaattgttgcccagcttgcctcaatgggctttaaccagcttcattgtcagaaagctgccataaacactntaaatgctggtgtggaagaggcaatgaattggttgctttcacacatggatgatccagatatagatgctcctatcctccatga

SEQ ID NO: 39934 - DNA, 414 bp, Gossypium hirsutum
  Clone ID: LIB3165-046-Q1-K1-G11
cagttggaggcctgtgctagaattgatcgcccaagtagaagggaacacagagccagagcaatctgattcagaaaaatggaatcttgcttcacgaaatgttggcatagcaaggctcttttcacatcactttattcccttcgccgttcttccatctccattcactctgttagaaattcggttaaaagagcttacgatggactgctgttggacgcggcaggcactctcttgcaattatccaagcctgtagaagagacttacgcttctattggagctaaacacggtctgaaattgaattcagctgaaataaagaaaggatttaaaagggcttttgctgctccctggcctgataagctccgttacgagggggatggaaagccattttggaaacttgttgtctctgaagccactggttgt

SEQ ID NO: 39935 - DNA, 418 bp, Gossypium hirsutum
  Clone ID: LIB3165-046-Q1-K1-G12
cccacgcgtccgctttttgccggaatacaaaaccctatcttcttcttcctcttcacttcaccacataccctctcttcccttatccctttccctatccctttcatcaccattacgctgttaatccccatcccaatatctgggtttctgaaggaacccctgaaggagaacggaataataataagaaaccccactctttttcttgccccctttctgactgattcaattttagcctttcgtttcttttgattcaatttatctcttttttttatttttctttttttttaaaaaaaatttgaacctattattctttattaaccctcaaaagatggcgattgcttggtctgaaaccgctgcttcaatggaagctttatctttgtctcctcctatgtccccacccgtcatcctaacccaagacgaa

SEQ ID NO: 39936 - DNA, 411 bp, Gossypium hirsutum
  Clone ID: LIB3165-046-Q1-K1-G2
cccacgcgtccggaaaaactaaacataataaagccccttcgacttgcttcattgatttgccctctcaaagcccaagaaaaatggcttctgcttccgctactctcctcaagtcttcacctattatcgacaagtccgagtggattaagggccaaaacctccgccacccttcggtttgttttgtacggtcacaccctacatcggccgcctttgccgtccgtgctagttcatatgccgatgagcttgttaagaccgcgaaaactgttgcatctccaggtcgtggtattttggccatggatgaatcaaatgctacatgtgggaaacggcttgcctcgattggtctcgagaataccgaggcaaaccggcaagcttaccgtacccttctcgtgtctgcccctggcctcggtgactaca

SEQ ID NO: 39937 - DNA, 422 bp, Gossypium hirsutum
  Clone ID: LIB3165-046-Q1-K1-G3
cccacgcgtccggaaaaactaaacataataaagccccttcgacttgcttcattgatttgccctctcaaagcccaagaaaaatggcttctgcttccgctactctcctcaagtcttcacctattatcgacaagtccgagtggattaagggccaaaacctccgccacccttcggtttgttttgtacggtcacaccctacatcggccgcctttgccgtccgtgctagttcatatgccgatgagcttgttaagaccgcgaaaactgttgcatctccaggtcgtggtattttggccatggatgaatcaaatgctacatgtgggaaacggcttgcctcgattggtctcgagaataccgaggcaaaccggcaagcttaccgtacccttctcgtgtctgcccctggcctcggtgactacatctcgggagct

SEQ ID NO: 39938 - DNA, 390 bp, Gossypium hirsutum
  Clone ID: LIB3165-046-Q1-K1-G4
cccacgcgttcgaaccccctttctgtcactgttacagtgcgacgaatatgggatattcggactgtgaatttgacgtaatcgttgtttgggcggacgtcatggggagctccacggcgtaccaactagccaaaagaggccaaaaaacgctactcctcgagcagtatgactttctccaccatcgaggttcgtctcacggcgagtcacgcaccatacgagcaacgtaccctgaagactactacttcggcttggtcgatgagtcctatcggttgagggagcaggctcaatctgaaatcgggttcaaggtttacttcaaggcccaacagttcgacatgggtgcatcccacaccaagagtttcctttctgtgatcgctacttgtcgaaagaacgcca

SEQ ID NO: 39939 - DNA, 403 bp, Gossypium hirsutum
  unsure (1)..(403): unsure at all n locations; Clone ID: LIB3165-046-Q1-K1-G5
cccacgcgtccgcccacgcgtccgcccacgcgtccgccaccaccaacatagtccaacattttcataacaatggctgcagtcacaaacgccgctgctacatcctccttcatggggacacgcttccccgacgtctacacaagttcagggagattcgtcgccaggtttggttttggcggcaaaaaagcagctcccaagaaagcctcgaaacaaacctccgaccgccctctatggtacccaggagcggtggctcctgattggctcgatggaagcttggtgggtgattacgggttcgacccgttcgggttagggaaaccagcggagtacttgcaatatgatttggattctttggaccagaacctggctaagaatatggctggtgagatcatnggaactaggaccgaag

SEQ ID NO: 39940 - DNA, 400 bp, Gossypium hirsutum
  Clone ID: LIB3165-046-Q1-K1-G6
ctccctctcaaaaaccaaagctcaaaccctcatgctttttcaaggttgattgattaccaggttacaagctgtcatcatcatcatcatcatcatcatggacatattcttcaataaacctaataccatcatggttattgacagcatatgcttcaaaagagcaatctccaccatggatgttgttgaacaatacttaccaagcttctttacaacaatggcttgttgacctctgtcttggtgctatcccacctgagcttatttttaacaatccccccctccccccccccaaaaaaaaagaactacccttttttttattatctcaccatggtttcctcttcttgaccttgtaaggccttttcttgaccttgtaagacccttaccatcacctactacactcaatacc

SEQ ID NO: 39941 - DNA, 380 bp, Gossypium hirsutum
  Clone ID: LIB3165-046-Q1-K1-G8
tcgcatgcgtacaactgagcttcaaaaactccgatctttttttttctaaatttatttttttagtctttgaatggaaggttggatttttcataattaatcgatttattttttggttgggaattaaagaaaattacttttagaaatttaaaaaataataattaatggcttcgtctagtcttcgcactgttgaagagatcttcaaagactataacgctcgacgctctgctctcgttcgtgctctcacttacggtatttgatttccccctgcttccgtaaagcctaattttgagttattgaatttcttctcttttatttcgatttttttttatgttatcgcgttgttttggatcagatgtagatgatttctactcgcaatgcga

SEQ ID NO: 39942 - DNA, 344 bp, Gossypium hirsutum
  Clone ID: LIB3165-046-Q1-K1-G9
cccacgcgttcgtcgggacgcggtggttttcttttacgcaagggagttcggacacggcggcgggggcctcgggaagagttatcctttctgtttaaccgcctgcccaccctggaaacggctcatccggaggttgggtccagcggtctgaagagcaccgcacttttcgtggtgtccggtgcgcccccggcggcccttgaaaattcggatgacctagtgctctccgtgcccggacttactcataaccccatcatgtttccaaggtgaacagtccttggtcaatggaacaatttttgcaagggaagtcagcttaattgatccgtaacctcttgaaaaggattggctct

SEQ ID NO: 39943 - DNA, 418 bp, Gossypium hirsutum
  unsure (1)..(418): unsure at all n locations; Clone ID: LIB3165-046-Q1-K1-H1
caagcacccggtgaagatagtgaagttatcttataccctcaagcaatctttaaggaccctttccgaggaggtaacaatatcttggtaatttgtgatgcatacacaccagctggtgagcctattcccacaaacaagcgccaccgagccgctgagattttcagtaacaagaaggtggtcgatgaagtaccatggtttggtattgagcaagagtacactttacttcaacaaaatgtgaaatggcctttgggatggcctgttggaggctaccctggtcctcagggtccttattactgtgcagctggtgctgacaagtcattcgggcgtgacatctcagatgctcattacaaggcttgcttgtatgccggcattaacattagtggtaccaacggngaggttatgccaggccagtgggagtatc

SEQ ID NO: 39944 - DNA, 321 bp, Gossypium hirsutum
  Clone ID: LIB3165-046-Q1-K1-H10
cgactctggatacattcagcaagccttgcacaatggccaccatcacctctgccgctgtcgctatcccatctttcaccggccttaaagccggtgcaaccgcagctaaagttagcgccacagccaaggttgcagcctctccagtcccaagggtcagcatcaaggcctccctcaaagacgtcggtgttgctgttgcggcaactgctgcaagcgcaatccttgccaacaatgccatggccattgaagtcttgctcggcagtgacgatggggggtctggcttttcattcccaaagaaatttatccgtaaagccccaaggggaagaa

SEQ ID NO: 39945 - DNA, 420 bp, Gossypium hirsutum
  Clone ID: LIB3165-046-Q1-K1-H11
atcggctaccattgccactgcctctccggcacaggctaacatggtcgctcctttcaccggcctcaaatctgcctctgctttcccagtcatcaggaaggccaacaacgacattacttctctcgcaagcaatggcggcagaatgcaatgcatgcaggtgtggcctcctactggaaagaagaagttcgagactctctcatacctccccgatcttacacccgtgcagttggctaaggaagtagattaccttcttcgctcaaaatgggttccttgcttggaattcgaattagaagagggattcgtgcaccgtaaatactcgagcctacccacgtactacgatggacgctactggaccatgtggaagctgcctatgttcgggtgcaccgactcggctcatgtattgaaggaacttgaggaatgcaa

SEQ ID NO: 39946 - DNA, 424 bp, Gossypium hirsutum
  Clone ID: LIB3165-046-Q1-K1-H2
ccgagccaccgaagggaggcaaccctgattcaaacacgctcattagcgatatgaccactgtgatatgcttagatgattaccattcactcgacagaactggaaggaaagagaagggggtgacagcacttgacccaagagctaacgactttgacctcatgtatgagcaagttaaggctatcaagagcggtgttgctgtggacaagcctatctacaaccatgttactggtctcttagatcctcctgagctcatcaagcctcctaagatccttgtcatcgaaggactacaccctatgttcgatgagcgtgtgagggatctgttggacttcagcatctatttggacatcagcaatgaggtcaaatttgcatggaaaaattagagggacatggctgagagagggcacagccttgaaagcattaaagctag

SEQ ID NO: 39947 - DNA, 217 bp, Gossypium hirsutum
  Clone ID: LIB3165-046-Q1-K1-H3
cccatgcatccgttcactcgtacgaaaaaataatcattcttcgtccaccgttcactgctgagggagaggtgagagccctttaaataaaaaaatggacacaattcgccataccgaaccttgatctctcactcgcttacgcgccacttctaattccagcgcgtttcattcaccatatgccttgccagcttattttccgtccaatacaccgattgtcctt

SEQ ID NO: 39948 - DNA, 426 bp, Gossypium hirsutum
  Clone ID: LIB3165-046-Q1-K1-H4
cccacgcgtccgcccacgcgtccggcagattcttggagctaaacgacaaattgggccttcaaggaaaggatcctttgttgttaaggcagcttcgactccacccgttaagcaaggagctgatagacctttatggtttgcatctaaacaaagcctttcatacttggatggcagccttccaggtgattatggatttgaccccttgggactctcagaccctgaaggtccaggagggttcatcgagcctaaatggctagcctacggtgagatcatcaacgggcgttatgctatgttgggtgcagtaggtgcgattgcccctgaaatacttgggaaggccggtcttatcccagcagatacagccctcccttggtttagaaccggtgtgatcccaccagcaggaacatacagctattgtgcagacccttacac

SEQ ID NO: 39949 - DNA, 157 bp, Gossypium hirsutum
  Clone ID: LIB3165-046-Q1-K1-H5
gaggccgcccacgcgtcgattgatgatttatattgaagttcctttttgttttaattagcaaacagatgcagtgcttgttagactctaaccggaagacacactcttatgcgggagctccgttacgatcgacaacgggaggtcaaaaccaagaaaggaa

SEQ ID NO: 39950 - DNA, 245 bp, Gossypium hirsutum
  Clone ID: LIB3165-046-Q1-K1-H7
acgaccactcgtccagttggcaccattttgtttcttttaaacaatgtcttacgaccagtggcgaggaggtcacagtaaagacaacggctcgttctgcttaccgacgagcagatctgtctattcaaagaggcattcaccctctagctcatggataggtgaagggagcattactgcgacgaagctgggcaccgggatgcgatcgtttaagaccaccctaacttgtagcaatacgcaaaatgttctta

SEQ ID NO: 39951 - DNA, 411 bp, Gossypium hirsutum
  Clone ID: LIB3165-046-Q1-K1-H8
gataagagaaagcactgaaaaagcaaaaccatggcctctgcttctctcctcaagacttcaccagttttagacaagtctgagtgggttaagggtcacacccttcgccaaccttccacttctgtggtgaggtgccaccctgttgcaccctccggactaactgtgcgtgcaagctcatatgccgatgagcttgtcaagactgctaaagctattgcttctcctggccgtggaattttggccatggatgagtccaacgctacctgtgggaaacgtttggcctcaatcgggctagaaaacacggaggctaaccgccaagcctacaggacgttgcttgtttcagctcctggccttggtcagtacatcttaggtgccatcctttttgaggaaaccctctatcaaaccacaattgatggc

SEQ ID NO: 39952 - DNA, 413 bp, Gossypium hirsutum
  Clone ID: LIB3165-046-Q1-K1-H9
cacactctcaaattcagttaacaatttcacagttgttttcttcagtctctctctcagccatggctgcagccatctccaccgtcgctgccgctgccgccgccaaccgagctctgggagtgtcagtcccaacctcagctttcatggggaagaaagtgagctcaagattcaacagcaccaggcaggttccttcgggaagttttaaggtgatggcggcggagaaagagatagacgaagagacacagaccgaaaaggaccgatggaaagggttggcttacgatatttcggacgaccaacaggacattactcgagggaaagggatggtggattccttgttccaagctcccatgaatgatggaactcactatgctgtcatgagttcctatgaatacctcagccaaggtcttaaaacgtac

SEQ ID NO: 39953 - DNA, 411 bp, Gossypium hirsutum
  Clone ID: LIB3165-047-Q1-K1-A1
cccacgcgtccgggcattagtgataaatgtagtggccatggagttactcgatttactaagcttctaagcagctggtctaattctcaaggatactgcgtggaaattggagatggttcatgggattcatggactatgccccttttggaacagacatcaattgcttgtgaaaaggtgaaaaacatgactgaacttagccaaggttacaacatggttggactctctcaaggtagcctgattagtcgaggcattattgaattttgtgatggatgacctcctgtcaagaatttcataacgttggcagggccccatgctggtattgcttcaattccattttgtgaatctaccgtgatatgcatatttctcgatagcttaatcaagtccgaagtttatagcaactttgtacaagaacac

SEQ ID NO: 39954 - DNA, 392 bp, Gossypium hirsutum
  Clone ID: LIB3165-047-Q1-K1-A10
cacactctcaaattcagataacaatttcacagttgttttcttcactctctctctcagccggggctgcagccatctccaccgtcgccgccgctgccgccgccaaccgagctctgggagtgtcagtcccaacctcagctttcatggggaagaaagtgagctcgagattcaacaacaccaggcaggttccttcgggaagttttaaggtgatggcggccgaaaaagagatagacgaagagacacagaccgaaaaggaccgatggaaagggttggcttacgatatttcggacgaccaacaagacattactcgagggaaagggatggtggattccttgttccaagctcccatgaatgatggaactcactatgctgtcatgagttcctatgaatacatc

SEQ ID NO: 39955 - DNA, 386 bp, Gossypium hirsutum
  Clone ID: LIB3165-047-Q1-K1-A11
cccacgcgtccggagaagttcccggagactatggatacgatccgtttggtctgagcaagaagccagaagactttgcaaaatatcaagcatatgagttgatacacgcaaggtgggcaatgcttggtgctgcagggttcatcatccctgaagcctttaacaaatttggtgccaactgtggccccgaagccgtttggttcaagaccggagctcttctcttggacggtaacaccttgaactacttcgggaagaacatccccatcaaccttgtggtggctgtcgttgccgaagtcgtccttgttggtggtgctgaatattacagaatcatcaatggcttggatctggaggacaagcttcaccctgggggaccatttgacccactggggtta

SEQ ID NO: 39956 - DNA, 414 bp, Gossypium hirsutum
  Clone ID: LIB3165-047-Q1-K1-A12
taactgtagcatatagtactagtaagcagttttagcaatggcctcctccatgatctcatcggcaaccattgccaccgtgaactgctcctccccggcacaggccaacatggtggcccccttcaccggcctcaagtctgcctctgctttcccagtcactaggaaggccaacaacgacatcacttctcttgcaagcaatggtgggagagtgcaatgcatgcaggtgtggcctcctcttgggaagaagaagttcgagacactctcatacctgcccgatcttacacccgtacagttggctaaggaagtagattaccttcttcgctctaaatggattccttgcttggaattccaattagaagagggattcgtgcaccgtaagtactcgagcttacccacgtactacgatggacgctactg

SEQ ID NO: 39957 - DNA, 410 bp, Gossypium hirsutum
  Clone ID: LIB3165-047-Q1-K1-A2
atggaccctctatcaagctctgtttcttcacgcctcaaacccgccaacttcaactcaacacctcgccaattgcaccccttaaaaccactcaacagaccgcgtcacctccctccaccgtcaccccaacgtccccttctcttctccaccaccaaaccaaccactatctccacctctttcacccacaaaaacctcaccgctcctcctatcttcccccaccgcacctcacttctcccttcatcatcccttcatgtccatcgaacccccgccaccggctacgccgcagctctattagacacagctcaatccaccggttcacttcacgaagtccgacgagacgtacgaaagctctcgagactactccaaaacagtcaaattcaagcttttttgaatgaacccgtttttgggtgatc

SEQ ID NO: 39958 - DNA, 411 bp, Gossypium hirsutum
  Clone ID: LIB3165-047-Q1-K1-A3
tgcaaccctagcctttttctcttcaatcgtcaagccttaaactcactccttcaagcgccgatcctccctaaggggcgatcaacgcctttaaattttaggggatatttcatagcctcacgattcctttccaacctcgattttgacgaagcgaaacaaaattcgtggctctttctttaggagcagccgtacagaggaacgaagggaggcgcgcatgaaggaggccgtgcatgggactattcgtagggagcccgatcctggctagctgctggtgttttccagaaacctctagggtttctggtgtttgggcctttttcgggtcattttgggtctcgggtttagtttatttgggcttgtattttaatgtttgggttggattttatgtaattgggtcattgacttttatcgttttgg

SEQ ID NO: 39959 - DNA, 438 bp, Gossypium hirsutum
  Clone ID: LIB3165-047-Q1-K1-A4
cggggcggacccacccgtccgccacgcgtccgaaaaactaaaacctgtgtgcctttgctacgcaccacttcttaagcagcttcctctacgatcataatggtgtcggttactgtttctgtagccaaaccaacccttcaggcaaatgcaaagggttttgcggaattctcaggtctgcgcaactcagctagccttacctttgccaggaaaacctcggatgactttcaatcagtcattgctttccagacatctgctttgggaatcaataatggtggataccggaaaggcgtagtagaggcaaagctaaaggtcgctattaatgggtttggtaggattggcaggaacttcttaagatgctggcatggccgtaaggactccccacttgatgtcattgcaatcaatgacactggtggtgttaagcaggcttctcaccttctcaag

SEQ ID NO: 39960 - DNA, 430 bp, Gossypium hirsutum
  Clone ID: LIB3165-047-Q1-K1-A5
cggggcggaccaacccgtccgcccactcatttaacctgcggaattatttgctccattgactcaactcgtgtcacccaaatcacccttgatcctgctggttactccggccaactcacccctctcctttcccaactcacccaactcactattcttgatctctctgataacggcttcttcgggtctataccttcttccatttcttccctacgtagtctccaaactctgattctcaagtccaactccttctctgggtcaatccctgactctgttaccaccctgaaatcacttgaatccttggacatttctcataattcactttccggacctttgcccaaaaccttcaactcgctttctggtttgaggagactcgatctcagttacaaccaactcaccggttttctacctaaactgccttataacttattggagc

SEQ ID NO: 39961 - DNA, 448 bp, Gossypium hirsutum
  unsure (1)..(448): unsure at all n locations; Clone ID: LIB3165-047-Q1-K1-A6
ggaaatnccggggcggccccaggcgtccgagaagctacagtatgagctgtggagaagtaattgaccccacaatttacggtgaagaagaagagtgtgcgcagttgcattgtggtgttcctccatacgaactggagagaaggttgcatgaattgttggaatcgaggcaggaagagcagataagagaattagaagctgctttggcaagtgcaaagcaagaactggtcgacaaggaaagagagatttcatggtggaaagacactgcacagcttatgtcgattcatgtccaacaaccttcaccgtttggttccaagctgaggtgagaaaatttcttaactgcttttttttcatgtgtatcatatcangtgtagttgtttggtgtttaaaaatggattgtttgttattttggctttaaaagcattttggatgggtgattagtttgcaagtgaaa

SEQ ID NO: 39962 - DNA, 411 bp, Gossypium hirsutum
  Clone ID: LIB3165-047-Q1-K1-A7
gctatagcatacactactagtacccactactagcaatggcttcctcaatgatctcatcggctaccattgccactgcctctccggcacaggctaacatggtcgctcctttcaccggcctcaagtctgcctctgctttcccagtcaccaggaaggccaacaacgacattacttctctcgcaagcaatggcggcagagtgcaatgcatgcaggtgtggcctcctactggaaagaagaagttcgagactctctcatacctccccgatcttacacccgtgcagttggctaaggaagtggattaccttcttcgctcaaaatgggttccttgcttggaattcgaattagaggagggattcgtgcaccgtaaatactcgagcctacccacgtactacgatggacgctactggaccatgt

SEQ ID NO: 39963 - DNA, 308 bp, Gossypium hirsutum
  Clone ID: LIB3165-047-Q1-K1-A8
gttattatccatattatatcttcctctccacccttgaaccatgtcggcttttgttggcaagtatgcagaggagttgatcaagaacgccaagtacatcgccacgccaggcaaaggtattttggcggcggacgagagcacaggcaccatcgggaagcgtctctcgagcatcaacgtcgagaacatcgagtccaatcgccaagccctccgcgagctccttttcacctctcccaacgcattatcctgcctctccggtgtcattcttttcgaggaaacactttaccagaaaacctctgacgggaaacccttcg

SEQ ID NO: 39964 - DNA, 389 bp, Gossypium hirsutum
  Clone ID: LIB3165-047-Q1-K1-A9
cattttagcctttgaattgaaaccctcaaaattccactaaaaaatggcctccacagcttgcctctccaccgccgtagccaccacctctttcctccgcggccatccggcgccgaaaaccctaaactcccttcctttcaaccaatctcttttcgggctaaaaccccaacgaaatggccgtctcaccatggcagcatacaaggtgacactgttaacacccgaaggaccccaagaattcgtgtgccccgacgacgtatacatcgttgaccaagctgaggaagaaggcattgatcttccgttctcgtgtagggctgggtcttgttcttcgtgtgccggagtgattaagcaaggctccgtcgatcaatccgacggtaatttccttgatgatgacc

SEQ ID NO: 39965 - DNA, 404 bp, Gossypium hirsutum
  Clone ID: LIB3165-047-Q1-K1-B1
cccacgcgtccgtggaataagaaaccaaagggagtggcagtggaagatggccgctagcagcgatcctaacccggagggttccgatgagcagcagaaacgatccgagatatacacttacgaggccccttggcatatctacgccatgaactggagtgtccgccgcgacaagaaataccgtctcgccatcgccagcttgctcgagcattacaacaaccgccttgagattgtccagctcgatgactccaatggcgagatccgatcggacccaaatctctccttcgatcatccttatcccccgaccaagaccatcttcatccccgacaaggagtgccagaaacccgaccttctcgccacgtcctccgacttcctccgcatttggcgcatctccgatgaccactcccgcg

SEQ ID NO: 39966 - DNA, 413 bp, Gossypium hirsutum
  Clone ID: LIB3165-047-Q1-K1-B2
cccacgcgtccgcccacgcgtccgccaacttggactggtacaagggccctacacttcttgaggctcttgaccagatcaatgagcccaagaggccttcagacaagcctctccgtctaccacttcaggatgtgtacaagattggtggtattggaactgtcccagttggtcgtgttgaaactggtgtcttgaagcctggtatggttgtgacctttggtcctactggtctgaccactgaagttaagtctgttgagatgcaccatgaagctcttacggaggcgcttcctggtgataatgttgggttcaatgttaagaatgtcgctgttaaagatctcaagcgtggttatgttgcatccaactccaaggatgatcctgctaaagaggctgcaaacttcacttctcaggtcatcatcatg

SEQ ID NO: 39967 - DNA, 411 bp, Gossypium hirsutum
  Clone ID: LIB3165-047-Q1-K1-B3
ccaggcgtccgccagaaccaccattttaaggccattgcatgtatggggtcatcccactatggatcagtctatagtgcacttatggccaaaacacttagcaccccctccgccaccaccacggccagcttggggacctacaccaccggcagaccctagcttttggcaccatcagcaccaccgtgtaccaaatggacaaaccccgggaacaccgtgctttcccccgccattgacggcggcaccaacgagatttggtgtagtaccggtgccgggcattcctcctcaccatgcaatgtacaaagctgacaccggcatcggtgtccctgccagccaattacgtcgccaccctctcgtcgacttacatccgtcgaaagagagcatcgatgccgctatcggggacgttttatcgaaacc

SEQ ID NO: 39968 - DNA, 417 bp, Gossypium hirsutum
  Clone ID: LIB3165-047-Q1-K1-B4
cccacgcgtccgaagaggggtcccttcaccatccttaccctctcaatcaacaatggcctctacttcatctgtcaccctatctcaagccctcctttctcgcgctatctcttcccatgcctccgcccaatcctccgaccaccgcccctccctctccactatctcttttcccggtttctccggcctcaaatcttctatccctcgcgcttcctcatcccgtcgacgccttccctcccgctccaaccaaaagcgccaggtccgtgctgctgccgtcgaaacaattggcaccgccgccgagacttccttggtcgagaaatccgtcaacaccatcagattcttgtctattgatgcggtcgagaaggcgaattcagggcatcctgggttgcccatgggatgtgctcccatgggtcacattttgta

SEQ ID NO: 39969 - DNA, 420 bp, Gossypium hirsutum
  Clone ID: LIB3165-047-Q1-K1-B5
ataataatttcccctttttttttctttcacaatttattcacaaaaaacactgtcactttcttttgcatctctcttctcgttgagcaccactggcaaccatgaagaccgccgaggcaaccgccgccacgacgaccgttctcagccgcggttacaaacgttcccccaaatccaacggcaaggtcaacggcacagctgctaagaaaaccggcgttaatcatggcaatggtggtgacatttctaacgggaaagcatcgttcatgaagtggacactcgacgacgtcgtttacgtcgctaaataccaccgcttaccctgttttttcgcggcgtggttcttgtttttcatatacgtggagtacacgctccggatggtaccggattcatccccgccgtttgatctggggttcgtcgtcacacgatctt

SEQ ID NO: 39970 - DNA, 91 bp, Gossypium hirsutum
  Clone ID: LIB3165-047-Q1-K1-B6
cacgcgtccgaaaaaaaaaaaaaaaaaaaaaaaaaaaaaaaattttttaaaaaaaaaaaaaaaaaaaaaagggggggaaaaaaaatggggg

SEQ ID NO: 39971 - DNA, 368 bp, Gossypium hirsutum
  Clone ID: LIB3165-047-Q1-K1-B8
ctctctcaaaatctcaaacccagatttgttctctctctctctctctctctatttccagatcaattaattcctccattggaggagcttagggtttgttggtgttctggtctttgctttgtctgaaaaataaacagaattataaacgaacaccaacgccatgggaagatttgaagagagaggattcgattcagtggtttgccctaagcctatccgaacctttagatggtctaccaactgttatcagactgagatggctgattcaaaaactggtgcagagcttcttgatataatcctccccgagggagggtatggggccgagaatcccaccaaccaaatggctttatcaccaccgtatttctgtggatcac

SEQ ID NO: 39972 - DNA, 386 bp, Gossypium hirsutum
  Clone ID: LIB3165-047-Q1-K1-B9
gcatacactactagtacccactactagcaatggcttcctcaatgatctcatcggctaccgttgccactgcctctccggcacaggctaacatggtcgctcctttcaccggcctcaagtctgcctctgctttcccagtcatcaggaaggccaacaacgacattacttctctcgcaagcaatggcggcagagtgcaatgcatgcaggtgtggcctcctactggaaagaagaagttcgagactctctcatacctccccgatcttacacccgtgcagttggctaaggaagtagattaccttcttcgctcaaaatgggttccttgcttggaattcgaattagaagaaggattcgtgcaccgtaaatactcgagcctacccacgtactacgat

SEQ ID NO: 39973 - DNA, 385 bp, Gossypium hirsutum
  Clone ID: LIB3165-047-Q1-K1-C1
caccattgttccaagtttgttgtaaaccaagttagaaccagcagccaacatggcctcattagcagcctccaccgctgccgcctcccttggcgtctctgaaatgcttggtaaccctctgaatttcagtggtggagctaggtcatcggctccaacaccatccaactcatccactttcaagaccgttgctcttttctccaagaagaaggccgctcctccaaagcccaaggctgctgctgtcgccccggccgatgaagagctggctaagtggtacggtccggacagaaggattttcttgcctgaaggtctgttagacagatcggagatcccagagtacttgaacggagaagttcccggagactatggatacgatccgtttggtctgagc

SEQ ID NO: 39974 - DNA, 405 bp, Gossypium hirsutum
  Clone ID: LIB3165-047-Q1-K1-C10
cccacgcgtccgccaaaccttaccttatctagggttagggttttgctccttctgagtttgtctcagtaccaaaaatatccccaaattgaagatgatgcaacaaccagcacaagctatggtaccaccaccaatggctccacagacccaacagtaccaatatcagcaaccacctccggctccggttcctcaggcacaacaaccttacatgatgatgaacatgatgcagccgcctcagagtcatcctccacctatgtggcccccacaacaaggttcggctggggtacctgctcaacaacagccagctggtcaaccggctaacgcagatgaggttcggactttgtggatcggagatttgcagtattatatggatgagaattatctcttgagcttttttgcccaaactgg

SEQ ID NO: 39975 - DNA, 207 bp, Gossypium hirsutum
  Clone ID: LIB3165-047-Q1-K1-C11
tacaagcctccaggcttctaagctttttattaactttgtctctccatttgtttgaatttgtactcagaaaaaccatgttctttacctttgcttttctctttctttgagttattggcctttgtttcttgatttctgggttttaatcctttttggattttcgttggaaaaaaggctgagaactaatgaataaaagttggttttcttccc

SEQ ID NO: 39976 - DNA, 297 bp, Gossypium hirsutum
  Clone ID: LIB3165-047-Q1-K1-C12
ctcaaatcaaaacccataaaaccctcaaatcctctaccatggcaattgccagaacgggcgtgtacaccgacgattatttggagtactcaagcaccttcccagctgagcttcaaagacttctcaatacacttcgagaactcgatgaacggctccaatctatgattaatcagacgaggcaacaaactaagtatcgttctggaattgcggcgaacagagggaatggcaataggtatatgaataatggtcatgatgatgaggaaaccgatgagaaaatgaggaaggatatagaggccggtc

SEQ ID NO: 39977 - DNA, 433 bp, Gossypium hirsutum
  Clone ID: LIB3165-047-Q1-K1-C2
cggggggggcccacgcgtccgcccacgcgtccgcttttgtataactgtagcatatagtactagtaagcagtaatagcaatgggctcctccatgatctcatcggcaaccattgccaccgtgaactgctcctccccggcacaggccaacatggtggcccccttcaccggcctcaagtctgcctctgctttcccagtcactaggaaggccaacaacgacatcacttctcttgcaagcaatggtgggagagtgcaatgcatgcaggtgtggcctcctcttgggaagaagaagttcgagacactctcatacctccccgatcttacacccgtacagttggctaaggaagtagattaccttcttcgctctaaatggattccttgcttggaattcgaattacaggagggattcgtgcacccgaagtactcgagcttaccca

SEQ ID NO: 39978 - DNA, 415 bp, Gossypium hirsutum
  Clone ID: LIB3165-047-Q1-K1-C3
cccacgcgtccgcgcctttctctcacaattgtcagatagcaataataaaaatgggtggttggtgattgggggtgtgggctgggggagagagccattccttggtcgtctccgttgcagcagcaataataataacagcaactgcgatgcgaaaaagggtgtccctgattcaaactacgtagtgcccctggagaaatctttttcgccttccaactcctcctgcatcactcgccctcttattgaaatcctgcgcgacctcaataagcgtatcccgcataacatcatcaagtctccgcctaattcttccactttcctcccctggtaccatgccaatcgcatgttgagcttctacgcccctgggtggtgtggagaagtacgtgatgttatattcgccaacaatggaaccattactgttgtg

SEQ ID NO: 39979 - DNA, 442 bp, Gossypium hirsutum
  Clone ID: LIB3165-047-Q1-K1-C4
cggggcggcccaagccgtccgttagctatagcatacactactagtacccactactagcaatggcttcctcaatgatctcatcggctaccattgccactgcctctccggcacaggctaacatggtcgctcctttcaccggcctcaagtctgcctctgctttcccagtcaccaggaaggccaacaacgacattacttctctcgcaagcaatggcggcagagtgcaatgcatgcaggtgtggcctcctactggaaagaagaagttcgagactctctcatacctccccgatcttacacccgtgcagttggctaaggaagtggattaccttcttcgctcaaaatgggttccttgcttggaattcgaattagaggagggattcgtgcaccgtaaatactcgagcctacccacgtactacgatggacgctactggaccatgtggaagct

SEQ ID NO: 39980 - DNA, 421 bp, Gossypium hirsutum
  Clone ID: LIB3165-047-Q1-K1-C5
cccacgcgtccgcccacgcgtccgacgtaaacagggaggtctgaatttctgagaatttttagaaccgggtttctctccgtaaatcaatatgttgaagctttgcttaatggtttctcatggctaccctcgtggtctggggcctgttttacaccaagagccaggctttagcaggatggtcaaggagtttggttccgtcttcccaggtcagctagtgaaacaagacatggtacagattggctcctttgatctgaggtgcaaccaattccatttccaggagcagccaaagccagttactgcactatgtgagaccaaactgattatcgatgctgatccaacggtacaaaaccccgtggttatagataaaccagatgcttatctagacacagcacggtttagctttaggatagctgaaaagtgcact

SEQ ID NO: 39981 - DNA, 280 bp, Gossypium hirsutum
  Clone ID: LIB3165-047-Q1-K1-C7
ctttttcttctctcttcaaaatctaacctcttaagctttagagattctcattttgctgagcgtattttagatcgggagtttagaggttattcattaatggcggatacagagacatttgctttccaagctgagatcaatcagcttcttagcttgatcatcaacactttctacagcaacaaagagatctttcttcgtgagctcatcagcaacgcatccgatgctttggataagatcagatttgagagcttaacagacaagagcaagctagatccttaaacct

SEQ ID NO: 39982 - DNA, 404 bp, Gossypium hirsutum
  Clone ID: LIB3165-047-Q1-K1-C8
tttaatatttgttcaaagctttcgattacaaatccctcgcgaaagatgcagatctttgtgaaaactcttactggtaagaccatcaccctcgaggtggaaagctccgacacaattgataatgtcaaggccaagatccaagacaaggaagggatcccccctgaccaacagaggcttatcttcgccgggaaacagcttgaggatggccgtacccttgctgactacaacatccaaaaggagtccaccctccaccttgtccttcgtctcaggggtggcatgcagatcttcgtaaaaacccttactggcaagacaatcacccttgaggttgaaagctctgacacaattgataatgtcaaggctaagatccaggataaagaagggatccctcctgaccaacagaggcttat

SEQ ID NO: 39983 - DNA, 410 bp, Gossypium hirsutum
  Clone ID: LIB3165-047-Q1-K1-C9
gttcggtgttaggttttttgtacgggatggggatgatgcgtgagagaaacaaagctaaagcatttttgaatcattatttcgctgccgaaggtggtaatgcccagtccaagatggctttggcttacacttactcgcgtcaagatatgcatgaaaaagctgttaaattatatgctgaactggcagaaacagcggtaaacagtttcttgatatccaaagattcgccggtaatagaaccgattaggatacacaatggagctgaggagaacaaggaagctttgaagaaatcaagaggtgaagacgatgaagattttcagatattggaatatcaagcacagaaagggaatgccggtgctatgtacaaaatgggtcttttttactatttcggattgagagggttgcgccgtgatcat

SEQ ID NO: 39984 - DNA, 351 bp, Gossypium hirsutum
  Clone ID: LIB3165-047-Q1-K1-D10
cccacgcgtccgcaaaaggcaaaaaagccatgtcaaagctggtggtgttgcagcccacagagcagcctcccatctgcctcctctcttcctctctttcccacttcaatggcaccaagctctgccaaatccagtacaagagaaaggtctatcagccaaaaggtgcattgcatattgcagcatccagcaccaagaagattctcataatgggaggcactaggttcatcggtgtgtttttatcaagactccttgtaaaagacggtcatcaggttacttcgcttactagaggtaaagcaccagttactcaacaattgcctggggaatcagacactgactacgctgagattaaatcca

SEQ ID NO: 39985 - DNA, 379 bp, Gossypium hirsutum
  Clone ID: LIB3165-047-Q1-K1-D12
cccacgcgtccgatcactcccaatactttcataacatttcacgaacttcactctccagtctccaatggcggctgccgtctccaccatcggtgctgtcaaccgagcaccgttgagtttgaatggatcaggtgccggagcttctgctccaagctcagctttcatggggaacagcttgaagaaagtgagcgctaggttcaacaacaacggcaaggctccagtgggaagtttcatgattgtggctgccaaagaaatcgacgaagacacacagaccgaccaggaccgatggaagggtcttgcttatgatatctccgatgaccaacaagacattaccagagggaaaggtatggtcgactcattgttccaagctcccatgaacgat

SEQ ID NO: 39986 - DNA, 414 bp, Gossypium hirsutum
  Clone ID: LIB3165-047-Q1-K1-D2
gagagaggggcgacatggaaggaaagtgtgaggagcaaccatggttgaatggagagaaaaaagagccaaaatacagccatgggttttgttcagccgagatacagacgctggccagcgttgccgaagtgtttttcccttctttaccaccggattctggctttcaacgaaaggaaacccagccaagcaaggctgttcaatccttcctaaaagcttctgcctctcaaccggctttccccgaggaggtagcagaattgctggggaaaagagcattcattgaaagtgtgatagtggtgagaattgtattagtgttactgtggacgagggtaggaagcttgttgctatgtggaaagcagtgtttggggaaggaatggccgtttataaatgactttggaagcatgggattggagaagagag

SEQ ID NO: 39987 - DNA, 416 bp, Gossypium hirsutum
  Clone ID: LIB3165-047-Q1-K1-D3
cccacgcgtccgccaagttctattacatgctgcctttcaaatgatggagaagaagcccacccttgattctgattggcgttcgtttagagctaaattagtggcaaccgagaaagtttcaagcccttcatcatggattgatcctgatacactagtggaccaacctcctcaacctgttacaattggtgacaaatgggctcacaccatccgtgagcccgaaaaaggttgtctacttatcgctaccaaaaaactcgacggggtccacatttttgagcggacggtgatcctcctcttaaaagcagggtccataggcccattagggatcatactaaatcaatcatcgctcaaatctatcaaagaaataagatcaacaactatccgagatgtctcggaggtgttctctcatgtgccattgttct

SEQ ID NO: 39988 - DNA, 425 bp, Gossypium hirsutum
  Clone ID: LIB3165-047-Q1-K1-D4
cgtccgcccacccgtccggttaattattgaaaccatgggctgcaatcatatgtggctttgtagcagcatgggttctaattggattcaacatgcttgcagccgagttcaagtacgatgacccactagaagcagcccaattacatggaggatgcggcgcgtggggtttactcttcaccgggttgtttgcgacaaaggcctacgtcaacgaggtgtatccggggctgtcagggaggccatatgggatgttcatgggcggtggagggaagctgttaggggctcaaatcattcagattggtcataacagggtgggtgacggccacaatggggccactgttttatgtgctaaaaaagatgaatttgttaaggatttcaagagaggatgaaacagcagggatggacttgactaggcatgggggatttgctta

SEQ ID NO: 39989 - DNA, 427 bp, Gossypium hirsutum
  Clone ID: LIB3165-047-Q1-K1-D6
gtccgaaataagaagaaaaacaaaaatggccatggcattggcgcttcgacgactctcctcttccattggcaagcctctccgtcctttcttcaatgccccttccctctattacatgtcgtctttgccaaatgaagctgtgtacgagaaggagaaacctggcgtcacttggccaaagcaactgaatgctccacttgaaaccgttgatcctgaaattgctgacatcatcgagcttgaaaaagcgcgccaatggaagggacttgaactcattccatcggagaacttcacttcggtgtcagtgatgcaagcagttgggtctatcatgaccaacaagtacagtgaagggtatcccggtgctagatactatggagggaatgagtacatcgacatggcagagacattgtgtcagaagcgtgctttggaagcattc

SEQ ID NO: 39990 - DNA, 310 bp, Gossypium hirsutum
  Clone ID: LIB3165-047-Q1-K1-D7
cgggagatgataaatccaagcatgtctgcttgtcactggttcataactgtattctgaggggctttcccatttgctttggctcttctaatttgggatgtattactctttgagggtgttaagattgtctttaaagttggattggccctttctgaagtactgccattatgatttgataaaattatcctctgaaaaactcattcatgctatgcgtaacttccaagaggattcaatgaatcctgatatatagctgcccatggcttattcattcaaaggatcccgattcttagcagaattttatatcgagtgctat

SEQ ID NO: 39991 - DNA, 410 bp, Gossypium hirsutum
  Clone ID: LIB3165-047-Q1-K1-D8
cccacgcgtccgcccacgcgtccgggcattacagctgaagatgtgaatgctgcttttagaaaggcagccgagggaccattgaagggtgtattggaagtgtgcgatattcctcttgtctcagtggacttcaggtgctctgatgtttcttccaccattgactcttccttgaccatggtcatgggagatgacatggtcaaggtggtggcctggtatgacaatgaatggggttacagccaaagggttgttgatctggcacacttggtggcaagcaagtggccgggcatgcctgtagctggaagcggtgaccccttggaggattactgcaaggcaaacccagcagatgaggaatgcaaagtttacgaggcttaaatagttgcaactttatgattatttttaattttttttttact

SEQ ID NO: 39992 - DNA, 415 bp, Gossypium hirsutum
  Clone ID: LIB3165-047-Q1-K1-D9
gttgttttcttcagtctctctctcagccatggctgcagccatctccaccgtcgctgccgctgccgccgccaaccgagctctgggagtgtcagtcccaacctcagctttcatggggaagaaagtgagctcaagattcaacagcaccaggcaggttccttcgggaagttttaaggtgatggcggcggagaaagagatagacgaagagacacagaccgaaaaggaccgatggaaagggttggcttacgatatttcggacgaccaacaggacattactcgagggaaagggatggtggattccttgttccaagctcccatgaatgatggaactcactatgctgtcatgagttcctatgaatacctcagccaaggtcttaaaacgtacaatttggacaacaacatggatggtttctacatt

SEQ ID NO: 39993 - DNA, 412 bp, Gossypium hirsutum
  Clone ID: LIB3165-047-Q1-K1-E1
ggagagccttttttttgtgtagcgattctcagttagtcttttctttaagcttacagcttctctccagagttttataatgggtaaggagaaggttcacatcaaccttgttgtcattggccatgtcgactctggcaagtcgaccactactggtcatttgatctacaagctaggtggtattgacaagcgtgtgattgagaggttcgagaaggaggctgctgaaatgaacaaaaggtcattcaagtatgcttgggtgcttgacaagcttaaggctgagcgtgaacgtggtatcaccattgatattgccctgtggaagtttgagaccaccaaatactattgcaccgttattgatgcacctggacaccgtgactttatcaagaacatgattaccggtacctcacaggctgactgtgct

SEQ ID NO: 39994 - DNA, 423 bp, Gossypium hirsutum
  Clone ID: LIB3165-047-Q1-K1-E10
atttttaacagtgcatgtctgcttcaaaactttacactgcaacaaccaaaacccaacgctctaaactggtcttcttcaatggcagtgcagatggctatccgagtttcacccactgcaaggctttctcttccaccaccatcaccatcaccaccttctccttcagtaccatcatccacaatctcaaccaaaccttttttaaaaccccaacaacctaaacccatctctctatcactcccaacatccacagctatctctttattagctttattttcacctccccatgaagccaaagctatcaatcttagcaaagaacaaattatttcatctctcaatgaagtggagaaaaccattgatcaagttcaagaagccagttcaagtgccttggatgtagcacaacagatatttgatgttgtcggaaaagtt

SEQ ID NO: 39995 - DNA, 271 bp, Gossypium hirsutum
  Clone ID: LIB3165-047-Q1-K1-E11
cccacccgtccgggcagccacttttgcaagcctatcaaccggcgttggccttcgaggcaccgccaccgttatgtcattctcgactatgaaaaccccgctatattgagggcttacaaaatcttgggagacagataggaacccataccggctggatgtagcttgcggaggcaagtttacttgcttcgagagagactgtctacgacaggactttaacgatatcagatctgcactgattggttggatagcaccttatatatataccgaacactca

SEQ ID NO: 39996 - DNA, 416 bp, Gossypium hirsutum
  Clone ID: LIB3165-047-Q1-K1-E12
gcgtgagccgctatagttacgagtccctccaccctagattcttataattgtgcttcccccctgcaaaggctttattcttcattcgcttcgttgaatttttatcttctttttatctgaacggagtttggtaatccagttttcgtcttcggttgattcacgaaatcttagtttttgaattgcgtgactgaatgatctaatggagtctaaaggtgggaaaaagaagtctagcagtagtaagtctttattctacgaagctcctctcggatacagcattgaagacgtgcggccaaactgtggaatcaagaagttcagatctgctgcttactccaactgcgctcgcaagccatcctgatatactcacaagcgtgccgtctgaccactagtagtggttaataaaactgttatttgctttgata

SEQ ID NO: 39997 - DNA, 416 bp, Gossypium hirsutum
  Clone ID: LIB3165-047-Q1-K1-E2
cggacgcgtgggcggacgcgtggggaaaaatggcttctgcttccgctactctcctcaagtcttcacctattatcgacaagtccgagtggattaagggccaaaacctccgccacccttcggtttgttttgtacggtcacaccctacatcggccgcctttaccgtccgtgctagttcatatgccgatgagcttgttaagaccgcgaaaactgttgcatctccaggtcgtggtattttggccatggatgaatcaaatgctacatgtgggaagcggcttgcctcgattggtctcgagaataccgaggcaaaccggcaagcttaccgtacccttctcgtgtctgcccctggcctcggtaactacatctcgggagctatccttttcgaggagactctctaccaatctaccatcgatgggaaa

SEQ ID NO: 39998 - DNA, 377 bp, Gossypium hirsutum
  Clone ID: LIB3165-047-Q1-K1-E3
cgggcgggccagccgtccgcccacgcgtccgattaattttaatggctgcttttgtttctttttggtactcctctctcgtctggtcatatccacctaccgagtgagcttcaccatgtctatatcctcctctacgcttggctctgcccacttctgctatactctactatctgctctttcactttgtccttgctaccatgcctaccccaccagctgtagacgatactctgctgcttctttcactatcacggcctctgctgcaaagaagaagaaagtccttatatgtaatacagacagtggcggccatgcagttatcggttcctactgtgacaaagagctgctgggttctggccatgaggttaccatcttcactggtggag

SEQ ID NO: 39999 - DNA, 421 bp, Gossypium hirsutum
  Clone ID: LIB3165-047-Q1-K1-E4
ccttccgaggaaatggagtttagttcaaacgctaaccagcgcattgccaggctcgcagcccatttccaagctcaaatggacgaaagttctattttgaggcgagctgactgtaaagcgaaaggagggtcaccagggttcaaagttgctatcttaggagcagctggaggcattggccagcctcttgcaatgttaatgaagatgaatcctctcgtctcggttcttcatctttacgatgttgtgaactctcctggtgtcacagctgacctcagtcacatggatactggtgctgtggtacgtggtttcctagggcagccgcagcttgagagtgcgttgaccggcatggaccttgtgatcatacctgctggtgttccaaggaagcctggaatgacgagggatgaccttttcaacatcaatgctggaa

SEQ ID NO: 40000 - DNA, 425 bp, Gossypium hirsutum
  Clone ID: LIB3165-047-Q1-K1-E6
tttctttaaaaaaaccctaatttatttttaaaaaattccaaaaaaaaagactgtattttacaactctcaaatttgtctgcaaagcttaaaatcagaagtcagtaatgttgggcgctttaaggagaaaagttgcgagcggacgctcatcagcttcgatattaggaaagtcattacaggcgattcggcctggtgtttcggcttccagagtttcttctaatgctggagaagagatgctatcagttcaactgagagggatcgctcatgttcggaacttctctcatcttgttctgcctggatgttctgctggtttaacaaaaacaagagatgccatttgtatcatccaaccggaggctatcatgcaaacatcatgcagggctttctcttctggagatggggatctcgttgatgcttgtgtcccatttatg

SEQ ID NO: 40001 - DNA, 355 bp, Gossypium hirsutum
  Clone ID: LIB3165-047-Q1-K1-E7
aaaatcagttgcttcacaatggcctctacaaccatggctctttcttccccatcattcgccggtaaggcagtgaagttctccccttccacccctgaaatccggggaactggccgtgtttccatgaagaaaaccaccaagcctgttccttctggtagcccatggtacgggcctgaccgagttttgtacttgggtccactttccggtgagccaccatcttacttgaccggtgagttccctggtgactatggttgggacactgctggactctcagctgatcccgagacctttgctaggaaccgtgagctcgaagtcattcactgcagatgggccatgttgggagctcttgggtgtgttt

SEQ ID NO: 40002 - DNA, 409 bp, Gossypium hirsutum
  Clone ID: LIB3165-047-Q1-K1-E8
caaaaaaacacggtttttccttcttccctgtctttctctgtcttctctttcttttttatgttactctcaattcccattgaaactttcagactttcagccataattaagcttcttcccttcagaaaacttcgactgaagctgctccaagattaaagaagcttcaatttataatactctgccccttaaactagcaagcctgatctgctgcataatcgtctaaagaaaatttgatggggataaataagttgctgtgttggtttgcagttttcttctttttgttgggtttctctgcttgcacttcgatttcggatggtgttttcgactctctcacttctactggaaggcacctccttcaagctaagaaagcttgccctgtgaactttgagtttctgaactacacaattatcac

SEQ ID NO: 40003 - DNA, 338 bp, Gossypium hirsutum
  Clone ID: LIB3165-047-Q1-K1-F1
cccacgcgtccggcgtcggatacgaggtacctttaggacgaagtacaaactccactgctgataacgctattctacttattgcgtggatcttaagcgccgcacctatcctctttgtggacccaagggccacttccgcctgactatccgggcgcaagacattgtcaagaacccagttcgcctgccccggcacatctgtcaaaagatcacacatgtgtgctaagatcagctcttcgagaacaaacttttaatgtcgaacagaaggatggaagcatgttagctgctcttgcacatggctaatacgaacctagaagacgggggctatccatcctacagacctt

SEQ ID NO: 40004 - DNA, 423 bp, Gossypium hirsutum
  Clone ID: LIB3165-047-Q1-K1-F10
cttttggaggaaaaaaaagaaaaaagaactaccacattctacaagccaaatatgagcttgaccattttaaaaccatggattcactgtagttatcttcaacctaccaaattcggcaactacccattttcaagcagcaccaggcttttcaacaatggctgccagcagattgatgaaggcaacaagagtaaaagaaggggagcttttgttaaagttaatgctctaccagattggcctctaatggcagttttagttcatcatgttcaacaacttgatgcccaaagagaaattataaccaataaatctatttggcatcttagtgatgaagccattaaaaaagtttatgctttctacattatgttcacttgctggggatgtttgttttttgggtccaccaaggatccatactatgattctgaagtatac

SEQ ID NO: 40005 - DNA, 412 bp, Gossypium hirsutum
  Clone ID: LIB3165-047-Q1-K1-F12
gttttccaatagttcgtaacaatggcggtctcacttcaagctgcagctaccctgatgcaaccaatcaaggttgctgcaccatcaaggaccaatgtgccgctcaggtcctcccagagcgtttctaaggccttcggtttggagcctgttggtgctaggcttacctgctctttgcaaactgacctcaaggacttggctctgaagtgtgttgatgctaccaagctcgctggtttcgctcttgctacatctgctcttgttgtctcgggagcaagcgctgaaggagtttcaaagcggctaacctacgctgaaatccaaagcaagacatacatggaagtcaaaggaacaggaactgctaaccagtgcccaaccatcgatggtggtgtcgactcttttgccttcagccttgcaaatacta

SEQ ID NO: 40006 - DNA, 354 bp, Gossypium hirsutum
  Clone ID: LIB3165-047-Q1-K1-F2
ccgaataaaaaaagaagaaataaactcaatcttacacccgtacagttggctaaggaaggggattaccttcttcgctctaaatggattccttgcttgtaattcgaattagaggagggattcgtgcaccgtaagtactcgagcttacccacgtactacgatggacgctactggaccatgtggaaactgaccatgtttgggtgcactgactcggctcaagtgttagaggagcttgtgaatcgcatgaaggaataccccaatgcattcattataatcattgggttcgacaacgtttgtcaagtgcagtgcattagtttcattgcctacaagccttatagctacttaagtgtttacttt

SEQ ID NO: 40007 - DNA, 293 bp, Gossypium hirsutum
  Clone ID: LIB3165-047-Q1-K1-F3
ggccgcccttttttttttttgcttatatggatcttaaaactgtaattttatgttttggtgggtgtgtggagccagggttataatagtggatgatgaatgtgacggtgtttgctaaaggtagaacagataagagcggtggtggtggatgcaatgggggttatggacaaatggtgggggcttatcgatgattaatgtcgtggaatttggtattgtcaaaatctgtctttgtgggatcaatttggttgtatgattgggatatgaaaatggaaatgtccgttactgcttatttacgt

SEQ ID NO: 40008 - DNA, 402 bp, Gossypium hirsutum
  Clone ID: LIB3165-047-Q1-K1-F4
gggcggcccaagccgtccggcttttatttttaaaaaaaaaagaaaaaaatttactttctactacgctccttttgttcgctcgggagaataatttggtggtggtggtggtgtttttcgtagtcgacgttgttgttctttgtgggttttcattatatttgaatttttattggacaaagaaagaagttgttgcaagatgatgctcaggattaagagggttccgactgttgtttcgaattaccataaggatgagactgaagagactgctctccgcagcagtgggtgtggaaagaattgccttagaagctgctgcatcccaggagcgaagcttgctttatatgctttcaggaaactgaacaatattggcagtgaaaataatgtgcatctgattgagaacaaagaacc

SEQ ID NO: 40009 - DNA, 426 bp, Gossypium hirsutum
  Clone ID: LIB3165-047-Q1-K1-F6
aaaaaaggagagaaaaccctagatttaggggagatagggtcattatcgtcatttcacgctatgaatcggcgataacgggagcggttcatatcaacggcaaaataagagaagaaaagagatgtacagaggataagtcatcgcagtcccttcaaatggggaagcatccacctgatcattaccgtgactcttgttctgcttctctacctaaaccgaacgcctccggtgatgaatctgaaactgacagtgaagagtcggatgttagtggttccgacggggatgacacatcttggatctcatggttttgcaatctacgtggaaatgaattcttttgcgaagttgatgatgactacatacaagacgattttaacctttgtgggctaagtagccaagttccttactatgattatgctcttgatttgattttgg

SEQ ID NO: 40010 - DNA, 250 bp, Gossypium hirsutum
  unsure (1)..(250): unsure at all n locations; Clone ID: LIB3165-047-Q1-K1-F7
tcctcttcttggagagaggcccttctgggccttttcgtggcggtggtactagccatcaccatctctaaacttcgtggcaagcggttcaagctccctcctggaccattacccgtgccggtgttcggcaactggctccaagtgggtgatgacttgaaccaccgcaacnnnacaacaccggccgagatattcggtgacatatttttacttcgaatgggacagaggaatctggtggtggggcctcttcctgagc

SEQ ID NO: 40011 - DNA, 368 bp, Gossypium hirsutum
  Clone ID: LIB3165-047-Q1-K1-F8
cccacgcgtccgaattatttgaaatttgaagaaaaaaacatctctcaaaaagacccatagatgaaagggaaatggaaaggttcgaagagaaaactagggttgccagctgcccttctactgtgctcactctcattccttgctggattgtttgttcccacttttttctttcaggatgttccaatcattaaacccaagccgagaatgctcgaggcagtgcaggagaagacgtttcgtgatccgatggcaaatggagtaactggggagagttcgattgaatctattccatttcaggttttaagttggaaaccacgagcttactattttcccaactttgcaacttcagaacaatgtgaacatgtaatagaaat

SEQ ID NO: 40012 - DNA, 333 bp, Gossypium hirsutum
  Clone ID: LIB3165-047-Q1-K1-F9
ctatttgctgattgaatccgtgaaactatatctatatatgcttttctttgtatggaagttagattggtatctgaaaagtgtacaaacctgatgtatccaatttggcaattttaatggctagtttcatttgttcaaaagaaaaaaagaaagaaaccacttttttatttcaagatgttccaataatataaacccaagccgataatgctcgaggcagtgcaagagaagacgtttcgtgatccgatggcaaatggagtgggccggggagagttagaatgaatctattccatcccaggttttaagttggaaaccactatcttactattcccccaactt

SEQ ID NO: 40013 - DNA, 416 bp, Gossypium hirsutum
  Clone ID: LIB3165-047-Q1-K1-G1
cccacgcgtccgcccacgcgtccgtttagctatagcatacactactagtacccactactagcaatggcttcctcaatgatctcatcggctaccattgccactgcctctccggcacaggctaacatggtcgctcctttcaccggtctcaagtctgcctctgctttcccagtcaccaggaaggccaacaacgacattacttctctcgcaagcaatggcggtagagtgcaatgcatgcaggtgtggcctcctactgggaagaagaagtttgagactctctcatacctccccgatcttacacccgtgcagttggctaaggaagtagattaccttcttcgctcaaaatgggttccttgcttggaattcgaattggaggagggattcgtgcaccgtaagtactcgagcttacccacgtacta

SEQ ID NO: 40014 - DNA, 411 bp, Gossypium hirsutum
  Clone ID: LIB3165-047-Q1-K1-G10
cggacgcgtgggcggacgcgtgggcggacgcgtgggaaaaaattgaaattagcttcttctcttttaaatgtatagttttttttattttaaacggtgacttgggagaaagggtggaagcaggttagggtttttgggattgttgagaaggagattagcagcggggtttccaggtgatgggcgatgagaaatcgatgatcgtgatggcgagtagggatagagagagtagagatcgggagcttctgatcccggtcgctgacgccgtccacgatgattcctccaaaccttctccttcctcttcttccagtcacgccggccgcgagaccttttacaaagttttcccgagcttggcttcaaagagttcatgacgggatgtgtcattttgttttctatagcaatcactttctacataac

SEQ ID NO: 40015 - DNA, 396 bp, Gossypium hirsutum
  unsure (1)..(396): unsure at all n locations; Clone ID: LIB3165-047-Q1-K1-G11
cggacgcgtgggcggacgcgtgggcggtcgcttgggaaaaaattgaaaatatctggtgggggtttaaatgtatagnnccnnnnatgggaaacggtgacnngggagaaagggtggaagcaggttagggtttctgggattgttgagaaggagattagcagcagggtttccaggtgatgggcgatgagaaatcgatgatcgtgatggccagtatggattagagagagtatagatcgggagcttctgatcccggtcgctgacgcccgccacgatgattcctccaaaccttctctattctctgcttccagtcaacgccggccgctagacctattacaaagttttccggagctgagcttcaaagaagttcatgacgggatggtgtactttgtttcctatagc

SEQ ID NO: 40016 - DNA, 423 bp, Gossypium hirsutum
  Clone ID: LIB3165-047-Q1-K1-G12
aatgtcgacggcttccatcaacggttggtgccttacctcctcttcttcctccaccaccacctcctctttttccgctcgtcgacgacctacactgcggccttcggtcgtcgctagccttaactcttctccttctcctccgactcttatccaagaccgcccggttttcgctgcccctgttcctttgctcaccccgagagaagagatgggaaacaagtcctacgacgaagccattgaagctctcaagaaacttctcagtgagaaaggagaactgaaagctgaagcagctgcaagggtagatcaaataacagcagagttaaacacaacatcagctgacggcaaaccatctgactcttctgttgagagactgaaagaaggcttcgtttacttcaagaaagaaaaatatgaaaagaatcctgcttctga

SEQ ID NO: 40017 - DNA, 368 bp, Gossypium hirsutum
  Clone ID: LIB3165-047-Q1-K1-G2
cctaattttccacatccacgaaaaaaacccaatagcttatacaactctgtgttactacccgcctgaggccaatccaggacttgattgttttccatctgaaaactctccaacggataaaatgagttcaaaatcaaataacccagaaccaggataccactgtaatgatgagaaaaagagcaaagacggattcgcgactatcttctctagttagcccatgtgagattgtgttgaaaattctaaccaaggatgttaccaatgatcagattacataccctctctcgtactttctcttgcttcctactagtgcaacatattttgaagtttatatctcacaaaagtaacattgcatacactattttacatttgaa

SEQ ID NO: 40018 - DNA, 338 bp, Gossypium hirsutum
  Clone ID: LIB3165-047-Q1-K1-G3
gtaaatggttaccactgcttctccattggcgattcatctgaagagcagctttaggtcgtctgttacaataagactggtatgtcccaagggcatttcgggatcccctgttaaagtatttttcggaaagaccaggaccccttgctttactgtcaaagctgttcaatccgacaagtcaacatttcaagtaatccaacccattaactgggaccccttgattggaagcctggagactctcatcacctgaagccccttaattgcatggtacctttgcaaccttccagcctataagacggcagagaacccacttttgatgaggatctaagtgggtctggctcaca

SEQ ID NO: 40019 - DNA, 402 bp, Gossypium hirsutum
  Clone ID: LIB3165-047-Q1-K1-G5
cccacgcgtccgctcttaccatggatccttacaagttttgtccttcaagttcctttgatttgctgttctgtaccaccaattctggtgctccaatttggaacaataactcatcacttactgtgggagcaagaggtccaattcttcttgaagactatcatttggtggagaagctatgctaatttcgatagagaactcatacctgaacgtgttgttcatgctagaggagccagtgcgaaagggttctttgaggtcactcatgatatatctcagctcacatgtgctgatttccttcgtgcccctggagtccagacccctctcattgttagaattcttcagggttttaatgaacgcgtattcctgaaacttttgagagaaccctcgggtttctcttgtgaaaattta

SEQ ID NO: 40020 - DNA, 324 bp, Gossypium hirsutum
  unsure (1)..(324): unsure at all n locations; Clone ID: LIB3165-047-Q1-K1-G6
ctagtacccactactagcaatggcttcctcaatgatctcatcggctaccatagccactggctgggctgtacatgctaacatggncaccccttncaccggcctcaagtctgcctctgctttcccagacaccaggaaggccaacaactacattacttctctcgcaagcaatggcggctgattgcaatgcatgcaggtgtggctctcctactggaaagaagaagttcgagactctcttataccttcccgatcttacacccgtgctgtttgctaatgaagaagatttccttcttttctcaaaatgggtaccttgcttggagttttaat

SEQ ID NO: 40021 - DNA, 410 bp, Gossypium hirsutum
  Clone ID: LIB3165-047-Q1-K1-G7
gatttctataagaaacaacagctgcgagagctatcaatgctgaatggtacacttcgtgaggaaggctctccaatgtctggttctttatcccctttccaaaacagcctcggaatgaagcgagcaaagactagggggtaaaaggatcccttctcgaggcctgttggagcttgtgtcttagtgtctgccgtaagccagcagttttcccggacattgcaggtattggctatatataggcaaatgcctccatgcacgatcggggcactggcatgggcactgttactgttgtgtgccagttaagttaggttgttctaacttatttgtttgatatatgaagtgtgtttatgttgtgtgtgttgggagaagttaaatgctagtattatttttacacagtgagcaatgggtgtgcgttc

SEQ ID NO: 40022 - DNA, 390 bp, Gossypium hirsutum
  Clone ID: LIB3165-047-Q1-K1-G8
ataattggcccctaaatttcccctacgctctcactaaaacaactctctcttctttgttttccaatagttcgtaacaatgtcggtctcacttcaagctgcagctaccctgatgcaaccaatcaaggttgctgcaccatcaaggaccaatgtgctgctcaggtcctcccagagcgtttctaaggccttcggtttggagcctgttggtgctaggctcacctgctctttgcaaactgacctcaaggacttggctcagacgtgtgttgatgctaccaagctcgctggtttcgctcttgctacatctgctcttgttgtctcgggagcaagcgctgaaggagttccaaagcggctaacctacgatgaaatccaaagcaagacatacatggaagtcaa

SEQ ID NO: 40023 - DNA, 271 bp, Gossypium hirsutum
  Clone ID: LIB3165-047-Q1-K1-G9
atgacgcgtgggcgcattcagcgcgagcttttaatgggaaatcggtttaaatttcggaaccgaaacgctggggatgacggcaaccttacttaaagctgaaactaccctgatggcctcaataaaagttattttttctttaaaaccgactgcccaccttaggaactgctcaagcggaggtaaggtccaccggtcggaagatgaccgtacttcgcttagctgctcgttccccaccggccgcccttgataagctcaaagatctattgatgctccc

SEQ ID NO: 40024 - DNA, 425 bp, Gossypium hirsutum
  unsure (1)..(425): unsure at all n locations; Clone ID: LIB3165-047-Q1-K1-H10
aatgaaagcaagcaatccagttgtcatggtccaggcataccgcctccttgttgctgaaatgtacgttcatggctgggattatccattacacttgggagtcactgaagctggagaaggtgaagatggaaggatgaaatccgcgattggcattgggaccctccttcaggatggtttaggtgacacaatcagggtttcactcaccgagccacccgaggaagagatagatccgtgcagaaggatggctgaccttggtatgaaagctgccgaactccagcaaggggtggcaccatttgaggaaaagcacagacattactttgatttccagcgtcgatctggtcaattgccaacacaaaaggaaggcgaagaggtggactttataagtgtcctgcatcgtgatggctcgngtcttatgtcttgttcccttg

SEQ ID NO: 40025 - DNA, 421 bp, Gossypium hirsutum
  Clone ID: LIB3165-047-Q1-K1-H11
atgttgataacggtcagggaagcttcttcttggcctctcaccttcaacctctcctctttctcttctcctaagccttctccaatactcaaaaactctgtttgcagagccagtttaagtgttcatccaaaacccacctccaattcccaatcatggaaccttagtcttctttctaacagccaaaaaggatctgtttttgatcctttgggtatcaacccagacgagtcttcaggtttaaatcgtgtttgggatagttttctatccttgttaacacctacatttgagagtacctcaggtactagaaaggagaaatcttcttcggctagaggagtggcagctgcaattgaggacagttccattgaatttggggatttcttcaaaggcccattaccaggaaaatttctcaagcttttagcatttttgg

SEQ ID NO: 40026 - DNA, 417 bp, Gossypium hirsutum
  Clone ID: LIB3165-047-Q1-K1-H12
atgttgataacggccagggaagcttattcttggcctctcaccttcaacctctcctatgtctcttctcctaagccttctccaatactcaaaaactctgtttgcagagccagtttaagtgttcatccaaaacccacctccaattcccaatcatggaaccttagtcttgtttctaacagccaaaacggatctgtttttgatcctttgggtatcaacccagacgagtcttcaggtttaaatcgtgtatgggatagttttctatccttgttaacacctacatttgagagtacctcaagtactagaaaggagaaatcttcttctgctagaggagtggcagctgcaattgacgacagttccattgaatttggggattccttcaaaggcccattaccaggaaaatgtctcaagcttttagcattt

SEQ ID NO: 40027 - DNA, 419 bp, Gossypium hirsutum
  unsure (1)..(419): unsure at all n locations; Clone ID: LIB3165-047-Q1-K1-H2
cccacgcgtccgcgagattccgtacatttcggatgaaaatgctgaagaggatccggaagttaaggtgacggttaaagacgaaggacccattggtaaagccttgaaggaagcgatgctggccaaaggcaaggctttggttttggagaaagtgagggattttgttcaagctatggcgaaaggtggccccgttaaagatgaattggaagccaagaaatcggctcccaaaactaatactactactggtaatagtaactcagctgcagtgtctaaggaggaagttgggatggagaaggaagccaaaaaggaagtgaagaaggaagggaagaaagggttcaagacgattacaatgacggagaagtttaattgtagagctaaggatatatatgagattntgatggatgagaatagatggaaagggt

SEQ ID NO: 40028 - DNA, 417 bp, Gossypium hirsutum
  Clone ID: LIB3165-047-Q1-K1-H3
gagcaggcaaaaaggaaagaatcaatggcatccacttcagctgcttcaatggctctgcccttagctttagctacccaaaacagggtgccaagctctgaggcattctttaagccacttccggtgaagccatggagggcaatgggcggtgttaaaagacccaacggaaggctccaagtcaaggctggtgcttcttcgttcaaggaaaaggcggtgacggggttgacagcggcagcactgacgacatcgatgatgatgccagaggtggctcaagcagctgatggagtcagcccatctctcaagaacttcttgctcagtatagcggccgggggtgtggttctggtcgccattgttggagccgtaattggtgtgtccaacttcgatcctgtcaagcggagctgagctcatatatttctctct

SEQ ID NO: 40029 - DNA, 414 bp, Gossypium hirsutum
  Clone ID: LIB3165-047-Q1-K1-H4
ggcggacccacccgtccggggttgcaatggcacaagcaatggcatcgatgactggtttacgtggctcttcacaagctgtgttggaaggtagtctccaactcagcggccaaacccggttgaacgttgctagcaccaacagggtggctgtggctagacctggttttaccgttagagctcaacaggtccctgccgagcctgaaactggacgcagagctgtgctgggtcttgttgctgctggtttggctactggctcctttgttcaagctgtgcttgctgatgcacgaagcatcaaggttggcccgcctccaccaccctccggtggattgcccggaactttgaattccgatgagccaagagaccttgatctggcgtacaaagatcggtttttcctccaaccattgactccggcacaag

SEQ ID NO: 40030 - DNA, 394 bp, Gossypium hirsutum
  Clone ID: LIB3165-047-Q1-K1-H5
atgttgataacagacaggggaaatgtgaactatgcggaggaatcggatcaggcaaaccggtgttgggactgcgacgtcaaggttcatgaagctaactttcttgtagctaagcacacccgaaccctcctctgccatgtctgtcagaacccaactccatggctcgcctctggtcaacacctcagccctgctgtctccgtttgcgagtcatgtgtagccaacaaaaatactacttgcgaaatgacgacggagcaggaggagtcatcggagggagagtatgaggatgaagaagaagattatgacggcgatgatgatgaatgagggggggaagaggaagatgatgctgaaaatcaagcggttccatggtcagaggtttcttcttctttctcgatgttaa

SEQ ID NO: 40031 - DNA, 410 bp, Gossypium hirsutum
  Clone ID: LIB3165-047-Q1-K1-H6
cgtccgcgaaaaagatcccatacttctgatctctgccccaaatcaaaaaaagttctcatcttttacaagcgcggcttctgcttatctattttcatgcctcaaagatattcttacttcccgcaagacatggttaatcaggaagaagaacagaggctgaaatacttggaattcgtgcttgttgccgccgttcacgccgatttgtgcttcaccaacctttacctttacgctaaggaaagatcggggccgatgaaacctagcgtcgagaccgttgatggaaccgctaactgcgtgtgaggacctcctttttcattaataccaagatgtccctgttgtatttcttaaattcgttgattccaaggagggggaatttgtgaccaaacttgattttttagtcccttccctcataaaac

SEQ ID NO: 40032 - DNA, 312 bp, Gossypium hirsutum
  Clone ID: LIB3165-047-Q1-K1-H7
gctccccacccttaaaccatgtcggcttttgttggcaagtatgcagaggagttgatgaagaacgccaactacatcgccacgccaggcaaaggtattttggcggaggacgagatcacaggcaccatcgggaagtgtctttcgagcatcaacgtctagaacatcgattccaatcgccaagccctccgcgagctcctatttacctctcccaacgcattatcctgcctctacggtgtcattcttttcgaggaaacactttaccagaaaacatctgacgggaaactcttttttgaaatcctcgaagagaacaatgtc

SEQ ID NO: 40033 - DNA, 414 bp, Gossypium hirsutum
  Clone ID: LIB3165-047-Q1-K1-H8
gctgtatcagctagggtgagtattgaggctggatcaacatttgggtgggcgaagatgtgttggatccaaggggaaggctattggaattgaccggttcggggcaagtgcaccagcaggcaaaatatacaaggagtttggcttgactcccgaggctgttgttgcagcagcaaaagaactttgctaagcttgcttagaagtgtcgggagaaatttgtggttctgggttggaggttacactgaagagagaccattccatttgtgacagtctcgtttgtttttaataagaatcagaatccacttatattttatgttgcctgtgattcatcaaaaagcaaaacatagagagaaagggagggtagagtttgtgtatgatcatcaattttgaatttactctcggactttttcccagagtttt

SEQ ID NO: 40034 - DNA, 406 bp, Gossypium hirsutum
  Clone ID: LIB3165-047-Q1-K1-H9
cccacgcgtccggtcccttattaataagtagagtatttccataactggtttaattcccttcatgcactgtgctccatagtcttggaacccaaggacagaagactcttttagcatttcaccgcaaagatggagataacaaatgtgagcgagtatcaagaaattgcgaagcaaaagttgccaaagatggtgtatgactactacgcatctggtgctgaggaccaatggacattgcatgagaatagatttgctttcaccaagatactgtttcgtcctcgtattctcattgatgtaaacaagatagacatgaccacaactgtgttgggtttcaagatatcaatgcctatcatgattgccccaactgccatgcaaaaaatggctcatcctgaaggggagtatgcaacagcta

SEQ ID NO: 40035 - DNA, 424 bp, Gossypium hirsutum
  Clone ID: LIB3165-048-Q1-K1-A1
cccacgcgtccgcttctttgaaatttagctgaaatggctactgcaacaatgagcttcaatttggtgggagcatttaggggtctttctctagcatcaagctcgacgtcgtcctttatgaaaggagaagtgggttccattcacaaaacggcagtcgtttcgttcccgaggaagtctccgttccctttgacgatcgaatcggcgcacaaaaaaggagccggtagtactaaaaacggtcgcgattcaaagggtcaacgactcggcgtcaaaatctacggcgaccaggtcgccaagcccggcgctattatcgttaggcaacatggaaccaagtttcatccagggaaaaatgtggggcttggcaaggatcacacaatcttttcattgattgatggacttgtgaaattcgagaagtttggaccccacagaa

SEQ ID NO: 40036 - DNA, 373 bp, Gossypium hirsutum
  Clone ID: LIB3165-048-Q1-K1-A10
aacttccacattgttctactccctcttctcttagcttcaaccctttttcatcttcattcccttctttctcaacgcgacaaaacaagggttttaggagaacatctctggtagtagcttccatggctgatctcagcactgtgctcgtcactggagccgctggcagaacaggtcagatagtttacaagaagctgaaagagaggtcggatcagtttgtcgtgagaggactcgttagaactccagaaagcaaggagacaatcggtggagcagatgatgtgtttgttggggatatcagggataccacctctctggttcctgccatgcaaggaattgatgcactcataattcttactagtgctgttcctagaatgaaacc

SEQ ID NO: 40037 - DNA, 432 bp, Gossypium hirsutum
  Clone ID: LIB3165-048-Q1-K1-A11
cccacgcgtccggaaacaattctaacaatgatggtttcttgcatggatgtctcagagcctgtggcagtcagaatagagggatttagacttgcccaacatttggtggcagatgaacaacgatgcataaaaatgacaagcttatgttctgggcctctaattaaagccattattggaggaatgagagtatggaggttgggctctggaaagggtgtaaatgatctggtgtctttgctagatgaggcctgtcggttggctctaattactcgctggccaggagaacatcacaatcacttttgggagcaagggattgacaaagttcttcttgatctacttcttgaaaattttgacaaacaagcatcggagcacactttgacacctcaggcacgaatctctattgctcagcaaggccttgatactaattttcttattgca

SEQ ID NO: 40038 - DNA, 413 bp, Gossypium hirsutum
  Clone ID: LIB3165-048-Q1-K1-A12
tggtgaaaccatcaacgataaggatcgttgcccacaatgcaaaggtgataaggttgtgcaagagaagaaagtcttggaggttattgttgagaagggtatgcagaatggacaaaggattactttcccaggagaagctgatgaagcgcccgatacggttactggggacattgtattcgtcctgcaacagaaagatcatcctaaatttaaacgaaagggtgatgacttatttgtagagcatacattggcacttactgaggccctttgtggctttcagttcatactgactcacttagatggcagacaacttctcattaaaacccaacctggggaagtcgttaagcctgatcaattcaaagcaataaacgatgaaggaatgccgatttatcagaggccatttatgagaagtaaacttt

SEQ ID NO: 40039 - DNA, 379 bp, Gossypium hirsutum
  Clone ID: LIB3165-048-Q1-K1-A2
gtctactcttgctcgtacctctctgcttcatttatctcctcttcgttcaacttcttctacgagggataacgcaactgaaagtgttgccatcgagggtcgtaatattaacttctcggtcaatacgaggcaaggcaaaatggtgccaattctcaaggattgttcaattcggattccttccggacagttgtggatgcttcttggacctaatggttgcggtaaatctacccttttaaagatcttggcaggtcttttgacccctacaaacggggctttatacgttaggaggccaaagagctatgtattccaaaatccagaccatcaggttgtgatgcctacagttgaagcagatgttgcatttggcctttggagaataaactta

SEQ ID NO: 40040 - DNA, 438 bp, Gossypium hirsutum
  Clone ID: LIB3165-048-Q1-K1-A4
gctatagcatacactactagtacccactactagcaatggcttcctcaatgatctcatcggctagcattgccactgcctctccggcacaggctaacatggtcgctcctttcaccggtctcaagtctgcctctgctttcccagtcaccaggaaggccaacaacgacattacttctctcgcaagcaatggcggtagagtgcaatgcatgcaggtgtggcctcctactgggaagaagaagtttgagactctctcatacctccccgatcttacacccgtgcagttggctaaggaagtagattaccttcttcgctcaaaatgggttccttgcttggaattcgaattggaggagggattcgtgcaccgtaagtactcgagcttacccacgtactacgatggacgctactggaccatgtggaagctgcccatgttcgggtgcaccg

SEQ ID NO: 40041 - DNA, 435 bp, Gossypium hirsutum
  Clone ID: LIB3165-048-Q1-K1-A5
actcccctctcactgcaacactcatagcacactatccacacttgctttctttgctttgccttccagtacagccccattttaaagccttggaaagcagacagacagcattaaggaatctcgaatctcaactgggtatggcaattactgcaacggctatgactatgactgtcactacgggattacagtttgctggttctctcaatcataaacagacttcttttttaggagttcccttgaggctgtcaatgtcaaaccctcagccatctttaccctctgtcttcctcaatgttcaagccaaagctcgcacccgaacagaagatcgtgaggcccgccattctcgcattaggaagaagattgaagggacaccagatagaccaagactgtgtgtcttccgttccaacaagcatctctatgttcaggtcattgatgactcaa

SEQ ID NO: 40042 - DNA, 432 bp, Gossypium hirsutum
  Clone ID: LIB3165-048-Q1-K1-A6
atatcttcctctccacccttgaaccatgtcggcttttgttggcaagtatgcagaggagttgatcaagaacgccaagtacatcgccacgccaggcaaaggtattttggcggcggacgagagcacaggcaccatcgggaagcgtctctcgagcatcaacgtcgagaacatcgagtccaatcgccaagccctccgcgagctccttttcacctctcccaacgcattatcctgcctctccggtgtcattcttttcgaggaaacactttaccagaaaacctctgacgggaaacccttcgttgaaatcctcgaagagaacaatgtcattccaggtatcaaggtcgataagggcaccgttgagatagccggcaccaatggcgagaccactactcaagggttcgactccttgggtgcgcgttgtcagcaatactataaagc

SEQ ID NO: 40043 - DNA, 376 bp, Gossypium hirsutum
  Clone ID: LIB3165-048-Q1-K1-A8
gtccatctttcagtaagagaaaggaaatggagtttagttcagaggctaaccagcgcgttgccaggctcgcagcccatctccaacctcagatggaggaaagttctattttgaggcgagctgactgtagagcgaaaggagggtcaccagggttcaaagttgctatcttaggagcagctggaggcattggccagcctcttgcaatgttaatgaagatgaatcctctcgtctcggttcttcatctttacgatgttgtgaactctcctggtgtcacagctgacctcagtcacatggatactggtgctgtggttcgtggtttcctagggcagccgcagcttgagagtgcgttgaccgggatggaccttgtgatcatacctgc

SEQ ID NO: 40044 - DNA, 283 bp, Gossypium hirsutum
  Clone ID: LIB3165-048-Q1-K1-A9
gttgtttatacgtttggttgttgttgatttattgctactaccatggctacaaagaggagcgttggggacttgaaggaagctgatttgaagggaaagaaagtgtttgttagagtcgatctgaacgttccattggatgataacttcaacataactgatgacacaaggatccgtgccgctgtttccaccatcaagtatttgatgggtcatggctctaaagttatcctatttagtcatttgggacgcccaaagggtgtttctcccaagttcaggttgaatccttttg

SEQ ID NO: 40045 - DNA, 345 bp, Gossypium hirsutum
  Clone ID: LIB3165-048-Q1-K1-B1
gagaatactagagtctttacacaaatcaacttattttcaatttcctatatttagaatggtaattcgagtggatcaagattttgaattttagtgggaattttgatcattatacatgggctgaatgagcacagtggaagatatgctcaatttgcaaagcaactaatctcttgcaactttggtgtatatgcaatggactggataggtcatggtggcagtgatggattgcatggatatgttccttcacttgatcatgttgttgtagacactggggctttcttggaaaagatcaaatcagagaacccaggtgtaccttgcttcctttttggtcactctactggtggagct

SEQ ID NO: 40046 - DNA, 424 bp, Gossypium hirsutum
  Clone ID: LIB3165-048-Q1-K1-B10
tttcaagaccgttgctcttttctccaagaagaaggccgctcctccaaagcccaaggctgctgctgtcgccccggccgatgaagagctggctaagtggtacggtccggacagaaggattttcttgcctgaaggtctgttagacagatcggagatcccagagtacttgaacggagaagttcccggagactatggatacgatccgtttggtctgagcaagaagccagaagactttgcaaaatatcaagcatatgagttgatacacgcaaggtgggcaatgcttggtgctgcagggttcatcatccctgaagcctttaacaaatttggtgccaactgtggccccgaagccgtttggttcaagaccggagctcttctcttggacggtaacaccttgaactacttcgggaagaacattcccatcaacctt

SEQ ID NO: 40047 - DNA, 433 bp, Gossypium hirsutum
  Clone ID: LIB3165-048-Q1-K1-B11
ggcatacttcaaaagatatcaagttaagttcaagagaagacgagagggcaagactgactaccgggccaggaaccgtcttatcaatcaggataaaagcaagtacaataccccaaaatatcgtttcgttgcaagatttaccaataaggatatagttgcacaaattatacatgctagtatttctggtgatatagttcttgcagcagcttatgctcatgaacttccccgctatggacttgaagtgggccttaccaattatgctgcagcttattgtgttggactcctcttggctcgccgaacactgaagcaactggagatggatgctgagtatgagggaaatgttgaggcaactggggaggacttcactgttgaaccagcagagaccaggaggcctttccgtgcgctccttgatgttggtcttatcagaactactact

SEQ ID NO: 40048 - DNA, 432 bp, Gossypium hirsutum
  Clone ID: LIB3165-048-Q1-K1-B2
gaaggcaggactctcagactactctttcgaaccagctccaccatcacccccaaaaaacaaagcaaattgtagaagatggcaacacaagcacttgtatcatcgtctcttacctactcagtggagactgcaaggcagattcttggagctaaacgacaaattgggtcttcaaggaaaggatcctttgttgttaaggcagcttcgactccacccgttaagcaaggagctgatagacctttatggtttgcatctaaacaaagcctttcatacttggatggcagccttccaggtgattatggatttgaccccttgggactctcagaccctgaaggtccaggagggttcatcgagcctaaatggctagcctacggtgagatcatcaacgggcgttatgctatgttgggtgcagtaggtgcgattgcccctgaaatactt

SEQ ID NO: 40049 - DNA, 276 bp, Gossypium hirsutum
  Clone ID: LIB3165-048-Q1-K1-B4
cccacgcgtccgattataacagggaaaggagcactagcacagttaaacattgagacagggattcgtattagcgacattgaaccccttgttttgttcaacgttgccttcttcttctttgctgctataaatcctgggactggtaaatttgttactgatgaagcggaagaagactagattttcccaagcaatttgtaattaaagtctcaatacttttctctcccctttttttcttcatgtcccttcgttggcatcaatggattacattgctttttaacc

SEQ ID NO: 40050 - DNA, 437 bp, Gossypium hirsutum
  Clone ID: LIB3165-048-Q1-K1-B5
ttggtattgggcacctgggcaagcccgttcgtgctgagggtgaagattgcacttcacctcaagggtgtcaactacgagaaccatgaggaaaatttgccggaatccaaaagcgaccttcttctcaaatctaaccctgtttataagaaagtcccagtcctcatccatggtcataatcccatctgtgagtctctaatcatcgttgagtacatcgacgaggtttggaccacctctgcttcttccatcctcccttctgatgcctatgaacgcgcccagtcccgattttgggcggcctatgtcgaagataagttttccactgccttaagaagagtgttgtttggtgctacagaggaagataaaagggcagcaatggccgaagtctcagaagggatggtgctgttggaggaagtctttgtgaaattgagcaaagggaaagcttt

SEQ ID NO: 40051 - DNA, 434 bp, Gossypium hirsutum
  Clone ID: LIB3165-048-Q1-K1-B6
cccacgcgtccgcccacgcgtccggggatcagtgagactcttttgtataactgtagcatataggactagtaagcagtaatagcaatggcctcctccatgatctcatcggcaaccattgccaccgtgaactgctcctccccggcacaggccaacatggtggccccccttcaccggcctcaagtctgcctctgctttcccagtcactaggaaggccaacaacgacatcacttctcttgcaagcaatggtgggagagtgcaatgcatgcaggtgtggcctcctcttgggaagaagaagttcgagacactctcatacctccccgatcttacacccgtacagttggctaaggaagtagattaccttcttcgctctaaatggattccttgctgggaattcgaattagaggagggattcgtgcaccgtaagtactcgagct

SEQ ID NO: 40052 - DNA, 397 bp, Gossypium hirsutum
  Clone ID: LIB3165-048-Q1-K1-B7
cccacgcgtccggatttgtattttcctttttcttttttctttttttttggcgaaatgatgcataaaccactttttcttgtgcttactgcaatattctccagcctggtggttcagccagtaattggagctaagggtttcagtgtggagcttattcatcgtgattcgccaatatctcctttctatgatccttctctcacctcatcacaaatcctaagaaaaaatgccctccattccatggaccgtctgaaacacttccaatccttgattgatcaaagcaccatccaatctgcagtgactccaaatggaggtatttatctgattaatctctcctttggaaccccaccagttgaatacatggccgttgcatacactggtagcgaccttatatggatacaat

SEQ ID NO: 40053 - DNA, 428 bp, Gossypium hirsutum
  unsure (1)..(428): unsure at all n locations; Clone ID: LIB3165-048-Q1-K1-B8
ccgccatgtaaatccatgctaaaattgcagactccaagaggtttcaaagcaacacctgttggacaggataactcaacagttgattacagctccacggcctcagtatttccagctgaggcatgcgatacacttggaggagaagcctgtgatgttgagatgttccctgaagtgaagctaaagccagatcaaacacaaagcaataagggtaagacaggttcagagcaggttgacagagaatacttggagtacaacagtcccaagacggtgttcataggagaggcttgtgatgatcttggaggagaattctgtgagcctgagtatcagaaaggagttcaatgattttaccagataaacctcaaaacagtaactgcaaataaataatggggtggtcaccttctttgtaacctgcatactgncttgtgtttctt

SEQ ID NO: 40054 - DNA, 428 bp, Gossypium hirsutum
  Clone ID: LIB3165-048-Q1-K1-B9
cactctcaaattcagttaacaatttcacagttgttttcttcagtctctctctcagccatggctgcagccatctccaccgtcgctgccgctgccgccgccaaccgagctctgggagtgtcagtcccaacctcagctttcatggggaagaaagtgagctcaagattcaacagcaccaggcaggttccttcgggaagttttaaggtgatggcggcggagaaagagatagacgaagagacacagaccgaaaaggaccgatggaaagggttggcttacgatatttcggacgaccaacaggacattactcgagggaaagggatggtggattccttgttccaagctcccatgaatgatggaactcactatgctgtcatgagttcctatgaatacctcagccaaagtcttaaaacgtacaatttggacaacaacat

SEQ ID NO: 40055 - DNA, 401 bp, Gossypium hirsutum
  Clone ID: LIB3165-048-Q1-K1-C1
tcactctcttccactttgtctccttcctttctcccttacagccaatcccctcaataccccatggttctggttcctttttcaagccattttacaggcacttcccagttgggagaaggggaaaatggcacagcttttagcaccctcaactcaatggcaaatgacactaccaaagacctcaacctatggaagtcccattgcaacaaaaatgtggagttctctggtactgaaacagaacaagaaaggagctgctaaaagctctggcaagtttaaagtggttgccttgtctgaaaacagcactgtcaacaggctagagaacttactaaacatggacgtcactccatacaccgacaagatcatcgctgaatacgtttggataggaggcagtggactcgatatgcgta

SEQ ID NO: 40056 - DNA, 433 bp, Gossypium hirsutum
  Clone ID: LIB3165-048-Q1-K1-C10
gttaaggcaaaaattcaggacaaggagggaattcccccagaccaacagaggctgatttttgctgggaagcaactggaggatggccgtaccctggctgactataacatccagaaggagtccaccctccacttggtgctccgtcttcgtggtggtatgcagatttttgtgaagacacttactgggaagaccatcaccctggaagttgagagctctgacacaatcgataatgttaaggccaaaattcaagataaggaaggtatccctccagaccagcagaggctgatatttgctggaaaggcagctagaggatgggaggacccttgcagattacaacatccagaaggagtccaccctccacttggttctccgtctccgtggcgggatgcaaattttcgtgaagaccctgactggaaagaccatcaccctggaagtt

SEQ ID NO: 40057 - DNA, 393 bp, Gossypium hirsutum
  Clone ID: LIB3165-048-Q1-K1-C11
attttctctcaaaaaagtgaagcaaagaatacttgcatcaaacagatggcaaccatggagaaggggttagagtttgagaacaagaatttaggcctcaagcacctaaacttcgtcagggtggctacaatccacgccttggtttgcgtctcgaacctttacgattactctaaacagaactcggggccgttgagatccaccgttgacgccgtcgagcatgccgttaccactgccgtcggtcccgcctacgggaaatttaaggatgttcctgatcattttcttggatttcttgataacaaggtagatgaggtttcacacaaatttgacgagcatgctccagcaccagccaagcaagtggttaacctggcccacgatttggtccaaaaggcaacccaa

SEQ ID NO: 40058 - DNA, 382 bp, Gossypium hirsutum
  Clone ID: LIB3165-048-Q1-K1-C2
ctcaaacaaaccttttacttctcaactctctcaaattcaccatggctgacaagtgcggcaactgcgactgctctgacaagagccagtgtgtgaagaaaggaaacgccttggtcattgagactgagaaaagctacatcagcactgtagtggtcgaggctgtggcagagaacgatggcaagtgcaagtgtggaactagctgcagctgcacaaactgcacatgtggcaatcattaagcagacatatatagaactgcacgatgttttagtccataattaaattaatttgaataattggaggcgtgttgcatgtttgtctccgactcattgtataccatgatagaatggccatgtctatggactttgtctgattaatgaatgattat

SEQ ID NO: 40059 - DNA, 250 bp, Gossypium hirsutum
  Clone ID: LIB3165-048-Q1-K1-C3
gatccggcgcccagctcgtaattggttgacatggggtccgttataccgcctaccggctttctggacatggaccaaccccgattttcaacaaccatcatccacatggcatattacgttgttgtgcggtttgcttaggctaaactcgacgtcggcgtacgggaccggaggtgttcagactcgcagactgaccctggcgtccggtgaaaaaaccgtgcgaatcataccggtcggttgaaggattaaggtcgat

SEQ ID NO: 40060 - DNA, 364 bp, Gossypium hirsutum
  Clone ID: LIB3165-048-Q1-K1-C4
tcgattacgggttcgacccgttcgggttagggaaaccagcggagtacttgcaatatgatttggattgtgtggaccagaacctggctaagaatatggctggtgagatcattggaactaggaccgaagttgccgacgtgaaggcgacgccgtttcagccttacagcgaggtttttggtctacagaggtttagggagtgtgaattgatccatggacggtgggccatgttggctacgcttggtgcacttaccgttgaatggctcactggtgttacatggcaagatgctggcaaggttgagttagttgagggttcatcgtattttggccagcccctttccttcttgatgacaacattgatttggataga

SEQ ID NO: 40061 - DNA, 181 bp, Gossypium hirsutum
  Clone ID: LIB3165-048-Q1-K1-C5
cccacgcgtccgctagttctagatcgcgaccggccttccttttttttttttttttccaaatccggggcgtcgagtgctagacaataaaaaaaggcaaaatttaaagattcgagttttcatcaacaaggctcaagatccacggtgataaagagagaacacgtccacaaaccctaaacagaac

SEQ ID NO: 40062 - DNA, 429 bp, Gossypium hirsutum
  Clone ID: LIB3165-048-Q1-K1-C6
cccacgcgtccggcttgtcagcaattagagaatggaagtgatattgatgatgaggatgatactgaacatgatgaaattcttatggatgcagtttcggaccttttacctgcatttgctaagtcaatgggttatcactttgctcctatatttgcaaaactatttgaacctttgatgaaatttgcgaaagcttcacgtcctccaccagatcggactatggtggttgcttgtcttgctgaagttgcacaggacatgggtgctccaattgcaagctatattgatggactgatgcccctagtgcttaaagagttagcttcgccatctgcaacaaatagaaggaatgctgcattttgtgctggagagctggccaaaaatggatgagagacaactttgaaatattacaatgatatattgcgtgggctttacccatta

SEQ ID NO: 40063 - DNA, 416 bp, Gossypium hirsutum
  Clone ID: LIB3165-048-Q1-K1-C7
gattgtggctgccaaagaaatcgacgaagacacacagaccgaccaggaccgatggaagggtcttgcttatgatatctccgatgaccaacaagacattaccagagggaaaggtatggtcgactcattgttccaagctcccatgaacgatggtactcactatgctgtcatgagctcctatgagtacattagccaaggccttcgcacatacgacttggacaacaacatggatggattctacattgccccagctttcatggacaagcttgttgttcacatcaccaagaactacatgacccttcctaacattaaggttcctcttatcttgggtatttggggaggcaaaggtcaaggaaaatctttccaatgtgagcttgtctttgccaagatgggaatcaaccccattatgatgagtgccg

SEQ ID NO: 40064 - DNA, 415 bp, Gossypium hirsutum
  Clone ID: LIB3165-048-Q1-K1-C8
cccacgcgtccgagcaaaactggatgctgaccggaaggcaaacccaggaacagtcaaaggggggaataaggctgatgatgattcaaaaaaggagaggcagccatttctcacacagttcttctctcccatatttctgaaggcattttccatcacattctttggtgaatggggcgacaagagccagcttgctaccattggtttggctgcagatgagaatccatttggtgtggttcttggtggaattttaggacaagcactgtgcaccactgctgctgtacttggaggaaagagcctggcgtgtcagatatctgagaaaattgttgcactctctggtggagttcttttcattgtttttggattccaatccctcctctcaacagttgagtcttgacgacttactaatggttagttctga

SEQ ID NO: 40065 - DNA, 428 bp, Gossypium hirsutum
  Clone ID: LIB3165-048-Q1-K1-C9
cggacgcgtgggcggacgcgtgggtgagactcttttgtataactgtagcatatagtactagtaagcagtaatagcaatggcctcctccatgatctcatcggcaaccattgccaccgtgaactgctcctccccggcacaggccaacatggtggcccccttcaccggcctcaagtctgcctctgctttcccagtcactaggaaggccaacaacgacatcacttctcttgcaagcaatggtgggagagtgcaatgcatgcaggtgtggcctcctcttgggaagaagaagttcgagacactctcatacctccccgatcttacacccgtacagttggctaaggaagtagattaccttcttcgctctaaatggattccttgcttggaattcgaattagaggagggattcgtgcaccgtaagtactcgagcttac

SEQ ID NO: 40066 - DNA, 433 bp, Gossypium hirsutum
  Clone ID: LIB3165-048-Q1-K1-D1
cccacgcgtccgattagcactagcactagtagcaaccatggcctccgccgcatgtttcttgcagcaccactcactcacaaccaatggcagatcatcatcattatcgccgtcgctgcgccaggtttcaaacatgaagcctacccagcaggtggtgtgcaaggctcaaaagcaggaagatgatggaagccttgtgtcccgtaagttggctctcactgtactcattggtgctgccgctgttggctctaaggtttctcctgctgatgctgcctatggtgaagctgcaaatgtatttggaaagccaaaaacagacacagacttcatgccatacagtggggatggattcaagctctcgataccattcgaaatggaacccaatcatagaggtggagtttccaggttaagtgctgaggtacgaggacaactttgacaccac

SEQ ID NO: 40067 - DNA, 432 bp, Gossypium hirsutum
  Clone ID: LIB3165-048-Q1-K1-D10
aataagcacctccccgtaagcaaaccacaaaggaaagcttggagagagacccaaaaacaatgtctaaggaagttagtgaagaaggacagggtcgtaaggactatgtggaccctccaccggcacctctgattgacatggctgaactcaagtcatggtctttttacagagccctcatagctgagttcatagccactctcctcttcctctatgtcactgttgctactgtaattggtcacaagaaacaacaagatgcatgtgatggtgttggtctcttgggtattgcatgggctttcggtggcatgatctttatccttgtttactgcactgccggtatctcaggtggacacattaaccctgcggtgacttttgggttgtttttggcccgtaaagtgtctttcattagggctgtggcttacatggtgtcacagtgct

SEQ ID NO: 40068 - DNA, 414 bp, Gossypium hirsutum
  Clone ID: LIB3165-048-Q1-K1-D11
cccacgcgtccggattatcacaagaacctaataatcctctccttcttgctaattatgctcagtttctctaccttgttgttcatgattatgacagagcagaagagttgttcaagaaagcaatacaaatggaaccggtagacgctgaagcacacaataaatatgcgatttttttatggaaagcgaagaaggatatgtgggcagcggaggaaaatttcttggaagccattgaagttgatcctaataactcatattatccggcgagctatgctaattttctatggagtaccggtggggaagatacttgtttccctcttggttcatcggatggtattgcttaagaaacaatggccaacactctgttttttctttctttttctggaattttgctcagataaatgaaaacctttctttccc

SEQ ID NO: 40069 - DNA, 419 bp, Gossypium hirsutum
  Clone ID: LIB3165-048-Q1-K1-D12
cttgattgctggtggcccgtttgtccttcctcttgctcacaaacataaagtaaaaattcttccagctgattccgaacattctgccatatttcagtgtattcagggattaccagagggtgcacttcggcgtattattttgactgcatctggtggggctttcagggattggcctgttgataaattaaaagaagtcaaagtagctgatgctttgaagcatcctaactggaatatggggaaaaagattactgtggactctgctacccttttcaataagggtctagaagtcattgaagctcattacctatttggagctgagtatgatgatatcgagatagtaattcatccgcaatctattatacattcaatggttgaaacacaggattcatcagtgctggctcagttgggatggccagatatgc

SEQ ID NO: 40070 - DNA, 429 bp, Gossypium hirsutum
  Clone ID: LIB3165-048-Q1-K1-D2
atcatcaggatggccttcggttgttgcagtagttggtaactggttcgggaagaaaaaaagagggctaattatgggcatatggaatgcccacacgtctattgggaacattactggttctttgattgcttcaacactattgagctatggatggggttggtcctttgttgtgcctggtttgcttattgctttcatgggcatcctggtttgtcttcttcttcctgttagtcctgaatcagttggagctgatagacaagaagaagaagaagatgatgcagtagattcccctaagaagaagaaagagggagtaacagagcctctattgcgctcacatactgagatgaaggaaaatgcagtggggttcatagaagcatggcgaatcccaggggttgctccttttgctttttgcctctttcttgccaaattagttgc

SEQ ID NO: 40071 - DNA, 432 bp, Gossypium hirsutum
  Clone ID: LIB3165-048-Q1-K1-D3
cttcaagctgcagctaccctgatgcaaccaatcaaggttgctgcaccatcaaggaccaatgtgctgctcaggtcctcccagagcgtttctaaggccttcggtttggagcctgttggtgctaggctcacctgctctttgcaaactgacctcaaggacttggctcagacgtgtgttgatgctaccaagctcgctggtttcgctcttgctacatctgctcttgttgtctcgggagcaagcgctgaaggagttccaaagcggctaacctacgatgaaatccaaagcaagacatacatggaagtcaaaggaacaggaactgctaaccagtgcccaaccatcgatggtggtgtcgactcttttgccttcaagcctggcaaatactacgccaagaagttctgcttggagcccacttccttcactgtcaaggctgagggt

SEQ ID NO: 40072 - DNA, 435 bp, Gossypium hirsutum
  Clone ID: LIB3165-048-Q1-K1-D5
ctgagagataagagaaagcactgaaaaagcaaaaccatggcctctgcttctctcctcaagacttcaccagttttagacaagtctgagtgggttaagggtcacacccttcgccaaccttccacttctgtggtgaggtgccaccctgttgcaccctccggactaactgtgcgtgcaagctcatatgccgatgagcttgtcaagactgctaaagctattgcttctcctggccgtggaattttggccatggatgagtccaacgctacctgtgggaaacgtttggcctcaatcgggctagaaaacacggaggctaaccgccaagcctacaggacgttgcttgtttcagctcctggccttggtcagtacatctcaggtgccatcctctttgaggaaaccctctatcaaaccacaattgatggcaagaagatggttgatgtt

SEQ ID NO: 40073 - DNA, 432 bp, Gossypium hirsutum
  Clone ID: LIB3165-048-Q1-K1-D6
ctcgtctctctctctttcacctctctagaaaaccctgcatttcaccttcttcactcccattttcttatatctcgaaaccccataaaccaaaggatcgaacccatttcagattgtattcaatggcatcatcggacttgaaagaatcagctgccaataaccctgggcttcatactacccctgatgaagctaccaaagactacatcatgcagcaaactatgtttcgaattaaggatccaaaagccagtcttgatttttactctcgtgtgttgggcatgtcgctgcttaagagagtggatgttccagaattgaagtttaccttgtactttatgggctatgaggatgtttccaaagctccaagtgatccatacggtagaacagtttggacctttggaagggcagctaccattgaattaacacataattggggtactg

SEQ ID NO: 40074 - DNA, 427 bp, Gossypium hirsutum
  Clone ID: LIB3165-048-Q1-K1-D8
gtttcgttgatttgtttctaaggatttaatctccaaaccttcttcccatttcttcattacattgttcaagaaaaaagaagcaaaaaaacatggccaaagttctgttgttcattgcactatgtgtgcttccagctttggttagtgctacacgcattctgaataatcaattggtggtagaaggctatgtgtactgtgatacttgccgtgctggttttgaaacccctaagactagaagcctagctgatgccatggttaggttggtatgctccgacaggaagagcggccaagttgtcttcaaaaaggagggatacaccgacaaaaccggaaaataccagattcgtgtatccgaggatcacttggatcagatctgtgatgcagttcttgtgaagagctcccagcttggttgtgccacaatgtcccccggtcg

SEQ ID NO: 40075 - DNA, 419 bp, Gossypium hirsutum
  Clone ID: LIB3165-048-Q1-K1-D9
cgaaagccctttttcctcccatggccgccaccaacacattgatgagctgtggcatcgccaccgctttcccttcagtgctttcctcttcaaagtccaagttcgccaccgctacgccgttgcctagctttggcgccaatgttggccaccgtgttagcatgtcggctgactggatgcctggtcagcctaggcctccttatcttgatggttcagcacctggtgactttggatttgatccacttagacttggtgaggtgccggagaaccttgagaggtacaaggaatctgagttgattcactgcagatgggctatgcttgctgttcctggtatattggtgccagaggcattggggtatggaaactgggtaaaggcacaagaatgggcagccgttcctggtgggcaagccacttacttaggcaac

SEQ ID NO: 40076 - DNA, 431 bp, Gossypium hirsutum
  Clone ID: LIB3165-048-Q1-K1-E1
gtgatcctgaaaagtttaaagagttggctcaagcttatgaggtgctgagtgacccagagaagcgtgagatatatgatcagtatggcgaggacgcccttaaagaaggaatgggtggaggcggtggtgcccatgatccatttgatatcttccaatccttctttggtggcaatccttttggtggtggtggtagcagccgaggccgaagacaaagaaggggagaggatgtaattcatcccctaaaggtttctttggaagatctctataatgggatttccaaaaagctttctctttcacgcaacataatttgctccaagtgcaaggggaaagggtctaaatcaggtgcatcaatgaaatgttctggttgtcaaggttcaggaatgaaagtctccatcagacaccttggtccttccatgatccaacagatgcagcac

SEQ ID NO: 40077 - DNA, 428 bp, Gossypium hirsutum
  Clone ID: LIB3165-048-Q1-K1-E10
catggaagcaacctcacttctttcttcatcttcttccttcgccctctctttccttccttgacctctttcttctccagatctccaccacaagtctcttgtcttcaggggcatgtttccagttactgtaaacccgcagacatgttcaacagctgttgtccgcagaaagttgagcttctgtacaaaggcagttcttggaggaaatgtgcatgtaacaggagttcctacttctgtccctgtaagagtagcacacgagcttcatcaagctgggcatcgatatttggatgttaggactcctgaagagttcagtgcagggcatgtccctggggccattaacatcccttacatgtacaaagttggatcaggaatggcaaaaaaccccagttttgtagctgaagtatcatcacatttaggaaaatatgatgaaatta

SEQ ID NO: 40078 - DNA, 338 bp, Gossypium hirsutum
  Clone ID: LIB3165-048-Q1-K1-E12
caacctctttggtggcccaagtgttgttagcgtgtcgcagagtgatggtccatatagctttgcggttacgcgggcggcgcctggtccgtcatgtggggatgtcctccgagtgatgcagcacgagcccgagctaatgtttgagaccctcaagcaccgtgcggaagaattttgtggacaggaccatggcaatgaaggcacccatgctgctttagttagcaccattgctcgttctttccacaacatgccttatcttgtagtggcatccccttgttcgttgactgccatgaataacaatggcttctactattgcaatgaggaagattacaatgctgctgtcg

SEQ ID NO: 40079 - DNA, 347 bp, Gossypium hirsutum
  Clone ID: LIB3165-048-Q1-K1-E2
cccacgcgtccggtccattcacagcctatacgaaccctaagagctcctcatctctttgtttggggcttccatatgaactcaagttcgtcgtcgctttctactctttagccatcaaagatgaccaccatggaaagcttaatcggtttagttaacacgatccaacgagcatgtacggtgctcggggattacggtggcggcgacaacactttatcttccctttgggaagctcttacttccgttgccgtcgtcgggggtcagagtttaaggaagtcttaagtgcttgaaagcatataccgacgttattttcttcctagaggatcaggaaattgtacaagacggcctttgga

SEQ ID NO: 40080 - DNA, 430 bp, Gossypium hirsutum
  Clone ID: LIB3165-048-Q1-K1-E3
tcggaaaaaagccttaccctcaaaagaaaaccggacgtgttcgccgtgggtctacgcgcaccccgcgcgtcccggtggtggtgttatcttcggacccaaacccagagactggtcggttaagatcaataaaaaagagaaaaggttggcgatttcgacggcgttatccagtgcggctgagaacacgatagttgttgaagattttggggataaatttgagaaaccgaggactaaagagtttattgaggcttttaagagatggggattagacccaaagcagaaatctattgttttgatgatggaagtgccggaaactgtgaataaatagattcggaatattggaactttgaggatgttaacgccgaggacccttaatttgcttgatatttttgaattgcgataatttggtgttgacctctgatactgtggatta

SEQ ID NO: 40081 - DNA, 419 bp, Gossypium hirsutum
  Clone ID: LIB3165-048-Q1-K1-E6
tccgatcgtctgaggacactactgtcaaagcctaattgattagatcgctgagtgggatatgtggtggaaaaacattatatgttgtgagatctgcgcagatactgttgttgaaactggataaaactagcatacgtatcgcagggaaattcagctgtggaaactcttggtgaactataaatcataatagtttaggctttaagataggaaaatgcaaattctcaactttggatactcttctaagataaatcataatagtttaggtattgatataggaaaatgctacgaggcaatgaaggtaatcctatgctgcccatatgcatggatgataatggtctttcatattcagactaatgcattaaatcaactgcagtttttttgtaagactacctgttggatgtactgtagatgtggtgaattat

SEQ ID NO: 40082 - DNA, 429 bp, Gossypium hirsutum
  unsure (1)..(429): unsure at all n locations; Clone ID: LIB3165-048-Q1-K1-E7
cccacgcgtccggcaggatctgagatacaacggctgaaagtcggcaaatactaacatataaacgagtctccatgggatctctggacctaagctcaggatcagaagttgttaccattcatgttaatgaagcaaaaaacttgctgcagtcaggctaccgttacatcgatgtcatgacagtggaagaattcgagaagggacatgtggaagcagagaatattcttaacatcccatacttgttcatcacaccagaaggtagggtgaagaatcctgagttcttgaaggaggtttcatctctttgcaaggaggatgatcgtctcatagtgggctgccaaagtggggtgagatcccttgctgcaaccgctgatcttcttaaaattggttntaagaatgtgcacgacatgggaggagggtatctngcttgggtggaga

SEQ ID NO: 40083 - DNA, 423 bp, Gossypium hirsutum
  Clone ID: LIB3165-048-Q1-K1-E8
accaccaccatagtccaacattttcataacaatggctgccatcacaaacgccgctgctacgtcctccttcatggggacactcttccccgacgtctacacaagttcagggagattcgtcgccaggtttggctttggcggcaaaaaagcagctcccaagaaagtctcgaaacgaaccccagaccgccctctatggtacccaggagcagtggcgcctgattggctcgatggaagtttggtgggtgattacgggttcgacccgttcgggttagggaaaccggcggagtacttgcaatatgatttggattctttggaccagaacctggctaagaattcggctggtgagataattggaactaggaccgaggttgccgacgtgaaggcgacgccgtttcagccttacagcgaggtttttggtctacagag

SEQ ID NO: 40084 - DNA, 431 bp, Gossypium hirsutum
  Clone ID: LIB3165-048-Q1-K1-E9
cggacgcgtgggctccttgttggccatcttcgtggtcgtcttcattcgtaccactaacagaagaaacctcttattgccaccgtcgccgccgaaactcccaatcatcggaaacctccacaacatcggacgctaccctcatcgctcactcaagtccttagctcaacggttcggtcctctcatgtcgctacgcttcggcaatttccccatactcgtcgtctcctccgctgatgctgcctctgagatcaagaaaactcatgacttgacattcgtaaacagaccgaaacgcagcctctttcaaaagcttctttatgactacaaagacgtggcgtcggcaccttacggtgagtattggaggcaaatgaaaagtatatgcgtagtaaatcttttgagtaacagaagggataaatcttatcaaggtgtgcgagaagaaa

SEQ ID NO: 40085 - DNA, 344 bp, Gossypium hirsutum
  Clone ID: LIB3165-048-Q1-K1-F1
ggccgccctttttttttttttttttatagaagaaacacaaaataatgagtgatattaatttgtagataaagatagtattacatagtcgcaaaaagcgacctagtacacaacgcacaactctaaaattaggataactcctctgctatccctacggatggattttaaacatccatttttattctgtagctatcattattttggcttccactagctgatgaacattccatgccaaaatttcacttgacgctgctgcagtcagtgctagggctgatcttgtaagggatgttgacaccgcacttgcctggtagtccgcttgcaaggccaaagttgatgccaggaatgcc

SEQ ID NO: 40086 - DNA, 387 bp, Gossypium hirsutum
  Clone ID: LIB3165-048-Q1-K1-F11
ctttgctcacttgcacgaggacgaaagaaccagcgatgtacgtactggttttcgtgctttcatcgggaaaaacgcgaacctggatggggtggatttgactgtggagcatgtggctaatgctgtgctgttcttagcaagtgatgatgcagggtacataagtggagacaatcttatggttgatggtgggtttacatcttccaatcactcattgcgtgtctttagatgaggattgatgaaaatgtgaaccaaaatgaggctcattagcttagctgcctaagccactagctttggttcaactattaccagattgtatctcccttctattttctcctgtcagtggtatgtaatttgtgacaaaaaaacttctaatataattttaattatatt

SEQ ID NO: 40087 - DNA, 432 bp, Gossypium hirsutum
  unsure (1)..(432): unsure at all n locations; Clone ID: LIB3165-048-Q1-K1-F12
caccgccataagcgaaatcaaaagccagcagcgctgcagctaaaagagcagtcgtttgacaattattcgccatgggtaaggttcacggatctctagctcgtgctggtaaggtgagaggccaaactcctaaagtggccaagcaagacaagaagaagaagccccgtggccgcgcttacaagcggatgcaatacaaccgccgcttcgtcaccgcagtaatgagtttttggggattttttcacagtggttggatttggcaaaaagaggggacctaactcatctgagaagtaagagatctatgtaggtgaaagaaggcaagaagccttgttgaaagctttgatggattttaagtctttgttttcttttgataatgtttntatgatactggtttcaaggattggattgaactaccattttgtttgctagatattatgt

SEQ ID NO: 40088 - DNA, 432 bp, Gossypium hirsutum
  Clone ID: LIB3165-048-Q1-K1-F2
cccacgcgtccgttcttcacgtccattttcagatcctttgagtcctctcattccaaccccactgactactcataattgctgcggctcagctatggcctctcaaacccacatctctctcgatttccacacttgtgtcttcaagaaagagaaagtctccctcgctggtcacctcgagtacattgtgagaggaggaagagatttgtttacgttgctgcctgatgctttcaaagggattaagcagattggtgttattggttggggctcccagggacctgctcaagctcaaaatttaagggattctcttgctgatgcaaaatctaatatcattgtcaaggttggactcaggaagggttctcctttttttgccgaagctcgcgctgctgggttctctgaagaaaatggcccttttgggtgatatgtgggaaactattt

SEQ ID NO: 40089 - DNA, 405 bp, Gossypium hirsutum
  unsure (1)..(405): unsure at all n locations; Clone ID: LIB3165-048-Q1-K1-F3
ctactccaaannnnctctagaaccatactncgaganggctnnnctcaagccttcacctgaaatttccaccgcctctgcaaaatttttctctaaccctaccccccgccctaaatttctcaagagctgcgcgatttcgaagaacgacgacgagaaagtttggtcaaggaccaacgctagggtcggtgttaaagatgccggcagtacggtttcgtgtttgagccaaaacttgaggttgtacgtacaattttcggctccggtgaagcgaggatcgaagcccagcaaagaggaagaggagaagcaggattattacgtgaatatgggttacgctattcggaccttgagagaggagttcccggacatcttttacagggagctcagttttgatatttacagggatgacattgt

SEQ ID NO: 40090 - DNA, 243 bp, Gossypium hirsutum
  Clone ID: LIB3165-048-Q1-K1-F4
cccacgcgtccgggccttaaagccggtgcaaccgcatctaaagttagcgccacagccaaggttgcggcctctccagtcccaaggggcagcatcaaggcctccctcaaagacgttggtgttgctgttggggcaactgctgcaagcgtaatccttgccagcaatgccatggccattgaagtcttgctcggcagtgacgatgggggtctggctttctttcccaaaaaattcaccgtaggcccaggg

SEQ ID NO: 40091 - DNA, 276 bp, Gossypium hirsutum
  Clone ID: LIB3165-048-Q1-K1-F8
gcgtgatctcgaagcatccaaagcattgatattcccttcttcaatttcccgatttcaacaaagtgatttcgaaaaaccctaaccctatcttcagcttcaaccaagtctcgaattcttttcgcttttcttatcgtagatcgttgctaattctctcttttcttaatcgatggcggctaaacctcttacgagtgaagcaatcgcccttacagaaaagaaaatggacatgacattggatgatattcattaaatgtcaaaaaatacttcaaattaatctaa

SEQ ID NO: 40092 - DNA, 103 bp, Gossypium hirsutum
  Clone ID: LIB3165-048-Q1-K1-F9
atcagtgaggactcttttgtatacctgtagcatatagtaatagtaagcagtaataggagtggccttctccatgatctattggcaaccatttgtcaccgtgaac

SEQ ID NO: 40093 - DNA, 435 bp, Gossypium hirsutum
  Clone ID: LIB3165-048-Q1-K1-G1
aaaaaagcagataggtagataggttgaactctcttttctccccttagaaccaaactttcaccgaccttcactttctgcctaccatgacggccaaggattgcggcaaccatggcaaaggccggcggcagctcatccgaaggctcttcggttgccttctagtcttcctccttatcgttctcatcacaatcctcatcatttgggcaatcctccgccccacaaaaccccgcttcatccttcaagacaccaccgtctatgctttcaacgcctccagtcccaatttcctcacttctaatttccaagtcaccgtatccacccgaaaccccaatgacagaatcgggatttactacgacaggctcgtcatctacgccacctaccggaaccaacaaaccacccttaggacagctctcccttcaacataccagggtcataatgaga

SEQ ID NO: 40094 - DNA, 396 bp, Gossypium hirsutum
  Clone ID: LIB3165-048-Q1-K1-G10
gtacgcacaccattaaggctatttgtattgttcacaacgaaaccgcgactggagttaccaacaacttggccacagtgagaaaactactagatcattacgggcacccagcactgcttctcgtcgatggagtttcctcgatttgtgctctcgatttccgtatggatgaatggggagttgacgtagccttaaccggctcgcaaaaggcgctttctcttccaaccgggatcggtattgtttgcgctagcccgaaagctctcgaggcgaccaaaaccgcgaaatcagtccgggttttcttcgattggaacgattaccttaagttttacaaattaggaacattttggccttacactccttcaattcaactcttgtatggactaagagcagctttggacctta

SEQ ID NO: 40095 - DNA, 401 bp, Gossypium hirsutum
  Clone ID: LIB3165-048-Q1-K1-G11
cccacgcgtccgcgacatcacttctcttgcaagcaatggtgggagagtgcaatgcatgcaggtgtggcctcctcttgggaagaagaagttcgagacactctcatacctccccgatcttacacccgtacagttggctaaggaagtagattaccttcttcgctctaaatggattccttgcttggaattcgaattagaggagggattcgtgcaccgtaagtactcgagcttacccacgtactacgatggacgctactggaccatgtggaaactgcccatgtttgggtgcactgactcggctcaggtgttggaggagcttgagaattgcaagaaggaataccccaatgcattcattagaatcattgggttcgacaacgttcgtcaagtgcagtgcattagtttca

SEQ ID NO: 40096 - DNA, 406 bp, Gossypium hirsutum
  Clone ID: LIB3165-048-Q1-K1-G12
cggacgcgtgggcggacgcgtgggcggacgcgtgggcggacgcgtgggccgaggcaaaccggcaagcttaccgtacccttctcgtgtctgcccctggcctcggtaactacatctcgggagctatccttttcgaggagactctctaccaatctaccatcgatgggaaaaagatggtcgatgttcttgttgagcaaaatattgtccctggtatcaaagttgacaagggtttggttccactccctggttccaacaacgagtcatggtgccaaggtcttgacggtctttcatcccgcacagctgcctactaccagcagggtgctcgtttcgccaaatggcgtaccgttgtgagcattccaaatggtccatctgccttggcagtaaaagagcagcttggggacttgctcgc

SEQ ID NO: 40097 - DNA, 158 bp, Gossypium hirsutum
  Clone ID: LIB3165-048-Q1-K1-G2
gccaacccgagattttctattttccgattctttttaggtcttttttcccaattttttttgtatttctaaaacagaaacaaataggtgtctcaatggcagaagagagcggtgcccctgtaagttgtgctgatttgcccgttaaaaggcccagggaagac

SEQ ID NO: 40098 - DNA, 377 bp, Gossypium hirsutum
  Clone ID: LIB3165-048-Q1-K1-G3
gtgctttctcgagaggaaaaaaaaaacaaacaaacaaacagcagttaaaagcataaaaccatggtggctttaggcctccaagccacacatttgatttcccctcaaaagttaccaatacgtaaacaaagaacctttagcaacattgtcatccggagtagtattgcagagccgtcgggagaaccagcaccattgggacaaaaaactaaatacaacgatgggttgtttgccaaggcatttatgggtcttttcgcccgcaagatggagaagttcgcggttgcaccaaaagctggaacagaaccaaagaaaggggttttcgactatgactatgagagctttgttgaggtgtcaaagagaagtatgcaagggaggtctcggtt

SEQ ID NO: 40099 - DNA, 434 bp, Gossypium hirsutum
  Clone ID: LIB3165-048-Q1-K1-G4
cccacgcgtccggacgacaggattacgagatctatcgccaccgccaaattcagtccccgcaacgcttcatccaaatatgacttcgtcaaggtgaaggtctggttgggtgataatgccgatcattattatgttttatccaggtttttgcttagcagaatgttaaccgtcacgaagattccgaatcatgttgcagttaaaatctctcttgagctcaagaagctgcttatagacaacagccttttggatatctcgcagtccgatttagaggctaatctttttaagctgatggagtggcgaggttatggacaggagtacataagccggtacaagatgatgaccagatttcaccatcagagagttcctttggtaattcttgtttgtggaactgcttgtgttgggaagtctactatagctacacaacttgcacagaggct

SEQ ID NO: 40100 - DNA, 421 bp, Gossypium hirsutum
  Clone ID: LIB3165-048-Q1-K1-G5
cccacgcgtccgcccacgcgtccgcaccaacaaaatcagttgcttcacaatggcctctacaaccatggctctttcttccccatcattcgccggtaaggcagtgaagttctccccttccacccctgaaatccggggaactggccgtgtttccatgaggaaaaccaccaagcctgttccttctggtagcccatggtacggtcctgaccgagttttgtacttgggtccactttccggtgagccaccatcttacttgaccggtgagttccctggtgactatggttgggacactgctggactctcagctgatcccgagacctttgctaggaaccgtgagctcgaagtcattcactgcagatgggccatgttgggagctcttgggtgtgttttccctgagctgttggctaggaacggtgtcaagttc

SEQ ID NO: 40101 - DNA, 426 bp, Gossypium hirsutum
  Clone ID: LIB3165-048-Q1-K1-G7
ccaggattgaagagataagattatagtgaaaaactaaacataataaagccccttcggcttgcttcattgatttgccctctcaaagcccaagaaaaatggcttctgcttccgctactctcctcaagtcttcacctattatcgacaagtccgagtggattaagggccaaaacctccgccacccttcggtttgttttgtacggtcacaccctacatcggccgcctttgccgtccgtgctagttcatatgccgatgagcttgttaagaccgcgaaaactgttgcatctccaggtcgtggtattttggccatggatgaatcaaatgctacatgtgggaaacggcttgcctcgattggtctcgagaataccgaggcaaaccggcaagcttaccgtacccttctcgtgtctgcccctggcctcggtgactaca

SEQ ID NO: 40102 - DNA, 394 bp, Gossypium hirsutum
  Clone ID: LIB3165-048-Q1-K1-G9
ctttgtttgtagaagacagaagaagaagaagaagaagaagaagaaaaaaagggaacaaaagatggcaattcagattcctagagtgaaacttggaactcaaggatttgaggtttcaaagctgggatttgggtgtatgggtctttcaggtcacaataattcagtgtcagatgaagctggcatagccatcattaagcacgcattcgaaagaggaatcactcatttcgatacagccgacatgtacggacccaaaactaacgaaattctagttggaaaggcattgaagcatttgccacgagagaaggtacagttggctacaaaattcggtgttgaaagcatgggtccaagtggtccggttatcaatggcactcctgaaattttgtcgttctttacttga

SEQ ID NO: 40103 - DNA, 425 bp, Gossypium hirsutum
  unsure (1)..(425): unsure at all n locations; Clone ID: LIB3165-048-Q1-K1-H1
aaggctaccgattctcctcttccgactgttccaggctatgatgtancgggagtggtggtgaaagttggaagtcaagtgaaggagctaaaggaaggagatgaagtgtatggaaacataaatgagaaagcattagaagggccgagacagttcggttcccttgctcagtacactgctgttgaagagaagctgttggctttaaagcccaagaatctagatttttcccaagctgctggtctccctcttgctatcgaaaccgcctacgagggtcttgagcggaccggcttttcatccgggaaatccatccttgttttgaatggttctggtggtgttggaagcttagttattcagttagcaaaacaagtattcggtgcttcaaaagttgcggccacttccagtacttgaaaactggangtactgaagagctt

SEQ ID NO: 40104 - DNA, 381 bp, Gossypium hirsutum
  Clone ID: LIB3165-048-Q1-K1-H10
atggcattttcccaacttatcgtgatagtccattgccagcagcatttaatcgtgttttacagtttggtgatgctagtggcatacaatcacctgtctcttttggtggtttcgggagcttgactaggcacctcggaagattatcaaatgggatttacgaagcaattgatggggattttctcgattcatacagtttgtccctgctgaatccttacatgcctaacttgagtgcttcatggttatttcaaagagcaatgtctgcaaagaaacagtctaatgttccaccggattttattaacgagcttcttgacataaacttcaagagtatggagaggcttggagaccctgtgctaagaccgtttcttcaggatgtcatacagtttg

SEQ ID NO: 40105 - DNA, 420 bp, Gossypium hirsutum
  Clone ID: LIB3165-048-Q1-K1-H11
cccacgcgtccgtctgtaaccgtagaagtgattattggttgagaaatcatggggaaggacaagcataagcctgatgataagggtctgttttcacatcttgctcatggtcttagtcatggtggtcatggacaccctcctggtgcataccctccacctcctggcggatatccacctgctggagcttacccacctcaaggctatccaccagctggctaccctcctcaaggaggatacccccctcacggctatccaccatctggctatcctggtgcatcccattcaaggcacggtggcatgggagcgctgcttgcaagtggtgcagcagctgccgcagctgctatgggggctcaccacgtgtctcacggtgctcatggtgctcatggtgcttatggtgctcatgggtttggtcatggtcatcat

SEQ ID NO: 40106 - DNA, 197 bp, Gossypium hirsutum
  Clone ID: LIB3165-048-Q1-K1-H12
tcggggtcttgcttatgatatctccgatgacccacaagacattaccagagggaaagggttggtgggctcattttttcaagctcccatgaacgatggtactcactatgctgtcatgagctcctatgagtacattaacccaaggctttgcacataccacttggacaacaacatggatggattctacattgccccagctt

SEQ ID NO: 40107 - DNA, 372 bp, Gossypium hirsutum
  Clone ID: LIB3165-048-Q1-K1-H2
gcaccttcgttttttttcctttttcacttccaaaaaggaaaaagaaaagcaaaaaaatggctcatcgtatggcgttttctctgtgtgtcatttcgtattttttattcatcggtttgatatcatcggaggctttctcggtcgtcggatcagaagttgatccgttgatcaggcaagtaacggacggtcaagatgatggagtggagacacagcccttgaccgctgagcatcacttctcgctgttcaaggctcggttcaagaaatcgtacggctcggaggaggagcatgattaccggttcaaggttttccgggcgaacttgagacgagcggagcgtcatcagaagcttgacccgtccgcgactcacggtgtgactc

SEQ ID NO: 40108 - DNA, 464 bp, Gossypium hirsutum
  Clone ID: LIB3165-048-Q1-K1-H3
ggaaataactgccggaccgacccatgcggtttcttgagaaccatggctggctatggttatgcatacagaggggggttcacaacctacagtggcggcgttgctccacgaggtggcaccgaagggtggaacaaaacaagctatagctcagatcatacgtgtcagcctgtgttcattgatgcagaagggaggaggaagccgatcacgtcttacactggtccgcacggtagcaccgagtattacgttacaaaaaccgagatcgtcgaggttccatatatggccgaattcaagcaaagggctcctgtaagagttgaggtggtgagggaccatggtgagggtaagctgatgactaggcccttaagtcccggggaatggcgggagagttcaagtcctgttcggtatcatactgaagagaaatggaataagccttctagacccgttcagtatgacgtcgaagagaaatggaa

SEQ ID NO: 40109 - DNA, 321 bp, Gossypium hirsutum
  Clone ID: LIB3165-048-Q1-K1-H4
tccactcattcgtatgatgagtgccagagaattcgaatgtgagaacgccggataaccaaccaaggggatcaggcagaggtaccgcgtggtcaacaacattataaagaaagggataatgtttagcctttttatcaatgaactcgacgctggagccggacccatgggatgaaccacacactacacagtggacaaccaaatggtgaacaccacacttatgaacatcactgataaccacaccaacgttcagttcaccagggtgtacaacacggaagagaaccctattgttaccatcattgttacctggaaccatttctcgacgct

SEQ ID NO: 40110 - DNA, 380 bp, Gossypium hirsutum
  Clone ID: LIB3165-048-Q1-K1-H5
caaaaacaaatacttgagttcacgctctgttcctccctttaatttgggttttcggatcgtgagctgtcgggtttttttctctctccaaaacaatggcggtttcttcgactttttccggtgctaaattggagcgtttgttgatcaattcttgctcatcgccctcggcttcttctttgcgggcttgttctctttctcaccagcaaatgaaggccttttccaagcctaatcgtggcagaaaagctctggctcagaggactggtggagttagatgtgaagttgctcaatccgacgccattaacgaaggcgaaaaactggatccttccaaggcttctgcactctccgctcttgacagctcaagacttccgctgctgacaggtata

SEQ ID NO: 40111 - DNA, 393 bp, Gossypium hirsutum
  Clone ID: LIB3165-048-Q1-K1-H6
aaaaccgacccgacccacgcgtacggactcgttctaatttgcgtggaggatgcatgtaaacgatgacaaagtgaaagtggtggatgggaggatggggtcactggttaacttggagcaagccattcgagctttggacattgggctgctttgtacgttaaatgagtctaagggtaggcctaaaatggaagaagtggtggagtttctcagcatggacaaacaaatttctgagctgcctgcttgtagacccgtctcattgttcccttacaacagtgccacacgtctttgcactggttattcttgcggcccattcaagtgaatccagctgtttgcctgcttgtattaaactttcaagatcggtttattatttgtacaaaaaatgttggtcagtcaagc

SEQ ID NO: 40112 - DNA, 404 bp, Gossypium hirsutum
  Clone ID: LIB3165-048-Q1-K1-H7
cccacgcgtccgccaaatcttccaagagaacctgttcgatatgcttgacagccatgaaaccaggccaaggtcatgcaattttcactgcagaatgctcccattctttccacttccactgtataacttctaatgtaaaacatgggaatcagatttgtccggtttgcagagcaaaatggaaggaaatcccctttcagagtcctgcttcagatcttcccaatggaaggtctagaatcaacccagcagactggccccgggatgatgcgtggacaactgtggtacggcggctaccttcccctcggttggatccaactaggcagatttcttcactctttcatacttctgagccaggtacttttgatgatgacgaagtactagatctgcagcatgagacaactgaagaaaat

SEQ ID NO: 40113 - DNA, 340 bp, Gossypium hirsutum
  Clone ID: LIB3165-048-Q1-K1-H8
gtcaaccctgttaaacgagaagctattgcaactcgcggtggcggattacgagttccgacagtcaatatacaggaaggagttggaggaagtgataaggtggtccaagaataagggtatgagcgacatgggatttggtcgagataaaactacatattgctactttgccattgcttccagcattccactgccatatgactctgaagtgaggatgataattacaaaaagtgcagttgtgataacagttgccgacgatttttatgataccgaagcttctttcgatgaactgaccacccttactcaagctattagaagatgggatgctgagggattgaatgggcac

SEQ ID NO: 40114 - DNA, 433 bp, Gossypium hirsutum
  Clone ID: LIB3165-048-Q1-K1-H9
cccacgcgtccgaaaaagcttcaaatctcctctgcctattggagattacagcaaaaggcttttctgtttttgtttttgttttattttttatttatttataattttacaagtgtaaaaatccccttggggaatgcagagagatgagacgttcatcgttggcaaggcctgagctttcttaccaccgtaagcgctccattggcggccgaaattgtcaccgaaaacacgtcgaagacgggtgattcagtttgaagggtttcagttttaaatatacatatatttctcacttctattgtaaatagacagtaattcagatcaaagggtatccgtttcttttcttatttttcgttttaatttctcgagcttttacggttcaaaaatggcggacaaagctaaaaccgaaaacccatcttttctccatggaaaatacgagctt

SEQ ID NO: 40115 - DNA, 274 bp, Gossypium hirsutum
  unsure (1)..(274): unsure at all n locations; Clone ID: LIB3165-049-Q1-K1-A1
ggcccggggggtggaagatttaatcatggacccgcttgggaaacaaatgacaggtccactgctttcatggttgtcacnatgttggtttttttttttctataaattcctttttcccattaacttttttccatgatgtgtttctcaagattattagacctcattttgtttctctttagagcacgtgcaagtttgttggtgactgctatccttgaatgcttcttgatttggtattatatattactactgctgatataatgaactatatgtttactat

SEQ ID NO: 40116 - DNA, 422 bp, Gossypium hirsutum
  Clone ID: LIB3165-049-Q1-K1-A10
tttcaactctcaaaccttcaagtctcatttctttctttctctttctctcactagagaagccaagtttctgtgtggccacagagaaaataatttatgatggtgggaaaagatcaagatctgggtttaagtctaagcttgagttattctcaaaatcatcattcgcttcagttaaatctaggcccatctctcgttccatcttctgctaatcaatgctactctccttctgatccaaacatggaatctttacgggcagagactagatcatttcttaaagggatcgacgttaacaggctgccatccacggtcgattgtgaagaagaagccggagtttcatctccgaacagcaccatatcgagtagcctgagtgggaaaaggagcgaaagagaaggtaataacaatggcgacgagctcgagatcgaaag

SEQ ID NO: 40117 - DNA, 411 bp, Gossypium hirsutum
  Clone ID: LIB3165-049-Q1-K1-A11
cccacgcgtccgcccacgcgtccgctaagatttcgtcgtttatatttctccatctggattgtgattgagctctctctcctttcgtcttaattggtttcactatgtcttcttatacccctaagaacatcctcataactggggcagctggttttattgcgtcacatattgctaaccggctcataaggaactacccggactacaagattgttgtgcttgacaagcttgattactgctcgaacctgaaaaacctccttccttccaagtcatctccgaactttaagtttgtgaaaggtgacattggtagtgctgaccttgttaactacctccttattaccgagtctatcgacacaataatgcactttgcagcccagactcatgttgataactcgtttggaaacagctttgagttta

SEQ ID NO: 40118 - DNA, 427 bp, Gossypium hirsutum
  Clone ID: LIB3165-049-Q1-K1-A12
cccacgcgtccgcccaactggaaatagtttatggtgtctttggatacatgcaggtattgtcagcttgcttcatgtcattcgcccatggaggaaatgatgtctcaaatgcaatagggcctctagctggtgcattatcgattcttcaaggtggtgccagcagcgctgagatcgttatcccaaatgatgttcttgcatggggaggattcgggattgttgcagggcttttgatttgggggtatagagtgatagcaactattgggaagaagatcaccgaactcacaccaactagagggtttgcagctgagtttgcagctgcttcggtcgttctctttgcatcaaagctggcattgccgatctcagcaacccatactttggtcggagccgtcatgggagttggctttgcaaggggattaaatagtgttcgagc

SEQ ID NO: 40119 - DNA, 300 bp, Gossypium hirsutum
  unsure (1)..(300): unsure at all n locations; Clone ID: LIB3165-049-Q1-K1-A2
gaagctcttgcccctcttgtggaagttgctctaaaactttcgaagatgcaggagttcaccggccgatccgcaccaactgttatcacatagattcattctgctacacgttaaggtgtgtttgatttaattttgagcaaaagaaaacataaataaagtcctcataagatacgctatatatatatctatgtcagngtgcatccttgccatgagtacttgagaatggcaaaaggcaataatgcttactcatcaaaatttttgacaatattatttgaggatttatttgaatattaattgtttttc

SEQ ID NO: 40120 - DNA, 404 bp, Gossypium hirsutum
  unsure (1)..(404): unsure at all n locations; Clone ID: LIB3165-049-Q1-K1-A3
cccacgcgtncgatcacccccaaaaaacaaagcaaattgtagaagatggcaacacaagcacttgtatcatcgtctcttacctactcagtggagactgcaaggcagattcttggagctaaacgacaaattgggtcttcaaggaaaggatcctttgttgttaaggcagcttcgactccacccgttaagcaaggagctgatagacctttatggtttgcatctaaacaaagcctttcatacttggatggcagccttccaggtgattatggatttgaccccttgggactctcagacccctgaagtccaggagggttcatcgagcctaaatggctagcctacggtgagatcatcaacgggcgttatgctatgttgggtgcagtaagtgcgattgcccctgaaatacttgg

SEQ ID NO: 40121 - DNA, 424 bp, Gossypium hirsutum
  unsure (1)..(424): unsure at all n locations; Clone ID: LIB3165-049-Q1-K1-A4
ctaggttctcttattattggtctcattaaggctgctctttgctctctccttcccaacacaacggtagttattctggtttttagtggaggcgccggcngcggctgctgctgctgctgcngtggctgaaattcaacaaatctcgtaatccgacatggcgaccaaagggtttcgtttgtatctgctgtcgggttttttcgatagcagttctctctgttttggtcatccaaaaaagcaacaacgacgacatgaaccagagctcaaatctcttagagtccccatataatttatccaccactgaaaaaagttggcctgcattggagttgaactggaggcttgtaatggcgaccgtgatagggtttctaggatcaacatgtgggacggtggggcggcgttggcggcggcggcatttttgttccaatgctta

SEQ ID NO: 40122 - DNA, 436 bp, Gossypium hirsutum
  Clone ID: LIB3165-049-Q1-K1-A5
tttaagtgtttcttagtagcctctgtgaagaacccaatcaaggaaaaaacaaaaaacccaactccaaatctgttcagagagagaaacactagaaacaaacaaacaagctcttatcaatgggggaggaagagaagaaacctgcagacgagaaaaaaacggaagagcaagtatctgaaaaagaaggaaagaaaggagatgaagaggaagtaaagcaggctgagaagccagttgaggaaaagaaagctgaagaatccaaggaagaaacgccgccgccttctccgcaagagattatcttgaaggtttacatgcattgtgaagggtgtgcacggaaagttcgccggtgcctcaagggctttcaaggggtcgaagatgtaatgactgattacaagagtaataaagttgtggtgaaaggagagaaaactgatcctttgaaagg

SEQ ID NO: 40123 - DNA, 431 bp, Gossypium hirsutum
  Clone ID: LIB3165-049-Q1-K1-A6
ctagcctatccatctttttctcctcagccgaaccctatccctttagcactagcgccgatctgccttcacaaacggcaaccgacaaattcgggcttttgatgataattttcggccttgtgattcccctttcaactccgatttcaacgaagccaagaggaatctgtggccgattcgcaaggtaagatctcgccctttattttctcttttgttatcttacatacaatagcgttataaaatcaaaaaagaaaacaagataattcgacggagaactttaaggaaaatggaaaatcaccttcaagaatatctttcaaaatgccttttctaaatattagtgtgcgtaatatgcgtatttcagagtgcgtgcgtagtatgcgtacactgtgcgtaagattacagagatgaaatcgacgactttttatagccagattttt

SEQ ID NO: 40124 - DNA, 424 bp, Gossypium hirsutum
  Clone ID: LIB3165-049-Q1-K1-A8
gaaatataccagaaaatcaaaaagaagaagaaaagagatccccaagatgtctcttacaatggcaactaatctctcaaaatcaattttgaagccaaagctggagacccaagtgatccccaaggcttcatccagatcattgattgtatgctcctccagcaatccttcctccgacaaatcggcttcaccactccaggccttctcagcggctctggctctttcttccatccttctttcagctccactccctgctgttgccgacattgcggggctcactccttgcaaagagtccaagcaattcgccaagcgcgagaagcagcagatcaagaagctggaatcctcgttgaagctttacggccccgatagcgcaccggctctcgccatcaaagccaccatcgagaaaaccaagagacggttcgacaactac

SEQ ID NO: 40125 - DNA, 416 bp, Gossypium hirsutum
  Clone ID: LIB3165-049-Q1-K1-A9
cccacgcgtccgcgaaaacacaaactttcattctctcacacaaatatctcatcaagcaagagccttagggaataaaacatggcggtggcgggaatccttaacatccccaaactcccacttttctcgtcgcttcctttgcgtaaacaatcaaggccactttccatttccattaaagcctcaaattcccaaaccagtaccaaagaagaagaaaacccaagcttttcttcttcttcttcttcttcttcttctactactagtacagctacaacttttgctcctcctcccaacttcaagccgccagagccaaagccatttgcaattaggcccgacaagacttgggatgttgttggggcatctcttgctttgtctttcggttgggaactggggtttttgtttctggctattcagcatcttta

SEQ ID NO: 40126 - DNA, 59 bp, Gossypium hirsutum
  Clone ID: LIB3165-049-Q1-K1-B10
aaaaaaaaaaaaaaaaaaaaaaaaaaaattaaaaaaaaaaaaaaaaaaaaaaaaaaaaa

SEQ ID NO: 40127 - DNA, 328 bp, Gossypium hirsutum
  Clone ID: LIB3165-049-Q1-K1-B12
ctagaccaagccctacctttttttctcaaatgctagtggttcattcatttctctctttacaaccccccactgagcctttcttttgagcttcaacttctttgatgggtgtgaatacataatgttaacagctaaactataaccaaagagtttgttttttgcttagcatggggagagatggaaaaagaaactaaccaagaaaacccatctctcctctcaaataataacatcttcatcactaaagaaaactcctcccctaaaaaacacccttgaaacaccgctgcggctggtggcggagataggctgaaacgtgatgaatggagtgaaggag

SEQ ID NO: 40128 - DNA, 360 bp, Gossypium hirsutum
  Clone ID: LIB3165-049-Q1-K1-B5
cccacgcgtccgcatttttgttctcttcaactttattgcataccaaaaaaacttacaacaatggcaacagcctcagttacctacactccacccatgttggctgctgccaccactaaccccaagaagaagaccaacaccaatgtgaattacataacaggcttgaattcttttggtgggttgaaagctcataacaaagtggtctcactaggccaacgtgtatgcaccgagcaatcatttgcaaacgttgttagctcactcaaagctccgacaaagggcaagacaggtaaaagcagcggcggtgcactgtcttcaacctgtaatgctgttggtgagatattcaggattgcagcaatcatgaat

SEQ ID NO: 40129 - DNA, 416 bp, Gossypium hirsutum
  unsure (1)..(416): unsure at all n locations; Clone ID: LIB3165-049-Q1-K1-B6
cttttgtataactgtagcatatagtactagttttctgtaatagcaatggcctcctccatgatctcatcggcaaccattgccaccgtgaactgctccttcccgggacaggccaacatggtggcccccttcaccggcctcaagtctgcctctgctttcccagtcactaggaaggccaacaacgacatcacttctcttgcaagcaatggtgggagagtgcaatgcatgcaggtgtggcctcctcttgggaagaagaagttcgagacactctcataccttcccgatcttacacccgtacagntggctaatgaagtagattaccttcttcgctctaaatggattccttgcttggaattcgaattagaggagggattcgtgcaccggaagtacttgagcctacccacgtactacgatggacg

SEQ ID NO: 40130 - DNA, 420 bp, Gossypium hirsutum
  Clone ID: LIB3165-049-Q1-K1-B7
ctgatatagagggaatgaagacaaaggtgatgatatgggtaaaagtaaccagtatcacttgtgaaggatctaagatctatgtcacggccggaatgaagaaaagcaggaatagagaggcgtacgaggtttccagggatggagtaagtgtagataagttttaaagtggttaggatgccttggagatcctatttcttttaacttttaactctgaaccttcatacttttgtgtccataataagttttaggattcaagtgcaaagaccggtcaactttatggtttctattgtgataaggcttttattctgttctactatgttgaaggtgtctggccaaatatatatataatgaaagtggcaatgcatgaaccttgtgattaagatattataaattgtatggaaggtgctttagaggatctgcagt

SEQ ID NO: 40131 - DNA, 419 bp, Gossypium hirsutum
  Clone ID: LIB3165-049-Q1-K1-B8
ctcttttgtatacctgtagcatatagtaatagtaagcagtaatagcaatggcctcctccatgatctcatcggcaaccattgccaccgtgaaccgctcctccccggcacaggccaacatggtggcccccttcaccggcctcaaatctgcctctgctttcccagtcaccaggaaggccaacaacgacatcacttctcttgcaagcaacggtgggagagtgcaatgcatgcaggtgtggccgcctcttgggaagaagaagttcgagactctctcatacctgcccgatcttactcccgtacagttggctaaggaagtagattaccttcttcgctctaaatggattccttgcttggaattcgaattagaggagggattcgtgcaccgtaagtactcgagcttacccacgtactacgatggacgc

SEQ ID NO: 40132 - DNA, 123 bp, Gossypium hirsutum
  Clone ID: LIB3165-049-Q1-K1-B9
caaaatgcaagaaagcagttcacagttgtctgccacttcatatcaaagcgtcccaactttgcctcttattcacccatgagaaagctattccctttagtttggccgcgataccttcggcttcat

SEQ ID NO: 40133 - DNA, 148 bp, Gossypium hirsutum
  Clone ID: LIB3165-049-Q1-K1-C1
atcccactccttttaccgtattttacctaattccgggattcggaggcgggccccggcccttttttttgaacccaaggccgctttcggccggccgatccggccggaaaacattgtagggggggaagttggcttggggcggacatttgtt

SEQ ID NO: 40134 - DNA, 427 bp, Gossypium hirsutum
  Clone ID: LIB3165-049-Q1-K1-C10
actgaacttggtaaaagggcaaaagaagtgaagaaagctgctgatgcccttcatcaggaagaaagaagtggttctaagggtagaaaatggcgtaaaaatgttaaggctgtggaaaaggagttgcttcagctagaagaagatgtaaaacttttggaagagatgtatcctcaaggagaaaaggctgaaacttcctgggccttgactgttcttggatacttggcaaaacttgtgttgggaatcttagggttgattgtttcagtggcttggatcattcatattgtcatataccttctgattgatccaccactttctcccttcctgaatgagattttcatcaagctggatgatatatggggtcttctgggtacccgtgcatttgcattcttttgcttctaccttctgcttgctgtgattgcttgagcaatga

SEQ ID NO: 40135 - DNA, 355 bp, Gossypium hirsutum
  Clone ID: LIB3165-049-Q1-K1-C11
attggaacgattaccttaagttttacaaattattgaacattttggccttacactccttcaagtcaactcttgtatggactaagagcagctttggaccttatttttgaggaaggacttgacaatgtcattgaaaggcatagtcgtttaggcaaagcaacaaggcttgcagtggaagcatggggcttgaagaattgcacacaaaaggaggaatggttcattgacacggtgacggcggtgcttgttccaccatatattgatagttcggaaatcgtttaacgggcattgaagagatacaatatgagcttaagtcttgggcttaacaaagtggcaggaaaaagttttagaataggacatt

SEQ ID NO: 40136 - DNA, 232 bp, Gossypium hirsutum
  Clone ID: LIB3165-049-Q1-K1-C12
attccccaaaatttgtttcagtaatggctgccttagctttggcttcttcagttaccctcaggcctttattcaatgttgagaaacctggcgtaagaggggtttcttcccttgctaggtccctttcttctttcaaggtagaagccagtggtggcaataatatctataccgacatgccttacggaatcaatggttgtttcatcttgagggacggtgtttatgcctattggaacga

SEQ ID NO: 40137 - DNA, 381 bp, Gossypium hirsutum
  Clone ID: LIB3165-049-Q1-K1-C2
tttctcttgctctctcgtaaaaaacattccttataaatcctctagatctctttttacctttgagtaactctaggttattccgctttgccctaaatggagagggagctgctgcatttgttcgacgccgccaaaaaagctgccgatttggccgccttcgacgccgttttctccaacgcccctgaaagtttcagatgcgttgacgccttgaaccaccttaaggaattccccgtcacttatgacactcttgtttctacacaggttggaaaaaagctgcgacctcttactaagcatcctagagagaaaatcaagactgtggcttttgacttgctttgagtgtggaagaaaattgttattgtggagactaccaagagtaagaaaaat

SEQ ID NO: 40138 - DNA, 434 bp, Gossypium hirsutum
  Clone ID: LIB3165-049-Q1-K1-C4
cccacccgtccgcccacgcgtccgaacaacgttgttcgaaacgatcaacccgggattgtcaggattggaagtctttttctcttttcttcagaacagggatttcctcgttcgcaacaacggggatcaggttaaaatcgatagcttgaaggggaagaaggttggattgtatttctcagcatcttggtgcggtccatgccgtagattcaccccaaatttaatcgaagtgtacaccgagctctcaacgaaaggcgatttcgaggtcatttttattctcgcagatgaagatgaagagtcattcaatggttacttcttcaagatgccatggctggcaatccctttttctgaatcagaggcacgcaagcgcttagatgaaccgtacagtgtgaagggaatacctcacctcgtgctcttggatgaaaatggtaaagtcttga

SEQ ID NO: 40139 - DNA, 267 bp, Gossypium hirsutum
  Clone ID: LIB3165-049-Q1-K1-C7
ttattttttttttaagacaagaacatagtggagatattataacacaaaaatagaggatgcaaatccacttaaaacacaaaaggaaaacaacattcaattaaaacacaaaggggggatatcctttgtttgtgcccaatatagattatatttctacccttagagcttaaattcccatttagaaagctcctcttttgatagcatagataatagcattatcaagggcagttttactcaaaattttggaagccaattgaaccactcttacat

SEQ ID NO: 40140 - DNA, 423 bp, Gossypium hirsutum
  Clone ID: LIB3165-049-Q1-K1-C8
cccacgcgtccgcccacgcgtccgcccacgcgtccgcttgctcacacccaatgtcgcagcgaattcaagctccacttctaagaccaccaccgtgtttttcccttcaaagaacaacaacaattccaggcttgtggtgacgagggcagctgacgaggctgctgcaccagcaccagctaccaccactgcagcatcagaaggcggtgaagcccctaaacctaagccaccaccaattggaccaaaaagaggaaccagggtcaagattcttagaagagagtcctactggtacaacagctttgggtcagttgttacagtcgaccaggaccctaagactcggtatccagtggtggttcgattcaacaaagttaattacgccaatggatcaaccaacaactatgccttggatgagattgcagaagttaactg

SEQ ID NO: 40141 - DNA, 383 bp, Gossypium hirsutum
  Clone ID: LIB3165-049-Q1-K1-D1
gtggatacctaggcacccagagacgaggaagggcgtagtaagcgacgaaatgcttcggggaggttagaccctgaagtagagcaagaggaaagggacttggtagattttgcgtggaggatgcatgtgaaggatgagaaggtgaaggtggtggatgggaggatggggtcactggttaacttggagcaagccattcgagctttggacattgggctgctttgtacgttaaatgagtctaagggtaggcctaaaatggaagaagtggtggagtttctcagcatggacaaacaaattcctgagctgcctgcttgtagacccgtctcattgttcccttacaacagtgccacaggtctttgcactggttattcttgcggcccattcaagtg

SEQ ID NO: 40142 - DNA, 400 bp, Gossypium hirsutum
  Clone ID: LIB3165-049-Q1-K1-D10
cccacgcgtccgcccacgcgtccgcccacgcgtccgatagttcgtaacaatgtcgggctcacttcaagctgcagctaccctgatgcaaccaatcaaggttgctgcaccatcaaggaccaatgtgctgctcaggtcctcccagagcgtttctaaggccttcggtttggagcctgttggtgctaggctcacctgctctttgcaaactgacctcaaggacttggctcagacgtgtgttgatgctaccaagctcgctggtttcgctcttgctacatctgctcttgttgtctcgggagcaagcgctgaaggagtttcaaagcggttaacctacgatgaaattcaaagcatgacattcatggaagtttaaggaacacgaactgtttaccagtgcccaaccatcgat

SEQ ID NO: 40143 - DNA, 290 bp, Gossypium hirsutum
  Clone ID: LIB3165-049-Q1-K1-D11
aaaacaaccaaaaagaaatcgttgaatgagcttcaactttccattagttggaaaccggggcgttcatgcggtcaaaacaatctcgaaatgagctatacgctggcgacatttcttgcgacgacgccattgttggaggaagcaaggagggtgtgcaatataacaaacataagctctccaggggcttacctggtggaacggataggaagcgtggcttatattgcgttttccggtccgtaaatgacttctgggtttgaccagaaatgtataaatctggtggctttaattaatga

SEQ ID NO: 40144 - DNA, 426 bp, Gossypium hirsutum
  Clone ID: LIB3165-049-Q1-K1-D12
cccacgcgtccgcccacgcgtccgcccacgcgtccgaaaaaaatcaattcctctcagagctcactagagatcttctctgttaaccatggcggctaacggatttgtaggagatgaacgcaaagttcaaaagaattactggattgaacactcggttgatcttacggtggaggctatgatgctcgactccaaagccgctgatattgacaaagaggaacgtcccgaagtgctctccttactcccaccgtatgaagggaaaaccattttggaactaggagctggcattggtcgatttactggtgacttagctaagaaggctggtcatgttatagcattagacttcattgagaatgttataaagaagaatgaaaccatcaatgggcattataagaacgtcaaattcctctgtgcggatgtcacttcccctga

SEQ ID NO: 40145 - DNA, 431 bp, Gossypium hirsutum
  Clone ID: LIB3165-049-Q1-K1-D2
ggaaacagcaaaagccccagtaaaaagaggcaattcgatttggtaggaggtttcctttttggatgggaaagaatgcaagttttgagaggcggaattcgacaatcgaagaggatcaacgacaatccagagagctctgcttccttagttccgactgctcggaatgctgctgctaatagaggtagaggtagagggagaggtaggggtagagggcgcggaggaatgaatcctgaagaaaatcaaaagcttgttggtcccagtgcttgtggccggggttgcaatggaataaacttgccagtgagacaggtcgttgaaaaaagtgcataaaaaccggttgctgtcaaggaagaaagaagcactagttcactacctgaaagggtacaacttggtaactcttctgtgtacaggttagacagaaaactcggttaaggggg

SEQ ID NO: 40146 - DNA, 324 bp, Gossypium hirsutum
  Clone ID: LIB3165-049-Q1-K1-D3
ctttcttaaacagcacctttttctttccttcttccttctcccttttccctttcccaaatccattccttttcccttcaatttcccccttaaacgcctggtttccttccccaaacgcccggaactcaaacgcttacatgaggcagcagtggccactggctcagctcaaccagcaagtgaccctccaaaacgttcccgtacaggatacccataagcaagaacaatctggcaaacttgttctttcaactaacgactcatccgatgagctccttagaattagacacacctgtgcacatgtaatggcaatggcagttaaaaaactatacc

SEQ ID NO: 40147 - DNA, 431 bp, Gossypium hirsutum
  Clone ID: LIB3165-049-Q1-K1-D5
cccactccctcctttcctttctccctccccaaacacactttaacctcatatgcggtgtcccttacactgccctccctatagccacctccatctctctcgacacctccatccccatgctcatgcgccgcaaagaagtgaaagactacggaactgccaagtccatcgaaggtgtttacgaaaagggtcaagcttgtttggtggtggaagacctcgtaacgtccggtgcatcggttctcgaaacggcggcaccgcttcggtctttgggtatcaacgtaacggatgccgtcgtggttatagatagggagcaaggcgggagggaaacgctggaggagaatgggattaaacttcatgcactttttactttaactgagatggtcaaggttttaagagctaaagggaagctggaggaagagatggaaagtttggttatg

SEQ ID NO: 40148 - DNA, 411 bp, Gossypium hirsutum
  Clone ID: LIB3165-049-Q1-K1-D7
cccacgcgttcgaaaaaaaaaagaatttattgcttcttccatggctatctttggggagggtgtttccatccttcccatctccgccgtcatcttcctcctcctccgagcttatcgtctccggcgcctccgtctaccgccgggaaacttgggtttacctttcgtcggggagactttacagcttatatctgcttacaagaccgaaaaccccgagccgtttattgatgaaagggcgaaacggcacggttcagtatttacgacccacgtgttcggtgagccgactgtgtattcagccgatccggagacgaaccggttcatcttacaaaacgaagggaagctgttcgagtgtacctacccccggtcgatttcgaatttgctggggaaacattctttgctttggatgaaaggaaacct

SEQ ID NO: 40149 - DNA, 411 bp, Gossypium hirsutum
  Clone ID: LIB3165-049-Q1-K1-D8
cccacgcgtccgccggcttctgcctcacttccaactccacctctccttctaactcactccggcaacccacattgcggcggccgtctatcgtcgccaacctcaactcttccacttctcctcctactctcattcgaaatcaacccgttttcgcagcacctactcctttgctcactccttccaattggaaagaaaacatgggagaccagtcatacgaggaagccattgaagctctcaagaaactgctcaatgagaaaggagaattgaagagtgcagcgacggcaaaggtagagcaagtgacagctgagttgaagactgctgcttcttccgatgagtctgttgaccgcttgaaacaaggcttcatttacttcaagactgaaaaatacgaaaagaatcctgctctgtatggtgagc

SEQ ID NO: 40150 - DNA, 379 bp, Gossypium hirsutum
  unsure (1)..(379): unsure at all n locations; Clone ID: LIB3165-049-Q1-K1-D9
cccacgcgtccgcccacgcgtncgggcgagagaccgatagcgaacaagtaccgcgagggagagatgaaaaggactttgaaaagagagtcaaagagtgcttgaaattgtcgggagggaagcggatgggggccggcgatgcgccccggtcggatgtggaacggcgagagccggtccgccgatcggctcggggcgtggaccgacacgggtcgtggcggcggcccaagcccgggcctatgatacgcccgtggagacgtcgacgacttgatcgtgggattcagcacgcgccgcctcagcgtgcttctgcacctgcgagctccggtcgttcgcctgcgggctcttcattttggccgtcttggaacactgaccaaggagttttgac

SEQ ID NO: 40151 - DNA, 426 bp, Gossypium hirsutum
  unsure (1)..(426): unsure at all n locations; Clone ID: LIB3165-049-Q1-K1-E1
cccacccttccggtttaacttggaggttccttctggtgggaaggtcctttgggcccttggttattcggccaaaattcaaaagaattctggtggaatggaaccaggcggcttttttaccactggttctttcaaggaagcctgttgcccacccaaaaaaacttaacccaagggctgacccaagaaagaagcccaaaaggggggttggaaaacagcagcaaaagcagaggcccgttgagaggaggaggcaccaaaagcccaacccaagaatcctcttgatttgctggcttcaagtagatggtactggatgacttgaaaaggctttactctaacacnaagaccaatttccgagaggttgcaattaaaggattctgggacatgtatgatcccgagggatactcactgtggttttgtgactacaagtacaat

SEQ ID NO: 40152 - DNA, 420 bp, Gossypium hirsutum
  Clone ID: LIB3165-049-Q1-K1-E10
cttatcccattcactgagtctcaacaccgagttatcatcactcatggctatcgaggcttggtttatggatgaaagcaaagaagaccaaaggctttctcatcgacgcaaccccaacgaacctgtttcgttggagcacttggcagagctgggagtgttgtattggcatttgaaccccaaggattacgagaacgatgaagagttgaagaagattatagaagccagaggttataattacatggatttgcttgatttatgccctgagaaagttgacaactatgaggagaaactgaggaacttttacaccgagcacatccatgctgacgaaaagatacgctactgcctggaaggcagtgggtattttgatgttagggacaaggatgaccgatggatttcgatttggatcaaaggaagagatcttat

SEQ ID NO: 40153 - DNA, 334 bp, Gossypium hirsutum
  Clone ID: LIB3165-049-Q1-K1-E11
cccacgcgttcgaactctgccttgaagaagatttagagcatacagtttgtgggttggtgaaaattggggaatggaagctgcggcataagggctgtggggactggcggatgagtttgagaagaagggagagatagggaaggcggtgaagtgcttggaggcaatctgccagtctcacgcttccttccttcccatcgttgaggtgaagactcgactccgcatagccactcttctgctgcgccactctcacaacgtgaaccatgctaagtcccacctctaacgctcacaattgctccttaattccataccttcatgctttgacttgaagtgccgaacc

SEQ ID NO: 40154 - DNA, 370 bp, Gossypium hirsutum
  Clone ID: LIB3165-049-Q1-K1-E12
gccaaccccaacaccaaccatatgctcagctttcttagtcccaagccagtcccgatgaaacagatgggttctccaccgaaacccaccaagctctacaggggagttaggcaacgtcactggggaaaatgggtcgctgagatccggctacctaagaaccggacacgtctttggttaggcactttcgatacagccgaggaagcagccttggcttatgataaagcagcctataaacttaggggtgattttgcgagactcaactttcctaaccttcgtcaccaaagttcccatatcggtggcgacttcggtgaatacaagcctttgcatttctctgttgatgctaagcttcaagctatctgtgaaagtttggaac

SEQ ID NO: 40155 - DNA, 332 bp, Gossypium hirsutum
  Clone ID: LIB3165-049-Q1-K1-E2
gacaacatcaacattcagaacaggaaaaggtttgcagtacaattgttacccgactttgttgcctgattaaacttacaggggcagctttacattttccaggaaaatgaatggtagtgtaaagaaaaaagaagaaagcgaatttcagcctagtataggtttttatactttgggccaagtacaatttgagtcctctagacagtttaggattctcagcatatatttgaggattgtatattaattttgaaatgggagattgggatagatggattgatatcataaaattagttacttgaggtatactctggtaaataaagataaataaactaaagcat

SEQ ID NO: 40156 - DNA, 424 bp, Gossypium hirsutum
  Clone ID: LIB3165-049-Q1-K1-E3
aaacaactctctcttctttgttttccaatagttcgtaacaatggcggtctcacttcaagctgcagctaccctgatgcaaccaatcaaggttgctgcaccatcaaggaccaatgtgccgctcaggtcctcccagagcgtttctaaggccttcggtttggagcctgttggtgctaggcttacctgctctttgcaaactgacctcaaggacttggctctgaagtgtgttgatgctaccaagctcgctggtttcgctcttgctacatctgctcttgttgtctcgggagcaagcgctgaaggagtttcaaagcggctaacctacgctgaaattcaaagcaagacatacatggaagtcaaaggaacaggaactgctaaccagtgcccaaccatcgatggtggtgtcgactcttttgccttcaagcctggc

SEQ ID NO: 40157 - DNA, 425 bp, Gossypium hirsutum
  Clone ID: LIB3165-049-Q1-K1-E4
gccaccaaaaagaaaaacagaaaacaattcttaagtaaccgcttaggaaccttcactcttcagagcatccattgttatccccaagtagctttagtactctaccaccgaaatccaacccttaaaacaataccatttgcagagtggaaatgggcatctacgccatggattttgcactcaaattcaaccattctattttctctactccatacccacctaaaccttcacccaaatgtagatttctaaccgcaagatgctccctccctctctcctctgacggtgccgccactgggttggcagagaggccatggaaggtagcggatgctaggctggttcttgaagatggttctatttggagggccaaattttttggtgcctctggtacccaagttggcgaagtggttttcaacactttttttaacagggta

SEQ ID NO: 40158 - DNA, 203 bp, Gossypium hirsutum
  Clone ID: LIB3165-049-Q1-K1-E5
ttgcgaagcggcggcgcctttttctcacaattgtcagatagcagtaataaaaatgggtggttggtaattgggggtgtgggctgggggagagagccatccttgggcgctcgtgcgcagcaatatataacacaactggagcgaaaagggtccgataactctatgcctgggaactttcgcttcactctctgatactgcctttatga

SEQ ID NO: 40159 - DNA, 418 bp, Gossypium hirsutum
  Clone ID: LIB3165-049-Q1-K1-E7
gtttgaacgaccggataagcctgcgccacaaacagtctcacaggctgacagtcaacttccgatggcctccgccgccgcacacctttccttcagccttccctttccgcctttctcttctccaggccaccgcccagtaactgcttttccttacccaaccactcagagtcagaatcagagtcgagtctccctcagaactcgagctttaggtcctgactttttgggtgatttcggggcacgtgaccctttcccagcggagatagctagtggatttgctgagaaagtgttgggaaacgtcgacacagagcataagattcttatccctaatgcatcagctctctctcttgctaagcaagattgctctcctatttctcctttacagcctcccttgtcggtggatgaagctaaggctctaataaag

SEQ ID NO: 40160 - DNA, 420 bp, Gossypium hirsutum
  Clone ID: LIB3165-049-Q1-K1-E8
cccacgcgtccggatttctcaatctccacgttttaatttcttgaaatctttttggatttgttttcgatggaatcgattagatcgccctattggtgctacagatgtaatcgattcatccggatccgggttcgatctccccatgattcgctcaactgccccgactgtggcggaggattcatcgaagaaattgaaacaccctcgcgatctcccatccaccaccgtttccctgtcgctgccatgtattccgacacgccaagccctgcgctcagcccaagccccaccgccactcctcattttcgccgaactcgtcggaacgctggcgatcgctcccctttcaatcccggtgtggtccttcgtggacccacctccgaatccgacggcatagttaccgaaagagggaacagaaattttcagctttat

SEQ ID NO: 40161 - DNA, 421 bp, Gossypium hirsutum
  Clone ID: LIB3165-049-Q1-K1-E9
cccacgcgtccgtcatttcaaagattcttttataacagtgagggagtagtagttcgagttgtcgacgacgttttttttcaacacgaaaaaaaatggataacttttacgcaccagggaagaaccatctcttcggtccgggtccggttaacataccggaacccgttattcgagccatgaaccggaacaacgaggattaccgttccccggctattccggcgatgacaaaaacccttctcgaagatgtcaagaagatatttaagactacgaccgggactccttttatgatcccaacaacaggaaccggtgcatgggagagtgcacttactaatacgttatcccccggtgaccgaatcgtatcgtttctcattggacaattcagtcttttttggatcgatcaacaacaacggtctaaattcaacgt

SEQ ID NO: 40162 - DNA, 417 bp, Gossypium hirsutum
  Clone ID: LIB3165-049-Q1-K1-F10
attgaaaccctcaaaattccacttaaaaaatggcctccacagcttccctctccaccgccgtagccaccacctctttcctccgcggccacccggccccgaaaaccctaagctcccttcctttcaaccaatctcttttcgggctaaaaccccaacgaaatggccgtctcaccatggctgcatacaaagtgacactgttaacacccgaaggaccccaagaattcgtgtgccccgacgacgtttacatcgttgaccaagctgaggaagaaggcattgatcttccgttctcgtgtagggctgggtcttgttcttcgtgtgccggaatgattaagcaaggctccgtcgatcaatccgacggtaatttccttgatgatgaccagattgctgcaggttttgtcctcacttgtgttgcttaccctc

SEQ ID NO: 40163 - DNA, 366 bp, Gossypium hirsutum
  Clone ID: LIB3165-049-Q1-K1-F2
ccggaacggaagggccgggccgagcgacccgtcccgcgagcgccgccattgtttatatctctttcaacaacaacaacttggtcattttctgacacgagagaatatgatgcaaatccacttaaaacacaaaaggtaaacaacttttaattaagacacaaaggggggattagctttgtttgggcccaatgtagatttttttcttaccttagagctgaattgcccctttataaagctcctcttttgatagcatccgcattagcatttccaagggcggctgtactcaaatatttgtcagccaattgaaccctgttcacattttcttgctcaacaccaagcatgtatccatattccaacagctgcttaatg

SEQ ID NO: 40164 - DNA, 420 bp, Gossypium hirsutum
  Clone ID: LIB3165-049-Q1-K1-F3
tcaaagtccaatcactcccaatactttcataacatttcacgaacttcactctccagtctccaatggcggctgccgtctccaccatcggtgctgtcaaccgagcaccgttgagtttgaatggatcaggtgccggagcttctgctccaagctcagctttcatggggaacagcttgaagaaagtgagcgctaggttcaacaacaacggcaaggctccagtgggaagtttcatgattgtggctgccaaagaaatcgacgaagacacacagaccgaccaggaccgatggaagggtcttgcttatgatatctgcgatgaccaacaagacattaccagagggaaaggtatggtcgactcattgatccaagctcccatgaacgatggtactcactatgctgtcatgagctcctatgagtacattagcc

SEQ ID NO: 40165 - DNA, 408 bp, Gossypium hirsutum
  unsure (1)..(408): unsure at all n locations; Clone ID: LIB3165-049-Q1-K1-F4
cccacgcgtncgcccacgcgttcgcccacgcgttcgatttactcagtacttggtgggtcaaatgggaagggaatacatgataaccagcaggaagcatgtgagtgcttggtgggatgatattagtagcagaccggtctggcagaaggttctccagctctatgctcctcctttctaagaattgaaaatgatgcaatctggggatgggatctttgcaatgatgtctgctttgtggtttaacagtttggattggtttggggtctggtctttgtttgaagaggccaactagttatcctatgttagttatagttcaataaaatgttgatacgggtagggggccgggttacagttatccctgtgtttgcctatgtttgatggtatgaataaagaagaaaaaatcatggagatttc

SEQ ID NO: 40166 - DNA, 369 bp, Gossypium hirsutum
  Clone ID: LIB3165-049-Q1-K1-F7
gccgcctgcgtctctctcttcatctctctgaaccaaaaagactttagcttttcgctgcgagagagaccatgttggtttaccaggatctcatctccggtgacgagcttctttctgactcattcccctacaaggaaatcgagaatgggatgctgtgggaagttgagggaaagtgggttgtgcaaggagctgtcgatgttgacattggtgccaatccttcagccgaaggtgctgatgaggatgaaggtgttgacgaccaagctgtgaaggttgttgacattgttgacactttcacgctttatgagcaaccccctttcgacaagaagcagtttgttgtgttcatcaagaagttcatcaagaacttgtcaccaa

SEQ ID NO: 40167 - DNA, 194 bp, Gossypium hirsutum
  Clone ID: LIB3165-049-Q1-K1-F8
gcgagggccgccctttttttttttttttaagacaagaacaaagtggagattttataacacaaaaatagaggatgcaaatccacttaaaacacaaaaggaaaacaacattcaattaagacacaaggggggatttcctttggttgggcccaatataaaattttttcttcccttaaagcttaatttcccatttaaaa

SEQ ID NO: 40168 - DNA, 423 bp, Gossypium hirsutum
  Clone ID: LIB3165-049-Q1-K1-F9
ctcaacattcccatttccaatctccagctcccaaggaaaatatgccgatcagaaacatagcggttggccggcccgaagaggctactcaccccgatgctctcaaggctgctttggctgagttcatctcagccttgatcttcgttttcgctggatcgggctcaggaatggcctttaacaagttgactgacaacggagcaaccaccccggctggtctcgtagccgccgctctagctcatggcttcggtcttttcgttgctggctccgttggcgccaacatcttaggtgggcacgtcaaccctgccgtcaccttcggtgcttttgttggcgggaacattactctcttgcgcggcattctttactggatcgcccaactcctaggctcaaccgtcggttgcctgttgcttaagctcgctaccggcgacc

SEQ ID NO: 40169 - DNA, 274 bp, Gossypium hirsutum
  Clone ID: LIB3165-049-Q1-K1-G10
cccactcgtccgctgaaactgatacgattgctatttaagcttcatagaaccaagtgatcgaaccatctgaagtaaggacagatagcgatccttggtaagattgaagtgtcaaaatttaaataaaaattttcctgtattatctgattgctattaacaaaagaatccataatgaaagaagagttgtgggttcggttggtgaagatgaggaggttagtgataatggttttttctatggtggattaaattcactttatacgtgtattatttttaattt

SEQ ID NO: 40170 - DNA, 339 bp, Gossypium hirsutum
  Clone ID: LIB3165-049-Q1-K1-G11
cccacgcgtccgcccacgcgtccgaaaatgtgttgcctcttcatcaacgatctcgacgctggagccggtcgtatgggaggaaccacacaatacacagtgaacaaccaaatggtgaacgccacactcatgaacatcgctgataaccccaccaacgttcagctccccggtatgtacaacaaggaagagaaccctcgtgttccgatcatcgtcaccggtaacggatttttcgacgctgtacgcgcttctcatccgtgacggtcgaatggagaagtttttactgggcacccaccagggaaaaataggatcggtgtttggcacaaggtatttttcaaggaaccg

SEQ ID NO: 40171 - DNA, 422 bp, Gossypium hirsutum
  Clone ID: LIB3165-049-Q1-K1-G2
tttagctatagcatacactactagtacccactactagcaatggcttcctcaatgatctcatcggctaccattgccactgcctctccggcacaggctaacatggtcgctcctttcaccggcctcaagtctgcctctgctttcccagtcaccaggaaggccaacaacgacattacttctctcgcaagcaatggcggcagagtgcaatgcatgcaggtgtggcctcctactggaaagaagaagttcgagactctctcatacctccccgatcttacacccgtgcagttggctaaggaagtggattaccttcttcgctcaaaatgggttccttgcttggaattcgaattagaggagggattcgtgcaccgtaaatactcgagcctacccacgtactacgatggacgctactggaccatgtggaagct

SEQ ID NO: 40172 - DNA, 380 bp, Gossypium hirsutum
  unsure (1)..(380): unsure at all n locations; Clone ID: LIB3165-049-Q1-K1-G4
cccacgcgtncgcccacgcgtccgctctgtcagaattgaagagaaacctccaacctccacaaccaccaccaaaacatcacatccaccaccaccccaatctcctaaagcttggcctccaccagcgccatcctatgcttctccatcagttggagccaagaaaagagtagaaccaaggctgtccaccatgatcttcaatacatttgacgatattataaacaacttcatagaccctccactcaggccttctgtcgaccccaagcatgtcctgtcccacaacttcgctcctgttgatgagcttcctcctacaccctgtgaagttatacaaggatccctcccgccttgccttgacggtgcatacattcgtaatggccccaaccctc

SEQ ID NO: 40173 - DNA, 439 bp, Gossypium hirsutum
  Clone ID: LIB3165-049-Q1-K1-G5
cccacgcgtccggccacgcgtgcgatctgtcagaatggaacagaaacctccaacctacgcaaccaccaccaaaacatcacatccaccaccaccccaatatcctaaagcttggcctccaccagcgccatcctatgcttctccatcagctggagccaagaaaagagtcgaaccaaggctgtccaccatgatcttcaatacatttgacgatattataaacaacttcatagaccctccactcaggccttctgtcgaccccaagcatgtcctgtcccacaacttcgctcctgttgatgagctttctcctacaccctgtgaagttatacaaggatccctcccgccttgccttgacggcgcatacattcgtaatggccccaaccctcagttcctccctcgtggaccttaccacctcttcgatggtgatggtatgcttcactccatt

SEQ ID NO: 40174 - DNA, 422 bp, Gossypium hirsutum
  Clone ID: LIB3165-049-Q1-K1-G8
cggacgcgtgggcggacgcgtgggcggacgcgtgggttccattccttttctctctctgtagcaatggagtcgcgattgttatcacgcgcttctgttatcaccggcttacctcagctcaggccgaagctttcgccagggattgtcaacgtttcgtttgcttcggctaagccgatcggagccgtcggtgaaggcgggaacctcatatgggggaggcaactaaggccctccttgctactagaatgctcgtcggttagcaagccagaggtcctgaaaccggtttcggctgccgcgtcgtcaccggccgagggaggaagcgattccgccggggatgggaagattgctccggttggattcttcgagaagtttcccgctcttgataccggatgtttcttcttcatgtggtacttcgtgaatgtaatatt

SEQ ID NO: 40175 - DNA, 418 bp, Gossypium hirsutum
  Clone ID: LIB3165-049-Q1-K1-G9
gttagctatagcatacactactagtacccactactagcaatggcttcctcaatgagctgatcggctaccattgccactgcctctccggcacaggctaacatggacgctcctttcaccggcctcaagtctgcctctgctttcccagtcattaggaaggccaacaacgacattacttctctcacaagcaatggcggctgagtgcaatgcatgcacgtgtggcctcctactggaaagaagaagctcgagactctctcatacctccccgatcttacacccgtgcagtttgctaaggaagcagactaccttcttcggtcaaaatgggttccttgcttggaattcaaattatacgagggattcgtgcaccgtaaatacttcagcctacccacatgctatgatggacgctactggaccatgtgga

SEQ ID NO: 40176 - DNA, 154 bp, Gossypium hirsutum
  Clone ID: LIB3165-049-Q1-K1-H10
gccggccgatccgggcggaagacattgtcaggtggggagtttggctggggcggcacatctgttaaaagataacccatgtgtcctaagattagctcaacgagaacagaaattttgtgtggaacaaaagggttaaagctcgtttgattctgatttc

SEQ ID NO: 40177 - DNA, 270 bp, Gossypium hirsutum
  Clone ID: LIB3165-049-Q1-K1-H11
tccacgcgttcgcccacgcgtccgcccacgctttcgtaaaaccttttcaatgtctatcttaaaacatcatatgtgcccgtcgaggtctctaacgcatatttctactagcccacggctgcaccttgttgcaaggttgacatgttcggccactaccaccacaaccaagcttaagttcagtctataaccagttgggtatcgagccactgcttgagacaaaaccggactctatcacttccatattccctagtggttgcccttcccttgtccaat

SEQ ID NO: 40178 - DNA, 266 bp, Gossypium hirsutum
  unsure (1)..(266): unsure at all n locations; Clone ID: LIB3165-049-Q1-K1-H12
acgtgaaatatctagggattttcatcatncttcttcttctcatttcctacttctgaagatttcatcttaattgcatgtaaaagaaaaatgccttaggtatgatgaaccgccgcggcatatggtatctcgctctttattgttggttcacttatccgtcaagtgacaacgaacacgttaatctctagggcattgtttatcagatacgggagaatacatgatgtggatatgaagcgcgactatgcatttgttgaattcaacgaccctag

SEQ ID NO: 40179 - DNA, 366 bp, Gossypium hirsutum
  Clone ID: LIB3165-049-Q1-K1-H4
gaaaagaggggttttccccttttccctccgcaagggcatagatcgcccatcgtcgcggctccaccttccccaaatgcacaccgcggtggccgacgagccagatatctcggaggcgtgggagcgtggcatggagtagcgcacgattcggaagcttggcgcgcatcgtacgctgcttggactcgaagcttgcggcgccgatttccttctgctgctcgggttttaggttggctttatgttttgtgtattgggttgagagatgtgggataggttttgggtaatctggtgggctttaaggctgttttggattgggttttaataggtgtttttatatttggtgtttagttttttaatatttaaattttggat

SEQ ID NO: 40180 - DNA, 342 bp, Gossypium hirsutum
  Clone ID: LIB3165-049-Q1-K1-H5
attggtgctttcgttgcactcttttaccaccaatacattctaagagcagcagccattaaagcccttggatctttcaggagccatgcgtaaaaacatttcaccttcattacaataaggaaaacaatgatgtaataacaaatgaggaatgagagcaagtttatgtcttgtgggaggggttccctttagcagtttaatttctataccaattgagatagggggccatttgaaaggtaattatataagaataaaaaaaatttttggataagggtggttctttcaattccctgtttttatattaatttttaggaggcttttttaaaaaggtatatattcattatttaa

SEQ ID NO: 40181 - DNA, 425 bp, Gossypium hirsutum
  Clone ID: LIB3165-049-Q1-K1-H7
aagaaaatggggtttcgtgagttatgtgtggggttaatgatgatgatgattctggggagaccaattagcggcagagatgccgtcctagtacttaggagcaacgccactaaccagtgcaatggccttctcggcggctgcgttatccgggaagaattggagtcggagctggatttgttgatgatagattctaccgttatcagaatccttaagcaaggtagcggtcacatatctatcaacacgtttataaagggtaagccagcagtaaatcaaaatgactgcggtcctagttatgggaattgtatttcaaaacccaagccaaatggacataattctaattgtaacggtaatagcccttattgtaaacaatgatgtttatcaacctatctatgacaaataacgccctattcattattcgaatcgtaaag

SEQ ID NO: 40182 - DNA, 197 bp, Gossypium hirsutum
  Clone ID: LIB3165-049-Q1-K1-H8
accactcattctgacttctaatactgtttctttttccaaacccaacctatacattgaggcatatttaatgggtgtaggttcctccaaatatctcatgcctacacaacttctctactatccttccctttgtcatgaaaaccttttatgacttacattcactctttgcttttcatacatctactatatgaatcaataat

SEQ ID NO: 40183 - DNA, 428 bp, Gossypium hirsutum
  unsure (1)..(428): unsure at all n locations; Clone ID: LIB3165-050-Q1-K1-A1
nncgcccacccgtccggccgctaatctgcttctcttctccttctcttgcctttccaggttccaaactctgagtcttcctctagctcctatcctttaacaggaaatggcagtcacattcaacgacttgggttctgctgccggcttgaagaagctcgatgagtatctcctcactcgcagttacatctctgggtaccaagcttcaaaggatgatatcaccgtctacacagctctatctggggccccatcgtctagctatctgaatgtttctcgatggtacaaacacatcgatgcccttttgaggatcttaggtgtttctgaagaaggctgtggtgtgactgttgagggatttgctcccgctgaggctgtggccactcctccaactgcagattcaaaggctgcagctgctgaggatgacgaaaatgatgatg

SEQ ID NO: 40184 - DNA, 419 bp, Gossypium hirsutum
  Clone ID: LIB3165-050-Q1-K1-A11
atcaaagtccaatcactcccaatactttcataacatttcacgaacttcactctccagtctgcaatggcggctgccgtctccaccatcggtgctgtcaaccgagcaccgttgagtttgaatggatcaggtgccggagcttctgctccaagctcagctttcatggggaacagcttgaagaaagtgagcgctaggttcaacaacaacggcaaggctccagtgggaagtttcatgattgtggctgccaaagaaatcgacgaagacacacagaccgaccaggaccgatggaagggtcttgcttatgatatctccgatgaccaacaagacattaccagagggaaaggtatggtcgactcattgttccaagctcccatgaacgatggtactcactatgctgtcatgagctcctatgagtacattag

SEQ ID NO: 40185 - DNA, 437 bp, Gossypium hirsutum
  unsure (1)..(437): unsure at all n locations; Clone ID: LIB3165-050-Q1-K1-A12
gtaatagcaatggcctcctccatgatctcatcggcaaccattgccaccgtgaaccggtcctccccggcacaggccaacatggtgngcccccttcaccgggcctcaaatctgcctctgctttcccagtcaccaggaaggccaacaacgacatcacttctcttgcaagcaacggtgggagagtgcaatgcatgcaggtgtggccgcctcttgggaagaagaagttcgagactctctcatacctgcccgatcttactcccgtacagttggctaaggaagtagattaccttcttcgctctaaatggattccttgcttggaattcgaattagaggagggattcgtgcaccgtaagtactcgagcttacccacgtactacgatggacgctactggaccatgtggaaactgcccatgttcgggtgcaccgactcggctcaggtg

SEQ ID NO: 40186 - DNA, 300 bp, Gossypium hirsutum
  unsure (1)..(300): unsure at all n locations; Clone ID: LIB3165-050-Q1-K1-A2
atccgctcacttgtaaatttaaatgtgtaaatttgacattatgttgnnggaagnntaatgtgcaggggtgtacatacttcaattgaatccaataaaatgatttctagactcacaaaattatgctgctctttgttaaaccaattatacgttctagttataattaatcctttgccctcatcttcctactgaacacattgccaagagcatttatcaatgacactgcatcaaaatttgtgcccacatctgggacacgtatggatgtaacaatgaccaccaaaaacattcattgagaatataaaa

SEQ ID NO: 40187 - DNA, 260 bp, Gossypium hirsutum
  unsure (1)..(260): unsure at all n locations; Clone ID: LIB3165-050-Q1-K1-A3
cccacgcgtccgntgagagataagagaaagcactgaaaacgcaaaaccatggcctctgcttctctgctcaagacttcaccagttttagacaagtctgagtgggttaagggtcacacccttcgccaaccttccacttctgcggtgaggtgccaccctgttgcaccctctggactaactgtgcgtgcaagctcatatgccgatgagcttgtcaagactgctaaagctattgcttctcctggccgnggaattttggccatgga

SEQ ID NO: 40188 - DNA, 375 bp, Gossypium hirsutum
  unsure (1)..(375): unsure at all n locations; Clone ID: LIB3165-050-Q1-K1-A4
tttgaattgaaaccctcaaaattccactaaaaaatggtctccacagnttccttctccaccgccgtggccaccacctctttcctgcggggccatccggcgccgaaaaccctaaactcccttccctttcaaccaatctcttttcgggctaaaaccccaacgaaatggccgtctcaccatggcagcatacaaagtgacactgttaacacccgaaggaccccaagaattcgtgtgccccgacgacgtatacatcgttgaccaagctgaggaagaaggcatngatcttccgttctcgtgtagggctgggtctggttcttcgtgtgccggagtgattaagcaaggctccgtcgatcaatccgacggtaatttccttgatga

SEQ ID NO: 40189 - DNA, 245 bp, Gossypium hirsutum
  unsure (1)..(245): unsure at all n locations; Clone ID: LIB3165-050-Q1-K1-A5
gaggaacttatcatgaatccactgatttctgccgctttcgntattgctgctgggttggctgtcgggcttgcttctattggccctggagttggtcaaggtactgctgcgggccaagctgtaaaaggttgggagacaaccgggcgggggaaaatacagacttatgtaantgcttatgacttacatatgctggtgacatgccttattgaatcttgttatcttaactaaattgatttttttattatgtg

SEQ ID NO: 40190 - DNA, 216 bp, Gossypium hirsutum
  Clone ID: LIB3165-050-Q1-K1-A6
tcggccaagccttcgggtgggtttaagaacaaaccaaatttttaaagaaccattctttcaagctgcgtgttttggtcttcaacgaccacacaatttaacttaacggcctggccattgaagcttttaggttttaacccctcggccttattttcaattttttttctaaaccaaaagaatttccggcttgaattattccgtttcccaaccatttcaaaa

SEQ ID NO: 40191 - DNA, 219 bp, Gossypium hirsutum
  Clone ID: LIB3165-050-Q1-K1-A7
ctcacgcgtccggtcgcatacactattatgatctaatactagcgacggtccccagagggagctcagacactaccattggcgctttttcctgaacgggaggtggcaatggcattactctcaacgggctttagtccgcctttgataaagcagccatgaggaacgccaacaacgacattccttctatcggagcaatggcagatgaatgagatgaatgccggt

SEQ ID NO: 40192 - DNA, 112 bp, Gossypium hirsutum
  Clone ID: LIB3165-050-Q1-K1-A9
ctcacgcgtccgatcgcatatacgattttgttctactactactgactgtccacgggtgcgtctctcaatatacctttagcgcctgctccataacaggagataccactggcat

SEQ ID NO: 40193 - DNA, 421 bp, Gossypium hirsutum
  Clone ID: LIB3165-050-Q1-K1-B11
gggaaagtgacaggaaaaccagcaggaaatgtataagttttctagtgatcatcatcaggttcttcttcttcttcttctttagataagattcataacgccatgaaccgaggtgtgttgcagagctcaccggtgcagcatctgatggccggaaaccctaactggtggaacatcaacaccatgcgcccaccaactcatcatcaccaacaagcggcgtgtggggcggcagcacctcctcctttcttgcatcctcctcccactactttcttctctcacacacccacttgttcttcttcgacgtcttcatcttcttcacttcccgatccttcttggcatgataataaccaggagctttctgagtcatggaatcaacttctcttgggtggatcggcacgagaagaaaaaaaggggggtgatatatgac

SEQ ID NO: 40194 - DNA, 432 bp, Gossypium hirsutum
  Clone ID: LIB3165-050-Q1-K1-B12
atatatttttactccaacctcacttggtcccttcaaaccggaagagaaaccccaatttcttaacttccgaggggtttccagttagggttttactggatctaccactattggaatatttggtttttggataattcgtgatatttacggctttgggttgcttttgtttttcttggaggggttttatttgttagatttctggagctccggcttagttttaaaagggaagaatttgaatagccaatgccatatttgggtaattggtatttgaaaggtgtatttttagcgtaattttttttggagagaccgaaaaaaaagtgatcaatgtcttgggcaggccctgaagatatctacctttctacttctcttgccagttatcttgacagaaaacttttagttccgcatatgactcatgtttctgttgcagaaattaga

SEQ ID NO: 40195 - DNA, 437 bp, Gossypium hirsutum
  Clone ID: LIB3165-050-Q1-K1-B2
taagagaaagcactgaaaacgcaaaaccatggcctctgcttctctcctcaagacttcaccagttttagacaagtctgagtgggttaagggtcacacccttcgccaaccttccacttctgcggtgaggtgccaccctgttgcaccctctggactaactgtgcgtgcaagctcatatgccgatgagcttgtcaagactgctaaagctattgcttctcctggccgtggaattttggccatggatgagtccaacgctacctgtgggaaacgtttggcctcaatcgggctagaaaacacagaggctaaccgccaagcctacaggacgttgcttgtttcagctcctggccttggtcagtacatctctggtgccatcctctttgaggaaaccctctatcaaaccacaattgatggcaagaagatggttgatgttcttgttgagc

SEQ ID NO: 40196 - DNA, 438 bp, Gossypium hirsutum
  Clone ID: LIB3165-050-Q1-K1-B3
ctaaattcaccatgtcttctactttcagcggcgatgaaacggctcccttcttcggcttcctcggcgccgccgccgctctcgtcttctcctgtatgggagctgcatatgggacggctaagagcggtgtgggtgtggcttcaatgggtgtgatgaggcctgagttggtgatgaaatccattgttccagttgttatggctggtgttttgggtatttatgggttgattattgctgttattattagtactggcatcaatccaaaggccaaatcgtattatctttttgatggctatgctcatctttcctctggtcttgcttgtggacttgctgggctttcagctggaatggcaattggaattgttggtgatgctggtgtcagagctaatgcacagcagccaaaactttttgttggaatgatcctgatcctcatctttgctgaag

SEQ ID NO: 40197 - DNA, 442 bp, Gossypium hirsutum
  Clone ID: LIB3165-050-Q1-K1-B4
cccacgcgtccgcccacgcgtccgcccacgcgttcgtgaaactccatttctctgccacaaaaagctcccccgccccaactcccctgggatcaacagcacaattctaaacccaaaaacataaaaaaagggcagcaagtgtagcaacaatggcgatgctcaatgcaaaatgcctaagcatcagctcaactaagatgagcagcccaacaaagccaaccccaaagcccttctcccttctctccatgcagaacctccccaaaggcctcaccatctcaaaaccggccaacaactcaaacctaccgtcttcactcgctggcagcgccattgctggagctatcttctcaaccttgagctcatgtgaccccgccttagctgcacaacagattgctgaaatagctgaaggagacaaccgtgggctagctctattgcttcccataatcccagc

SEQ ID NO: 40198 - DNA, 215 bp, Gossypium hirsutum
  Clone ID: LIB3165-050-Q1-K1-B6
gcaagggccgcccttttttttttttttaccataaagttaaccatccaggcccttcggccagggggtatttattaaacctttcgaaattaaacaaggacgggcccatccaaacacccggttttttaacctttttttttccattccatgacattttccctcatatccttcccttttctttcttgccatcaacttcctaaccagctttttccactttt

SEQ ID NO: 40199 - DNA, 216 bp, Gossypium hirsutum
  Clone ID: LIB3165-050-Q1-K1-B7
aacacacctacggtaacatattctacttgtagtttatactagcattgaggaacctggtgaggttatccacaaacattgtcagttcttcttaatcaaaagcatccatcgttactgcttgtcaccggacttaaatctgacaatatgagcttagccatgaggaacgccaacaaccacattgcttgtatcgcagcaatggcagtttacattaattattac

SEQ ID NO: 40200 - DNA, 433 bp, Gossypium hirsutum
  Clone ID: LIB3165-050-Q1-K1-B8
atccgacgaaattgccgtgaaggaagaatgggaaggtggagtcaattcgtggttgcggtgactattctggcggtgggcctcctttcggcatcagccaccgctagaccctgcaagacattcttcgtcgcctcctattctttctcttttgaaaaccctaacgacccttcttcctccaccggattcgtcaccgtcttcaccgagatcggtcaattgaacgtcgtaccaccaagacccaagccctccgatgtcttgagctctctccgtgagcgcagtaaggacatccttagcgtggtcgtcgctcttctcttcggcgtcggtagcggcgctctcacggcggctaccctctacttggtctggaccctcttctcggcccggtctgattatcatcgtgcttgtttggaggatgatgagagcgacggagaacttagcccta

SEQ ID NO: 40201 - DNA, 438 bp, Gossypium hirsutum
  Clone ID: LIB3165-050-Q1-K1-B9
atggctttggctcccaccacttatccctcctatctctgctctaacacttgctcacccttacacagagccaggggagctttcctttcttcaaccaggcatgtaggagttagattcaacagcaagtgttcagcgtctttctgcagtggcaaggagcagctaaagccatggattttggtagcgaaagcattggaaggtgagtcccaaaccacagagcaggaagagcagcagtacgaggagtatgaggtagagattgagcagccttatgggctcaaattcagaaaaggcacagatggtgggacttacattgatgctattcagcctggtggagctgctgacaaggctgtggttttcaccgttggggacaaagtacttgccaccagtgcagtgtttggaacagaaatattgccggccgccgaatatgggaggacaatgtacacc

SEQ ID NO: 40202 - DNA, 433 bp, Gossypium hirsutum
  Clone ID: LIB3165-050-Q1-K1-C10
cccacgcgtccgcttttttgctttcagttaacatcaaaatccgtaaatggctaccactgcttctccaatggcgactcagctgaagagcagctttaggtcgtctgttacaagaggactggtagtccccaggggcatttcgggatccccgtttaaagtatcttccggaaagaccaggaccccttgcttcactgtcaaagctgttcaatccgacaagtcaacatttcaagtaatccaacccatcaacggcgaccccttcattggaagcctggagactccaatcacctcaagccccttaattgcatggtacctttccaacctcccagcctataggacggcagtgaacccacttctgaggggaatcgaagtgggtctggctcacggcttcctcctggttggtccattcgtaaaggccggccctctaaggaacactgcg

SEQ ID NO: 40203 - DNA, 429 bp, Gossypium hirsutum
  Clone ID: LIB3165-050-Q1-K1-C11
cttttgttagaaagacgttagcagcggcaaaatttgaacgttactcttaaggaaggataatgctatccttgcgcttcgctattcctaccgcaaatacattaactccacccaagactaaaccgaaaccgggtttagtagtacaaaccgcttggaaccaaacggacctttttccttctcttcccaaacgatatgattataagctacaagcagctaccacggacttatctgtggagggagatataccggcggaggaggtggtggagctgccggcggagctgcgcagagagttgatgccgaagcacgtagcggtgataatggacgggaacgggcggtgggctcggcagcggggattggcgacatcagcaggacacgaagccggtgtaaaggcgttgagggagctgatcgaactatgttgccagtgtgggatcc

SEQ ID NO: 40204 - DNA, 436 bp, Gossypium hirsutum
  unsure (1)..(436): unsure at all n locations; Clone ID: LIB3165-050-Q1-K1-C12
cccacgcgtccggagataagagaaagcactgaaaaagcaaaaccatggcctctgcttctctcctcaagacttcaccagttttagacaagtctgagtgggttaagggtcacacccttcgccaaccttccacttctgtggtgaggtgccaccctgttgcaccctccggactaactgtgcgtgcaagctcatatgccgatgagcttgtcaagactgctaaagctattgcttctcctggccgtggaattttggccatggatgagtccaacgctacctgtgggaaacgtttggcctcaatcgggctagaaaacacggaggctaaccgccaagcctacaggacgttgcttgtttcagctcctggccttggtcagtacatctcaggtgccatcctctntgaggaaaccctctatcaaaccacaattgatggcaagaagatggt

SEQ ID NO: 40205 - DNA, 236 bp, Gossypium hirsutum
  Clone ID: LIB3165-050-Q1-K1-C2
ctcagctgaagagcagctttaggtcgtctgttacaagaggactggtagtccccaggggcatgtcgggatccccgtttaaagtatcttccggaaagaccaggaccccttgcttcactgtcaaagctgttcaatccgacaagtcaacatttcaagtaatccaacccatcaacggcgaccccttcattggaagcctggagactccaatcacctcaagccccttaattgcatggtacctt

SEQ ID NO: 40206 - DNA, 440 bp, Gossypium hirsutum
  Clone ID: LIB3165-050-Q1-K1-C3
cggacgcgtgggaagaagagctgctatgctgtatttgtcagctacccttttcaccacagcggctgcttcttctgcaaatgctggggtcattgatgattaccttgaaaagagcaaagctaacaaggagttgaatgacaagaagaggttggccacaagtggagcaaactttgcaagagcatacactgttcaatttggcacctgcaagttccctgagaactttacaggatgccaggatcttgcaaaacagaagaaagtaccattcatctctgatgacttggccttggagtgtgaagggaaggacaaatacaagtgcggttccaatgttttctggaaatggtgaagacatcccaatgtaattttctcaattttctctgtattgttgtgctatttagtgaaacaccctgaaaatgttgtggtatttgttgataaacagaagtatg

SEQ ID NO: 40207 - DNA, 434 bp, Gossypium hirsutum
  Clone ID: LIB3165-050-Q1-K1-C4
gctctctttagagtaaatttcttttgcaatcctttgtagagctccgggatccattgtcaccatgtcttgctcaaatctgacaatgtgggtgtcctcaaaaccctctctttctgacacttcttcactctctttccgttctttcatcagcccttttcagctcccatctcagagctcaacccccggtaacccttccaggtcctcatctgtaaccccagttcactgtggtcttcgtgagcttagagaccgtattgattcagtaaagaacacgcagaagatcactgaagccatgaaacttgtggctgctgctaaagttaggagagcacaagaagctgttgtcaatggcagacctttctctgagtccctggttgaagttctttacaacatcaatgaacagctccagactgaagacatagatgctcctctcacaaacgtca

SEQ ID NO: 40208 - DNA, 373 bp, Gossypium hirsutum
  unsure (1)..(373): unsure at all n locations; Clone ID: LIB3165-050-Q1-K1-C5
tcgnccacttttattattattttttctcaattaattttaaaaccccttaatggggtcccctgggggttcaattgtgactcaactgaagaacaacttaatgtcgtctgcatacaaaaggacttgtaaaccccaggggcatttcgggatccccgtttaaagtatcttccggaaagaccaggacccctagcttcactgtcaaagctgttcaatccgacaagtcaacatttcaagtaattcaacccatcaacgtcgaccccttcattggaagcctggagactccaatcacctcaagccccttaattgcatggtacctttccaacctcccagcctatatgacggcagtgaacccacttttgaggggaatcgaagtggg

SEQ ID NO: 40209 - DNA, 411 bp, Gossypium hirsutum
  unsure (1)..(411): unsure at all n locations; Clone ID: LIB3165-050-Q1-K1-C6
cccacgcgtccggtaggtatgactctggaggatttcttgacgaaagctggggcggttagggaagaggatgtcaggggagttgttaatcangtgggagtaggtgcaggggtttatcctgttgacccggccgttatcaacggtggtggaaatcatttttcggcgttcggaaacagcggtggcgttgatcatcataggttggtggcggtggcaggtggaggcgctagaggaaagcgacgcgccgtggaggcaccgcctttggataaagcgactcagcagaaacagaggcggatgataaaaaacagagaatctgcagctagatccagagaacgcaaacatgcttatacggttgaattggaatcactggtgacacaattggaagaagaaaaagcccggttgctgagagaagaggct

SEQ ID NO: 40210 - DNA, 331 bp, Gossypium hirsutum
  Clone ID: LIB3165-050-Q1-K1-C7
cccacgcgtccgaatctcttctctcttgcttttcgtcttgcgttcttttgatatggcaggaaccggggtggttgcagtttatggaaacggggctataaccgagactcacaaatcccctttctcggtgaaagtggggctagcccaaatgctccgaggcggagttataatggacgtggtcactcccgatcaagctcgcatcgctgaagaagccggagcctgcgccgtcatggctctcgaacgagtccccgccgatatccgagcccaaggcggcgtggctcgaatgagtgacccacatctcatcaaagagattaagcaatccgtttctatacct

SEQ ID NO: 40211 - DNA, 384 bp, Gossypium hirsutum
  unsure (1)..(384): unsure at all n locations; Clone ID: LIB3165-050-Q1-K1-C8
attggcaccatccaatgaggatcaagcctatgatcctttccttaccccgatggagaatttcttctcccatgcgattatgaaattggccgtacttctttttgcaatgatattatttgttcagttgaattcgctcatccatggtcgctgtagggagaatccggaacgagcggcggcgactcagttggcgacggtggggttgaataaacgggacttgaaacgaatcccggtggccgtttacaggactggcggcacaagctttacggccaccgactgtcccatttgtcttggagagttcttagatggngaaaaggtacgagtgttaccaaaatgcaaccatggattccatgtgaagtgtatagacaaatggttaatgtcgaagtcatc

SEQ ID NO: 40212 - DNA, 290 bp, Gossypium hirsutum
  Clone ID: LIB3165-050-Q1-K1-C9
gagaaataaaaacagtttcatttccattctaagtttgtgttttttatttgccttttgtgggttttttttaaaaaaaattcagcaaaaatgtttattgagagttttaaggtagagagccccaatgtgaagtacacggagaatgaaattcagtctgtttacaactatgaaactacagagcttgttcatgagaacaaaaatggaacctatcaatgggttgttaaacccaaaactgtcaaatatgaattcaagactgatatccatgtccctaaattgggggtgatgcttgtggg

SEQ ID NO: 40213 - DNA, 340 bp, Gossypium hirsutum
  Clone ID: LIB3165-050-Q1-K1-D1
cccacgcgtccgatagcatacactactagtacccactactagcaatggcttcctcaatgatctcatcggctaccattgccactgcctctccggcacaggctaacatggtcgctcctttcaccggcctcaagtctgcctctgctttcccagtcatcaggaaggccaacaacgacattacttctctcgcaagcaatggcggcagagtgcaatgcatgcaggtgtggcctcctactggaaagaagaagttcgagactctcttataccttcccgatcttacacccgtgcagttggctaaggaagtagattaccttcttcgctcaaaatgggttccttgcttgga

SEQ ID NO: 40214 - DNA, 434 bp, Gossypium hirsutum
  Clone ID: LIB3165-050-Q1-K1-D10
caacagccaccaccacatacccttctgatacctcacccacaccaaactccagaaccagcctccgttatcaatggcgatgatatctacatattgcccacatttcaacggacttcaccgatcatctcccaagctcgacagttctcaatctcaatctttccttcaacacatcaactctcagcttcgccttgcttcgtctcgtaaaccttgcagagctgttactgccatggccggttccggaaagttctttgttgggggtaactggaaatgtaatggaacaaaagactccatcacaaagcttgtttctgacttgaacagcgcaaagttggagactgatgttgatgttgttgtgtcacctccctttgtttatctcgatcaagtgacagcttcatttaccagtcgaattgaggtatctgctcaaaactcttggattggga

SEQ ID NO: 40215 - DNA, 436 bp, Gossypium hirsutum
  Clone ID: LIB3165-050-Q1-K1-D11
cccacgcgtccgccagaatttgcttcagtaatggctgcctcagttatggcttcttcagttaccctcaagccttcattcaatgttgagaaatctggtgtaagaggggttccttcccttgctaggtccccttcttctttcaaggttgaagccagtggtggcaagaagatcaagaccgacaagccttatggaatcaatggtggtatgaacttgagggatggtcttgatgcctctggaaggaagggtaagggaaagggtgtttaccaatatgttgacaaatatggtgctaacgtcgatgggtacagtcctatctacaacaccaacgactggtctcccagtggtgatgtttatgttggcggtactaccggattggcaatctgggcggttaccctagccggaattcttgccggtggtgcacttcttgtttacaatacaagtg

SEQ ID NO: 40216 - DNA, 434 bp, Gossypium hirsutum
  Clone ID: LIB3165-050-Q1-K1-D12
cccacgcgtccgcccacgcgtccgcccacgcgtccggtggcatttgaagttgtcactagtttccgtttttacaaaagtggggtttataccagtaaaacatgtggcagcacacccatggatgtgaaccacgctgttcttgcagttgggtatggagtcgaaaatggcgttccatattggctcattaagaactcatggggtgcagaatggggtgacaatggctacttcaagatggagatgggcaaaaacattgcggtgtggcaacttgtgcatcatacccaattgttgcttgatccagtcgatgaaccgtgttggatcatgtcattcctttgtgttatagaaggcgtctagttatggtctacaaatgttgtagttgttcagggttatggtctagttgaaacccatgggttcatgtacaataaggatccaaagacatg

SEQ ID NO: 40217 - DNA, 282 bp, Gossypium hirsutum
  Clone ID: LIB3165-050-Q1-K1-D2
gcttctcttgcaaccttagctggtgttcaaccaacgaccatcaagggccttggtggcagctctctcaatggaaccaagctcttggtgaagtcaactcgccagagtttcaaacccaaaaactacagggctggtgctgtggtagcaaagtatggtgataagagtatatactttgatttggaggatattggcaacacaactgggcaatgggacttgtatggatccgatgcaccttcaccgtacaacccactccagagcaagttctttgagacatttgcagctcca

SEQ ID NO: 40218 - DNA, 422 bp, Gossypium hirsutum
  Clone ID: LIB3165-050-Q1-K1-D4
gtcatttcaaagattctatcaaaacagagaggttttttttataacgagttatacacgacgtggtcgttgaacacgaaaaagaatggatgacttttatagaccagggaggaaccatctcttctttactgcaacggttcacataccggaacctgatattcgagccatgaaccgtgataacgaggattaccgttccccggctattccgcgaatgacaaaaacccttgtcgataatgttcagaagatatgaaagactacgaccggtactccctatatgaacccaacaacaggaaccgacgcatgagagagagcacttactaatacgttatgccccggagaccgaatcatatcgggactcattgaacaatgcattcttctttggatcgatcaacaacaacgtctcaaggacaacgtcgacgttgacg

SEQ ID NO: 40219 - DNA, 439 bp, Gossypium hirsutum
  Clone ID: LIB3165-050-Q1-K1-D6
cttagcatacactactagtacccactactagcaatggcttcctcaatgatctcatcggctaccattgccactgcctctccggcacaggctaacatggtcgctcctttcaccggtctcaagtctgcctctgctttcccagtcaccaggaaggccaacaacgacattacttctctcgcaagcaatggcggtagagtgcaatgcatgcaggtgtggcctcctactgggaagaagaagtttgagactctctcatacctccccgatcttacacccgtgcagttggctaaggaagtagattaccttcttcgctcaaaatgggttccttgcttggaattcgaattggaggagggattcgtgcaccgtaagtactcgagcttacccacgtactacgatggacgctactggaccatgtggaagctgcccatgttcgggtgcaccgact

SEQ ID NO: 40220 - DNA, 166 bp, Gossypium hirsutum
  Clone ID: LIB3165-050-Q1-K1-D7
tctaaaccttctctttctctttctgcaatttttaattactcattttttattctgaagtgagatacttttacaacctctacattaaatcttacaaaccaaactaaggaaaaaaatctgatgcatttgattaccatgcgtcacagatgataaaggcaaagtttgttat

SEQ ID NO: 40221 - DNA, 434 bp, Gossypium hirsutum
  Clone ID: LIB3165-050-Q1-K1-E10
cccacgcgtccgatagcatacactactagtacccactactagcaatggcttcctcaatgatctcatcggctaccattgccactgcctctccggcacaggctaacatggtcgctcctttcaccggcctcaagtctgcctctgctttcccagtcatcatgaaggccaacaacgacattacttctctcgcaagcaatggcggcagagtgcaatgcatgcaggtgtggcctcctactggaaagaagaagttcgagactctctcatacctccccgatcttacacccgtgcagttggctaaggaagtagattaccttcttcgctcaaaatgggttccttgcttgcaattcgaattagaggagggattcgggcaccggaaatactcgagcctacccacgtactacgatggacgctactggaccatgttgaagctgcctatg

SEQ ID NO: 40222 - DNA, 407 bp, Gossypium hirsutum
  Clone ID: LIB3165-050-Q1-K1-E11
aacagcttctcaatggtcatcttcggttgctctaaagatgggggcccttacctagagtggacgagctttttaccgacaccattgactccaacctctacgatccatttcctcacttcttcatcgtaaactctggccctcagagcaccgaaaaagtcaatggattggcccgggaaggtgtcaacaagcttaacaaggtcatcaacgggaacattgtccgtcctgaaaatacctgtgcaaacaccgatcctatcttccctggtgggtgcccagaaaaacttctccatacgaccgtcacggatgagaggcgcctacagcgtcaagaaatcgttaccggtgacgatgatcggaacacgagggatctctgccttgttgtacataccggggagctgaacgttggtggggtaatc

SEQ ID NO: 40223 - DNA, 141 bp, Gossypium hirsutum
  Clone ID: LIB3165-050-Q1-K1-E3
gtctgacatgtgtgcgagtcaacgggctagaaaacccgtaaggcgcaaggaagctgattggcgggatccctcgcgggtgcaccgccgaccgaccttgatcttctgagaagggttcgagtgagagcatgcctgtcgggaccc

SEQ ID NO: 40224 - DNA, 439 bp, Gossypium hirsutum
  Clone ID: LIB3165-050-Q1-K1-E4
gcctatcgtactagtgagtacacttagcaatggccttcttcatgatgtcatcgtcaacgattgcgaccgttaactgttcctccgcctcacaggccaacattgtggcggcctttacttgcctcaagtttgcctctgcttttccagtcactatgaaggccaacgacgacatcacttttcttgctatcaatggcgggagagtgcaatgcatgcacgtgcagccttctcttgggacgaagaagaatgagacactgtcattcttatacgatcttacacttatacagttggctaaggatgaagaagaccatcatcgctctcaatggaaaccttgttcgggattggaattagaagaaggagtcgggcaccggcagtactcgagcttacccacaccctacgactgacactactgcaccatgtggaaactgaccatgtctatgtgcac

SEQ ID NO: 40225 - DNA, 437 bp, Gossypium hirsutum
  Clone ID: LIB3165-050-Q1-K1-E5
cccacgcgtccgatagcatacactactagtacccactactagcaatggcttcctcaatgatctcatcggctaccattgccactgcctctccggcacaggctaacatggtcgctcctttcaccggcctcaagtctgcctctgctttcccagtcatcaggaaggccaacaacgacattacttctctcgcaagcaatggcggcagagtgcaatgcatgcaggtgtggcctcctactggaaagaagaagttcgagactctctcatacctccccgatcttacacccgtgcagttggctaaggaagtagattaccttcttcgctcaaaatgggttccttgcttggaattcgaattagaggaaggattcgtgcaccgtaaatactcgagcctacccacgtactacgatggacgctactggaccatgtggaagctgcctatgttc

SEQ ID NO: 40226 - DNA, 441 bp, Gossypium hirsutum
  Clone ID: LIB3165-050-Q1-K1-E6
gtcaggcgggattacccgctgagtttaagcatatcaataagcggaggaaaagaaacttaccaggattcccctagtaacggcgagcgaaccgggaaaagcccagcttgagaatcggtcgccatcggcgtccgaattgtagtctggagaagcgtcctcagcgacggaccgggcccaagtcccctggaaaggggcgccggagagggtgagagccccgtcgtgcccggaccctgtcgcaccaagaggcgctgtctacgagtcgggttgtttgggaatgcagccctaatcgggcggtaaattccgtccaaggctaaatacgggcgagagaccgatagcgaacaagtaccgcgagggaaagatgaaaaggactttgaaaagagagtcaaagagtgcttgaaattgtcgggagggaagcggatgggggccggcgatgcgccccggtcg

SEQ ID NO: 40227 - DNA, 295 bp, Gossypium hirsutum
  Clone ID: LIB3165-050-Q1-K1-E8
gacccacgcgttcgggggaatgctcaatcatatctatgcggcaagcaaataaagtgttcttggggcagcaagcctacaccaccagggacaagctccaatccactttccccacccgcagcaccattacctggtctttcagccactgaccttttagcttacgaacgacaacttgccatgagcaagatgggtggagttcatgctctaatgcacccacagggacagcatcctctgaagcaggcagcaatgggggtgggtgctgctggagcaagccacgctatatatgatggtggatacc

SEQ ID NO: 40228 - DNA, 308 bp, Gossypium hirsutum
  Clone ID: LIB3165-050-Q1-K1-E9
gcctgcttcctcttcttcacatcgactttcacccctaaaaaaccatggcagcggcgagggcgataaatcaagctaaatcgactgggtttcaacctcactttacaaagaaggctatttttgcgacaaactccactgacttagccccaccttctgtttttactgccaaaaactcactcacttacaccaaagaaaccgtttccaatgaacaaaacattcgcgtgagaacacttacgctatagagtgatggagctattacagcttatttactccctgcaaaaccccttctagcggaaaagataccacaaaac

SEQ ID NO: 40229 - DNA, 173 bp, Gossypium hirsutum
  unsure (1)..(173): unsure at all n locations; Clone ID: LIB3165-050-Q1-K1-F1
cccacgcgtccgcccacgcgtncgcccacccgtccgaaaacaataaaaaatgccgatttctcgcattgcagtaggatctgcagctgaggctggccaagctgatgccctcaaagcagctttagctgagtttatttcaatgctcatttttgtttttgctggtgaaggctcgggca

SEQ ID NO: 40230 - DNA, 375 bp, Gossypium hirsutum
  unsure (1)..(375): unsure at all n locations; Clone ID: LIB3165-050-Q1-K1-F10
cccacgcgtccgctactcttaccctttttcagagctttgatagaggaagagcagctcaccgaatccatcatgggtcactctaatgtctggaactctcaccccaaaacctacggccctggctctcgcgcctgccgtgtgtgcgggaacccccacgccatcatcaggaaatatggactcatgtgttgcaggcagtgcttccgtagcaatgccaaggaaattggattcattaagtaccgctgaagaatttatgttgggaagaactttgttagagtatgagcctttggtaatgtgattattgaattagaaggataatgtttaattgtttcagtctggacatctaaagtggttgttgaactaaggannnntttttttttt

SEQ ID NO: 40231 - DNA, 436 bp, Gossypium hirsutum
  Clone ID: LIB3165-050-Q1-K1-F11
gcgggattacccgctgagtttaagcatatcaataagcggaggaaaagaaacttaccaggattcccctagtaacggcgagcgaaccgggaaaagcccagcttgagaatcggtcgccatcggcgtccgaattgtagtctggagaagcgtcctcagcgacggaccgggcccaagtcccctggaaaggggcgccggagagggtgagagccccgtcgtgcccggaccctgtcgcaccaagaggcgctgtctacgagtcgggttgtttgggaatgcagccctaatcgggcggtaaattccgtccaaggctaaatacgggcgagagaccgatagcgaacaagtaccgcgagggaaagatgaaaaggactttgaaaagagagtcaaagagtgcttgaaattgtcgggagggaagcggatgggggccggcgatgcgccccggtcg

SEQ ID NO: 40232 - DNA, 127 bp, Gossypium hirsutum
  Clone ID: LIB3165-050-Q1-K1-F2
ataagtaatctcaatcaagcaggatttttttcaaccagtacatcccaatccggaccgaaaagtaggatccagagcttataatacattcaccacagcgggaaagaaaccatatcatgaaatctccatc

SEQ ID NO: 40233 - DNA, 308 bp, Gossypium hirsutum
  Clone ID: LIB3165-050-Q1-K1-F3
atgtccttaagtagcagtctttaatgtttaaacgcgctagtaattggtgataacgtatttgctttgtcgattatatcttttcgattaaggaaataaaaaaattttaaacgctacctttgaaaaattccattctccctaataaagtcaaaaatcaaagcttcggtatataaaaacgaaaaagaatgttgtattgttaagaagcaaaaaatcgaacatcggatgaacagatctgtctatcgttggtccagcttaattttaagaaaaatggccgaagaaatcaataaatccgagattcgatcatccccgtc

SEQ ID NO: 40234 - DNA, 321 bp, Gossypium hirsutum
  Clone ID: LIB3165-050-Q1-K1-F4
tttagctatagcatacactactagtacccactactagcaatggcttcctcaatgatctcatcggctgccattgccactgcctctccggcacaggctaacatggtcgctactttcaccgccctgatgtctgcctctgctttgcgagtgaccacgaaggccaacaacgacaatacttgtctcataggctgcgggcggagcttgcagtgcatggccgagggaactggtactattaagaaccggtgaaagactcttgttgggaagaactttgttagagtatgaccctttggtaatgtgattattgaattagaaggataatgttta

SEQ ID NO: 40235 - DNA, 246 bp, Gossypium hirsutum
  Clone ID: LIB3165-050-Q1-K1-F5
cccacgcgtccggaaaccttcactactacactcaaataatggccttgacagcttcaatgatcacagccgctaccaccaccactgtccttccggccacgctaacatgaaaacctctttttacctgccttaaaaccaactttgctttgggctaaaacacgaacgaaaaggacgacataccatggctgcctacaaagggacactgataacaccgcatggaccccaagacttctagtgcacagacgacgt

SEQ ID NO: 40236 - DNA, 93 bp, Gossypium hirsutum
  Clone ID: LIB3165-050-Q1-K1-F6
tccacgcgttctattcacaccacaactgaaggttatttgtatcatgggcatcgtcactgataaccaaatataccatcgtctatgacttatcag

SEQ ID NO: 40237 - DNA, 437 bp, Gossypium hirsutum
  Clone ID: LIB3165-050-Q1-K1-F7
cggacgcgtgggctttttttttaaatatttttcattgccaatcagtcccttattaataagtagagtatttccacaactggtttaattcccttcatgcactgtgctccatagtcttggaacccaaggacagaagactcttttaacatttcaccgcaaagatggagataacaaatgtgagcgagtatcaagaaattgcgaagcaaaagttgccaaagatggtgtatgactactacgcatctggtgctgaggaccaatggacattgcaagagaatagatttgctttcactaagatactgtttcgtcctcgtattctcatcgatgtaagcaagatagacatgaccacaactgtgttgggtttcaagatatcaatgcctatcatgattgccccaactgccatgcaaaaaatggctcatcctgaaggggagtatgcaacagct

SEQ ID NO: 40238 - DNA, 419 bp, Gossypium hirsutum
  Clone ID: LIB3165-050-Q1-K1-F8
agtgatcaccggcaatgggtatcgatttggtcgccggcggcaagagcaagaagacaaagcgaactgctccgaagtctgatgatatctacctcaagctcctcgtcaagctttacaggtttctagtaaggaggactgggagcaaattcaatgccgtgattttgaagcggcttttcatgagcaaagtcaacaaaccgccattgtctctctccagattgattcaatacatgaagggcaaggaggataagatcgctgtggtagttgggaccgacaccgatgacattcgagtgtatgaagttccggcactgaaggttactgcattaaggttcactgagacggcgagggcaaggatcgagaaggccggtggggaatgtttaacgtttgaccaacttgctcttcgagcaccttttgtgcagaacacg

SEQ ID NO: 40239 - DNA, 178 bp, Gossypium hirsutum
  Clone ID: LIB3165-050-Q1-K1-F9
accacgcgtccggttagctattgcatacactatttgtacccactactagcaatggctagctcaatgatctcatcggctaccattgccactgcctgcccggcacaaggtaacatgggctgttcgttcagcggactgaaagctgactctgcgttcccagtcatgaggaaggccaactacg

SEQ ID NO: 40240 - DNA, 112 bp, Gossypium hirsutum
  Clone ID: LIB3165-050-Q1-K1-G1
gtgatttgtctcctctttacatactggacctagccctccttaaaaacacaatattcttgttagttgtttgtatgaaaattatgtttcaaaacttaaatccccttttcttaat

SEQ ID NO: 40241 - DNA, 346 bp, Gossypium hirsutum
  Clone ID: LIB3165-050-Q1-K1-G10
cagacacttacccatacacgacttcttttccttctgggtcggcttcagatcctggggtggacgcacactaagaccccccggaaaaatttccggcgagtcatctcttgtattctaatcctcctccttctcgttctcatcacaatcttactcatatgggcaatccttcgtcctagcaaacccaacttcactctcctcgacaccaccgtctacgccttcaacgccgccaccttcaacttactcacttcaaactctcaaatcaccgtcccgtcaaaaaaccccaaccaagatattcgtttttatttccgcccggttcaccgtttcccctcctacccgaacccaaaaaata

SEQ ID NO: 40242 - DNA, 385 bp, Gossypium hirsutum
  Clone ID: LIB3165-050-Q1-K1-G12
ggtattctgagacggaattgttagagcggatggcccttttagaagggcagaatcaaagtatagtgtccaacaagtaggtgtaactgttgagttctatggcggcgaactcaatggagtgagttatagtgatcctgctactgtgaaaaaatatgctagacgtgctcaattgggtgaaatttttgaattagatcgtgctactttgaaatccgatggtgtttttcgtagcagtccgaggggttggtttacttttgggcatgcttcgtttgccttgcttttcttctttggacacatttggcatggtgctagaaccctgttcatagatgtttttgccggtattgatccagatttggatgctcaagtggaatttggagcattccaaaaactt

SEQ ID NO: 40243 - DNA, 202 bp, Gossypium hirsutum
  Clone ID: LIB3165-050-Q1-K1-G2
cgaagtgctcccaactcagctgatcccagatgacaatgaggggaaggttttgagagtgaggttgataatgaaagaaggggtggagcatttcagtccagtttacctgtttgatgaaggctcaaccatctcatggataccatgtggaaggaagctcacttgttcttaccctggcatcaaattcttctatggccctgacacatac

SEQ ID NO: 40244 - DNA, 437 bp, Gossypium hirsutum
  Clone ID: LIB3165-050-Q1-K1-G3
tttagctatagcatacactactagtacccactactagcaatggcttcctcaatgatctcatcggctaccattgccactgcctctccggcacaggctaacatggtcgctcctttcaccggcctcaagtctgcctctgctttcccagtcaccaggaaggccaacaacgacattacttctctcgcaagcaatggcggcagagtgcaatgcatgcaggtgtggcctcctactggaaagaagaagttcgagactctctcatacctccccgatcttacacccgtgcagttggctaaggaagtggattaccttcttcgctcaaaatgggttccttgcttggaattcgaattagaggagggattcgtgcaccgtaaatactcgagcctacccacgtactacgatggacgctactggaccatgtggaagctgcctatgttcgggtg

SEQ ID NO: 40245 - DNA, 206 bp, Gossypium hirsutum
  Clone ID: LIB3165-050-Q1-K1-G4
ctttatcggggtttctgccgatttgcatcatcatcatcagcatcaacctccgatcgtctatctctatgtaagcgtcatattttcgttacaacaaatgtcttggaatggatgttgctctccgcctggggggcctggctgaagaagaggctcacctgaattgtacaaacagcagaagggggagggcggtttgtttctattacaaggaa

SEQ ID NO: 40246 - DNA, 442 bp, Gossypium hirsutum
  Clone ID: LIB3165-050-Q1-K1-G5
cgccgcctgcgtctctctcttcatctctctgaacctaaaagtctttagcttttcgcttcgagagagaccatgttggtttaccaggatctcatctccggtgacgagcttctttctgactcattcccctacaaggaaatcgagaatgggatgctgtgggaagttgagggaaagtgggttgtgcaaggagctattgatgttgacattggtgccaatccttcagccgaagatgctgatgaggatgaaggtgttgatgaccaatctgtgaaggttgttgacattgttgacactttcaggcttcaggagcaaccccctttcgacaagaagcagtttgtcgtgttcatgaagaagttcatcaagaacttgacaccgaaactggatgcggaaaagcaagagtccttcaagaaaaacattgagggagcaaccaagtttttgctttcaaaat

SEQ ID NO: 40247 - DNA, 333 bp, Gossypium hirsutum
  unsure (1)..(333): unsure at all n locations; Clone ID: LIB3165-050-Q1-K1-G6
aagtattctctcaaaaacctacgaccccaagattctctctttcgaaaactccttcaaatttggctaccaagaaaaacaatggaaataatcgaaaatcaagcagctgtttcgaatttcgacctccagtcaaagtctccgttttataacatttcctccaccgacattacgaacgtnggcttacttggggaattcgaatttgtatctgtggatagtccgaaccaagctagcgaatcggatttcccgacggtggttaatggtggtggtttgaaaatgctgttggagccgttatacgacgggggatattctccgggttcgaatcagacgcgcggtggc

SEQ ID NO: 40248 - DNA, 116 bp, Gossypium hirsutum
  Clone ID: LIB3165-050-Q1-K1-G7
atttttgtcaccatcttcgctattcttcttcttcttctttcattcggttgttttttgtcaccatcttcactactcttcttcttcttcttctgcccgctgttaacgtaaaaagaaat

SEQ ID NO: 40249 - DNA, 404 bp, Gossypium hirsutum
  Clone ID: LIB3165-050-Q1-K1-G9
gcacgtagcggtgataatggacgggaacgggcggtgggctcggcagcggggattggcgacgtcagcgggacacgaagccggtgtaaaggcgttgagggagctggtcgaactatgttgccagtgggggatccaggttctgactgtcttcgccttctcttacgagaactggattcgtcccaaggtggaggttgattttttgatgagtttgtttgagagagcgttgaagtctgaagtggagtcactttctagaggaggcattcgaatatctgtaataggggattcaacaaagcttcccacatcgctgcaaaagttgatcaacgaagttgaggagaccacaaaacataactccaggctccaactcattgtagccgtcagctacagtgggaaatacgacgtcgttcaag

SEQ ID NO: 40250 - DNA, 119 bp, Gossypium hirsutum
  Clone ID: LIB3165-050-Q1-K1-H1
gccacccgtccgatccaccaaacttatagtacgtattataaacttcggcatcctcaacggtctgggctgctaacaatggcagtggctctccagcataatctactatacaacattctttt

SEQ ID NO: 40251 - DNA, 386 bp, Gossypium hirsutum
  Clone ID: LIB3165-050-Q1-K1-H10
ggtagacggtgtacggaattgatagagcggatgggcctgttagaatggcagaataaaagtatactgtctaacaagtaggtgtaactgttgagttctatggcggcgaactcaatggagtgagttatagcgatcctgctactgcgaaaaaatatgctagacgtgctcaattgggtgaaatttcttggatgagatacagctactttcaaatccgatcgtgttttttgcaacactccaaggggttggattactttagggcatgctacgattgccttgcttttcttcttcggacacatattggcatggtgctagaaccctgttcagagatgtttatgccggtattgatccagatttggatgctcaagtggaatttggagcattacaaaaac

SEQ ID NO: 40252 - DNA, 442 bp, Gossypium hirsutum
  Clone ID: LIB3165-050-Q1-K1-H11
tcttcttttacctaacatccactctcttaaaaagcaaatggccaaactctctttgggctccacattttctatcttccattcccgccacatccgtcctccactcgccggctgccacgtcaccaaaatgacagtggccgatcaccacccatcgttggaggtcgtaggcggagcacgtgatcgcttcctcccatctctccacaccaacctccgactaccctacaaccctttccccctcatcgcctggaaccgtcacgtcgagaccatcttcgcctccttcttacgctctattccccaagtcagattacgacgggagtgcctccgagtcaaagacggcggctccgttgccctcgattgggtctccggcgaccaccgacgtcttactcctgattctcccgtcctcattttactcccgggtttgactggaggaagccaagattcatat

SEQ ID NO: 40253 - DNA, 343 bp, Gossypium hirsutum
  Clone ID: LIB3165-050-Q1-K1-H2
cgcttcccttccacccacctcctttgtttcacctctttctttctttttctcctaaaccatcggggatctcattaataggctcagccccaagcgtctttttcgatctaataaaaaagatagatccatcgtttccaagttcgacccctcctcctatagttccggttccgccgtttcctccttttcctcctccgaatccgtctcttccaccttcaaaggacatcagtacccttccgcggtaccgctgcttcgaacgcccaccatgtttgccccaacatcagggactggccgatttcccgctattttatctagacttgtcagcgttaaatgtaacaagatacgacgg

SEQ ID NO: 40254 - DNA, 424 bp, Gossypium hirsutum
  unsure (1)..(424): unsure at all n locations; Clone ID: LIB3165-050-Q1-K1-H3
cccagaccaacagaggctgatttttgctggtaagcaactggaggatggccgtaccctggctgactataacatccagaaggagtccaccctccacttggtgctccgccttcgtggtggtatgcagatttttgtgaagacacttactgggaagaccatcaccctggaagttgagagctctgacacaatcgataatgttaaggccaaaaattcaagataaggaaggtatccctccagaccagcagaggctgatatttgctggaaagcagctagaggatgggaggaccctngcagattacaacatccagaaggagtccaccctccacttgggtctccgtctccgtggcgggatgcaaattttcgtgaagaccctgactggaaagaccatcaccctgaaagttgagagctcagacacgattgataatgt

SEQ ID NO: 40255 - DNA, 392 bp, Gossypium hirsutum
  Clone ID: LIB3165-050-Q1-K1-H4
ggtagacggagacggaattgttagagcggatgtcccttttagaagggcagaatcaaagtatagtgtcgaacaagtaggtgtaactgttgagttctatggccgcgaactcaatggagtgagatgtagtgatcctgctactgagaaaaaatatgctagacgtgctcaattgggtgaaatttttgaattagatcgtgctactttgaaatcccatggtcgtttttcgccgcagtgcgaggggttggttcacttttgggcatgcttcgcttgccttgcttttcttattcggacacatttggcatggtgctagaaccctgttcagagatgtttttgccggtattgatccagatttggatgatcaagtggaatttggagcattccaacaacttggagat

SEQ ID NO: 40256 - DNA, 362 bp, Gossypium hirsutum
  Clone ID: LIB3165-050-Q1-K1-H5
aattcccgcgccgaccccgcgccccctttgtctgacttacttgcttgtacttgttaacgtttttgtaggaacccctccttccggctggtgctgttctttgctttatggattgactaatcagcaagcagtccttagcctttacactgtcataaaagccaatgttctaggaattaaccttaacattccaactgttataaaattaatccttagtgcatatttgtaggaggttccttcattctataaatgtgattaaaaaagatatattatcatttcgttggctaaagtttgttctaagttactttcatttctagtgattctcgttggtttttaagtcggatatatattgttttttttttgccatt

SEQ ID NO: 40257 - DNA, 100 bp, Gossypium hirsutum
  Clone ID: LIB3165-050-Q1-K1-H7
taagtgggagctctcgacccaaattgagacaccactacttgtaacgtcattttacttattgcgtgaatcggaagcagtgcacggtccttctttatggacc

SEQ ID NO: 40258 - DNA, 319 bp, Gossypium hirsutum
  unsure (1)..(319): unsure at all n locations; Clone ID: LIB3165-050-Q1-K1-H8
cccacgcgtncgcccacgcgtccgcccacgcgtccggacggatcttccaaacgacaggctgtcgtgctttttgccttcacgttaaagcatgcagtgaattgaaattctgaaattacccttcaactttgtataactgccgccaactaaccatcatcaactctcgccaaccaagttttatctatcatcttcctaatcctaatctgtacccgtcatacctcttaaacctttcatttcatcaccatctttttgcagtttctctttatgggtgaaagtgaaactcttaaaagctgctaagagggaagtgaattaaaggagagat

SEQ ID NO: 40259 - DNA, 417 bp, Gossypium hirsutum
  Clone ID: LIB3165-050-Q1-K1-H9
tttgattcccatgttgagcaacataactaagttgagttcagaaatctttcaaagagagatttctactctccctaagggaacagctgggtcttcccgacatctatatagtatcaagattttgggtcacctcacctttctacaaggagtcctgttagctcaacaacagtttgaggctcaccccactgatataatactttctagtgcccttagaaccgccccagcctggtaaaaatctttaactttcgttactataccaggaccttcttccaatgatcctcccaccctttggctttcaaggatgcctaatgatgttggcccttcaatgaagctggaccatgctaatttttccgttaatgaccatttggaatttcctttttggcccactcagcctctttattctttcttacctacatcaat

SEQ ID NO: 40260 - DNA, 215 bp, Gossypium hirsutum
  Clone ID: LIB3165-051-Q1-K1-A1
gcgatcgcttttgtcaagcgaatgcgctactagctggtcctgtcaccatcaggtgtgacatcaggaccatggctgtcaggtctccagagcgtttttaaggccttcggtttggagcctgttggtgctaggctcacctgctctttcaaactgacctcaaggacttggctcagacgtgtgttgatgctaccaagctcgctggtttcgctcttgctaca

SEQ ID NO: 40261 - DNA, 391 bp, Gossypium hirsutum
  Clone ID: LIB3165-051-Q1-K1-A10
cccacgcgtccgctcaaattcagttaacaatttcacagttgttttcttcagtctctgtgtcagccatggctgcagccatctccaccgtcgctgccgctgccgccgccaaccgagctctgggagtgtcagtcccaacctcagctttcatggggaagaaagtgagctcaagattcaacagcaccaggcaggttccttcgggaagttttaaggtgatggcggcggagaaagagatagacgaagagacacagaccgaaaaggaccgacggaaagggttggcttacgatatttcggacgaccaacaagacattactcgagggaaagggatggaggaattccttgttccaagctcccatgaatgatggaactcactatgctgtcatgagttcctatg

SEQ ID NO: 40262 - DNA, 390 bp, Gossypium hirsutum
  Clone ID: LIB3165-051-Q1-K1-A11
cttctattcagttttgtaagagctatggctaaggacattgaggttggtggtgagttccaggccaaggactaccatgatcctccacccgctccattggtcgacgctcaggagttagccaagtggtctttttacagggctgtcatagctgagttcattgccactctcctctttctctacatcactgtcttgactgtgatcggttacaagacccagaccgaccctgctaagggcggtgaagattgtggcggcgttggcattcctcggcattgcttgggcttttggtggcatgatctttatccttgtttactgcactgccggtatctctgggggacacatcaaccccagcagtaacctttggacttttcttggctaggaaggtgtccgtggttc

SEQ ID NO: 40263 - DNA, 418 bp, Gossypium hirsutum
  Clone ID: LIB3165-051-Q1-K1-A12
gtagagaacgtcgttctgaaagagtaaattggcgcagggagagagagaggcattgcgggtcgctgtctctctcaaaggtcaaaactttctctctccaaccccaaaaacacgctacttgttttctctctctatcccatcgattcaatttctttgaaaaaaaaagaagcttacagatcgaaaccttaactttcgatctctctcacacatttccttcgatcgaggtagctcgtttacaatttgatttctctatgttaaaacaaaaccctagttttctctctgaatttccgaagtttagcacaaaaccctagaaattctcatttcgatttaattagcgcttttatttgattaaatactcgggatgatatatatgcttaggagatgctgattttttaccgaaatatccttttggttcaaatcg

SEQ ID NO: 40264 - DNA, 345 bp, Gossypium hirsutum
  Clone ID: LIB3165-051-Q1-K1-A2
cggacgcgtgggttggtctgtttagatactgtgtcagagacttagtcagcttttgtccctgcgaaccaaccgtgtctgaaccacttctcttccatcccttaaaagggcaatacccttattagatatttgcttgatctcataacccaacaccccccaaaaagaaccctaatttgttatcaactttcatatctcaataaatcatatagtatatcccccctccccatgaataaccctcaccatctgaaccctacttctctaaaatccaggttcaccacgaggttcctccgcgccctgactaaaatccgtgctcaaaaacctatctcctcgtcttcttccacagagatc

SEQ ID NO: 40265 - DNA, 414 bp, Gossypium hirsutum
  Clone ID: LIB3165-051-Q1-K1-A3
gagactcttttgtataactgtagcatatagtactagtaagcagtaatagcaatggcctcctccatgatctcatcggcaaccattgccaccgtgaactgctcctccccggcacaggccaacatggtggcccccttcaccggcctcaagtctgcctctgctttcccagtcactaggaaggccaacaacgacatcacttctcttgcaagcaatggtgggagagtgcaatgcatgcaggtgtggcctcctcttgggaagaagaagttcgagacactctcatacctccccgatcttacacccgtacagttggctaaggaagtagattaccttcttcgctctaaatggattccttgcttggaattcgaattagaggagggattcgtgcaccgtaagtactcgagcttacccacgtactac

SEQ ID NO: 40266 - DNA, 417 bp, Gossypium hirsutum
  Clone ID: LIB3165-051-Q1-K1-A4
cccacgcgtccgcccacgcgtccgcccacgcgttcgcacacgtccttttgctgttggttttcagtaatcttgcgtttctccgtcgggtttccaagtttcagggctgagctcaacatcgaggaaacctcacgacacaacatccatccagtaacttgttttggttactggagacaatggacttcgggttcaagggaatcaatgaggacacatctgcgtgctcatttaatgagacagacattcagaaatgtccatttcttaagaacattaacaaacccaccgacttttcattcccttcaatgaggttttcccatgcctggaactagaggtcctttatttgaagatggtccaaactttgatatggcatttaagctttttcatgggaaggatggcattgtacctctctcagggaggtctgat

SEQ ID NO: 40267 - DNA, 328 bp, Gossypium hirsutum
  Clone ID: LIB3165-051-Q1-K1-A5
ctaagctggtttcagggctcctatactttgggtacatgctaattgcttcgtatgcattttttgttctaacgggcaccatcggattttatgcgtgcttttggttcacgagacttatctactcatctgtcaagatcgattagtgtgtaaaaggggatatgctttttaggttaagatatagtcatgctttaagatgtatacgttaattctcatttttgaactgagttgtcattgttgtagttgattgagaaaatactcgttaagagaagcctgaaatacactgggtgaatttgatgattttgtaataatatcgtaccctttttattccttt

SEQ ID NO: 40268 - DNA, 294 bp, Gossypium hirsutum
  Clone ID: LIB3165-051-Q1-K1-A8
gactccaacttctaagctcaacctatacttgtctgttgcttaagtaccataccgctggggcgtgtgcacctggtttaccattgccatcatgaactgctccttctaaccccaggccaacatgaaggccgattacactggccttgagtctcactctgctctcccaatcactaggaacgccaacaacaacatcactaacattgcaagcaatggcgggagagtgcaatgcatgcaggctacagctctgctcttgggaagaataagatcgagacactctcataccttccctatcttaca

SEQ ID NO: 40269 - DNA, 264 bp, Gossypium hirsutum
  Clone ID: LIB3165-051-Q1-K1-B1
cgaaatggcagcgaaaaggaagactcccgtcaagaccagaaacccagatctgatccgtggtgtgggaaagtattccaggtctaagatgtaccacaagcgtggcctttgggcaatcaaggccaaaaatggcggtgctttcccccgccatgatcccaaacctaaggcccccgctgccgctgagaaacctcccaagttttacccggctgaggatgtcaagaagccgcttcttaacaagcgcaaaccttaacccaccaaacttagagc

SEQ ID NO: 40270 - DNA, 408 bp, Gossypium hirsutum
  Clone ID: LIB3165-051-Q1-K1-B11
gtcccttttaatttttttctctctttcattttgagggctaaaaacattgcctcaaatccaacccccccttttttttccactcccaaaaaacaaaataagaaaaaaaaaatccaatctttatctatcttctataagatttataatttaattattttttccttgtttctatagagttttaattattttttccttgtttttatagtgttattatagtgttaatcgcctggtatagattcttctccaagtgactctcattttctagctcaatttgttttttaggctcatctgccacaaaaccaacatcttttggccatatagtgtttcttgcctttgaaaaaaaaaaaacaatcaaagatgttttttttcatttttttcctctatggtattagataaagttggtaactttag

SEQ ID NO: 40271 - DNA, 397 bp, Gossypium hirsutum
  Clone ID: LIB3165-051-Q1-K1-B2
ggtagatttgtttaaccccagcaactcgttgaaatggcgtccaagttgtgtgactcatgcaaatcagcgacggccactctgttctgccgtcctgactcggcttttctttgccccaactgcgactccaaaatccatgccgccaacaagctagcctcccgtcacgctcgggtcttggtctgtgaagtttgcgaacaagcaccggctcacgtcacctgcaaggctgacgcagccgctctttgcgtcacttgtgaccgtgacatccactccgctaaccctctcgctcgccggcacgagcgggttcctttggctcccttttacgattccgtcaagcccaacacagcgtttaacttcctggacgaccgttacttatccgacgttgatggagacgctgacagca

SEQ ID NO: 40272 - DNA, 392 bp, Gossypium hirsutum
  Clone ID: LIB3165-051-Q1-K1-B4
cggacgcgtccgcccacgcgtccgtctcaacgaagcccaggctcattcttctgttaagaacttggattttagctgtgatggaaaatttcttgtctcactgggaagtggcctttgtaggatttgggatgtaacttcgtcaaaagttgttgcttctctggcaaagggaaatgatgaggtttttgccttctgcagatttgctcaaattaatgataagaatccacatctgtatattgctgcagtcacagactatggtggaagtattttaacatataacacaaccacatggaaaagaatccgcacaagccgagtagtccgggaagctatctctgcattcaatgtctcgtctgatgggaagttccttgcagttggaacagtcggaggagaccttttta

SEQ ID NO: 40273 - DNA, 263 bp, Gossypium hirsutum
  Clone ID: LIB3165-051-Q1-K1-B6
ggcagacttttttgcttacctgatccttgtcaacatcgggctcagatttagcaccggcctccttcttgatactatcgctaaccattgacaccggaaaccgctccttcccggtgcaggccaacatggtggacccctacaccgggctaaaattggactctgctctcccagtcaccacgaggggcatcaccgacttaatttctattgcaagcgactacggtagagagcagtgcatgcagaaacagccgcctatcgggaagaagaag

SEQ ID NO: 40274 - DNA, 340 bp, Gossypium hirsutum
  Clone ID: LIB3165-051-Q1-K1-B8
gtggaacccaaatgggaaatacagagttattttcaccaaacctatgcctggaactggagggatcaacctcttaatcgagcaagattgccgtgtcgaaatatgtactgagaagaaaacaattttgtccgctgaggatatcatttctttgattggcaataactgcgatggggtgattggacagttgactgaaaactggggggagactttatttgcaggtttaagcagaccatgatgcaaagcatttagtaacatggttgtaggttacaacaatgttgatgttaatgctgacaacaagtatggtgttgctgttggaaacactcctggtgtactcacagaaaca

SEQ ID NO: 40275 - DNA, 408 bp, Gossypium hirsutum
  Clone ID: LIB3165-051-Q1-K1-B9
cccacgcgtccgcacactctcaaattcagttaacaatttcacagttgttttcttcaggctgtctctcagccatggctgcagccatctccaccgtcgctgccgctgccgccgccaaccgagctctgggagtgtcagtcccaacctcagctttcatggggaagaaagtgagctcaagattcaacagcaccaggcaggttccttcgggaagttttaaggtgatggcggcggagaaagagatagacgaagagacacagaccgaaaaggaccgatggaaagggttggcttacgatatttcggacgaccaacaggacattactcgagggaaagggatggtggattcctttgtccaagctcccatgaatgatggaactcactatgctgtcatgagttcctatgaatacctcagcc

SEQ ID NO: 40276 - DNA, 395 bp, Gossypium hirsutum
  Clone ID: LIB3165-051-Q1-K1-C1
cccacgcgtccggaaaagacatggctgctgttactgctgcagtctcttttccttctaccaagtccacctctctccctgctagaacctctattgtctctcctgataggatcaccttcaagaaggtgcctgtttactacagagatgtttgcagtggggggagagtggtttctgtcagggcccaggttacaactgaagctcctgccaaagttgtaaaggaatccaagaaaaatgatgaaggtgttgtggttaacaagttcaggcctatcaacccttacattggtagatgccttctaaacactaagatcactggcgatgatgctcctggagagacttggcacatggtcttcagcaccgaaggagaggtcccctacagagaagggcaatccattgggtga

SEQ ID NO: 40277 - DNA, 275 bp, Gossypium hirsutum
  Clone ID: LIB3165-051-Q1-K1-C10
gccacacggtcgactactggtacggactattttcactggcggccttacagggctcagagggatccattggcacagtctatggttctacatgctgacatggattcacttttgaccgagattagagctgcctgtgcttgaccaacggcatgaacgacaacatctgacacccttgggtggtgggcgatggcatgccactgcaaagcacgcaggagagacctgctacagtaaagaagaaattagaaactttctgatacctacccgatcgtacaccggct

SEQ ID NO: 40278 - DNA, 410 bp, Gossypium hirsutum
  Clone ID: LIB3165-051-Q1-K1-C11
gtcctcaaatatctcatacaaggaattaaattgaattaatggctcaaaccatgttgctcatgtctagccatgcagtgagcttgaagagagatcaccctttactccatttccaagctcaaggactcaagcctaaacctgcctctcatctcttcttcaatccattgtctaatggtgtccatacttcacccaaagctttcaccactttagctgtctttaaatcaaagaccaaagcagctcccaagagggttgagccaaagccaaaggttgaagatgggatctttggcacctctggagggattggttttaccaagcaaaatgagctctttgtgggacgtgttgccatgcttggttttgctgcatcattgctaggcgaagcaataacagggaaaggaatcctagcacagctgaat

SEQ ID NO: 40279 - DNA, 145 bp, Gossypium hirsutum
  Clone ID: LIB3165-051-Q1-K1-C12
gtcacccttattttaatacatgaaataaaatcgtatgaatggatctaactatgacacacgtgactatgcatttagttgagataaaagacagtttaccttaaaatgtatctttgtgctcctaggcggaatactaaacatgactatg

SEQ ID NO: 40280 - DNA, 157 bp, Gossypium hirsutum
  Clone ID: LIB3165-051-Q1-K1-C2
ccctgccgatggcttaaaatactcatattatgcttgttgggatggccaatgcttttaccgtgcgtgattatgtatctgttacaacctgtatacgctgtaataaatgaataaccgaattgttcaaaaaactttattacctatacttaaatggcgaatt

SEQ ID NO: 40281 - DNA, 310 bp, Gossypium hirsutum
  Clone ID: LIB3165-051-Q1-K1-C3
ctcttgtgctatttatacttatctttgatacttcttttgaacccgccgggagatcattcgattgttgtttttaccaaattcctcactgggtctggctttcttggattccacagctcttactttcattgcataggactgaagctccttattgcatactcgagcttcttaaaattgctactgtttatccgcaggctctatattactggctccttacatatttttttgagctcctcgatgtttcaaattaatcaaatctttgccgaatgaccatttttcagctaattatgcattacactattggatgtatttt

SEQ ID NO: 40282 - DNA, 424 bp, Gossypium hirsutum
  Clone ID: LIB3165-051-Q1-K1-C5
cccacgcgtccgcaactcatagtgagaagagagaaatcaatggcttccacttcagcagtttcaggggctctgccactaactcgtgctacccaaaacaaggtgcctgcctctgaagctttctttaagccattgccactcaagccatcgggggcaatcccaactacaacatccaatggaaggcttcaagtcaaggctgctgcttcttcactcaaggacaaggcaaatcacaggattgacagcttctgcaatcacaacatccatggtgatccctgaggtggctcaagctgctgatggagtttccccttctctcaagaactttttgcttagcattgtggctggtggtgttgtgcttgttgccattgttggagctgtaattggtgtggtcaacttccaccctgtcaagcggacctgaaccatataagct

SEQ ID NO: 40283 - DNA, 367 bp, Gossypium hirsutum
  Clone ID: LIB3165-051-Q1-K1-C6
gtgagactcttttgtataactgtagcatatagtactagtaagcagtaatagcaatggcctccgggatgatctcatcggcaaccattgccaccgtgaactgctcctccccggcacaagccaacatggtggcccccttcaccggcctcaagtctgcctctgctttcccagtcactaggaaggccaacaacgacatcacttctcttgcaagcaatggtgggagagtgcaatgcatgcaggtgtggccttctcttgggaagaagaagttcgagacactttcataccttcccgatcttacacccgtacagttggctaacgaagtagattaccttcttcgctctaaatggattccttgcttggaattcgaatt

SEQ ID NO: 40284 - DNA, 417 bp, Gossypium hirsutum
  Clone ID: LIB3165-051-Q1-K1-C7
cccacgcgtccgcccacgcgtccgttccatttctcaacacaaattttcatcacccatcaagcttttcatcaatggcttcccttcaacaagcttcaatctctcttcaacccaagcttctttcatcttctcaacaccccagatcccttccctctctcaacctctctttttcagccactttcccttccctcaaactctgcaccactcgccctcttcatggcggtgccaaaatgtcagcctccgccgcttccagctacgccaccgctttagccgatgtagccaagtccaacaacacccttgatgccaccagctccgacgttgaaaaggtcgagaaaatcttctccgacccacaagtcctccagttcttcaccaaccccaccattgatgtcctcaaaaacgtcaggttttgatgagaatgta

SEQ ID NO: 40285 - DNA, 416 bp, Gossypium hirsutum
  Clone ID: LIB3165-051-Q1-K1-C8
gttgcttcacaatggcctctacaaccatggctctttcttccccatcattcgccggtaaggcagtgaagttctccccttccacccctgaaatccggggaactggccgtgtttccatgaggaaaaccaccaagcctgttccttctggtagcccatggtacggtcctgaccgagttttgtacttgggtccactttccggtgagccaccatcttacttgaccggtgagttccctggtgactatggttgggacactgctggactctcagctgatcccgagacctttgctaggaaccgtgagctcgaagtcattcactgcagatgggccatgttgggagctcttgggtgtgttttccctgagctgttggctaggaacggtgtcaagttcggtgaagctgtatggttcaaggccgggtctcaa

SEQ ID NO: 40286 - DNA, 418 bp, Gossypium hirsutum
  Clone ID: LIB3165-051-Q1-K1-C9
cccacgcgtccgactactagtacccactactagcaatggcttcctcaatgatctcatcggctaccattgccactgcctctccggcacaggctaacatggtcacccctttcaccggcctcaagtctgcctctgctttcccagtcaccaggaaggccaacaacgacattacttctctcgcaagcaatggcggcagagtgcaatgcatgcaggtgtggcctcctactggaaagaagaagttcgagactctctcatacctccccgatcttacacccgtgcagttggctaaggaagtagattaccttcttcgctcaaaatgggttccttgcttggagttcgaattggaggagggattcgtgcaccgtaagtactcgagcttacccacgtactacgatggacgctactggaccatgtggaagct

SEQ ID NO: 40287 - DNA, 107 bp, Gossypium hirsutum
  Clone ID: LIB3165-051-Q1-K1-D10
accacgcgtacgtccactcgtacggctttagttttttaatctcagcatctgaactgcgcggtttttgaacaacgatggtcatggtaccaaatttaaggggtgtaagc

SEQ ID NO: 40288 - DNA, 387 bp, Gossypium hirsutum
  Clone ID: LIB3165-051-Q1-K1-D11
cccacgcgtccgcccacgcgtccgcgaagatccaagacaaggaaggcatccccccagaccagcaacgtctcatctttgccggaaaacaactcgaagacggccgtaccttggccgactacaacatccagaaggagtcaactctccaccttgtccttcgtttgcgcggcgggatgcaaatcttcgttaagacgcttaccggaaagacgatcactctcgaggtcgagagctctgacacgatcgacaacgtgaaagccaaaatccaagacaaggaaggcatcccgccagaccagcaacgtctcatcttcgccgggaagcaactcgaggacgggcggactttagccgattacaatatccagaaggaatcgactcttcatctggttctacgtc

SEQ ID NO: 40289 - DNA, 409 bp, Gossypium hirsutum
  Clone ID: LIB3165-051-Q1-K1-D12
gatgccaccgatctctgccacttgataaaattttcctcataaattcaaatctttattttttttcaagatccgatagaagaacccgacctggtgatccgaaatggcggcgtatagagcagatgacgactacgactatttgttcaagctagtattgatcggagattcgggggttgggaaatcgaacttgttgtcgagattcacgaaaaacgagtttaatctggagtcaaaatccacaatcggagtagaatttgctacccgaagtattcgggtcgatgataaggtcgttaaggcccagatttgggacaccgctggacaagaaagataccgggcgattacaagtgcgtactaccgaggagctgttggtgcattgcttgtctatgatgtcactcgacacatcacatttgagaat

SEQ ID NO: 40290 - DNA, 414 bp, Gossypium hirsutum
  Clone ID: LIB3165-051-Q1-K1-D2
cacgacatggcacagataggatcctttgagatgaggtgcagccaattccatttgcaggagcagccaaagccagttactgcactatgtgagaccaaactgattatcgatgctgatccaacggtacacaaccccgtggttatagataaaccagatgctgatctagacacagcacggttcagcttaaggatagctgaaaagtgcactagacatgaaaaaatcttgaagattcttatgtctggatcgaatgaataagagaatggggaacttgagatgtctctgctatatgaatagatgggacttcagccactgatgtgaggcgtgcatcaacagccttatgcgctttctctaatgtatccaagtagcataatcgattaccacgtgcctctcccagattgtttatgagagatgatccac

SEQ ID NO: 40291 - DNA, 420 bp, Gossypium hirsutum
  Clone ID: LIB3165-051-Q1-K1-D3
cccacgcgtccgtccaagtttgttgtaaaccaagctagaaccagcagccaacatggcctcattagcagcctccaccgctgccgcctcccttggcgtctctgaaattgctcggtaaccctctgaatttcagtggtggagctaggtcatcggctccaacaccatccaactcatccattttcaagaccgttgctcttttctccaagaagaaggccgctcctccaaagcccaaggctgctgctgtcgccccggccgatgaagagctggctaagtggtacggtccggacagaaggattttcttgcctgaaggtctgttagacagatcggagatcccagagtacttgaacggagaagttccccgagactatggatacgatccgtttggtctgagcaagaagccagaagactttgcaaaatatcaag

SEQ ID NO: 40292 - DNA, 236 bp, Gossypium hirsutum
  Clone ID: LIB3165-051-Q1-K1-D4
cccacgcgtccggtcagggcccaggttacaacttatgctcctgccaaagttgttaaggaatccaagaaaaatgatgaaggtgttgtggttaacaagttcatgcctatcaacccttacattggtagatgccttctaaacactaagatcactggcgatgatgctcctggagagacttggcacatggtcttcagcaccgaaggagaggtccgctacagagaatggccatacattggggt

SEQ ID NO: 40293 - DNA, 418 bp, Gossypium hirsutum
  Clone ID: LIB3165-051-Q1-K1-D5
atggcatgttttcgcctcttaattttcctctatcgcagcccctggagaaaaagatagaagggtgatttgtcttgcaagaatgattggtttttaacttgttatatataaatattctttatagcccgtaaatcttataagcttgagtgaagttttctggccttactgttggttatttatggatgcattatttttaagataggtagaagcttaggggtagtatattgacaatcataatcactagggattgattctcgatattgcgtaaagtctcttcttaatggaaagggattaactatttgggttaaacttgggggatcattatgtatgatttaaagtgttcctaggcagatcagactcgatttaaacattaggttttgtggttctttatttaaatcttgtaaagtggccgaataaattt

SEQ ID NO: 40294 - DNA, 417 bp, Gossypium hirsutum
  unsure (1)..(417): unsure at all n locations; Clone ID: LIB3165-051-Q1-K1-D6
cttatcttcctcctcttttccctcttataattcttccccctcaccattttcttttggtttctagaaaaaaaaacccagatttttctttcatttctgaagtgaattaagcaaaaaaaaaaagatgaagaaaacccttttggactctntttaatattgtatattgaattatcatcgtttttatagaaaacccaatatgttcttatagaacagttcatttgttgtaattgataaacaaaaagtgaagagaaaaaaaaaatcatttttgtattgaataagtcaaaacccagttcagctttctcggtaaacaaacatggcatcggtgtttttataccatgtagtgggtgatctaacggtggggaagccagaattggaagaattttatgaaacagaaacgattggatcagctataagagcaat

SEQ ID NO: 40295 - DNA, 255 bp, Gossypium hirsutum
  Clone ID: LIB3165-051-Q1-K1-D7
ggctttttcttccccatcattcgccggttatgttgtgaagttctccccttccacccctgagatcctaagaactggccgtttttccatgaagaaaaccaccaaacctgtcccttatggtatcccatggtacggtccttacctatttttatacttgggtccacttaccggtgagccactatatcacatgaccagagagttctcttgtgacaatggcttggacacttctatactcttaactgatccctaaacctttgc

SEQ ID NO: 40296 - DNA, 420 bp, Gossypium hirsutum
  Clone ID: LIB3165-051-Q1-K1-D8
aaatggtccatctgccttggcagtgaaagaagcagcttggggacttgctcgctatgccgccatttctcaagacagtggactggtcccgattgtggagccggaaatcttgcttgatggtgaccatggaattgataggactttcgaagtagcgcagaaggtttgggctgaggttttcttctaccttgctgagaacaatgtcatgtttgagggcatccttctcaagcccagcatggtcactcctggtgctgaatgcaaagacaaggccaccccacagcaagttgctgattacaccctcaagctcctccacaggagaatccccccagctgttcctggaatcatgttcttgtctggcggacaatccgaggttgaagcaaccctcaacttgaacgcaatgaaccaatctccaaacccatggcacgt

SEQ ID NO: 40297 - DNA, 359 bp, Gossypium hirsutum
  Clone ID: LIB3165-051-Q1-K1-D9
acaatctccagctgccaaggtaaatatgccgatcagaaacataccggctggccgggccgaagaggctactgaccccgatgctctcaaggctgctttggctgaattcatctcaacctggagactcatgtaattctggagagggctcaagaatggcactataacaagtgcgactgacaacggagcaaccaccccggaatggtctcgtagccgacggtctagctcatgggtccagtcttttcactcctggctccgaaggccccaacatgttaagtggcacacgtaaaccctgacgacaccttcagtgcttttgatggcagaaacatcactctcgtgcgcggaatcatgtactggatcggcca

SEQ ID NO: 40298 - DNA, 342 bp, Gossypium hirsutum
  Clone ID: LIB3165-051-Q1-K1-E11
attcaaaacacccccaaaaaaaattccaaaaaaatataaaagaaaaagaaaatgagccgaggaagtggaggcggctacgatcgtcatatcacaatcttctctcccgaaggtcgccttttccaagtggagtatgcgtttaaggcagttaaagcagctggaaccacttgaatgggtgttcaaggcaagaacttggcttcgttgttacttaaaaaaaagttcccgacaagctattggatcagactagagtcactcatcttttccctattaccaagttccttggattgttggctactgggctgacagctgatgcaagggaccttggccaacaagcaaagaatgaag

SEQ ID NO: 40299 - DNA, 372 bp, Gossypium hirsutum
  Clone ID: LIB3165-051-Q1-K1-E12
atcgcttgctccgactggattgtaccttggtggcacaaaatacatggtgatccaaggtgagcccggagctgttattcgagggaaaaagggcccctgagtgtgttactggtaaaaagaccaacctgtccttgatcattgggatctatgacgagccaatgactccaggtcagtgcaacatgattgtggaaaggcttggcgattatcttatagaccaaggtctttgatcactatggtgtcaccttaattgctgcaattcttcctggcttattctatacaaaagagcatctaccaccaccttttgtaatggttggctgcacttaaatcatactattactagtgttaaagtcgtgtggaaccttatacataaacaat

SEQ ID NO: 40300 - DNA, 62 bp, Gossypium hirsutum
  Clone ID: LIB3165-051-Q1-K1-E2
tcccggtcggccccacccgtccgcccctttctgtctctctctctctctctttcacttcactt

SEQ ID NO: 40301 - DNA, 409 bp, Gossypium hirsutum
  Clone ID: LIB3165-051-Q1-K1-E3
cccacgcgtccgtctatttagccaaacaagatgcagatcttcgttaagactctaaccggcaagacgatcactctcgaggtcgagagctccgatacgatcgacaacgtgaaggccaaaatccaagataaggaaggcatccctccagaccagcagcgtctgatcttcgccggaaaacagctcgaagacggccggaccttggccgattacaacatccaaaaggagtcaactctccacctcgtcctccgtctgcgcggtgggatgcaaatcttcgtgaaaaccttgactggcaagacaatcactctcgaggtcgagagctccgacacgatcgacaacgttaaagcgaagatccaagacaaggaaggcatccccccagaccagcaacgtctcatctttgccggaaaacaactcg

SEQ ID NO: 40302 - DNA, 413 bp, Gossypium hirsutum
  Clone ID: LIB3165-051-Q1-K1-E4
gctttggctgctgcaggaggcttcttggctcttttctttgcctgtgtaacagttttttacattggggccatatcggttgctgcttttgttatttcaactgcaataatttcagcaattatagctgctcttgtagctacaggttgggttggattcttttgggttttatggttgggtactaagagaagtatggaccttgcaaagcactccctcagcattactggatctgctttctcagcttattcttctgctcagcatgctcatcgccaccaggaactgcacaaagtttcagactgaaacacttacttgctcatcatgtatatattgtcagatgcagttgattaatcatagataaaaagcatgtcaatgtgtttgacaatttagtcggctaggccgacttgcagtatataggatgc

SEQ ID NO: 40303 - DNA, 421 bp, Gossypium hirsutum
  Clone ID: LIB3165-051-Q1-K1-E5
cccacgcgtccgggagaaacccaagtatgttgttggagtgaaacactgtctgtttgtgaagttgagaagtccagtgtgtagctgtgtacggaaaaaaaagcatggtttctgcatcagagattgcaacaaagttgaatctggcttcccaccctgaaggtggcttcttttctgaaacttttagggatagttctgttatgctctccacatctcaactttcctcctcaatacaaagtcgatcgtgccgttagcacatctatttacttcttgttaccggctgggagcgtgtctcaccttcaccgtataccctgtgctgagacctggcatttttatttgggagaacctcttacggtcttggagctggatgagaaagatgggcaagtaaaactaacatgtcttggacctgatttgttgaataatcaga

SEQ ID NO: 40304 - DNA, 421 bp, Gossypium hirsutum
  Clone ID: LIB3165-051-Q1-K1-E6
gttggatcgtattaaacaggccgagaagaaaaaaaggcgcttagagaaagcccttgctacttgcgccgccatacgttctgaactagagaaaaagaaacagcagaaaaaggaggaacaacaaaggcttgatgaagaaggtgctgcaattgctgaggctgttgctttgcatgtcctacttggtgaagacactgatgatgtcggcaatttcgatctatttatcaatggaggaagtggtccttgccttccccatcaagttcattcaaaaggtttggtcactaatgcatcatatcgagctggatgtgagtgggcaatgttcggaaacagtgactggtctttctcatgtggagactacggaagggatatgattgaaccatgttttgaggatagtgtttggggaactgcaggactttcagctggtctt

SEQ ID NO: 40305 - DNA, 413 bp, Gossypium hirsutum
  Clone ID: LIB3165-051-Q1-K1-E7
accattatggcttcggctactgtttctgtagccaaacccaaccttcagattcaggcaaaaggaaagggtgttggttttgcagatttctcaggcctacacaactcctctactagccttccctttgccaggaaaacctctgatgacttccattcactcgttgcttttcagacatctgctctaggaagcaataatggcgggtacaggaaagggatggcagaggcaaagctaaaggtggctataaatgggtttggtaggattggcaggaacttcttaaggtgctggcatggccgtaaagactccccacttgatgtcattgccatcaatgacactggtggtgttaagcaagcttctcaccttctcaaatatgattccacccttggcatcttcgctgccgatgtcaagcctgtcggcac

SEQ ID NO: 40306 - DNA, 421 bp, Gossypium hirsutum
  Clone ID: LIB3165-051-Q1-K1-E8
actcactatgctgtcatgagttcctatgaatacatcagccaaggtcttaaaacgtacaatttggacaacaacatggatggtttctacatcgctcctgcattcatggacaagcttgttgttcacatcagcaagaacttcatgtccctccctaacattaaggttcctctaatcctgggtatttggggaggcaaaggtcaaggaaaatctttccaatgtgagcttgtgtttgccaagatgggtatcaaccccatcatgatgagtgccggagaactggaaagtggaaacgccggtgaaccagccaagttgatcaggcaaaggtaccgtgaagccgccgacataatcaaaaagggcaaaatgtgcgccttgttcattaatgatctcgatgctggtgccggtcgtatgggaagaaccacccaataca

SEQ ID NO: 40307 - DNA, 418 bp, Gossypium hirsutum
  Clone ID: LIB3165-051-Q1-K1-E9
gagaaaactagaaggaaagaaaagaaagagctccagaagctctcatcttcgatggcatcggcagccacggcccgagctgtcatcctctcccgcatcactgccctttcagtcaaacctctatcaccttctctctctcgcttcctccctagccctcgcaaccgtcctccttcagccttgaccgtgagctgctgcttaaaggacggcggagcctacgacgactactccgtttcgacgcagaaatcgaatttagatcgtggattcatagtaatatctaacatgttaaagcacatcgaaccactcgacacttccgttatttccaaaggggtttctgattccgccaaggaagctatgaagcgaactatctccactatgctcggaattctcccttctgatcagttctccgttttggcttccctct

SEQ ID NO: 40308 - DNA, 129 bp, Gossypium hirsutum
  Clone ID: LIB3165-051-Q1-K1-F10
gatagatatgtctaaacgacttcaatactttttttaaatcaactacactctactggggggattccaaatagcatcaatggaaccccctataactcactataacactaaggggtatcttgctttcattct

SEQ ID NO: 40309 - DNA, 375 bp, Gossypium hirsutum
  Clone ID: LIB3165-051-Q1-K1-F11
ctgccactgacaaatacatcaatgtgaaatatgatgcaacaactgtttcttatgcaaagcgattattaaagggaggtcttcaagcagaacttgggttgccttgctatgagaatgttccattgattgggtacatccgtaggctggaagagcataatggctcatacatcttgacagctgctattccaaaattcattggacaaaattgtcagattgttgttcttggaactggtgaaacggccatggagaagcagattcaacagctggagaccctatattctgcaaaagctatatgagtagccaaattcattgccccataggcccatatgattttctcggttgctcattacctcttggttcctacttgatttgaaccat

SEQ ID NO: 40310 - DNA, 409 bp, Gossypium hirsutum
  Clone ID: LIB3165-051-Q1-K1-F12
gttagattttacaaggaagaggaaaagaatgaacctgaatttgcaaagaagcttgcttcgttagctgatctctttgtcaatgatgcatttgggactgcacatcgagcacatgcatcaacagagggtgttacaaaattcttgaagccatcagttgctggtttccttttacagaaggaactagactaccttgttggtgctgtttcaagccccaaaaggccttttgctgccattgtgggtggttcaaaggtctcttccaagattggcgtcattgaatcactccttgagaaatgtgacattctccttcttggtggtggtatgattttcacattttacaaggcacaaggcctatcagtcggttcatccctggtagaggaggataagcttgaacttgcaacatcacttcttgcaa

SEQ ID NO: 40311 - DNA, 370 bp, Gossypium hirsutum
  Clone ID: LIB3165-051-Q1-K1-F2
cccacgcgtccgctagcattagcactagcactagtagcaaccatggcctccgccgcatgtttcttgcaccaccacgcactcacaaccaatggcagatcatcatcattatcgccgtcgctgcgccaggtttcaaacatgaagcctacccagcaggtggtgtgcaaggctcaaaagcaggaagatgatggaagccttgtgtcccgtaggttggctctcactgtactcattggtgctgccgctgttggctctaaggtttctcctgctgatgctgcctatggtgaagctgcaaatgtatttggaaagccaaaaacagacacagacttcatgccatacagtggggatggattcaagctctcgataccatcgaaat

SEQ ID NO: 40312 - DNA, 382 bp, Gossypium hirsutum
  Clone ID: LIB3165-051-Q1-K1-F3
cttgctcaaatctgacaatgtgggtgtcctcaaaaccctctctttctgacacttcttcactctgtgtccgttctttcatcagcccttttcagctcccatctcagagctcaacccccggtaacccttccaggtcctcatctgtaaccccagttcactgtggtcttcgtgagcttagagaccgtattgattcagtaaagaacacgcagaagatcactgaagccatgaaacttgtggctgctgctaaagttaggagagcacaagaagctgctgtcaatggcagacctttctctgagtccctggttgaagttctttacaacatcaatgaacagctccagactgaagacatagatgctcctctcacaaacgtcaggcctgtcaaaaa

SEQ ID NO: 40313 - DNA, 411 bp, Gossypium hirsutum
  Clone ID: LIB3165-051-Q1-K1-F4
ggccactgacgcttcaccccagctccggtccgtgccacctccttcagactttcaccctgaaatctcactttcccagtcgccaacccacgatggccttcacttttggcaattcatgatcgctggctccatagccggcaccctcgagcacatggctatgtttcctctcgacacacttaagacacgcatgcaagctcttggcgcttcatgttcggttcaacccgtcagcgttcgtcaagccctcggttccatcttaaagctagaaggtcctcccggtctttaccgtggtatagctgcaatggggcttggcgcaggacctgcacatgcagtttacttttctgtttacgagctatctaagcaagttttgtcccgtggtgatccgaataactcaatggttcacgctgcttctggcgt

SEQ ID NO: 40314 - DNA, 419 bp, Gossypium hirsutum
  Clone ID: LIB3165-051-Q1-K1-F5
aaagcactgaaaacgcaaaaccatggcctctgcttctctcctcaagacttcaccagttttagacaagtctgagtgggttaagggtcacacccttcgccaaccttccacttctgcggtgaggtgccaccctgttgcaccctctggactaactgtgcgtgcaagctcatatgccgatgagcttgtcaagactgctaaagctattgcttctcctggccgtggaattttggccatggatgagtccaacgctacctgtgggaaacgtttggcctcaatcgggctagaaaacacagaggctaaccgccaagcctacaggacgttgcttgtttcagctcctggccttggtcagtacatctctggtgccatcctctttgaggaaaccctctatcaaaccacaattgatggcaagaagatggttgatg

SEQ ID NO: 40315 - DNA, 324 bp, Gossypium hirsutum
  Clone ID: LIB3165-051-Q1-K1-F6
aaagcactgaaaacgccaaaccatggtctctgcttctttccttatgactttaccagctacagacatggctcagagggttgagggtcacaccctacgacaaccgtctacttctgcggagaggcgccgccttgtggcaccctctggactaacatgacgtgcatagctcatatgcctatgagcatgtgcaagactgctatagctactgcttgtcctggacggggaatttgggccatggatgactacaacgctacctgcaggaaacgatcggcctccagcggactaaaacacacactagcttaccgtcaagcctacaagactgcgctt

SEQ ID NO: 40316 - DNA, 376 bp, Gossypium hirsutum
  Clone ID: LIB3165-051-Q1-K1-F7
gcaccttgtaattgtcttgaaccaattctgattatctcttgcatactatcaaatggcaggtactgcagcaatcaccactctcccccagttcagtgggttaagacccaaagtttctactgctccagttaggagcctggcagcagttcaaccaatgaggcgcaaggggaagggtgctctccgtgcacgatgtgatttcatcggatctcccacaaatttgataatggtgactacaacaaccctgatgctgtttgctgggaggtttggggttggctccatcagcaaacagaaaggccaccgctggattgaagcttgaagtaagggactcaggcttgcagactggtgaccctgctggttttacacttgctgacactttggc

SEQ ID NO: 40317 - DNA, 409 bp, Gossypium hirsutum
  Clone ID: LIB3165-051-Q1-K1-F8
gagagcggaggcttctttgcttgccacctctcttttatctcttcaaacacttctaaaatgatggatgagaagatgagtttgactgttgctgatgcagtggactacaagggtcaccctgctgacaagtctagaactggtggctgggtacctgctgctctcagcttaggcattgaaatatgtgagaggctgtcaacaatgggaatagcagtgaaccttgtgacttacctgggtggaaccatgcaccttccaagtgctacttctgcaaatgttgtgacagacttcatggggacatcatttctactatgtttactgggcggcttcctagccgattcatacttgggcagatacctaacgatcgcaatattcgccatggttcagatgcttggaacttgcctgttagcagtatcga

SEQ ID NO: 40318 - DNA, 371 bp, Gossypium hirsutum
  Clone ID: LIB3165-051-Q1-K1-F9
caagaggtagcaatggcgtcagtcaaggctgctggcactcaactctttgggcaggtcaagaaggaagccactgatgcttcctccaagtccaaacccgctgcttccaagcccgccgccaaaaaggctgctccaaagcctcaggaacctaacaagaagaagggaaaaggtgggaaagcagcgaccaaacagtagttaccagccccaagtcaagcgcagacttttacgacttcagaccctgatgatctaacttaataatactatacatgcatatgttatgctcacgaaacttaatcaattagggttccctgtaagctatggtgagaaagatattgcgctaattaaatcaagacagcatctatgtaattatcatt

SEQ ID NO: 40319 - DNA, 411 bp, Gossypium hirsutum
  unsure (1)..(411): unsure at all n locations; Clone ID: LIB3165-051-Q1-K1-G1
gaaaatgtcgatgaccccttcgctctctcgtcttcactctccgttcctttgctgtccactcaaacactcaactccgtcattatccatcaaatgtggaaggaatcaccggtcgccgccatcttatccttgcatcagagccgttgatcttgatcagagcacaatagtagcagtgtcggttgggcttgtcagcgttgcggttgggattggcattcccatcttctacgaaactcaaatcgataacgctgcaagccgagaaaatacccaaccatgcttcccttgcaatggctccggtgcccagaggtgtagattttgcatgggaagtggaacaattaccgtagagctcggtggcaacgaaaaagaagtctcgaaatgtgtcaattgcgaaggaanttgttccttaacatgcactac

SEQ ID NO: 40320 - DNA, 385 bp, Gossypium hirsutum
  Clone ID: LIB3165-051-Q1-K1-G10
gagatctgttaccaggttttgaatcccaataatgggtgtttgtttcttcatggccggagttccctgagaatatagtcgctgctgggttccggattttagggaatcttttcttccttcctcgtaaaggttttagtctgctgggtttctggtgtttttgctgagcaatgttcatttctgcttgagctaagctttttgttatttgttactgtctttcgtccatcatagttggttttaccgagtctcccacgtttttgaactcaaatgttctacacgtgatggttgggtctttttcttttcttacagtggcggattgaagatctcgagtcattgtagttatggttcgcttttggcagttcaaagtgtggtgtctagctttcacgggctt

SEQ ID NO: 40321 - DNA, 418 bp, Gossypium hirsutum
  Clone ID: LIB3165-051-Q1-K1-G2
actaaatgtgctggaaatgtcaactgttatatttaacatgatagtattattataaatggtttactaattaatcttaaaagagtgatcccgaataagttctagtcttactgtgaccttgttccagcaacagacgggcttgggttaagctgaattgtctttgttgactttattattaacgatcaagaaagggtagtggatcacccttttcctctttccttctcttttcgtttttcttcagaaacgtagggctctctcgttataatttggtgggttcagtggttttaagggtggctttagtggtggtaatgttggacgattctctgccttcctcttgcagagaggcttgatgaagctcgttttgtggcttttctatcttatcctgcgacagggtggtggttgccgtggaaggttcggtcat

SEQ ID NO: 40322 - DNA, 422 bp, Gossypium hirsutum
  Clone ID: LIB3165-051-Q1-K1-G3
aggctctgcaaaaactctgtgggaaacccttaaacctatgcccccataagaaaagcagtggccaagggcagcaacaagctaaccaagctcttatcggttctaaagaagctgaattcattcaacagcaagcaaagccgtacccccacgtcaaccgccgcggtggcggcttccgatatcatctacaacgaagaaagctctgccgatctccaccctgtctacgttgggaaatcccggaggcggaaccttattagctccgacattatcgacaaccctttgttccgtgagctcgcggaacggtccggtgaagacgatgacgccgtcatcaacgtgtcgtgcgaggtgggtttgttcgaacacttgctttggatgctcgaaaatgctgatcctcaacccgagtctttggaagagctggttgagtttta

SEQ ID NO: 40323 - DNA, 401 bp, Gossypium hirsutum
  unsure (1)..(401): unsure at all n locations; Clone ID: LIB3165-051-Q1-K1-G4
attggtcctcaaatattctcatacaaggggaattaaattgaatcaatnggctcaaaccatgtntgctcatgtctagccatgcagtgagcttgaagagagatcaccctttactccatttccaagctcaagggctcaagcctaaacctgtctctcatctcttcttcaatccattgtctaacggtgtccatacttcatccaaagctttcaccactttagctatctttaaatcaaagaccaaagcagctcccaagagggttgagccaaagtcaaagccaaaggttgaagatgggatctttggcacctctggagggattggttttaccaagcaaaatgagctctttgtgggacgtgttgccatgcttggttntgctgcatcattgctaggcgaagcaataacaggg

SEQ ID NO: 40324 - DNA, 367 bp, Gossypium hirsutum
  Clone ID: LIB3165-051-Q1-K1-G6
cccacgcgtccgcaaagaggaagctccgattgctgtaaaacaatggcggattaccatttcgtttacaaagatgtcgaaggagcttccactcaatgggatgatattcaaagaaagcttgggaatttacccccaaagccaccagctttcaagcctgacccttttgaacctgcacctgacccggattccgtccctaaggacaagtcttggatcgatgaaaagactgaagaagaacttgaagaaatcgaagatgatctcgatgatgatagattccttgaagaatacagaaagaagaggctggctgagatgagggaagctgttaagatttcaaagtatggatcggttatgccaatttccggatccgatttcg

SEQ ID NO: 40325 - DNA, 340 bp, Gossypium hirsutum
  Clone ID: LIB3165-051-Q1-K1-G7
cccacgcgtccggaaacccaagattataaatttagtatcgctttgagtatttgaattgttgagattacaggaatggcaggggaattagtattgttggatttctggccaagtccatttgggatgagatccaagattgctttggctgaaaaagggatactatacgagttcagagaaaaagatttgaggaacatgaggggatttgttgctgtagatgaaccctgttcacaagaaaatgcctgttcttatccataacggtaaacccatttgtgagtctgtcattaaagttcaatatattgatgaggtctggcgtgataaagctactttgatcccttctgatcct

SEQ ID NO: 40326 - DNA, 300 bp, Gossypium hirsutum
  Clone ID: LIB3165-051-Q1-K1-G8
ttctactgttctcctcaccagggtgcaggtatcgttgtaaaattcacagctaactgtgttgtacatatatcatgggaacgcctctgtgctttgtatgtatcatctcacacatcgtttctactttatgagcactagagttaagagtattggggatggatgaggtgattatgaacaatcaacaatggggcgttgatcaccctctatcttgtactttaaattttgctcatatttgcgagacacctggctttatctttacacttcaacatctcatctgtagtaacgcaacatataatggagttt

SEQ ID NO: 40327 - DNA, 157 bp, Gossypium hirsutum
  Clone ID: LIB3165-051-Q1-K1-G9
aaaaaaaataaaaaaaaaaaaaaaaaaattttttttataaaaaaaaaaaaaaaaaaaatggggggttttatattgtattctcttgtttttccctctttttccctcttattgcctccctccttcttttttttttttttccctcttctttattcttttt

SEQ ID NO: 40328 - DNA, 404 bp, Gossypium hirsutum
  Clone ID: LIB3165-051-Q1-K1-H1
gtggacttcaggtgctctgatgtttcttccaccattgactcttccttgaccatggtcatgggagatgacatggtcaaggtggtggcctggtatgacaatgaatggggttacagccaaagggttgttgatctggcacacttggtggcaagcaagtggccgggcatgcctgtagctggaagcggtgaccccttggaggattactgcaaggcaaacccagcagatgaggaatgcaaagtttacgaggcttaaatagttgcaactttatgattatttttaattttttttttacttgcagatggtatagttggtggccaagggttttccaatgttcatgttaacagaaaaaataaacaggtcattttgtaatgacagcagagtgacatgaacatataacatttcaatgc

SEQ ID NO: 40329 - DNA, 362 bp, Gossypium hirsutum
  Clone ID: LIB3165-051-Q1-K1-H10
cccacgcgtccgttctctcaagacctgctcttaactgctcccaagcctcaatctcaatcgtctgaccttcccgaaggcagccaatggaggtacagtgagttcttgaacgcagtcaagaaggggaaagtggagagagtcaggttcagcaaagacggttccgtcctccaactctccgccgttgatggtcgtcgagcctctgtgattgtccccaatgaccccgatctcatcgacattttagccatgaatggtgtcgatatttcggtgtccgagggtgaatccgctaataggctttttaactttattgggaatttgcttttcccttttcttgcatttgcccgattgttctttctctttccgtcggc

SEQ ID NO: 40330 - DNA, 265 bp, Gossypium hirsutum
  unsure (1)..(265): unsure at all n locations; Clone ID: LIB3165-051-Q1-K1-H11
gtctgaagcaagtcaaacaacctgcaacttcgtcttggactgtgcccacaaccattggagtggctccctcttcccttcctcctccttcacctcccnctcccctgcgtactcataacccttcttggttcaccacgaggaccaccctctggtgaatggaacactgtgcgcaagggaagtccgcaaaatggatccgtaacctcgggaaaaggattggctcttagggctgggcacgggggtcccagtcccgaacccgtcggctgccggc

SEQ ID NO: 40331 - DNA, 424 bp, Gossypium hirsutum
  Clone ID: LIB3165-051-Q1-K1-H2
ggtattgaagagataagattatagtgtaaatttagacataataaagcccctcataacatccttcgacttgcttcattgattagccctctgaaagcccaagaaaaatggcttctgcttccgctactctcctcaagtcttcacctattatcgacaagtccgagtggattaagggccaaaacctccgccacccttcggtttgttttgtacggtcacaccctacatcggccgcctttaccgtccgtgctagttcatatgccgatgagcttgttaagaccgcgaaaactgttgcatctccaggtcgtggtattttggccatggatgaatcaaatgctacatgtgggaagcggcttgcctcgattggtctcgagaataccgaggcaaacccggcagcttaccgtacccttctcgtggtttgcccctggcc

SEQ ID NO: 40332 - DNA, 420 bp, Gossypium hirsutum
  Clone ID: LIB3165-051-Q1-K1-H3
cccacgcgtccggccgaagtgggcaactataggcagggagatgttcatggattgttctggttctaaggattcggctcctgcagaatcttctgagtcttctttcagtggttttggttcccttccgagcttgaatttgatcaagtttcagttgcctagtgttatctcttggatttcagatgacggggctcaaaaagattctttctttttgtcacctactcttcattccaattgcagttcatcacagaacgagaagcaaaaactgggttttctgacagatgatgatttagagcatttatataaattagttgaagaaaaagatggaggtcctgcttggattcacatgatggataagtccaccccaactatgggatatcaagcttggcaaagagatcttgagattggtcctacacaatatcgtag

SEQ ID NO: 40333 - DNA, 401 bp, Gossypium hirsutum
  Clone ID: LIB3165-051-Q1-K1-H4
cccacgcgtccgcccacacgttcgcaaccacccactcttacactggagaccagaggctctgaggggctttacaccgtgacttgaggagagccagggctgcagcattgaacattgtaccaacaagtacaggtgctgccaaagctgtctcccttgtgcttgctcagctcaagggcaagctcaatggcattgcacttcgtgtgccaacacccaatgtatctgttgtcgatctggttgtgaatgttgagaagaagggtatcacagctgaagatgtgaatgctgcattcagaaaggcatctgaggagccattgaagggcgtatcggatgtgtgtgatgttcctcttgactcggaggactttaagtgctctgattgttcctccaccattgactctttcattgaccat

SEQ ID NO: 40334 - DNA, 399 bp, Gossypium hirsutum
  Clone ID: LIB3165-051-Q1-K1-H6
cggaaagactggccggaccgacccacgcgttttaatccttgcaaaaccaaacttaataattgtgtttttccttctatgcaatgatctccgacaagagagcagcgaatgccatgggaggcaagactgctagagcctgcgatggctgtctacgaaagcgtgctcgttggtattgttcagctgatgatgccttcctttgccaaggttgcgatacatcagtccactccgctaaccagttagccagtagacatacaagggttaggcttgaaactgcatcttccaggttcaatgcttctgttatcaacaacagtgctactgatcaagatgctctgccagcatggcaccaaggtttcactcgaaaggcaagaacaccaaggcaaaacaggtccatacaggggcaac

SEQ ID NO: 40335 - DNA, 415 bp, Gossypium hirsutum
  Clone ID: LIB3165-051-Q1-K1-H7
cccacgcgtccgcccacgcgtccgatccccaattcttatccagaaaaccctaattttgtgaattttctaataaatcttattttcgtttcctttaattttgattttaataactcaagctcataacccatctgaaaaagaagaaaaaggaaatgagcaatctgaggactgtttgtagaccacacatggtcttcacttcattgatgtgtagtagcaggcaccactacctccatcaagctcgatccagaactagagttgcctttcgaaaccctgattttaggtcatcttccttctctccgtggcttcatttgtccagagatttgaggaggaaggagccttggtttcgggtcaatcaaagaagaactgtcgttagggcatcgaattggtccgatcaaaagtctccctatgaaactcttga

SEQ ID NO: 40336 - DNA, 420 bp, Gossypium hirsutum
  Clone ID: LIB3165-051-Q1-K1-H8
atcggctaccattgccactgcctctccggcacaggctaacatggtcgctcctttcgccgggctcaagtctgcctctgctttcccagtcaccaggaaggccaacaacgacattacttctctcgcaagcaatggcggcagagtgcaatgcatgcaggtgtggcctcctactggaaagaagaagcacgagactctctcatacctccccgatcttacacccatgcagttggctaacgaagtggattaccttctacgctcaaaatgggttccttgcttggaattcgaattacaggagggattcgggcaccgtagatactcgagcctacccacgtactaccatggacgctactggaccaagtggaagctgcctatgttcgggtgcaccgactcggttcaagtattgaaggagcttgaggaatgcaa

SEQ ID NO: 40337 - DNA, 436 bp, Gossypium hirsutum
  Clone ID: LIB3165-051-Q1-K1-H9
ctcctccaaccctgactccatggaaatcgtggagctagctgcacttcttcatgatgtaggtgattacaaatacttgagggatccgtccgaggagaagctagttgagaattttctagaggaagaaggcatagctgagagcaaaaagataaaaatattaagcatcataaagggaatgggttttaaagatgaacttgctggtgtgggaaaccaggaatttccccctgaatttggggttgtgcaagatgctgatcgtctcgatgcaattggtgccataggaatcgctcgctgctttacatttggtggaaacagaaacagagtgcttcacgatcctgctatccagtcacgattggacttatccaaggaacattacatgaagaaagaggagcagactactgtgaaccatttccatgagaagcttcttaagttaaaggatttg

SEQ ID NO: 40338 - DNA, 322 bp, Gossypium hirsutum
  Clone ID: LIB3165-052-Q1-K1-A1
ccggcccgaattcccggtcgcccccccttccggggaatccaatctcctttttaagccctccccaattccaaattcgaagttgattttggaaggggagtcttccgaggaggcgatggcagctttgtcaaaccttctcagtgagaaagctgatctcggaagtgttgccgctgaaaaaatcaaccaaataccacccgccttaaaggcacttggcagttgcgacaccgccaaccggatcaaaaccggtttccttcatttcaagtcagaaaaattcgagaaatatcctgatttgtacggtccacttgccaaaggccaatgccccaag

SEQ ID NO: 40339 - DNA, 326 bp, Gossypium hirsutum
  Clone ID: LIB3165-052-Q1-K1-A10
ggcacttaaactcgcgatctatacccggacgtatgggcgagggtcagtcccacgatgagggggacggcactgtggtcgccgcaaaaccctgggcgcaagcccgagcggagcgtccgtcggtgcatatcttgttggtattagcaaatatttaaatgagaactttcacggcaacttagggggaaggatccgtgtgaacgggtcttgcacctgcgttattccatcctaagagacgtggtaagaccctgcgacagcacgtccaacacgtgcttcaaaaggatatcggactgaaattcctgaaccgtacacacggacgttgacatctatgc

SEQ ID NO: 40340 - DNA, 417 bp, Gossypium hirsutum
  Clone ID: LIB3165-052-Q1-K1-A12
cccacgcgtccgcccacgcgtccggatgtttgccatctgaatctccacaaaaccttgtgcattccacacggaggtggtggacctggcatgggacctattggtgtcaagaagcatttggcaccatttttgccttcacaccctgtggtacctacaggaggtatcccagccccagaaaaatcagaccctcttggtaccatttccgctgcaccttggggctctgcacttatcctgccgatatcttacacttacatagccatgatgggatctaagggactcactgatgcttcaaagatagctattttgaatgcaaattacatggcaaaacacttggagaaacactaccccgttcttttccgcggagttaatggaacagttgctcatgaattcattatagacttgagaggttttaagaatact

SEQ ID NO: 40341 - DNA, 441 bp, Gossypium hirsutum
  Clone ID: LIB3165-052-Q1-K1-A2
gtcgaatcttttttattttttggcctccaaagggtttctgccaccacttccaccacttttgccggcctcaaaaccaccgcctccaccaccttttcctccgcctcccgctcttttgcatccctcatccgccttccctccactcgccgccacctcaaatcctcttctctcatccacagcctaggcttctcctccgctgcttctggggactctctgctttccctccatgcctcctccaaagttcgatctttcaagggaaaagggtcaagaggggttgtttcaatggccaagaagagtgttggggacttgactgccgctgatttgaaagggaagaaagtgtttgtgagggctgacttgaatgttccattggatgatagccagaacatcactgatgacaccaggattcgtgctgctattcccaccatcaagcatttgattcagaat

SEQ ID NO: 40342 - DNA, 388 bp, Gossypium hirsutum
  Clone ID: LIB3165-052-Q1-K1-A3
gagtctctctttaacccagggtgggggccatataaaccgtggttgccgttgccgccgccaaccaagctatgggagggtcattcccaacctcagttttcatggggaagaaagtgagctcaagattcaacagcaccaggcaggttccttcgggaagttttaaggtgatggcggcggagaaagagatcgacgaagagacacagaccgaaaaggaccgatggaaagggttggcttacgatatttcggacgaccaacaggacattactcgagggaaagggatggtggattccttgttccaagctcccatgaatgatggaactcactatgctgtcatgagttcctatgaatacctcagtcaaggtctttaaacgtgcaatttggacaacaacat

SEQ ID NO: 40343 - DNA, 437 bp, Gossypium hirsutum
  Clone ID: LIB3165-052-Q1-K1-A5
agccttccgccaaggcttccgtttaaacgttagctgaatactattgttcatttcttcccgcaaaaccctaggcgataactgaagccatttaatcatgtttgggcgtgttccaaaaaaatctgataacaccaagttttatgaagtacttggggttcccaaaagtgcaagtcaggatgaattaaagaaggcttataagaaagctgcaattaagaatcatccagataaaggtggagaccccgagaagtttaaggaactggctcatgcttatgaagttcttagtgacccagagaagagagacatatatgatcaatatggtgaagatgctcttaaagagggaatgggaggaggcggttcttctcacaacccatttgacatatttgagtcattttttggtgggggagcctttggtggcggtggtagctccagaggaagaaggc

SEQ ID NO: 40344 - DNA, 436 bp, Gossypium hirsutum
  Clone ID: LIB3165-052-Q1-K1-A6
attgaaaccctcaaaattccactaaaaaatggcctccacagcttccctctccaccgccgtagccaccacctctttcctccgcggccatccggcgccgaaaaccctaaactcccttcctttcaaccaatctcttttcgggctaaaaccccaacgaaatggccgtctcaccatggcagcatacaaggtgacactgttaacacccgaaggaccccaagaattcgtgtgccccgacgacgtatacatcgttgaccaagctgaggaagaaggcattgatcttccgttctcgtgtagggctgggtcttgttcttcgtgtgccggagtgattaagcaaggctccgtcgatcaatccgacggtaatttccttgatgatgaccagattgctgcaggttttgtcctcacttgtgttgcttaccctcagagtgatgttgttattgag

SEQ ID NO: 40345 - DNA, 439 bp, Gossypium hirsutum
  Clone ID: LIB3165-052-Q1-K1-A8
tatgcatagccgaggtaagggtatttccgcatctgctcttccgtacaaaagaactcgagctagttggctcaagatctcctctcaagatgtggaggagaacatttgcaagtttgtgaagaagggtttgaccccatctcaaattggtgtcattctccgtgattcacatgggattgctcaggtgaagagtgttacgggcagcaagattttgcggatactgaaagcccatggtcttgctcctgaaattcccgaagatttgtaccacctgattaagaaagctgttgccatcagaaagcatcttgagaggaaccgcacagacaaggattccaagttccggttgatcctggttgagagcagaatccatcgccttgcccgctattataagaagacaaagaagcttccacccgtctggaaatacgagtcgactactgccagcacactt

SEQ ID NO: 40346 - DNA, 436 bp, Gossypium hirsutum
  Clone ID: LIB3165-052-Q1-K1-A9
gaaaaatccactcaacctttaagatttcaaacatggctgcaacttcctcttacgtggcctgcacaaaattctccatgttgggttggagtggagggaaaagagacttgagaatgaaaagggttctttcggtttcggctcagcagcaagctgaagttggtgaaacacaagaagctaaagtgcaggaagagcaagaaaaggttaagcaacaacaacctacacaaccaaggccagtggaaaaacaactgaatgtaaagagcaaaaacatgggcaaagattatggaggacagtggcttagcagtgttacgaggcacgtcaggatctatgctgcctacattgatcctgaaacctctgagttcgatcaaactcagatggataaactcacccttatacttgaccctactgatgagtttgtttggactcctgaaacttgcaataa

SEQ ID NO: 40347 - DNA, 411 bp, Gossypium hirsutum
  Clone ID: LIB3165-052-Q1-K1-B10
accgaatggagttcatgcttccaccccaatttgggcacatgcctagttacattccggggtatcccggatacgggcacccagcttacgcgtatggaaacccgtatccgcacccacacgggcatggttaccccgggtatgtgccaggttacccggtgtatgttaatccacctcaccagatgtttaacgatgagaacaccaatgcttgtgctatcatgtaaggaggaatggggtttacggtataggtttaggtcaaggaaaatggaaaaaaaaatagtgtaaataggaaatagacaagaaagtttacttggagaagaaaattttcttatatatgttggattccagggttttgatcttgttatttgttgttaaaaaagttttactgttgtcatttttaatataattagtgttctt

SEQ ID NO: 40348 - DNA, 435 bp, Gossypium hirsutum
  Clone ID: LIB3165-052-Q1-K1-B11
cccacgcgtccgtgttaataccgagtcgaactgctgtgcgacatgtgagagcctcagcagcaaaagccgatgcaactcactcgtgatctccgagcacgaaaccagaaccctgcccttactgttcctggctactaatccccttgacaattgccgagatctttcatcaaaagctgcatcgaagttgatcttcacgacctttacagttttgttggtcttcttgtgaatcctgttatttctgtcaccccaaattgcccataatacacagcagacaaccttactctgagatggagaactctgcaaaaacacccaaatgagccactgtgcgaactccaggtggtccatactttctgatcctctatcatatgctttgctcatatcaagtttaaccgccatgtatcccttcagtcttgttcgcttttgccgaaaagatgtaat

SEQ ID NO: 40349 - DNA, 439 bp, Gossypium hirsutum
  Clone ID: LIB3165-052-Q1-K1-B12
atcggctaccattgccactgcctctccggcacaggctaacatggtcgctcctttcaccggcctcaagtctgcctctgctttcccagtcatcaggaaggccaacaacgacattacttctctcgcaagcaatggcggcagagtgcaatgcatgcaggtgtggcctcctactggaaagaagaagttcgagactctctcatacctccccgatcttacacccgtgcagttggctaaggaagtagattaccttcttcgctcaaaatgggttccttgcttggaattcgaattagaggagggattcgtgcaccgtaaatactcgagcctacccacgtactacgatggacgctactggaccatgtggaagctgcctatgttcgggtgcaccgactcggctcaggtattgaaagagcttgaggaatgcaagaaagaataccccaatgca

SEQ ID NO: 40350 - DNA, 425 bp, Gossypium hirsutum
  Clone ID: LIB3165-052-Q1-K1-B2
cccacccgtccgcgacggcttccatcaacggttggtgccttacctcctcttcttcctccaccgccacctcctctttttccgctcgtcgacgacctacattgcggccttcggtcgtcgctagccttaactcttctccttctcctccgactcttatccaagaccgcccggttttcgctgcccctgttcctttgctcaccccgagagaagagatgggaaacaagtcctacgacgaagccattgaagctctcaagaaacttctcagtgagaaaggagaactgaaagctgaagcagctgcaagggtagatcaaataacagcagagttaaacacaacatcagctgacggcaaaccatctgactcttctgttgagagactgaaagaaggcttcgtttacttcaagaaagaaaaatttgaaaagaatcctgct

SEQ ID NO: 40351 - DNA, 405 bp, Gossypium hirsutum
  unsure (1)..(405): unsure at all n locations; Clone ID: LIB3165-052-Q1-K1-B3
tttgggggaaaaaatggtggttgcagaagcttaagtttccatgtcggccaccgccgttttgattccacgtgttcctgcacccgttagaacaacccactgttccgccttgccgcctgtccttcctcgcgtttccaccgtttccttttcctcgtccgttaagctaactccagaatcccggaggtttccttttctccaaacaaaagcaacagaagacacctctgtcgataccggggagctttttgatgacttgaaagaaaaatgggataaagttgagaacaagaccacggttcttctttatggtggtggggcaatagttgccgnttggctatcatctattcttgttggcgccattaactcagtgcccttgcttccaaagataatggagttggttggacttggatattc

SEQ ID NO: 40352 - DNA, 417 bp, Gossypium hirsutum
  Clone ID: LIB3165-052-Q1-K1-B5
agccttccgccaacccttccgccaacccgtccgcccacgcgtccgaaaaaaatgaggggctgcacctgcttctcctttccttcatcccctccaattttctccttttacagtaatagcaataatcgtttctcttcttcttcttcactgttattttcatcagcctctcacaactgctctgtgaaactgtcccctctcctcttcgccaagtccacgcgcttcagaacaaattgcaaagccaaagatcccgaagttgtggactgcgtagggacgggcctggacgtggagtgcctcgtctctcaaaacgagaaacaagatttggaaatagaagatgttgaaaaggcggaaagcaacattttgttggagtgggcagtgctcgtttctccattcttcttctggggcaccgcaatggtggcaatg

SEQ ID NO: 40353 - DNA, 433 bp, Gossypium hirsutum
  Clone ID: LIB3165-052-Q1-K1-B6
cccacgcgtccgagaaaaccccctttgccaaacatggagactagtgtcacgtgctacgctcgtgggattgttcttcctggtgtctcttctaagcactcctcggcattagtctcccctccatccatatctccttccttcagctctaagagccttaaaacaagttcactatttggagaatcattaagggttgttccaaggtcatcattgaaggtttcaaaggcaaagaacactacttcactagtgacaaaatgtgaaattggagagtctttggaagagtttcttacaaaggcaacaacagataaggcattgattagaataatgatgtgtatgggtgaagcattaagaacaattgcttttaaagttagaacagcttcatgtggtggtactgcttgtgttaattcctttggtgatgaacaacttgctgttgatctac

SEQ ID NO: 40354 - DNA, 433 bp, Gossypium hirsutum
  Clone ID: LIB3165-052-Q1-K1-B7
cccacgcgtccgcaaattcctgaggaaatccctttttccatgaaaattcttgggacatggggacctttgcctctccctttatataacaattctcctcctttctctcatccacacctttctccttcaattttcccatcaacccattattctcacaagttttcgcaatccatggctgcttgcattgacatctcaagaacaacagactcttcccaactttcccaacgtccaaacatttctcaacctgatgaatttctttacgagtatggaagtttctgcagatccactttcccaaataatgtttcgagcgtacccttgaataaaaaccacacagaaaccatccctacaagaaaatctgttgatttttctttagaagaaaaagaagaggttggtgctttatggctgaaaatgaaagaagaagcaacgttagatgctg

SEQ ID NO: 40355 - DNA, 437 bp, Gossypium hirsutum
  unsure (1)..(437): unsure at all n locations; Clone ID: LIB3165-052-Q1-K1-B8
cccacgcgtccgcccacgcgtccgcccacgctttctcccacgcgtccgaaaaacttatgggggctcggttgacgttggtgtcctccatcatccttctgctatgctccgtcgccgccggatcaactttcgaggactccaaccccatccagatggtatccgatggcctcagcggcttcgaatcctccgttcttcgtgtcatcggtcacactcgtcatgctctctccttcgcccgttttgcatacaagcatgggaagaggtatgaaaacgtggaggagatgaagctacggtttcagattttcaaaggcaacttggatttaatcagatccactaacaagaagggactgccttacactcttgctgtcaatcagtttgctgattggagcttggaagagttccagaaacacagattgggggctgcttanaactgctctgctacc

SEQ ID NO: 40356 - DNA, 432 bp, Gossypium hirsutum
  Clone ID: LIB3165-052-Q1-K1-B9
gcctttgaattgaaaccctcaaaattccactataaaatggcctccacagcttccctctggaccgccgtagccaccacctctttcctccgcggccatccggcgccgaaaaccctaaactcccttcctttcaaccaatctcttttcgggctaaaaccccaacgaaatggccgtctcaccatggcagcatacaaggtgacactgttaacacccgaaggaccccaagaattcgtgtgccccgacgacgtatacatcgttgaccaagctgaggaagaaggcattgatcttccggtctcgtgtagggctgggtcttgttcttcgtgtgccggagtgattaagcaaggctccgtcgatcaatccgacggtaatttccttgatgatgaccagattgctgcaagttttgtcctcacttgtgttgcttaccctcagagtgat

SEQ ID NO: 40357 - DNA, 441 bp, Gossypium hirsutum
  Clone ID: LIB3165-052-Q1-K1-C1
cgccctccgggagggggagagaggggccttttaatcaccggggttggcggcggcggttaatttagttttggggccagcattccccgaggaagaaacgacgtcaaattcccttatacgaaacactcgttgctgcttctgtttcccttgcttcagctcccgtcgtccgcctgccgttggcgtagccttttggcagcggataggttcgtcccacgtccagtccgatactggcttctggtcctcaagtgttagagccttcaaggttcgagagtggtccgagatcgtcgccggcccccgctggaagacttttatcaggagattcaaccgtagcaaaagtgggggcggaatcgtctccggcggtaggcatggacaattccattatgatcctttgagttacgctttgaatttcgacgaaggcccgggacagaatggtaatttggaaga

SEQ ID NO: 40358 - DNA, 429 bp, Gossypium hirsutum
  Clone ID: LIB3165-052-Q1-K1-C10
agcctttcggaggttcatcagaaatggacggttctcaccttttcatcactttttcttcgttttgttcttatctagaggcgttgacttgaagtcgtcgtttgtttttttgaatctttgttccatcccctaagcaagttttttgaaagattcaatcaattgttttgaatcgaaagtagtgtgtagtacaaatttcgggtaatcaagtagagaggcagctttattcttgtaatctagtttgatggtgaaaagaaagcagcagcctcctccagaaatggagggtactggcggcgctgaagcggcggtggaggctgagaccggaatccaaccccaacgaaggtgtaccaaatctctgaaaacgcgagctcagatggataaacataacgagagcttgtaacgatatcgactgaaaattaaaatgaggcgtgagga

SEQ ID NO: 40359 - DNA, 431 bp, Gossypium hirsutum
  Clone ID: LIB3165-052-Q1-K1-C11
cccacgcgtccggccactgactctccggcacaggctaacatggtcgctcctttcaccggcctcaagtctgcctctgctttcccagtcaccaggaaggccaacaacgacattacttctctcgcaagcaatggcggcagagtgcaatgcatgcaggtgtggcctcctactggaaagaagaagttcgagactctctcatacctccccgatcttacacccgtgcagttggctaaagaagtggattaccttcttcgctcaaaatgggttccttgcttggaattcgaatcagaggagggattcgtgcaccgtaaatactcgagcctacccacgtactacgatggacgctactggaccatgtggaagctagctatgttcgggtgcaccgactcggctcaagtattgaaggagcttgaggaatgcaagaaggaataccc

SEQ ID NO: 40360 - DNA, 411 bp, Gossypium hirsutum
  unsure (1)..(411): unsure at all n locations; Clone ID: LIB3165-052-Q1-K1-C12
cccacgcgtccgaattcagttaacaatttcacagttgttttcttcagtctctctctcagccatggctgcagccatctccaccgtcgctgccgctgccgccgccaaccgagctctgggagtgtcagtcccaacctcagctttcatggggaagaaagtgagctcaagattcaacagcaccaggcaggttccttcgggaagttttaaggtgatggcggcggagaaagagatagacgaagagacacagaccgaaaaggaccgatggaaagggttggcttacgatatttcggacgaccaacaggacattactcgagggaaagggatggtggattccttgttccaagctcccatgaatgatggaactcactatgctgtcatgangtcctatgaatacctcagccaggtcttaaaacg

SEQ ID NO: 40361 - DNA, 435 bp, Gossypium hirsutum
  Clone ID: LIB3165-052-Q1-K1-C2
agccttcggtctggtgcttttggaaatagaggtaccaggctgttgtaaaaaaggtgccggtggcgcttttcatgaggatgacctcaggggtgtttacttggtttggcaggacctcacggtggtgttgccaaactttggtaataaaccaaccaaaaggttgcttcaaggacttagtggatatgctgagcctggcagaatcatggccattatgggtccttctggttccggaaaatctactctgctcgactctcttgcaggtagacttgccagaaatgtggtcatgactggaaatatccttttaaatggaaagaagaagagactagagtatggtgctgttgcttatgtaactcaggaggatgtgatgttgggaactctaacagtaagagaaactttaacatactcagctcatttaaggcttccgaccacgttgagcaa

SEQ ID NO: 40362 - DNA, 218 bp, Gossypium hirsutum
  Clone ID: LIB3165-052-Q1-K1-C5
tcggttaacctttcctttcatctttctgtaccagtgaatgcccaagggtaatcacccgctagtgggacaccggctcacctaccgtcagaccaaatctttggacaagaatagtcaacgtttctcatgcttcggctaactcaatcggtcacgtcggcgaatgccagaacctaatatcgcgcaggcaactaaggccctcctggctaatctaatgctcgtca

SEQ ID NO: 40363 - DNA, 418 bp, Gossypium hirsutum
  Clone ID: LIB3165-052-Q1-K1-C6
ctcaacccaagttgtggtgcatatcccattttccacactccatttccccagattttcacggtgcacaaacagccataattctcaacaactcgttatatatataatttctgggttcaatcgtttcttgttgtttgtagttttggttttaatctttgaaggaagcaaaaaagaagggaaaaaaaaaagtttgaattaatgctagctgtgtcacctttgaggaacaacacaagcaaagatgatgacgaaggagagatggagagtactttcacaatcagctccgacgagttcccggatttcgctgacgggaacttacttgaaagtatcgatttcgacgatctttttctcagcatcgatgttgatggcgacgtcttacctgatttggagttggaccccgtaaatttggctgtattgccccccg

SEQ ID NO: 40364 - DNA, 420 bp, Gossypium hirsutum
  Clone ID: LIB3165-052-Q1-K1-C7
cccacgcgtccgctcgccgtctcgcgtgcgctcctgtggctctcttcaaccctcgcatgggtcttcaagatctgatctgatctgacaaaaaaatgttcgggagagcaccaaagaaaagcgataatactaaatactatgagatattgggagtgcccaaaaccgcttcccaagatgatttgaagaaggcttacagaaaagctgcaattaagaatcatccagataaaggcggtgatcctgaaaagtttaaagagttggctcaagcttatgaggtgctgagtgacccagagaagcgtgagatatatgatcagtatggtgaggacgcccttaaagaacgaatgggtggaggtggtggtgcccatgatccatttgatatcttccaatccttctgtggtggcaatccttttggtggtggtggtagca

SEQ ID NO: 40365 - DNA, 434 bp, Gossypium hirsutum
  Clone ID: LIB3165-052-Q1-K1-C8
cccacgcgtccgcccacgcgtccgcccacgcgtccggtgagactcttttgtataactgtggcatatagtactagtaagcagtaatagcaatggcctcctccatgatctcatcggcaaccattgccaccgtgaactgctcctccccggcacaggccaacatggtggcccccttcaccggcctcaagtctgcctctgctttcccagtcactaggaaggccaacaacgacatcacttctcttgcaagcaatggtgggagagtgcaatgcatgcaggtgtggcctcctcttgggaagaagaagttcgagacactctcatacctccccgatcttacacccgtacagttggctaaggaagtagattaccttcttcgctctaaatggattccttgcttggaattcgaattagaggagggattcgtgcaccgtaagtactcg

SEQ ID NO: 40366 - DNA, 435 bp, Gossypium hirsutum
  Clone ID: LIB3165-052-Q1-K1-C9
cccacgcgtccggcgggccgcccttttttttttttttttaagacaagaacaaagtggggaggttataacacaaaaatagaggatgcaaatccacttaaaacacaaaaggaaaacaacattcaattaagacacaaaggggggatttcctttgtttgtgcccaatatagatttttttcttcccttagagcttaatttcccatttagaaagctcctctcttgatagcatcgtcattagcatttccaagggcagcttcactcaaatatttgtcagccaattgaaccctcttcacattctcttgctcagcaacaagcatgtatccatattccaacagcttctcaatggtcatcttcggttgctcgaaagatggtggcccttccctcgagttcacgagctttttcccgacaccattgactccgacctctccgatccatttc

SEQ ID NO: 40367 - DNA, 433 bp, Gossypium hirsutum
  Clone ID: LIB3165-052-Q1-K1-D1
gcgggcgagaccactactcaagggttcgactccttggaaacctggaggaccattggccttaaggtatattcctcctaccaacgaggacagatatttactcttaattgatgagttacgtggccgtttggttactcttcttggtggacgcgctgcagaggaagttatctatcatgtcgaggaaatactggtgcacttgatgatattaggcgggcgacagacatggcatacaaggcagtagctgaatatggtcttaatcagactatagggcctctctccttagctacggtttctggtggaggcatggatgaatccgggggtggagttccttggggacgagatcagggacatctagttgatcttgtccaaggagaggtgaaggcattattacagtctgcccatgaagtagccctttctgttgtacgtgctaatccaa

SEQ ID NO: 40368 - DNA, 424 bp, Gossypium hirsutum
  Clone ID: LIB3165-052-Q1-K1-D10
caaaaacactattatatatcaccatgccttcttcaccttcttttactcttgtgtctagatgcacggtttccccagaccaaatatctgacatcaaaaccttaaagctttcggtttctgacatccctatgctttcatgtcagtacattcaaaaaggggttttgctcacttctcctccttattcgttcgacgacctcgtgtgcttccttaaacaatccctgtccactactctctcctacttccctcctttggctggtcgtctcaccacggaccccgacggtcacgtccacatcacctgcaacgatgccggcattgacttcctcgttgtgaaatcccccaatatttccattcacaacgttttggtccccggcgatgtccccgattgtgtcaaacagtttttcactttcgacaagacacttagttactc

SEQ ID NO: 40369 - DNA, 436 bp, Gossypium hirsutum
  Clone ID: LIB3165-052-Q1-K1-D11
caagttctgaaaacaaaatccttcacttcaaaatttcactttccctcacttcaaatgccggcggcgatgcctcccctcaagctcccttgcctatgctcaagttcaccatcactggcgccgcttccacctctctttctgctcataagaagaccaagggtcgtggcttccatgagggcgatgctaaccgccactcccgtctcgcctctcgcgacttcgagtcctttggcactgacggcggccccggtccccagagatgttcaagtggattttgatgataaaactagctgggagtatctgtttaaggtgtactgggttcttttaaaagagaagctagctttaagtttacatgagcttactaacgctacaaatccatggaaggaacttagagaagcttcagctaatattgaaccaaagcatcaaaacgacgttgcagatt

SEQ ID NO: 40370 - DNA, 433 bp, Gossypium hirsutum
  Clone ID: LIB3165-052-Q1-K1-D12
agcaaaaggcaaaaaagccatgtcaaagctggtggtgttgcagcccacaaagcagcctcgcatctccctcctctcttcctgtctttcccacttcaatggcaccaagctctgccaaatccagtacaagagaaaggtatatcagccaaaaggtgcattgcatattgcagcatccagcaccaagaagattctcataatgggaggcactaggttcattggtgtgtttttatcaagactccttgtaaaagagggtcatcaggttactttgtttactagaggtaaagcaccagttactcaacaattgcctggtgaatcagacagtgactacgctgagtttaaatccaagattctgcatttgaaaggagatagaatggacttcgatgttgtgaaatccagtctttctgcagaaggctacgatgttgtgtacgacataaat

SEQ ID NO: 40371 - DNA, 199 bp, Gossypium hirsutum
  Clone ID: LIB3165-052-Q1-K1-D2
ggattggcaaaggaggaggtgttggtggtggaatctgaaagggtggaggatacggaggtggcgtcggaaagggtggtgggattggcaaaagatgaagatatggaggtggaattggtaagggaggaggccatggaattggtggtgggatcggcaagggtggtggagtctgtagaggaattggaaagggtggcggtattgg

SEQ ID NO: 40372 - DNA, 427 bp, Gossypium hirsutum
  Clone ID: LIB3165-052-Q1-K1-D3
cccacgcgtccgtttagctatagcatacactactagtacccactactagcaatggcttcctcgatgatctcatcggctaccattgccactgcctctccggcacaggctaacatggtcgctcctttcaccggtctcaagtctgcctctgctttcccagtcaccaggaaggccaacaacgacattacttctctcgcaagcaatggcggtagagtgcaatgcatgcaggtgtggcctcctactgggaagaagaagtttgagactctctcatacctccccgatcttacacccgtgcagttggctaaggaagtagattaccttcttcgctcaaaatgggttccttgcttggaattcgaattggaggagggattcgtgcaccgtaagtactcgagcttacccacgtactacgatggacgctactggaccatgt

SEQ ID NO: 40373 - DNA, 85 bp, Gossypium hirsutum
  Clone ID: LIB3165-052-Q1-K1-D5
ccaacccgtccgccaacgcgtccgttaatctaattacttgggggaggaacaatagtatttgagttgctacaaatatggattattg

SEQ ID NO: 40374 - DNA, 439 bp, Gossypium hirsutum
  Clone ID: LIB3165-052-Q1-K1-D6
aaaaaagagtcaatggcttccagttcagctgctttatatggctctgcccttaactggagctacgcgaaacatgatgccaagttctgaggcattctttaagccactcccggtaaagccatggagatcaatgggcgctgttaaaagacccaacggacggctccaagtcaaggctgcttcttcttcgttcaaggaaaaggtggtgacagggttgacagcagcggcgctgacgacatcgatgatgatcccagaggtggctcaagcagctgatggagtcaccccatctctcaagaacttcttgctcagcatagcggctggtggtgtggttctggtcgcccttgttggagctgtaattggtgtgtccaacttcgaccctgtcaagcggacctgatctgagttcatataattctctctcatgctgtacatttttcttttaatgtta

SEQ ID NO: 40375 - DNA, 431 bp, Gossypium hirsutum
  Clone ID: LIB3165-052-Q1-K1-D7
ggcgagaccactactcaagggttcgactccttgggtgcgcgttgtcagcaatactataaagctggtgcgcgtttcgccaaatggcgtgcagtgctcaagatcggtcccaacgagccatccgagttggctatccagcagaacgcgcaggggttggctcgttatgccatcatttgtcaggaaaatgggctcgtccccattgttgagcctgaggtgctaactgatggccctcatgatattaaaaaatgtgccgctgtcactgaaaccgtgcttgccgctgtttacaaggcgctgaatgatcaccatgttttactcgagggcacccttttgaagcccaacatggtcactccaggttctgacagcctaaaggaggcaccagaggtgattgcgcaatacacagtaaccgcacttcgccgaaccgttccaccagcagt

SEQ ID NO: 40376 - DNA, 435 bp, Gossypium hirsutum
  Clone ID: LIB3165-052-Q1-K1-D8
agataagagaaagcactgaaaacgcaaaaccatggcctctgcttctctcctcaagacttcaccagttttagacaagtctgagtgggttaagggtcacacccttcgccaaccttccacttctgcggtgaggtgccaccctgttgcaccctctggactaactgtgcgtgcaagctcatatgccgatgagcttgtcaagactgctaaagctattgcttctcctggccgtggaattttggccatggatgagtccaacgctacctgtgggaaacgtttggcctcaatcgggctagaaaacacagaggctaaccgccaagcctacaggacgttgcttgtttcagctcctggccttggtcagtacatctctggtgccatcctctttgaggaaaccctctatcaaaccacaattgatggcaagaagatggttgatgttcttgt

SEQ ID NO: 40377 - DNA, 383 bp, Gossypium hirsutum
  Clone ID: LIB3165-052-Q1-K1-D9
caaaatcagatgcttcacaatggcctctacaatcatggctgtttctttcccatcattcgccggtgaggcagagaagttctgcccttccacccctgaaatcctgggaactggccgcgtttccatgaggaaaaccaccaatcctgttccttctggtctcccatggcacggacctgaccgagttttgtacttgggtccactttccggtgagccaccatcttacttgaccggtgagttccctgtggactatggctgggacactggtggactctcagctgatcccgagacctttgctaagaaccgggagctcgaagtcattcactgcagatgggccatgtagggagctctcgggtgtgtttcacctgagctgccggctaggaacgggg

SEQ ID NO: 40378 - DNA, 429 bp, Gossypium hirsutum
  Clone ID: LIB3165-052-Q1-K1-E1
agccttccgttcaatattgggaattattccctggtttttaacttccaaacaacaataaataacccgtcttcgctaccatcgtccaccactaacgaccgtccgtgtcagtgctgcaaccgtcactacaaccaccgggatgccagaccaccaccacccttcactctaaattactggtggaggagctgatcgctttatccctgctttaacacccttaaccttgcttacaaacctttccgcatgattgggtggaaccgtcatgttgagaccatatttgctgccttcttacgtactgtccccgaagataagtaccgccgtgtgtgcctgcggacccaatacaatggcaccatagccttggattgggtctatggcgaccaccggaggtagtcttgcgactctacgattctcattttactgccagcgctaactgga

SEQ ID NO: 40379 - DNA, 436 bp, Gossypium hirsutum
  Clone ID: LIB3165-052-Q1-K1-E10
ctcaaattcagataacaatttcacagttgttttcttcactctctctcagccatggctgcggccatctccaccgtcgccgccgctgccgccgccaaccgagctctgggagtgtcagtcccaacctcagctttcatggggaagaaagtgagctcgagattcaacaacaccaggcaggttccttcgggaagttttaaggtgatggcggccgaaaaagagatagacgaagagacacagaccgaaaaggaccgatggaaagggttggcttacgatatttcggacgaccaacaagacattactcgagggaaagggatggtggattccttgttccaagctcccatgaatgatggaactcactatgctgtcatgagttcctatgaatacatcagccaaggtcttaaaacgtacaatttggacaacaacatggatggtttctaca

SEQ ID NO: 40380 - DNA, 402 bp, Gossypium hirsutum
  Clone ID: LIB3165-052-Q1-K1-E11
gagagctcccttcatacgttactagattatcttctctctcttctcttaccatggatccttacaagtttcgtccttcaagttcctttgattccccgttctggaccaccaattctggtgctccagtttggaacaataactcatcacttactgtgggagcaagaggtccaattctccttgaagactatcatttggtggagaagctagctaatttcgatagagaacgcatacctgaacgtgttgttcatgctagaggagccagtgcgaaagggttcttcgaggtcactcatgatatatctcagctcacatgtgctgatttccttcgtgcccctggagtccagacccctctcattgttagattctccacggttattcatgaacgcggtagtcctgaaactttgagag

SEQ ID NO: 40381 - DNA, 383 bp, Gossypium hirsutum
  Clone ID: LIB3165-052-Q1-K1-E12
aattccccaaaatttgtttcagtaatggctgcctcagttatggcttcttcagttaccctcaagccttcattcaatgttgagaaacctggtgtaagaggggttccttcccttgctaggtccccttcttctttcaaggttgaagccagtggtggcaagaagatcaagaccgacaagccttacggaatcaatggtggtatgagcttgagggatggtgttgatgcctctggaaggaagggtaagggaaagggtgtttaccaatatgttgacaaatatggtgctaacgtggatgggtacagtcctatctacaacaccaacgactggtcttccagtggtgatgtttatgttggcggtactaccggattggcaatctgtgcggataccct

SEQ ID NO: 40382 - DNA, 449 bp, Gossypium hirsutum
  Clone ID: LIB3165-052-Q1-K1-E2
ccacgcgtccgcccacgcgtccgcaatacctcccataatcacctttgatctttgcacttaccttcaatcaggtgcgaattttgttgctgtcgttatatattttctcgagaagagcacccaaaaattccaagaaaagttgcatccctgaaccatctggttcattgccactcatcggtcacctccatctactaggtgggaaaaagccaacctgcaagaagctagcaacaatggcagacaaacacggcccactctactcactcaaactcggaacccaccgagtgttggtggtgagcagttgggaaatcgccaaggattgcttcacggacaatgaccgaaccctggctactcgagctagcatcgctgctgggcggcacatgggttacaacaatgcggtcatggcactcgccccatacggcgaatattggcgtaacatccgtaagatagccacg

SEQ ID NO: 40383 - DNA, 371 bp, Gossypium hirsutum
  unsure (1)..(371): unsure at all n locations; Clone ID: LIB3165-052-Q1-K1-E4
tcaataataataaatgggaccttggaccggcgggaaataaacggaagatatagttagctatagcatacactactagtacccactactagcaatggcttcctcaatgatctcatcggctaccattgccactgcctctccggcacaggctaacatggtcgctcctttcaccggcctcaagtctgcctctgctttcccagtcatcangaaggccaacaacgacattacttctctcgcaagcaatggcggcagagtgcaatgcatgcaggtgtggcctcctactggaaagaagaagttcgagactctctcatacctccccgatcttacacccgtgcagttggctaaggaagtagattaccttcttcgctcaaaat

SEQ ID NO: 40384 - DNA, 437 bp, Gossypium hirsutum
  Clone ID: LIB3165-052-Q1-K1-E5
cccacgcgtccgcccacgcgtccggtggagtcagtaaacactcctccagcataagcaaatgggtgagctaacaatttcgggacactgaattatgccgttaggccatttaccagaaagagaactttggggagggatgctcaaaatctgcttgattatttcaagaagatgcaggcatagaaccctggtttcttttatgcaatacagttggatgatgataatcaaatggctaatgcattttgggctgatgcaaggtcaaggacagcctacacacattttggtgatgctgtgaaactggacaccagttacagagtaaaccactatagggtgccatttgctccattttcagggatgaaccatcatggccagaccattttgtttggttgtgctgtactactagatgattccgaggcttcttttgtttggcttttcaaaacatt

SEQ ID NO: 40385 - DNA, 383 bp, Gossypium hirsutum
  unsure (1)..(383): unsure at all n locations; Clone ID: LIB3165-052-Q1-K1-E6
ggatagccttgtgtcactccccacctcacactgtcactcacctcttttcacctcaaagccgcggtcttcctccgccaccaccaccacctncacctccgtttccttctcccttccaccaccacctcaacctcccgaacctaatatccgccgccccaagtccatcaatccctcccccaaacccaaaatctcttccaatcccctcaaaaacttctccactactactcctactcctactactaccaataacaatttttctcatgtcccttctcctggtgaaactacaagaaccactcaatctcttgtctccaaacttcgcctctctagcaaactcttnccgcctnctccacctncgnctnttctacatgatacccgaaaggcaactc

SEQ ID NO: 40386 - DNA, 397 bp, Gossypium hirsutum
  unsure (1)..(397): unsure at all n locations; Clone ID: LIB3165-052-Q1-K1-E7
gactggccttgtgttactccccacctcacactgtaactcacagctttacacctgacagtggcactcttcctacgtcgccaccaccacactaacctgcggttgcttttccgtgccaacatgacctcaaacttacgaacctaatatgcggcggcccaagtacaacaatccgtccgccaaacccaaaatctctttcaatctccctgagagactactacactactactcctactactactactaccaataacaaggtgcttaatgtccctacctatgccgaaactacaagaaccagtcaatctcttgtctacaaacatggcctgtctagcaaactataaccgcctgctccagctccgnctgttctacatgatacccgaaaggcaactgaaatttctgaacc

SEQ ID NO: 40387 - DNA, 433 bp, Gossypium hirsutum
  Clone ID: LIB3165-052-Q1-K1-E8
gagagccttttttgtgtagcgattctcagttagtcttttctttaagcttacagcttctctgcagagttttataatgggtaaggagaaggttcacatcaaccttgttgtcattggccatgtcgactctggcaagtcgaccactaccggtcatttgatctacaagcttggtggtattgacaagcgtgtgattgagaggttcgagaaggaggctgctgaaatgaacaaaaggtcattcaagtatgcttgggtgcttgacaagcttaaggctgagcgtgaacgtggtatcaccattgatattgccctgtggaagtttgagaccaccaaatactattgcaccgttattgatgcacctggacaccgtgactttatcaagaacatgattaccggtacctcacaggctgactgtgctgttctcattattgactcgaccact

SEQ ID NO: 40388 - DNA, 406 bp, Gossypium hirsutum
  Clone ID: LIB3165-052-Q1-K1-F1
gttaaaaaataaaaggccatggttcctttacaattatttacaaaccccattcttaagccatcaatcaaacattccctctctctttgatctttaagaatcaagatcctttctttttctttcactaaatcgacgttaacccaatcttcccaacacaatcaggccattgaattctctggtgtttgaattgaatatctcatatatggcttacatccctccacacaagcgacattcgaaggatgcggagagtccaacaccaactccagagtccctgattcccaaatttgaaagaaatgtacagttaagagcttcaaacaccaaagctgataggagcggaagaatcatatattcaaactatgccatctctagatggtttggctgtggtttggatgatggaaacggggacaca

SEQ ID NO: 40389 - DNA, 440 bp, Gossypium hirsutum
  Clone ID: LIB3165-052-Q1-K1-F11
cccacgcgtccgttttaactggttttcatggaatctttgtggtgtgggaagccatagcttctatttttgcattctcaccctctgttgtactatgaaagccttcccttttcctccaatcaccaaaaggagatgctttttaatggtgtctttatcttagttggaagttgctgacaggcacataaccctaactctaaagccccgtatctccctttagttaaaaagctgatctacaagaacccaatgaaagaaagcataagccctcactctctatatatcagctgcagctgcgcccatctttgcttagccaaaccccaagtttcaagcaaacaagccaagggattttaattttgtttcattgatcagcagcaaatgagagaggtgaactttgagtaactctttttatataagtttttggtgatgatgcaagctaaaacagcaat

SEQ ID NO: 40390 - DNA, 434 bp, Gossypium hirsutum
  unsure (1)..(434): unsure at all n locations; Clone ID: LIB3165-052-Q1-K1-F2
gttcttgaaaagcaatggagagcaacctgttcactggaaaagagcatcaagtatggatgaggtgctccgggaggcagatgtgataagtcttcacccggtcttggataaaaccacctatcatctgatcaacaaagaaagccttgcaacaatgaagaaggaagcaatacttgtaaactgtagcaggggcccggtgattgatgaagtagctcttgttgagcatctgaagcaaaatcctatgttccgagttggtcttgatgtctttgaggatgaacctttcatgaaacctgggcttgctgagatgaagaatgctgtcatcgtaccacacattgcttctgcttccaagtggactcgtgagggaatggcaacgttagctgctctaaacgtcttgggcaagatcaaaggatatnccaatttgggtgattcaaaatgcgtcg

SEQ ID NO: 40391 - DNA, 445 bp, Gossypium hirsutum
  Clone ID: LIB3165-052-Q1-K1-F4
agccttccgcaagggcttccacttaagttgtttaaatggctctgcccttagctttagctacccaaaacagggtgccaagctctgaggcattctttaagccacttccggtgaagccatggagggcaatgggcggtgttaaaagacccaacggaaggctccaagtcaaggctggtgcttcttcgttcaaggaaaaggcggtgacggggttgacagcggcagcactgacgacatcgatgatgatgccagaggtggctcaagcagctgatggagtcagcccatctctcaagaacttcttgctcagtatagcggccgggggtgtggttctggtcgccattgttggagccgtaattggtgtgtccaacttcgatcctgtcaagcggagctgagctcatatatttctctctcatgctgtacatcttttttctcgtcttccctgtttaataat

SEQ ID NO: 40392 - DNA, 443 bp, Gossypium hirsutum
  Clone ID: LIB3165-052-Q1-K1-F6
aaagaatggcgtcatcatctagcagcggtctaactttcaagcttcatcctctggtaatcgttgacatatttgatcactacactcgtgtcaagtcccagttgaacccaccttctctcaccttcaccttcgccaccgtcaatggcgtcgaaaaccatcagcaagctcctcgagtctatggatgtgtcatatgctttcagaggggccgcaccgtctagatcttcaacagcttcgagcttctctacgatccctccacccactcccttgaccgccccttccttaagaagaaacacgtgctttatatgaaggttttccccatttttatatacttattatggtactccactgggagcgatgccctagaatcctatatgcacattcatagagcctcgattgatattaatgaaagtcctctctatgttctgctcaatcctgcaatcaatccc

SEQ ID NO: 40393 - DNA, 426 bp, Gossypium hirsutum
  Clone ID: LIB3165-052-Q1-K1-F7
cttgtcttccagagttgcattttagacaattagacagacataaaggaaacagagaacgaaattatggcttccatgtctttctctgcaactattccgtctcctcttcttgatttttcccaaacgaaaaagaaccaagttttttcttcatcatggccttccatgtctttctcaatcccttccatcaaatcctcgcttgggtcttcaaaatcagcctttttccaaaatgggttctcgttgctatcgcttactgcttctgggtttgtctttaactctagatcttcaggcatttatgcaagagcagctacggataaaaccctatacgactacacagtaaaggatattgatgggaaggatacccctcttagcaaatttaagggaaaagttcttttgattgttaatgttgcttcaagatgtggtttgacaaca

SEQ ID NO: 40394 - DNA, 430 bp, Gossypium hirsutum
  Clone ID: LIB3165-052-Q1-K1-F8
cccacgcgtccggaagaaggttcatcgtcgcctttggcgatggaaatgcgagacatcggcgatctgccgaagaacgccgccaactacacggcgttgacgcctttgtggttcttggaacgagccgccaccgttcatcctgctaggaaagcggtggtccatgggtctcgtacttttacttggctgcaaacttaccagcgctgccgtcgcttggcttctgctctctctaacctctccgtcggcttcggtagcacggtagcagtaatcgcgccaaacgtccctgctgcatacgaagctcacttcggaattccaatgtctggtgctgttataaaccctgtcaatattaggctaaatgcatcaaccgttgcattccttttgggtcactctcaatcagccgtcgtcattgtcgaccaagagtttttcactttggcag

SEQ ID NO: 40395 - DNA, 431 bp, Gossypium hirsutum
  Clone ID: LIB3165-052-Q1-K1-F9
cagaaacgttaggtgccgaagcgacgaggaatctcaaagatacaaagataacgagtgactcgagtgagcgagagatgccttctgcagatgtggcattggctcctgaggtttctgatgattctaaaaatgagcagttaatggctgcatatcctcttcatagcaaccatgaggttccagatgttgaaaattcctccatggtctgtgatgatcaaaccgattcggttaaattgcctaacggggacgatgttgcttcaaagattactgatccgacttcaagtcaaatggaggcttcaaaaatcatgcctggtttaaaccaagtagtagaaaaactccatgcaaatgcaggccaagcacaggtcctggaaaaaatagacattggttcggtccccgggattcagtttcgcaattagggacaacaaggaatggaagga

SEQ ID NO: 40396 - DNA, 436 bp, Gossypium hirsutum
  Clone ID: LIB3165-052-Q1-K1-G1
gcaaaaggcaaaaaagccatgtcaaagctggtggtgttgcagccaacaaagcagcctcccatctccctcctctcttcctctctttcccacttcaatggcaccaagctctgccaaatccagtacaaaagaaaggtatatcagccaaaaggtgcattgcatgttgcagcatccagcaccaagaagattctcataatgggtggcactaggttcattggtgtgtttttatcaagactccttgtaaaagagggtcatcaggttactttgtttactagaggtaaagcaccagttactcaacaattgcctggtgaatcagacagtgactacgctgagtttaaatccaagattttgcatttgaaaggagatagaatggacttcgattttgtgaaatccagtctttctgcagaagcctacgatgttgtgtacgacataaatggac

SEQ ID NO: 40397 - DNA, 425 bp, Gossypium hirsutum
  Clone ID: LIB3165-052-Q1-K1-G11
tagaggtatgggactgctgtagtggaggtatggggctgtttcttggttgtggcgcaaaacgaaaagagggggagacctaaagtttctggagcttgttaagggaatggccctattgggcttgtttcgatttgggctcatgatgggtatcgggctagggttaatgtatttgggctgctttgtaccaaagacctggactgtggtatacatatttttttgtgattttttttttgtattttcgttttggttcttgtctttatacgggccaggcaaatttggcccattacatctatcatatcattcattatacattctaactactaaaaatagtaattacattgtattaaatcattaagcatagtttatagaaatacaaactaaatttctcgagtttactcgaaaaaaaaaaaaaaaaaaaaagggcggcc

SEQ ID NO: 40398 - DNA, 337 bp, Gossypium hirsutum
  Clone ID: LIB3165-052-Q1-K1-G12
gaagccatggccagcctgagaatggcttactcaactcctgtaatctacattggtgagagatgatccttttttggcaaacccagactcaaacaaagaccacaactgtgccttccaaaacttcccacaacaaacttcttgataatctcacagatgccctgactgtatccaccactctcaaatctatatgaatattgacactcaccactttatccttggccaacccttttcttgctgcaaaaatagaaaaggccgatcttttgaagctcaacttaaccctgcccatcatgatgaaccaactcttaggcctcatgattgctcttgacatggtctactttac

SEQ ID NO: 40399 - DNA, 437 bp, Gossypium hirsutum
  Clone ID: LIB3165-052-Q1-K1-G2
cgattctgaaattttgcctgccgctccatctctacatcacaggaatggcgacagatgttgcagcccccgccaccgccgcacccaaagacccaacccaacctcaccttgaagtaaaactcttcaaccgctggagcttcgaggaagttcaggttgctgatatctccttgagtgattacattggtgtccaagcttcgaagcatgctacctatgtgccacacactgctgggaggtactcagttaagcgtttcaggaaggctcagtgcccaattgttgaaaggcttacaaactcacttatgatgcatggccgaaacaatgggaagaagcttatggcagtcaggattgtgaagcatgctatggatattatttatctcttgactgatcagaacccaattcaagtcattgttgatgctattatcaacagtgggccacgtgaagat

SEQ ID NO: 40400 - DNA, 448 bp, Gossypium hirsutum
  Clone ID: LIB3165-052-Q1-K1-G3
gaccaacccttccgcggccgcgtgggtgatgttgaaaatcacccaagtgttgttgccataaacgttagtcctattgaatacggacatgtgctgttgatccctcgaattcttgaatgcttgcctcagaggatcgaccgtgagagctttttgcttgcgctctatatggcagctgaagctgggaatccgtactttagattgggttacaacagcttgggtgcatttgctacaatcaatcacctgcacttccaggcttactacttggctgtggcctttcccattgagaaagctcctaccaagaagataacctctctgaatgatggagtcatcatctcagagcttttaaagtatccggtcagaggtgttgtctttgagggtggtaacactcttcaagacttgtctgacgcagtgtctgatgcgtgcatttgccttcaagataacaacatagcat

SEQ ID NO: 40401 - DNA, 325 bp, Gossypium hirsutum
  unsure (1)..(325): unsure at all n locations; Clone ID: LIB3165-052-Q1-K1-G5
cggnccggaannccggggcgaccaagccttccgcaaacgggtaaaggaaattacgttcttggttcaaaatgggaacctaacccggaaaaccatggggaagagggattttagaactgtaaattctcaagcttaccgagttactaaaatggacacatgtgtaacatgtttgagctgcccatgtttggatagcacagactcgtttcagatgctggaagatctggtataactaaataaggcatacacaattgcataaattataattagtggatccaacaacatgcaacaagagctgtgcataaaccgcattgagaaaaagtcttcatac

SEQ ID NO: 40402 - DNA, 71 bp, Gossypium hirsutum
  unsure (1)..(71): unsure at all n locations; Clone ID: LIB3165-052-Q1-K1-G6
acccacgcgnccgcccacgcgnccgcccacgcgnccgcccacgcgnccgcaaaaaagaaaaaaggagaaaa

SEQ ID NO: 40403 - DNA, 431 bp, Gossypium hirsutum
  Clone ID: LIB3165-052-Q1-K1-G7
gaaaaatggcttctgcttccgctactctcctcaagtcttcacctattatcgacaagtccgagtggattaagggccaaaacctccgccacccttcggtttgttttgtacggtcacaccctacatcggccgcctttaccgtccgtgctagttcatatgccgatgagcttgttaagaccgcgaaaactgttgcatctccaggtcgtggtattttggccatggatgaatcaaatgctacatgtgggaagcggcttgcctcgattggtctcgagaataccgaggcaaaccggcaagcttaccgtacccttctcgtgtctgcccctggcctcggtaactacatctcgggagctatccttttcgaggagactctctaccaatctaccatcgatgggaaaaagatggtcgatgttcttgttgagcaaaatattgtccct

SEQ ID NO: 40404 - DNA, 434 bp, Gossypium hirsutum
  Clone ID: LIB3165-052-Q1-K1-G8
atacattttctgggatttttggagtagaactgcttgaaagtagaaaagcatggcaacagtgacagcttcacactttgtttcgaggatttcccatggagctgaaactaaggccaatctgagtcagacagggttggggaatcaatccatgactcacaatgggttgaggtttttaaacaaggtagataggttgcagatgaggaccaatgcaaaggctgttgctaggaacgcagtgaaagatgaacacccaactgcaaatgacaagctatctgggaaaattatatgtggaacagggatgaatattatctttgtgggagctgaggttggtccatggagcaaaactggtggacttggtgatgttcttggcggacttcctcctgcaatggcggccaaaggacatcgtgttatgacagtgtctcctcggtacgaccagtaca

SEQ ID NO: 40405 - DNA, 434 bp, Gossypium hirsutum
  Clone ID: LIB3165-052-Q1-K1-G9
gaaacacagtttctttctcacttgtcttccccccctcacccctcaatggctgcaatcacgtaatttcttaactaagccacctacttccgatcttcacttcaccccaaaactcacttctctttgctctcatgcttcttttctaccatcccttgcgactaggcccagatctttttcaacaaagctaggaacaagcacaagctctcgcttcattaccaaggctacagctgctcctgggaccaagaatgctccgagtgatgagcgagttcagaaggttcacagcattgaggaattcgatgaagctctcaggaaggctaaaaacaggcttgttgtggtggaatacgccactagcttcagctatcatagcagtaaaatttacccgtttatggtagaccttagcaggacatgcaacgatgtcgaattcatcctcgtgatgg

SEQ ID NO: 40406 - DNA, 445 bp, Gossypium hirsutum
  Clone ID: LIB3165-052-Q1-K1-H1
agccttccggagtcaaggtaataattaataaccaatggttcctgtaaaattggaatctccggttggccggcttttggcacaaatattgagaactcatcctcatttattgcctgcggctgttgatcaacagctcgataaccttcaaagtgataaaaatgaccagacagaagaaactccacaatctcaagatctcctctacaagagaatagctgaagttaaagaaaaggagagacagaaaacactggaggaaatcatatattgtttgattgtacagaaatttgtcgacaacgatatttcaatgattcctaaggtaacggaaacttcagaccctactggacgagtggacttttggccaaaccaggaacaaaaactggaatttgttcattctcctgaagcatttgaaatgattcaaagccacttatcccttgtgctcggagaccgaatg

SEQ ID NO: 40407 - DNA, 424 bp, Gossypium hirsutum
  Clone ID: LIB3165-052-Q1-K1-H10
tcgcaccttgtaattgtcttgaaccaattctgtttatctcttgcatactatcaaatggggggtactgcagcaatcaccactctcccccagttcagtgggttaagacccaaagtttctactgctccagttaggagcctggcagcagttcaaccaatgaggcgcaaggggaagggtgctctccgtgcacgatgtgatttcatcggatctcccacaaatttgataatggtgactacaacaaccctgatgctgtttgctgggaggtttgcgttttcttcatcaccaaacagaacagccacctcttgattgaagcttgaagtaagggactcaagcttgcagactgaagaccctgctggttttacacttgctgacactttggcttgtggtgtcgttggccatatttttggtgttgggatcgttcttgggc

SEQ ID NO: 40408 - DNA, 372 bp, Gossypium hirsutum
  Clone ID: LIB3165-052-Q1-K1-H11
ctagtacccactactagcaatggcttcctcaatgatctcatcggctaccattgccactgcctctccggcacaggctaacatggtcacccctttcaccggcctcaagtctgcctctgctttcccagtcaccaggaaggccaacaacgacattacttctctcgcaagcaatggcggcagagtgcaatgcatgcaggtgtggcctcctactggaaagaagaagttcgagactctctcatacctccccgatcttacacccgtgcagttggctaaggaagtagattaccttcttcgctcaaaatgggttccttgcttggagttcgaattggaggagggattcgtgcaccgtaagtactcgagcttacccacgtacta

SEQ ID NO: 40409 - DNA, 447 bp, Gossypium hirsutum
  Clone ID: LIB3165-052-Q1-K1-H12
tcgcccacgcgtacgaaacaaaccaagtcaacctaaagccttaggcaccatggcaacctctgctatccaacaatctgctttcgttggccagaccgctttgaagcagtccaatgagctcttacgcaaagtcggagctttcgatggtggtcgtgttaccatgcgcagaactgtgaaaagtgcccctaccagcatctggtacggccctgaccgcccaaagtacttgggtccattctcagaccaaatcccatcatacctgacaggtgaattccctggtgactatgggtgggacactgctgggttatcagctgacccagagacatttgctaagaaccgtgagcttgaagtgatccactgcagatgggcaatgcttggtgcccttggttgtgtcttccctgaaattctttcaaagaatggagttaagttcggagaggcagtttggttcaaagc

SEQ ID NO: 40410 - DNA, 432 bp, Gossypium hirsutum
  Clone ID: LIB3165-052-Q1-K1-H2
catatcttcagtgtctcactctctccgtgcttcactcccgcttctcctttccctcttcaaagaaaatgcgtgagatccttcatattcaaggtggccaatgcggcaaccaaatcggagccaagttctgggaagttgtttgtgctgagcatggcatagatgcaactgggcgttaccaaggagacttggatcttcaacttgagcgaatcaatgtctactacaatgaagccagttgtggtagattcgttcctcgtgctgttctcatggatcttgaacctggaaccatggacagcatcagatctggccccgtcggtcagatttttagaccagataacttcgtttttggtcagtctggtgctggtaacaactgggctaagggccattacactgaaggtgctgagttaatcgactccgtacttgatgttgttcgtaaag

SEQ ID NO: 40411 - DNA, 408 bp, Gossypium hirsutum
  Clone ID: LIB3165-052-Q1-K1-H3
cttccgccaacccgtccgcccacccttccggggaagtattgagggggttaattattggttgtttttggataattactgaggtctccgccgctgcttggcgtggaggaggaaggggttcaaagcaatgttactttactcggttcttcaggctcaatggaaagtgtgtgccagaatagtgctgaattgaaggaacggaactacatgggcttgtctgattgttcttcagtggatagctctgttttttcccctccctccgacgaaagaaaggctagtttgaatctaaaggcgactgagcttaggctctgacttcctggattgcagtcgcctgacagaaatccagagctttgcttgttaaggtcttctcagcttgatgagaagccgcttttccctttgcatccttcaagtgat

SEQ ID NO: 40412 - DNA, 454 bp, Gossypium hirsutum
  Clone ID: LIB3165-052-Q1-K1-H4
cttccgttcaaattcagataccaatttcacagtggttttcttcactctctctctcagccatggctgcagccatctccaccgtcgccgccgttgccgccgccaaccgagctctgggagtgtcagtcccaacctcagctttcatggggaagaaagtgagctcgagattcaacaacaccaggcaggttccttcgggaagttttaaggtgatggcggccgaaaaagagatagacgaagagacacagaccgaaaaggaccgatggaaagggttggcttacgatatttcggacgaccaacaagacattactcgagggaaagggatggtggattccttgttccaagctcccatgaatgatggaactcactatgctgtcatgagttcctatgaatacatcagccaaggtcttaaaacgtacaatttggacaacaacatggatggtttctacatcgctcctgc

SEQ ID NO: 40413 - DNA, 307 bp, Gossypium hirsutum
  Clone ID: LIB3165-052-Q1-K1-H5
ccgatacctacttgatacatgtgcaaggccaaatatccaaagacaatagaaggctattcctccagacccaacaagatgctctatttttgcccggaaaacaaactcgaggatggccagaactcttgccgactacaacatccaaaaggagtccaccctccacctagtccttcgtctaaggggtggcatgcacatatttgtgaaaacccttacgggcaagaccatcaccctcgaggtggaaagttctgatacgattgataatgtcaaggccaagatccaagacaaggaagggatccctccagaccaacag

SEQ ID NO: 40414 - DNA, 435 bp, Gossypium hirsutum
  Clone ID: LIB3165-052-Q1-K1-H7
cccacgcgtccggtcgacggtttacatgaacggttggtgcctgaccttctcttcttgctgcaccaccacctgctttttttccgctcgtctacgacctacattgcggccttcggtcgtcgctagccttaactctcctacttctgctacgactctgatccaagaccgcccggttttcgctgcccctgttcctttgctcaccccgagagaagagatgggaaacaagtcctacgacgaagccattgaagctctcaagaaacttctcagtgagaaaggagaactgaaagctgaagcagctgcaagggtagatcaaataacagcagagctaaacacaacatcagctgacggcaaaccatgtgactcttctgttgagagactgaacgaaggcttcgtttacttcaagaaagaaaaatatgaaaagaatcctgctctgtatgg

SEQ ID NO: 40415 - DNA, 429 bp, Gossypium hirsutum
  Clone ID: LIB3165-052-Q1-K1-H8
catgtctcctcaacccgacccatgcctgactccatttgtagcatctgctggcgaatgggggccttcttgctgcacttccggagaaaacaattgctgaggaaacgccttttgcttcttattctggtctccagatcaagcgtttgttttctcttttgaatatccgatttgagtttttggatgggggaaaattataacgagctgaaaaaatcaacggcttcacaaaccgttctaaccgacgttgttttgggctgggtgattctatacatcgacgacccggaggaccggagcgccgtttccctcgtttgtcggcgttggtacgagctcgacgcgttgacacgtaagcacgtcacggttgcgctttgttacacgacgagtcccgaacggttgctgcggccgttcccacacttggaatcgttgaaatcgaaagga

SEQ ID NO: 40416 - DNA, 429 bp, Gossypium hirsutum
  Clone ID: LIB3165-053-Q1-K1-A1
gttgccaaaaggattccctctctctaatcttcttctgcaacttctttgggaaggttttcaagttggggaagaagaattaatagctttagtactgctgctgctgcgattgatgaacctatacatccatctattcaagtagatcatactcagcttctcatcaatggacaatttattgatgctgcatcaggaagaaccttccctacagttgatcctaggacaggagatgtaattgctcgagttgcagaaggagatctcgaagatgtaaatcgtgcggttgctgcagctcgtaaagctttcgacgaaggaccatggcctaagatgactgcttatgaaaggtcgcgtataatgttgcgtttcgccgatttgctcgagaagcacactgaagaggtagcgaaacttgaaacttgggacaatgggaagccttatgag

SEQ ID NO: 40417 - DNA, 335 bp, Gossypium hirsutum
  Clone ID: LIB3165-053-Q1-K1-A10
tctaaaatcttttcaaaaatgcaaatcccttctactgttacccaagaatctggccctgctgcctttgatctcgtcacacaattgggtcacttagcattcaacaagagctttcgcagctcaaacactgatgggttttgttcatttaagccaaatcaccgtgtatttttcaggctttatagactcaatttctcagaataagcgcttagttgctgctgctgctttactcagtatgggtgctcgtaacatcgattcttcaagcgttaggataattctgaatgatttttacagagcaatcaagtttcactgagatagaatcccaattggatctgctttta

SEQ ID NO: 40418 - DNA, 305 bp, Gossypium hirsutum
  Clone ID: LIB3165-053-Q1-K1-A11
tctaagaaacgtaaacaaaatccttcaagaaaacttttggagatggaacttgctgggagatgcgtgccaaaatatcttcttctttgcattttagcgttggttgaaggaggaaggagatgaagagttgtgagctcttgtatgtagcggcgacaacattttgagaatcggaccaagccagattgtgctgggattgtgacgctgtagtccacggcgcttacttccttgaggcaagacatgtgaggttgttgttctgtcacgcttagtattatcttactccgtggatagtcactggtttcaagcttggt

SEQ ID NO: 40419 - DNA, 240 bp, Gossypium hirsutum
  Clone ID: LIB3165-053-Q1-K1-A12
tatgttaggtttcttttttgagtggtttttattttgcccgtcttgctttctgcaggtacagggttaaaccatcaacccttctgattttggttgaaccaacttatcatctggatttaccctttatcagatatgctagaggaggctattatggaatacatcggcactgtcactatctgttcgcatgaccgatactttatttggcagatagtcaacagagtactgggagtaaaagatggtcat

SEQ ID NO: 40420 - DNA, 433 bp, Gossypium hirsutum
  Clone ID: LIB3165-053-Q1-K1-A2
gtcgcttcttttgttagaaagacgttagtagctgaaaattttgaacgttactattaaggaaggataatgctatccttgcgcttcgctattcctaccgcgaatacattaactccgcccaagattaaaccaaaaccgggtttagtagtacaaaccgcttggaaccaaacggacctttttccttctcttcccaaacgaaatgattataagctacaagcagctaccacggacttatctgtggcgggagatataccggcggaggaggtggtggagcttccggcggagctgagcagagagttgatgccgaagcacgtagcggtgataatggacgggaacgggcggtgggctcggcagcggggattggcgacatcagcgggacacgaagccggtgtaaaggcgttgagggagctggtcgaactatgttgccagtggggga

SEQ ID NO: 40421 - DNA, 430 bp, Gossypium hirsutum
  Clone ID: LIB3165-053-Q1-K1-A4
gggaaatggcctcatccactgtcttcaccggtgtcagcctcttcaagtccaaaaactccactaaactcatcacttcaactcggttctccgactccaagcaacaactcagcctcaactcagtgaaatgttgctcaaaaacaaccgccgcaacaacggaggaggcgactggtcgtctagtcacggtgaagaacgggaacgattcgctcgaaatatgtcgagtccttaacggcatgtggcagaccagtggaggttggggcagaatcgaccgagacgccgccgttgaagccatgcttcgctacgctgacgccggtctctccaccttcgacatggccgaccactacgggcctgcagaagatctttatggcatctttatcaatagagttcgtcgggagcgtccaccagagtacttggaaaaagtcagaggtctcac

SEQ ID NO: 40422 - DNA, 415 bp, Gossypium hirsutum
  Clone ID: LIB3165-053-Q1-K1-A5
gaattaattttacaccccacaccagctgttaggcacgttttgatttgcgcaattgggatccattttttccaacaagcgataggcttggagtctgttgttttgtacagtccaaggatttttgaaaaagctgggatcacatcgtcagatcataagctacttgccaccatggccgttggattttccaagacaacctttatcttagtggccacatttttactagacaaaatcggacgacgtccgttgctcctcatcagttctggcggcatggtcgttatattggctacactagggctttcattaaccgtcattggtcattcggacaagaaacaaacttgggccgtcggattgtgcattaccatggttttatcttctgtggcagtttttttcgatagggatgggacctattacgtgggtt

SEQ ID NO: 40423 - DNA, 286 bp, Gossypium hirsutum
  Clone ID: LIB3165-053-Q1-K1-A7
actcgtctttcgtagacaaatcatttcccaaacggggggggtttctctgggccgtggaactctctcttctctcccattgccagctaagtccgaggaagttttgtcggaatgggaaagagtctaccttcccatcgatcccggtgctgtccttctagacatcgcctttgaccctgatgacttaaaccatggatttttgctggggacgaggcatactattttggagacaaaagatgggggaaatacatggactcaacgttcaattctctttgctgaggatgatgacttc

SEQ ID NO: 40424 - DNA, 428 bp, Gossypium hirsutum
  Clone ID: LIB3165-053-Q1-K1-B1
ctctatcccagacttcttgtacttcgactgcatctttagactttgaaattgctatttctcaacttcccctcagagatttcactcatcagatttgtgcttggggttttcctcatctcttagttaaaaccatggattttagccatttaaatcgtgggcagatgactctgatgggatctgcgttttgtgtggtgctttcgttgcatttcacactgcagcttgtgtcacagcatcttttttactggaaaaaccccaaggagcagaaagctatacttattattattcttatggctcctatatatgctgctgtctcctttgtgggtttatcggatattagaggaagcaaagccttcttcatgtttctggaatctgtcaaggaatgttacgaggcttttgtgatcgctaagttcatggctttgatgtatagttac

SEQ ID NO: 40425 - DNA, 420 bp, Gossypium hirsutum
  Clone ID: LIB3165-053-Q1-K1-B12
gcttgtgggatggggaggaaacaatggttcaaccctcaccggaggtgttatagctaacaaagagggtatctcttgggctactaaggacaaggtacaacaggctaattactttggttcattgactcaagcatcaacgatccgagttgggtcctacaatggagaagagatttatgctccatttaagagtcttcttcctatggtgaacccaaatgatattgtgtttggaggatgggacattagtgacatgaacctatctgatgcaatggctagggccaaggttttcgacattgatctgcaaaagcaactgataccctacatggaatccatggtcccactccctggaatctacgatcctgatatcattgctgctaaccaaggtgaacgtgccaataatgtcatgaaggggaccaagaaagaaca

SEQ ID NO: 40426 - DNA, 428 bp, Gossypium hirsutum
  Clone ID: LIB3165-053-Q1-K1-B2
cccacgcgtccgtaaatatgttcctcctcatgttaacatattttattgtctaggaggaattacgcttacttgttttttggtacaagtagctacaggatttgctatgactttttactatcgtccaaccgttactgaggcttttgcttctgttcaatacataatgactgaagctaactttggttggttaatccgatcagttcatcgatggtcggcaagtatgatggtcttaatgatgatcctgcacgtatttcgtgtctatctcactggtggttttaaaaaacctcgcgaattaacttgggttacaggcgtggttctgggtgtgttgaccgcatcttttggcgtaacaggttattccttaccttgggaccaaattggttattgggcagtcaaaatcgtaacaggcgttccggaagctattccggtaatag

SEQ ID NO: 40427 - DNA, 429 bp, Gossypium hirsutum
  Clone ID: LIB3165-053-Q1-K1-B3
atggattccctcacttgcacggcctctgacctcgtccccctcctctcctcctccgccaatgcaaccgccctcgcctccttcctttgcgcccgtttctccaccatctccagccaactctctgacgccactcacgccgttgacaacacttacctcctcttctccgcttacctagtcttcgccatgcaactcggctttgccatgctttgtgctggctctgtcagagctaagaacaccatgaacatcatgttgactaacgtccttgacgctgcagccggtgctctttcttattacctctttggttttgcctttgcctttggtgccccttctaatgggttcattggatgtcatttctttggtcttaaagcatacccttcacccgatggtgattataggttttttctttatcaaagggcttttgctatagctgct

SEQ ID NO: 40428 - DNA, 423 bp, Gossypium hirsutum
  Clone ID: LIB3165-053-Q1-K1-B4
gttttaaaccttcccttgcttgtataagcatacctaaatatagcaatgacaacaacaacctcagctacactctctccacccacattggctgctgccagtgttggcaatcccaggaggagaactaaagttaatgtaagttacattataggattgaattcctttggtgggctaaaagctcataacaatgtgatctcactaggccaaccagtgtgcattgaacgatcatttgcaaaggttgtgagctcactcagagctccatccaaggggaaaggtagtggcggcggtgccctctcttcaacctgcaatgcaattggtgagatatttaggattgcggcaatcatgaatggacttgttctcgttggtgttgctgtggggtttgttctccttcgaattgaagcatctttggaagaggctgagtgagaa

SEQ ID NO: 40429 - DNA, 410 bp, Gossypium hirsutum
  Clone ID: LIB3165-053-Q1-K1-B5
cccacgcgtccgcttgaggatgggaggaccttttctgtttataacatccagaaggaatcgaccctgcaccttgttttgaggcttcgtggaggcatgcatattttcgttaagacattgactgggaaaacaatcacattggaggtggaaagttcggatacaattgacaatgtgaaggcaaagattctggacaaggaaggtatccccccagatcagcaaaggcttatctttgctggcaagcaattggaggatgggaggactttatctgattattacattcagaaagagtccacccttcaccttgttctttgtcttcgtggtgggcaatgagaagtaaatacttcttctgactttgttctagcttaagatgtcacaaataatcctttagaaagtcctatttcttatctcttaag

SEQ ID NO: 40430 - DNA, 283 bp, Gossypium hirsutum
  Clone ID: LIB3165-053-Q1-K1-B6
agccatgttgggagctcttgggagtgttatttctgttctgttggctaggaacggagtcaagtgcggtgaattctgatggtttaaggccgggtcttaaatcttcagtgagggtggacttgactacttgggttacccaagcttgatccatgctcaaagcatttttggccatcttgggcttgccaagttatcttgatgggagccttctagggctaccgttatttcggtggaccactctgtgaaatgactgacccactgtacccagttggcagttttgactccattt

SEQ ID NO: 40431 - DNA, 225 bp, Gossypium hirsutum
  Clone ID: LIB3165-053-Q1-K1-B7
gccaaaactagtgtttgttgaactttttacactgttctgatctccccctttcgtgtgggtgttctgtttcagttccatctatatttccatggatcttacacctcaacaacttatccatatcaacggcttctacccatccaatcccatctactatgtaatcaatggtctcatctactatgtcaccgcctgcaaatccttctacagtcctggtgtgtgcctacgcca

SEQ ID NO: 40432 - DNA, 429 bp, Gossypium hirsutum
  Clone ID: LIB3165-053-Q1-K1-C1
gtgaaatgaaaacgatgtcatcttatcaaagctgctgaaggtttcagttatgaacctaggaatggcttctctggctcgatctccttctgccatgtccattactagaattcctcagggtcattccaaaatcctacaattgttaaaagcttcaaaggtgccttatgtgctccctttccgtcgcgtccacatcagaaggtcccctgtttgctgcacgaaatttcctcagtgggaaccttcaccggccacatatgctctaactgagaaagctggtgataagttcttggataaatcatctgaattatttgaaactctgcgttctgagtcttctgacagcaaagatgaggcttcaattactaaagctgaagatcgtacagatacaaccaatcaaccagttgcacagcttcagtttcttaaatggccattgtggct

SEQ ID NO: 40433 - DNA, 422 bp, Gossypium hirsutum
  Clone ID: LIB3165-053-Q1-K1-C10
gatcgtccctgcatacacgatgcctgcagatgccgaacacatcgcagtcctgcgcgtgggtgttagggaagacttcagttgtagcttggccgagaggcttatctcgcacattcaagaggtgttaaaggaactcgactcacttccgagtcaaattgtgaaagattctcacgttgttgccgttgcaaaagaagtggtagaggagaacaaagatggggaggcagctaaaatgggtgacagaaagattcaagaaaaggttactaagcaatggaggcattatgtgaaaactaagaagacgggtgtgtgttaaaaggctcctacaaaatctatgttctatcatatactgtttgtagctatatttccaaactgcagcataattgacctattacttggtcataatctcgttgtgtcatgcatttgtagca

SEQ ID NO: 40434 - DNA, 292 bp, Gossypium hirsutum
  Clone ID: LIB3165-053-Q1-K1-C11
ctttacaaaaccctaatctctaactacttatttgtattgcctaaaccatgtcgtggagaaaggttttagagcccaaggaggagaatactaacctaggacctgctgttcgagagggcgagcatgtattaggggtggctcacatctttgctacatttaatgacacattcattcatgtgactgactagtctggaagggaaacaatgtgatcgcattactggtgacttgaaggtgaaagctgatatggatgattcttccccttatgcatgtatgcttgtaacccaagatgtttctc

SEQ ID NO: 40435 - DNA, 390 bp, Gossypium hirsutum
  Clone ID: LIB3165-053-Q1-K1-C12
gttctttttttcacagcaatggcagtcatgaactccagtgttttggcatgcaactatgctatctcaggcactggatcatctgagcttaatgccaaacttgcttcagcgccatcagttgcttccccagttatgtgcggtggtcgcaagttgcctgtgatcagagcccagcaggctaaattttctgattccaaaggatcatgtgccagtgaaggaagaagagctgctgtgctctacttggcagctggccttttcaccacagctgttgcttcttctgcaaatgctggggtcattgacgagtaccttgaaaagagcaaagctaacaaggaattgaatgacaagaagaggttggcaacaagtggagcaaacttttccagagcatacactgttcaa

SEQ ID NO: 40436 - DNA, 418 bp, Gossypium hirsutum
  Clone ID: LIB3165-053-Q1-K1-C2
cccacgcgtccgttgggattcaagggattgcttgggcttttggtggaatgatctttgctcttgtttactgcactgctgggatctcaggtggtcatatcaatccagcggtgacatttgggctgttcttgggaaggaaattgtcgttgacaagggcaatatactacatggtgatgcagtgcttgggagccatatgtggggctggtgtggttaaagggttcatggggaagacaaggtatggtgctttgggtggtggagctaactctgtgaatcatggctacaccaagggagatgggcttggtgctgaaattgttggcacctttgtgcttgtttacactgtgttctcagccactgatgccaagcgcagtgccagagactctcacgttcctattctggcaccattgccaattgggttcgcagt

SEQ ID NO: 40437 - DNA, 430 bp, Gossypium hirsutum
  Clone ID: LIB3165-053-Q1-K1-C3
ggagaaacaaattactggtggaaacaattgtatgcttattgccttcagataagggtgtgaggtggtcatgtagtttcttgctgaagctgttgaaagttgccattttggttggggtggatgattcagcgagggaagatttaatgaataggataattttaaagttgcatgaagcttctgtcaaggatttattaatcccagcacggtcttctcaaacaaccatttatgatgttgggatggtgcattctatttgtgaatcagtgtatgatcaataagaagtgcagtcaagatttggatcttggaaagaatgatgtgggatgtactgatttttgttctacggcatggatcattgttgagtgttggtaaagtgattgatgggtattttgtaaaaatttgacgagatccgtatttttccttgtcagtttcattgtct

SEQ ID NO: 40438 - DNA, 392 bp, Gossypium hirsutum
  Clone ID: LIB3165-053-Q1-K1-C6
tatatttagctatagcatacactactagtactcactactagcaatggcttcctcaatgatctcatcggctaccattgccactgcctctccggcacaggctaacatggtcgttcctttcaccggtcttaagtctgcctctgctttcccagtcaccaggaaggccaacaacgacattacttctctctcaagcaatgtgcggagagtgcaatgcatgcaggtgtggtcttcttctgggaagaagaagtttgagactcttttatacctccccgattcttacacccgtgcagttggctaatgaagaaaatttccttctttcgttcaaaatggggttctttcttggaatttctaattggttggaggatatcttgcacccgaatgttcttttagctttc

SEQ ID NO: 40439 - DNA, 207 bp, Gossypium hirsutum
  Clone ID: LIB3165-053-Q1-K1-C7
aaaattaaaatgatctccatcaagttaatgcatttttattacctcagtttaatgttttcaacccaagaaaaccggaacttttattccctttgtttccttattctgtttgcttgaaagctaatgttcctgtttccaataaattgattgaaagttcatctattattttttcatcaattatgctcctttaattgaaaaataagatatttt

SEQ ID NO: 40440 - DNA, 368 bp, Gossypium hirsutum
  Clone ID: LIB3165-053-Q1-K1-D10
tcgcccacgcgtccgcccacgcgtccgtctacgcttctggagatagtgaagcaaatgattcagattctggaactgctattcctacacaaagcaatatagtttccgtttgataatgaagcaaattactccgattccgaaattgctattcctacacgaagcaatatagtttttttctgatggctctgtgctaattgccaagcattattgtccgtgcaaatatggccactgtttcagctagatctcgataattaagttccttcaaagttgtgctatatgtacagatatcattcttgccttagtctgtatacttggttatgttcttcttattcctttggtttgagtacttttgcatgatattaccttttcat

SEQ ID NO: 40441 - DNA, 414 bp, Gossypium hirsutum
  unsure (1)..(414): unsure at all n locations; Clone ID: LIB3165-053-Q1-K1-D11
cccacgcgtccgaaaatcgaaccccccttctctctattgctttccatggcgaactcggtggctaattcacgtagcaacagggcagcggttcaagccaccaacgatgatgcttcagccagtaaactgtcatgcgttaaaaagggatacatgaaagatgactacatccatttgtttgtcagaagacctgtgaggagatctcctattattaaccgtggttattttgcacgttgggctgctttcaggaagcttctatatcagtttcttgattgtgagggatctaatagtgaaaagggtaaaacaaagaggcagatactatcacttggtgctggatttgataccacctattttcagttgcaggatgagggaaaagcaccgtatctatacgtggaactggattntaaagaggtaaccaac

SEQ ID NO: 40442 - DNA, 379 bp, Gossypium hirsutum
  Clone ID: LIB3165-053-Q1-K1-D12
cccacgcgtccgcaaaatttaaagttacaaagtttggttacaatgcatctattgaaattgatcccgtgagtcgttcacccacaatgaaggcatcatttgagttagaggcataactgccttatcgtcttcatcaagctgtggtggtaattaaggctatcaaaattaaataatagtgtgatgcttgctgctgcattacctgtactactattatagtaaaaagatttgatagccagtagaaccattagaaagtgtgtaggccttcacaatcatgtcagtgccatgtatatgtacatggttgactatttgtgtaatattatggaagaataaaacaaaatggcctttactattttatctttagactaaatttatactctaaaaa

SEQ ID NO: 40443 - DNA, 432 bp, Gossypium hirsutum
  Clone ID: LIB3165-053-Q1-K1-D2
gcttcccattcccaaatcccatcttcttcttcctattgattcactcaagatccagagctgctacaaaatttcaccaaaaaaatcatctctttcagaaatccccaaaaattccaaatcgagaaatgttactctctcttgttcaaagcagcttcctttcaccttcaacacccctctgcaaattccattccaacttaaagccactaaaaccctcttttttacttcccaaatccctttcccataaaaagtcgctgtatttgtcaccaaagtatgccactgctattcgtgcttccatgattgaagctccagtgctttgggctggtcggctttgtatttattatgctcttttgaagtctgggttagctggatctcaggctaacccacttgtttcaaggttggaggagaatggtgatagtgttggcgaatctggtgatt

SEQ ID NO: 40444 - DNA, 426 bp, Gossypium hirsutum
  Clone ID: LIB3165-053-Q1-K1-D3
gaaaaatggcttctgcttccgctactctcctcaagtcttcacctattatcgacaagtccgagtggattaagggccaaaacctccgccacccttcggtttgttttgtacggtcacaccctacatcggccgcctttgccgtccgtgctagttcatatgccgatgagcttgttaagaccgcgaaaactgttgcatctccaggtcgtggtattttggccatggatgaatcaaatgctacatgtgggaaacggcttgcctcgattggtctcgagaataccgaggcaaaccggcaagcttaccgtacccttctcgtgtctgcccctggcctcggtgactacatctcgggagctatccttttcgaggagactctctaccaatctaccatcgatgggaaaaagatggtcgatgttcttgttgagcaaaagattg

SEQ ID NO: 40445 - DNA, 417 bp, Gossypium hirsutum
  Clone ID: LIB3165-053-Q1-K1-D4
attgaaaccctcaaaattccactaaaaaatggcctccacagcttccctctccaccgccgtagccaccacctctttcctccgcggccatccggcgccgaaaaccctaaactcccttcctttcaaccaatctcttttcgggctaaaaccccaacgaaatggccgtctcaccatggcagcatacaaggtgacactgttaacacccgaaggaccccaagaattcgtgtgccccgacgacgtatacatcgttgaccaagctgaggaagaaggcattgatcttccgttctcgtgtagggctgggtcttgttcttcgtgtgccggagtgattaagcaaggctccgtcgatcaatccgacggtaatttccttgatgatgaccagattgctgcagggtttgtcctcacttggggtgcttaccctca

SEQ ID NO: 40446 - DNA, 421 bp, Gossypium hirsutum
  Clone ID: LIB3165-053-Q1-K1-D6
ttagattccctttccattgcactgctctttctttctttagaattagtcactcctgttctagatgaaggttctctccccaattcttgcttgcctagcgcttgctgtggtggcaagtcatgctgctctctcacccgagcaatattggagctataagctgccaaatactccaatgccaaaggctgtcaaagaaattctacatccagaactgatggaggagaaacgtacctctgtaagtgtaggaggtggtggtgtaaacgtcaatacaggaaaagggaagccagggggtggcactcatgtgaacgttgggcgcaaaggagttggagtgaacacaggaaagccagggggtggcactcatgtgaacgttgggcgcaaaggagttggagtgaacacgggaaagccagggggtggcactcatgtgaat

SEQ ID NO: 40447 - DNA, 192 bp, Gossypium hirsutum
  Clone ID: LIB3165-053-Q1-K1-D7
tccctcgcgtcactccacacgtacgcttactcttttctgcttctatcgttattgcgggggttgtcatctcatacaccatctcccataatattgtatcaatataggtgacaacaaaggcttctttcctgacacgtaataaactttatactgttataaagttcacaaaaccagctgtcggaccaacaattacat

SEQ ID NO: 40448 - DNA, 412 bp, Gossypium hirsutum
  Clone ID: LIB3165-053-Q1-K1-D8
cccacgcgtccggtgcaccgtaagtactcgagcttacccacgtactacgatggacgctactggaccatgtggaagctgcccatgttcgggtgcaccgactcggctcaggtgttggaggagcttgaggaatgcaagaaggcataccccaatgcattcattagaatcattggcttcgacaacgtgcgtcaagtgcagtgcattagtttcattgcctacaagcctccaggcttctaagctttttattaactttgtctctccatttgtttgaatttgtactcagaaaaaccatgttctttacctttgcttttctctttctttgagttattggcctttgtttcttgatttctgggttttaatcctttttggattttcgttggaaaaaaggctgagaactaatgaattaaagttggtt

SEQ ID NO: 40449 - DNA, 423 bp, Gossypium hirsutum
  Clone ID: LIB3165-053-Q1-K1-E1
cccacgcgtccgcccacgcgtccgattcacccaggtgtggtggccataaacgttagtcctatggaatacggacatgtgctgttgatccctcgaattcttgaatgcttgcctcagaggatcgaccgtgagagctttttgcttgcgctctatatggcagctgaagctgggaatccgtactttagattgggttacaacagcttgggtgcatttgctacaatcaatcacctgcacttccaggcttactacttggctgtggcctttcccattgagaaagctcctaccaagaagataaccactctgaatgatggagtcatcatctcagagcttttaaagtatccggtcagaggtgttgtctttgagggtggtaacactcttcaagacttgtctgacacagtgtctgaggcgtgcatttgccttcaagat

SEQ ID NO: 40450 - DNA, 194 bp, Gossypium hirsutum
  Clone ID: LIB3165-053-Q1-K1-E10
tccggggcgacccagcgtcgaggcctgagaagtgggcttctctactgccatgccctcaaaattttgtgctccaccaatgcccctgttttccctctcagagcttttcactgttttggatggttgaaatatgctgatacatgaatggtgaatcactaagccagttctccatgcatactgaccatgctcagaccatt

SEQ ID NO: 40451 - DNA, 417 bp, Gossypium hirsutum
  Clone ID: LIB3165-053-Q1-K1-E11
aaagaatatggtgggggcttcgtctttgcatccaagactcctctcttcttttgttggtgatcgtttagctcaatcgagacaaccacttgctcagctatttcattacaacccaggtcgtaagcatatatcaatgcaattatccagaacgttttctggcttaaccaatattttatttaatagaaggaacaatttggacgaagttccagatggcaaacgcaaatgtctaagacctgggaagttatctcctcgtcgaccagttccaaatcatataaaaaagccaccttatgtcaaaactcgtatggcacctggaattgctagtggcccggaagtgcatgatctaaagggcatagaacacatgagagcttctggaaggctcgcagctcaggttctcaattatgctgggaccttagtgaagcc

SEQ ID NO: 40452 - DNA, 408 bp, Gossypium hirsutum
  Clone ID: LIB3165-053-Q1-K1-E12
attatcttctctctcttctcttaccatggatccttacaagtttcgtccttcaagttcctttgattccccgttctggaccaccaattctggtgctccagtttggaacaataactcatcacttactgtgggagcaagaggtccaattctccttgaagactatcatttggtggagaagctagctaatttcgatagagaacgcatacctgaacgtgttgttcatgctagaggagccagtgcgaaagggttcttcgaggtcactcatgatatatctcatctcacatgtgctgatttccttcgtgcccttggagtccatacccctttcattgtaagattcttcacggttattcatgaacgcggtattcctgaaactttgagagaacctcgaggtttcgcttgtgaaattttaca

SEQ ID NO: 40453 - DNA, 425 bp, Gossypium hirsutum
  Clone ID: LIB3165-053-Q1-K1-E2
cccacgcgtccggcagtcccctgtaccaactccagaaacacagtttctttctcacttgtcttccccccctcacccctcaatggctgcaatcactaatttcttaactaagccacctacttccgatcttcacttcaccccaaaactcacttctctttgctctcatgcttcttttctaccatcccttgcgactaggcccagatctttttcaacaaagctaggaacaagcacaagctctcgcttcattaccaaggctacagctgctcctgggaccaagaatgctccgagtgatgagcgagttcagaaggttcacagcattgaggaattcgatgaagctctcaggaaggctaaaaacaggcttgttgtggtggaatacgccactagcttcagctatcatagcagtaaaaattacccgtttatggtagacc

SEQ ID NO: 40454 - DNA, 421 bp, Gossypium hirsutum
  Clone ID: LIB3165-053-Q1-K1-E4
ggaaatccagaaaaacaaaagtagattttttcttgtttttgataatggctgggactggtttgtttgcagagatattggatggagatgtttacaagtactatgctgatggagaatggaagaagtcttcttcagccaaaactgttgccattattaatccaactaccagaaaaactcactacaaggttcaagcttgtacacaagaagaagtgaacaaggtcatggaatcagcaaaaactgcacaaaagtcttgggccaagactccactttggaaacgagctgagctacttcataaagctgcagccatcctaaaggaacataaagcaccaattgcttgagtgcctggttaaagaaattgcaaaaccagccaaagatgcagttaccgaggttgtaaggtccggggatctggtttcttacactgttg

SEQ ID NO: 40455 - DNA, 376 bp, Gossypium hirsutum
  Clone ID: LIB3165-053-Q1-K1-E5
cccacgcgtccgttttgctttcagttaacaacaaaatccgtaaatggctaccactgcttctccaatggcgactcagctgaagagcagctttaggtcgtctgttacaagaggactggtagtccccaggggcatttcgggatccccgtttaaagtatcttccggaaagaccaggaccccttgcttcactgtcaaagctgttcaatccgacaagtcaacatttcaagtaatccaacccatcaacggcgaccccttcattggaagcctggagactccaatcacctcaagccccttaattgcatggtacctttccaacctcccagcctataggacggcagtgaacccacttctgaggggaatcgaagtgggtctggctcac

SEQ ID NO: 40456 - DNA, 306 bp, Gossypium hirsutum
  Clone ID: LIB3165-053-Q1-K1-E6
gttttctttccttttaattgaagattggagtgccaagggttaagttccaatttagttttctgctggcatggatcctagcaggacaaggagctagccatacccagagccagaccccaacattacagtacgggtcaatcgtgacgggcaatgggaaagatcatccgaccgtgtcttcacacccttcaactgcgaacggcctcggacggagctgcaacatttgtgacctatgtaggcaaataaattctgagcctgactgacaccagcgggactcgagttgagactgttgttaatgttacgaagggcaaa

SEQ ID NO: 40457 - DNA, 423 bp, Gossypium hirsutum
  Clone ID: LIB3165-053-Q1-K1-E7
cggacgcgtgggaaaatgtctcttacaatccccactaacctctccaaatcccttttgaagccaaagctaaactccaaactcacccccaaagtttcacgatcattggtggtatgctccaccgacaagacttcatcgccactatcatcagcttcatcactccaagccttctcagcagctcttgctctttcttccattcttctctcagccccacagcctgccgtagctgatattgcaggcctcacaccatgcaaagagtccaagcaattcgccaaacgtgagaagcagcagatcaagaagctggaatcgtcgttgaagctatacgcccctgacagcgctccagctctcgctatcaaagcaaccatcgagaaaaccaagagacggtttgacaactacgggaagtacgggctgctgtgtgggtctgat

SEQ ID NO: 40458 - DNA, 245 bp, Gossypium hirsutum
  Clone ID: LIB3165-053-Q1-K1-E8
ccgtatttgactatggtaatcttgaaattggttttgcagaagctgcttagttgcccattattctgattctgtgtcttaccatttatatacatggtgataatcgtcgcttctgttctgtggcaacaaacaatatatatagaatgtatgttttgctcttaacctatgcaagcttgtagtactactctatatgttttgcctcgttggttttatgtcatgcttgtgggctgtggctccaatttcaatat

SEQ ID NO: 40459 - DNA, 270 bp, Gossypium hirsutum
  Clone ID: LIB3165-053-Q1-K1-F1
ccccgatcttacacccgtgcagttggctaaggaagtagattaccttcttcgctcaaaatgggttccttgcttggaattcgaattagaggagggattcgtgcaccgtaaatactcgagcctacccacgtactacgatggacgctactggaccatgtggaagctgcctatgttcgggtgcaccgactcggctcaggtattgaaggagcttgaggaatgcaagaaggaataccccaatgcattcattagaatcattggcttcgacaacgtgcg

SEQ ID NO: 40460 - DNA, 397 bp, Gossypium hirsutum
  Clone ID: LIB3165-053-Q1-K1-F10
gccaatttgatagattatatgaacttatttttgttgaaagccatttgagcaacagtctccgccaagttctatggagaagtcacccagcaaatgttgaagcatgcggatttatctggaagtaacaacggaactggcctcttccaaaccattgtctggttgaagataatagatctctatgagcaaattacttccagcaaaactgcatcttcactagaagcaacaaaagcctaagactattagagtttcttcatacattgtactagaccttgggtccataacaaattatcctttttacagctttcctctataaaaggtttatttgattgtatggctgttgttgctttcataagaattgaatatgatcctatgcaatttattttattctcgttattcagtg

SEQ ID NO: 40461 - DNA, 287 bp, Gossypium hirsutum
  Clone ID: LIB3165-053-Q1-K1-F11
cccacgcgttcgcccacgcgtccggtttgatttacagcgcgtccagcgcgagcttcgtaagggaattgtgttaaaattcctgaaccgggacgcggtggttgacggcaacgttagggagaccggagacgtctgtgggggccttgggaagagttatttttattgttaaacggtctgcccaccctggaaacggctcagcctgaggtagggttcagcggccggaagagctccgcacgttgcgtggtgtccggttgcgccccaggtggtccttgaaaattcggaggatctag

SEQ ID NO: 40462 - DNA, 423 bp, Gossypium hirsutum
  Clone ID: LIB3165-053-Q1-K1-F12
aacagaacttacccacacccaatgccacaaacaagctttgcttatatgaatcacctccacttcaactaactaccttcttccacaacccaaaataagaagaaaaacaaaaatggccatggcaatggcgcttcgacgactctcctcttccattgacaagcctctccgtcctttcttcaatgccccttccctctattacatgtcgtctttgccaaatgaagctgtgtacgagaaggagaaacctggcgtcacttggccaaagcaactgaatgctccacttgaaaccgttgatcctgaaattgctgacatcatcgagcttgaaaaagcgcgccaatggaagggacttgaactcattccatcggagaacttcacttcggtgtcagtgatgcaagcagttgggtctatcatgaccaacaagtacagtga

SEQ ID NO: 40463 - DNA, 307 bp, Gossypium hirsutum
  Clone ID: LIB3165-053-Q1-K1-F2
gatttcctgaattggttaatgtactttgttttctacttgatattgtttcaagctttccgtgggatcacaagaaggatattggtaagatcccataagcttccgcccggtccaccaacaattccgatcttcgggaaccttttccaggttggtgataaacctcaaaggttccttgccaaacttgccaagattcatggggacatcatgactctgaaacttggccacactactaccgtagttatttcatctgcaacaatggccaaagaaatcctccaaaagcatgatgccgtatcttgtaaccgaaccattt

SEQ ID NO: 40464 - DNA, 441 bp, Gossypium hirsutum
  Clone ID: LIB3165-053-Q1-K1-F4
atttagctatagcatacactactagtacccactactagcaatggcttcctcaatgatctcatcggctaccattgccactgcctctccggcacaggctaacatggtcgctcctttcaccggcctcaagtctgcctctgctttcccagtcaccaggaaggccaacaacgacattacttctctcgcaagcaatggcggcagagtgcaatgcatgcaggtgtggcctcctactggaaagaagaagttcgagactctctcatacctccccgatcttacacccgtgcagttggctaaggaagtggattaccttcttcgctcaaaatgggttccttgcttggaattcgaattagaggagggattcgtgcaccgtaaatactcgagcctacccacgtactacgatggacgctactggaccatgtggaagctgcctatgttcgggtgcac

SEQ ID NO: 40465 - DNA, 422 bp, Gossypium hirsutum
  Clone ID: LIB3165-053-Q1-K1-F5
gcacaatggccaccatcacctctgccgctgtcgctatcccatctttcaccggccttaaagccggtgcaaccgcagctaaagttagcgccacagccaaggttgcagcctctccagtcccaagggtcagcatcaaggcctccctcaaagacgtcggtgttgctgttgcggcaactgctgcaagcgcaatccttgccaacaatgccatggccattgaagtcttgctcggcagtgacgatgggggtctggctttcattcccaaagaattcagcgtaagcccaggggagaagattgtgttcaagaacaatgccggattcccacacaatgttgtgttcgatgaggacgaaatcccaagcggcgtcgacgtatccaaaatcttcatgcctgaagaagagctactcaatgccaaaaacgagacttacgct

SEQ ID NO: 40466 - DNA, 318 bp, Gossypium hirsutum
  Clone ID: LIB3165-053-Q1-K1-F6
gcaatgcatgcaggtgtggcctcctcttgggaagaagaagttcgagacactctcatacctccccgatcttacacccgtacagttggctaaggaagtagattaccttcttcgctctaaatggattccttgcttggaattcgaattagaggagggattcgtgcaccgtaagtactcgagcttacccacgtactacgatggacgctactggaccatgtggaaactgcccatgtttgggtgcactgactcggttcatgtgttggaggagcttgagaattgcaagatggaattccccaatgcattcattataatcattgggtt

SEQ ID NO: 40467 - DNA, 314 bp, Gossypium hirsutum
  Clone ID: LIB3165-053-Q1-K1-F7
tccactcgtactcccacacgttcgcactttttaagtaaaaaaacccgtccctgaggggtgagatgtgactgaagtggctcctgctgtcacttatgaaatctaatatgcctttgtgaaaaacattacgagaagaatgactcctcaacctttgtatattctagctgatatataaattaaatgtttccagtttgaaggcgtatactcacattattgaggctattctctaatctgatgctgctgggaattatgattgatctgttaaaatcaatcttgatgcttctccattttatgttctgaccacttaaacttttgac

SEQ ID NO: 40468 - DNA, 446 bp, Gossypium hirsutum
  unsure (1)..(446): unsure at all n locations; Clone ID: LIB3165-053-Q1-K1-G1
cgggggagccccacgcttccgcccacgcgtcggcccacgcgtccgcccacgcgtccggacaaatctaaaatttctacgcttggcagaaatctagggtttttgtatctaataaatggaccacataaatactcaacccccacactcaattctcctttcttttcagctttgcttcaaaattcgatcacatttcccctaaattccgtcttttttcttcaaattccccacaaatggccatcactttctcagatctccacacggaatctggccttaaatcccttaatgacttcctcaccggcaaatcttacatctctggggataagctgactaaggatgacatanaagtttatgctgctgttttgaaaaatcctggtggttcatttcccaatgtgagccaatggtataattgtgtgtcttcccatctcgcttctagcttccctgggaaagct

SEQ ID NO: 40469 - DNA, 427 bp, Gossypium hirsutum
  Clone ID: LIB3165-053-Q1-K1-G2
gtctcaagctctctcttcctgtcttcgtctacttcgcctctttctctatggatccctacaagcaccgtccatcaagtgctttcaattcaccattctggactaccaattctggcgctccagtttggaataacaattcatctctcactgttggacccagaggtccaattctccttgaggactatcatctggtggaaaagcttgccaactttgacagggagcggattccagaacgtgttgtccatgctaggggagcaagcgcaaagggtttcttcgaggttacccatgacatttctcaccttacatgtgctgattttctgcgagcacctggagttcaaacccctgttatcgtgcgattttcaaccgtcatccatgagcgtggaagccctgaaaccctcagggatcctcgtggttttgcagtgaagttcta

SEQ ID NO: 40470 - DNA, 424 bp, Gossypium hirsutum
  Clone ID: LIB3165-053-Q1-K1-G3
cggacgcgtgggtaaattattagggttatttttaaaattttcatatttgataaaggtgtttatggaaaccctttctcctaaatcaacctcaaacttttttaaccaaaggatgttatacccaaactccatcattataaattggaccttggaactgcgggaaataaacgggagatatagttagctatagcatacactactagtacccactactagcaatggcttcctcaatgatctcatcggctaccattgccactgcctctccggcacaggctaacatggtcgctcctttcaccggcctcaagtctgcctctgctttcccagtcatcaggaaggccaacaacgacattacttctctcgcaagcaatggcggcagagtgcaatgcatgcaagtgtggcctcctactggaaagaagaagttcgagac

SEQ ID NO: 40471 - DNA, 341 bp, Gossypium hirsutum
  Clone ID: LIB3165-053-Q1-K1-G4
gggacgacccacaatggcgaaaacgggtcctcaatctctttattccttactttctttcccatcaaacactccttttttttttccaaggctgtttaagatggcagatggtcatgatattcagccccttgtttgtgacaattgaactggaatggttaacgctggttttgctggcgatgattctccccgtgccgtttttcctaacttccgtgggtcgttcacgttttcacctgtgttattgttggcttggaccaaacagatgcctattttggtgatgaatctcatttacatagaggtactttgactttgaaataccctattgttcatggtcttgttagcaactg

SEQ ID NO: 40472 - DNA, 425 bp, Gossypium hirsutum
  Clone ID: LIB3165-053-Q1-K1-G8
tgggaatcaaccccattatgatgagtgccggagaattggaaagtgggaacgcgagaaccagccaagttgatcaggcaaaggtaccgtgaggccgccgacattatcaagaaagggaaaatgtgttgcctcttcatcaacgatctcgacgctggagccggtcgtatgggaggaaccacacaatacacagtgaacaaccaaatggtgaacgccacactcatgaacatcgctgataaccccaccaacgttcagctccccggtatgtacaacaaggaagagaaccctcgtgttccgatcatcgtcaccggtaacgatttctcgacgctgtacgcgcctctcatccgtgacggtcgtatggagaagttttactgggcacccaccagggaagataggatcggtgtttgcacaggtattttcaggaccgacaa

SEQ ID NO: 40473 - DNA, 421 bp, Gossypium hirsutum
  Clone ID: LIB3165-053-Q1-K1-H1
caggaggcaaatttcagaaaaaagaagaggaaggaagccctttcttcctctcttttagtcactcaattttccgtagtattcttttgcatggcagtgaggttattgtcacatgagttgtctgacttgtgtcttggcaagccagcgctgaggtcactttctgtaacatctaccattgctgaggctcttgaggtcttgaaaacctcggatgataacttcgttagtgtgtggagttgcgatcataaggctaaaaccagttcagggtttgagtcggctgctggtttttgcgacaattatgatgatgatgattgtagatgtgtaggcaaagtttgtatggtggatgtgatttgttatctttgcaaagatgaaaacttggtgtcaccttctgttgctttgaaggaaccttgttcagtgcttttgccta

SEQ ID NO: 40474 - DNA, 344 bp, Gossypium hirsutum
  Clone ID: LIB3165-053-Q1-K1-H11
ttattttattcaaaactaatcatgtaaaaaaaaaagttgatcggaacaaataaagtgaaacatttaagacatgaacaaagtggagattttataacacaaaaatagaggatgcaaattcacttaaaacacaaaaggaaaacaacattcaattaagacacataggggggatttcctttgtttgtgcccaatatagatttttttttttccttagagcttaattttccatttagaaagctcctttcttgattgcattcgcatttgcatttctaagggcagttttacttaaatatttgtcagtcaattgaaccctttttacattcttttggttagtaacaagcatgttt

SEQ ID NO: 40475 - DNA, 423 bp, Gossypium hirsutum
  Clone ID: LIB3165-053-Q1-K1-H12
gccagaaggaccctttcgactttctaccaaaggggtttctggagaggacaaaagggcggggtctagtggtgccatcgtgggcaccacaggctcaagtgctgagccacagctctaccggagggtttttgacccactgcgggtggaattctactctggaaagtatcgttaacggggtgcctttgatcgcctggccgctctacgctgagcaaaaaaatgaatgccgcgatgctaacccaagatattaaagtggcactgcgaacagaacccaacgaaaacggtttagtttgcagagacgagattgcaaaggctgttaagggtctaacggaaggtgaagaagggaaaggtgttcgaaatagaatgaaggacctcaaggaagctgcggcaaaagcactttttgaaaatgggtctttcaccaaggcactt

SEQ ID NO: 40476 - DNA, 334 bp, Gossypium hirsutum
  Clone ID: LIB3165-053-Q1-K1-H2
gaaaaacaaaggcacccgtatgctctcataccctttggaattgggccacgggcatgcgtcggccggaagttctccttacaggaaatcaaactttccttgatacatctatatcggaaatatacatttcaacattcttcaaccatggaaaatcctttggagcttgaatatggcatagttctcaacttcaaacacggtgtaaaactcactgtcacaaaaagaacatgattattgtatctgactgagttatatttcctcagtcgtattaatgcaaaaaggtgtcatactatacgcctaaaattctaaaacaaatgaaagaacaaagaaatgtttggtc

SEQ ID NO: 40477 - DNA, 429 bp, Gossypium hirsutum
  Clone ID: LIB3165-053-Q1-K1-H3
aatttttctcttttgataaagctgacaaccctgaaagcaacccaaaagaaaaaaaagaaagaaattatatccgttttgatcacaattcacacagcacagccccgttatagaatttgtcttaaaaatacaaaagggtttgagaattttcagttttgtttatatgtttgaaaaatgggggtcttgtgttttttttagtaaagatttgaagagagattcatttccaattccagggacaaacaatctggaataaacccatgttgtgttatgaacacaacaagacattattctatacaaaaacataccacaatatgattcacatttttgttgctttccttcttgtttccacttcgcttggccctgtcttgtctttacaaccagtaccggattccggtcaccggcaactacagaactgtactttaaaccctcaca

SEQ ID NO: 40478 - DNA, 423 bp, Gossypium hirsutum
  Clone ID: LIB3165-053-Q1-K1-H4
agattaccttcttccttagccaactgtacgggtgtaagatcggggaggtatgagagtgtctcgaacttcttcttcccaagaggaggccacacctgcatgcattgcactctcccaccattgcttgcaagagaagtgatgtcgttgttggccttcctagtgactgggaaagcagaggcagacttgaggccggtgaagggggccaccatgttggctaaggaagtagattaccttcttcgctctaaatggattccttgcttggaattcgaattagaggagggattcgtgcaccgtaagtactcgagcttacccacgtactacgatggacgctactggaccatgtggaaactgcccatgtttgggtgcactgactcggctcaggtgttggaggagcttgagaattgcaagaaggaataccccaatgca

SEQ ID NO: 40479 - DNA, 264 bp, Gossypium hirsutum
  Clone ID: LIB3165-053-Q1-K1-H5
tttcgctcttttgtataactgtagcatatagtactagttagcagtaatagcaatggcctcctccatgatctcatcggcaaccattgtcaccgagaactgttccttcccggcacaggccaacatggtggcccccttcaccggcctcaagtctgtctctgctttcccagtcactaggaaggccaacaacgacatctctttttttgcaagcaatggtaggtagagtgcaatgcattgccgtgtggtcttctcttgggatgaaagaat

SEQ ID NO: 40480 - DNA, 192 bp, Gossypium hirsutum
  Clone ID: LIB3165-053-Q1-K1-H7
ctcgttagattctgatattcagtgcgttttctaaccgcgaaagcgtggcctatggggcgtgtttacctttggaatttgaagctagaggtgttttaaaagttaccacaggggaaactggtttgtggcagccaatcgttcatagcgacctagctttttgatccttcaatgatatgttttttctatcattgtgaa

SEQ ID NO: 40481 - DNA, 363 bp, Gossypium hirsutum
  Clone ID: LIB3165-053-Q1-K1-H8
cccacgcatcctccttatcctcatatccactcaattatctcttttttatattctctttctacatctggccaggaaactttactctaaattctttcctcctccttccatcctttatcttccttctacttcttcaatcacttcccttccttaatctcaatcaagaatcccaaatattgtatctgattcatacttgaactctttgtttgataatctttatgaaaagctcttatgacgacgacaaatgggagactgttattgataagaaaaccaactctttatcctacatggcataatgttgcacacctattaattaaccactaaaatacctgtactcaactgtattttatggatgctcttcggatc

SEQ ID NO: 40482 - DNA, 359 bp, Gossypium hirsutum
  Clone ID: LIB3165-055-P1-K1-A1
tggacgcgtgggtccatggacggtttgccatgttggctacgcttggtgcactggccgttgaatggctcactggtgttacatggcaagatgctggcaaggtggagttagttgagggttcatcgtatctcggccaaccccttcccttctcgatgacaacattgatttggatagaagtattggtgatcggattcatcgagttccaaaggaacgccgagcttgacccggagaagaggctgtaccccggaggaaagtactttgatcctctcggcctagccgccgacccggagaaggaagcaaccctacaattggctgagatcaagcatgctcgccttgccatggttgctttcttggggtttgct

SEQ ID NO: 40483 - DNA, 353 bp, Gossypium hirsutum
  Clone ID: LIB3165-055-P1-K1-A10
cccacgcgtccgctctttgttttattcccttccaaagatggaccgcttgtctcgtctcttcctcctcctttcctccgtcgttgcttcggccgtcgtctccgacgttaatagcgatgacgatcctctcatccgtcaagttgtttccgatggtggtgtcgaggaggactccgatgaccatctccttaatgcggagcaccacttcacgctgttcaaatccaagtatgggaaaacctacgcatcccaggaggagcacgattaccgactgggagtcttcaaggctaacctgcgtcgggccaagcgtcatcaggtcctggaccccagtgccgtccatggcgtcacaaagttttccgatt

SEQ ID NO: 40484 - DNA, 352 bp, Gossypium hirsutum
  Clone ID: LIB3165-055-P1-K1-A11
gttgaacactgtgagcgagttcatttgataatagctgcaaagcgagtctgcagggcaaattgtcgcgagtgtttattctttttgggagtgaatcagcgcccccttgttgttggtgataaccacaagctacaggtggcaccgtataatacattctactctcagttggaggagcacatgactgaagttggcattcaggccactatgaatagatgggatgaacctttggcacttggagcggttgatccacacgattcattatctcatcctgcaggtgtttctgatgcgcaagcagagtcagctgcacagttagatcctgatcagttcacaaatttcctgattccaaactggtttg

SEQ ID NO: 40485 - DNA, 370 bp, Gossypium hirsutum
  Clone ID: LIB3165-055-P1-K1-A12
gtgttaaaccctgattctccccatccccactaatatctccttgatggctttgagggcggcggcgacgagagcgatgttcgctggggcggctccccagggattcaggcgcatgtgttcaacagctacggctaattcctttatgccgcctccaattacggcgatgggcaacggcgagggaacccctggtcgagagcaagcgcctccaagtaccaacctctttgtctctgggcttaacaagcgcactaattcggagaaacttcgagaagccttttctcagttcggacgtgtaattgatgccagagtagtgactgatcgtgtatcaggatattctaaagggtttggtttcgtaagatatgccactatagaggaa

SEQ ID NO: 40486 - DNA, 125 bp, Gossypium hirsutum
  Clone ID: LIB3165-055-P1-K1-A2
acagcaattaactacgattcaagtgtaaagctccaatcgggattcatggtcttggtgcaatgtcatcaaggacaaccgtatcaacggtaacatgacactctacgttgacttttaacctatggtgc

SEQ ID NO: 40487 - DNA, 353 bp, Gossypium hirsutum
  Clone ID: LIB3165-055-P1-K1-A3
acggttgtatctttgagtattttctcttcattcatattaatcaccaaaagtcttcgacaccacgtacgaggtaaagatgaagatgagcagttctgctaccatgggggcctcaaagagaaggctatcaagcagaggccttggaggggttctccgagagaaaagggctaagctttatattatacgaagatgcgttattatgctcctttgctggcatgattgaaactcctactcctagccatgctaatgatcatggaggatcttaggggctcctcttcttttcttcttcatttggtggagtgtaaatactgtcagtggtcggcggatgttatcggagagttaagaaatttttttgt

SEQ ID NO: 40488 - DNA, 360 bp, Gossypium hirsutum
  Clone ID: LIB3165-055-P1-K1-A4
ggccaatcaccacagctactcgtcataaagtaaagagaaaaatggtctccgaaagcaggggctgtacgagccttatattcacgtacggaaccttgaaacgagggttctccaatcacgtgcttcttcaagatctgacgcgaaccggagatgccgtgttcaaaggcagttaccaaacggtggagaaataccctctcgtttgcgggccttaccgcgtccctttcctcctcaacatgcctggttcaggacaccgagtcacgggcgagttgtacgccgtgtcgtcacgtggactcgcccgcgtcgatgagttggaaggcacgagtcgcggtcattacgagcggctgccgatcctgctgattcccg

SEQ ID NO: 40489 - DNA, 359 bp, Gossypium hirsutum
  Clone ID: LIB3165-055-P1-K1-A5
aacatttcacgaacttcactctcctttctctaatggcggctgccgtctccaccagcggggctgtcaaccgagcaccgttgagtttgaatggatcaggtgccggagcttctgctccaagctcagctttcatggggaacagcttgaagaaagtgagcgctaggttcaacaacaacggcaaggctccagtgggaagtttcatgattgtggctgccaaagaaatcgacgaagacacacagaccgaccaggaccgatggaagggtcttgcttatgatatctccgatgaccaacaagacattaccagagggaaaggtatggtcgactcattgttccaagctcccatgaacgatggtactcactat

SEQ ID NO: 40490 - DNA, 357 bp, Gossypium hirsutum
  Clone ID: LIB3165-055-P1-K1-A6
ggaaaatctttccaatgggagctttttttttccaagatgggaatcaaccccatgatgaggagtgccggagaattggaaagtgggaaccccggagaaccagccaagttgatcaggcaaaggtaccgtgaggccgccgacattatcaagaaagggaaaatgtgttgcctcttcatcaacgatctcgacgctggagccggtcgtatgggaggaaccacacaatacacagtgaacaaccaaatggtgaacgccacactcatgaacatcgctgataaccccaccaacgttcagctccccggtatgtacaacaaggaagagaaccctcgtgttccgatcatcgtcaccggtaacgatttctcg

SEQ ID NO: 40491 - DNA, 214 bp, Gossypium hirsutum
  Clone ID: LIB3165-055-P1-K1-A7
cacacttgcatcaacaaattacgtttcaagttaaagctccaattgggattcatggtcttgagcaatcacatcaaggacaaccggatcaacggtaacatgacactccacgtggactttaaacctatgttcccaccatagcatcttagcggtgccgctaatctccaccttagcatccagcgccatctctcttttggccacgtccgcgaaaaactta

SEQ ID NO: 40492 - DNA, 371 bp, Gossypium hirsutum
  Clone ID: LIB3165-055-P1-K1-A8
gcgacgccccacgcgtacggttgaatctttgggtggtcactatttgtttggtaatagaactcagagagtttggatatttggtcaaggtagtttgaaggttggttatttgaatttcgggggtaacacccaaggttacacattgtggacatcacggctatatacaaagtttctcggtctctttttcatgtccgagctggacgacgtaagggttgtgtgatcgagagcaacccttcgccgcacggcgggcgtggagctttgccttccgaaggcggcaatccttccgatctcctcttccttgctggtggtgggattgtcttttagagtttgggtaccctatttttagctagcttattagtctgtaaaatattact

SEQ ID NO: 40493 - DNA, 355 bp, Gossypium hirsutum
  Clone ID: LIB3165-055-P1-K1-A9
tcgcccacgcgtccgccactgttcgtgttcttctccagatgcccccacctcgcctgagtaacaggtattttttggtgagggctggggagtcccaatatgagagcctcggaataatcaacaccaaccctgtagcaaaaacttctgttgatagtgggttatcagacaaggggaaaaaccagactctgaaatctgctttggaattgaaggctatgggggcctgtgaaaggaattgctggatttggccttctattactcaaagagcttaccaggctgctgagatcattgcagctgttaatggtgtcagtcgtagttatatagttccagagtacagcttcctggatgctcgtggactggg

SEQ ID NO: 40494 - DNA, 356 bp, Gossypium hirsutum
  Clone ID: LIB3165-055-P1-K1-B10
cccacgcgtccgctcaaagctctgtttctccattgctgcttcatcatccgtctgttccaaacccaaactcaaacaaatcccacaactttccctcccaaaactccccaccccaaagttcttgaaaacccaacaaatcccctcactctcctccaccactctcaaatctatctccctcttcacagtcaccactttatcctttgccccaccttctcttgctgcagaaatagaaaaggccgctcttttcgatttcaacttaaccctccccatcatgatggtccagttcttgttcctcatgtttgctcttgacaaggtctactttaccccactcgggaaattcatggatgagagagatgctg

SEQ ID NO: 40495 - DNA, 351 bp, Gossypium hirsutum
  Clone ID: LIB3165-055-P1-K1-B11
gttcatacatcaaactttcactctttctttctttactttagtttcctcgtctcgctttcttctttgctctgctccttccaccaggagcttggttttgtgcatagaagagggaaaactggattgatttaaagaaaaaagggggaaaaatactttggctgaaaagctttagttttgtttgaaatggaaggagggtcctccttttgtctgtgtacctcctaatggccctttcctgtctgggttttcaccatttttcccttttagtggacaacaagtatcccaacctacacctgaccttaaccaaaattacttaaattcaactgctgttccgcttcggtcagttagagccgaacc

SEQ ID NO: 40496 - DNA, 354 bp, Gossypium hirsutum
  Clone ID: LIB3165-055-P1-K1-B12
caaaaactaagaaaattccttttttttttcttaacaaatttcttgaaaactatggtttaattaatgtttcgttaagaaatctcgaatttctatcagttttccagtttcaagatccgatttttctccattttcgaataaattaaggaaaaaattcagggtttgaattttgaaagaaaaaaaagtttttttttttttcaatcttaaggctctgtttggtggctcatagccgaattttgtaacaaatggtagtaaatgtagcagcaaatttgcatttacatttatcagagccaaaccttacccactcgtcggcggtaatcccttcaccttcatttgcaaaacggtgccgtaccgacg

SEQ ID NO: 40497 - DNA, 84 bp, Gossypium hirsutum
  unsure (1)..(84): unsure at all n locations; Clone ID: LIB3165-055-P1-K1-B2
gtcgacgcgcacgcgtnnccgagtatttagctanttagcatacacctactatgtactttcatctactanngcaatggnncttcc

SEQ ID NO: 40498 - DNA, 358 bp, Gossypium hirsutum
  Clone ID: LIB3165-055-P1-K1-B3
gccactcgttcggaaatgaataatttactctcttaacttgacaatcaattatggattgggttgtcgcctggacgacccatcaccatattaggcgcatgggctataagggtccctcactgaacatcttttacattctaatccacctgatccatggaagggagaatctgctgcacttatagtgccgtgatcgctcatcttgtgcacaaagagggtaagaactttgtgagtggtatgctatgccccaatacatcggtgcagaccctgtagagatgttcaatgatgaataactcagctaggacaaatatactgactcagatgacgaggtaatagctggtatagctcacccataagctgatat

SEQ ID NO: 40499 - DNA, 330 bp, Gossypium hirsutum
  unsure (1)..(330): unsure at all n locations; Clone ID: LIB3165-055-P1-K1-B4
atatttagcgannttctgccctttagtcctgnnggatgggtnncaccttannttccactcnngttgagttcgcttaanngcgatttgtaccagcaaccacaatntnntcactgtcacttttgttatcncccaccccgctgattctccttctaannagctcaaatatcaaccctggannttcccttcccagccctatnagatnntatgtttttcttcccctcctgttgacccttgagtgnnacctccctcagagacgcccaaagattgaaacccnngtgatttctttaaccggtggcttcgcttcttctgtcgttccttttcgggatgctt

SEQ ID NO: 40500 - DNA, 360 bp, Gossypium hirsutum
  Clone ID: LIB3165-055-P1-K1-B6
cccacgcgtccgaaatccaactagtttcactaacatgggtatggtttttggtaggatcacagtggaaacaccaaagtatgaagtggttcaatcctcggctgactatgaaatccgaaaatacccacctgcagttgcagctgaagtcacatacgatccatctcagttcaaggggaataaagatggtggcttttcgttgttggcaaattacatcggtgctttaggcaatacccaaaatgcaaaacctgaaaagattgcaatgacagctccagtgataactaaatcacctggaaatgaaagtgaaaagattcccatgactgctcctgtggtgacaaagggtgacaacaataacatggttaccat

SEQ ID NO: 40501 - DNA, 353 bp, Gossypium hirsutum
  Clone ID: LIB3165-055-P1-K1-B7
cccacgcgtccggacgattgaaattgcaccggagatgcgtcttcatgagggtggcggaaatagcaccgttgagcaacgtgactgaaccttgagtagatctgacactgaagccgaggccgaaagctccgaccacggccacgcaccaccgaacgtcccccacgtgatgaaacatccacaaccggtgacgagtcttccacttaatattcgcggcataaacaacttctttagccgcttgcacctgacgattttcacactcgatcagcgcatcgacaagacgctggaaaggaagagaggtcgaagacagtgtagcagacgacaccacggcgtcaaactccgagggaagaccgggaagt

SEQ ID NO: 40502 - DNA, 351 bp, Gossypium hirsutum
  Clone ID: LIB3165-055-P1-K1-B8
ggtcaagccaatatcaaatgactttccttttagctcacagctcctctgttgagtgctataatgggtaaggagaaggttcacatcaacattgtggtcattggccatgtcgactccgggaagtctacaaccactggtcatttgatctacaagcttggtggtattgacaagcgtgtgattgagaggtttgagaaggaggctgctgagatgaacaaaaggtcatttaagtatgcatgggtgcttgacaagcttaaggccgaacgtgaacgtggtattactatcgatattgccctctggaagtttgagactaccaaatactactgcactgtcattgatgcccctggacaccgtgac

SEQ ID NO: 40503 - DNA, 354 bp, Gossypium hirsutum
  Clone ID: LIB3165-055-P1-K1-B9
agccaaacaagatacagattttcgtttagactctaaccggcaagacgagcactgtcgaggtcgagagctccgatacgatcgacaacgtgaaggccaaaatccaagataaggaaggcatccctccagaccagcagcgtctgatcttcgccggaaaacagctcgaagacggccggaccttggccgattacaacatccaaaaggagtcaactctccacctcgtcctccgtctgcgcggtgggatgcaaatcttcgtgaaaaccttgactggcaagacaatcactctcgaggtcgagagctccgacacgatcgacaacgttaaagcgaagatccaagacaaggaaggcatccccccag

SEQ ID NO: 40504 - DNA, 356 bp, Gossypium hirsutum
  unsure (1)..(356): unsure at all n locations; Clone ID: LIB3165-055-P1-K1-C1
cccaaaaatgaggaagtttttcctcttttcgtcancggcctaaaccccgaaggtgacgccggatccatncggcccgaccccgcttcgttccctaaccaaactctcccttccaccaccgncaccacagccgccggtcatcggaaaaaagggaccggtgttcgagcatggcttatactggactcgacatgccaaacccagatggtggaagccggaaaacatgctatcatgagacgtacgggtttgcctgctcgagatcttcggatcttggacccgctgttgtcgtacccatcgacgattcttggtcgagaaagggcgatcgtgattaatttggagcatatcaaggcaatcatcacggc

SEQ ID NO: 40505 - DNA, 353 bp, Gossypium hirsutum
  Clone ID: LIB3165-055-P1-K1-C10
cccacgcgtccgcccacgcttccgttcacgcgtccggttttatctctagagttcaaaagtaataaagatgcccagatcctccattgatgctctgcaaatttccctacttcaagctaaggtattctagtatttggcctgtagttgattttaattgatttttcggaggaaggaagcagcattctgtttggttaatggggggtagtagttccaaggagggaagttggaggcagggttcttcctatcattcaaatccaccttcatgggattctcatcaggggtatcctcagacatcatatggtcaagaaaaccatagttttccgcctcaatatagctatgcagagccgcagtattat

SEQ ID NO: 40506 - DNA, 354 bp, Gossypium hirsutum
  Clone ID: LIB3165-055-P1-K1-C11
ctcgacacctccatccccattcttattcgccgcaaagaagtgaaagactacggagctgccaagtccatcgaaggtgtttacgaaaagggtcaagcttgtttggtggtggaagacctcgtaacgtccggtgcatcggttctcgaaacggcggcaccgcttcggtctttgggtatcaacgtaacggatgccgtcgtggttatagatagggagcaaggcgggagggaaacgctggaggagaatgggattaaacttcatgcactttttactttaactgagatggtcaaggttttaagagctaaagggaagctggaggaagagatggaaagtttggttatgaagtttttggaggagaat

SEQ ID NO: 40507 - DNA, 352 bp, Gossypium hirsutum
  Clone ID: LIB3165-055-P1-K1-C12
tggaaatcctgcgaaaatttctttgtgaggattgtctcttgctttgcccagaggggagtgttttggcatgcttggacccaatggtgctggcaagacttctttaattaatatgatgattgggctcacaaaaccaacctcagggacaacatatcttcagggtttggatatactgacttctatggatataatctatacaagcatgggtgtctgtctgccccggacctgctctgggaaactttaactgggagggagcacttgctattttatgggagactgaagaacctcaaagcttctgcattaaatcaagcagtggaagactctcttaagagtgtcaacctatttcatggagggg

SEQ ID NO: 40508 - DNA, 359 bp, Gossypium hirsutum
  Clone ID: LIB3165-055-P1-K1-C2
cacactccatctcaaaaaagcgatttaaattttgactgagtactaacccgaggtgtaggtgaccattaaaatgaacacaaaagccaatcaaatgctattgattgaccaaaggtcgaaccaccccttccactgccactgccataaacatatccctaaccctttgtctctgccattgatctgactgacgactatgacctctcttctgctatttctgcaactaccaaaaccttttttcgcaatgcttataatatattcaacactacaagcctgccttctctttctataccaaccacacgcatcggccttacaaagaacgcaccgaccatacccactgctcttaacacggattctccctctac

SEQ ID NO: 40509 - DNA, 360 bp, Gossypium hirsutum
  unsure (1)..(360): unsure at all n locations; Clone ID: LIB3165-055-P1-K1-C4
gccaccggcttccatcaacggtggtttgctttacctcctctncttcctccaccacgcaccgcctttttttccgctcgtcgacgacctacattgcggccttcggtcgtcgctagccttaactcttctccttctcctccgactcttatccaagaccgcccggttttcgctgcccctgttcctttgctcaccccgagagaagagatgggaaacaagtcctacgacgaagccattgaagctctcaagaaacttctcagtgagaaaggagaactgaaagctgaagcagcttgcagggtagatcaaataacagcagagttaaacacaacatcagctgacggcaaaccatctgactcttctgttgag

SEQ ID NO: 40510 - DNA, 357 bp, Gossypium hirsutum
  Clone ID: LIB3165-055-P1-K1-C5
atctaaagggttctttagattttcttaccatttccttctattaagaaaatggcgtcccagattgttggatatccccgtatgggaccaaagagagagcttaagtttgctttggaatccttctgggataagaagagcagtgccgaggatttgcaaaaggttgctgctgatctcaggtcatccatctggaaacagatgtctgatgctgggatcaagtacatccccagcaatgctttctcttactatgaccaggtgctcgatgccacatccatgctcggagctgttccacctagatacggctggagtggtggtgagatcggatttgacacttacttctccatggccagaggaaatgcctct

SEQ ID NO: 40511 - DNA, 378 bp, Gossypium hirsutum
  Clone ID: LIB3165-055-P1-K1-C6
ccgggcggcccaaggcttccgcccacgcttccgggctctctctcttttttttcttttccttttaaatctgtttgaaattgacctaaaggttgattcaaccatgaagaggtcacttggcagctcagattctttgggtgctttgatgtccatctgtcccacaacagatgaacatagtcctaggaacaaccatgtttacagcagggagtttcagtcgatgttagatggattagatgaagaagggtgtttagaagaatcaggtcatgttgctgagaagaagagaagattaagtgtagatcaagttaaggccttggaaaagaatttcgaggttgaaaacaagcttgaacctgaaaggaaagtgaagttggctcaagagcttgg

SEQ ID NO: 40512 - DNA, 345 bp, Gossypium hirsutum
  Clone ID: LIB3165-055-P1-K1-C7
cacagcaatggcagccttgaactccagtgttttggcatgcaactgtgctatctcaggcactggatcatctgagcttaatgccaaacttgcttcagcgccatcagttgcttccccagttatgtgcggtggtcgcaagttgcctgtgatcagagcccagcaggctaaattttctgattccaaaggatcaggtgccagtgaaggaagaagagctgctgtgctctacttggcagctggccttttcaccacagctgttgcttcttctgcaaatgctggggtcattgacgagtaccttgaaaagagcaaagctaacaaggaattgaatgacaagaagaggttggcaacaag

SEQ ID NO: 40513 - DNA, 351 bp, Gossypium hirsutum
  Clone ID: LIB3165-055-P1-K1-C8
cccacgcgtccgcaggaatcgcctttggtcgctttgatgattccttcagtttggggactgtcaaggcctaccttgctgagtttatctcaactttggtgtttgttttcgccggcgttggctctgccattgcttacaacaagttgacaactgatgcagccctagatcccgatgggctagtcgccattgctgtttgccatggatttgctctctttgttgcagtggctatcggtgccaacatctcaggtggccatgtcaaccctgcagtcacttttgggttagctcttggtggccaaatcaccatactaactggcatcttttactggattgcccaacttcttggatccattgttg

SEQ ID NO: 40514 - DNA, 354 bp, Gossypium hirsutum
  Clone ID: LIB3165-055-P1-K1-C9
cggacgcgtgggcggacgcgtggtgttgacgcgtgggcggacgcgtgggtttaggtatagcatacactactagtacccactactagcaatggcttcctcaatgatctcatcggctaccattgccactgcctctccggcacaggctaacatggtcgctcctttcaccggcctcaagtctgcctctgctttcccagtcaccaggaaggccaacaacgacattacttctctcgcaagcaatggcggcagagtgcaatgcatgcaggtgtggcctcctactggaaagaagaagttcgagactctctcatacctccccgatcttacacccgtgcagttggctaaagaagtggattacct

SEQ ID NO: 40515 - DNA, 324 bp, Gossypium hirsutum
  unsure (1)..(324): unsure at all n locations; Clone ID: LIB3165-055-P1-K1-D1
cggtcgtattggnnagaaattttnnactgggcaccaacttaggnngacgaccgtnngtcggtgtttggcaaaggtattttttcaggnnaccgacggcattccnncagatgaagaccattgttaagctttcgtcgacancccttccccggcccaatccaaatcgatttcttcggtggccttgagggcttcgggtttaccgatgaccgaagtgaggaaatggatcnagtgatgtcggnagttgcaaggcgtagggggaagaagttagtgaactcaagggacggaccttccaacattntgaagcaaccgaaaatgaccattgaaaag

SEQ ID NO: 40516 - DNA, 352 bp, Gossypium hirsutum
  Clone ID: LIB3165-055-P1-K1-D10
ctaaaagaaagaaccagagttttttttctctttagtttacgtttattggccttgtggaatttttgatactaaaaaaaggaagcaacgaagaagggaaatggagggcaaagaagaggatgttagattgggagccaacaagttcacagagaggcaaccaattgggaccgcggctcagagtcaagatgacgggaaagactacactgaaccaccaccggctccatttttcgagcctggcgagttaacctcatggtctttttatagggctgggattgccgagtttgtggcgactttccttttcttgtatatcactattttgactgttatgggagttgttaaggaaaaaactaagtgc

SEQ ID NO: 40517 - DNA, 353 bp, Gossypium hirsutum
  Clone ID: LIB3165-055-P1-K1-D11
cttgggttgagtgtagagatgaggtaaaatcatgggtgccaaagttcttggcttgtttgctttgctttccttttcagctgtctcggcatttgcacaggatgaggaagaccaaggtcttgttatgaacttctacaaggattcttgtcctcaggctgaagacattatcaaggagcaagttaagctactgtacaagcgacacaaaaacactgctttttcttggctgagaaacattttccatgactgtgctgtccagtcatgtgatgcttcactgctgctggactccacaagaaggagcttgtctgagaaggagacagacaggagctttggcctaaggaatttcaggtacattgaga

SEQ ID NO: 40518 - DNA, 352 bp, Gossypium hirsutum
  Clone ID: LIB3165-055-P1-K1-D12
cccacgcgtccgaaaaaaatagtttggcgcaaagctcagagctttagcggcgagcacaagctacaattcatcaccgccaaatccaattaaacaacataagtatttgcctgctagaatcatcgaacctgtaagaaatttcccttcttttttttttcttcttgtttgaatccgtcacgatggacccactttccgccctccgcgacttcacaatccgaggtgagctcgacaaaatcgtccgagtcaacgacgagttccgatttggcaccgagtattccttcccatgttccgccgaaaccgcctaccgttccaagcaaggcaacctctacaaccttgaaaccttggttttctacat

SEQ ID NO: 40519 - DNA, 357 bp, Gossypium hirsutum
  Clone ID: LIB3165-055-P1-K1-D2
gagaaatctagaattctctcagatttccggtctagggccatcactgctcatccgtgaggtctgccgcgtgtggtcttagcgccgacgcgccatcctaagaaccaccgcacacggtggctaaggttcaaaaaaccctccctcgccagtcgtcgggaaaatcacgaagctcacggtggtaatctcgtcagcgttgatggaggcgtagaatctggttatgaggagccctgggtatgctaagaaggtgcattaatggcctcgattttagggagctagacagacgctcctcgaggcttctagaagacgttgcggcgctagaagaaagagggcagaaaccctagggtttcctgcttgggtctg

SEQ ID NO: 40520 - DNA, 356 bp, Gossypium hirsutum
  Clone ID: LIB3165-055-P1-K1-D3
gttggctcgtaagctttcttcgtgctctacttgcaagtttgagaaattttattgtttagcaatcaacggtgatggcttcatctctagctctcaagaggctcctctcatgcaacatcctccctagctccttgcgggtggtccgcccaatggccattgctccatcctcctccaggctctttaacaccaatgccatgcgtgagttcgacgacgatggtgacgagcgtgacctcagtgatgaacgccagcgttcactttctcgccgcggtgacggttttttcacagatgtgctcgatccttttgctccaacaaggagcctgagccaagtcctgaacatgatggatcagttcatggagagc

SEQ ID NO: 40521 - DNA, 358 bp, Gossypium hirsutum
  Clone ID: LIB3165-055-P1-K1-D4
gtttgtttaactgtagcatatatttttagtttgcacaaatagcaatggcctccgccatggtctcattggcaaccattgccaccgtgaactgcttcttcccggcacaggccaacatggtggcccccttcaccggcctcaagtctgcctctgctttcccagtcactaggaaggccaacaacgacatcacttctcttgcaagcaatggtgggagagtgcaatgcatgcaggtgtggcctcctcttgggaagaagaagttcgagacactctcatacctccccgatcttacacccgtacagttggcttaggaagtagattaccttcttcgctctaaatggattccttgcttggaattcgaatt

SEQ ID NO: 40522 - DNA, 360 bp, Gossypium hirsutum
  unsure (1)..(360): unsure at all n locations; Clone ID: LIB3165-055-P1-K1-D5
gccacaaaaagctcccccgccccgtttcctttggcatcaacagcacaattctaagcccagaaacataaaaaaatggcagcaagtgtancaacaatggcgatgctcaatgcaaaatgcctaagcatcagctcaactaagatgagcagcccaacaaagccaaccccaaagcccttctcccttctctccatgcagaacctccccaaaggcctcaccatctcaaaaccagccaacaactcaaacctaccttcttcactcgctggcagcgccattgctggagctatcttctcaaccttaagttcatgtgaccccgccttagctgcacaacagattgctgaaatagctgaaggagacaaccgtggg

SEQ ID NO: 40523 - DNA, 356 bp, Gossypium hirsutum
  Clone ID: LIB3165-055-P1-K1-D6
cccacgcttccggccaaaaccagtttcaattgaagtgtggaacccaaatgggagatacggagttattagcaccaaacctatgcctggaactcgatggatcaacctcttaatcgagcaagattgccgtgtcgaaatatgtactgagaagaaaacaattttgtccgttgaggatatcatttctttgattggcaataagtgcgatggggtgattggacagttgactgaagactggggggagactttatttgcagctttaagcagagcaggaggcaaagcatttagtaacatggctgttggttacaacaatgttgatgttaatgctgccaacaagtatggtgttgctgttggtaacactc

SEQ ID NO: 40524 - DNA, 354 bp, Gossypium hirsutum
  Clone ID: LIB3165-055-P1-K1-D7
cttagccctgctgtcgctttatgttcggggcccgaggcaattccagagtcttgagctcaacgactttccccccgacatttccccggccgaatccgctcaattagaacgcgaaacggaagaaaatgcccgggaatgtgatcgcttacacaatgagatatttcaaaaaactaaagaaatagctcgggcggcgggagtggacgataatcaaaaactggagaaaatcgtcgacgcggtcaagtttctttccgacgtggaggacttggccgaagaggcgcgaatcccctatctccatgagttcaaagccaagatcgagaacaaagaaacttggttcgagatcgataaggaaatgaagcg

SEQ ID NO: 40525 - DNA, 353 bp, Gossypium hirsutum
  Clone ID: LIB3165-055-P1-K1-D8
ttcagttaacaatttcacagttgttttcttcagtctctctctcagccgtggctgcagccatctccaccgtcgctgccgctgccgccgccaaccgagctctgggagtgtcagtcccaacctcagctttcatggggaagaaagtgagctcaagattcaacagcaccaggcaggttccttcgggaagttttaaggtgatggcggcggagaaagagatagacgaagagacacagaccgaaaaggaccgatggaaagggttggcttacgatatttcggacgaccaacaggacattactcgagggaaagggatggtggattccttgttccaagctcccatgaatgatggaactcactat

SEQ ID NO: 40526 - DNA, 352 bp, Gossypium hirsutum
  Clone ID: LIB3165-055-P1-K1-D9
cccacgcgtccgtcactttaaccttgtacactactattacacttccgggaaaagatcatggccaccgtcacgacgcaagcctctgccgctgttttccggccatgtgcatcgaaaacacggttccttactggttcttccggtaagttaaaccgagacgtttcatttaaaccagtggcttctacatcgactagctcattcaaagttgaagcaaagaaaggggagtggttacctggtcttccttcaccagcttacctcaatggcagtcttccaggtgataatggctttgatcctcttggattggctgaggaccctgagaacttaagatggtatgtacaagctgagcttgtgaatg

SEQ ID NO: 40527 - DNA, 344 bp, Gossypium hirsutum
  Clone ID: LIB3165-055-P1-K1-E1
cccacgcgtccgccaacgctcgcgttccatttgtagaggccgcaagctttcctcgctaagaggactttgggggacagaacctagtactcccaatatgagagcctcctgataatcaacaccaacccagaccaaaaacagctgctgatcgtaccttattagacatggctaaaatccaaactcttaaatctgcttttgaactgactgatcaggcggccatagaccggaactgatgcaatccataccctatgactcaaagcgcttaccaggctgctgagatcattgcatctggcaagggtgacaggctcagctatataggagcagaggacagtttcttggatgctcat

SEQ ID NO: 40528 - DNA, 355 bp, Gossypium hirsutum
  Clone ID: LIB3165-055-P1-K1-E11
attcaacagctcgttggcattcaattccatttcattcatcaaaaaaaaaagaaggaaaaatgaagaaccagatgcttaaacaagttattggagtaccaatcaaagcagcaacttatagagttgagagaagaacatcaaggcaatacttacctgatgctgctggccaataccacgtttcatcacaagggtgtacaaaaagcaaaggaaactttgtactcaaaaggatgaacttgctagggaagaaagccgatatgttcgcccatggagtccgagagcatgtgagactggggccaaagatcagtgaaacagtgaagggaaagctgagtttaggggcaaggattcttcaagtaggagg

SEQ ID NO: 40529 - DNA, 352 bp, Gossypium hirsutum
  Clone ID: LIB3165-055-P1-K1-E12
cccacgcgtccgatcacctttacattaaccaagtgttcgacctctccagtgatgtgcttccacaaggtgggaccaagtgctatgatgacgacggccgcctcaagcgatctggaaccgtgtggaccgctagcgcacatattattacagcagtcattggttcaggggttctgtcactggcttgggccacggctcagctgggatggatcgctggtccaatagtgatgattttgttttcttttgtaacttattacacctccactcttcttgccgcttgttaccgctctggtgaccctgttaacggcaagcgaaactatacttacatggatgctgtccgatcaaatcttggtgggtt

SEQ ID NO: 40530 - DNA, 359 bp, Gossypium hirsutum
  Clone ID: LIB3165-055-P1-K1-E2
attttaattccccctttttttttttttcatttataatccacaaaaaacactgcgacttgcttttgcatctctcttctcgttgagcaccactggcaaccatgaagaccgccgaggcaaccgccgccacgacgaccgttctcagccgcggttacaaacgttcccccaaatccaacggcaagggtcaacggcacagctgctaagaaaaccggcgttaatcatggcaatggtggtgacatttctaacgggaaagcatcgttcatgaagtggacactcgacgacgtcgtttacgtcgctaaataccaccgcttaccctgttttttcgcggcgtggttcttgtttttcatatacgtggagtacac

SEQ ID NO: 40531 - DNA, 358 bp, Gossypium hirsutum
  Clone ID: LIB3165-055-P1-K1-E3
tcgcccacgcgtccgcccacgcgtccgttcttcttccttatcacaacaatatgttctgccttgctctctgcccatcaacctccgcctcttatccttatctccgttcgttggtcttacctccgaatctctatctcgtcatctctgttggatgactgtcgttcttaccaaatctgtaagaaaccctaaaatttggctttccattcctatcaagaatgggtaagggaaacaaagaagggatatccaagcaattcaggtggacaaaactgatagaatatctttttctcgaaattctaaaagaggaggcccagaaaggaaataaaccttcaaacactttcaaagcagtttctattaattaggt

SEQ ID NO: 40532 - DNA, 357 bp, Gossypium hirsutum
  Clone ID: LIB3165-055-P1-K1-E4
cccacgcgtccgcccacgcgtccgttcactcttccgcccacgcgtccgagctcgtctcgtcagagtcatttgggatatccggcggccatggcagcttgttccctcactctatcgtcctccttgccccaacctaaaccctcattttttggatcgaaaccctctcatctatccttacacagcacttcgtttgcgctcaaatcccagtgtttcagggtttcctcaagttccgtttccatctccagtcgccccgccgatgatctagttgcatctcttctctccaaggtgataaaaacggatggtggagtttcactcaccacaaaacagcaccaagaggtagctcaagtggctaatgagttg

SEQ ID NO: 40533 - DNA, 318 bp, Gossypium hirsutum
  Clone ID: LIB3165-055-P1-K1-E7
cccacgcgtccggccactcttagtttgacacgaacgaagagcatgcttgttccgtctgatatacaaagcctgacaataaactaggactggacgaaatagcaatgcccagaaattcatcgtaactcaaaacaatcaaacaggtggtgaaaataccataatggctctcacgaaaataggaccttaccactctattaatcaactcactaacaacccttgcatacaccgttacgcatggaacacatacccgatgtaggcggccatttgggagccatgtaaatggtcataagcaagcagggatcacaagacaatatctctggc

SEQ ID NO: 40534 - DNA, 351 bp, Gossypium hirsutum
  Clone ID: LIB3165-055-P1-K1-E8
ctcaaagccaggtctgggggcttttaagttttgacaaagatggaagtgcaaaagcctcaacatgggcaatatattgaaataaatgtggatgttggtcaaggccaaaggcgtataggagggagtaagttttgtggggaagcaccttgtggattttctgatgccggtactagctctaaggatgccgaagaaagatcggcttccatgcgcaagcttttaattgccgtggtgctttgcgtcatcttcatgagtgtagaagtagtgggaggcatcaaagccaatagtctagcaatattaactgatgcagcacgtttgctatctgatgttgcagcttttgccatatccttgttttcg

SEQ ID NO: 40535 - DNA, 354 bp, Gossypium hirsutum
  Clone ID: LIB3165-055-P1-K1-E9
cccacgcgtccggtggaagtcaagttcatgtctccatcagataatttaagtcaagaagattggaattggccattggggtttattttttccctaagaaccgagaactagaccgaaaacagttatagtttgagaagaaaagagaagaaaggcaaaaaggaagaaactttggagagaaatgagtggtggagcggaagaaggggtaacattagagcatacgccaacatggattgttgcagcaatttgtactgtgattgttgccatttctttggctatggaacgtttgcttcatgttgttgggaatgttttgaagagaaaacaacagaaaccactctttgaggctcttttgaaagttaa

SEQ ID NO: 40536 - DNA, 351 bp, Gossypium hirsutum
  Clone ID: LIB3165-055-P1-K1-F10
cccacgcgtccgcccacgcttccgtttggcctctacaaccatggctctggcttgcccatcattcgccggtaaggcagtgaagttctccccttccacccctgaaatccagggaactggccgtgtttccatgaggaaaaccaccaagcctgttccttctggtagcccatggtacggtcctgaccgagttttgtacttgggtccactttccggtgagccaccatcttacttgaccggtgagttccctggtgactatggttgggacactgctggactctcagctgatcccgagacctttgctaggaaccgtgagctcgaagtcattcactgcagatgggccatgttgggagctct

SEQ ID NO: 40537 - DNA, 354 bp, Gossypium hirsutum
  Clone ID: LIB3165-055-P1-K1-F11
ccacactctcaaattcagttaacattttcacagttgttttcttcagtctctctgtcagccatggctgcagccatctccaccgtcgctgccgctgccgccgccaaccgagctctgggagtgtcagtcccaacctcagctttcatggggaagaaagtgagctcaagattcaacagcaccaggcaggttccttcgggaagttttaaggtgatggcggcggagaaagagatagacgaagagacacagaccgaaaaggaccgatggaaagggttggcttacgatatttcggacgaccaacaggacattactcgagggaaagggatggtggattccttgttccaagctcccatgaatgat

SEQ ID NO: 40538 - DNA, 352 bp, Gossypium hirsutum
  Clone ID: LIB3165-055-P1-K1-F12
cccacgcgtccgcaacagttatgttctacgacagattatccctctcctgtaaggcaaagctccaaaaactcgaaaaccctgatccccgtttcctcaaatacggttcccctcatccagctgttgtttcccacacgcacatactatcttcccccgaaaccaaaattacaactttgcccaatggccttcgtgtcgccactgaatctactctatcttcccgcacggccacggttggggtctggatcgatgcggggtcgagatttgagactgaagagactaatggaacggcgcacttcttggagcatatgatatttaaagggacagagaggaggtctgccagggacttggaggaaga

SEQ ID NO: 40539 - DNA, 360 bp, Gossypium hirsutum
  Clone ID: LIB3165-055-P1-K1-F2
cagcaatttttatatgggcaagcactctccagctatgcttcctccacaagctagtgttgggtatcagcagcaactgcttcctggaatgaggcctggtggcccccctgtaccaaacttctttgttcccatggtccagcagggtcagcagggccagcgtccagggggacgaggaggagctggtgctgtccaacagactcagcaaccaatgccgatgatgcagcagcagatgatgcccagggggcatgcctatcgttacccccctggtcgtaacatgcctgaagttccactgtctaatgttggtggaggcatgctttctgttccatacgacatgggtggcatgcccttgcgagatgctggtat

SEQ ID NO: 40540 - DNA, 358 bp, Gossypium hirsutum
  unsure (1)..(358): unsure at all n locations; Clone ID: LIB3165-055-P1-K1-F3
gagcttanaaccttttcttgcacgttaaaattgattcttcactcactgatcaggagcaagacaagtaccgttcttacttgcatggagaaggtgaaaagaataccaactggaagcttggtgctcctccaaactatgacactgttaacaagctctttgaagaaggccgaaccaagatatggcctcctgcatcactagaagagaaggtccagaaccttgtgaagacatgggaaatggaaatgttcaataaaatatccttccctgactacaaatcagtgaaactacagaattatacagtcagcgtgaatgggaggaaacctttgagtttagaagagaagaggaagctgggaggaggctataa

SEQ ID NO: 40541 - DNA, 360 bp, Gossypium hirsutum
  Clone ID: LIB3165-055-P1-K1-F4
cccacgcgtccgcccacgcgtccttaaggctgctccagccaagactaaggcaggggcttgtgtgaagccgaagactactgcagctacaaagtcaaaagctgcagccaagcctaaggacaagccggttaaggcttcgaggacttcaactaggacgtctcccggaaagagggctgctgctcccaagcctgctgcgaagaaggctcctgcggctaaaaaagctcctgcgaagagtgtaaagccgaagagtgtcaagtcaccggcgaagaaagccccgtcgaggaggggaaagaaatgagagaagagagggtggtcaacataggggtagttttgtaaattcgagtgaagcttagtggctgtatt

SEQ ID NO: 40542 - DNA, 355 bp, Gossypium hirsutum
  Clone ID: LIB3165-055-P1-K1-F5
tcgatttccattcctttgacttcttttcatcatttcaagaaatgggttcaggagaaaaggtatttgtttatgaagatctggtgaagcacaaagacagaaatgattgttggcttttgatctctggaaaggtgtataatgtaacccaattcttggaggaccatcctggtggagatgaagtttgcttgctgctagtggaaaagatgcgaccaatgatttcgaagacgtaggtcacagtgatgatgcaagagagcagatgcagaagtactatattggtgaggtcgatgccaccaccattcccgcacgaaggatgtacaaagcacagacgtcaaccgcggcaactcaacaagaggagcct

SEQ ID NO: 40543 - DNA, 353 bp, Gossypium hirsutum
  Clone ID: LIB3165-055-P1-K1-F8
aacaaaatcagttgcttcacaatgttctctacaaccatggctctttctggcccgtcattcgccggtaaggcagtgaagttctccccttccacccctgaaatccggggaactggccgtgtttccatgaggaaaaccaccaagcctgttccttctggtagcccatggtacggtcctgaccgagttttgtacttgggtccactttccggtgagccaccatcttacttgaccggtgagttccctggtgactatggttgggacactgctggactctcagctgatcccgagacctttgctaggaaccgtgagctcgaagtcattcactgcagatgggccatgttgggagctcttgggtg

SEQ ID NO: 40544 - DNA, 352 bp, Gossypium hirsutum
  Clone ID: LIB3165-055-P1-K1-F9
tcctttttctttttctcagtcaagtttggttctcagggatcggttatggctatgcttttgctgatgatgttcactttatcatcagcttccgacatgtccattatatcctacgatgaagcccatcccgacaagtcaacgtctagttggagaacagacgacgaagttatggccatgtacgaggagtggcttgtaaagcatggaaaaacatacaacggtttgggtgagaaagagaggaggctccagatttttaaggataaccttaggttcatcgatgaacataacgccgatgagagtcacagttttaaggttggtttgaaccgctttgctgatcttaccaacgaggagtaccgag

SEQ ID NO: 40545 - DNA, 379 bp, Gossypium hirsutum
  unsure (1)..(379): unsure at all n locations; Clone ID: LIB3165-055-P1-K1-G1
ccgggtcgcccaacgccttccgaccattttcctccttttaatcttaattacattcacccaaaaaataaaacccttgggaaagcaaanaaggaagaagaagatgtcttggcaagcttacgtagatgatcacttgatgtgtgaaatcgaaggaaaccatctctctgccgccgctatcatcgcccacgacggcagcgtttgggcccaaagcgccaatttccctcagttcaagcccgaagaaattaatgccatcatgaatgactttaatgaaccgggtacgctcgctcccaccgggttgcacctcggtggcacgaaatacatggtgatccaaggcgaaccgggagctgttatccgagggaagaagggacccggaggtgttact

SEQ ID NO: 40546 - DNA, 347 bp, Gossypium hirsutum
  unsure (1)..(347): unsure at all n locations; Clone ID: LIB3165-055-P1-K1-G11
cccacgcgtccgcccacttttccgtatgcagcggagacgaggaagatgatgaggaggaaggtccgtggtggatagcataatcaatgtaggctgtgatagtgtttgatcaaaaccttatgttaatgctttagatgtttccatgttattcttttagatgcgcatgccatctaagggagaaatgtacctctgaatcctgttggttccttttgaccttcagaaattaatagttgtagatgggataatctgcttctatatgtacttttgatttaaagttgaatggcttagataaatcctttttgtnaaaaaaaaaaaaaaaaaaaaaaattaatatatataaaaataaaata

SEQ ID NO: 40547 - DNA, 352 bp, Gossypium hirsutum
  Clone ID: LIB3165-055-P1-K1-G12
cggacgcgtgggggaaatttagaatccaacaccgattttttgcttccgcttccgcttcctccatctttgacacctgatcttctgcttgccgtcagccaacactgattctcaacaccagacaccggcgttcatcaaagcttttacccattttcgcctttcgttgtcaaaatctgcactggcattcatcttcttctctcgaagattcgatcatagtgcttattgttactttaaaatttatttactgaaagcatttgtggattgcaacggatgggtgcactttgtgaatataagatattgtgtctagttaaaagctgatctttgtgcatttgaatcaagtgcttaccatactctt

SEQ ID NO: 40548 - DNA, 360 bp, Gossypium hirsutum
  Clone ID: LIB3165-055-P1-K1-G2
gttagcttaagcatacactactagttccctttactagcaatggcttcctcaatggtctgagtcggctaccattgccactgcctctccggcacaggctaacatggtcacccctttcaccggcctcaagtctgcctctgctttcccagtcaccaggaaggccaacaacgacattacttctctcgcaagcaatggcggcagagtgcaatgcatgcaggtgtggcctcctactggaaagaagaagttcgagactctctcatacctccccgatcttacacccgtgcagttggctaaggaagtagattaccttcttcgctcaaaatgggttccttgcttggagttcgaattggaggagggattcgt

SEQ ID NO: 40549 - DNA, 363 bp, Gossypium hirsutum
  Clone ID: LIB3165-055-P1-K1-G3
tcgaaaaaacgaaaaccttccttaaagtgtccttttcattactggactgacccataggtgaagaaaagagggaccccaatataataacctctttgtctttggtggtttagccattgaagaaacgaagctgaagagaaaaagaaaattaacagagtcggaagaaagaatgtttgcagcggagaatggactcaaaggggacccgaggctacaagccatatctgacgccattagagtggttcctcacttcccaaaaccagggattatgttccaagacataacaacgttgttgctggatcacaaagcgttcaaggataccgtcgacatatttgtcgatcgctacagagacatggatatatctgtcgt

SEQ ID NO: 40550 - DNA, 357 bp, Gossypium hirsutum
  Clone ID: LIB3165-055-P1-K1-G4
cccacgcgtccggccatacattttttgggttttttggagtagaactgcttgaaagtagaaaagcatggcaacagtgacagcttcacactttgtttcgaggatttcccatggagctgaaactaaggccaatctgagtcagacagggttggggaatcaatccatgactcacaatgggttgaggtttttaaacaaggtagataggttgcagatgaggaccaatgcaaaggctgttgctaggaacgcagtgaaagatgaacacccaactgcaaatgacaagctatctgggaaaattatatgtggaacagggatgaatattatctttgtgggagctgaggttggtccatggagcaaaactgg

SEQ ID NO: 40551 - DNA, 359 bp, Gossypium hirsutum
  Clone ID: LIB3165-055-P1-K1-G5
cccacgcgtccgctactagtaccctctactttcaatggcttcctcaatgatctggtcgggtaccattgccactgcctctccggcacaggctaacatggtcacccctttcaccggcctcaagtctgcctctgctttcccagtcaccaggaaggccaacaacgacattacttctctcgcaagcaatggcggcagagtgcaatgcatgcaggtgtggcctcctactggaaagaagaagttcgagactctctcatacctccccgatcttacacccgtgcagttggctaaggaagtagattaccttcttcgctcaaaatgggttccttgcttggagttcgaattggaggagggattcgtgcacc

SEQ ID NO: 40552 - DNA, 358 bp, Gossypium hirsutum
  Clone ID: LIB3165-055-P1-K1-G6
ggaaatattcagcaaagaaagggttatgatttttgaaaatttcaacaacatatggggccgtgcttagtttccaggttcgctcggttaggacgccgtcagagatattatccccctatcgagttaacgtcatcggaataggaaaactcaagagattcgagtctatggcatgtatagggttttaatgtgagtatgtaatattatgatttagccaaaggcattggcttgttattaaggtagtattagtcatgtaaattggcctatgtccgctaatgacgctatgggcccatatgattattcttatgcatgtatgttattatctcttgtgatgtggcttacaacatgtatgcctagagattga

SEQ ID NO: 40553 - DNA, 354 bp, Gossypium hirsutum
  Clone ID: LIB3165-055-P1-K1-G7
cccacgcgtccgctttccctctcatttccgctcatcttccttctttcaggctaggccaatgtctacttgttcacaggacttagctccgctcctcggcgtcaacggcaccggcgccgccgactacatatgcggcaagttcagtgatgcttcttatgccgtcgacaacacttaccttctcttctcagcctacctcgtcttctccatgcaactcggctttgctatgctctgtgctggctcagtccgagccaaaaacaccatgaacatcatgttaaccaacgtcctcgacgctgccaccggtggtcttttttattacctttttgggttcgcctttgcctttgggtccccttccaatgg

SEQ ID NO: 40554 - DNA, 354 bp, Gossypium hirsutum
  Clone ID: LIB3165-055-P1-K1-G9
cccacgcgtccgcccacgcgtccgtcttcttctattgtatgctcagcagtggtgtccgcctctacccccaattaagcttaatatcacccagaaatgtttaataacagaaagtagcagaataaaaattcaagtacgaaaatggctatgctgggagcaagtccaattaggttctcaagctttccaccgtcttcttcatatctcacttccaccttcaaacccacctcctcttccacactatcattagttgtggtggggaaatcaattatctatcgtcgatgtgtcgcctgctccgctgttcaggaatcttctactcctacagccactgctgaaaccaagggaaccactccaccatca

SEQ ID NO: 40555 - DNA, 357 bp, Gossypium hirsutum
  Clone ID: LIB3165-055-P1-K1-H1
ggaaggccggtattgaaaagataatttttatgtgtaaatttagacataataaaggcccgcataacatccttcgacttgcttcattgattagccctctgaaagcccaagaaaaatggcttctgcttccgctactctcctcaagtcttcacctattatcgacaagtccgagtggattaagggccaaaacctccgccacccttcggtttgttttgtacggtcacaccctacatcggccgcctttaccgtccgtgctagttcatatgccgatgagcttgttaagaccgcgaaaactgttgcatctccaggtcgtggtattttggccatggatgaatcaaatgctacatgtgggaagcggct

SEQ ID NO: 40556 - DNA, 354 bp, Gossypium hirsutum
  Clone ID: LIB3165-055-P1-K1-H10
ctcggagttccggaagatttacagtaaatgatcagtgacctcatgtcgatatgcgacaacaatgttcaagccaacaagaatgcgagtcccattaaaaatccagtcacgtaaggtcaaaatcttcttcagctgaaaacccaacagcaacaggacgagttcttccgtggtcaaggcctttccttcttcaatgagtccaacataccggctaataaccagattttaccacaaggggaagctcaattcgaccggttgaagacctcgaattctccattcgagaccacctacaacaacaacaacagtttcaaactgatgttcggctctccattcgatttgtcttcatttgattacaatgat

SEQ ID NO: 40557 - DNA, 361 bp, Gossypium hirsutum
  Clone ID: LIB3165-055-P1-K1-H11
cacccgtacaagaagaagaaatgtgatccttatgatgtctcttacaatcccaactaatcgctcaaaatcaattttgaagccaaagctggagacccaagtgatccccaaggcttcatccagatcattgattgtatgctcctccagcaatccttcctcctccgacaaatcggcttcatcactccaggccttctcagcggctctcgctctttcttccatccttctttcggctccactccctgctgttgcggacattgcggggctcactccttgcaaagagtccaagcaattcgccaagcgcgagaagcagcagatcaagaagctggaatcctcgttgaagctttacgcccccgatagcgcaccg

SEQ ID NO: 40558 - DNA, 362 bp, Gossypium hirsutum
  Clone ID: LIB3165-055-P1-K1-H12
aggcgacgcgttcgaaacctgataacttatgctttatatataacaacaccaatcaggaatggtgggcaagttttaatgtgactgcgatcccaaaagagatagacgaagagacacagaccgaaaaggaccgatggaaagggttggcttacgatatttcggacgaccaacaagacattactcgagggaaagggatggtggattccttgttccaagctcccatgaatgatggaactcactatgctgtcatgagttcctatgaatacatcagccaaggtcttaaaacgtacaatttggacaacaacatggatggtttctacatcgctcctgcattcatggacaagcttgttgttcacatcagcaag

SEQ ID NO: 40559 - DNA, 359 bp, Gossypium hirsutum
  Clone ID: LIB3165-055-P1-K1-H2
cctctccacccttgaaccatgtcggcttttgttggcaagtatgcagaggagttgatcaagaacgccaagtacatcgccacgccaggcaaaggtattttggcggcggacgagagcacaggcaccatcgggaagcgtctctcgagcatcaacgtcgagaacatcgagtccaatcgccaagccctccgcgagctccttttcacctctcccaacgcattatcctgcctctccggtgtcattcttttcgaggaaacactttaccagaaaacctctgacgggaaacccttcgttgaaatcctcgaagagaacaatgtcattccaggtatcaaggtcgataagggcaccgttgagatagccggcac

SEQ ID NO: 40560 - DNA, 361 bp, Gossypium hirsutum
  Clone ID: LIB3165-055-P1-K1-H3
gccacgcgtccgcccacgcgtccgtttagtctatacattttcataacaatggctgcgatcagaaacgccgctgctacatcctccttcatggggacactcttccccgacgtctacacaagttcagggagattcgtcgccaggtttggctttggcggcaaaaaagcagctcccaagaaagtctcgaaacgaaccccagaccgccctctatggtacccaggagcagtggcgcctgattggctcgatggaagtttggtgggtgattacgggttcgacccgttcgggttagggaaaccggcggagtacttgcaatatgatttggattctttggaccagaacctggctaagaattcggctggtgaga

SEQ ID NO: 40561 - DNA, 360 bp, Gossypium hirsutum
  Clone ID: LIB3165-055-P1-K1-H4
aattcgtttgtagttcccataaggatgttctgtacaggtagatattctttttctggaaattgtcatctatggcacagcagcaggctcaggtgaagttcacggcggtgaagccacagttgatggtgaagacgccaaaggcagttgatgcagttaatttctacaagtccgcttttggcgccgtcgaagcaggccgatctgcttgctgccccccgccaacggccgaacagaacctccctaacatcctctgcgctcagcttgagctcgccggctgttccttcgtcgtatataacgacgactccgctccacagaaaatcgaagggatcgctacatacactttgtcttcatctgattacaatgatg

SEQ ID NO: 40562 - DNA, 358 bp, Gossypium hirsutum
  Clone ID: LIB3165-055-P1-K1-H5
ggccacgcgtacgctctgaagcttttattttctttctataaacagttctaaagcacgttctgggtgtttttcttttggttggagatctcggcggagatggggaaacgacgctgtgttgtggcggcattagcagcgataatgttgatgatggagttggcggcgttgacagtagcagaaaacagaagaagtatgttgagtaatggtcttggaatgactcctcccatgggttggaacagctggaatcactttggatgcaatattgatgaaaaaatgatcagagaaactgctgatgctctagtttcaactgggctctccaagcttggatatgaatatgttaatatagatgattgctgggctg

SEQ ID NO: 40563 - DNA, 350 bp, Gossypium hirsutum
  Clone ID: LIB3165-055-P1-K1-H6
gtttcatgccggctaacttatgctttattcatcacaaccaccatcaggaatgggtggcaaattggctttcactttgatgcctcctcgtttcttcactgcgactattcaaaaacccgtggtttgtttctcttcttcttcttcttcttctatcaggtttcaacccagtgggaagcatctatgttttcgacgccgattgctcttactacccctcaaggctactgccgatcaacaaggtcaggtcgaagaagatgaagttgttgatagtaaaattctgccttactgtagcatagacaagaaagagaagaagtctttgggtgaaatggaacaagagtttcttcaagccctacaag

SEQ ID NO: 40564 - DNA, 354 bp, Gossypium hirsutum
  Clone ID: LIB3165-055-P1-K1-H7
cccacgcgtccgcccacgcgtcctttaaataagaggagagaattttggggattgaagatcttggattctctccatagatagaaaaaatgttgaaactttgtttaatggcttctcatgggtacactcccagcccgggacttgtttttcaccgggaaaaaggtgttagcaggatgatcaaggaatgtcaaaccttgttgccaagtaaagcaataaaaaatgacatggtacaaacgggtccctttgatctgaagtgcaatggaatcaaagagcagccaaaaccagttacccttctttgtgagcctaaactgattgtagatgtcgatccaaaagcacaaaagcctatggctattgata

SEQ ID NO: 40565 - DNA, 352 bp, Gossypium hirsutum
  Clone ID: LIB3165-055-P1-K1-H8
cccacgcgtccggctgtcgaagaatacgaggatagattttaacatctacagccggaatacatcatctacaagctcaacggttccttgtagcagtgacaagtgcgaacaacatagaaaatgttcttcaccttcaagtaattgtccttatcaagttatctatctatccaatggcacctcgtcgatcggggttttggtggaagatgtcttgcgcttgactacggacgacgataaaacaaacaaacccgtcgacgccaagattactttcggttgcgggaagattcagactggatcgttcttaaacggtgcagctcctaatggtcttttcgggcttggtatggacaatatatcagtt

SEQ ID NO: 40566 - DNA, 353 bp, Gossypium hirsutum
  Clone ID: LIB3165-055-P1-K1-H9
tgataaccgaatcatacgatgctctcttctctttatatctcaacctctgtttcggtttctccgatttctccgccgtctacttcccgctccaaattccggccacctcgctccgccgctacttacacttcgcaacaacagaaaggatcgacgaacggttacctaagccgtcaaggaatggcgacgtgcacgtcgttgtacgaagttctagggattcccgtcggtgcttcgaacgaggaaatcaaatcggcgtaccgccgattggctagagtttgccatccagacgtggcggcaatcgatcggaaagattcgtcggcggacgagttcatgaagatccacgcggcgtacagtacctt

SEQ ID NO: 40567 - DNA, 266 bp, Gossypium hirsutum
  Clone ID: LIB3165-056-P1-K1-A10
cccacgcgtccggaattggagtgattttcggttgaactcgtgttcttatccgtgagacaatgaaatgcgtatccaattctaaaaggattctgcctaagaaagcctccatagagaatggcagccaattccgtttcgtagataaatgtctttgcggtgacaatcgggtagcctctcagattcgatagcgaagaaatctttagatattaagtgtatgttcagtgatctttcctggtattatcttaaatttagtatttattgtatttatt

SEQ ID NO: 40568 - DNA, 226 bp, Gossypium hirsutum
  Clone ID: LIB3165-056-P1-K1-A12
cccacgcgtccgcccacgcgtccgcttattgtgactgtaatgatctatgcaggtggtcatgtttctggggcacatatgaaccctgctgttactctcgctttcgcagttgtcagacattttctatggaaacaggtctcattttatggtgcagttcaactaacaggggcaatctatgtatcattcacactccgtgtatcattcgattcaatataacatgctggtttca

SEQ ID NO: 40569 - DNA, 352 bp, Gossypium hirsutum
  Clone ID: LIB3165-056-P1-K1-A3
gagagataagagaaagcactgaaaaagcaaaaccatggcctctgcttctctcctgaagacttcaccagttttagacaagtctgagtgggttaagggtcacacccttcgccaaccttccacttctgtggtgaggtgccaccctgttgcaccctccggactaactgtgcgtgcaagctcatatgccgatgagcttgtcaagactgctaaagctattgcttctcctggccgtggaattttggccatggatgagtccaacgctaccttggggaaacgtttggcctcaaacgggctagaaaacacggaggctaaccgccaagcctacaggacgttgcttgtttcaactcctggcctt

SEQ ID NO: 40570 - DNA, 209 bp, Gossypium hirsutum
  Clone ID: LIB3165-056-P1-K1-A8
ggtcaaaggaacaatgtaggcattttaagtcggcaaaacggattcggggggtggttaaaaggaagggctttgaggtcttgacacgggggtaccagtccctaacccgctggttgccggcgcactgctcgagctgttcccgagacgagagcggttctatcacatgccggccgttggacggactggtaacggcttctttgggggcctttcct

SEQ ID NO: 40571 - DNA, 278 bp, Gossypium hirsutum
  Clone ID: LIB3165-056-P1-K1-B1
cccacgcgtacgcagaagactcttttaacatttcaccgcaaagatggagatagcgagatgtgaccgagtattgaagaaattgcaaagcaaaagttgccaaagatggtgtatgactactacgcatctggtgctgaggaccaatggacattgcatgagaatagatgtgctttcactaagatactgtgttgtcctcgtattttcattgatgtgagcaatgaaatacatgaccacaactgtgttggggtgtcaatatatttaatgcctattatggattgccc

SEQ ID NO: 40572 - DNA, 347 bp, Gossypium hirsutum
  Clone ID: LIB3165-056-P1-K1-B10
aaccctcaaaattccactaaaaaatgtcctccacagcttccctctccaccgccggagccaccacctctttcctccgcggccatccggcgccgaaaaccctaaactcccttcctttcaaccaatctcttttcgggctaaaaccccaacgaaatggccgtctcaccatggcagcatacaaggtgacactgttaacacccgaaggaccccaagaattcgtgtgccccgacgacgtatacatcgttgaccaagctgaggaagaaggcattgatcttccgttctcgtgtagggctgggtcttgttcttcgtgtgccggagtgattaagcaaggctccgtcgatcaatccgac

SEQ ID NO: 40573 - DNA, 346 bp, Gossypium hirsutum
  Clone ID: LIB3165-056-P1-K1-B12
tttagctatagcatacactactagtacccactactagcaatggcttcctcaatgatctcatcggctaccaggggcactgcctctccggcacaggctaacatggtcgctcctttcaccggcctcaagtctgcctctgctttcccagtcaccaggaaggccaacaacgacattacttctctcgcaagcaatggcggcagagtgcaatgcatgcaggtgtggcctcctactggaaagaagaagttcgagactctctcatacctccccgatcttacacccgtgcagttggctaaggaagtggattacctccttcgctcaaaatgggttccttgcttggaattcgaattag

SEQ ID NO: 40574 - DNA, 251 bp, Gossypium hirsutum
  Clone ID: LIB3165-056-P1-K1-B2
cccacgcgtccgattagcactagctctagtagcaaccatggcctccgccgcatgtttcttgcaccaccacgcactcacaaccaatggcagatcatcatcattatcgccgtcgctgcgccaggtttcaaacatgaagcctacccagcaggtggtgtgcaaggctcaaaagcaggaagatgttggaagccttgggtcccgtaggttggttttaactgtactcattggggctgccgtggttggcttaaaggttt

SEQ ID NO: 40575 - DNA, 103 bp, Gossypium hirsutum
  Clone ID: LIB3165-056-P1-K1-C10
atccatatatacgtaattcttattttttcatcattaaccatcttaaacgacggtgttattttatgttgtggtggtaatatatttcacccactcatgccatttc

SEQ ID NO: 40576 - DNA, 324 bp, Gossypium hirsutum
  Clone ID: LIB3165-056-P1-K1-C12
ttttcatttcaaagattctttcaatatcagtgagggagtagtagttcgagttatggacgacgttttgtttgggcgcgaaaaaaaatggattacttttatggaccagggaggaaccatctcttcgttccgggtccggttaacataccggaacccgttattcgagccatgaaccggaataacgaggattaccgttccccggctattccggcaatgacaaaaacctttcttgaagatgtttagatgatattcaagacttctaccggtacttcttttatgatcccaacatacagtgaactcgcgcatgggagagtgcacttactaata

SEQ ID NO: 40577 - DNA, 148 bp, Gossypium hirsutum
  Clone ID: LIB3165-056-P1-K1-C2
ccggccggaaacccggggcgacccacgcgaacagacacgcgaccgagccaaacagacgggggaagcccggccgacagcgcgaccagggcgagggaaaaaagggcaaggggggaaaaaaacggaaccgggacgcggcggcagacgggaa

SEQ ID NO: 40578 - DNA, 210 bp, Gossypium hirsutum
  unsure (1)..(210): unsure at all n locations; Clone ID: LIB3165-056-P1-K1-D1
nacgcccacgcgnacgggaacggcacccgcgggggccaaccccgggcgacgaacaggggacggagaaccgggacggacaaggggaanccgaccggccaacaaaaacaaagcagggcgaaggggccggcggaagccgacgcaaagggaggacgggccagggcggggaaggcgaaagcgaagaaaaggaaccaagcgcggggaaacgggggg

SEQ ID NO: 40579 - DNA, 340 bp, Gossypium hirsutum
  Clone ID: LIB3165-056-P1-K1-D10
taaaattttcacttcacttttttttactttgtctccttcctttctcccttacgggcaatcccctcaataccccatttttctggttcctttttcaagccattttacaggcacttcccagttgggagaaggggaaaatggcacagcttttatcaccctcaactcaatggcaaatgacactaccaaagacctcaacctatggaagtcccattgcaacaaaaatgtggagttctctggtactgaaacagaacaagaaaggagctgctaaaagctctggcaagtttaaagtggttgccttgtctgaaaacagcactgtctacatgctagagaacttactaaacat

SEQ ID NO: 40580 - DNA, 346 bp, Gossypium hirsutum
  Clone ID: LIB3165-056-P1-K1-D12
gccttccaggtgattatggatttgaccccttgggactctcagaccctgaaggggcaggagggttcatcgagcctaaatggctagcctacggtgagatcatcaacgggcgttatgctatgttgggtgcagtaggtgcgattgcccctgaaatacttgggaaggccggtcttatcccagcagaaacagccctcccttggtttagaaccggtgtgatcccaccagcaggaacatacagctattgggcagacccttacactttgtttgtgttcgagatggcactcatgggatttgcagagcacagaaagttccaagactgggccaaaccaggttcgatgggggaacaata

SEQ ID NO: 40581 - DNA, 176 bp, Gossypium hirsutum
  Clone ID: LIB3165-056-P1-K1-D3
tttcgactcctgagatccaaaacaccaagttcattttcccgtttaacctacaccattgttgaaatttatgtccctttcgaggtatttaccaaaggctctcttaaatatgaggagaaagatggtatagattattctgtcttcacattttatctttcttgtggtgagcgtgtgctttt

SEQ ID NO: 40582 - DNA, 237 bp, Gossypium hirsutum
  Clone ID: LIB3165-056-P1-K1-E12
cccacgcgttcgcccacgtttccgctcacgcgttcgtgaaaatccactgtgatggttgtgagagagtttcagcaacagtgatatgttgtgcatatgaggctgcactttgtgctaaatgttatttcgaattttatgcacctaacaagcttggtagcaaacaccataggtttgtcctttaatgccttcttaacaatgttttcttcttgtgatatatgtcaggataaagctgctatcatc

SEQ ID NO: 40583 - DNA, 314 bp, Gossypium hirsutum
  Clone ID: LIB3165-056-P1-K1-F1
acatcacgcgttcgcgatatctttgaaatctttttctaacatcttaacatacgattttggttgtgtggtagagagagatggactcccttgacaacgtggtatatcctttgagagacttctccaaggacagctttcgccttgtcatgcgttgtcacaagtctgatcgttaagagttcacgaaggtggttttccgtacagtgatcggttttgtagtgatggtattttgttggattctttgtcaagcttatctttatttctattaaccaacattatctttggctttcgttaggaattggtaggctcgtttaaaattg

SEQ ID NO: 40584 - DNA, 300 bp, Gossypium hirsutum
  Clone ID: LIB3165-056-P1-K1-F10
tccacgcgtccgcccacgcgttctttcacgcgtccgattcccgaaagacatgagtcattgtttcagctctttgaccacattgaggacaacttgtattggctgctagtttcctgtgttgtaaatttacctttgtaggcagatagttccatgacagtctccatatagtagcatatactttagatggtagatttagactccagagttgtttgtaaaattttgtttagatggattgtaaagcatactctctaggatattcatccattctctataattgtttataagctcttcttactgtgaatt

SEQ ID NO: 40585 - DNA, 234 bp, Gossypium hirsutum
  Clone ID: LIB3165-056-P1-K1-F11
agctttcttttccgttttagatctcaaaattcaaaaggctttctttttcatctgatggctgctactattgactccgtcaaagctaggcagatcttcgacagccgtgtaaatcctacggttgaggttgatgtggaaatttctaacggtataaaggctagggccgcatttcctagcggtgcatccactgtattttactgaggctcattgagttgagagatggaggttcctattacc

SEQ ID NO: 40586 - DNA, 347 bp, Gossypium hirsutum
  Clone ID: LIB3165-056-P1-K1-F12
cccacgcgtccgcccacgcgtccgtgctattttctgtctagattccatgcccatggcttctacaaccagtaccaatctcccactcaaagaccgagttgctatagtaactgggtcatctcgtggtattggccgagttatagccactcacctggccggactcggtgctaaactcgttattaactacacttccagtgcagaccaagccgatctcgtagctacccagatcaattctctgtatcctggtgactccccgcgagctgtgactgtcaaagccgatgtttcggaccctgcccaggtcaagcttctgtttgattcggccgagcaggcgtttggatcaccgattcaca

SEQ ID NO: 40587 - DNA, 121 bp, Gossypium hirsutum
  Clone ID: LIB3165-056-P1-K1-F6
cgaccgaaaaacgggcggcgcagctactttgaaaactcaaaacctgcccttttttttttcctaagactcaccatttttgacgggctggtgggtgggggtcacactctccccaacctccact

SEQ ID NO: 40588 - DNA, 209 bp, Gossypium hirsutum
  Clone ID: LIB3165-056-P1-K1-G1
cggaaaaaccggggcgacccacgcgaacgaccaagcgaacggggaaaggaaccaagcgaacggaacaggaacaaggagaagacgagccgaagagacgggggaagcccgaacgacagcgcgaacagcgcgagcggcgaaagggaaccggggaaaaaagacggaaccgggacgcggcggccgacggcaacggaagggagaccggagacgaa

SEQ ID NO: 40589 - DNA, 146 bp, Gossypium hirsutum
  Clone ID: LIB3165-056-P1-K1-G12
tccactgcgtacgagaaagttacatgtttacaaccccactaacattaaacttgtgatctatatattctatggcaaaacccttcagcttctgacattagaacctaagaaaaaagagtttaattcattttgaatttggtctgagattg

SEQ ID NO: 40590 - DNA, 295 bp, Gossypium hirsutum
  Clone ID: LIB3165-056-P1-K1-G9
tcgctcacacgttcgctgacatttgtttttctctcttatcaactccactaccattattactaccattatggcttcggctactgaacctgaagccaaacccaacctttagatacaggcaaaaggaaagggtgttggattagcatatttctaaggctttcacatcttctctactatctggacatttgccaggaaaacctttgtagatctttcattcactctctgcttctctaacataggctctatggaatgcaacaatggcgggttcacgaaaggtatggcataggcatatctaaag

SEQ ID NO: 40591 - DNA, 271 bp, Gossypium hirsutum
  Clone ID: LIB3165-056-P1-K1-H1
tcgtccacgcgtacgccatctccctattctcattggcaatggcaacccaagcctgcctgttgactccatcaaccctctgcaccccaaaatccggcgaccgcatcggcggcgtgttacggaaacaaccaccggtcctaaccggccctagctttaagtgcccaaaaagcatcatctgcccacgcaccatcaatagccaaggaactcggagagaaaggccggggacatacccgccacaaaagggaaggcacccaggttcgggtttttaacctcc

SEQ ID NO: 40592 - DNA, 202 bp, Gossypium hirsutum
  unsure (1)..(202): unsure at all n locations; Clone ID: LIB3165-056-P1-K1-H12
gcaacccacgaaaacccaatttttcccgcacaacaacggcaaccaaggggaggttttaaaaagaggtttcccttaaccaaccagcnggacggacgagaaggagcactacgccgatagcacaccccggaccgctgagaacgaccgagcgcacggcaccggcgagaaaggggtaggccggaacggcaaacccctccaccacaaa

SEQ ID NO: 40593 - DNA, 418 bp, Gossypium hirsutum
  unsure (1)..(418): unsure at all n locations; Clone ID: LIB3165-057-P1-K1-A1
ccggnnggaaaaanggggcgacccacgcgtcgctccctatgcagcgggcccactaggtaacggccctttggttcgctgtaatcccaatcgggccgaatcggttactcccctgtaccttgattgcgcataataggtaatacgccccctcagcaccgattacccattccgcgtttttccttgtctgctattccgttttttgccctcgtcctcaacgttctgattctcggacgcctacttgcacagctaagcaacaatggcggggatagcaatattgctagatctatacaggaaaaacccaagcttttgctcttaaccaagcttccactcttctgggttcttctctgcctcagctgccggcacatcaaccgccgctactgtctttgctggaaccccttttgcctccaggttcctttttggg

SEQ ID NO: 40594 - DNA, 379 bp, Gossypium hirsutum
  Clone ID: LIB3165-057-P1-K1-A11
gttactctctacctcccacagtcgcatcatggccgattccgccaccgcgggttgccccctaaaagtcatcggcggagctgattcttttggcgccgagctaaaagacgccatggtatcccacctccgctccctcaacatagaagtcgaagatctcggaatcacctcctactacaacatcggtgctgaagtcggccgtcgagtatcttccgccaccacctcgccctccttggagacccgtggcctccttgcttgcggaacgggcgtcggagtcgggatcttcgccaacaaattccccggcgtgttcgccaccacatgtctcactccggacgaagctcgcaacaatcgctccatcaataactgcaacgtcttggcactcttc

SEQ ID NO: 40595 - DNA, 379 bp, Gossypium hirsutum
  Clone ID: LIB3165-057-P1-K1-A12
cccacgcgtccggagagcctcaccttaccactctcatttcttccaactcccttcgtcttcttcaatttgatctatctgtttctttcttctttgcttcttttcaagctctattattataacagctacctctgcttcttcttcttcttcttttcaattgccattagtttgattgtagctatggcttctgctgctaactgtgtagtgtattttagcagcaacactaactaccttactgtctcagaactaaaaaaccattctttgcctgctacctttgtcagcagaccacccaacaattacactcttgggaaaagaagtcattacagtgtcagattgttatcttcaacgacgggaatcaatccacgggcagcagcaccattag

SEQ ID NO: 40596 - DNA, 383 bp, Gossypium hirsutum
  Clone ID: LIB3165-057-P1-K1-A3
gacaaaatggagagccaaatggcgctgccattatcacagctcagctgaaagtgagaactattactgaaaagctcctaactgtcgttcgccgtcgcgcacaacctcctcaaacgccgaagcttccgtcggccaatgacttcgtctctaggcaacaccgcctcttctcgaatctcagcatcttcctcccccggagttcgactttctctccatcccccctcctctttttctctcctttctttctcttcctcttttaagcccttcgctttctctcctctatcttctcatttctctccccaccagaggagatcggcagttaatgtgtcgagtagcagaggattcggcacagttgcaagtccgaaatgtgcagcttcgaattctgatca

SEQ ID NO: 40597 - DNA, 376 bp, Gossypium hirsutum
  Clone ID: LIB3165-057-P1-K1-A4
cccacgcgttcgactcctcaaaattttttttcaatggcgtctcgagttcttgttttggcttcaattcttattttctcttgttttgcagagacatgctatggggcgatctcattctcatcccttcaaagaacacttgttgttactgcttctcatagacaaggacttttgaaagccggggaagacaagatcacagtgagatggggattgaaccagagttttccggccgggaccgactcgtcttataagaccatcaaggtccagctttgctatgcacccatcatccaagtcgaccgtgcatggcggaaaaccgaggaccatcttaacaaagacaagacatgccagttcaagatagtcaagaaaccctacatcaacgtta

SEQ ID NO: 40598 - DNA, 401 bp, Gossypium hirsutum
  Clone ID: LIB3165-057-P1-K1-A5
aaaaccggggcggcccacgcgtccgcccacgcgtccgttcgcatttcggttatattcacagagggagagagagagttgaggcggttttgtttttggtgatggaaaacaaatggcggtttcatcatgttcatttactcttagccctagggtttgtaatccatattcttcatatgagtgccgttcagatcccgatttttccactgcgccgatcgtggacaagcctcgttttgtctccagccgaatggtgacggcttcttcgctttacgccggatgtatcattagccgacggttgtcttctctgatctttcgtttcccggctaatttcttgcgccagcctttcattaatgctcgctcgcaactttagcaattatctgggttgtgcaaatagtttctgctttttg

SEQ ID NO: 40599 - DNA, 159 bp, Gossypium hirsutum
  unsure (1)..(159): unsure at all n locations; Clone ID: LIB3165-057-P1-K1-A8
taaaccaatcatccttaacttttttttttagaacatttactgcgcacccgggggggattatagaatcggcgtgcgcacacanattcacacaaccaacaattttacccttgattacattgaaaagcttgatgacaccttccactaccaatccattgactt

SEQ ID NO: 40600 - DNA, 384 bp, Gossypium hirsutum
  Clone ID: LIB3165-057-P1-K1-B10
gcatacactactagtacccactactagcaatggcttcctcaatgatctcatcgggtaccattgccactgcctctccggcacaggctaacatggtcgctcctttcaccggcctcaagtctgcctctgctttcccagtcatcaggaaggccaacaacgacattacttctctcgcaagcaatggcggcagagtgcaatgcatgcaggtgtggcctcctactggaaagaagaagttcgagactctctcatacctccccgatcttacacccgtgcagttggctaaggaagtagattaccttcttcgctcaaaatgggttccttgcttggaattcgaattagaggagggattcgtgcaccgtaaatactcgagcctacccacgtactacg

SEQ ID NO: 40601 - DNA, 382 bp, Gossypium hirsutum
  Clone ID: LIB3165-057-P1-K1-B11
gttgaagctcagctctataaaaaaatatgggcaccacattgttttccggctggggtagcttttcatggcagcaactatctctttcttgcagtttcgctcactcttcttcatcagaaaatgggatttcaaggccaaaagctgttcccacgtcaagaggaaatgggttggttgataaggagaaggacaattcattggggatttcgagtagacgatcccttttgatcactgggatatctgtagcgtcatcgtctgtattaggatttccaggtgagggaatggcagtcgtcaaacaaggtcttctagcaggaaggatacctggcttgtctgagcccgatgaacaaggttggaggacttatcgaagaccagatgacaagtcaggagg

SEQ ID NO: 40602 - DNA, 275 bp, Gossypium hirsutum
  Clone ID: LIB3165-057-P1-K1-B12
tatcaaccattttttattccatgttttttttcctcctattgcgtgagaaatcaggtctgttttgtttgagcactgaatgtaaccaagtagattctgaaacaaatattatacatgtttttcactgttggcttggctgtaatcatttattttatgaatgctagggaagagactgagtgccttttcttattcccttaatttgaggatctttgtttattaaatgaacttctagctatgatatatactggtgtctggtttattgagaatgattttatgta

SEQ ID NO: 40603 - DNA, 371 bp, Gossypium hirsutum
  Clone ID: LIB3165-057-P1-K1-B3
cccacgcgtccgaaagctttcccttttctttttgttttccttcttgattgcttgcagggtagctcgtaagtgccgttcaccaacaacaaaaatccttgatgtcttagcttctttgaaacaagctcagcatattctttcctttgatcctcaaatttctaatggtttttccaaaagccaaccccttttcgtcaactcttcttcttcatcgggttctggtttttcgattccacttcattcacggggctctttgcgaaaaacccatcatgttgattataaaaacctggttcgagcccgactcgacctgtattcattccgagttaacacgctcaccaccgaggtactacttcgctgtcaatggggttcgcaaaact

SEQ ID NO: 40604 - DNA, 411 bp, Gossypium hirsutum
  Clone ID: LIB3165-057-P1-K1-B4
gaaaaaccggggcggcccacgcgtccgttagctatagcatacactactagtttcttctactagcaatggcttcctcaatggtcggatctgttaccattgccgctgcctctccggcacaggctaacatggtcgctcctttcaccggcctcaagtctgcctctgctttcccagtcaccaggaaggccaacaacgacattacttctctcgcaagcaatggcggcagagtgcaatgcatgcaggtgtggcctcctactggaaagaagaagttcgagactctttcataccttcccgatcttacactccttcagttggctaaggaagtggattaccttcttcgctcaaaatgggttccttgcttggaattcgaattagaggagggattcgtgcaccgtaaatactcgagcctaccca

SEQ ID NO: 40605 - DNA, 302 bp, Gossypium hirsutum
  unsure (1)..(302): unsure at all n locations; Clone ID: LIB3165-057-P1-K1-B6
gaaaaaccggggcggccgacgcgtccggaaatagtgaaggtgaacgcttcatttgttgatatgctcctacagccaangatctttgttcaatggatgttggtgggcgatctataaccatggaaatcatggaaggtcgtggtgtaggacctttgaaggatcatatctatctccacttgaatcacttgcctacagaggtgcttaaggagaggcttccaggtatctctgagactgctgccatttttgctggtgtggatgttacgaatgtgcccatcccacttttgcctactgtacattataacatt

SEQ ID NO: 40606 - DNA, 382 bp, Gossypium hirsutum
  Clone ID: LIB3165-057-P1-K1-B7
gtttttcacaccataaatttgtgtttaagaaaaagaagagagcttttttttttgtttggtgagatctaaacaatttgagtggttctggtttttgttgtttgaaaatctttcccccttttttctattactccccgcttctctgaatccctttctgttaatcatctgtcttttgaatcaaaatctgatttttgggtttgtttttcatcagtacttagcaaatgggtcaaaagcaaacttagacaaggatttctttaaaagtcaggtgttttcagaaacgagatccaggttttttttttttttttttccttcagctttgttgatataaagtttcaatatttgtctctatttcgaggtaaatcttataaaatttctcatttttttt

SEQ ID NO: 40607 - DNA, 216 bp, Gossypium hirsutum
  Clone ID: LIB3165-057-P1-K1-B8
attgaaattgatgagatatgaagtgtgagaaggatgaactctgtattttgttgtgtggtgaagtagctaacttctgcaattagtttgtttattcatatgcttagcatatggtaatgtaatctgcagttgcttcttattcataaggttgaagcaaggtatcgttttctatttatcttgatttaaaattagagttatatcaataaatatagttttttt

SEQ ID NO: 40608 - DNA, 423 bp, Gossypium hirsutum
  unsure (1)..(423): unsure at all n locations; Clone ID: LIB3165-057-P1-K1-C1
caggaanggaanaaccggggcgacccacgcgtacgcccacgcgtacgcccacgcgtacgtttttttctctcagactactctttcgaaccagctgcaccatcacccccaaagaacaaagcaaattgtagaagatggcaacacaagcacttgtatcatcgtctcttacctactcagtggagactgcaaggcagattcttggagctaaacgacaaattgggccttcaaggaaaggatcctttgttgttaaggcagcttcgactccacccgttaagcaaggagctgatagacctctatggtttgcatctaaacaaagcctttcatacttggatggcagccttccaggtgattatggatttgaccccatgggactctcagaccctgaaggttcaggatggtttaattgagcctaaatggctagcctac

SEQ ID NO: 40609 - DNA, 393 bp, Gossypium hirsutum
  unsure (1)..(393): unsure at all n locations; Clone ID: LIB3165-057-P1-K1-C11
accggccggaaaccggggcgacccacgcgccgcagagagccaaancacaaaaaagcgaggcaacacagagaagcccagaaggaagccgcagaagggggggaaaagggccacaagagagcaccacgcgaccagcaccggcacaaagggcaccacgcggcgacaaacgcagggacccaaccgccccccaaccaagacgaagcgcggaaccgggaacgcaaacccaggcgcaccaagagcaaanggggaaaaggacgcgcgagacacgagggggcgaccccagagaacacaaaacccgaaaacagcgaacgaggacggccagaagaaagagagcaaaccgaggaagacaacggaagggcgcacagaagacgaggggagagcacgcgaaaagaggcg

SEQ ID NO: 40610 - DNA, 334 bp, Gossypium hirsutum
  unsure (1)..(334): unsure at all n locations; Clone ID: LIB3165-057-P1-K1-C12
ccggaaaggaaaaggggggggacccacgacgacgaccacgcgaccggcggaagcaagacgcagaaccggccaccagaccaancgggggggaagcgaaagaggggggggggcgagcacgnacacggacggaagccggncgggacgagcaggacgagcaggacgaagagcaccaggggcacgcgccagccgaacagggagacaggcgaaaggggcgcacgcccgacggggaggagcaagacgggacccagggagaagccggcaggacgaagagaaggggggaaaaaggccgcacagcaggagagaaagacagaaggcggggggggggggcggaccg

SEQ ID NO: 40611 - DNA, 396 bp, Gossypium hirsutum
  Clone ID: LIB3165-057-P1-K1-C2
aaacccgggcggaccgacgcgtccgcctttacctgagctaatagcagatttatttgatgcacgttcaatgtcatttggtgggacacacgagtacttggctccagagatcatcaaaggtgaaggccatggaagtgctgttgattggtggacttttggaatcttcctctatgaactcttgtttggtaaaactcctttcaagggatccgggaaccgagcaacattgttcaatgttgtaggacaacctctttggtttccagaatcacccattgtgagttttgtagtaagggacctcatactaggtctacttgtaaaggaaccacaacatatattggcttataagcgaggtgcaaccgagattaaacaacatcctttctttgaaggggtgaattgggcatt

SEQ ID NO: 40612 - DNA, 389 bp, Gossypium hirsutum
  Clone ID: LIB3165-057-P1-K1-D1
gaaaaaccggggcggcccacgcgatacgtccactcgttcgattaaccctaatttttttttccaaatttggttgagaagaaatggggagattaactgatgaagcccgcctgagatcctttaatttggaaacctacgaattagctttacacagtttatgccatggccttatcttccacgcttttttccaccaatattaaccattaacgcattgttcttggcagttttctctaagattacacttacagagttgacataatctcatctgattcagatatcctctttcttaagacctacccaaagtttgtctttgaccatccttatgcacttatcaatctcattttccaacccatttcgtaaatccgttttatcctttttttctagtttcgatc

SEQ ID NO: 40613 - DNA, 379 bp, Gossypium hirsutum
  Clone ID: LIB3165-057-P1-K1-D10
gccagtttcaatggcaaagttttgttcctgttttctcctctgctgttttctctggattcatatccccacctgggctcaaagcagacaaccctcctacgccgaacagcaagagaccgacagggtgactaacttgcctggacagccgccggtgaagttccggcactatgctgggtacgtcaagctccgacctcaagacttcaaagccttgttctactggtttttcgaagcccaagatggagtttccaacaagcccctagttctatggcttaatggaggacctggttgctcatcagtggcctactgagcagcacaagaacttggtccttttcttattcgaagcaatggcactcgccttacttttaacaaattctcttggaat

SEQ ID NO: 40614 - DNA, 156 bp, Gossypium hirsutum
  Clone ID: LIB3165-057-P1-K1-D2
aaaaaaaaaccgggcggcccacacataacgattgatggatacttatgaaaaattgtttttttctcatgctaaagtacaatggggggggacccaaatgtgtggcggggcttaaaaatgctttctcaattgcaagattagttggatgcaacaagaatg

SEQ ID NO: 40615 - DNA, 112 bp, Gossypium hirsutum
  unsure (1)..(112): unsure at all n locations; Clone ID: LIB3165-057-P1-K1-D5
ggaaggaaaaacggggggggggagcgnacgaccacgcggacggaaggaaaggggcnnngggcacaaaccaaagaccaaaaggaggaggagcnaggagaaggggggggggcca

SEQ ID NO: 40616 - DNA, 305 bp, Gossypium hirsutum
  Clone ID: LIB3165-057-P1-K1-E12
tgaaaaagcaaaaccatggcctttttttctctcctcaagacttcaccagatttggacaagtctgagtggggtaagggtcacacccttcgccaaccttccacttctgtggtgaggggccaccctgttgcaccctacggactaactgtgcgtgcaagctcatatgcctatgagcttgtcaagactgctaaagctattgcttcttctggccgtggaattttggccatggatgagtccaacgctacctgtgggaaactgttggcctcaatcggtctttaaaacacggaggcttaccgtcatgcctacag

SEQ ID NO: 40617 - DNA, 404 bp, Gossypium hirsutum
  Clone ID: LIB3165-057-P1-K1-E4
aaaaatccgggcggcccacgcgtacgcccacgcgtacggttgagcagctgtttttacatgcacgtagactccaggtatcggggtagacttcagattggtgtgggtgagaaagggtatgagaaagatcctgcaattgtagcaaaggaagcaattcatgaggccactcgtaatggttctgatgttgttctcgtcgatacagctggtcggatgcaggataatgaaccactaatgagagccctctcaaagcttatataccttaacaattcaaatctagtcttatttgtgggagaggcacttatgtttaaatgatgctgttgaccagtttttaaaacttaatcacatattggttgacctctttactttttctacttttatatcgatagtatatatttctcttaccaaat

SEQ ID NO: 40618 - DNA, 142 bp, Gossypium hirsutum
  Clone ID: LIB3165-057-P1-K1-E8
gggggggggggagaagggagagaaaggacgggaaacgaaaaacgtgtggaaaaaggagagacaagaaggaaggggggggaccaaggggggggggggggggggaaggggaaaaaaaccaaccaacgagagagggggaaggggg

SEQ ID NO: 40619 - DNA, 282 bp, Gossypium hirsutum
  Clone ID: LIB3165-057-P1-K1-F1
gtgaacggcacttgcacatgggttagtttatcctaagagacgggggaagcccgtgcgacagcgcgtccagcgcgagcttctaaagggaatcgggttaaaattcctgaaccgggacgcggcggctgacggcaacgttagggagtccggagacgtcggcgggggcctcgggaagagttatcttttctgtttaacggcctgcccaccctggaaacggctcagccggaggtagggtccagcggccggaagagcaccgcacgttgcgtggtgttcggtgcgccccct

SEQ ID NO: 40620 - DNA, 241 bp, Gossypium hirsutum
  unsure (1)..(241): unsure at all n locations; Clone ID: LIB3165-057-P1-K1-F11
cccacgcgnccggcgagagaccgatagcgaacaaggaccgcgagggaaaggggggacggaccnggaagcggggggcaaagagcgcncgaaancgccgggagggaagcggacgggggccggcgacgcgccccgggcggacggggaacggcgagagccggaccgccgagcggcacggggcgaggaccgacccgggacggggcggggggccaagcccgggcccgagcaacgcccgggggggacg

SEQ ID NO: 40621 - DNA, 157 bp, Gossypium hirsutum
  Clone ID: LIB3165-057-P1-K1-F12
tcgcggacgcgtggggttggtggtttttttaacgatgctcatgattgagacgtgtaccatcatgttgattacggtgggtcgctattactctaatatactaccgtcttcagcttttatatctctgtataatattcatcacattttttctttctttatt

SEQ ID NO: 40622 - DNA, 242 bp, Gossypium hirsutum
  unsure (1)..(242): unsure at all n locations; Clone ID: LIB3165-057-P1-K1-F5
ggcaggaacgggagggggggggcccaaaggcgcaaaaaaaagagacgaagaggaacacggcgcggcgaacgagccgcagaacacaaccgaggacangacacacacgcgcaaggacgacagaggccacgggcaaaggaagcagcaggaacccaaaggcaaggaaacggagacccacagccagggggagaagacagacacgaggacacgccagcaggaacccaaaaagagaaccccaccggggc

SEQ ID NO: 40623 - DNA, 341 bp, Gossypium hirsutum
  Clone ID: LIB3165-057-P1-K1-G11
gctatagcatacactactagtactttctactagcaatggcttcctcaatgatctgatcggctaccattgcgcgctggctctccggcacaggctaacatggtcgctcctttcaccggcctcaagtctgcgtctgctttcccagtcaccaggaaggccaacaacgacatcacttttctcgcaagcaatggcggcagagtgcaatgcatgcaggtgtggcctcctactggaaagaagaagttcgagactctctcatacctacccgatcttacacccgtgcagttggctaaggaagtggattaccttcttcgctcaaaaagggttccttgcttggaattcgaatt

SEQ ID NO: 40624 - DNA, 173 bp, Gossypium hirsutum
  Clone ID: LIB3165-057-P1-K1-G12
cccacgcgttcggaagtcgttatttttgatccgtaacctcggaaaaaggattggctcttaaggctgggcacgggggctccattaccgaacccatctgctgccggcgcactgctctagctgctccttcggttagagcggatcgtctcctgcctgccggcggacggactgggaac

SEQ ID NO: 40625 - DNA, 382 bp, Gossypium hirsutum
  Clone ID: LIB3165-057-P1-K1-G7
cgtttttcctctaggctttttgtctttttctccttctcaagagtgattcagaagcgacttgtgggaggaaagaagagttttcagaagatgggttcttatggaatgcttgccagaaggattgtggagactgaaatgccaatcatggttcagatacagcaattgatccgaggagcgaaaaatgctgtgtcactcgctcatggagtggtttactggaaaccacccaaacaggcattggtttaggttaaagcacttgtagaggagtcttcagttagttgttatggtgctgatgaaggtctttctgaacttatagaagcattgatttgaaagttaccttaggagaacaatttgcagaggttttctgttgattgtcactgcatgagca

SEQ ID NO: 40626 - DNA, 163 bp, Gossypium hirsutum
  unsure (1)..(163): unsure at all n locations; Clone ID: LIB3165-057-P1-K1-G8
ataaaaaaaaaaaacaaagtaaggggaattgttgagtctgtgacagcaaaaaaannaaaaaagggcgggaggaaaaaaagaaagaagaaaaaaaagaagagaaaagtttaacaaacggaaaaaaaaagaaaaaagggggggagaaaagaggggggggggggag

SEQ ID NO: 40627 - DNA, 363 bp, Gossypium hirsutum
  Clone ID: LIB3165-057-P1-K1-H10
ctcaattctctgaaaatttttgtgttgaacttcttttttctctttgtaccaccatgtgtggaggtgctatgatctccaatttcataccgccgtcgcggtcgcgacgattgacggccgatttcttgtggcccgatctgaaaaaatccgggttgaagaaggggtcgggtaagagatactcgaagcccgtgatcgacttgggcgatgatttcgagactgactttcaggagttcaaagatgaagaatctgatatagatgattatgatgttgatgatgttttggctgatggaaagccctttgcttttaacgctacaaaaaaacctgcttatggtgtatcttatggttcgaactctgaaaaattcatgc

SEQ ID NO: 40628 - DNA, 366 bp, Gossypium hirsutum
  Clone ID: LIB3165-057-P1-K1-H11
acggcgaagccgtgatcaggaggttttttttatgctttagccagggcccaagaagagaagaaagtcaaagaagctggggatgttcgattcataatggcgcagatacagttcttgcaaaagaacgtggacgaatctttgatgagttaccaggaattggtcaaagaagatccaactgattttaggccgtatttttgtcaaggtatcatatatagcttgcttgataggaatgcttaagctaaagaacagttcgtaaagtataaggagctttcaccaaacaagtttgtggtggatggatacttaatgacatctttatcgagaatgaaaactgttttgtgaccagtgtggatgaattgtagtttgggggtt

SEQ ID NO: 40629 - DNA, 382 bp, Gossypium hirsutum
  Clone ID: LIB3165-058-P1-K1-A1
cccacgcgtccgcccacgcgtccggtccgggcccaagtcccctggaaaggggcgccggagagggtgagagccccgtcgtgcccggaccctgtcgcaccaagaggcgctgtctacgagtcgggttgtttgggaatgcagccctaatcgggcggtaaattccgtccaaggctaaatacgggcgagagaccgatagcgaacaagtaccgcgagggaaagatgaaaaggactttgaaaagagagtcaaagagtgcttgaaattgtcgggagggaagcggatgggggccggcgatgcgccccggtcggatgtggaacggcgagagccggtccgccgatcggcttggtgcgtggaccgacgcgggtcgtggtgggggcccaagcccgg

SEQ ID NO: 40630 - DNA, 295 bp, Gossypium hirsutum
  Clone ID: LIB3165-058-P1-K1-A11
tcgaaaaaagagtcaatggcttccagtttagctgcttcaatggctctgtccttagcgggagcttcttaaaacaggatgccaagttctgaggcattctttaagccactcctggttaagccattgagatcaatgggcgctgttaaaagacccaattgacggttccaagtcaaggttgcttctttttcgctcaaggaaaaggtggtgaccgggttgtcagcatctgctctgtctacatttattattatcctagaggtggcttcaatcagcttatggagtcaccctatttttaagaact

SEQ ID NO: 40631 - DNA, 246 bp, Gossypium hirsutum
  Clone ID: LIB3165-058-P1-K1-A2
cttctcccatttgtttcatggctcgagaactggcagagggggggcttaatttattttcaactcagtcttcaagttatcctaaccggagctgtgctcctcctcataagtgcccaattctcaagcgactctgctattatttttatgattcaagaattttatgtctaataaatctgtcaacttttgtgctttgttggtaaagtttgtgtttgatttgatgagactgtgatgtaattttcttctctttga

SEQ ID NO: 40632 - DNA, 199 bp, Gossypium hirsutum
  Clone ID: LIB3165-058-P1-K1-A8
gaaatggaccgatggaaaggttttttttacgatatttcggacgaccaacaggacatttcttttgggaaagggatggtgcataccttgttccaagctcccacgattgatggaacttactatgctggtatgagttcctattattacattaaccattgtcttaaaactttacaatttgtacaacatcatggatggactttac

SEQ ID NO: 40633 - DNA, 383 bp, Gossypium hirsutum
  Clone ID: LIB3165-058-P1-K1-B1
cccacgcgtccgtggaatcagccctagttgacaaatattcactttctctttcacagagagagagagagagagagagaaaaaagagagggtattctttacataatattcatctaatacaaataaaagatggctcttcacctttcttgggttttcgtttttggcatcctcggcaacgttgtttcatttatggtctccctttctcccttgccaacattttatcaaatctacaagaagaaaacatcagaagggttccaatcattaccctatgtggtatcactgttcagtgcgatgctttggatttactatgcacttcttaagaaggatgctatgctactaaattaccatcaacactttctgctgtttcattcaatctttttacattg

SEQ ID NO: 40634 - DNA, 175 bp, Gossypium hirsutum
  Clone ID: LIB3165-058-P1-K1-B10
cggacgcgtgggcgcgagcggtcctccctttttttttttttttttttttttcgcgctttattccctctctccctctccctctttttttctctcctttcctcacccccaaaatgaccaattttaatttcaacccccttaacccctttcccccaatcaaccgttcggctccaccccc

SEQ ID NO: 40635 - DNA, 380 bp, Gossypium hirsutum
  Clone ID: LIB3165-058-P1-K1-B11
cggacgcgtgggcggacgcgtgggcggacgcgtggggagaaaactcagaaacacacaggaaacccaaagtctttctcctttttttccccctctttttttatacacaaaggtaataattttcgaaaatggcgtttgctgttacctcttccccggctgcaatttctggttccagcttttctcgttcaagtgcctcctctgacctcaaaattccgcaaattggttcatttcggctagcggatcgccatgcaacggtgaatctatctcaaaagcgttgcgcagtgaagcccgtgaatgcggagccaaagaggaacgattccatgctttctcatgctgcaaccacctctgctcctgaagtgtcggaaaaagttgaggtggaggat

SEQ ID NO: 40636 - DNA, 386 bp, Gossypium hirsutum
  unsure (1)..(386): unsure at all n locations; Clone ID: LIB3165-058-P1-K1-B2
cccacgcgnccgaaaatggcctctgtttgtgcttcttcttttattgcagctgttgccatctcatcccccgggtgctttaaaactggatcagtcctccctacaacaaaggcttctttccttacagggaagaaacttagatctgtgagaaagtacacaaaaccagctgccggaccaacatttccagtgtgcgccgccgccgaccccgacagacccctttggttcccaggcagcactcctcctccatggctggatggcagtctccctggtgactttggttttcgatcctcttggtcttgggtctgaccctgagacattgagatggtactgtccagcagagctggttcactgcagatgggcaatgttgggagctgctggtattttcatcc

SEQ ID NO: 40637 - DNA, 339 bp, Gossypium hirsutum
  Clone ID: LIB3165-058-P1-K1-B3
gtaaatttcttttgcaatcctttgtagagctccgggatccatcggcaccatgggggcgtcaattttgacaatgtgggggccctcaaaaccctctctttctgacacttcttcactctctttccgttctttcatcagcccttttcagctcccatctcagagctcaacccccggtaacccttccaggtcctcatctgtaaccccagttcactgcggtcttcgcgagcttagagaccgtattgattcagttaagaacacgctgaagatcactgtagccatgaaactgggggctgctgctaacgttaggagagcacaagaagctggtgctaatggcagaccttt

SEQ ID NO: 40638 - DNA, 115 bp, Gossypium hirsutum
  Clone ID: LIB3165-058-P1-K1-B7
cccacgcgtacggttagctttatgtttacactactagtacccactactagcaagggctgttttaatgatctcatagcctaccattgccactgcctatccggcacaggctaacatg

SEQ ID NO: 40639 - DNA, 382 bp, Gossypium hirsutum
  Clone ID: LIB3165-058-P1-K1-B8
ctgaatctcaattaatcaaccacacactcaggcagccatggcatcagcctcaggtttgtttacccccatcttcaccaccaccctccaaaacaaacatggcagccgccacaacatcgccactccatcgttccaaggcctcaggcccctacgcaaggccccctcctccaagctcgcccccttgtcttgtggtagaaaggttggtggtgtgaaggctgagctaagcgccccagtggtgataagcctaagcacaggcctctcccttttcttgggtcggttcgtgttcttcaacttccaaagagagaacgtggcgaagcaagtgcctgagcaaaacgggttgacccatttcgaagcgggtgacactcgagccaaggagtatgttagc

SEQ ID NO: 40640 - DNA, 380 bp, Gossypium hirsutum
  Clone ID: LIB3165-058-P1-K1-B9
aaaaaatctccaagccaaaccatttttccgctggcatttgcttacaacaaaaaggattttttttgaagaatgcctgtatttgcttcaagagttgggttcaggagacacgactacaagaatagatcaaaggaacgaaacgatgaccgtaaagacaaattgtccgaagtgttcaagagctatgctgctaatgggctgctagacaaggaagggctgaaagacgcttttctacatctagatgctgccatgccgtaccggcaagccgaagacgccctccgtgtcgtcggcaaaacctataacattaacgtcgaggaggaaaccgagcttaacgcccttatcgactatgcttacaataagggtgacgggtcttcaatttgattagc

SEQ ID NO: 40641 - DNA, 290 bp, Gossypium hirsutum
  unsure (1)..(290): unsure at all n locations; Clone ID: LIB3165-058-P1-K1-C1
gcccacgcgnncgnccactcgtccgcccacgcgtccgtttatgggcctggaactttagccaagcaaagcgcattatgatacttacccggagctcaagagatatatatagcatccgcattgcatttatggcataaaattactctgttttttttctgtgggaacatgtttctgtttcattgagttaaaaggttatgtaatgataatgttggctactgctgccttttcactgtatattcttttcttaaaaacgatttgctgatatgagtcttcataaatgaacattaatcaat

SEQ ID NO: 40642 - DNA, 349 bp, Gossypium hirsutum
  Clone ID: LIB3165-058-P1-K1-C10
cccacgcgtccgaggaactgtaccatattaaccagcgcactaaacagagtaaagaaggtttcgtctacggagttcggccatccttgttggtctgcaacttctgtagttactagcgggaaacaaatggcaaccaacacaagttttcaactgttttcatcatctaaggataaacccagtttgggtttagggttcttggagtccttggagccgcagctgccaccttcttcttcttctgtcgaagtccttttcttagaggtttctttttttgtgaaatacactgtggagcctgtctacttggatggccttactttacttaagggatgggtgagttcttaagaagttcttgggt

SEQ ID NO: 40643 - DNA, 340 bp, Gossypium hirsutum
  unsure (1)..(340): unsure at all n locations; Clone ID: LIB3165-058-P1-K1-C3
gccggaggcgtggccacaccggcggtatgctgcgttgatgatgcagttgggttgcgacggattgtttgtcggatctggggttttcaagagtggtgacccggctaagcgtgcccgagctattgttcaggccgtcactcactacagtgaccccaacatgcttgcggaagttagctgtgggctcggtgaggccatggttggccttaatttgaacgattagaaggttgagcggttcgcagctcggtctgattagtaagtgaaggagggatcaagcctntggttgttgaaccaccgtcaccagtgcactggtgttccaagttatcatagtttaaagtggagtctt

SEQ ID NO: 40644 - DNA, 381 bp, Gossypium hirsutum
  Clone ID: LIB3165-058-P1-K1-C4
ctcatttcaaggttttagaaattgggtaaaccaaaaaagaaattaagctcttaaccatggctgccatcaatccagcagtagcagcaccatattctatgggtgttcatagaaatacagcgacccaaagccacaaagttatggcggctgccaatccagcagtgaaatacggacgtgcagcttcgattctttctacacccacacagacacagtccccattactacgtagaaattcggttcccagcagaagctcagacacgagaatcatggctgccaaccctgaagttttgtcgtcaccgtcgtcgtcaaattttaatgggggttctgatttttacgcagtgccagtttcggaaccgttacggtcaggatttaaagctggaagac

SEQ ID NO: 40645 - DNA, 371 bp, Gossypium hirsutum
  Clone ID: LIB3165-058-P1-K1-C8
tttattcgtacgtttttaccttatattaaaccaaaaccagcaggcaccggtcagagaatcttcagacaccccctccctccataatctggaacaaccaagatgacgaatatgcctggcaccactattgtggagcctttagatttggctggtctacaaataccttatcatttcaggggccccatgttcctcgagctaatgcatgaccctgtcaccgtgtgcaccggccaaacctacgaccgtgccagcatagagtcctgggtcgccaccggcaacaccacttgtcccgtcactcgtgcccccctatctgattgcacatttatgcctaaccataccctttgacggcttattcaagattggtgaggagcgaacca

SEQ ID NO: 40646 - DNA, 259 bp, Gossypium hirsutum
  Clone ID: LIB3165-058-P1-K1-C9
cccacgcgtccgtccacgcgttctttagcttctgctccaagctcaactgggagggggtattgtttgaagaaagcgacccctaggttcaacaacaacggcaaggctccagtgggaagcatcatgattgtggctgcccaagaaattgactaagacacacataccgaccaggaccgatggaagggtcttgctttagattgttacgaagaccaacaagacatcaccataggggaaaggtttggctgactcatatcatcaagct

SEQ ID NO: 40647 - DNA, 312 bp, Gossypium hirsutum
  unsure (1)..(312): unsure at all n locations; Clone ID: LIB3165-058-P1-K1-D12
cggaaaccccgggcgcccacgcgccgcccaccgccgaggcnaccaagcacaccaaggcgacacaccgagagggcnaaggncgccggacaagaggacggagccccaggggcanacgggaccccgccaaaggaccccggaaagaccaggaccccagcacaccgaaaagcagacaacccgacagcaacacccaagaaacaacccacaacggcgacccacaaggaagcccgagaaccaaacacccaagccccaaaagcacggaccnggcaacccccagccaaggacggagcgaaccacgacagggggaacgaaggg

SEQ ID NO: 40648 - DNA, 106 bp, Gossypium hirsutum
  unsure (1)..(106): unsure at all n locations; Clone ID: LIB3165-058-P1-K1-D9
ccaggcaccaggaagggcaacaacgacaagaccncgcgcgcaagcaaagggggcagagagcaaagcaagcaggggggggcccccacaggaaagaagaagagcgaga

SEQ ID NO: 40649 - DNA, 192 bp, Gossypium hirsutum
  Clone ID: LIB3165-058-P1-K1-E8
atcgaccactcagtttaacttatttttttgctcatggaagctctcagctcggagcgccttttaccttctcttgcatcatttcttctaaaccataatatttcccggctagaatcatacgctctcccactccattccaaaaaggacctgtactcttccgttttccaattacgttcctaacaacacaagtattct

SEQ ID NO: 40650 - DNA, 302 bp, Gossypium hirsutum
  Clone ID: LIB3165-058-P1-K1-F10
ggggcgacccacgcgttcggtctctatcttagtcatggctttatttcatctccaccgtcgctgccgttgtcggcgtcataccgagctctgggagtgttagtcccaaccttagctctcatggggaagaaagtgagctcaagattcaacagcaccagtcatgttcctacgtgaagttttaaggtgatggctgcgtgtaaagagatagtcgttgcagacacctgactgaaatggacctatggataagggttggcttactatattttcggaccatcaacatgccattacttttaggtaaagggttg

SEQ ID NO: 40651 - DNA, 331 bp, Gossypium hirsutum
  unsure (1)..(331): unsure at all n locations; Clone ID: LIB3165-058-P1-K1-F3
gaaaaaaccggggggaccaacgctttcgaccatttgtagctgctgttgacttttcttgtcgtctccatcccgaagccgnggggatcctcctacgacaatggtggccgctaagaagaccaagaagacccatgagagcattaacaacagattggctctcgttatgaagagtggtaaatacactttgggttacaaaactgttcttaaatctcttagaaaactccaaaggttagttgattattattgccaacaactgccctccttttaggaagtcagagatcgaaaattatgccatgctgtgcaaagttggagtccactcaccataatggaaaca

SEQ ID NO: 40652 - DNA, 414 bp, Gossypium hirsutum
  Clone ID: LIB3165-058-P1-K1-G1
ggaaattcccggcctataatcttccttccttttcattccttttgctatggcaggaactggggtggtcgctgtttatgggaacggcgcaatagctgaaacccacaaatcccctttctccgtcaaggttggcctagcccaaatgctccgtggcggggtgattatggatgtcgtcacccctgaccaagctcgcatcgctgaagaagctggagcctgcgccgtcatggctcttgaacgagtccccgccgacatccgagcccaaggtggcgtggcgcggatgagtgacccacaactcatcaaagaaattaagcaagctgtcaccattcccgtcatggccaaggctcgtattggccatttcgttgaggcccagatccttgaagccattggcatcgactatgttgacgagagcgaagtcct

SEQ ID NO: 40653 - DNA, 352 bp, Gossypium hirsutum
  Clone ID: LIB3165-058-P1-K1-G10
ccacgcgtccgttggccttctggttcaacccatcgtgttatacaacagtgaccgttgcacctctcggttcggccgacgccgacccgttattgtcattggagctctctttgtctccatagctgcctttctcatcggttgcgccaaagacattggccaccatgcgggagatttcttgaagagaactaccaaaccgagagctgtatcctattttttgtcgtcgggttttggatccttgtcgtggctaacaacatgttgcaaggtccgtgttgagctctccttgcggacctttcgggtaaagaccactaaaagatgagaaccgctaacgggtggttttcgtttttcatggcggtcg

SEQ ID NO: 40654 - DNA, 272 bp, Gossypium hirsutum
  Clone ID: LIB3165-058-P1-K1-G12
tcggtaaatggctaccactgctttttcaatggcgactcagctgaagagcagctgcacgtcgtctgttacaagaggactggtattccccatgggcattttgggatccctgtttaaagttattttttggaaagaccaggaccccttgcttcactgtctaagctgttcaatccgacatgtcaacatttcaagtcatgcaactcatcaattgagactcctttataggaagcctggagactccaatcttctgaagcccctataatttcattggtacc

SEQ ID NO: 40655 - DNA, 400 bp, Gossypium hirsutum
  Clone ID: LIB3165-058-P1-K1-G2
cgacccacgcgttcgtccacgcgtccggttaaaaaaaaaaatctccaagccaaaccatttctccgctggcatttgcttacaacaaaaaaaattcaaattgaagaatgcctgtatttgcttcaagagttgggttcaggagacacgactacaagaatagatcaaaggaacgaaacgatgaccgtaaagacaaattgtccgaagtgttcaagagctatgctgctaatgggctgctagacaaggaagggctgaaagacgcttttctacatctagatgctgccatgccgtaccggcaagccgaagacgccctccgtgtcgtcggcaaaacctataacattaacgtcgaggaggaaaccgagcttaacgcccttatcgactatgcttacaataagggttacgggtc

SEQ ID NO: 40656 - DNA, 169 bp, Gossypium hirsutum
  Clone ID: LIB3165-058-P1-K1-G9
aaaaaaaaaaaaaaaaaaaaaaaaaaaaaataaaaataacacaaataaaaaaaaaaaaaaaaaaaaaaaaaaaacaaaaaaaaaaaaaacaacaaaaaaacaataacaaaaaaaaaaaaaaaaaaaaaaacaaaaaaaaaaaaaataaaaatacaaaagaggaagaggg

SEQ ID NO: 40657 - DNA, 78 bp, Gossypium hirsutum
  Clone ID: LIB3165-058-P1-K1-H10
taaaaaaaaaaatttaaaaatattttttaaaaaaaaaaaaaataaaaaaaagggggggtaattaaaataaaatagatg

SEQ ID NO: 40658 - DNA, 221 bp, Gossypium hirsutum
  Clone ID: LIB3165-058-P1-K1-H12
ccacagcgtccgcggacgcgtggggcaaccattgctttcgtgaactgctcctccccggcacaggccgacatggtggcccccttcaccggcctcaagactgtctctgctttcccagtcactaggaaggccaacaacgacattacttctcttgcaagcaatggtgggagagtgcaatgcatgcaggtgtggcctcctcttgggaagaagaagtttcgagacac

SEQ ID NO: 40659 - DNA, 377 bp, Gossypium hirsutum
  Clone ID: LIB3165-058-P1-K1-H5
cggacgcgtgggctagggtttcggcgccgcagctctgtggcttttccagtcccgtgtgcccttttggttgacttgcaggctaccacggcaccacgcgcgccttcatcatccgtcgtagctctgaccggatccccaaggatccgtttggccttggacggagaggcaactgtcgattaagtcggcgtcgatcgacaggtacaggggtacggggccagctgtggggatatgtggcactcgacgtggggtgtacggaggcgttgaaggcggtcgtacggcgcgaaggctggggctcgcctgcggttgcggcgcaaatgtgaggaggaaaccctagggtttcttttctaaaaacattgggcctatcgggcttgtaatctggg

SEQ ID NO: 40660 - DNA, 112 bp, Gossypium hirsutum
  Clone ID: LIB3165-058-P1-K1-H6
cacgcgtgcgctaggggtgttgttttttatttttcagtatggtacagtaccggggggaattttgttaaagggggctgcaactattgaagagcatttgccttcatcatctgtc

SEQ ID NO: 40661 - DNA, 156 bp, Gossypium hirsutum
  Clone ID: LIB3165-058-P1-K1-H7
caaagggtgttgcaggcggtttttaatattttcagcctctatcccttccatggcatctacttcaagcaaggtcccaaatgggtcagatgcgacttaagactatcgtcaacactaactcatcggcgaatatctattctataacctcagggtttgatc

SEQ ID NO: 40662 - DNA, 157 bp, Gossypium hirsutum
  Clone ID: LIB3165-058-P1-K1-H8
gaattatgctgtataaccattttttgccccagataaaaactaccactgcggggggtatattacccacgatgcacctcattttccatattctgatcagctccccgcggccgcagatgagccaaaaccccatcaatagccgctacttgacaacataccc

SEQ ID NO: 40663 - DNA, 328 bp, Gossypium hirsutum
  Clone ID: LIB3165-058-P1-K1-H9
gaaagagtggaggaagatgactcttaacaaaacaatgttaaaactaggcccaagggaggattggtcaccatgcctttcattttctcaaatgagatctgtgagaagctggcggtggtgggatttaataccaatatgataagctacttaacaacacagcttcatatgccattaaccaaagcagccaacactctcacaaattttggtggaacagctagcttgacaccattgcttggtgcctttatctttgatttatacgccggtcgtttctggacaataacagtgcgctttcattatataccaaaattgggatgacatgtttaacactttt

SEQ ID NO: 40664 - DNA, 258 bp, Gossypium hirsutum
  Clone ID: LIB3165-059-P1-K1-A11
attcgctgcccatttactttgttttcttaagactaatagccaataactttggcactctgttagagggcttcttcctctgccaatgcactctatttctcttgttcctccattcctattgtttcccttgctttttctctctctatatgcttttccactgtttaggatgggctgatgtatgctttttctcttgtatgggtgttgcatgttagtccttgtgctacctttggcttcactgtccatgctctggaccttcttgga

SEQ ID NO: 40665 - DNA, 367 bp, Gossypium hirsutum
  unsure (1)..(367): unsure at all n locations; Clone ID: LIB3165-059-P1-K1-A8
acactctcaaattcagntaacaatttcacagtagttttcttcagtctctgtctgagccatggctgcagccatctccaccgtcgctgccgctgccgccgccaaccgagctctgggtgagtcagtcccaacctcagctttcatggggatgaaagagagctcatgattcaacagcacctggcaggttccttcgggatgttttaaggagatggcggcggagaatgagatagacgatgagacacagaccgaaaaggaccgatggaaagggtaggcttacgatatttcggacgaccaacaggacattactcgagggaaagggatggaggattccttgttcctagctcccatgaatgatggaactcactatgct

SEQ ID NO: 40666 - DNA, 146 bp, Gossypium hirsutum
  Clone ID: LIB3165-059-P1-K1-A9
cggacgcgtgggcggacgctttgtttttcccctacgctctcactaaaacgagctgtctcttcttagttttccaatagttcgtaacaatgtcggtctcacttcttgctgcagctaccctgatgcaacctatctaggttgctgcacca

SEQ ID NO: 40667 - DNA, 223 bp, Gossypium hirsutum
  Clone ID: LIB3165-059-P1-K1-B10
tttctatgactgaaaaaaaaattccttattcttttctttccttctaatctctccttatctccacatcctccgtcatctccgccgtcctccgccgctacgagtttcgattcgttatgtgttgtaagtttatcgatacgtgcttggattagagtataatagtgtttgggttttgatttatctgatttatttataagatgttaaaaaaatatggagttgtacgtgc

SEQ ID NO: 40668 - DNA, 312 bp, Gossypium hirsutum
  Clone ID: LIB3165-059-P1-K1-B12
ttatatctcaacctctctttccgtttccccgatttctccgccgtctacttccgggtccatattccggccacctcgctccgccgctacttacacttcgcaacaacagaaaggatcgacgaacggttacctatgccgtcaaggaatggcgacgtgcacgtcgtagtacgtagttcttgggattcccgtcggagcttcgaacgaggatatcttatcggcgtaccgccgattggcttgatttagccatccagacgtggcggcaatcgatcggaaagattcgtcggcggacgtgttcatgaagatccacgcggcgta

SEQ ID NO: 40669 - DNA, 236 bp, Gossypium hirsutum
  unsure (1)..(236): unsure at all n locations; Clone ID: LIB3165-059-P1-K1-B4
cggacgcgtgggttttgctatagctttctctactagnaccctctacttgcaatggctgcctctatgatctcatcggctaccattgccactgcctctccggcactggctttcttggtcgctcctttctccggtctcttgtctgcctctgctttccctgtctccaggttggcctactacgactttacttctctcgcttgctttggcggtagatagcaatgcatgctggtgtggcctcc

SEQ ID NO: 40670 - DNA, 166 bp, Gossypium hirsutum
  unsure (1)..(166): unsure at all n locations; Clone ID: LIB3165-059-P1-K1-B5
gggctgnactatatggatttggctctncttttctttgtgggggaatgtggagccaagccctttagggagccagcattggggccaatggctcgccctcccctactgctggaactagatagtagttcgttgtggcagccgccgcacctataaagtctaggatccctgc

SEQ ID NO: 40671 - DNA, 219 bp, Gossypium hirsutum
  Clone ID: LIB3165-059-P1-K1-C11
aatactataataaatgccgatttctcgcattgctgtaggatctgcatctgatgttggcctagctgatgccctcattgcagcttttgctgagtttatttcttagctcttttttgtttttgctggagatgagctcgggcatggcttttttctagctctctgacaatggctcttcaactccggctggtcttgtagctgcatcggaggcccatgctttcgctc

SEQ ID NO: 40672 - DNA, 107 bp, Gossypium hirsutum
  unsure (1)..(107): unsure at all n locations; Clone ID: LIB3165-059-P1-K1-C12
gnttctagtttcatagagtttttattttatgtaatgataatgttggctactgttgccttttcactagaatattcttctcttaaaaacgattagctgatatgtgtctt

SEQ ID NO: 40673 - DNA, 298 bp, Gossypium hirsutum
  Clone ID: LIB3165-059-P1-K1-D11
cccacgcgtccggctaaacgttttttggactatggattccatggtcctactaagtcttggcctgttcctggcacactcatgattgaacccactgaaatagattgcatggcggagctcgataggttctgagatgctctcatctccattagggttgttattgctctgattgtgtaaggataagctgatatccactactaagttctgaatggagctcctcatccaccatctttgctcatgggtgatgcatggacttagccatattctcgagtattcgccgctttccctgcttcctggcttc

SEQ ID NO: 40674 - DNA, 267 bp, Gossypium hirsutum
  unsure (1)..(267): unsure at all n locations; Clone ID: LIB3165-059-P1-K1-D12
gtccgagcccggtcgtactcatatccgcatcaagtctccaatgagaactgcctctggtcaaaggaacaatgtaggcaagggatgtcggcaaaaaggatccgtaacctcgggaaaatgataggctctgagggctgggcacgggggtcccagncccgaacccgtcggctgccggcgcactgctcgagctgctcccgcggcgagtgcgggtcgccgcgtgccggccgggggacggactgggaacggctccctcgggggccttccccgggc

SEQ ID NO: 40675 - DNA, 258 bp, Gossypium hirsutum
  Clone ID: LIB3165-059-P1-K1-E10
ataggaatctaggttcttcattcttctcgtcgctttctccttttccatttttctctttgccttcttcatcctcttctctcctcccaattatcttacccactctctccctccttgccctttctctttccctttcattggcaactacttttttctccgtatatctttcttcgatttcgtgccaatactccgcaaccttcgcttttagtatggttccatggtcactctccacattgttcctcgcccctccttctatgtctc

SEQ ID NO: 40676 - DNA, 246 bp, Gossypium hirsutum
  unsure (1)..(246): unsure at all n locations; Clone ID: LIB3165-059-P1-K1-E12
cttttnagagcacgcccacatggcagaagtcgaagttcctttgtagctagaatccgaaatcccctccgaccctccgccgccacccaccgatgccgccgaggataaatccgagactccacctcctcctactgaagataagcccgccgactctacggataagcctcccgaacccatcgaaatggcggcagagtcgtcggtgaagtatagcacggtggagtctgttgatcgtgatgctgagcttgcttg

SEQ ID NO: 40677 - DNA, 221 bp, Gossypium hirsutum
  unsure (1)..(221): unsure at all n locations; Clone ID: LIB3165-059-P1-K1-E5
cccacgcgtccgcccacgcgtccgttcttttgtttacctgtagcatatagnaatagtaatgcagtaatagcaatggcctcctccatgatctcatcggcaaccattgccaccgagatccgctcctccccggcacaagccaacatggaggcccccttcaccggcctcaaatctgcctctgctttcccagtcaccaggaatgccaacaacgacatcacttctct

SEQ ID NO: 40678 - DNA, 313 bp, Gossypium hirsutum
  unsure (1)..(313): unsure at all n locations; Clone ID: LIB3165-059-P1-K1-E7
tattagtattcatatttatattttttcacacattnttatttcacgaatgtatatattcttacttgtttattatcttacaattttttatacctatatatatatacatatatatattacttttgcaattttattcatttatttatttatatttncattattattttgaatgaaagttttaattttattcccttatatgcattgatatttaatcctacaaataaagggcttaaatcacaactatctgtacatgtatatactatactacatttctatcttttcctatcataatngcatatacattactactttttat

SEQ ID NO: 40679 - DNA, 214 bp, Gossypium hirsutum
  unsure (1)..(214): unsure at all n locations; Clone ID: LIB3165-059-P1-K1-E9
ccctcgcgtccgcccacgcgtccgtttttttntttggcggaatcttttcgtatgatgcggtttttatagttgattctccggatatggtgnttgcttactggccctgntgtcatcctctgcggcgttgtgggagcctccgtcgttgctcactttctctttgttgtcgttccatatcttaaacctaagaagaatactgattctcctccactaacct

SEQ ID NO: 40680 - DNA, 217 bp, Gossypium hirsutum
  Clone ID: LIB3165-059-P1-K1-F10
tatatttcccctagaagtctctttctatccctactaatctctcaatatctattttgatgccaaagctggtgacccaagtgatccccaaggcttcatcctgatcattgattgtaagctcctcctgctatcctttcttctccgacttatcggcttcatctctccaggccttctctgcggctcttgctctttcttccatccttctttctgctcctctccc

SEQ ID NO: 40681 - DNA, 297 bp, Gossypium hirsutum
  unsure (1)..(297): unsure at all n locations; Clone ID: LIB3165-059-P1-K1-F11
cttgtcttctcctattatcgtcttgtccgtgtggattttgtggcctaatcctccgcctcccttcggtttgttttgtacggtcacaccctacttcggccgcctttaccgtccgagcttgttcttatgccgatgatgctagttttgtccgcgaatactgttgcatctccatgtcgaggtattttggccatggatgaatcatttgctacatgagggttgcggcttgcctcgtttggtctcgtgtataccgatgcaaaccggcaagcttaccgnacccttcttcgtgtctgcccctggcct

SEQ ID NO: 40682 - DNA, 334 bp, Gossypium hirsutum
  unsure (1)..(334): unsure at all n locations; Clone ID: LIB3165-059-P1-K1-F6
ggggggggggggngaggggggagaggggggggggggggagnnngggggggggggagggggggaagggaaaaaagagggggggggggggaggggagggggggggaggggaggggagaggggggggaggggggagggggggggggggggggggggggaggggggggagagagggggggggggaaggggggggggggggggggggggggggggggggggggaggggggggggggggggggggggggggggggggaggggggggggggggggggggggggggggagggggggggggggggggaggggggggggggggggggggggggggggggggggg

SEQ ID NO: 40683 - DNA, 68 bp, Gossypium hirsutum
  Clone ID: LIB3165-059-P1-K1-F7
tattactcctgttctatttctttgttttgtatctatggcttctctccctatattttcctttgttcctt

SEQ ID NO: 40684 - DNA, 133 bp, Gossypium hirsutum
  Clone ID: LIB3165-059-P1-K1-G10
tccttcttttcttcaccggcactgggcccattgactacctctttgccctcctcgccgatcctggtcttgccaccatttttgctgctttctccccctagagagcttttggtgggggaacccttactgccttgtt

SEQ ID NO: 40685 - DNA, 290 bp, Gossypium hirsutum
  unsure (1)..(290): unsure at all n locations; Clone ID: LIB3165-059-P1-K1-G11
ccctcgcgtccggaattttcccgttttccgacttctaaatcagtatttttgcatctacccgatatagcggtattttgatttaaggatcttatactgtcatatatcaatgatgagtcgtcctcaggaaccacatcgccctttcttccattttgcaaatcctttccgtaagtattcacataagggttctcagtttaatccttaacttcgntctttattgaatgattttgataccgccttatctatgaagctgctaaaacttgagccaaatgacatgggtgacatcctttgct

SEQ ID NO: 40686 - DNA, 260 bp, Gossypium hirsutum
  Clone ID: LIB3165-059-P1-K1-G12
ccctcgcgtccgccctcgcgtccgggcctctgctggtgatactcatttgggaggagaggatttcgattattggatggttaaccttttcgttctagtatttttgtggatgtatttgtaggatatttgtgggttcccctgtgcattgaggaggttgaggactgcttgagtgagtgcttagtggactctttcatcgacagctctaactaccatcgagatcgattcataggacgagggtattgacttttacaccacgataactc

SEQ ID NO: 40687 - DNA, 313 bp, Gossypium hirsutum
  unsure (1)..(313): unsure at all n locations; Clone ID: LIB3165-059-P1-K1-G6
catatgttagcatctaaacccgaatcttctagagctatggatatagataactctgcggcaggattctgagggcttgcatcaaacaataactagagtaagcaaagagcatctgtacacgttgtaaacatctaatctttgaatgtactatcataacatgagtgctccattagaaaaaaaactagaatgatctgattcacattgttcatggagatttgngaatcatacattatgttcttgaaaagggttactgaacatcgaaaacgatcagtggaactttgactgatcattnnccattttttttttttttatattt

SEQ ID NO: 40688 - DNA, 59 bp, Gossypium hirsutum
  Clone ID: LIB3165-059-P1-K1-G8
tataaaaaaaaaaaaaaataaaaaattttataaaaaaaaaaaaaataaataaggggggc

SEQ ID NO: 40689 - DNA, 201 bp, Gossypium hirsutum
  Clone ID: LIB3165-059-P1-K1-G9
gagtgactctttagtatacctgttgtttatagtaatagttagcagttattgctttggcctcctccatgatctcttcggcaaccattgccaccgagtaccgctcctccccggcacaggcctatatggtggcccccttctccggcctcttatctgcctctgctttcccagtcaccaggtatgccttcttcgacttctcttctt

SEQ ID NO: 40690 - DNA, 265 bp, Gossypium hirsutum
  unsure (1)..(265): unsure at all n locations; Clone ID: LIB3165-059-P1-K1-H10
gcattatactcgtactaagttgtttcttgnagttgagcagctattatatcgtttctcctttctcccttctcttttgagtagaaagattataggaaggttacgccaaaggttaagtctactggtctgtgtgcttgctgttatactactcaaatctgtaggcgctagagtagggattacttatctgcaggaagccgnatcgaaatgagctgtttgtttggatgggagtcctccagcttaccatttagacatgggctctggcgctgga

SEQ ID NO: 40691 - DNA, 255 bp, Gossypium hirsutum
  Clone ID: LIB3165-059-P1-K1-H11
tggcattcccttggtgctctgtcgtgtctccgtcatcgggttcccatgcgctctcgcgcctccgctgacttcgccgagtacggcggtctgtattcgtagcgtttcgccttttctacaggaaaaaaagagtaatctcttttatttttttttatagtatttggcatgcatgatacgtagatttctttgtattgatattggatcacctttgttttcagacaaagtgaagaattctgtaatattctcttgtgctctttt

SEQ ID NO: 40692 - DNA, 206 bp, Gossypium hirsutum
  Clone ID: LIB3165-059-P1-K1-H4
acccacgcgtccgagcctaggatagtagcacaacagatattatttgttgtcggaaaagttttgaaaccagtcatagatgctggggtacctattgcccagaaagctggagaagaagcattgtaagaggcttttccagctatatccgaagcttctaataaagccctagaagcatttcaaggcactgggcttgacactgaacctgttct

SEQ ID NO: 40693 - DNA, 209 bp, Gossypium hirsutum
  unsure (1)..(209): unsure at all n locations; Clone ID: LIB3165-059-P1-K1-H6
gaacggcagggccgacccatcgcgtccggtccgactgagcgtncagcgcgatgcttttttgaggaatcgggntaaaattcctgatccgggacgcggaggctgacggctacgttagggagtccggagacgtcggcggaggcctcgggatgtggtatcttttctgtttaacggcctgcccaccctggattcggctctgccggaggtagggt

SEQ ID NO: 40694 - DNA, 287 bp, Gossypium hirsutum
  unsure (1)..(287): unsure at all n locations; Clone ID: LIB3165-059-P1-K1-H7
atttcaagtctctccttttctcctttgtttttgccacttcaattttctggttaacttggatgtaccttttatcctagaagagggatgccgccacccccaccaggccctctaggcctccccttggagggaaaccttcccttccttcgnactgaccttcactcctacttctctgaacttgctcacatctacggtccagttgagatactccagcttggatgcatgcttgcgatcctgattacctccccatccacggctcgagaagttcttaaagacctagacatcgcgtt

SEQ ID NO: 40695 - DNA, 408 bp, Gossypium hirsutum
  Clone ID: LIB3165-060-Q1-K1-A1
gtgatggagtgaggattttatcgaacacaagtttggagtttctgcaacgggttccagattctactgtatctatattcaaaattggtagcacatcaccagctgcattgctttatgatgccttggatcattttgaccggagaagtgccaaggcagatgaaaatttgagattgattcagtcatccttgcctgaggctgttgaagcctgcattgatgctgctggtcatgaatttgatgtttcacgtcaaagaactctattaagagctgcaagccatggacaagctttctgcagtacttttcaacgtgatcgcattcaggagatgtgtaaaaccttgcgggtcttaaatgctgtgcgtgatcctgagattggcatccttctcagtattaatcaatataagttgcttacaccat

SEQ ID NO: 40696 - DNA, 159 bp, Gossypium hirsutum
  Clone ID: LIB3165-060-Q1-K1-A10
ttttactgcaaactgtgagcgagtgagtgagatggcttgctcagctacttcatcggccgcggctctcatctcctctaagccaagggctttctcctccaattccaagcccttctcccaatccctttctctccccaatcccttcactggtctccctgcccc

SEQ ID NO: 40697 - DNA, 361 bp, Gossypium hirsutum
  Clone ID: LIB3165-060-Q1-K1-A12
cccacgcgtccgtaaacttgtacggccaaagattccttcccagcaaaaaatcggaaagaaagaaaaaacatggggatgccgcctgccacgtgcgcctccgcctcttcctcctccatcgtcaactcttctccgatcggtggcgctggcggaggaggtggagagatcatgctttttggagtcagagtggtggttgattccatgaggaaaagtgtgagtatgaacaacctttctcaatacgaacaacctcatgagtcgaacaagcataacaacaagagcaacaaagatcaaggcgatgataacctcaccgcttgttacgcctccgccgacgatgcccgtcctcactcctctggaaatcgagagc

SEQ ID NO: 40698 - DNA, 145 bp, Gossypium hirsutum
  Clone ID: LIB3165-060-Q1-K1-A2
ggcggtgactcagatgccgacaacaaaaatcatagtaatagcggtgattttgtggcgttaggaggcttgttcgaacccattgtagaaatttcggagctaacctcgtgacctgaatcgctttgcgaactacggtgccgtttgatgt

SEQ ID NO: 40699 - DNA, 406 bp, Gossypium hirsutum
  Clone ID: LIB3165-060-Q1-K1-A3
cgaagagacacagaccgaaaaggaccgatggaaagggttggcttacgatatttcggacgaccagcaagacatactcgagggaaagggatggtggattccttgttccaagctcccatgaatgatggaactcactatgctgtcatgagttcctatgaatacatcagccaaggtcttaaaacgtacaatttggacaacaacatggatggtttctacatcgctcctgcattcatggacaagcttgttgttcacatcagcaagaacttcatgtccctccctaacattaaggctcctctaatcctgggtatttggggaggcaaaggtcaaggaaaatctttccaatgtgagcttgtgtttgccaagatgggtatcaaccccatcatgatgagtgccggagaactggaaagtg

SEQ ID NO: 40700 - DNA, 318 bp, Gossypium hirsutum
  unsure (1)..(318): unsure at all n locations; Clone ID: LIB3165-060-Q1-K1-A4
caccaatccaaaaaaaccaaagatgcagtacaaaaacctgggcagatcaggcttaaaggtgagtcaactatcgtatggagcatgggttagtttcggtaaccagctcgatgttaaagaagcaaagtcacttctccagtgttgtaaagacaacggagtcaactntttcgacaacgccgaggtttatgccaatggtcgagccgaggagatcatgggtcaggctattagggaacttgggtggaaacgatcggatatcgtggtttctaccaagatcttttggggtggtcctgggccaaatgataaaggtttgtctagaaaaca

SEQ ID NO: 40701 - DNA, 301 bp, Gossypium hirsutum
  Clone ID: LIB3165-060-Q1-K1-A5
gtggagagccttttttttgtgtagcgattctcagttagtcttttctttaagctgacagcttctctccagagttttataatgggtaaggagaaggttcacatcaaccttgttgtcattggccatgtcgactctggcaagtcgaccactactggtcatttgatctacaagctaggtggtattgacaagcgtgtgattgagaggttcgagaaggaggctgctgaaatgaacaaaaggtcattcaagtatgcttgggtgcttgacaagcttaaggctgagcgtgaacgtggtatcaccattgata

SEQ ID NO: 40702 - DNA, 370 bp, Gossypium hirsutum
  Clone ID: LIB3165-060-Q1-K1-A6
actcaacattcccatttccaatctccagctcccaaggtaaatatgccgatcagaaacatagcggttggccggcccgaagaggctactcaccccgatgctctcaaggctgctttggctgagttcatctcaaccttgatcttcgttttcgctggatcgggctcaggaatggcctttaacaagttgactgacaacggagcaaccaccccggctggtctcgtagccgccgctctagctcatggcttcggtcttttcgtcgctgtctccgttggcgccaacatctcaggtggccacgtcaaccctgccgtcaccttcggtgcttttggttgcgggaacatcactctcttgcgcggcattctttactggatcgcca

SEQ ID NO: 40703 - DNA, 151 bp, Gossypium hirsutum
  Clone ID: LIB3165-060-Q1-K1-A7
gagtgaggattttatcgaacacaagcatgtagattctgcaactttttcgggattctgcgggatctataggcaaaattgacaccacatcaccaactgcatcgcttatatgatgcctcggatcatttttaccaaacaagggcccatgcgatgt

SEQ ID NO: 40704 - DNA, 400 bp, Gossypium hirsutum
  Clone ID: LIB3165-060-Q1-K1-A8
ttttactgcaaactgtgagcgagtgagtgagatggcttgctcagctacttcatgggccgcggctctcatctcctctaagccaagggctttctcctccaattccaagcccttctcccaatccctttctctccccaatcccttcactggtctccctgcccctctcctttctcgtcccgcctccttttccctctcccgcacctccccttctcgcaagtctttcgtcgtcaaagccaccagtgagcttccattggtgggaaatcctgcccctgattttgaggctgaggccgtctttgaccaggagttcattaaggtcaagctctccgaatacattgggaagaaatatgtgattctcttcttttacccgctggacttcacatttgtttgccccacagagattact

SEQ ID NO: 40705 - DNA, 152 bp, Gossypium hirsutum
  Clone ID: LIB3165-060-Q1-K1-A9
tcgaaaaaaaaaaaaatatataaaaaaaattataaaaaaaaaaaaaaaaagggaaaaaaggggaaatggaattaataatataaaataaagggcgctggctttttaaattgtaagttttttttcgggtcaatttatttcaatttttttttatt

SEQ ID NO: 40706 - DNA, 357 bp, Gossypium hirsutum
  Clone ID: LIB3165-060-Q1-K1-B1
gaccactctcgtgaccggtgtgtttctcctcctactatccgtcgccggcgtcggctccgctgctagatatatcaccggtgatgtcctccggttaccttcggaagcttcaaggttcttccaatggaggagcgatgatgatgaagttggtggcacaagatgggcggtcctgattgctggatctaatggatattggaattacaggcatcaggctgatgtttgtcatgcttatcaactcctaaggaacggtggtttgaaagaggaaaatatcattgtctttatgtacgatgatatcgctttcaatgaagaaaaccctaggcctggtgttatcattaacaatcctcatggcgatgatgttta

SEQ ID NO: 40707 - DNA, 356 bp, Gossypium hirsutum
  Clone ID: LIB3165-060-Q1-K1-B11
gctcccatgggtcacattttgtacgatgaagtcatgaggtataaccccaagaacccgtactgtgctacattctttgtcttcactgactacatgagagctgccattaggatttctgccttgtgtgaagcaggagttatctatgttatgacccatgattccattggtcttggggaagatggaccaacccaccagccaattgaacacttggcaagcttccgtgcaatgcctaatgttttgatgcttcgtccagctgatggaaatgaaacagctggtgcatataaggttgctgttctgaacaggaagagaccttctattcttgcctctctaggcaaagctgcccaactccttgaacttca

SEQ ID NO: 40708 - DNA, 310 bp, Gossypium hirsutum
  Clone ID: LIB3165-060-Q1-K1-B12
cttgcttttaaattttattcaaattttatttttaggtcaaataatcaatcgatttgaggaaaaaaaataaacaaaagaaatgtcgaaatcggtgatcgaaacgcctccgaagggcggatttagcttcgatctttgtaaaagaaacgagatgcttgcaaagaaaggcgctaatccgccttcgtttcggaaaactggtaccacaattgttggcttgattttccaggatggtgttattcttggagcagacacgagagcaacttgagggcctatagtttgtgataagaattgtgagaaaattcattacatggca

SEQ ID NO: 40709 - DNA, 322 bp, Gossypium hirsutum
  Clone ID: LIB3165-060-Q1-K1-B2
cccacgcgtccgctcaaacccacctttttttctctttgtaattccgtagaacggatacttcaaccgaaaaaacaaaaaaaaaaaaacaaaccagatgtcttcggtttattcagatccgatccatggaacccacccggaaccaatcgatcacttcgaccgtcttcccgattctcttctccttttagtcttcaacatgatcggcgacgtgaaagcgcttggccgatgctgcgttgtttcgcgtcgtttccactccctcgtccctcaagttgaaaacgtcgtcgttcgtgtcgattgcgtcatctccgacgacgattattcccct

SEQ ID NO: 40710 - DNA, 319 bp, Gossypium hirsutum
  Clone ID: LIB3165-060-Q1-K1-B3
cggacgcgtgggtctttgcaagaattgttggaggacttggtggcagagccgcagaggaaatcatcttcggtgaacctgaggtgacaacaggtgcagctggtgatttgcagcagattactggtttggctaaacagatggtggtgacatttggaatgtccgaaattggtccatggtcccttatggactcatcagcccaaagcgccgacgtcataatgagaatgatggcaagaaactcaatgtcagaaaaactcgccgaagacatcgatactgccgtcaagaggttatcagacagtgcttacgagattgcgttgcaacacat

SEQ ID NO: 40711 - DNA, 324 bp, Gossypium hirsutum
  unsure (1)..(324): unsure at all n locations; Clone ID: LIB3165-060-Q1-K1-B5
accgcccgaattccgggcgccacgcgncgttttcccttccttcaacttcttctctatttccgcatggaaatagctctgctttccttcccttctcaaacccccgctttcaaaacccttctctaaaacccaccgcccattcctcgaccttcaaacccaacctccttctttagaccatccccattgccttcatcagagccgcatttcccgaccaagaagaagaaaccgtcgaactgtcaaaccgagtggagaactgtacctcttggcagccgcgaatacaaggcttaccggaagcaattcaggacttggccgatcgcttccgaaacg

SEQ ID NO: 40712 - DNA, 264 bp, Gossypium hirsutum
  unsure (1)..(264): unsure at all n locations; Clone ID: LIB3165-060-Q1-K1-B6
cccacgcgtncgnccacgcgtncgnccacgcgttcgcccacgcgtncgctctctctcaaaatcatactagaaaagagcaaaaaaggtatagagcaagtgaacgttgtttggacagtgctggggggttggtgtgtgcgctttctattatggatagctatgaagcaaccagaattgtgttctcaagaatccaaaaccttgaaccagaaaacgcttccaaaatcatgggtctactgctgattcaggaccatggggagaaggagatga

SEQ ID NO: 40713 - DNA, 394 bp, Gossypium hirsutum
  Clone ID: LIB3165-060-Q1-K1-B7
cccacgcgtccgagaaaaacctaaggcagagcaaatttgataaaagaaaaatctaaaaaataccccaaaaaaataggaaaaaaaaagtttacattgagagatggtgagcaaaacagaggagacccaattgaataggcttgaaaaccaggtagataatggaggaggaggtgcttgggagtacctttgccttgtgagaaagctcaaagttaggcgttcagagaaagtcttgaaatatggtttatccatcttaaatgatcccaagaaaagatctgctcttggccctgaagaatggactttgtatgagcaggtagctattgctgctatggattgccaatgtctcaacgttgcaaaggattgtataaaggctttactgaaaaaatttcctgagagcaaa

SEQ ID NO: 40714 - DNA, 388 bp, Gossypium hirsutum
  Clone ID: LIB3165-060-Q1-K1-B8
ctctcttctctttatatctcaacctctctttccgtttctccgatttctccgccgtctacttcccgctccaaattccggccacctcgctccgccgctacttacacttcgcaacaacagaaaggatcgacgaacggttacctaagccgtcaaggaatggcgacgtgcacgtcgttgtacgaagttctagggattcccgtcggtgcttcgaacgaggaaatcaaatcggcgtaccgccgattggctagagtttgccatccagacgtggcggcaatcgatcggaaagattcgtcggcggacgagttcatgaagatccacgcggcgtacagtaccttatcggatccacaaaaacgagccgtatacgatagtaagcttgtatggagaaaccaac

SEQ ID NO: 40715 - DNA, 381 bp, Gossypium hirsutum
  Clone ID: LIB3165-060-Q1-K1-B9
gtctctctgttttactccacaaccactatcactaccattatggcttcggctactgtttctgtagccaaacccaaccttcagattcaggcaaaaggaaagggtgttggttttgcagatttctcaggcctacacaactcctctactagccttccctttgccaggaaaacctctgatgacttccattcactcgttgcttttcagacatctgctctaggaagcaataatggcgggtacaggaaagggatggcagaggcaaagctaaaggtggctataaatgggtttggtaggattggcaggaatttcttaagatgctggcatggccgtaaggactccccacttgatgtcattgccatcaatgacactggtggtgttaagcaggct

SEQ ID NO: 40716 - DNA, 352 bp, Gossypium hirsutum
  Clone ID: LIB3165-060-Q1-K1-C1
cggacgcgtgggtttagctatagcatacactactagtacccactactagcaatggcttcctcaatgatctcatcggctaccattgccactgcctctccggcacaggctaacatggtcgctcctttcaccggcctcaagtctgcctctgctttcccagtcaccaggaaggccaacaacgacattacttctctcgcaagcaatggcggcagagtgcaatgcatgcaggtgtggcctcctactggaaagaagaagttcgagactctctcatacctccccgatcttacacccgtgcagttggctaaggaagtggattaccttcttcgctcaaaatgggttccttgcttggaattcg

SEQ ID NO: 40717 - DNA, 319 bp, Gossypium hirsutum
  Clone ID: LIB3165-060-Q1-K1-C10
cttccgtctatcctccgtcaacacttcgttcttcgccgtcactgtcatgcacagcggcacaccccatcgcctcctcccatagagttccttccacttcgaattccttcgtcgcgttagaatcgtcatcgttaaagaccgttaactctatttcgagcgctaagaacaatagaaggaaaggcgttgtcggaaaggtgaggtcgagcctggagacggcgggagcaacggtggggcaggtgacggaggttacaaaggacaccttctggcccatcgttaacgccgcgggggataaaaccgtcgtcctcgatatgtatactcaatg

SEQ ID NO: 40718 - DNA, 332 bp, Gossypium hirsutum
  Clone ID: LIB3165-060-Q1-K1-C11
ccaccacatacccttctgaaacctcacccacaccaaactccagaaccagcctccgttatcaatggcgatgatatctacatattgcccacatttcaacggacttcaccgatcatctcccaagctcgacagttctcaatctcaatctttccttcaacacatcaactctcagcttcgccttgcttcgtctcgtaaaccttgcagagctgttactgccatggccggttccggaaagttctttgttgggggtaactggaaatgtaatggaacaaaaagactccatcacaaagcttgtttctgacttgaacagcgcaaagttggaagactgatgttga

SEQ ID NO: 40719 - DNA, 366 bp, Gossypium hirsutum
  unsure (1)..(366): unsure at all n locations; Clone ID: LIB3165-060-Q1-K1-C12
cccacgcgtccggttccgtatgccgcggacgccattgttgagatggaatcaacactttcaacattaccctccgctcttactcccttctccttttctaaacccctaaaccctaaatccactttgttctctttctctcagtctccactccttggccctgtcgccgtcctttcttattcttttcctctaaggactatctcctccattcccaaacgcctacaccgccgtttggagtgcgtctcttctggtaccggcggcggatttggtggaaatgatgggagtagcggcngcngtggccgcngcngcngggaagggacgggtggaggtgattcgaaggcgaaattggagctggagtggntgacgatctct

SEQ ID NO: 40720 - DNA, 293 bp, Gossypium hirsutum
  unsure (1)..(293): unsure at all n locations; Clone ID: LIB3165-060-Q1-K1-C2
ctgaaactgagcctggcagcttcaatctacgtcaagccccgccaatgggtccgaacaataaccaccacccgtcctccacctncacctncacctncactccgcctaactcggcgcatgactgcccttttctcaccctccacccattttagcaattcccttcttcccaaaaaaaacctacttcctcttgttagatttgcctttcccaactgcttctcttcctcaacaaacaataaaggagctatcaacgggtcgggtcccggatcggaccgcattcttgcagatatggatcccga

SEQ ID NO: 40721 - DNA, 302 bp, Gossypium hirsutum
  unsure (1)..(302): unsure at all n locations; Clone ID: LIB3165-060-Q1-K1-C5
accgcccgaatcccgggcgaccacgcgtccgctcaactctcctatcataatcctttggtttttgtttttaatttcgatgcccccgtgattgatttgaaagatggcaaatcaccaccgtacatcaagaatcgacgtcggcggcggaagcccaatgtttggaggttttggctttactgttagattattggcttctgccattactgttgcactctgnttcttctttcttctttcttttttctttacttctcactctcattctcctcatctccaaaccaactttggtttctccactggaattggat

SEQ ID NO: 40722 - DNA, 392 bp, Gossypium hirsutum
  Clone ID: LIB3165-060-Q1-K1-C7
cccacgcgtccggtttgttgagcttacagggatacccgttgcaagtactttgatgggtcttggagcctttccgatttcggatgagttgtcgttacaaatgcttgggatgcacggaactgtgtatgccaattatgctgttgataagagtgatttgttgcttgcttttggagtgagatttgatgatagggtgacaggaaaacttgaggcttttgccagccgggcaaagattgtgcatatcgatatcgactctgctgagattgggaagaacaagcagcctcatatgtcagtgtgttccgatgtgaaattggcattgcaggggataaataagatattggagaccacgggagctaagctgaatcttgattattcggaatggaggcaggagttaaacg

SEQ ID NO: 40723 - DNA, 396 bp, Gossypium hirsutum
  Clone ID: LIB3165-060-Q1-K1-C8
tcggcctcttgttttgggatgaggtcgagttaatcgcctcaaccttcgcttacagcatagtccaagcctttgcctcttttgaagagcaatgggaagaaatatgcagtgatatcaaggacggcacactgagctcaaggataacactgcccaggatgcgaaaagccgtgttggatataatttctccaaacccgtgtttggcatcacagattgaagccatttgcagggactccaaagcttccaactggtatggcatcgttcccaggctgtggccgaatgcaaagtatgtgtactctatcatgaccggctcaatgcaaccctacttgaagaagcttaggcactatgctgtctcgttaccgctagtgagtgctgactacgggtcaaccgagggttggattg

SEQ ID NO: 40724 - DNA, 233 bp, Gossypium hirsutum
  Clone ID: LIB3165-060-Q1-K1-D1
gtggggtggggggggggtgggggggagcatatatgcagttctcacattaaaacgagatctgtctttggcttgttattgcaccccacatagtttggagtttagcgattaagattctgatggaagcagggcaacataaattttggtcacatggatgatgcatggatatttgtctttcatccttgtgggaatgtagcattgtcaaatcatctgcccagggaataactctttgtccc

SEQ ID NO: 40725 - DNA, 250 bp, Gossypium hirsutum
  Clone ID: LIB3165-060-Q1-K1-D11
aaaaatagtaaaatcttttttcttctttaacaagtacaagaggaaaggagattgacaaattattcttaggaggagaatctattctctctctttgtcataacagccgtagcatctttcgtcaacaactctttccttccgagagttcacagggatttgaagcgtaaataagatcttattaagatatagtttgggggtgtagatattgctacctgttttgtttaaacatggtgatggtagagtcgattgcaac

SEQ ID NO: 40726 - DNA, 379 bp, Gossypium hirsutum
  unsure (1)..(379): unsure at all n locations; Clone ID: LIB3165-060-Q1-K1-D12
cccacgcgtccgcttcttcttcatcttcaaacccacaaattttttttaacaaagatcttatatagtgatagtgcaggcgatgaatctttggtcggacgataacacgtcggttatggaatcttttatgagctcagacatatctgctttatggccaccaccaccaccttcgncgncgccgcagcaatctcagccgtccgttcctctcaaccaagactcgctccaacaacgtctccaagctctcctcgaaagtgttcgtaattgttggacttacgctattttttggcaatcctcatacgattacgccggcgccgccgtgctcggctggggagacgggtattacaaaggggaaagaagattaagagaaagcaaagtcaaaagc

SEQ ID NO: 40727 - DNA, 366 bp, Gossypium hirsutum
  Clone ID: LIB3165-060-Q1-K1-D2
cccacgcgtccggaaaaatggcttctgcttccgctactctcctcaagtcttcacctattatcgacaagtccgagtggattaagggccaaaacctccgccacccttcggtttgttttgtacggtcacaccctacatcggccgcctttgccgtccgtgctagttcatatgccgatgagcttgttaagaccgcgaaaactgttgcatctccaggtcgtggtattttggccatggatgaatcaaatgctacatgtgggaaacggcttgcctcgattggtctcgagaataccgaggcaaaccggcaagcttaccgtacccttctcgtgtcttgccctggcctcggtgactacatctcgggagctattcttt

SEQ ID NO: 40728 - DNA, 323 bp, Gossypium hirsutum
  Clone ID: LIB3165-060-Q1-K1-D3
cccacgcgtccgagaagaagaaggtccttatagttaatacaaacagtggcgggcatgcagttatcggtttctactttgccaaagagctgctgggttctggccatgaggttaccatcttcactgttggagaagagggctctgataaaatgaagaagccccccttcaacagattctctgaaattacgagtgctggagggaagacggtgtggggagaccctgcagatgttggcaaggttgttgcaggggcaacctttgatgtggtgttggataacaatggcaaggacttggacactgtcaggccggtggtagattgggcaaagagc

SEQ ID NO: 40729 - DNA, 326 bp, Gossypium hirsutum
  unsure (1)..(326): unsure at all n locations; Clone ID: LIB3165-060-Q1-K1-D4
agaaatccttctgaagagcctgagttgaagttgaagaaatggcgtccaagtttggtgactcgtgcaaattagccacctccgacctcttttgccgccctcactcagcgttcctttgctgtaactgtgattccactacccacgccgccaatcacctcgcatcgcctcaccctcgtgtttgcctctgtcaagtctgcgagcaagcgccggctcacgtcacctgcaaggccgacgccgctgctctctgcgtcgcctgcgaccaacacatncactcagcaaaccctctcgcccgccagcatgtgcgccttcctattatccccttctatgac

SEQ ID NO: 40730 - DNA, 295 bp, Gossypium hirsutum
  Clone ID: LIB3165-060-Q1-K1-D5
aaattcagttaacaatttcacagttgttttcttcagtctctctctcagccatggctgcagccatctccaccgtcgctgccgctgccgccgccaaccgagctctgggagtgtcagtcccaacctcagctttcatggggaagaaagtgagctcaagattcaacagcaccaggcaggttccttcgggaagttttaaggtgatggcggcggagaaagagatagacgaagagacacagaccgaaaaggaccgatggaaagggttggcttacgatattttcggacgaccaacaaggacatt

SEQ ID NO: 40731 - DNA, 326 bp, Gossypium hirsutum
  Clone ID: LIB3165-060-Q1-K1-D6
cccacgcgtccgctaagactgtagacgcatacctggcggagatagcaactgcagttgaacttgccatctccaagttcaacggcatcgccaatctcgtccctaaaggagccagaaaggtggaggatgatctctaccgggccattgacgtctacctcaagtctcatccaaatctggacgagatagagagggagaaggtatgcagctccatggaccccctgaagctgtcctatgaagctcgagtgcatgcattccaaaacaagcgcttgcctgtgcagattgttttgcacgcattgtactatgatcagctaaagctaaggagtgggggg

SEQ ID NO: 40732 - DNA, 388 bp, Gossypium hirsutum
  Clone ID: LIB3165-060-Q1-K1-D7
aaggaaatacatttttttttcattttctggtttcagggttgtggttagattcgtggaatttgttgaagtgaacagtacatggaggactgggaggatgacattccgcctcttgtttcaaaggagcaacctaaaagcaaatgggatgatgaagatgttgatgatgctgatatcaaggaatcgtgggaggatgaagatgaagaacgtcttctgcaacccgtagcaaaagctactgaagagaaggcccccaagaaacccttatcgaaagctaccgaaaaaaaagggaaaactatcgaaatagctaaagaagagccccttgatcccattgccgagaaacttcgccaacaaaggcttgtggaagaagctgattttaggtcgactaccgaacttt

SEQ ID NO: 40733 - DNA, 379 bp, Gossypium hirsutum
  Clone ID: LIB3165-060-Q1-K1-D8
cccacgcgtccgcccacgcgtccgttctctagaggtctggtctactcaacactctctcctccctcttagcaaccaaagactcagatccgctcggatttctttgtcccagaactagaatggagacctttctattcacatcagagtccgtaaacgagggacaccctgacaagctttgcgaccaggtctctgatgctgttctcgatgcctgccttgcccaggaccctgacagcaaggttgcctgtgaaacatgcacgaagactaacatggtcatggtctttggagagattaccaccaaagccaacgtagactatgagaagattgttcgtgatacatgccgctccattggatttgtttctgatgatgttggtcttgatgctga

SEQ ID NO: 40734 - DNA, 242 bp, Gossypium hirsutum
  Clone ID: LIB3165-060-Q1-K1-E1
atttttccctttccaagaatttgtgaagtgtcttttttttttgccatgggttcaaactcattgaagaaccctcttctgttcagtgatgaagttgagcctggttatgtcaaaaactcatcttttctgaaatcatcagtgaaatggggtttaaagattgtaatgtgggtgattttcattgcatgggttggtgttatttttctatatcctggagaaattggtagtcagttggttgagaaaattat

SEQ ID NO: 40735 - DNA, 379 bp, Gossypium hirsutum
  Clone ID: LIB3165-060-Q1-K1-E10
agaaacttgccaataaccccaaatcccacagctgagaattgcgaacccaacagatccagatttcccagattaaccctaaatccacccgtctctgttagctagttcctttcttcggccggtggcccaaatcctctgcgtttcgaatcagagttatactcaaaggacaagccaagcccccgaaacaatgccattcaaaacaatgatagaggttgaaccaccgagtccgttaagatatatcatcggagcagcggtcatgatgatcggagttgtattgcccgtcggatacatgatgttccgtaacaaacgcgtcccttcctcttcttcttattccaaacagacgaacaaagttttaatatagagattttggtggaagagagac

SEQ ID NO: 40736 - DNA, 377 bp, Gossypium hirsutum
  Clone ID: LIB3165-060-Q1-K1-E11
aaaaaacaatgtcaggtcctcagtgctgttcgaatccaccaacattggattctgcaagtggagctggtcacgttgagaatcttgctggtctcaacacttatgtttctgggtctcttcaatctaagcttgctgtttttcttatctctgatattttcggatatgaggctccaaactttagaaaactcgcggacaaggttgcagcctctgggttctatgtggtggctcctgacttcttttatggagaaccctatgaccctaataaccctgatagacctttatctgtttggataaaggatcatggaccggataaaggttatgaggatgcaaagctcgtaattgacgctttgaaaagtaaaggagtttcatccattggagct

SEQ ID NO: 40737 - DNA, 362 bp, Gossypium hirsutum
  Clone ID: LIB3165-060-Q1-K1-E12
gattatcaaggcttttgggtaactcggaaacccatgcaacaactggtgtagccggcacatttggatatgttgcaccggagtatgctatgacctgccgtgtatccgagaaggctgatgtctacagctatggagttgtgcttctcgagttgatatcagataaaaaagctttggatccttctttctcctcgcatgcaaatggtttcaatatcgtttcttgggcctgcatgatgctgcgacagggtcaagcaaaagatgtgttcactgcaaggttatgggatagtggtccgcatgaccatcttgtacaactgctgcacttggccattacatgcacagttgatagcctctcagcaagaccaactatg

SEQ ID NO: 40738 - DNA, 280 bp, Gossypium hirsutum
  Clone ID: LIB3165-060-Q1-K1-E2
cccacgcgtccggggtcaccctggcaccaaatatggaatctctttccctgtcctggcgagatcatcttttggcattcgtggtgcacatgttcctacttcgcttagtgctttggtttgttgtgggtggtatgggatagagagttggattggaggtgaggctatctacctttttctcccaaactccattaaacaatcttccttttctcaacccttaccatggcttggcacttcccctcttgaattcgcttgttttattgccttttggttggtccagctggtc

SEQ ID NO: 40739 - DNA, 292 bp, Gossypium hirsutum
  Clone ID: LIB3165-060-Q1-K1-E3
agaaacttgccaataaccccaaattctcacagctgagaattgcgaacccaacagatccagatgtcccagattaaccctaaatccacccgtctctgttagctagttcctttcttcggccggtggcccaaatcctctgcgtttcgaatcagagttatactcaaaggacaagccaagcccccgaaacaatgccattcaaaacaatgatagaggttgaaccaccgagtccgttaagatatatcatcggagcagcggtcatgatgatcggagttgtattgcccgtcggatacatgat

SEQ ID NO: 40740 - DNA, 276 bp, Gossypium hirsutum
  Clone ID: LIB3165-060-Q1-K1-E4
cccacgcgtccgcccacgcgtccgcataacaatacacaggcagtcttttttctgaaaactgagaatggcttccaccgccgtcctctccacttccacggtcagcagcacctcattcgtccgccgccagccagtgaggagcctatcctccctcccaaactttaagcaggctcttttcgggctaaaaccccaaagaggtgggcgtcttacaatggcagtatacaaagtaacgctgctcactccggaaggacctcaagagtttgagtgcccagatgactt

SEQ ID NO: 40741 - DNA, 306 bp, Gossypium hirsutum
  Clone ID: LIB3165-060-Q1-K1-E5
cccacgcgtccgcccacgcgtccggtagtacgtaatattttaaccctcaacccccactatctgtccatctttcagtaagagaaaggaaatggagtttagttcagacgctaaccagcgcattgccaggctcgcagcccatctccaacctcagatggacgaaagttctattttgaggcgagctgactgtagagcgaaaggagggtcaccagggttcaaagttgctatcttaggagcagctggaggcattggccagcctcttgcaatgttaatgaagatgaatcctctcgtctcgggtcttcatcttta

SEQ ID NO: 40742 - DNA, 348 bp, Gossypium hirsutum
  Clone ID: LIB3165-060-Q1-K1-E7
cccacgcgtccgaacgtgtttgcggctcttgaaactctacggaagaagaagaagtctgataaggaccgaggttcttctaaaaagtcttcttctaagtctcagcaatcacaaccgcaaaaagaatctgaaccgcaggtcttttgggctccggcaccgcttaatgtcaaatcatgggccgatgttgatgacgatgacgatgacgattattatgctacaaccgctcctcctcagtcggtttggggatcctccgagccgtctcatgaagataagaccgtcaacgaagaggatagtgagagtgaagaagatattttagatgaaagtgatgatgatatagaagaagatcatgat

SEQ ID NO: 40743 - DNA, 378 bp, Gossypium hirsutum
  Clone ID: LIB3165-060-Q1-K1-F10
gttagctttagcatacactactagtacccactactagcaatggcttcctcaatgatctcatcggctaccattgccactgcctctccggcacaggctaacatggtcacccctttcaccggcctcaagtctgcctctgctttcccagtcaccaggaaggccaacaacgacattacttctctcgcaagcaatggcggcagagtgcaatgcatgcaggtgtggcctcctactggaaagaagaagttcgagactctctcatacctccccgatcttacacccgtgcagttggctaaggaagtagattaccttcttcgctcaaaatgggttccttgcttggagttcgaatgggagggaggattcgtgcaccgtaagtactcgagc

SEQ ID NO: 40744 - DNA, 382 bp, Gossypium hirsutum
  Clone ID: LIB3165-060-Q1-K1-F11
attgttactcgtgactttgtcttttgctgttgttgccaccgccgacggtgcttgccaggacgacggccctgagttacctgcttgcaacaaccctttcaaattggtcaaggtgaagatctgggttgatggtgttgaaggtgaagatttgtctggtataactgcgagctttggagcatcattgcccgaggaagccaacaaaagttctaaattgcctgctgttttctcaaatcccctaaatggctgttctaattcttcttcaaagctaactggttctgtagccttgtccatacgtggtgattgtgactttgtaactaaggcaaaagttgcacagtcaggaggtgcttcagccttactggtgataaatgacaatgaagaactttac

SEQ ID NO: 40745 - DNA, 370 bp, Gossypium hirsutum
  Clone ID: LIB3165-060-Q1-K1-F12
cccacgcgtccggtttttattctctagagtcttcccttgtccctgttaaaatctgtcactgtgatcattaatggccaccgctgaacctgaagttccagtcactgagcagcagcccgcggcagcagaggagccaaagccggcggaaaagcctgtgaaggagaagagacccagagctccaaaggagaaaaagcctaagcaacccaaatccgcagcacatcctccttattttcagatgatcaaggaggcgcttttggctttgaaagagaagagtggatcaagtccgtacgctatagcgaaatacatggaagagaagcacaaggcggtgcttccagcgaatttcaggaaaatcttaggtcttcagcttaaaaac

SEQ ID NO: 40746 - DNA, 213 bp, Gossypium hirsutum
  Clone ID: LIB3165-060-Q1-K1-F2
accgcccgaattcccggctgaccggccttcgagatttgcaggcaatcgcaaatgggccagcctttgcgcgggagtgcgtggggagttatggaggtgaaaagccatctatatgcaacatgcctcgttacaaagaagatccgccagcggtttgcgtgtatacagtgtcggacgcatcctaatttttgattgtcacgatcgttgccacattgggat

SEQ ID NO: 40747 - DNA, 294 bp, Gossypium hirsutum
  Clone ID: LIB3165-060-Q1-K1-F3
gtgagactcttttgtataactgtagcatagtactagtaagcagtaatagcaatggcctcctccatgatctcatcggcaaccattgccaccgtgaactgctcctccccggcacaggccaacatggtggcccccttcaccggcctcaagtctgcctctgctttcccagtcactaggaaggccaacaacgacatcacttctcttgcaagcaatggtgggagagtgcaatgcatgcaagtgtggcctcctcttgggaagaagaagttcgagacactctcataccttcccgatcttaca

SEQ ID NO: 40748 - DNA, 392 bp, Gossypium hirsutum
  Clone ID: LIB3165-060-Q1-K1-F5
cccacgcgtccggaagggtgcaaaggttgtgattgataggatcactgggcgcacaaaaggtgatgggtttgtcaggtttggcgatgaaactgaatataatcgtgccatgactgagatgaatggtgctttttgttcaactaggcctatgcgcatagggccggctactaacaagaagactggtgctgcacagcaatatccagcagcttcatctcaagggactcagaacgagaatgatccaaataatacaactatatttgttggtaatttggattctaacgtgactgaagaccatttgagagaggtcttcagcccatatggtcagttggtgcatgtgaaagattccacaaacaagcgttgtggattttgtcaatttgctgatagggagtgtgccc

SEQ ID NO: 40749 - DNA, 326 bp, Gossypium hirsutum
  Clone ID: LIB3165-060-Q1-K1-F6
cccacgcgtccggaaccctaacattgggcctaaattccacgatgctgctgcctctgtctcgagcattgcagactttctccctccccgatcttccttacgactatggcgctcttgagcccgccattagtggagagatcatgcaactccatcaccaaaaacaccatcaaacttacatcactaactataacaaggctttagagcagctccatgaggctattcagaaaggtgattcttccaccgtcgttaagttgcaaagcgccatcaagttcaacggcggaggtcacgtcaaccactccattttttggaagaaccttgcccctattcgt

SEQ ID NO: 40750 - DNA, 330 bp, Gossypium hirsutum
  Clone ID: LIB3165-060-Q1-K1-F7
cccacgcgtccgagagatcaagaaagcaaccaacaatttctcgaaagaccgaatcctaggtgccggtggctacggcgaagtctataaaggaatccttgacgacggtactccggttgctgtcaaatgtgccaagctcggcaacaccaaaggcaccgatcaagtcctcaacgaagtacgaatcctatgccaagtcaatcatcgaagccttgttggactactcggatgttgcgtcgaactcgaccaacctataatggtttatgagttcatcgaaaacggtaacctcttagatcatctccagagcccaaacattaatgaccgaagtctactcac

SEQ ID NO: 40751 - DNA, 386 bp, Gossypium hirsutum
  unsure (1)..(386): unsure at all n locations; Clone ID: LIB3165-060-Q1-K1-F8
cccacgcgtccgatccctagctttttcccccttctaactgtcggttcatctccgcacaatggtgctctcaatcttggaggaacctttcatccttggaatctcttttgattcgatttcaacgaagcaaagagaagaaatctatggcctattcgcacagtaaggtttttattttcttttgtttttttttctattttaaatgcgaaaaaaactaaaagaccaaaagaataaatcgaaaagaaaatcaaaagcctcaagaactttgaattagaaaatcatcttttaacctttattttagtatgcgtgtgtatttctgggaaaaaaattcccatttacatcctttttattctggtttatagccgnaaaattaattaattaaattaaaagaa

SEQ ID NO: 40752 - DNA, 302 bp, Gossypium hirsutum
  unsure (1)..(302): unsure at all n locations; Clone ID: LIB3165-060-Q1-K1-F9
gtttcttagcattgcgcaacactgcaactcccgcgccccttctttcactctcacactacatatggggttggcttcagccaccaccatctcctcctcctcctcctccttgctctcctcctccctatgccctgccagaagaggctttcttctgccctgccatcatcacttctgcttcctctcaacttttagtaaatgcaatttgaattggaaaagatcatcaggaaagaagagaggtgaaagagtaaagtgtagtgcantgggagtgggagtggaagatgaagcatgtgaattagtgaatggag

SEQ ID NO: 40753 - DNA, 265 bp, Gossypium hirsutum
  Clone ID: LIB3165-060-Q1-K1-G1
aaaataaactgtttaacaatggcctttacaaccatggctctttcttcccaatcattcgccggtaaggcagtgaagttctccccttccacccctgaaatccagggaactggccgtgtttccatgaggaaaaccaccaagcctgttccttctggtagcccatggtacggtcctgaccgagttttgtacttgggtccactttccggtgagccaccatcttacttgaccggtgagttccctggtgactatggttgggacactgctggac

SEQ ID NO: 40754 - DNA, 378 bp, Gossypium hirsutum
  Clone ID: LIB3165-060-Q1-K1-G10
atttagctatagcatacactactagtacccactactagcaatggcttcctcaatgatctcatcggctaccattgccactgcctctccggcacaggctaacatggtcgctcctttcaccggcctcaagtctgcctctgctttcccagtcaccaggaaggccaacaacgacattacttctctcgcaagcaatggcggcagagtgcaatgcatgcaggtgtggcctcctactggaaagaagaagttcgagactctctcatacctccccgatcttacacccgtgcagttggctaaggaagtggattaccttcttcgctcaaaatgggttccttgcttggaattcgaattagaggagggattcgtgcaccgtaaatactcgag

SEQ ID NO: 40755 - DNA, 360 bp, Gossypium hirsutum
  Clone ID: LIB3165-060-Q1-K1-G12
cgaaaactgttgcatctccaggtcgtggtattttggccatggatgaatcaaatgctacatgtgggaagcggcttgcctcgattggtctcgagaataccgaggcaaaccggcaagcttaccgtacccttctcgtgtctgcccctggcctcggtaactacatctcgggagctatccttttcgaggagactctctaccaatctaccatcgatgggaaaaagatggtcgatgttcttgttgagcaaaatattgtccctggtatcaaagttgacaagggtttggttccactccctggttccaacaacgagtcatggtgccaaggtcttgacggtctttcatcccgcacagctgcctactaccagc

SEQ ID NO: 40756 - DNA, 274 bp, Gossypium hirsutum
  Clone ID: LIB3165-060-Q1-K1-G2
cccacccgtccgaaaaaagaaataaaaacagtttcatttccattctaagtttgtgtttttgatttgccttttgtgggtttttttttataaaaaagttcagcaaaaatgtttattgagaattttaaggtggagagccccaatgtgaagtacacagagaatgaaattcagtctgtttacaactatgaaactacagagcttgttcatgagaacaaaaatggaacctatcaatgggttgttaaacccaaaactgtcaaatatgaattcaagactgata

SEQ ID NO: 40757 - DNA, 269 bp, Gossypium hirsutum
  Clone ID: LIB3165-060-Q1-K1-G3
tcctctacagagcacactgtctatgcaccctcaaactaagaaaacagcataaatggtgaaagtagcctgttacttcgctatggcatacgccgcctctatcttctggcagaccatggataaagtccacgtctggatcggcctccaccaagacgagaagaaagagagacttgagagagaagctggggtcaggagactgatggaagagttgcttcagcatgccaagcagaacgatcgtctcccctaaattctgcgtacaactccctcttcta

SEQ ID NO: 40758 - DNA, 320 bp, Gossypium hirsutum
  Clone ID: LIB3165-060-Q1-K1-G4
gtggattccttgttccaagctcccatgaatgatggaactcactatgctgtcatgagttcctatgaatacatcagccaaggtcttaaaacgtacaatttggacaacaacatggatggtttctacatcgctcctgcattcatggacaagcttgttgttcacatcagcaagaacttcatgtccctccctaacattaaggttcctctaatcctgggtatttggggaggcaaaggtcaaggaaaatctttccaatgtgagcttgtgtttgccaagatgggtatcaaccccatcatgatgagtgccggagaactggaaagtggaaa

SEQ ID NO: 40759 - DNA, 337 bp, Gossypium hirsutum
  Clone ID: LIB3165-060-Q1-K1-G5
cctaacctacttccaactaatacccttttctcttcttcttcttcaactgagactgcttatagtggttcaaagagtgaacataagccctcaagtttcatcatggaaggtgaattacaggagccaaaagccggttctcaatcaattttgctcgaattggctgcatctgatgatctagtagccttcaaaagtgaagtagaagagaaaggtttggatttcggggaggcgagcttctggtatggtcggagaatagggttgagaaagatgggatttgaagagaggacgcctttgatgatcgcagccatttttggtagcatcgaaattttgaaatacatcattg

SEQ ID NO: 40760 - DNA, 282 bp, Gossypium hirsutum
  unsure (1)..(282): unsure at all n locations; Clone ID: LIB3165-060-Q1-K1-G7
atatttagctatagcatacactactagtacccactactagcaatggcttcctcaatgatctcatcggctaccattgccactgcctctccggcacaggctaacatggtcgctcctttcaccggtctcaagtctgcctctgctttcccagtcaccaggaaggccaacaacgacattacttctctcgcaagcaatggcggtagagtgcaatgcatgcaagtgtggcctcctactgggaagaagaaagttgagactctctcatancctcccgatcttacacccgtg

SEQ ID NO: 40761 - DNA, 364 bp, Gossypium hirsutum
  Clone ID: LIB3165-060-Q1-K1-G9
tggcaatggaacaagggagataaccagatatggaagattgtaccatattgaggcttgtaatatggtgctgctagttctacattgaagctctatcatgcctgcggttgaaggttccctacgcattatctttgtgaggttttttcgtgtgtttttcattccaagtgcatgaaaatcttgatgggtcgagaggcctactaaatatttgtaccagtaataaagaagagctattacagagtttctatggccgcaaaatttggataatatagtttctctattatacatacttgtaagattagcattgcatttcatttttctttcgtggaatgtaccaacaacatgctttttctggtcctcaaattaaaaa

SEQ ID NO: 40762 - DNA, 251 bp, Gossypium hirsutum
  unsure (1)..(251): unsure at all n locations; Clone ID: LIB3165-060-Q1-K1-H1
ggggttaccaccggattgaagccggggatcttctcttaatgaagaagcaacttgaagtcaccgatttcgactcagcgcttcacggaacatttgaaacaagacgggttgttgcacacgacttgcggaacgccggcgtatgtggcgccggaagtcattggaaaaaaagggtacgacggagccaaggcggatattttgtcttgtggggtgattntatacgttcttctcgcccggtttttacccgttcaagatga

SEQ ID NO: 40763 - DNA, 381 bp, Gossypium hirsutum
  Clone ID: LIB3165-060-Q1-K1-H10
aaaaaaaagaaatctccaacccaaacccttcctccgccggcatttgtttgcaaaaaaaaaaaaaaaaaaagaagttcaaattgaagaatgcctgtattttcttcaagagctatgttcaggaactacgacaagcatagaaagcaaaaaagtgaccctaaaggcaaattgtccgacgtgttcaggagctatgctgattctaatggggagctaaacaaggaaaagctgaaagacgcttttctacatctggatgctgccatgccgtaccggcaagccgaagaagccctccgtgtcgtcggcaaaagctattacattaacatcaaggatgaaaccgaccttaacacccttgtcgactatgcttacaaatagggttacgggtattca

SEQ ID NO: 40764 - DNA, 383 bp, Gossypium hirsutum
  unsure (1)..(383): unsure at all n locations; Clone ID: LIB3165-060-Q1-K1-H11
acccacgcgtccggagagcactagcattagcactagcactagtagcaaccatggcctccgccgcatgtttcttgcaccaccacgcactcacaaccaatggcagatcatcatcattatcgccgtcgctgcgccaggtttcaaacatgaagcctacccagcaggtggtgtgcaaggctcaaaagcaggaagatgatggaagccttgtgtcccgtaggttggctctcactgtactcattggtgctgccgctgttggctctaaggtttctcctgctgatgctgcctatggtgaagctgcaaatgtatttggaaagccaaaaacagacacagacttcatgccatacagtngggatggattcaagctctcgataccatcgaaatggaac

SEQ ID NO: 40765 - DNA, 389 bp, Gossypium hirsutum
  Clone ID: LIB3165-060-Q1-K1-H12
cccacacgtgtccggagacgtgctaatgggcgtccgatatattgctttgcctaatttgtaagctttgaggttaagtgaaaaaactatggctgaagagggacaagtaattgcctgccacactgttgagtcatggcagcagcagctccagatgggaaacgagtccaacaaactggtggtggtggatttcacagcatcatggtgcgggccatgccgttttatatcaccaatcctggtggatcttgctaagaagctgcccaacgtcatattcttgaaggtggacgtggatgaactgaaatctgtcgctcagtcgtgggctattgaggcgatgccaacttttgtgtttctgaaaggaggcaccataattgacaagcttgtgggtgcaaggaaag

SEQ ID NO: 40766 - DNA, 262 bp, Gossypium hirsutum
  unsure (1)..(262): unsure at all n locations; Clone ID: LIB3165-060-Q1-K1-H2
ccaattttctgccatttcaattggggattttctcagttagatattctttttctttaaattgtcatcgatggcccagcagcaggctcaggtgaagttcacggcggtgaagccacagttgatggtgaagacgccaaaggcagttgatgcagttaatttctacaagtccgcttttggcgccgtcgaagcaggccgatctgcttgctgccccccgccaacggncgaacagaacctccctaacatcctctgcgctcagcttgagctc

SEQ ID NO: 40767 - DNA, 365 bp, Gossypium hirsutum
  Clone ID: LIB3165-060-Q1-K1-H4
ggtgaatgctgctttcagagaaagtgcagagaaggagcttaagggtatcctttctgtatgcgatgaaccccttgtctcagttgatttcaggtgctctgatgtgtcctccaccgttgatgcatcactcaccatggtcatgggagacgacatggttaaggtgattgcttggtacgacaatgagtggggttactctcaaagagttgtagacttggctgacattgttgccaacaactggaagtgattcgaaatacttgtctgcagtgtgatatggttaatttttgctcacctcatttcttttcggctttcatcaagaatgtataattttaacgtggactgtatgcaataaaaatcgtgcttgcacttaa

SEQ ID NO: 40768 - DNA, 340 bp, Gossypium hirsutum
  Clone ID: LIB3165-060-Q1-K1-H5
gtgggaaaaacaccagttcaatttctaagctaagtaacaatggcttctctccctagattttcctttgttccttcaaaaacaaggatttacgcaacagcagctgcaaaaggtgcaggtggaggcaaagaagagaaagggcttttcgattggattcttgggaacttgcagaaggaagagcagttttatgaaactgaccctatcctcaagaaagttgaagaaaagaatggcggtggcagtggcagtggcactaccagtggtcgcaagaactctgtttcaatcccttagaagaagaaggacaatgctggcttttggcttggagggcttttcaagaaatgaaaga

SEQ ID NO: 40769 - DNA, 331 bp, Gossypium hirsutum
  unsure (1)..(331): unsure at all n locations; Clone ID: LIB3165-060-Q1-K1-H6
gaccggcgggagacccgggccgacccacacctgtcgcgagacggggtaatggccgcggagaattcaagttcgaaatcggcttcaacggctgattcctacatagggagcttaataagcttgacttccaagagtgagatcagatacgagggcgttctttacaacatcaacccggacgagtccagtattggattaagaaacgtacgatcatttggaactgaaggaaggaaaaaggatggtccgcaagtacccccgagtgacaaagtttatgaatacatattgttccgtgggagtgacattaaggatttacaagttaaatcttnaccacctacac

SEQ ID NO: 40770 - DNA, 312 bp, Gossypium hirsutum
  Clone ID: LIB3165-060-Q1-K1-H7
cccacgcgtccgcccacgcgtccgcccacgcgtccgctatagcatacactactagtacccactactagcaatggcttcctcaatgatctcatcggctaccattgccactgcctctccggcacaggctaacatggtcgctcctttcaccggcctcaagtctgcctctgctttcccagtcaccaggaaggccaacaacgacattacttctctcgcaagcaatggcggcagagtgcaatgcatgcaggtgtggcctcctactggaaaagagaagttcgagactctctcatacctccccgatcttacacccgtgca

SEQ ID NO: 40771 - DNA, 311 bp, Gossypium hirsutum
  Clone ID: LIB3165-060-Q1-K1-H8
gggtcagaccctcttggggttaaatctacagcagtgcaaggcaatcagcagtggtgcagttgacctgctagtggagcagctatggaggtgtgatatccttttctaaacgatgttgcagtatgggattgtcaacaactcgggttttgacccttcgagaagcttcagaatagcctttgttagtattagcagtttgtgtagtttttgggtccatcatctatgggtcttccattgtccagtactcagtccccttttccaaggaatacggccattttccttggttcttttttgcaagtctctttacatcagagatc

SEQ ID NO: 40772 - DNA, 380 bp, Gossypium hirsutum
  unsure (1)..(380): unsure at all n locations; Clone ID: LIB3165-060-Q1-K1-H9
caaattcagataacaatttcacagttgttttcttcactctctctctcagccatggctgcagccatctccaccgtcgccgccgctgccgccgccaaccgagctctgggagtgtcagtcccaacctcagctttcatggggaagaaagtgagctcgagattcaacaacaccaggcaggttccttcgggaagttttaaggtgatggcggccgaaaaagagatagacgaagagacacagaccgaaaaggaccgatggaaagggttggcttacgatatttcggacgaccaacaagacattactcgagggaaagggatggtggatccttgntccaagctccatgaatgatggaactcactatgctgtcatgagttcctatgaataca

SEQ ID NO: 40773 - DNA, 574 bp, Gossypium hirsutum
  Clone ID: LIB3165-002-Q1-K1-B9.9C0
cctttgatgctccagagaagagggggcagccttcgaagatcccgacaaaacagaatactccgagaggctttgaaatgggtggtactacggatgccaaccgggggactcgggggtgttccatttctgtggacacggctctcgacaaaaagattacacccatgacaaagttgacttttttgacgaaacattgcgccctcttgatcacgaacccgaggggaacataatcgacgacgaaatcaacgaccccatcgtaaaaccggtgactcgaggaaccacactgcacgcgatcatcgatgcctgctacagtggaacagtcctcgatctccctttcgttggcaggatgaacaaggaagggcgttatatgtgggaagatcaaagaaatcctctattttacaagcgtactagtggaggattagccttttggtatagcgcttgagaagaacatcaaacctgtgcagataccactgttttcacaggaaccagtgtgagaaccggcgcgatgacatatagcttcgcacaagcgattcaaaatgaccggaggttgacttatgggcatttgcttaatgcagtgcgt

SEQ ID NO: 40774 - DNA, 751 bp, Gossypium hirsutum
  Clone ID: LIB3165-041-B2_FLI
gccgaccagaaggcctacgctgcggcgaagtagggggaagtgtggctaaggtgcagcccacgaagtcacgcagctcggtttgttgcgtggagttcaaccccttcggagatgcattgatagctgccggatgcgccgaccagaaggcctacgcctatgatgtacggaaaatggtggaacctgtacacattttcgatggacatacgaaaaccataacatacgttagatttctgaatgcccaaacactggtttccgctggaaccgacgggtgtttaaaactatggaatatcgttgattctcgtttacttagaacatacaaagggcacgtaaacagtcggagttttgtggggttgtcagtgtggaggcatggagggttgcttggatgcggatcagaaaataaccaggtgttcgtttatgataccaggtggggtgagcccatttgggtgcatggcttcgagcctatgggtagagatagctccgatcatcaccatgctttcgtcagcagtgtgtgctggaggcaagtcaatgaagaccagtgcacacttgttgcaggtggttccaatggagttttacacgttttcgtgggcaagaggaaatctgattcagagtagcccatgtttggaaacatgaccttcctttcctcctcaacaatgtaatattcaaggttgaatctgcattctccatatcttactgttgtagctaatacttttcggttgaattataaggtttgacaatattaattaattaatttatt

SEQ ID NO: 40775 - DNA, 881 bp, Gossypium hirsutum
  Clone ID: LIB3165-001-C10_FLI
gaagaattttgttggattatccgttgttgatggttttatagcatgtggctcagaaacaaatgaggtttatgcatactataggtcactgcctatgccaataacttctcataaatttgggtccattgatcccatttctgggaaagacacagatgatgacaacgggctgtttgtatcaagtgtttgctggagagggaaatcagacatggttgttgctgcaaattctagtggatgtattaaagtattgcagatggtttaaggagaaggttaattgcttagagtcatcaattactggcgtcatttggttgccaagttttattctcgaggcttattcttaagcattgaagccatcttgggttcaggcaaatatgtcatacatggatgacttggtctgctcggtggctcattataataggcttggctttgattcatagaaaattatatacagagtagagtcgagccaaactggagttatggttccaggttatcaagattatccagagctaggttccagttattcttttacatgcttaagaatccagaatatcatgacacttcctgagtcttgagaaagaggatcaaaccgtaaatacgggaatgcaaaatcaagattgaggtaacttctgctaagaggctttccatctcggttgtgggagcgagagtgtatgctatattagtacgtgtctttacttctgctggtgatccttgaaactaaggtgcagtccttttaagcgttgtaatatatatatatatagagagagagagagagaggtataattcgtaatttactcaaatgtagggtattctttattgagatgtaagtaagcattctatgattctatgtaactgatgttttaccagtgtaaatctataaattttgatgt

SEQ ID NO: 40776 - DNA, 395 bp, Gossypium hirsutum
  Clone ID: LIB3189-001-P1-K1-B10
caaaaggaaaatctccattttagcagactatcttcgccgcctcctcttcctcctatctcatagcagccatgatcattccagagaagaaccgccgcgagatctccaagtacctctttcaagagggtgtttgctatgcaaagaaagattacaacttggcgaagcacccagaaatcgatgttcccaatcttcaagtcataaagctgatgcaaagcttcaagtcaaaagaatacgtgcgtgaaacttttgcatggatgcattattactggtaccttaccaatgatggcattgagttccttaggacatatctgaatcttccttctgagattgttcccgctactttgaagaaacaagctaagcctgctggtcgtcccatgggccctcctggtgaccgccca

SEQ ID NO: 40777 - DNA, 231 bp, Gossypium hirsutum
  Clone ID: LIB3189-001-P1-K1-B11
ggaataattcatgtcttttgttatattggatttcaaatgctttggagcttaccagatgattgtagaaattggtgtattgtgggtttctctagtttatcattttatttttaggagggaaattaaagagcatggatgatggatcgtctctgacgtttccgaggctgctagcttggggaaggtcggttgtttcattcatgagcttgttgtataaatactaaaatttcatttttt

SEQ ID NO: 40778 - DNA, 393 bp, Gossypium hirsutum
  Clone ID: LIB3189-001-P1-K1-B5
tgaatcttgatgatttacgccaattgtggcttcaccttcaatacaatctagtcagggtcatcatttgctctgctagggtagtcttcgggttaacagtctatatcatgacccgaccccgaccggtttaccttgtcgattattcttgttaccgtcctcccgaccatcttaaagccccgtacggtcgtttcttggagcactctaggttgaccggggattttgatgagtcgtcactcgagttccagcgcaagattttggagcgctcggggctgggagaagagacttatgtgcctaaagcaatgcatagtatttctccgacgccgtctatggcggcggcaagggaagaagctgaggagggtatgtttggggcattggatactctttttcgaaacacga

SEQ ID NO: 40779 - DNA, 303 bp, Gossypium hirsutum
  Clone ID: LIB3189-001-P1-K1-B6
agaacggcgggtcgcacgccgtccaaccccacccaaatccaaccgtaaaatctccttcgtggaacccactcaatgatccggcggctaattatccttccgtgggttataactgcaatccccctcccagtccttgtcccgtcgattccctttaatcgttccaccgttacctcccgtcaaacaatttcaagtcgtccgacttctttgagggaggattcggattttcctgttgacgcgttctcgtgtgaccatttccctatgtatgagttcaaagtgaggaggtgtgctcctggcatgtcacattac

SEQ ID NO: 40780 - DNA, 393 bp, Gossypium hirsutum
  Clone ID: LIB3189-001-P1-K1-C10
gaagtttcctttctcgattttctatttagccaaacaagatgcagatcttcgttaagactctaaccggcaagacgagcactctcgaggtcgagagctccgatacgatcgacaacgtgaaggccaaaatccaagataaggaaggcatccctccagaccagcagcgtctgatcttcgccggaaaacagctcgaagacggccggaccttggccgattacaacatccaaaaggagtcaactctccacctcgtcctccgtctgcgcggtgggatgcaaatcttcgtgaaaaccttgactggcaagacaatcactctcgaggtcgagagctccgacacgatcgacaacgttaaagcgaagaaccaagacaaggaaggcatccccccagaccagcaacgtc

SEQ ID NO: 40781 - DNA, 393 bp, Gossypium hirsutum
  Clone ID: LIB3189-001-P1-K1-C11
cccacgcgtccgcccacgcgtccgcggacgcgtgggttctcaactaaacttataacgttcgatcgtttaacgcaaacccatttttaagtgagggaaaggtttcagttcagagtcataagcaacatcaatggctccttcaactctgacggctcttgcggaagagaaaaccttgcaggcaagcttcgttcgtgatgaagatgagcgtcctaaggttgcttacaaccaattcagtaatgatatccctgtcatctctcttgctggtatcgatgatgttgatggcaagaggggtgagatatgcaagaagattgttgaggcttgtgaggattggggtgtcttccaggttgtggatcatggtgttgatactaaactcgtgtccgaaatgacccgtcttgc

SEQ ID NO: 40782 - DNA, 396 bp, Gossypium hirsutum
  Clone ID: LIB3189-001-P1-K1-C12
ccacgcgtccgaaccctagccgcccctttctcttaagagcaagcccgacaatgccgcccaagttcgacccgacccaagtcgtcgacgtattcgtccgcgtcaccggcggcgaagtcggcgcggctagttccttagccccgaagatcggtccgctgggtctttcccccaaaaagatcggtgaagacatcgccaaagaaacggccaaggaatggaaaggcctccgcatcaccgtcaagctcacggtgcagaaccgtcaggcgaaggtcacggtggtcccttccgcggcggcgctagtaatcaaggcgttgaaggaaccggagagggataggaagaagaccaagaacatcaagcacaacggtaacattagcctcgacgacgtcatcgagatcgctaagg

SEQ ID NO: 40783 - DNA, 92 bp, Gossypium hirsutum
  Clone ID: LIB3189-001-P1-K1-C4
acccttccgaacctttaaagcccaaaaagggaaattgtcccatgtaaccgccacttccacatgggggggtcattcctaaaaaacgggggaac

SEQ ID NO: 40784 - DNA, 380 bp, Gossypium hirsutum
  Clone ID: LIB3189-001-P1-K1-C5
gcaaaaatctcgaagcttccttttcctttttagatctcaaaattcaaaaagctcgctgtttcatctcatggctgcggcgatcgtctccgtcaaagctaggcagatcttcgacagccgtggaaatccaacggttgaggttgatgtggaaacatcgaacggtataaaggctagggccgcagttcctagcggtgcatccactggaaattacgaggctcttgagttgagagatggaggttccgattacctcgtgtaaggtgtatcgaacgctgttgctaatgttaacacaagcctcggccctgcattgattggaaaggacccaaccgagcatactgcaattgacaaattcatggttcaacaactggatggaaccctaaatgagt

SEQ ID NO: 40785 - DNA, 385 bp, Gossypium hirsutum
  Clone ID: LIB3189-001-P1-K1-C6
tccaaccttttttcccaaaaccaaaaccacgtatcaaaaaaccaaattcaccatcacagggggcaaggtccgactttccaaggaaaaaattgaaaaaatggttcaggaaccaaaaaattccaaatccgaaattgaaaaccataaaaggaaggtcaaggcaaaaaatgcattgaaaaactatccttacaatattaggaccacagttaaggacaaaaagattgttgccaacttcccagcacctgataaaaagaagatcgaagatcctattgaacaagccattcaatggttagacagcaaccaactcgccgaatccgatgaattgaagacaagatgaaggagttggagagtattctcaaccccatcattgctaagatgtaccaaggtg

SEQ ID NO: 40786 - DNA, 391 bp, Gossypium hirsutum
  Clone ID: LIB3189-001-P1-K1-D10
gttttccttgttctcttctacattcagcgaaggggtgctctgagatcacataccaaaatggtgaaggccgttgccgtccttggcagcaatgaaggtgttagcggaactgttttcttctcccaagaaggagatggtccaactaccgtgactgggaacctttctggtcttaagccgggactccatggcttccatgttcatgcccttggggacacaactaacgggtgcatgtcaactggaccccattttaatcctgctggcaaagagcatggtgctccagaagatgagaaccgccatgctggtgatctagggaatgtcactgttggtgatgatggctgtgcaagcttctccatcaccgacaaacagattcctctcacaggcccaaactccatta

SEQ ID NO: 40787 - DNA, 393 bp, Gossypium hirsutum
  Clone ID: LIB3189-001-P1-K1-D11
cccacgcgtccgggctgctcagggctctccacaactcctctttatttatttcactaattgttagaatagtgctaatcaacagaatgcaggcatccatgtcggttacctcgacgaactccacattaccaatgccagtgcaaagcagccttggattctctcaccgcttccttccttcatctcatcggttttctcaacttccgatcacccgcttttctcccgctcctacttcactcaaatgcaggggctctctttcaagctttccacttgttaatgatgaaaagaagtttgtggaggcggccaaaaaagcaaatttagtccccctttatcgttgcattttctctgatcaactgactccagtgcttgcataccggtgtttggttaaagaagatgata

SEQ ID NO: 40788 - DNA, 391 bp, Gossypium hirsutum
  Clone ID: LIB3189-001-P1-K1-D12
aacaatttcaacttgcccaaatttcttaaaacagttgctgcacttcttcttcttctctttgtctttcaccttagtcctttctacattctctcctaaaacccgttcctcccttctgttgccctttctttcttgttcttttatttctattcttttttccttttttaatctctgtccatcggtcgtcggtcggagtaaggtctccctctctcgttttcgcgctgccgctgaccagttcgcctttttcggttctcagatggaaagtgataatcttgcatacatggaacttgcaattcaccaggcaaaacttgctttggaaagccttgaagtgcctgttggttgcgtaatcatcaaggatggggagcttatagccttgggtagaaatcgaaccact

SEQ ID NO: 40789 - DNA, 198 bp, Gossypium hirsutum
  unsure (1)..(198): unsure at all n locations; Clone ID: LIB3189-001-P1-K1-D5
gtcagccaattgtttgagctagctatgctcntactcaaatggcaaccaaaacgatgatgggtgcaaatatttccactttgcttctttttgttcagtgtctgcaactccattttccttggtgctaatggagatgacaatggtggttggcaaactgcccatgccaccttctacggtggtgctgatgctaccggctcaatg

SEQ ID NO: 40790 - DNA, 53 bp, Gossypium hirsutum
  Clone ID: LIB3189-001-P1-K1-D6
aacaatttcaacttagcccaaatttattaaaacagcagcatgctactttttga

SEQ ID NO: 40791 - DNA, 395 bp, Gossypium hirsutum
  unsure (1)..(395): unsure at all n locations; Clone ID: LIB3189-001-P1-K1-E10
cgacaaatgttggaaccagacccaaatctccggcttactgcaaagcaagtgcttgagcatccttggctccaaaacgctaaaaaagcccccaatgtgcctcttggtgatgttgttaagtcaaggcttaaacaattttcaatgatgaacagattcaaaagaaaagccctacgggttattgctgagttcttatccgttgaagaagttgaagatatcaaagttatgttcaataaaatggacactgacaatgatggcattgtttcggtcgaagagctgaaagccggatttaaaaattatggttcacagcttgcagagcctgaagtgcagatgctcattgaagctgttgatgctaatgggaagggaacattggactatggggaatttcttgctgnttctct

SEQ ID NO: 40792 - DNA, 393 bp, Gossypium hirsutum
  Clone ID: LIB3189-001-P1-K1-E11
accgttgtttaatatacttgggagacctagcgaggtacaaaggactatacggagatggagattctaaatcacgcgagtatgcagctgcttcaaattactacttgcaagctgcatcaatttggccatcaagtgggaatccgcatcatcagcttgctatattagcttcatattcaggagatgagctggtggccatttatcggtatttccggagtttagctgttgataaccctttttcaactgcgagggataacttgattgtagcatttgagaagaatcgccataattactcgcagctccatggggatgttaagggccccttcaaggagcctgttgtgcggctatcggggaaaggcagggggaaattggaagcaaagcttgcatctaaagatgcca

SEQ ID NO: 40793 - DNA, 398 bp, Gossypium hirsutum
  Clone ID: LIB3189-001-P1-K1-E12
ggaaatgataaatcatgcgtttggcacgccgctgatttcgctgatgggaatttgaaagaagagatgttctgtatcagatttgcttctgttgagaattgtaagaccttcatggagacagttcaagatgttgctgaaagtcagggaaagaaagaggaaaataaagacgctacagtcactgctgatctcctcgacaagttgagtgttggagaaagtaaaagtgacggtaaagaagaagatacggtcgttgcctccgacaccaaggaagccgtcaaagatgaagcaaaaacagaggaagataagaaggatgaggctgcttcaaaagcatagacctgaaagagaaagcaacaatatactcgagtaagtttattataaaaaaattaatatttagtggtttaagg

SEQ ID NO: 40794 - DNA, 184 bp, Gossypium hirsutum
  unsure (1)..(184): unsure at all n locations; Clone ID: LIB3189-001-P1-K1-E4
agatgagctacctttatgcaaaagggtggatgacaaagggagataggatttggcagatggcttttaagagtggatgcgactgcaacacnccggtatggaagttcaatccaaccatcaaaaaaccaacatatgggcctcgggaggattgcatccatagtttttccgcccatatccacaaaactca

SEQ ID NO: 40795 - DNA, 133 bp, Gossypium hirsutum
  Clone ID: LIB3189-001-P1-K1-E5
acaacaaacggaacttttcaaaactctttgttcagatttctgctatattccagcgtgggctttcaagttgtaacgacgcttaaaaatcccccaatgtgcctgttcgtacacttgttaaattatgtcttaaaca

SEQ ID NO: 40796 - DNA, 359 bp, Gossypium hirsutum
  Clone ID: LIB3189-001-P1-K1-F10
caagaaaaacaaaccggggtatcaccatttccttgatgtaaacataaatggcactctgtttcaaagaacaagatgcatgatacaactataataattaacatataccatatatgtatatcaaaagaaaggctcgtatacgtaaaagagttcttgaaggaagaactatcaacaacacctttaacagattttaggacaaaaagttcagtttttcccctactttttgctccctcaacgagaagaaaaaacaacatatacgtagataaaaaagcatattttgcatcaaggttccagcttcaaggaaacaacacgtgactgtctgttgcgctttgctaccttaacaaagaatattgaaaggcacg

SEQ ID NO: 40797 - DNA, 393 bp, Gossypium hirsutum
  Clone ID: LIB3189-001-P1-K1-F12
aaacacgtttcccgttctgggttttcaatcaaattttgctttgtttcctgttgcggaagatgcagcaactcttcagtatgttgcaaggatctctcatggcgctcctttgggatccactgaccttgtggttgatcttggcggttcgtttctttggatggattgcaattccggacacgtgtcttcatcatacaggttggtctcaagctgctcggtcaactgctctagagcaaagttccatgatcttggaagcacgagttgtctattaaacaccaactgttatgtgtccccttacaatggcgtaacaggatcgacttcaatgggggaactagtggaggatgtcatagccgttgattctgttgacccttcagatgtaggccaaagcacaacagtgga

SEQ ID NO: 40798 - DNA, 367 bp, Gossypium hirsutum
  Clone ID: LIB3189-001-P1-K1-F4
gatatacatgccagaaacctacactttttttttttgtaagtatgaacaaaaacaaactgggaaacttcaaaaggctcaggcaatcaattatttaccggaagctagcatttaatgcttgtacacccatatgaacaatcgctctaaaactttcagcaaaacgttgaaaaactcaacgtttacaccaattatattaatcaacttaaatagcttaaaccataaatcatcatgtgcttaatgcctcgccaagaatttactgctgatttgccggcccgctattactcaaaataaaccctgtatccctactccaacagatgtttggtagctatcatcttgtgaacgatcacctcaatgaatcataagcattcct

SEQ ID NO: 40799 - DNA, 349 bp, Gossypium hirsutum
  Clone ID: LIB3189-001-P1-K1-G10
attgaagctcgttggagaaaaagataatagaaaaaaaatcagtttttcaagctgggtgcatcagtgatcaactggtcgatcgaaggtccatccgtggttcgattgagctgatttttggacagcagctaggtgataaggtgttcttgactttgtacggtcggatttttcatccgagacttgtagcgtcggaaatacccatttttcagcagctacgtttttggtgatgttctctcatttttctctcttttgcttaagattacatatttgtaaccttgtctgagttgtatgcttgttgtaggtttgatattgtgatcttgtagtctttcattcttttatttgtatatctttt

SEQ ID NO: 40800 - DNA, 399 bp, Gossypium hirsutum
  Clone ID: LIB3189-001-P1-K1-G11
ctcctgggtgcagcttactttgttgcaggcaccgatataggaaaattcaccatgaaaactgttgatgacattaggaccttgaataagtcagttcattttaggcctgcctgcaatttctataacatgaacgagcttgcagctttgtgggaaaggaaaatccggcgaacactccctcgagttaccgtcactgaggaagaccttctctcggctgcggcagagaatattatcccacagagtgttgttgcatcattcacccatgacatcttcataaagggttgtcaaatcaacttcccaatagaaggcccgaatgaaaccgaagcctgcagtctgtacccgaatgagccattccgaacattggatgactgcttcaacgacttcttagcaaagatgaaggatgaa

SEQ ID NO: 40801 - DNA, 399 bp, Gossypium hirsutum
  Clone ID: LIB3189-001-P1-K1-G12
cgccaatctcccttttacggccgccgatttcttctgtcctcttctcgttccctgggcggccaccacttcccctgcgctatggatgacgacaattcgaacgcgttgcggagaatgtcgacccgtactcggaaagttgctcctaaaatggctgcagcactcggcagttctgataatcgatcccaggcagctttggcccgtcttgaagcattggagaatgataacgctgggattgaagcagttgaaatgaacgatgatgatgaagcttctcttgatgaagatgatcaagcatacatgcaaaagagatcgaagggcacaaaacgtaaaacccgacaggcaaaagcacttgaaaatgctaggaaggctcccagatcatttcttgagctcttacatgaggcaaac

SEQ ID NO: 40802 - DNA, 103 bp, Gossypium hirsutum
  Clone ID: LIB3189-001-P1-K1-G5
aaaaaaaaaaaaaaaaaaaaattttttaaaaaaaaaaaaaaaaaaaaaaaaggagaggaaaaaaaaaaaaaggggggaaaaaaaaaaaaaataaaaaaaaaaa

SEQ ID NO: 40803 - DNA, 398 bp, Gossypium hirsutum
  Clone ID: LIB3189-001-P1-K1-H11
aattcatctacattaacgcctatggaattttccaagacatcaccagcaaccctgcagcttacggttttaaggtgacaaatgcaggatgttgtggagtggggaggaacaatgggcaaataacatgcttgccattccaaacaccatgccagaacagggatgagtacttgttttgggatgcatttcatccaagtgaggctgccaatgtgatcattgggaggagatcctacagcgctcaatctcctaccgatgcttaccccattgatatccgccgtcttgctcagctctgaaactgaaagtcgacgaggtttttgatgggaatttatagataattaattgaatcgttgtagaattctttctatatttgtgtcgttttgaattgtgtaacagcttacaatcat

SEQ ID NO: 40804 - DNA, 396 bp, Gossypium hirsutum
  Clone ID: LIB3189-001-P1-K1-H4
ctcaaatatcaaatccctcgaaaaatccttcccatccaatcaccacccgaaaccatgggcactccttccccacgcgaagaaaatgtctacatggccaaactcgccgagcaagccgagcgctacgaggagatggtcaagttcatggagaacgtcgtctccgccgtccccgctcccgacgaactctccgtcgaggaacgtaacctcctctctgtcgcctacaagaacgtcatcggcgcccgccgtgcttcctggaggatcgtctcctccatcgagcagaaggaggaaggccgtggcaacgccgaccacgtcgccgtcatccgtgactacagggccaagatcgaggccgagttgtccgagatttgcgctggaattttgaagctccttgacgagaagctt

SEQ ID NO: 40805 - DNA, 211 bp, Gossypium hirsutum
  Clone ID: LIB3189-001-P1-K1-H5
aaaaaaaaaactacatttaccccaatcttattttttatgaacctccaaagaagcctagcggcttactcaaatacaccagtgtatacacctccaaagaaagaggatcctaaacctaaaccaccaatatatgaacctccaaagaatgagaaaccttagccaaaaccaccgatttatacacctccaaagaaagagaaacctgaacccaaaccac

SEQ ID NO: 40806 - DNA, 388 bp, Gossypium hirsutum
  Clone ID: LIB3189-001-P1-K1-H6
tttttggtaagcagtaactggcacatgcattatgaacaatgacttggttacggtgccgagctacgagctcaggtgcaggaatgatcctcaatggtgaattagtcgaaccataaccgtgacagacaccaactattgtacacctaactatgctttatctagtgacaatggcgggtggtgcaatcccacacaagaacactttgatttggccgaaccggcattcttgccgatagcataatattgagctggaatcttacctgatatgtatacaacggtgttatgtgttaagaaaggaagcatcaagtacaccatgaatggacattcatacttaaacatggtgttgataacgaacgtgtgaggatcaggggatataacgtaagtgtgcatcaag

SEQ ID NO: 40807 - DNA, 376 bp, Gossypium hirsutum
  Clone ID: LIB3189-002-P1-K1-A10
cccacgcgtccggcttcctggtgataatgttgggttcaatgttaagaatggcgctgttaaggatctcaagcgtggttatgttgcatccaactccaaggatgatcctgctaaggaggctgcaaacttcacttctcaggtcatcatcatgaaccatcctggacaaattggaaacggatatgccccagtcctcgactgccacacctcacacattgctgttaagtttgctgaacttttgaccaagattgacaggcgatctggtaaggagcttgagaaggaacccaagttcttgaagaatggtgatgctggtatgattaagatgattcccaccaagcccatggttgtggagaccttcttcgagtacccacccttgggtcgt

SEQ ID NO: 40808 - DNA, 357 bp, Gossypium hirsutum
  Clone ID: LIB3189-002-P1-K1-A11
cggacgcgtgggagaactttgaagttcggctgctcagattttgcctatttcccgtatttttctctcagtgggggacgatgtctacggctggtgaagctgcttgttcttacgctgctttgattctctatgatgatggaattcccatcaccgctgagaaaattgcaacaattgttaaagctgcaaatgtttcggttgaatcttattggccaagcttgtttgcaaagcttttcgaaaagtgcaacattgaggatcttataaccaatgttggtgctgctggtgctggtgctccagttgccgcagctgcacctgttgctgctggcggtggtggtggtgccgttgctcccccttctgctgagg

SEQ ID NO: 40809 - DNA, 373 bp, Gossypium hirsutum
  Clone ID: LIB3189-002-P1-K1-A12
aattggttcagaaaagaaaaatggtcaccattgatgttcctgagcaagtttcggttcttgcatatgcaggagctgttataaaggcttgtaaaggatgggggacagatgagaaggcaataattgcagtgttgggtcacagaaatgcagatcaaaggaagcaaatcaggcttgcttatgaagacctttaccaggaagatctcatcaagcgtcttgaatcacagctttctggtgatttatagaaagcagtgtatcgatcgatattggatccagcagaccgagatgccgggttagctaatgctgccatagagaaattaagccctgatcaccatgtgatcgttgaaatctcatgcaccagatcctctgaagagctctt

SEQ ID NO: 40810 - DNA, 320 bp, Gossypium hirsutum
  Clone ID: LIB3189-002-P1-K1-A4
cccacgcgtccgtactactccaagcaagcattttccttacaagtttgtttttcttgtgattaatcgatatggggaggtcaatgtcccttaagcttgcatgtgtggcggtgttgtgcatggtggtgggtgcacccctggctcaaggggccgtaacctgtggtcaagtcacaagctccctcgcaccctgcattggttacttgacagggaatggcgcttgtggcgttcccccaagttgcttcgggggcataaaatcttttaacttcggcggccaaacaacaccaaacccgcaagcaacttggaaattccttaaaagggccggc

SEQ ID NO: 40811 - DNA, 384 bp, Gossypium hirsutum
  unsure (1)..(384): unsure at all n locations; Clone ID: LIB3189-002-P1-K1-A5
gttattcttcaacaatnttattcttctttattcnntggttgctcagcgcattcatgtttgattggtctaactcattcctcgtgagctaatggtaaggttaatatattgcctcctaccaatacaagtgataaggtcactttggccctgtactatgaaactttatgcccatattgtgccgactttatcacaaatgaccttgtaaaggtattcctcagcgatctgtttaccattgtcaatctaaagttagtcccttggggcaatgctgacattcttggcgatgaaccccattgccagcatggagaagatgaatgctacttaaataccatacatagctgtgtcatctaccactggcctgatgtgaaaaagcactttgatttcattcgc

SEQ ID NO: 40812 - DNA, 376 bp, Gossypium hirsutum
  Clone ID: LIB3189-002-P1-K1-A6
gcggaggatcaaattaagcggctggcgaaggatccgcaagtcgttccggctctcgggagcaccttcgcactggcaagactcccaacgtccgtcaactcgccgcagttctcctaaggaagaagatcactggacactgggctaagctcgctcctcaggttaagcaacttgtcaagcagtccctcattgaaagcatcacaatggaacatagtccaccagtgaggcgagccagcgcgaacgtagtgagtatagttgcgaaatacgctgttccggctggagaatggcctgatctgctgccgtttctgtttcagtgtagtcaaagtccacaggaagatcatagagaagtggctttgatacttttcagctctttgactgaaac

SEQ ID NO: 40813 - DNA, 166 bp, Gossypium hirsutum
  unsure (1)..(166): unsure at all n locations; Clone ID: LIB3189-002-P1-K1-A7
ccgggcgacccacacgtcctctttcacatacatttccatctttcttgtttcacactttttttatataatgtccgttttataatatagtggcttgctatacacccaacnnnacttaactctcctcccttcttctaataaataacatcacttcacacttccctaacct

SEQ ID NO: 40814 - DNA, 368 bp, Gossypium hirsutum
  Clone ID: LIB3189-002-P1-K1-B10
cggacgcgtgggttcagattactggcccgttctttatcccgtttgaaaagcactttttcacccaaaagtggtggtctcttaaaagcagctaagaacaggcttctttttctcttaaaatatctgcatcaaaaaagtgcttctctctagatggagaagctaaaaaattctccttttcttctgctgtaactgcttttggatgaaaattgaccaaatacccctgtcttctcccccaaatggctttcccctctgctggttacctaaatgttctttcccctctgctggtgaaattggagctttatacccgatttcttttccccattttcggctttcaaagctctactttctgttctttgttcctcttccgcagc

SEQ ID NO: 40815 - DNA, 365 bp, Gossypium hirsutum
  Clone ID: LIB3189-002-P1-K1-B11
gaatagcccaagtgaaagttcctcacaatcatttgtcattcaaagaggggaagctcaaaacagtgatcagtgagaaaagggcaagtgaatgtgttctttttgttactgtttttgagtctctcttcagcttctgatcagaaatggaggaaagcaatgatgtcagcttacaatggttcttcttcttcttcttccatgatgatgaatagagttgggtcctccatcctgttcccaattcatggaaatgtgtatccaacagggtactataatgttaccatcaatataggtcaccctcccaagccttactttcttgattttgatactggaagcgacctcacatggctccaatgcaacgctccatgcgtcca

SEQ ID NO: 40816 - DNA, 346 bp, Gossypium hirsutum
  Clone ID: LIB3189-002-P1-K1-B5
tcgtaaaaataaattataaaaaataacattttttcaaacacaaacataaaaaaaaaatagaaaatttaaataaaaaaaaacgagatggaatatttcctcccctttttaaaaccccattttacctccccctatctccaacttcacactttttatatattttcccctaaattcaatttactgcccctcgttcttacaacgtactaacttgaaaaaccctacctttcccccatttaaatccctttaattacattcccctttctccctctttcttaatattaaaaattccctaacctatctcccttcccaacatttcctcatcctttatctccaatttaccccccctttt

SEQ ID NO: 40817 - DNA, 372 bp, Gossypium hirsutum
  Clone ID: LIB3189-002-P1-K1-B6
gacaaatgttacaactcaagttcgtgggacaatgggccacatagcaccagagtgcttgtccaccggaaagtcatgagaaaggacagatgtttttggttacgggattatgcttctagagcttgtaacaggtcaacgtgcaattgatttttcacgcttggaagacgaagatgatgttttgctgcttgatcatgtcaagaagctggaaagggagaaaatgctcgatgctattgttgatcgtaatcttaataaaaattacatcatgcaagaggtagaggcaatgatccaagttgcactgctttgtacccaatcttcaccagaggaccgtccggcaatgtcggaggtagtgaggatgttggaaggagaggggctggc

SEQ ID NO: 40818 - DNA, 245 bp, Gossypium hirsutum
  Clone ID: LIB3189-002-P1-K1-C10
gagtaatatcatattaataaataatgaaaaaaggaaaatgtatgggagaggtgggcttgtttgattcaaagcaggtcaatccttggaacccttctctgtatacctgaattctttttcccccaaaacctcacccaaagctgttcaagttcaacaacattcacatattcaaaatgcaattgctcatcctcatcacgctgcggatgtttaatccaatccatccacttaatgtagagcccttcaatcca

SEQ ID NO: 40819 - DNA, 373 bp, Gossypium hirsutum
  Clone ID: LIB3189-002-P1-K1-C12
aaaaaagaaaaaaaaaagacagaaattaaaataaaaagtgaaagagcgaaaaagagtaaagcacaaagaaacagatttgacacagttgaaaatcttttgagtttccgtgcttaaaaaattaaactagttttaaaagaggggaaaatcatttgattttcctttttttaatttgaatttcgcagcaataactgagaatcaatcactttcagtgttttttttgggagaaaattctatgtcgagcgagagagttcccgttgagttatccaagggcgttaacggccttgaaaaaatcatcctccgcgagactcgaggcagctctgccgaggtgtatttgtatggaggacacgtgacatcttggaagaatgagcatgga

SEQ ID NO: 40820 - DNA, 369 bp, Gossypium hirsutum
  Clone ID: LIB3189-002-P1-K1-C4
aggacagttcctttggttttgagagaaaagagtagatcttggcttctctccttcgttcgattccgcttaattatagcccgcgtttctctcagacgtgaaaaatggggctgtctttcacaaagctatttagccggcttttcgccaagaaggagatgcgtatactcatggttgggcttgatgctgcgggtaaaactaccattctttacaagcttaagttgggagagattgtcactaccattcccaccatcggtttcaatgttgagaccgttgaatacaagaacatcagctttactggttgggatggtggtggccaggacaagatccgaccattgcggagacactactttcaaaacacccaaggacttattt

SEQ ID NO: 40821 - DNA, 380 bp, Gossypium hirsutum
  Clone ID: LIB3189-002-P1-K1-C5
caaaatactagccagaaaaaaaaagttaattaaaaaaaaaaaaaaaaaaaaaaacccaggtgccaccacgatcaccaccagccgttttatttcagaggagtgaaaacgacgccgcatttgaaaccttttctttactcttcaaccaagctgctgctcattcatccctttctctctctttttggtttcattattaaacacaccaaaaaaaagaatttcaaattattggttttaaggggatcgtatttatgatcacgtcgtagctctctattccacgccattgttcttctgtttaactcggtttgaggaggttattgtttgatctagggaagaaatggttgtttctgggccaattacgcctggacaggtgtttttttttttag

SEQ ID NO: 40822 - DNA, 375 bp, Gossypium hirsutum
  Clone ID: LIB3189-002-P1-K1-C6
cccacgcgtccgagctcagctcagttcatctcattttacataactcttttctactgcggtggcgatgggggcggcgatgttgtcggagatggcgacggagatcgtggtgccagtgtgcgccgtgattggaatagctttctcgttggtgcagtgggtgatggtgtcgcgcgtgaagcttacctccgagcgccatgcgtcgtcggcgaatagtagcaagaatggttacggtgattacttgattgaggaagaggaaggaatcaatgaccatagcgttgtcaccaagtgcgctgatattcaaaacgctatctctgaaggtgcaacatcctttctttttactgaatatcagtatgttggcatcttcatgattgcttttgc

SEQ ID NO: 40823 - DNA, 375 bp, Gossypium hirsutum
  Clone ID: LIB3189-002-P1-K1-D11
aaatccgcgaacatagattctgatcgtaagaggaagaaatcttcgatctgatccgcagatcgaacggcggggaaggagggcgaaaaacataaagataaagctcccacttcctccaccaatcaccaccaccaccaccaccaccacaaaaagaagagcaagatgtcttcttcatcgcccgccaatcaagtgagggcttctcacatcctcatcaagcaccaaggctcccgccgtaaggcctcttggaaggatcctgaaggtcgcgtaatctccaacactacccgagatgccgccgtctcacagctcaaagccctccgtgacgacatcacttctggcaacgctaagttcggtgaggttgcctctcgccactccgattgc

SEQ ID NO: 40824 - DNA, 373 bp, Gossypium hirsutum
  Clone ID: LIB3189-002-P1-K1-D12
ttttaatttatttgcccacaatcgctctctctctctttcagttcacttctacagccttctcttctccacgaatccaaaaaaaccaaagatgcagtacaaaaacctgggcagatcaggcttaaaggtgagtcaactatcgtatggagcatgggttagtttcggtaaccagctcgatgttaaagaagcaaagtcacttctccagtgttgtaaagacaacggagtcaactttttcgacaacgccgaggtttatgccaatggtcgagccgaggagatcatgggtcaggctattagggaacttgggtggaaacgatcggatatcgtggtttctaccaagatcttttggggtggtcctgggccaaatgataagggtttg

SEQ ID NO: 40825 - DNA, 371 bp, Gossypium hirsutum
  Clone ID: LIB3189-002-P1-K1-D4
atcagaacagtctactaagcactttggattcgttctccggaggaggcattggtagacttggtatatgctcccttggtattgttccttttattaacgctcaaatcgtgtttcaactcctcgcccaagtttaccctaaattgcaagatcttcagaaaagagaaggtgaagctggaagaaagaaaattttgcaatatactagatatgcctcggttttttgctatagtacaggcaattggccaagtactttaccttcgtccatatgtcaacgatttcagcacgcagtgggttctctcctctgttactttattgacacttggtgctgtactgacaacatatattggggaacggatttctgatctaaagcttggaaa

SEQ ID NO: 40826 - DNA, 376 bp, Gossypium hirsutum
  Clone ID: LIB3189-002-P1-K1-D5
caaaaggaaaatctcaatttaagctaattattttggcggcttctttttcttctatctcatagcagccatgatcattccagagaagaaccgccgcgagatctccaagtacctctttcaagagggtgtttgctatgcaaagaaagattacaacttggcgaagcacccagaaatcgatgttcccaatcttcaagtcataaagctgatgcaaagcttcaagtcaaaagaatacgtgcgtgaaacttttgcatggatgcattattactggtaccttaccaatgatggcattgagttccttaggacatatctgaatcttccttctgagattgttcccgctactttgaagaaacaagctaagcctgctggtcgtcccatgggc

SEQ ID NO: 40827 - DNA, 341 bp, Gossypium hirsutum
  unsure (1)..(341): unsure at all n locations; Clone ID: LIB3189-002-P1-K1-D6
acaagnngaggaataaagtgccgcaaaattcacaattacaatggggaaataaaacataactaagaaaatttcaaaacaaaaataaatgaaatcaacaagacaaactcaaaattcaatctttatacagaacataaattttttaaatgataattattgaaaaaataaaaaaacacttgccatcttgatcaccatcaaaatcactgtcttcttattttctccattttcatggacacaaagaaagtgcaataactagagcagtatctccaaacaaaccaacattttgcaaggtggccgatttggagttatcagctggggtaacatgggtgctattataaaccgtg

SEQ ID NO: 40828 - DNA, 373 bp, Gossypium hirsutum
  Clone ID: LIB3189-002-P1-K1-E10
tagttctagatcgcgagcggccgctgcgatctagacggacgcgtgggagccggttcacacatctcacttctctgcaatttcactcccttagagagaaaaaaccatggcggccgcagctcaaatcagcaaaaagcgaaagttcgtcgctgacggagtcttcttcgctgaactcaatgaagtcttgactagggaactggccgaagatggatactctggtgtcgaagtcagagttactcccatgcgtactgagatcattatcagagccactcgtacccaaaatgttctgggcgagaaagggaggaggattagggaactgacctctgttgttcaaaagcgattcaagttccctgaaaatagcgtggagctttacgct

SEQ ID NO: 40829 - DNA, 372 bp, Gossypium hirsutum
  Clone ID: LIB3189-002-P1-K1-E11
ccagcatccttgtactccccttgtttcaattcccagaatccagcctccaacgccatgagaagtgagatagagagtgtttgggtgtttgcccttgcatccaaatggcgaaccttttctcaagaaagctttgcatggtcgattttcatcattcttcttgcctggctaatcatgacccttgtctactgggcttaccccggtggcccagcctggggcaaatacaggttcgtgaaccgttcctctcttactgctgctaacaagaggagaattccagggcctagaggtttgcctctaataggcagcatgaagctgatggccaactccttggctcaccaccggattgcggccgcagcagaagcatgcaaagccaagagg

SEQ ID NO: 40830 - DNA, 370 bp, Gossypium hirsutum
  Clone ID: LIB3189-002-P1-K1-E12
caccactctataaaactgaagtcgttcttttcataaccaattcaaaccagataaagtcattttagttttgttatttttctctacttaaaacatttttccctgttcgtttgtctatttcttccttttccattttcaggtctatcggtcttccttccttgtctttcaagattctccttcttattatttataaaatacttttgtttttgaagatccgattcttgtttaaagaaaaattagataatggcgaggattagatcatcgtcgtcttcgagtaaatttagatactgtaatccatcgtattatttgaaaagaccgaagcgtttggctttgcttttgattggttttgtttcagctacttttttcgtttggg

SEQ ID NO: 40831 - DNA, 380 bp, Gossypium hirsutum
  Clone ID: LIB3189-002-P1-K1-E3
cggacgcgtgggcaaatttcagaaagcctgtattaaaacaaactcttgtggataaaaagattgaggaaaagaacatcgaagtgatgaagaaagaagattgcttccaaaagaacctcattaatgaggaggcattaaaaggtcaattgcaaaaacagcaaatgatctttgatcaacaacaaaggaatattaaggaactaaagcatgctattaattccacaaaagcaggcatgcaattcatacaaatgaagtttcatgaagaattcaacagtcttggtatgcatattcacggcctagctcatgctgcttctggttaccacagggttctagaagaaaaccgcaagttatataaccaagttcaggatcttaaaggaagtatccgt

SEQ ID NO: 40832 - DNA, 372 bp, Gossypium hirsutum
  Clone ID: LIB3189-002-P1-K1-E4
ggaacatgtgcacagattcaacacttcttttttttatacacactattgtggctgaagggattggggatatgaacatggaagagcaaaataacgaagattgcttccaaaagaacctcattaatgaggaggcattaaaaggtcaattgcaaaaacagtatatgatctttgatcaacaacaaaggaatattaaggaactaaagcatgctattaattccacaaaagcaggcatgcaatttatacaaatgaagtttcatgaagaattcaacagttctggtatgcatatttacggtctagctcatgctgcttctggataccacagggttctagaagaaaactgtaagttttataaccaagtttaggatcttaaatgaa

SEQ ID NO: 40833 - DNA, 373 bp, Gossypium hirsutum
  Clone ID: LIB3189-002-P1-K1-E5
caaaaattggaagctgaacaaaaggtcaccctccgagaaaagcagcaaggttctgctttggttttctttaccagtagggtgactgcagccctggctgctcaaagcctacatgctcagatggttgacaattggaccgttactgaagcgcccgaacctcgtcaactcatatggagcaacctgaccatcaagttttacaataggataatacgacaatatgtcgtttatattgtcgtgtttctgaccatagttttttatatgattcccattgcttttatctctgcagtcacaacccttaagaatctgagaaaacttctgccattcttgaagcctattgttgatatagctgcactaaagacggtattggaggcatatc

SEQ ID NO: 40834 - DNA, 375 bp, Gossypium hirsutum
  Clone ID: LIB3189-002-P1-K1-E9
cccacgcgtccgcccacgcgtccgttgacgcgtggggcgcggtgggatgcaaaggttcgtgaaaaccttgactggcaagacaatcactctcgaggtcgagagctccgacacgatcgacaacgttaaagcgaagatccaagacaaggaaggcatccccccagaccagcaacgtctcatctttgccggaaaacaactcgaagacggccgtaccttggccgactacaacatccagaaggagtcaactctccaccttgtccttcgtttgcgcggcgggatgcaaatcttcgttaagacgcttaccggaaagacgatcactctcgaggtcgagagctctgacacgatcgacaacgtgaaagccaaaatccaagacaagga

SEQ ID NO: 40835 - DNA, 376 bp, Gossypium hirsutum
  Clone ID: LIB3189-002-P1-K1-F1
tgcacttgatgattccacctcaaaggcaaaatgtgcacgtgatgcagtcactccccttgctcatatgccttatagtgatcaattggagcacaagaagaattctgtcatgcagatgctcaaaaaacttacgagaaatgcacgtaaagcatgtcctaacggtgtttcacttcctcagtgggttcttcatctagggaaagaggcggtcttccatgtgaagtagaaggtataattgaatcaccagttgtaaatggataccgtaataagtgtgagttttctgttggatattctcaacagggaaaaccaactgtggggttcatgcttgggaattttagggagggtgtgacagctgttgaagaacctgtggactgcccaaatg

SEQ ID NO: 40836 - DNA, 326 bp, Gossypium hirsutum
  Clone ID: LIB3189-002-P1-K1-F11
caaagctctgtctgtgtattctctttggcttatctatcgctttgatttcgcatccttgctgtgcactcgatggcaaatcgatggttgaggcctgaggtgtatccgctgtttgcggccgtaggtgttgctgtcggaatctgcgggtttcagttggtgcgcaatatctgcatcaaccctgaagtcagggtaaccaaggagaacagggctgctggggttttggacaactttgctgagggagaaaaatattctgaacatttcttgagaaaatatgtccgcaacaagacgccagaaatcatgcccagtatcaacagcttcttcactgaccc

SEQ ID NO: 40837 - DNA, 372 bp, Gossypium hirsutum
  Clone ID: LIB3189-002-P1-K1-F12
cggacgcgtgggttcatttccaagctctaaccctgcgttcaatggaaatacaagcccctcatcccatcaccaaatcttcagaccctgagaaacatgatgccaccagcggcggaaaccacgacgtcgaagacgacgagatctcccctatcgaacaagtccggctaaccgtaaccaacaccgatgacccgacgttgcctgtatggaccttccgaatgtggttcttaggcttgttctcatgcgcccttctctcttttctcaaccaattcttctcttacagaacagagcctctcattataacccaaatcacagtccaagtttccacacttcccattggccatttcatggcttctgtcttacccaaaacccagttcg

SEQ ID NO: 40838 - DNA, 378 bp, Gossypium hirsutum
  Clone ID: LIB3189-002-P1-K1-F2
cccacgcgtccggtatgggaccaaagagagagcttaagtttgctttggaatcattttgggataagaagagcagtgctgaagatttgcagaaggttgcagctgatctcaggtcagctatttggaaacaaatggctgatgctgggatcaagtacattcctagcaacactttctcttactatgaccaggtgcttgatgccacctctatgctcggtgctgttccaccgagatatggttggaacggtggtgagatcggattcgatacttacttctccatggctaggggaaatgcctctgtgcctgctatggaaatgaccaagtggtttgacactaactaccacttcattgttcctgaattgggacctgatgttaacttctctt

SEQ ID NO: 40839 - DNA, 377 bp, Gossypium hirsutum
  Clone ID: LIB3189-002-P1-K1-F3
ttgtactttcttttttacctatccatttttcatttcactcaattcttctttttcttctttaattccgtttcagcgagtgaaactgtttggatctacttctaaagcaacgaccaggagtttcttcttgacagctagggcaatggctgagctcgttaaagataaggaatccggtgtcgccgctgctggaggcggcaagatggacattgagcattcccgtaccttccttgaagctcgctctgaggaagaactcctatctggaattaagaaggaagtagaagcacgaaggttaccttcaaatgttgcagcaggaatggaagaattctatcggaattataaaaatgctgtaaactgctaatctggaactcttacttcagttc

SEQ ID NO: 40840 - DNA, 374 bp, Gossypium hirsutum
  Clone ID: LIB3189-002-P1-K1-F4
gctctcttgctcttcatccaccgtccggtttcgcttgagttaatttaagtgtaggtgagccttaacaaaaaaatgtgtcggagatatgatagccgcacaacaatcttttcccctgaaggccgtctctaccaagtagagtatgcaatggaagccattgggaatgctggctctgcgattggaatattatcaaaggatggtgttgtcttggttggtgaaaagaaagttacttccaagcttcttcaaaccttcacatctactgaaaagatgtacaagattgatgatcatggtgcttgtgctgtggcgggaataatgtccgatgcaaacatcctaatcaacactgctagggtgcaagctcaacgatacacatatgctta

SEQ ID NO: 40841 - DNA, 375 bp, Gossypium hirsutum
  Clone ID: LIB3189-002-P1-K1-F5
caacacacttgctagtattcctacttggagtggtgactctcaccactcccacatttggtacctatgagtcaccagagtatgggaaaccccctactcctgtattcaagcctcccaaggtgaaaccaccaccatatgaacctaagccaccagtgtatgaaccaccaaaaaaggagaagcctgaacctaagccaccggtttatgcacctccaaagaaagagaagcatggacccaaaccaccaatgtatgaacctccaaagaaggagaagcctgagccaaagccaccagtttatacacctccaaagaaagaggagcctaaacctaaaccaccagtatatgaaccttcaaagaaggagaaacctgagccaaaaccaccga

SEQ ID NO: 40842 - DNA, 373 bp, Gossypium hirsutum
  unsure (1)..(373): unsure at all n locations; Clone ID: LIB3189-002-P1-K1-F6
cttcctcacattttattcgtcccaaaaaacatttctattcctcttttatacaaacaaaaaacaatggctacaccgttgcttcatcttcttcctttaccatgcttcatttagcttcattgttctccattttcgtattagttaacgcaagaatccccggtgtttgcactggtggatcctgggaaactgctcatgtcactttctatggtggcatgttcacatctagggaaaatcaaaatcaaagaacccaaaactaggaaaccaaggaaacgatgagaaaaagagcaaaaagggattggaaattgaagggtaccgagtggaagggttgtcaataggagggcatgaaacttgcattatttttnccactcttaaccta

SEQ ID NO: 40843 - DNA, 374 bp, Gossypium hirsutum
  Clone ID: LIB3189-002-P1-K1-F7
gttgtttcggagtgaggtttcagatgataatgattcacagggttcaacaccttgttcccccactgttctaggttctcttgaggatggagggtctggtggtaatggccaggcatttgagcggcagctatcgaagcttagctcgttcaatttcaagccaaatattaggagatctgggcagatacccattccacccgaagaattaagatgtccaatatctttgcagcttatgtatgatccagtcataattgcctctggacagacatatgaaaggatctgtattgagaaatggcttggtgatgggcatgacacctgcccgaagactcaacagagactttcacatctctctttaacttccaattattgtgtaagggtct

SEQ ID NO: 40844 - DNA, 364 bp, Gossypium hirsutum
  Clone ID: LIB3189-002-P1-K1-F8
gttcttcgctagggttattcttcattcaaagagaaggaataagatgcttcctctttctctactaaaaacggcacagggtcatcctatgttggtggaactgaaaaatggggagacatataatggacatttggtcaattgcgacacttggatgaacatccatcttcgtgaagttatctgtacttcaaaggatggagacaggttttggagaatgcctgaatgctatatccgtggaaatacaattaagtatcttcgagttcctgatgaggtaattgataaagttcaggaagaaacaaagagtcgtgcagataggaagcctcctggtgtaggccgtgggagaggcaggggtcgagaagatggtcctggt

SEQ ID NO: 40845 - DNA, 161 bp, Gossypium hirsutum
  Clone ID: LIB3189-002-P1-K1-F9
gagggttgtactttgatcttgtatgtaatccatttcccacatcaacccgacctggagttggcttttcgtggcgggtgtcaagagaactcaaggtcgtgttgatgtgggaaatggattatttcaagatcaaagtacatccctctggacgcgttagtcgaccc

SEQ ID NO: 40846 - DNA, 267 bp, Gossypium hirsutum
  unsure (1)..(267): unsure at all n locations; Clone ID: LIB3189-002-P1-K1-G1
aaatncccgggccgcccacacccttccgaaaaaaaaaaaaaaaaaaaaaaaatttatatcaaacaaaaaaaacactaaaataggaagtaatactaaattttactgggagaaaaacatctattatctttgacaagaaactttaatcatccaaaaatagcaaatacttcaagaatctgaactaaaaatacattttcattgccggtgccctttttatagattccactttttcatcacccatcttgccatatatcattttttattattctc

SEQ ID NO: 40847 - DNA, 426 bp, Gossypium hirsutum
  unsure (1)..(426): unsure at all n locations; Clone ID: LIB3189-002-P1-K1-G2
cccacgccgtccgcaaatnccctacactttaatataatccantgcggttttcgttttgtgaaatgccgtacggagaggagtggcggagtgcggcgttgacgcgtattcgcgaattggtcagcttccgacccgnnctgcaagnncccaagannagtgccgnntcaggaatgcaangnnaagagctgtctctnngttgttaaaaccctgggaaancctttgcattgagggttacccccctgcnnctcaaagattggctttcaaatctctgaggagttgtgcatntggttgtggcatcntgtgtcaagaaatgcccatttgaagcaattcaaatcatcaacttaccaagggatttggataaagatacaacccatagatatggccccaatacttttaaactacacaggttaccagttccaaggcctgggc

SEQ ID NO: 40848 - DNA, 371 bp, Gossypium hirsutum
  Clone ID: LIB3189-002-P1-K1-G3
ctcaatttccccatctttttcgtctttggttctcgaaagttggtgaatagtggggtgattagtgccaatggctcgggttgggacctctgcagctcacattgtgttggcaatatttgctgtggccatgtttgttgtgtccgggaccatggcacacgatattgctccttctcctgcaatggctaccggagcaggctctgctttgccggtttccgctgtcttcttatgctcttccatgttggtctctttaattgctctcttggtgcattgaattcaaagcttttcaagactttatgacattggctacccttaatttcactctcactggtgatgaggggagtagcctctaatcttcttcgagataatatttgggt

SEQ ID NO: 40849 - DNA, 373 bp, Gossypium hirsutum
  Clone ID: LIB3189-002-P1-K1-G4
tgtgtcgtgtctgacgggtttcacttgcatagctagcaaagctaaagagtttgcaagatggggagcatggatagcttttggcagctgggggattatcttcgaggacaatcaaaagcctcagagaataaccaatggctgatggttgcctctaaactggctgagcagacgaggaaaaagggtgaacgcctgagcaatcttgatctttcgaagggtccagccgaaataaggacaagggataaatttggtttccgggaagacaacaaattcgagaaccttaacttcaatatgttaaacttggactccaagattggagataatgcaagcaaaagctcattccgaaatggtacctacaatataaatgctgtttaccaga

SEQ ID NO: 40850 - DNA, 376 bp, Gossypium hirsutum
  Clone ID: LIB3189-002-P1-K1-G7
gacgacttcggaattgcggttgcagccaaacaacttggacgcttctctcttcagtcatactcccttttactgcgaggagaacgtctattttctttgcaagaaactttgttcatccgagatagcagatgctcaaggatctgatcttttcgtcgttttcatttccaatgacaataaacagattccactgtggcatcaaaaagctagccatagagcagatggtgtaattctctgggattaccatgtaatttgtgttcagaggaagaaagatggtggtactcatttagtatgggacttggattcaagtcttccatttccttgtcctttagctacctatgtgtcagaaactatccggccatcatttcagctcttttcggag

SEQ ID NO: 40851 - DNA, 267 bp, Gossypium hirsutum
  Clone ID: LIB3189-002-P1-K1-G8
gtggattttttaacgtgaaaaaaatggggctgctttcaccaactattgagcgctatttgccaaagggagatccatactgatggtgggcttgatgctgctggtaaaaccaccattctttacagctgagtggagagatgtactctttccaccatggttaatgtggaccgtgatcaaacatacttactgtggagtggcgcagcagaccgaccatggggcctttccaacaccggctatttcgggtgtgcatgacggccggggtgagctaga

SEQ ID NO: 40852 - DNA, 372 bp, Gossypium hirsutum
  Clone ID: LIB3189-002-P1-K1-G9
cggacgcgtgggaaaacattcacatttctttgataatggctgccagaaggattgcctctctcttatcttcgtcggcaacttctttgggaaggttttcaagttggggaagaagaattaatagctttagtactgctgctgctgcgattgatgaacctatacatccatctattcaagtagatcatactcagcttctcatcaatggacaatttattgatgctgcatcaggaagaaccttccctacagttgatcctaggacaggagatgtaattgctcgagttgcagaaggagatctcgaagatgtaaatcgtgcggttgctgcagctctaaagctttcgacgaaggaccatggcctaagatgactgcttatgaaag

SEQ ID NO: 40853 - DNA, 245 bp, Gossypium hirsutum
  Clone ID: LIB3189-002-P1-K1-H1
ccacccttccggaaaatgtatcaggaggttgaggaggatttctagtgtgttggtttggatttatggggatatgaaatatgatgttgtgtgctatttgttatgtgaattgctccgttatttctacgtttagaggacttctataacttatttttcttacaaattctattaccaattatataaacctaagctatggcttctatctcggaagtatttttttgggtaattgatgttgtttcaacttgatg

SEQ ID NO: 40854 - DNA, 107 bp, Gossypium hirsutum
  Clone ID: LIB3189-002-P1-K1-H2
agaacagagaacttaaaactgattttttcattgggaatcctactgtttaattaagacttctaccccggatggggcctgcggatgctcacacaatgtgatttctgccc

SEQ ID NO: 40855 - DNA, 377 bp, Gossypium hirsutum
  Clone ID: LIB3189-002-P1-K1-H3
caaaaggcgactgaaaatggagcattcatatgtgcccagggatctgcaactgcctggatatgttcccgtctcccttgctcagtccaccattcttaccgtctatggtctctcttccctgctcgtcgtctcccttgtttggttcctctctgggcgatcgcgcagcatatctaaacttgatagattgttgatgtgctggtgggctttcacgggacttacacacataattcttgaaggatattttgcattctcccctgaattctataaagacaagactggattttatctggctgaagtttggaaggaatatagcaaaggtgattcaagatatgcaggaagagactcagcaattgttgctgttgaaggaataacatcagttc

SEQ ID NO: 40856 - DNA, 356 bp, Gossypium hirsutum
  unsure (1)..(356): unsure at all n locations; Clone ID: LIB3189-002-P1-K1-H8
aacgaaaagaacttaaatcaaaatacttaatagcatggcgatacatttatacaagaacttctaccccgggcacacgcaatggagccgtanacagtcaagtgaaatccaatccacgaaataatttgatctatggacagcatcgttgtggtaaaggtcgtaatgccagaggaatcattaccgcaaggcatagagggggaggtcataagcgtctataccgtaaaattgattttcgacgaaatgaaaaagacatatatggtagaatcgtaaccatagaatacgaccctaatcgaaatgcatacatttgtctcatacactatggggatggtgagaagagatatattttacattccaaaggg

SEQ ID NO: 40857 - DNA, 375 bp, Gossypium hirsutum
  Clone ID: LIB3189-002-P1-K1-H9
aatccataaacactttgcccccaattaccatagaagaggtgtttagacacattggaccactttattcagggtgtggaaataataatacactattttgtctcctttcagcactgtttttcaactatccaattattcagctttacttgagctcacacccaaagaagataacttgcttcttccctacagtgaggaatgaaataaagctaaagctatgaagatcgtttgtaaagattgttgttttatggagagaccagttagggttcttgggttcttgtttttgttactgcaaatcgaaaggtcttcatcagctttcaattatttgattggccttggaacctatgacataactggacctgctgctgatgttaatatgat

SEQ ID NO: 40858 - DNA, 341 bp, Gossypium hirsutum
  Clone ID: LIB3189-003-P1-K1-A1
agagaaactctcaccttcaatctcctttctctctctagaaacccccctaaaagattccatttttgtacatttaaaaaacttaaattttctccctctttttttttttaatctttcatatattcagattcagcgtttttacgtatcgctgagttatttgttcttttttgaatcggtcggcagagattgaatctcacgtgataagatctaagtatgcagcaaggtgatcaaacggtgttgagtttaagacctggggggggcgagggaacagacttttggtgggccttcgtcatcttcgtcggcatcatcatcctcgggttctttattagcatttgggttctttt

SEQ ID NO: 40859 - DNA, 370 bp, Gossypium hirsutum
  Clone ID: LIB3189-003-P1-K1-A10
cgccaatcagctgtccgccttgaccgaccgtccggcatcgtcttggccctcgatttttcccttttgtaaaccttttttcaccaattcccgaaatggcagtgaaaccctccaaggccgaaaagaaaatcgcgtacgacgcgaaactgtgccagctcttagatgagtacacgcagatcttgatcgccgcagccgacaatgttggctcgaaccagctccagaacattcggaaaggtctccgaggcgactcagttgttttaatgggtaagaacactatgatgaaaaggtctgttaggatgcatgctgagaagactgggaaccaagctttccttaaccttatccccttgcttcagggaaatgtgggtttgatctt

SEQ ID NO: 40860 - DNA, 268 bp, Gossypium hirsutum
  Clone ID: LIB3189-003-P1-K1-A11
gttcgaagagaagaagagagaagaagaggagcttaggttcgccacgactcggccggcgagcagcgtgatatcgtggctggaagaggtagccaagtcggtgaagttcaacgtgaagaaaagtgagtcaaaggtgaggttacagggtcaagaatgtggattgaaaggaaaattagcttttgctgctgacatatttgcagtgtcgccattgtttttggccttggtagttaaaatagattacgggtttactcttattttcatttagttttgt

SEQ ID NO: 40861 - DNA, 124 bp, Gossypium hirsutum
  Clone ID: LIB3189-003-P1-K1-A12
gtccagtatctcttttgttcttttcatttctgctttcaactaaaaaaaaaaatcctttattttttgtttcccccaaaagttttcatcgtttttgggtggggaaccttctttaactttagttcca

SEQ ID NO: 40862 - DNA, 226 bp, Gossypium hirsutum
  Clone ID: LIB3189-003-P1-K1-A2
aaatactatagaaatccaagaaaaaaaatttaaaaaaacccctaattctataaaaagatcgaagtaaagtagaatcagaagcaaaaatcgccgaggaaaacaagatgtcggggcagcatgaagaagataagaagcccggcgatcagttcgcggcttacatcaacctcaaagtcaaaggccaggacgggaatgaaggtttcttcaggatcaaaagaagcccacaatt

SEQ ID NO: 40863 - DNA, 444 bp, Gossypium hirsutum
  Clone ID: LIB3189-003-P1-K1-A3
gcacgcgtgcggctcatctacgattgtggaaagcggatctttctcgttccacagtgttatgctgagaaacaagctctcggggaagtgagtccagagcttctggatacccaggtgaacccagctgtgtgggaaattagtgggcatatggtgttaaaaaggaggaaggactatgatgaggcgtctgatgaaaatgcttggaggctcctggctgaggtttctctctctgatgagaggttccgggaagtgaatgcactcatctttgaagtcattgccagtggcaaagatggcattgaacatgctgctaagagtctgccttaggagcccgatacttaagctggatccactgaagaagaaagcgccatcaccaaaaccttccaccgcgctttggtgggtgggacacatgaatgggttgtttgcattaggaactggcatccacaaacaata

SEQ ID NO: 40864 - DNA, 234 bp, Gossypium hirsutum
  Clone ID: LIB3189-003-P1-K1-A9
cattgatgcttctaattgaccatcatatatgtatatatagacacacacatgtatgtatgcttgcacatatgtatgtatgaatgagggtatgtacgaatatatcgtcttcatcgatgcctggtatggtctggcccggctctcgggtttttcggtcactagatcttgacaattggtgtatgtgtatatttcttttatattataaagtgtgacgtgcttaaaaaaaaaaaagaacat

SEQ ID NO: 40865 - DNA, 471 bp, Gossypium hirsutum
  Clone ID: LIB3189-003-P1-K1-B1
aaaaaagtgaaaagggtaatggtgttgctcctgctacaaggtctccaatggctttaatggggtcatctagaaatgaaaaccaagaagtgaataccagcatgagaactgccgagaccatgctgcggttggtgcctatggctttaggggttgctgcacttgttgtcatgctcaaaaactcacagtccaatgactttggctccgtttcatactcagatcttggtgctttcaggtacttggtgcatgctaatggtatttgcgcaggctattcccttctttcagctattatagcagctgtgcctagtccttctactatgcctagagcttggactttcttcctactcgatcagattcttacatacgtaatcttgggagctgctgctgtttcaaccgaggtgctttacttagcatacaaaggagactcatgcattacttggagtgcagtttgggggacatttgctggtttctgttata

SEQ ID NO: 40866 - DNA, 380 bp, Gossypium hirsutum
  unsure (1)..(380): unsure at all n locations; Clone ID: LIB3189-003-P1-K1-B10
atctttagatnnttccttctataataaatagaagatagtaaataaaacctgaggtaatagaagggtactttttggaggaagatctattggcttcacctacaataattggatctgctggtttgtctgattttttcttatttttttattttaataattttttatatgtcttcttattatttattctaaatttttgatatttatttttatttctttaattttattttgttttttgtatttttttatttttattttttttttgtttttttttttatatttatttttttggtgttttttattcattttttttatttttttttttttttttttattctctaatttttttttttttacttttttttttatatttttattttttattt

SEQ ID NO: 40867 - DNA, 339 bp, Gossypium hirsutum
  Clone ID: LIB3189-003-P1-K1-B2
cacgattctatcacaaatctgcgtgagtttcctttcttttttatttgaatttctctgcttctgatttccattggtaaaactagcacattgcaagttgttgcttttttcttactcgcaaaaccgtactaaagaaatcgcctaagatttgagatagggctttgaaaagaaacccgctaatgtacaaccagaatcatactgtccacctctagaggatctggcaccattggttacattcagagctacaaattttctgttgagcccaagacgaactgtttcaccgtttccaccaatccttttgatgcagcattcaagctccccatgtctcaccaccatgaaacc

SEQ ID NO: 40868 - DNA, 298 bp, Gossypium hirsutum
  Clone ID: LIB3189-003-P1-K1-B3
aaaaaaaaagaagagcctgcaattgccggtgaatatttgtagacacctccaccgactcgtgacagcttccttttcatctcctcagatgagatcgaatcaggttcttatgattgcgaaataactgcagttggtcaatttttatcattgaacgtgccagttttgaagcctgagctacttttattatccgaaaattgttattattacctgtgattagtgatgattatttagctctaatgaaaatttggaagttcgttgttgttggaaaatttgtgttttttaccgatggctgtgagcttct

SEQ ID NO: 40869 - DNA, 188 bp, Gossypium hirsutum
  Clone ID: LIB3189-003-P1-K1-B4
cttcctgagaagcggttatatttgggttttggatatttggacctggatttggaaaagcacatgggttcatgggcagaattccgggaagatcccagaataattaaaacattcccttattaaattctccgtggcattgcttattggcactctcatagggttctttcaccgagaacttaaacccccaaaat

SEQ ID NO: 40870 - DNA, 255 bp, Gossypium hirsutum
  Clone ID: LIB3189-003-P1-K1-B6
gcagactacaagcgggatttgtagggtttttgttccattcctcttccgcatatccgtagcctttcaatatgacaaagagaaccaagaaggccggtattgttgggaaatatgggacccgttatggagctagtctgcgcaagcagattaaaaagatggaagtcagtcaactcagcaagtacctctgtgaattctgtggaaagtttgcgtggattagaaaagctgtcggtttttggtgttgcaaagactgtggataag

SEQ ID NO: 40871 - DNA, 389 bp, Gossypium hirsutum
  Clone ID: LIB3189-003-P1-K1-B7
aaaaaagtgaaaagggtgatggtgttgctcctgctacaaggtctccaatggctttaatggggtcatctagaaatgaaaaccaagaagtgaataccagcatgagaactgccgagaccatgctgcggttggtgcctatggctttaggggttgctgcacttgttgtcatgctcaaaaactcacagtccaatgactttggctccgtttcatactcagatcttggtgctttcaggtacttggtgcatgctaatggtatttgtgcaggctattcccttctttcagctattatagcagctgtgcctagtccttctactatgcctagagcttggactttttttctactcgatcagattctaacatacgttatcttgggagctgctgctgtttaaccg

SEQ ID NO: 40872 - DNA, 76 bp, Gossypium hirsutum
  Clone ID: LIB3189-003-P1-K1-B8
aaaaaacggtgccgtatttacgcttgttggtgaaagtgcgagatggcgctcggagctgagcacatgtcacagtccg

SEQ ID NO: 40873 - DNA, 299 bp, Gossypium hirsutum
  Clone ID: LIB3189-003-P1-K1-C1
ggcaaccaaaacgatgatgttgcaaatattttcacttttcttctttttgttcagtatctgcaacgccattttccttggtgctaatggagatgacaatggtggttggcaaactgcccatgccaccttctacggtggtgctgatgctaccggcacattggggggagcttgtggttatggaaacctgtacagtcaatggtatggaacgagcacagcatctttgagcactgcacttttcaacaatggcttgagctgcggtgcctgcttctagctccgttgctacaattatccttaatggtgca

SEQ ID NO: 40874 - DNA, 384 bp, Gossypium hirsutum
  Clone ID: LIB3189-003-P1-K1-C11
cccacgcgtccgctaaaatctcccaatttcccaattctttatctgtagggttccgttcttagcttcaaatttgcaaatttagatctcaatcactcaaatcactgaaaaaacaacccagcaaaatgtacggattcgaagctatgacgttcaacatccacggcggttacctagaagcgatcgtgagaggtcaccgggccggtctcttaaccgccgccgattacaacaatctctgccaatgcgagacccttgacgatatcaagatgcacctctccgccaccgaatacggtccttacctccaaaatgaaccttcaccattgcatacgactactattgtggagaaatgcactcttaaactcgttgatgagtataagcatatgctatgcc

SEQ ID NO: 40875 - DNA, 191 bp, Gossypium hirsutum
  Clone ID: LIB3189-003-P1-K1-C12
cccacgcgtccgcttactatagccccacattttcttcctatagcctcacttctcctgggggcaggctaacctcaccaagttgcagtcccacatcaccaagctatagccctacctcttcatagtacaaccctctgtcagccatggtctgtcctgtctttggcatacacaccaagtagtccatagggtggctt

SEQ ID NO: 40876 - DNA, 331 bp, Gossypium hirsutum
  Clone ID: LIB3189-003-P1-K1-C2
gaagccgccgaagagagagtcgagaaagggaaacagagagcaagagaaaatgaagaccatactgtgatcagagaccatggatatccccgatggggtcaatatcaaagtgaaggctaaaatgatcgaggttgaaggtcccaggggtaagctcactcgtaacttcaagcacctcaacctcgatttccaccttaccaaggacgaggagaccggcaagcgtaagctcaggatcgaggcctggttcggtaccagtaagaccagcgctgtcatccgtaccgtccttaaccacatcgagaatcttatcaccggtgtcaaccaaagggtaccgggacaa

SEQ ID NO: 40877 - DNA, 315 bp, Gossypium hirsutum
  Clone ID: LIB3189-003-P1-K1-C3
gcaccagcaggcattatacccccgagcaatttgctgatgttcttattcaacaatacactgagcagcttcaggctttgtataactatggggcaaggaagtttgcgttgattggagtgggtcagatcggttgcagtcccaatgaattggctcaatacagtggagatggttaaacatgtgtggagagattcaatgctgcaaaccggatcttcaatgtcaagcttaaagggctcgttgatcaattcaacatcgactattccgatgccaaattcatctacatcaatgcttatggaatttccaagatcattacaagcaacc

SEQ ID NO: 40878 - DNA, 248 bp, Gossypium hirsutum
  Clone ID: LIB3189-003-P1-K1-C6
cccaaatcaaaattccaacccatctctacattgccgaacccgaccatctgctgcatcgccgtcgacttgaccatctgctatgttgccgtcgcacttctctgccgcaaccaatcggtacgcaagacacagcgagattaacccaaaaccctcactcagctctttttgccatcttcttctcagttttcattcgccttttttggtggaatatcttattggttcgaggggttgttgttcagtttcaaggtttc

SEQ ID NO: 40879 - DNA, 145 bp, Gossypium hirsutum
  unsure (1)..(145): unsure at all n locations; Clone ID: LIB3189-003-P1-K1-C7
aaaaggaaaaatgccgatcgctcaggtgtttatttcctatggcttncggtacagctctaagaaaatagcccaatgtcacatacaatcggtatcatcagttgataccattattgcatcatattttttatcacgtatactcgtgaac

SEQ ID NO: 40880 - DNA, 290 bp, Gossypium hirsutum
  Clone ID: LIB3189-003-P1-K1-C8
ctttcttacaggaaatggtgtgtcctgagttttctcatcctcaatcttcttctcccatggcgaaacctcggaaccggtcgttttggtgtcttcccgatgcctttcttgtctttggtgttgcatttttagctcttttattagtagcgtcattttggtcttttttcactccaacaccaaactttgaacccactgtaaccgacccaccctccaagttgagcatgaatccagtcgattgctcggaaagtgggttcggagttaacttaaaatccgatcccaaagaccccaccttt

SEQ ID NO: 40881 - DNA, 184 bp, Gossypium hirsutum
  Clone ID: LIB3189-003-P1-K1-C9
gcggtaagtttctggatttcatacctcggtttgtttaccctccgcaaaaggagtcgctgagggaggggcatcggaaccgatcacgcagagctcatatatattgaacactggtcggtgtttgtgtattttcagtcccgatatcaaaactgtgacttggtgtatgagtacacatcactgctgatca

SEQ ID NO: 40882 - DNA, 395 bp, Gossypium hirsutum
  Clone ID: LIB3189-003-P1-K1-D1
gtttgctctgtatatagaaattttctttctcgattttctctttagccaaaaaagatgcagatcttcgtcaagactctaaccggcaagacgatcactctcgaggtcgagagctccgacacgatcgacaacgtgaagaccaaaatccaagataaggaaggcatccctccagaccagcagcgtctgatcttcgccggaaaacagcttgaggacggccggaccttggccgattacaacatccaaaaggagtcaactctccacctcgtcctccgtttgcgcggtgggatgcaaatcttcgtgaaaaccttgaccggcaagacaatcactctcgaggtcgagagcttcgacacgatcgacaacgttaaggcgataatccaagacaaggaaggcattccccc

SEQ ID NO: 40883 - DNA, 350 bp, Gossypium hirsutum
  Clone ID: LIB3189-003-P1-K1-D11
cccacgcgtccgcggacgcgtgggatttttaaaaaatcagatctgcagaaatggcaacttttggatttctcaccattgcttttttcttagtttttgaactcaccttcgccacagattcgccggcgcctgctccctcgctcggtgcagacacatcaccgctacttgctcctactccggttacgggatctccggactcggcaccgttaatctcaccggtgatgcctgctttgcctccggcgccaatcgcgccgtccccatcagatctggcagaaggagagtcatcgccttcaagatctcctgctccttcaccgggcgatgcgagtgatatcatccacagcatcatctatgct

SEQ ID NO: 40884 - DNA, 444 bp, Gossypium hirsutum
  Clone ID: LIB3189-003-P1-K1-D12
cggacgcgtgggagcagctcactttctccttcatcaaaccccaaaaacctagctttgcctcctttataatttcttggattttggtgaactttacgaatccaagatcagagtataaaggattcgagttttaacccagaattaagtacttctgttctttttgatctttgggttgaaattgtctacacaaagagggtgatttagaaatggatgctgatccatggactctttgtctttcttcaactgctaggagatatcaatcagctcttcagtcacgatctgatatgtttatggggtttgaagaaatggatggagaagacgatataagagaggagtttccatgccctttttgttcagagtatttcgatatcgtgggcttgtgctgtcacattgatgatgaacattctgtggaggcttacaatggggtttggcctgtctgcgcaatga

SEQ ID NO: 40885 - DNA, 244 bp, Gossypium hirsutum
  Clone ID: LIB3189-003-P1-K1-D2
cggacgcgtggtcggacgcgtgggcggacgcgtgggggcggctgacggcaacgttagggagtccggagacgtccgcgggggcctcgggaagagttatcttttctgtttaacggcctgcccaccctggaaacggctcagtcggaagtagggctcagcggtcggaagagcaccgtacgtcgcgtggtgtccgttgcgcccccagcgtgtcttgattatccagttgaccgagatccgttcgtgcccg

SEQ ID NO: 40886 - DNA, 330 bp, Gossypium hirsutum
  Clone ID: LIB3189-003-P1-K1-D3
gaaaaaaagaaaagggagggggaggatgtctctctgggcaatccattttcgacgttcggaccaccatgcatgcgtcaccagtgacagacaggcacagctttctgaggtgcaaaaaatggcccattttaatactttctctttccccacctcatatatgagtctcaaacactcgaaaaatcccacgaccgttgaaagaaatcgagaaaaccattcagtttccttttttccgatcgcccaataaggcaaaaataataggtatctttatataactatactttgtttgtatattatatccggtgtatagacgtgaaaatcagtggaaatggtccg

SEQ ID NO: 40887 - DNA, 486 bp, Gossypium hirsutum
  Clone ID: LIB3189-003-P1-K1-D4
cagagatgatgaagaacacaattaaggagtgcgaacagccagcgattgaaggagaggaaaaatattgtgcaacctcactggagtcaatgattgactatagcatttccaaactagggaaagttgatcaggcagtctcaacagaagtggaaaaacaaaccccaatgcaaaagtatacaatagcagctggagtgcagaagatgacagatgacaaagctgtagtgtgccacaagcagaattatgcatatgctgtcttctattgccataaatcagaaacaacaagggcttacatggttcctttagagggtgctgacggaacaaaagccaaagcagtagcagtctgccacacagatacatcagcatggaaccctaagcatttggcttttcaagtcctaaatagtgaaccaggaaccattcctgtctgccatttccttcctcgggatcacattgtttgggtccctaagtaaaaatcctgaagagtagattcat

SEQ ID NO: 40888 - DNA, 189 bp, Gossypium hirsutum
  Clone ID: LIB3189-003-P1-K1-D5
ttatcttcaacaactattctttaatagcagccgggaatcactctcatctactgtttgacaaagatatgaaccctacattcgcactgaatttaatagaatcattcattcattttagtaacacaaatttttctgtagaaccccatatatgggctagtgacataaagttaatgccttgtttgattttcttgc

SEQ ID NO: 40889 - DNA, 395 bp, Gossypium hirsutum
  Clone ID: LIB3189-003-P1-K1-D6
ctctcaatactgtttcactaaaaaatgccaatcaaaaaagatccttcgattccaccgccgatgatcagcaagatcggcccttacaccgtcttcgttaccccttcgtcaaccccttctccaactgaccctcctgtttttcactctcccaagaaggcggcgccgccttctccttctccttatccttctgctccgccgcctgtccagccacctccccaacagttcgacaagtctttccttacttcccaatccctttccgatggttcatttttgggtttcttcaaaaacgctgccttcaaactccaaaacgctcattcaagcttggatgaccatttagctcgttggttaggcttaaatcagtccaagtatcaatgggcattggacgattattatgagag

SEQ ID NO: 40890 - DNA, 353 bp, Gossypium hirsutum
  Clone ID: LIB3189-003-P1-K1-D7
cccacgcgtccggacggagcgtaaatgtatcgaacggtggtgaatcgcatccttctaaccaaaaacaccggcggaggccgtcgctgcctcctccgattccctgatcttcgaactgccgttacctcttctcgtttctccactacaacggaacctcaaacgttccctaatcgtccccttaatccagctgattcttccacgtgatcttcgtcgacgagtttccaaacatcatctggggctggcgatatttcgcgtcaggagagaaagaatccggcaggtgagtaccagggggagcaagctcgggttctttaagcctcactacgacacgtggtaagattgggatggagtgaaaaagc

SEQ ID NO: 40891 - DNA, 172 bp, Gossypium hirsutum
  Clone ID: LIB3189-003-P1-K1-D8
cttagaaggtgtcttaataaacgccttctttcttcttcttcttattccttgattgctcggtagcagtctctcttaatcgaaaatgagagagtgcattctgatccacatcggtcaagccggtatacaggtcggaaacgcttgctgggagcttttctgtcttagcgcttggaat

SEQ ID NO: 40892 - DNA, 220 bp, Gossypium hirsutum
  Clone ID: LIB3189-003-P1-K1-D9
gggagagagaattttcttgcattttctcttcttttcccttttttttgtaattttctctgaaaattgctcattttattcaattaaatggacggccgtttgatcgactgatcttcgtgtgtcgtgatttaaaggttgcaagagaagaggctatttgtctagcatcttccaacttttagacaagtggaagttcaaaggctttgggacaatgagctttgttttt

SEQ ID NO: 40893 - DNA, 399 bp, Gossypium hirsutum
  Clone ID: LIB3189-003-P1-K1-E1
cggacgcgtgggttcttcattctcactctctctccactgaactcttgctaaacggtatcgttttagtcagtctttcatcaatggcgaaagaaccggttcgcgtcctcgttactggagctgcaggacaaatcgggtatgctcttgtacccatgattgctaggggagtcatgttgggtgctgaccagcccgtgatccttcacatgcttgatatcccacctgctgcggaggctttgaatggtgtcaaaatggagttggtggatgctgcttttcctcttctaaagggtgttgttgctacaactgatgttgttgaggcatgcactggagtcaatgttgctgtcatggttggtggtttcccaaggaaggaaggaatggagaggaaagatgttttgtcaaagaatg

SEQ ID NO: 40894 - DNA, 217 bp, Gossypium hirsutum
  Clone ID: LIB3189-003-P1-K1-E10
tattggtccgccaaccgaattcaactatgattgccagcatcttggtactggcccacaaacactgacagaaattgctgagggtcgtcattctttttgctcggccatctcaaatgccaaaaacccagccatcattgttggtgctggcctgtttgagagggacgacaaagatgcaatttttgctgctgttgaagccattgcgaagaatggaaatgtcatc

SEQ ID NO: 40895 - DNA, 459 bp, Gossypium hirsutum
  Clone ID: LIB3189-003-P1-K1-E12
caaaatccaatccattctgacgatagcagtttccgaggataagactttactttctatcttcttttgaaatcatttccctcaaacgctccatcagtctggatttattggccatcttctcttcgaagcgaaaatatggcgattcaactcttctcccatcaagtaaaaggtttctcctctatcaagagcgtcttttgctagtctatgtgcttgcaagttccctgatgtgtgaatatgctgaaagataatatctcgaaaacaaggtttcttattctgaatgtctctgataatagctccaatcactaatttatttgttaaagtcatttggcatttttattatttttgagtccctcataagtgagatccctaactttgtgccttctaaatatgcatacgcttctgctgcaaatggggaggaaatattgttgtgaatgatcatctttaaaaccaagtgttcccccc

SEQ ID NO: 40896 - DNA, 243 bp, Gossypium hirsutum
  unsure (1)..(243): unsure at all n locations; Clone ID: LIB3189-003-P1-K1-E2
acnacaacagccgnngcngcnggnccgaggccaagaggaaggccaaaaggcacngacanggcggcagcaggcccagcggacccgggaaaggagagagagcccaccacccaagagaaggggaggcggagagaagcccaacaaacccaaaaaagcaaccgaaaagccngaaggccaccccaagaagacaacagaagggagcagcaggcaaaggagaacaaaagagaaaaccagaagagaagcaaa

SEQ ID NO: 40897 - DNA, 188 bp, Gossypium hirsutum
  Clone ID: LIB3189-003-P1-K1-E3
cccacgcgtccgccacgcgtccgaaaagtttccattgaaaaattgatttgatttttgagtgaaatcgtttttgcgatattggtttataagatcaatggcggtattattggattttacatttcttattttatcatttttttttttttttatatttatttatattttgtttttttattttttattttttt

SEQ ID NO: 40898 - DNA, 175 bp, Gossypium hirsutum
  Clone ID: LIB3189-003-P1-K1-E4
aacaatacgcatatatacactcacacatacatatcaaatagagagggatatcgcgagctgtgccgccggtataattgtcttagattctggtgaacatttacgaatcctagatcagagtatataggattcgagttttaactcacaaattagtacttctgtttctttttgatctttg

SEQ ID NO: 40899 - DNA, 455 bp, Gossypium hirsutum
  Clone ID: LIB3189-003-P1-K1-E5
gaaaccagtgcttcaatgccagcttcttcttcaaggtcttcttcagctgggagaagctcaaagagatgggtttttttgaaagattttttaaggagcaaaagtgaaggaagaagcaacaatcataagttctggtcaaccatttcattctctccggcaaaagagaagaaacctgggagaaaagagaagctaagcaataatgtgtcaaatgggggatcagagaatcaatgaagcaacaagaacaataataataagcctatgaacgggatatctaagaggagggttccaccatctccacatgatttgcattacactgcaaatagagcactagcttaataatattagtgagaagactttttttccttcaagcagacttgcttggttgcttggtagtttatttaaatgtatttgttcctttatgttttttgtttacttttttccattattttatttatatt

SEQ ID NO: 40900 - DNA, 456 bp, Gossypium hirsutum
  Clone ID: LIB3189-003-P1-K1-E6
gctcgtttgattctgatttccagtacgtatacgaaccgtgaaagcgtggcctatctatcctttagaccttttgtaatgatgcttgaggtgtctgaattgtttccattgggttttctggtttgtttttttctatctttattgattcttttttttatttgattttttttttgttcattattggatatttttttattcatagttttttttttttttattgaatatttttattttttgtttattctctttttgttatatttatttttttatttattttttattttttattcttttttttgcttttatttgttattttttatttttattgttttatttattggtttaatttattcggttttgtttaattcattttttttttatttttttttttattttttaattattttttttttttttttttgtttttttgtttattgatttattttttaattttttttt

SEQ ID NO: 40901 - DNA, 463 bp, Gossypium hirsutum
  Clone ID: LIB3189-003-P1-K1-E7
gcgaaaatctcgaagcttccttttccgttttagatctcaaaattcaaaaagctctctttttcatctcatggctgctactatcgtctccgtcaaagctaggcagatcttcgacagccgtggaaatccaacggttgaggttgatgtggaaacatcgaacggtataaaggctagggccgcagttcctagcggtgcatccactggaatttacgaggctcttgagttgagagatggaggctccgattacctcggtaaaggtgtatcgaaggctgttgctaatgttaacacaatcatcggtcctgcattgattggaaaggacccaaccgagcatactgcaattgacaatttcatggctcaacaactggttggaacccataatgagttgggttggtgcaaacaaaatcttgtgtcaaatgccaatcttgccgattcccttctgtttttaatgttgaactgaagttcatta

SEQ ID NO: 40902 - DNA, 233 bp, Gossypium hirsutum
  Clone ID: LIB3189-003-P1-K1-E8
ggtgagaagaaacgcggctgacgagatctttgcagaataatggcgtcgctgcgtcttttagttttcctgttactttgtcttccttttattttcagtgcttacaggccaggggacatatttgcgatgtgcaagatgggtcaattccattcctttagaactgttgggcatgacgtgatcgcgaaacattggcccaatttttgccgttaatcgggaggtgtaatttgctatagcaa

SEQ ID NO: 40903 - DNA, 193 bp, Gossypium hirsutum
  Clone ID: LIB3189-003-P1-K1-E9
cccacgcgtccgttcttttccaataacctgcatttgtttaggttagatctgcgagagaaaaaaagagagcgagaaatggggagaatgcgacagtatttggcaatgaaaacggatcctgttgctcaagaattgatcatgttcgttatcaaagatctcaagctggctgcgtataaattgatggatgatgcatctt

SEQ ID NO: 40904 - DNA, 252 bp, Gossypium hirsutum
  Clone ID: LIB3189-003-P1-K1-F1
attttctaattatatatagtttccttcgctttgaaatgctaaaggtttgagagagttatgttctttttctcttcctctttcttttttaactttatcaaacaatttttgaataaaaatgtgagtatattgtaacaaaaaatataaattataataccttataaaataataaatttaaaaaataaatattttatcaataaattttaaataattatattttattattatatttatttttatcttcttttctaattt

SEQ ID NO: 40905 - DNA, 462 bp, Gossypium hirsutum
  Clone ID: LIB3189-003-P1-K1-F10
gaaaaaaatggttggtgtgtttaggttagtgagggggtatccgggaccaagtggctttggttcagcctccaccgcccaagaggttaccgaagggattgatggaaccaacttgactgctctagttaccggaggagcaagtggaattgggttggaaacttctagagtattggctcttcgtggagtccacgtcatcatcggtgcaaggaacatgaaagccgcgaatgaagcaaagaacaaaattgttagagagaacacatgagcccgtatagatgttctggagctggatctttgctctactagttcaatcagatcatttgccgacaatttcattgctcttcatcttcctcttaatatcttaataaacaatgctggcatcatgttttgttcctttcagctttcttaagatggaatagaggtgcaggttggcacctatcattatagacattttccttttaacaaact

SEQ ID NO: 40906 - DNA, 293 bp, Gossypium hirsutum
  Clone ID: LIB3189-003-P1-K1-F11
ctctatttaaaaaaaaagagcaatttttttgaggtggtagtatacaaaaacaaaatgaagatctgttgcattggagctggttatgttggtgggcctacaatggctgtgatcgcgcttaaatgtccggatattgaagtggctgtcgttgatatctctgtacctaggatcgctgcctggaacagtgaccagctccctatctatgagcctggtcttgatggtgttgtgaaggagtgtcttggcagaaaccttttcttcagcactgatgtatataaacatgtgcgttaggctgattt

SEQ ID NO: 40907 - DNA, 248 bp, Gossypium hirsutum
  Clone ID: LIB3189-003-P1-K1-F12
gtttgacaataaatatttcataacttcttctaaatcgttgcactctctttagatctgaagcttggggccttccttttctcatctcctggcattcccttgtctgggacgcgcaaccaatcaaatcttctttgatctttggcatacttaagacctacatttgtaggtaaaccttttcttaccttcttaagggtattttatacaagaatatgtcggatatgtttgagtgcattcattggggttagtacaaa

SEQ ID NO: 40908 - DNA, 406 bp, Gossypium hirsutum
  Clone ID: LIB3189-003-P1-K1-F2
cccacgcgtccgcttcatggacatttggggtgaagtggtcaccaagtgggaatactttggcttatgtaggtcataattctatgatttacttcgttgatgatattggtccttcccctttggcccagaatgttgcattccgtaatttgcctcttcgtgatgtccaatttttttcagagaaaatggtcataggcgtgggatttgactgcaacccaatgatttttgcagcagataaatcaggattatggagctttatcagattcttaggtgaaaggaaagaattcttgtcaggtccaaaatctggttctcagttttctgaagcatttggcaaattatatggtcaagcaaagcatggattgagcaatgattcggttgaaccttcaaaaatacagggagctggtcatgacaa

SEQ ID NO: 40909 - DNA, 428 bp, Gossypium hirsutum
  Clone ID: LIB3189-003-P1-K1-F4
cgaccgctaaaacgtttcctggtcttaatccaaattccgatcggaagatcaagttagggctttcagtcgattttcaatggaaagaatcagaagagcttcgcatgcaggatcttggtacactgataacccaaaaaaactggcggaagagcttgatggatggatcacggcggctggcttgcctaaatcctctgatgtaagaggtgtaattgctccgcatgcaggttattcatattcaggtcgtgctgcggcctatgctttcggaaatatagacccaacaaacatttctcgggtattccttcttggtccatctcaccattattacactccaaaatgtgctctgtcaactgctacagtatacaagacaccaataggggacctacctattgttttggaagtcatcgaagagctgaaagcttcaggaaaatttg

SEQ ID NO: 40910 - DNA, 377 bp, Gossypium hirsutum
  Clone ID: LIB3189-003-P1-K1-F5
gttgccaaccctatttttcccttgttttgtacagaaacaagcgaattttcttttttgttttaaaaaatttgaaaagtaaaaccgtagaagagattgatcaatccaattctgtggctctctttctctctctcttcagagagttcttctttgaatgtctccgatctcttattttctatcagttgaatgcataaataaataaaaatcttcagaagttttctcaaatttcagatctaaatcatagaagtactttttcatttccccgtaacttatccgaagagagattaagagaaaagaggttggtaaatcgagaaaaaaaatgatcacaattccgtatttgaccgctttaaccacgtatttcagctatggccttctcttcg

SEQ ID NO: 40911 - DNA, 437 bp, Gossypium hirsutum
  Clone ID: LIB3189-003-P1-K1-F6
ctatcctgattctcataagttgcaggcatacccgttgaatgcttttgggggccaagtttaccactttcctgtggataaccgatttcattatgccccatttaatgtgatcactcatggatacccgtacgaattccagttccaagattttcagtactttgtggtcatagattttgaggctacctgtgacaaggagagaaacccacatccacaggagattatcgagtttccatctgttattgtgagtagtgttactgggcagctggaagcttgttttcagacatacgtccgaccaacttgcaatcaactcctgagtgatttctgcaaggatctgactggcatccaacaaattcaggttgatagaggtgttactttgagtgaagctcttatttagcatgataaatggcttcggaaagatggcattaagaacactaactttg

SEQ ID NO: 40912 - DNA, 429 bp, Gossypium hirsutum
  Clone ID: LIB3189-003-P1-K1-F8
gaacaaacgatgctcctgccctgcatgaagcagatattggactagcaatgggcatttctggaaccgaggtggccaaggagagtgccgatgtcataattctagatgacaatttctcaacaattgtgacagtagccaaatggggtcgttcggtatacataaacattcaaaaatttgtacagtttcaactgacagtcaacattgtcgcattgatcgttaacttctcctcagcatgtttgacagggactgctcctcttaccgccgttcagctattgtgggtcaatatgattatggatacactgggagcacttgcgcttgcaactgagcctccaactgatgaactaatgaagcgtgcaccggttggaaagaaaggaaactttatcagtaatgtgatgtggaggaatatattttgacaatccttttatcagttta

SEQ ID NO: 40913 - DNA, 135 bp, Gossypium hirsutum
  Clone ID: LIB3189-003-P1-K1-F9
gaacaaactatgctcctgccctgcatgaagcagatattggactagcaatgggcatttgtggaacggaggtggccaatgagagtgcctatgtcataattctagatgacattttctcaacaattgtaacagttgcca

SEQ ID NO: 40914 - DNA, 257 bp, Gossypium hirsutum
  Clone ID: LIB3189-003-P1-K1-G1
aacagagatgtcatcgacgaagcgaacatcgataagtatttcccggacagattgttcagaactgtcagtgatttaagtttatctatgttagagaccgaagacactagccggttagaactacaacatgtccagctctttgaacacatattaccgatctatttaatgagttaatgcttttcttgctttaatcaagaataggacttgcttgtatgttatagcttgactcacatttttagggtaagtttttagtgatttat

SEQ ID NO: 40915 - DNA, 335 bp, Gossypium hirsutum
  Clone ID: LIB3189-003-P1-K1-G10
aaacgccttcgatttaccttcgatttccatttacttctctattgctacgtttttgaatttttagtgagcgaaaatgagagagtgcatttcagtccacatcggtcaggctggtattcaagtcggaaatgcctgctgggaactttactgccttgaacatggaatccagcctgatggccagatgccaagtgacatgactgtctgaggaggtgatgatgcttttaacacctttttcagtgaaactggtgctggatagcacgtcctttgagctgtttgtgtggatcttgtgccttctatatttgtataattgatgtctgtgtacttatcgtcttcttttt

SEQ ID NO: 40916 - DNA, 491 bp, Gossypium hirsutum
  Clone ID: LIB3189-003-P1-K1-G11
cggacgcgtgggaaaatttttaatttttttctgggaatgtgcagttcaagataagatagctttacacgtttcccaattcagcaatccatttctgcaaccaaaaacacaaaacactccatcaatttataaactcgaagcaatttgaagaaatcccatcactcatttcacctccaatccttttaaaaacagggcattcaatatgcaggagaccaataattctcgagtcaaccaacgaattgcaacaatctcggctcatctcaacccacccagtttttcccacatggagggtagttcgggtttgggtcgagctgactgccgagccgaaggtgggtcaactggtttcaaggtggcgattttgggagcggcaggtgggatagggcaaccgctatcattgttgatgaagatgaaccccttgggttctggtcttcatctttatgatgggggtaacactcctggggtactgctgatttagccacatggatactggagct

SEQ ID NO: 40917 - DNA, 243 bp, Gossypium hirsutum
  Clone ID: LIB3189-003-P1-K1-G12
ttttgtttcactttctttagttctgaagctttgtttcttggctttcctcatcttgtggcatatccttgtcaggggcgcgcaacccatcatatcttcttttatctttggcatactcaagacccccacgcctaggggaaccccctctttccccctaagggcctctattgctagaatatgtctgcaacaatttgccgatctctggatagggaccaaaactggcgtaagctgaacacaaaaattggg

SEQ ID NO: 40918 - DNA, 127 bp, Gossypium hirsutum
  Clone ID: LIB3189-003-P1-K1-G2
atccctatattaatctcttttgtctatatttaatttctatatattttcctattaatttcgttaaatttattaagttaatttctttttatccatttttttcatttctatttttataattttattattt
